United States Patent Application Publication US 2024/0327476 A1 - sequence listing, part 73

SEQ ID NO: 137522 - DNA, 12669 bp, synthetic construct
  misc_feature 1..12669: note = Description of Artificial Sequence: Synthetic coding sequence
  source 1..12669: mol_type = other DNA
atgatgccagcacagtacgctttaacctcctctctggttctgctcgtcctattgagcacggctagggctggccctttttctagcaggtctaacgtgacactaccagcccctaggccccccccccaaccaggtggccatacagtcggagccggagtgggctctccgtccagccaattatatgagcacaccgtggaaggaggcgaaaaacaagttgtcttcacacatcgcatcaacctcccaccctccaccggatgtggctgcccacctgggacggaacccccagtgctggcttcggaggttcaggcactgcgggtccgactcgagatcctggaggaactggtgaaggggttgaaagagcaatgtacggggggctgctgtccagcaagtgcacaggctggaacagggcagaccgacgttaggaccctgtgctccctacacggagtattcgatcttagcagatgcacttgtagctgtgagccaggctggggagggcctacatgtagcgaccctacagatgccgaaataccaccttcatcacctccaagtgcaagtggaagctgccccgatgactgcaacgatcagggacgctgcgtgcgcggacgctgcgtctgctttccaggctacaccggccctagctgcggatggcctagctgtcccggtgactgtcagggtagggggagatgtgtacagggagtgtgtgtgtgtcgtgccggcttctccgggccagattgtagccaacggagctgccccagggggtgctcccagcgaggtcggtgtgaaggcggcaggtgcgtgtgcgatcctgggtacacaggagacgattgcggtatgcgctcctgtccgaggggatgctctcaacggggccgatgcgaaaatggtcgctgcgtgtgtaatccagggtatgcaggcgaggattgcggtgtcagaagctgcccccgcggctgctctcagcgaggccgctgtaaagacgggcggtgcgtgtgtgaccccggctacaccggcgaggattgtggaactcgttcatgcccctgggactgtggagaagggggccgctgtgtggatggtcggtgcgtttgttggcccggctacaccggggaggactgttctacccgtacctgtccaagggattgtagagggcgcggcagatgtgaggacggcgaatgcatttgcgataccggctattccggcgacgattgtggggtacggtcgtgcccgggcgactgtaatcagagaggtcgttgcgaggacggacgatgtgtctgctggcccgggtatactggcacggattgtggcagccgagcatgtcctagagactgtcgtgggagggggaggtgtgaaaatggggtttgcgtttgtaacgctgggtattccggcgaagattgtggagtgagatcttgccccggtgattgcagaggccgggggaggtgcgagtctggacgatgcatgtgctggcctggatacactgggcgggactgtggtacccgggcctgcccaggtgattgtcgggggcggggccgctgcgtggatgggcggtgcgtgtgcaaccccggcttcaccggagaggactgcggctcccgaagatgccctggtgactgccgaggccacggtctgtgcgaagatggtgtctgcgtgtgtgacgcaggctactccggcgaggactgctcaacacgttcctgccctgggggatgcaggggacgaggacagtgtctcgacgggcgatgtgtctgcgaagacggctacagcggcgaagactgcggcgtccgtcaatgccctaacgattgcagccagcacggagtttgccaggatggagtgtgcatttgttgggagggatatgtgtctgaggactgtagcatcaggacctgcccctccaactgccatggtagggggaggtgcgaggaggggagatgcctgtgtgacccaggctacacaggacctacatgcgcaacaagaatgtgcccagctgattgcagaggcaggggcaggtgtgtccagggtgtctgcctctgccatgtgggctacggtggggaggactgtggccaggaagaaccgcccgcctccgcttgccccggtggctgcggtccgagagaactgtgccgcgcgggacaatgcgtgtgtgtggaaggcttccgcgggccagattgcgccattcagacctgtcctggcgattgccgcggcagaggagagtgccacgacggctcatgtgtatgtaaagatggttatgccggagaagattgcggcgaggaggtccccactatcgaaggcatgcgcatgcacctgctcgaggagaccactgtgagaaccgagtggacaccggctccagggccagtggatgcttatgaaatccagtttatacctacgacagaaggggcctcccccccatttacagccagggtaccgagtagtgccagcgcgtacgatcagcgcggacttgccccggggcaggaataccaggttaccgtgagagcgctgagggggactagctggggcctccccgccagcaagaccatcaccacaatgatagatggcccccaagatttgcgggtggtggctgttaccccaaccacccttgaactgggatggcttagacctcaggcagaggtagatcgctttgttgtgtcctatgtgagtgccggaaaccagagagtgcgactagaagttcctcctgaggcagatggaacactgctcacagaccttatgcctggagttgagtacgtggtgaccgtcactgccgagagaggtcgggccgtcagctatccagctagcgtccgcgctaacacaggaagctccccactcggactacttgggaccaccgatgagccccctcccagcggaccgagtactacccagggagcccaggctcctctgttacagcagcgtccacaagaactcggagaacttcgtgtgcttggaagggacgaaaccggtcgccttcgcgtggtatggacagcacaaccagataccttcgcctacttccagttgagaatgagggtgccagagggaccgggggcccacgaagaagtcctgccaggtgacgttcgccaggcattggtgcctccccccccaccaggcaccccctacgaattgtctctgcacggagtccctccgggaggaaaacctagcgaccccatcatctaccaggggatcatggataaggatgaggagaaacctgggaagtcctctggaccaccacgcctgggtgagttgacagttaccgatcgtacatccgactctctcctattgcgttggactgtgcccgaaggtgagttcgacagctttgtcattcagtacaaggacagggacggccaaccacaagtagtccccgtcgagggcccgcagcgtagtgcagtcattacatcactcgatcccggacggaagtacaagttcgtgctgtacggattcgtaggcaaaaaacggcacggtccactagtggcagaggccaaaattctcccccagagcgacccatcccccggcacccctccacacctgggaaatctgtgggtgactgaccctaccccggattccctgcacttgtcatggactgtgccagagggtcagtttgataccttcatggttcaataccgcgacagagacggccgtcctcaagtcgtgcctgtcgagggtccggagcgctctttcgtcgtttcctcacttgatcctgaccacaagtataggttcaccctgttcggcatcgccaataaaaaaaggtacggaccgctgaccgccgatggcacaaccgcccccgaacgaaaagaagagcctcctcgtcccgaattcttggaacagcccctgctgggcgaattaacggtaacaggggtgaccccagactccctgagactcagctggacagtagcgcagggcccgttcgactccttcatggtccagtataaagacgcccagggacaaccccaggctgtgccagtggcaggagacgagaacgaagtgacggtccctggtctggacccggatcgaaagtacaagatgaatctgtatggacttcgcggcagacagcgtgtggggcctgagtccgtggttgctaaaacagccccacaggaggacgtagacgagactccctcccccaccgagctagggacggaagctccagagagcccagaagagcccctcctgggagagctgaccgtgacggggtccagccccgactcattgagcttgttttggaccgtgcctcaagggtcttttgacagctttacagtgcagtacaaagaccgcgacggtcggccacgtgccgtgcgggttgggggtaaagagtcggaagttactgtggggggcctcgagccaggacacaaatacaagatgcacctctacggactccacgaaggtcagagagttggaccggtcagcgctgtgggcgtcactgctccacagcaggaagaaaccccacctgccaccgagtcacctctcgaacccagactgggggaacttaccgtcacagatgtcacccccaacagcgtggggctctcttggactgtcccagaggggcaatttgattccttcatcgtgcagtataaagataaagacggacagccccaggtggttccagtcgccgcagatcagcgtgaggttaccgtttataacctggaacctgaacgcaagtataaaatgaacatgtacggcctccacgatggacagcggatgggaccactctcagtcgtaatagtgactgccccgctgccgccagcccccgctacagaggcatccaaacctccactggaaccccggctaggtgagctgacggtcacagacatcactccagattcagtgggattgagttggacagttcccgagggagaatttgactctttcgtggttcaatataaggatcgggacggccaaccacaggtggtgcctgttgcggccgaccagagagaggtgacgattccagatctggagccgagccggaagtataaatttctcttgttcggaatccaggacggaaaaaggagatcaccggtgtccgtggaagcaaagaccgtagcacgtggcgacgcttctccaggcgcacctccacgcctcggcgaactatgggtcactgaccccaccccagactctctgcgattgtcctggaccgtccctgaggggcagtttgatagcttcgtcgtgcaattcaaggacaaagatggcccacaggtggtgccagtagaggggcacgagcggagcgtcaccgtgacccccctagatgctggtagaaagtatcggttcttgctatacggactgctgggaaagaagcgccacggcccactgactgcggacggaaccacagaagcaaggagcgcgatggacgatacagggactaaaagaccacccaagccccgactaggggaggaactgcaagtaacgactgtcacccagaatagcgtagggttgtcatggaccgtgcccgaggggcagttcgactcatttgtcgtgcagtataaggaccgcgatggtcagccccaagttgtccccgttgagggcagcctgcgtgaagtctctgtccctggcttagaccctgcccaccgctataagctgttgctctatggcttgcatcacggcaagagagtgggccctatcagcgccgttgccatcactgccggccgggaggaaactgagactgaaaccactgcacctacccctccggcaccagagccccacctgggtgagctcactgttgaggaggcaaccagtcacacccttcacttaagttggatggttacggaaggtgagtttgatagtttcgaaatccaatataccgaccgagacggacagctgcagatggtgcgaatcggcggcgatcgcaatgatatcacactttcaggtctcgagagcgaccacagatacctggtcacactttacggattcagcgacggtaagcacgtgggtcctgttcatgtggaggccttgacagttcctgaagaagaaaagccaagtgaaccaccaacggctactccggaacctccaatcaagccgcgactgggtgagctcacagtgaccgacgccacaccagattcattgtctctaagctggaccgtgcctgagggacagttcgaccatttcctggtgcagtaccgcaatggagatgggcagccaaaagctgtgcgcgtgccaggacacgaggagggagtcaccatttctggactggagcctgaccataagtacaaaatgaacctgtatggtttccacggggggcagcgcatggggcccgtgtccgtggtgggcgtgaccgccgccgaagaggaaactccctcccctaccgaacccagtatggaggcacccgaacccgctgaggaaccactgctgggggagctgactgtcaccgggtccagtcccgacagcctgagcttgagttggaccgtgccacagggacgcttcgactccttcacggtccagtataaagaccgggacggaagaccccaggtggtaagggtggggggcgaggaaagtgaggtgacagttggcggattagaaccagggcggaagtacaagatgcacctgtacgggttgcacgaggggcgccgcgtgggacctgtatcagccgtgggggttaccgcgccagaggaggaatcccctgacgcccctcttgccaagttgaggctcggacagatgaccgtgcgcgatatcacctcagactctttatccctcagctggacagtgccagaaggacagtttgaccactttctcgttcagttcaagaacggagatgggcaacccaaggccgttcgggtcccgggccacgaggacggagtgaccatatcgggtttggagcctgaccataagtacaagatgaatctgtatggatttcacggagggcagcgcgtgggtcctgtctctgccgtcggtctgaccgctcccgggaaagatgaagagatggctccagcatccaccgaaccacccacacccgagcccccaattaagccaaggttggaggagctgactgtgaccgacgcgacgcccgattcactttcactgtcctggaccgtgcctgaaggccaattcgatcatttccttgtgcagtataaaaacggcgacggacagccaaaagcgaccagagttcctggacatgaggatcgggtgactatctctgggctggagcccgacaataaatacaagatgaatttatatggcttccacggaggccagagagtcggcccagttagtgccataggtgtcacagccgctgaagaagagactccatcccccactgagccgtctatggaggcacctgagccccctgaagagcctcttctgggcgaacttaccgtcacggggtcaagccctgactcactttcattatcttggaccgtgccccagggcaggtttgacagtttcactgttcagtacaaagacagggacggcagaccccaggttgtgagagtcgggggggaagagagtgaggtcactgtcggggggctggagccgggccgcaaatacaaaatgcacctgtatggactccatgaggggagacgagtgggacccgtgtccacagtgggtgtgaccgcgccacaggaggacgtggacgagacacccagtccgacggagcccgggaccgaagccccagaaccgcccgaagaaccactgttgggcgagttaactgtcaccgggagttcgcccgactccttgtctttgtcttggacggtaccacagggtagattcgattcctttaccgtgcagtacaaggaccgggacggccggccgcaggccgtgcgggtgggaggccaggagtccaaggtgacggtgaggggccttgagccagggaggaaatataaaatgcacttatatgggctgcacgagggccgccgcctcgggcctgtcagtgctgtcggcgtaaccgaggacgaggcggagaccacacaggccgtaccaacaatgacacctgagcccccaataaagccaagacttggagaattaacaatgacagatgcaacgcccgactctcttagcctgtcctggacggtgcccgaaggccaattcgatcacttcctggtgcagtaccggaacggggacggtcagcctaaagccgtgagggttccaggacacgaggatggagttaccattagcgggctcgaaccagatcacaagtataagatgaatctgtatggctttcatgggggccagagggtgggtccgatctcagttatcggggtcaccgccgcagaggaggagaccccatcaccaacagagctgagcaccgaagcacctgaaccaccagaggagcctctgctgggagaactgaccgtcactggttctagccctgatagcttgtccctatcatggacgattcctcagggacatttcgacagcttcacggtgcagtataaagatcgggacgggcgcccccaggtgatgcgggtgcgcggcgaggagtccgaagtgactgtcgggggacttgaacccggacgcaagtacaaaatgcacttatacggcctgcatgaaggtagacgcgttggacctgtcagtaccgtgggcgtgactgtcccaaccactacccctgaacctcctaataagcccaggctgggagaactaactgtcaccgatgctactcccgacagcctttccctctcctggatggtgcccgaaggccagtttgatcattttctggttcagtataggaatggcgacggacagcccaaggtagtgagggtaccaggacacgaagatggagtgacaatatcaggtctggagcccgatcacaaatacaaaatgaacctctacgggtttcatgggggccagcgcgtgggccctatctccgtaatcggggtaactgcggccgaggaagagacgcctgctcctacggagcctagcaccgaggccccagagcctcctgaagaacccctgctgggcgagttaactgtcactggaagcagccccgacagtttgtccctgagctggacgataccccagggcagattcgattcatttactgttcaatataaagacagagatggcagaccccaggtggttcgagtgcgaggcgaggaaagcgaagtgactgtcggaggattggaacctggttgtaagtataaaatgcatctgtacggcctccatgagggccaacgggtggggcccgtgtcagcagtcggggtgaccgtacccaccatgactccagagccccccatcaagccgcgcctcggagagttaacagtcacggatgccaccccagattctctgtcattatcatggatggttcctgaagggcaatttgaccattttttggttcagtatagaaatggcgatgggcagcctaaagctgttagagtaccaggacatgaagatggcgtgaccataagtgggctggagcccgatcataagtataaaatgaatctgtatggcttccacggaggccaaagagtgggtcccgttagtgcaattggggtaactgaggaggagacaccaagtccaacggaaccctccacagaggccccggaggctccagaagagcccctccttggtgaactgacagttactggtagttcacctgattcactgagcctgtcctggacagttccccagggcaggttcgactcttttactgtgcaatacaaggatcgcgatgggcaaccacaggtagtgagggtgcgaggggaagagagtgaggtgaccgtgggcgggctggaacccggacggaaatacaaaatgcacctctacggcctgcatgagggccagcgtgttggtccagtgtcgaccgtgggaatcactgcacctctaccaactccgctccccgtggagcctagactcggcgagttggcagtggctgccgttaccagtgattccgttggactttcatggacagtagcccaggggccgttcgattcgtttctggtgcagtaccgggatgctcaagggcagcctcaggcagtgcctgtttcaggagacctgagggcggtagctgtgagcggtttagacccagctagaaagtacaagtttttactatttggtttgcagaacgggaagagacacggtcccgtccctgttgaagcccggacagccccagacacaaaacccagtcctagattgggggaactaaccgtgacggatgctactccagacagtgtcggattgtcttggacagtgccagagggagaatttgacagttttgtggtgcagtacaaagacaaagatgggagactgcaggtcgtccctgtagccgctaatcagagggaggtaactgttcaaggcctcgaaccctcgaggaaatatagattccttctgtacgggctttctggtagaaagcgtttggggcctatctctgcagattccaccacggctcccctggagaaggaactgcctcctcacctcggggagctcactgtggccgaggagactagctcatctctccggttaagctggactgtggcccaagggccctttgattccttcgtagtccaatacagggacaccgacgggcagccccgggctgtgcctgtggctgccgatcagaggactgtcactgtggaggatctggagcctggaaagaagtataagttcttattatacggtcttcttggaggcaaaaggttgggcccagtctcggctctgggcatgaccgccccggaggaggacactccagcccccgaacttgcgcccgaagcccctgaaccgccagaagaacctcggcttggcgtgctgacagtgacagacacaacacccgatagtatgagactgagctggagtgtggctcaagggccattcgacagttttgtagtgcaatatgaagacacaaacggacaaccccaggccctgctggtcgatggagatcagtcaaagattttaatttccggccttgagccttcaaccccctaccggttcctgctgtacggactccacgaaggaaaacgcttaggccccctttcagcagaaggaaccactggtctggcacccgccgggcaaacaagtgaggaatctagaccaaggctctctcagctgagcgtgacagacgtgaccacctcaagtttgagattgaattgggaggcccccccaggtgccttcgacagctttctgctgaggttcggcgtgccatctccttcgaccctcgagccgcatcccaggcccctgctgcagagagagctgatggtgcccggtacgcgtcacagtgcagtgttgcgggacctcaggtctggcactctttatagcctgacattatatggactgagaggacctcataaggcagattccatccagggaacagcccgaactctgagtcctgttctggaatctcctcgggaccttcagttctccgagattcgcgagacatctgcaaaagtgaattggatgcctccacccagtcgtgctgacagcttcaaagtgagctaccagctggctgatgggggcgaaccgcagtcagtgcaggttgacggccaggcgcgcacccagaaactgcaaggacttattccaggcgctagatacgaggtcactgtggtgtcagtcaggggattcgaggaaagtgaacccctgaccggcttcttaacaacagtgcccgatggccccactcaattgcgggctctgaacctaaccgagggttttgctgtgctgcactggaaacctcctcagaaccccgtcgacacttatgacgttcaagtaaccgcacctggggccccgcccttacaagccgagacacctgggtctgctgtcgactaccctctccatgatctggtcctgcacacgaactataccgctactgttcgtgggctccggggacctaacctgacaagccccgcatccatcacgtttactaccggcctcgaagctccacgtgacctggaggctaaggaggttacccctaggaccgccctgctgacctggaccgaaccacctgtgagaccagccgggtatctcttaagtttccacacacccggcggccagaaccaggagattctcttacccggcggcattacatcccaccagctattgggtctgttcccatccacgtcttataatgcacgcctgcaggctatgtggggtcagtcgctgcttcctcccgtatcaacttcatttacgaccggcgggctcaggatccccttccctcgcgactgtggggaagagatgcagaatggcgctggagcgtcacgcacctcaacaatctttctaaacggtaatagggagcgccctctaaatgtgttttgcgacatggaaacagacggagggggttggttggttttccagagacggatggatggacagacagatttctggagggattgggaagattatgcccacggttttggcaatatctccggcgaattttggctcgggaatgaagcactgcattcactgactcaggcaggagactactctatgcgcgtagatctgagagcaggcgatgaagcagtgttcgcccagtacgattcttttcacgtggactctgcggcagaatactacaggttgcaccttgaggggtaccatggcaccgctggggacagcatgtcatatcattcgggcagtgtgtttagcgcgagggaccgggaccccaactcattgctgatttcatgtgctgtcagctatcgtggagcttggtggtatagaaattgtcactatgccaatttgaacggcctttatgggtccactgtcgatcaccagggtgtcagttggtaccactggaagggctttgagtttagcgtgccattcaccgaaatgaagctgcgtccccggaattttcgttccccagctggagggggctag

SEQ ID NO: 137523 - DNA, 6450 bp, synthetic construct
  misc_feature 1..6450: note = Description of Artificial Sequence: Synthetic coding sequence
  source 1..6450: mol_type = other DNA
taggctgaagaagaaacaccctcaccaacagagcccagcatggaggccccagaaccggccgaggagcctctcctgggagaattgaccgtcacaggatcctctcctgactccctgtctctgtcgtggacggttccccaggggcggttcgatagcttcacagttcaatacaaggaccgggacggtagaccccaagtggtgagggtcggaggggaggagagtgaagtgaccgtgggaggcttagagccaggaagaaagtacaaaatgcatttatatgggttacatgagggcaggcgcgtgggtccggtcagcgctgtaggtgtgacggcacctgaggaggagtctccagacgcccctctggccaagctcaggctagggcaaatgaccgtgcgggacataactagtgattcgctgtctctgagttggaccgtgcccgaggggcagtttgatcattttctggtgcagttcaaaaatggcgacgggcagcccaaggctgtgcgggtccctggtcacgaggacggcgtaacaatctcaggccttgaacccgatcataagtataaaatgaacttgtatgggtttcacggcgggcaacgtgttggccctgtgagcgcagtcggcttgacggcacctggcaaggatgaggaaatggccccggcgagtacagagccacccactcccgagccgcctattaagccacgtttggaagaattaactgtgactgacgctacaccggattcactgagcctctcctggactgtgcctgagggacagttcgaccatttcctggtgcagtataagaatggggacggacaacccaaagccacccgggtccccggccatgaagacagggtgacaattagtggtctggaacctgacaacaagtacaaaatgaacctgtacggctttcacggcgggcagagggttggtcctgtgtccgccataggcgtgaccgcagctgaggaggagactcctagccccacggagccaagcatggaagcccctgaacctcccgaggaaccactcttaggcgagttaacagtgaccggaagcagccccgactcattatcactttcttggaccgttccccagggacgttttgacagtttcacagttcagtacaaggatagggacgggagacctcaggtggttcgtgtggggggggaggagagcgaggtcacagtgggcggcctcgaacctggccgcaagtacaagatgcacctctacggacttcatgagggtcgaagagtcggaccagtgtccacagtgggcgtcactgctccccaggaggatgttgacgaaacaccaagccctactgagcctggtactgaagctcctgaacctcccgaggaaccacttctgggagagttgactgtgaccggatctagtcccgacagccttagcctcagctggaccgtgccccaagggagattcgattctttcaccgtccagtataaggatagagatggcaggccccaggcggttcgagtcgggggtcaggagtcaaaagttacagtcagagggctggaaccgggaaggaaatataagatgcacctctacggactgcacgagggacggagactgggccctgtgagtgctgttggcgtcacagaggatgaagcagaaactactcaagctgtgcccactatgacccctgagccaccgattaagcccagactcggggagttgaccatgaccgacgcgacccccgactccctctcactgtcttggactgttccagaaggacaattcgaccacttcctggtacagtacaggaacggagacggccagccgaaggcggttcgggtgccgggacacgaagacggtgtgaccatctctggactggaacctgaccacaaatataagatgaatctctacggcttccatggtggtcagcgtgtgggcccaatctctgtcacaggcgtgacggctgccgaggaggagactccctccccaacagaactgtccacagaagcaccagagccaccggaagaaccactgctgggagagctgacagtgaccgggtcctccccggattctctctccctttcttggacgataccacagggccactttgatagttttacagtgcaatacaaagatagggatggacgcccccaggtgatgagggtacgaggtgaggaatcagaggtaacagtggggggactcgagcccggacggaaatacaagatgcacctgtatgggttgcacgaaggccgtcgcgtgggtcctgtgagtaccgtgggggtgacagtccctaccacgacacccgagccacctaacaagcctcggcttggggaactcaccgtcacggacgctacaccagactccttgtcgctgtcatggatggtgcccgagggccagttcgatcattttttggtccaatacagaaatggagacggccaaccaaaggtagtgcgagtacccgggcatgaggatggtgtcactatatctggactggagccagaccataagtacaagatgaacttatacggtttccatggcggccagagggttgggccgataagcgtgatcggggtgactgcagccgaagaagagacccctgcccctacagaaccatctaccgaggctcctgaaccgcccgaagaacctttgctgggtgagttaacagtgaccggaagtagcccggatagcctgtctttgagctggactataccacaaggaaggttcgatagcttcaccgtccagtacaaagaccgtgatgggagaccacaggtggtacgtgtccgcggtgaggagtctgaggtgactgtaggtggcttagaacccgggtgcaagtataagatgcatctgtacgggctgcacgaggggcagcgggtcggcccggtgagcgccgtgggtgtgactgtgcctacaatgacaccagaaccccccattaaaccccgtcttggcgaactgaccgtgacggacgcgactcccgattcactcagtctatcgtggatggtaccagagggacagtttgatcacttcctcgtgcaatacaggaacggagacggacagcccaaggccgtcagggtgcccgggcatgaggatggagtgacaataagtgggttggaacctgatcacaagtacaagatgaacctgtatggatttcacggtggacagcgcgttggacctgtctctgccatcggggtcaccgaggaagagacgccatcacctaccgagccaagtacagaggcccccgaggcacccgaagaaccccttttaggtgaactgactgtaacaggctcctcccccgatagcttgtcactgagttggacagtcccccaggggcgcttcgattcgttcactgtgcagtacaaagaccgagacgggcaaccccaagtggttcgcgtgagaggtgaagagagcgaagtgaccgtggggggtctggagcccggaaggaagtacaagatgcacctgtacgggctgcatgaaggccaacgggtgggtcccgtgtcaaccgttggcattacagcccccctgcccacacccctgcctgtggaacctaggctgggtgaactcgccgtggcagcagtgacctccgattcagtcggcttgtcttggactgtcgcccagggaccctttgactcctttctggtccaatatcgggacgcccagggacaaccgcaagctgtgccggtgtcaggtgacctgagggcagtggcagtgtcagggctcgaccctgcaagaaagtataaatttctgctctttggtctgcagaatggaaaacgacatggccccgttcccgtcgaggccaggacggcacccgacacaaagcctagcccgcggctgggcgagctcacggtcactgacgccacaccagactcagtcggcctctcttggacagttcctgaaggggagttcgacagctttgttgtacagtataaagataaggacggtagactgcaggtggtccctgtcgcggccaaccagagggaagtcacagttcaaggcctcgaaccctctcggaagtatcgtttcttgctgtatgggttgtcggggcggaagcgactcggacctatctctgccgactccacaacagccccactcgaaaaggaactcccaccccacctcggcgaactgactgtcgcagaggagacctcatccagcttacgcctcagttggacagttgcacaaggaccttttgatagctttgtggtgcaataccgggataccgatgggcagccccgtgctgtccccgtcgcagccgaccagcggactgtcactgtcgaggatctcgagcccggtaagaaatacaagtttctgctctacggcttgctaggtgggaagcggcttggacctgtctccgctctggggatgaccgccccagaggaagatacccccgcaccggagctcgctccagaagcgcccgagcctccagaagagccacgcctcggcgtcctcacggttacagacactacccccgactcaatgaggttatcttggtctgtcgcccaggggcccttcgattcttttgtggtccaatacgaagataccaacggacagccccaagcactacttgttgatggagaccaatcaaagatcctgatttcaggcctcgaaccgtccacaccctatcgctttttgctgtacggcctgcacgagggaaagcgcctcggccctctgagtgcggaggggactactggcctcgcaccagccggacagacttccgaggaatcacggccccgcctcagccaactctcagtcacggatgtcacaacatccagtctacggttgaattgggaggccccccctggagcattcgatagctttctgcttcgatttggagtgccctctcccagtactctggaacctcacccgaggcccttactgcagcgagagttgatggtgccgggcacgcgccattcagctgtgctgcgggacctgcgttccggtacactgtacagcctaacactttatggattaagaggacctcataaagcagattccattcagggcacggcgcgtacattgtcacccgtgttggagtctccgagagacctgcagttcagcgaaattcgtgaaacgagtgcaaaagtgaactggatgccaccaccttcacgagcagattcctttaaagtgtcgtatcaactggcagatggcggagaaccacagtctgtacaggtcgacggccaagcaagaacgcagaaactgcaagggcttattccaggtgctaggtatgaggttaccgtggtgtcagtacgaggtttcgaggaatcggagcctttgaccgggttcctgactacagtgccggatggtcctacacagttaagggccctgaatttgacggaaggattcgccgtacttcattggaagcccccccagaacccggtcgacacatacgacatccaggtgaccgcccctggtgccccacccctgcaggcagaaacccctggctcagccgttgattatcccctacacgacctggttcttcacacaaattatacagcaactgtccgagggcttcggggtcctaacctcacttccccagcatccatcacatttaccaccgggctcgaggcccccagggatttggaggccaaagaggtcacaccaagaaccgccctcctgacatggactgagcctccagtgaggcccgctggctatctgctgagctttcacactccaggtggccagacccaagagatcttgctccctggagggattacatctcatcagcttctggggctgtttccatctacatcctataatgccagacttcaggcaatgtggggccagtctctgctccctcccgtctctacctcatttacaacaggtggccttagaatcccattcccgcgcgattgcggggaagagatgcagaacggtgcaggagcatcaaggactagcaccatctttttgaacgggaaccgtgagaggccactgatcgtgttttgtgacatggagacagatgggggcgggtggttggtctttcagcgtcgcatggatgggcagacggatttctggagagactgggaggactacgctcatggtttcggaaacatcagcggggagttctggctcggcaatgaggccctacattcactgactcaggcgggcgactactccatgcgcgtcgacttgcgtgctggtgatgaggcggttttcgcccagtacgacagtttccacgtggatagtgccgccgagtattatcgtttgcacctggaagggtaccacggaaccgccggtgactccatgtcttaccatagcggctctgtctttagcgcccgggaccgggatcccaacagcttactcataagttgcgctgtcagctatcgaggagcttggtggtataggaattgtcattatgctaaccttaacggcctgtatgggagcaccgttgaccatcaaggagtatcctggtaccattggaaaggctttgagttttccgtaccattcacagagatgaagttgagacccaggaatttccgttcgcctgccggcggcggttag

SEQ ID NO: 137524 - DNA, 27 bp, synthetic construct
  misc_feature 1..27: note = Description of Artificial Sequence: Synthetic coding sequence
  source 1..27: mol_type = other DNA
atgatgcccgctcagtatgccctgtag

SEQ ID NO: 137525 - DNA, 27 bp, synthetic construct
  misc_feature 1..27: note = Description of Artificial Sequence: Synthetic coding sequence
  source 1..27: mol_type = other DNA
atgatgcctgcccagtacgccctttag

SEQ ID NO: 137526 - DNA, 9891 bp, synthetic construct
  misc_feature 1..9891: note = Description of Artificial Sequence: Synthetic coding sequence
  source 1..9891: mol_type = other DNA
tgatcttcaccactgggattactggggactacggacgaaccacctccatccggcccgagtaccacccaaggtgcccaggccccactgctccagcagaggccacaggaactcggggagctgagggtactcggaagagacgaaacgggcaggctgagagtggtgtggaccgcgcagccagatacgttcgcctatttccagttacgcatgagggtgccagaaggacctggcgcccatgaggaggtcctacctggcgacgttaggcaggcactagtaccgccgcctcctccggggacaccctacgagctatcattgcacggggtgcctcccgggggtaagccaagtgaccccatcatatatcaggggatcatggacaaagacgaagagaaacccggaaagtccagcgggcctccccgtctaggggaactcactgtcacagatcggacatccgactctctcttgctccgctggactgtgcccgagggagaatttgattctttcgtcatccagtataaagaccgcgatgggcagccccaagtggtgcctgtagaggggccacagcggtcagctgtgatcaccagtctcgaccccggcaggaagtataagtttgtgctttacggcttcgttggcaaaaaacgtcacggacctctggtagctgaggctaaaatcctgccacagagtgacccatcacctgggacccctccccatctgggcaacttgtgggttactgacccaactcccgactcattacacttgtcctggaccgtgcccgaagggcagtttgataccttcatggttcagtaccgcgatagggacggcaggcctcaggtggtcccagtagagggtccagagagatctttcgtggtgtctagtctcgacccagatcacaagtataggtttactctttttggaatcgctaacaagaaacgctatgggcccctgaccgcagacggcactacggcacctgagcgcaaagaggagcctcctagacctgagtttctggaacaaccccttctcggggagcttactgttacaggcgttactcccgattccctgcgtctaagttggaccgtagctcagggtccctttgattcttttatggtccagtacaaggatgcacagggccagccccaggctgtacctgtcgccggcgatgaaaatgaagtcaccgttcctggactcgacccagacagaaagtataagatgaacctctatggactgcgggggcgacagagagtggggcccgaatcagtggtggcaaaaacagcccctcaggaggatgtggacgaaaccccgtcacctactgagctgggtaccgaggccccggaatcgccagaagaacctcttcttggagagttgactgttaccgggagtagccccgatagtctgagccttttctggaccgttccacagggttcattcgatagttttaccgtgcagtacaaggatcgggacgggcgtccccaggctgtgcgcgtgggcgggaaggaatctgaggtgacagtggggggattggaacctggacataagtataagatgcacctctatggtctccacgagggacagcgggtgggcccagtctccgcggtgggtgtcacggctccacagcaggaggaaacacccccagccactgaaagccccttagagccgcggcttggcgagcttacagttaccgatgtcacgcctaactccgttggcttaagttggacagtccctgaaggccaattcgatagtttcattgtgcaatacaaagacaaagacggccagccccaagtggttccggtggccgctgatcaacgtgaggtgaccgtttataatcttgagcctgaacgaaagtacaagatgaacatgtacggcctccacgacggacagagaatgggtcctcttagcgtggtgattgtgacagctcccttgcccccggcacctgcaaccgaggccagtaagcctccactggaaccccgcctgggcgaactgacagtgactgacattacacccgattctgttggccttagttggaccgtgccagaaggcgaatttgacagttttgtggtacagtacaaagatcgagatggacagcctcaggtggtcccagtggctgctgaccaacgggaagttactattccggacttggagccaagccgtaaatataagtttcttctgttcgggatccaggacgggaaacgccggtcccctgtgagtgtcgaagcgaagaccgtggcccggggcgacgccagcccaggcgcaccgcctcgcctcggtgagctctgggtgaccgatccgactccggattcactcagactttcctggaccgtccccgaagggcaattcgacagctttgtagtacagtttaaagacaaagatgggccccaggtggtcccggtggaggggcacgaaaggtccgtgaccgtcacacctctcgatgctggcaggaaatacagattcctgttgtatggtttattgggaaaaaagaggcatggaccattgaccgccgacggcacaaccgaggcccggtccgccatggacgataccggtacaaaaaggcccccaaaaccacggcttggtgaggagcttcaggtgacaacagtgacccagaattccgtgggcttgagctggaccgtgcctgaagggcaatttgattccttcgtcgttcagtacaaggatcgagacggacaaccgcaggtggtgcctgtcgagggctccttgcgagaggtatccgtgccaggcttggatccagctcataggtacaagttgctcctctacggtttgcatcacggtaaaagggtgggacccatcagcgcagttgctataactgctggcagagaggagactgagaccgaaacaacagcaccaacacccccagctccagaaccccaccttggcgaattgactgtcgaggaggcaacgagccacacactgcatctctcttggatggtcacagaaggagaatttgactctttcgaaatccagtataccgacagagacggacagctacagatggtgaggattggaggcgatagaaacgacattacattgagcggccttgaaagcgaccacagatacctcgtgacgctgtatggcttttccgacggaaaacacgttggccccgtgcacgtcgaggccctcactgtccccgaggaagaaaagccctccgagcccccaaccgccactcctgaacctcccatcaagcccagattaggggagctgacagtgaccgatgccacccctgactcactgagtctgagctggacagtgccagaagggcagttcgatcactttcttgttcagtaccggaacggggatggccagcccaaagctgtcagggtcccaggccatgaggagggggtaactatttcaggcctggagcccgaccacaagtataagatgaatctgtatggatttcatggagggcagcggatgggcccagtgtcagtggtgggcgtgacagcagcagaggaagagactccaagtcccaccgagcctagtatggaggcacctgagccagccgaagagcctctgttaggagagctgactgtgactggaagcagccccgattctctgagtctctcttggacagtgccccagggccgctttgatagcttcactgtgcaatacaaggacagagacggtcgaccacaagtcgtcagagtaggtggtgaagaatccgaagttacggtcggtggactggagccaggtaggaaatacaaaatgcacctgtatgggttacacgagggaaggcgggtgggcccggtttctgcagttggcgtcacggctcctgaggaagaaagccccgacgcgcctttggcaaagcttcgactcggacagatgacagttcgagacataacaagcgattccctaagtctgagctggacagtgcctgagggacagtttgaccacttccttgtccagttcaaaaacggagatggtcagcccaaggccgtgagagtgccaggtcatgaggacggcgtgactatatccggtctcgagcctgaccacaaatataagatgaatttgtacggattccacggcggccaacgggtgggccccgtatccgccgtcggcctgactgcgccggggaaggacgaggagatggctccagcatcaacagagcccccgacacccgaaccccctatcaagccacgcctcgaggaattaactgtgaccgacgcgacccctgatagcctgtctctgtcatggactgtaccagaaggccaattcgaccacttccttgtgcaatacaaaaacggcgatggacagcccaaagcaactagagtgcccggacacgaagatagggtgactatctctggactcgaacccgataataaatataaaatgaacctctacggatttcatggagggcagcgggtgggtcctgtaagcgccatcggtgtgactgccgctgaagaagagactccctctccaacagaaccatcaatggaggcgcccgaaccccctgaagagccactgttgggagagttaacggtgactggttcctctcccgactccctttccttaagctggaccgtgccccaggggcggttcgattcctttactgtacagtataaggaccgtgatggcagacctcaagtggttagagtgggaggtgaagagagcgaagtgaccgtcggtggacttgaaccaggcaggaagtataaaatgcatctttacggcttgcatgagggaagaagagtcgggcccgttagtacagttggagtgacagctccccaggaagacgttgacgagacgcctagcccaaccgaaccaggaaccgaggcccctgggccccctgaggagccactcctcggggagctaacagtgactggcagctcacccgacagcctgagtctatcatggactgtacctcaaggtagatttgacagctttacagtgcagtacaaagaccgcgatggtcgcccccaagccgtacgggtgggtgggcaggagtctaaagtaactgtacgtggtctggagccgggcaggaaatataagatgcatctgtacgggctccacgaaggacggcgccttggccccgtgtctgcagttggagtcaccgaagacgaggccgaaaccacgcaggcagtcccgactatgactcctgagccccccattaaaccgcgactgggagaactcaccatgacagacgctacacccgacagcctctccttgagttggactgtgcccgagggacaattcgaccatttcctggtgcaatacagaaatggagacggccaacccaaggcagtacgcgttccgggacacgaggatggcgtgacgatctccgggttagaacctgatcacaagtacaaaatgaacctctatggatttcatggtgggcaaagagttggaccaatctccgtaataggagtaaccgctgcagaggaggagacacccagtccaactgaactgtctactgaggcccccgagccgccggaggagcccctgctaggggagctcaccgtcacaggctctagccccgactcgctaagcctctcttggacaatcccccaaggtcactttgactccttcacagtgcaatacaaagacagagatgggagacctcaagtgatgcgggtgcgaggagaggagtccgaggttactgtggggggactggaaccaggccgcaaatataagatgcacttatacggcttacacgaaggccgacgcgttgggccagtgtctaccgtgggagtgacagtacccactaccacccccgaaccccctaacaagcccaggctgggggagttaacggtcaccgatgccacccccgacagcctgtccttgtcctggatggtaccagagggccagttcgatcacttcctagtgcagtatagaaacggcgatggccagccgaaggtggtgagagtgcctggtcatgaggatggagttaccatttccgggcttgaacctgatcataagtataagatgaatttgtacggcttccacggcgggcagcgagtcggtccaatctcagtcatcggcgtgaccgctgcggaagaagagactccggctccaactgaaccctccaccgaggcgcccgaaccccctgaagaaccactcctgggagagttaactgttaccggatccagtcccgactccctcagcctctcttggactatcccgcaaggaaggttcgactcttttaccgtgcagtataaggatcgcgacgggcggcctcaagtcgtgcgggtgaggggtgaggagtccgaagtgaccgtgggggggctcgaaccagggtgtaaatataagatgcacctatacggtctccacgagggccagagagtcggtcctgtaagcgctgtaggtgtgacagttcccacaatgactccagagcccccgatcaaacccagactcggcgaactaaccgtcacagatgcaacgcccgactccttgagcttgtcttggatggtcccagaagggcagtttgatcattttctggtccagtatcggaatggggatgggcagcctaaagccgtgcgcgtacccggtcacgaagacggagtgaccatctcaggcttggaaccagaccacaagtacaagatgaatctgtatgggtttcacggtggacagagagttggacctgtgtccgccattggcgtgaccgaggaggaaactccttcccctaccgagcctagtacagaggcacctgaagcccccgaggagccccttttaggggagctcactgtaactggatcatcgcccgatagcttgtccctgtcctggaccgttcctcagggcagattcgactcttttactgtacagtacaaggatagagatggtcagccccaggttgtgagagtgcgcgttgaagagtctgaggtgaccgtggggggtttggagcctggacggaagtataaaatgcatctgtacggactccatgaaggtcagcgcgtcggacccgtgtctaccgtcgggattacagctcctctgccaacgcccctccccgttgagccccggttgggagagctggctgtggccgcagttaccagcgattctgtggggttgagctggacagtcgcacaagggccattcgactcatttttagtgcagtaccgtgatgcccagggccagccccaggccgtccctgtgtccggggacttgagagccgtggccgtgtcagggttggatccagcccgcaagtataaattcctcctgttcgggttacagaacggtaaacgtcacggccctgttcctgtggaggcccggaccgctcccgatacgaagccctccccccgcttaggagagctcaccgttactgacgcaactcccgattcagtggggctgagctggaccgtcccagaaggagagtttgactcattcgtggtacagtataaagacaaagatgggcgcttgcaagtcgtgccagtcgccgctaatcagagggaagtgacggtgcagggactcgagcctagtcggaagtaccgctttctgctgtatggccttagcggcaggaagagactcgggcccatcagcgcagattccaccactgcccccctggagaaagagctcccaccccacttgggagaactgacggtagccgaggaaacttccagctcccttagattgagctggactgttgctcagggccccttcgacagcttcgtggtacagtaccgcgatacagatggccagcctcgcgctgtacctgtcgctgccgaccagcgcaccgtcacagtggaagacctggagcccggtaagaagtacaagtttttgctgtacggattgctggggggcaaacgactcggtcctgtctctgctctcggaatgaccgcaccggaggaggacacccccgcccctgagttggctccagaggcgccagagcctcctgaagagccaagactcggagtactgacggtgacagacaccacccccgattccatgcggttaagttggtctgttgcacagggaccttttgacagtttcgttgtgcagtatgaagatacaaacggccagccgcaagccttactggtggacggtgaccagtcaaaaattctcatatcaggtctcgagccatccacaccatatcggtttctactttacgggctgcatgagggcaagcgcctgggtcctctctccgccgaggggaccacaggcctggcccccgccggacagacatccgaggagagtcgccctagactgagtcagttgtccgtcactgatgtcacgacatcgtcactcaggttaaactgggaggctcctcctggtgcctttgacagctttctgctgcggttcggggtgccatctccttccactttagagccacaccccaggcccctcctgcagcgagagctcatggttcctggaactagacattcagctgtcctgcgcgacttgagatcagggacactgtacagcttgactttgtatggactgaggggaccccacaaggcggactcaatccagggcaccgccagaaccctgtctccagtactcgaatccccgcgtgacctgcagttttcagagattcgagagaccagtgcaaaggtcaattggatgccacctcctagtagggcagattcatttaaagtcagttaccagttggccgacggcggcgagcctcagtccgtgcaagtggacggtcaggcaagaactcagaaattgcagggacttatacctggagcacggtacgaagtcactgtggtgtccgtgcggggctttgaggaatctgaacctctcaccgggttcctaactaccgtccctgacgggccaacacagctgcgcgccttaaatctgactgagggattcgccgtcctgcattggaaacctccccagaaccccgtcgatacctacgacgtgcaggtaactgcccccggagccccccctctgcaggctgagacacctgggtctgcagtggattatcccctgcacgacttggtgttgcacaccaactacaccgctactgtgagaggcttacgtgggcctaatctgactagccccgccagcataacctttactaccggcctggaggcgcccagggatctggaggccaaggaggtgactcctcggactgcgctgttgacctggaccgagccgcctgttagacctgcgggttaccttctgagttttcataccccaggaggtcagaatcaggagatcttgctgccaggaggtatcacttcccaccaactcctgggcctgtttccatccacctcttacaacgcacggcttcaggctatgtggggtcaatctctgctcccccccgtgtccacctcctttaccaccgggggccttaggataccatttcctagagactgcggcgaagagatgcagaatggcgccggtgccagtaggacatctaccatcttcctcaacggcaatcgtgaacgtcccctgaatgtgttttgcgatatggaaacagatgggggcggatggcttgtctttcagaggcggatggacggtcagactgacttttggagggactgggaggattacgcacatgggttcgggaacatatcaggagagttttggcttggcaatgaggctctgcactccctcacccaggcaggcgactactccatgagagttgatctgagggctggagacgaagctgtattcgcccagtacgatagcttccacgttgactcagccgcagaatattatcgactccacttagaaggataccacgggactgccggcgacagtatgtcataccacagcggttctgtattttctgcaagagaccgggatcccaattcattgttaatatcctgcgcagtcagctacagaggggcctggtggtaccgcaactgccactatgcgaatctgaacgggctgtacgggtctaccgtggaccaccaaggcgtgtcctggtatcactggaagggctttgagttttcagtgccctttaccgagatgaagctgaggccccgtaacttccggagtcccgccggaggggggtag

SEQ ID NO: 137527 - DNA, 12669 bp, synthetic construct
  misc_feature 1..12669: note = Description of Artificial Sequence: Synthetic coding sequence
  source 1..12669: mol_type = other DNA
atgatgcctgcccagtacgccctcaccagcagtctcgtgctgctagtcttgctgtccacggcccgagccgggcccttttcttctcggtccaacgtaacacttcctgccccccggccaccaccacagcctggcggccacacagtgggggccggggtggggtccccctcatcacagctttatgagcatacggtcgagggcggcgagaagcaggtggtgtttacgcataggataaaccttcccccctccaccgggtgtgggtgcccgcccggaaccgagcctccagtgctagcctcagaagtgcaggcgctgcgcgtgcgcctggagatattggaagagctggtgaaagggctgaaagaacagtgtactggcggctgttgcccggccagcgcgcaggctggaaccgggcaaacagatgtcagaaccctctgttctctgcacggggtgtttgacctttcacgttgtacctgctcctgtgagcctggatggggagggcctacctgttcagatcccaccgacgcggagataccgccctcttcccccccgagtgcgagcggtagctgtccagacgactgcaatgatcagggtcgatgcgtgcgcgggaggtgtgtatgctttccaggatatactgggccctcctgcgggtggcctagctgtcccggggattgccagggcagaggcagatgcgtacagggagtgtgcgtgtgccgggcaggtttttccggccctgactgctcacagcgctcctgtcctagagggtgcagccagcgcggtagatgcgaaggagggagatgtgtatgtgatcctgggtacactggcgacgactgcgggatgagatcatgcccaagagggtgcagccagagaggcaggtgtgaaaacgggcggtgcgtctgtaatcccggttacacaggcgaggactgcggcgtgaggtcatgtccacgaggttgctcccagagaggcaggtgtaaggatggcagatgtgtgtgcgatccaggctacacaggtgaggactgtggaactagaagttgtccctgggattgcggggaaggcggtcggtgcgtcgacggtcggtgtgtttgttggcccggctacacaggggaagattgtagcacaaggacatgccccagggattgtaggggtaggggccgctgtgaggacggggagtgtatatgcgataccgggtattctggagatgattgtggagtaagatcctgtcccggggattgcaaccagcgtggcagatgcgaggatgggagatgcgtttgctggcctggctacactggcaccgactgtggctcccgggcgtgtcctcgcgactgcaggggaagaggccggtgtgaaaacggcgtgtgcgtgtgcaatgctgggtactctggagaggattgtggtgtgcgcagctgtcccggcgattgtcggggacgagggcgatgtgagtcgggaagatgtatgtgttggcccgggtacacgggacgggattgcggaacacgcgcttgtccgggggattgtagaggccggggcaggtgtgtggacgggagatgtgtgtgcaaccctggctttacaggggaggattgtggatcacgaagatgcccgggcgattgcaggggtcacgggttgtgcgaggacggcgtgtgcgtgtgcgatgcaggatacagcggggaggattgcagcacccgatcctgcccgggtgggtgtcgcggcagagggcagtgcctggacggccggtgtgtttgtgaggacggctatagcggggaagactgtggcgtcagacagtgccctaacgactgtagccagcacggggtttgccaagacggcgtctgcatttgctgggagggctatgtgtctgaagactgttcaatccgcacctgcccaagcaattgtcacggaagggggcgatgcgaggagggccggtgcctgtgcgaccccggctatacagggcctacttgtgccaccaggatgtgccctgcagattgtcggggccggggtcggtgcgtccagggtgtctgtctttgccacgtggggtatggtggcgaggactgcggccaggaggaaccgccagctagtgcctgcccgggcggctgcggcccacgggaattgtgcagagcaggacagtgtgtatgcgtcgagggtttcagagggcccgactgtgctattcaaacatgtcccggggattgccgaggtaggggggagtgccacgatgggagctgtgtgtgtaaagatggctatgctggagaggattgcggcgaagaggtgcctactattgaagggatgagaatgcatcttcttgaagagacgacggtgcggaccgaatggaccccagcacccggacctgttgacgcctatgagattcagtttattcccactacagaaggcgccagtcctccgttcaccgctcgcgtgccatcaagtgctagtgcctacgatcagaggggcctcgcacccgggcaagagtaccaggttaccgttcgcgcactgaggggcacctcctggggcttgcctgcctcgaaaacgattactaccatgattgatggtccccaagatctgcgtgtggtggctgttacacctacgaccctggagctcggatggctgaggccccaggccgaagtggacagattcgtggtatcctatgtctcagccggtaatcagcgcgtgcggcttgaagtcccccctgaggccgacggaaccctgctaacagacctgatgccaggagttgagtatgtggtcactgttaccgcagagcgtgggcgagccgtgagttaccccgcatctgtgcgcgctaataccgggtcaagtcctctgggtctgctgggtactacagacgaaccgccacccagcgggccctcaacgacccagggtgcccaagccccactgcttcagcagcgacctcaggagttaggcgagctaagagttctcggccgtgacgagactggaaggctgagggtcgtctggacagcccagcccgataccttcgcctattttcagcttcggatgcgggtgccagaggggcccggcgctcatgaggaggtgctgccaggcgacgtgaggcaggccctcgtcccccccccccctcctgggaccccctatgaactcagtttgcatggggttccgcctggaggaaaaccctccgaccctattatctatcaaggtataatggacaaagatgaagagaaacccggaaaatcaagtggcccaccccgcttaggagagctaaccgtgaccgacagaaccagcgacagcctgttgcttaggtggacagtgcccgaaggcgagtttgactcatttgtaatccaatataaggacagggatggacagccacaagtcgtgcccgtcgagggccctcaacgttctgcagtgataactagccttgacccaggcagaaagtacaagtttgtcctgtatggtttcgttggcaagaagcgtcacggacccctggttgccgaggcgaagatccttccacagagtgatccaagcccaggaacaccacctagacttggaaacctatgggttacggaccccacacccgacagtctgcacctctcttggacagtcccagaaggccagtttgacacattcatggtccagtatcgggaccgggatggaaggccacaagtagtccccgtggagggccctgagagatcttttgttgttagcagcctggatcccgaccacaagtatcggtttaccctatttggtatcgcaaacaagaaaagatacggaccattaacagctgatggaactacagccccggagcgcaaggaagagccacctaggccggagttcctagagcaacccttgctcggtgagctcactgtaaccggcgtgaccccagatagcttgcggctgagctggacggtcgctcagggccctttcgattcattcatggtccaatacaaagacgcccagggccagccacaggcagtccccgttgctggagatgagaatgaagttacagtgccgggactggatcctgatcgaaagtataaaatgaacctgtatggattacgaggccggcagcgcgtggggcccgagtccgtggtggcgaagacagcaccccaagaggatgttgatgaaaccccgtcacctacggaactggggacagaggctccagaaagccccgaagaacccttactgggtgagctgacggtgacaggatcttcgccagacagtctgtcacttttctggactgttccacaaggtagtttcgatagtttcacggtccagtataaggatcgcgacggacggcccagagccgtcagagtgggagggaaagaatctgaagtgaccgtcggaggtctggagccgggacataagtacaagatgcatctctatggactccatgagggtcaacgtgtcggacctgtgagtgccgtcggagtgaccgccccccagcaggaggagacgcctccagcaactgagagtccactcgagcctcggctcggcgaattgaccgtaaccgacgttaccccaaacagcgtcggcctgtcttggaccgtacctgagggtcaattcgatagctttatcgtgcagtacaaagacaaagacggccagcctcaagtggtgccagtggccgccgaccagagagaagtaaccgtctacaacctcgagcccgagcgaaagtacaaaatgaatatgtacgggctccatgatggacagcgcatgggtcctctttccgtggtgattgtgacggcgcccctccctccagcgcctgctaccgaggccagcaaaccccccctagaacctcggctgggcgaactcactgtgacagatatcacccccgactcagtaggactgtcctggacagtacctgaaggggagttcgactctttcgttgtgcagtataaggatcgcgatggccagcctcaagtagtacctgttgccgccgatcagcgagaggtgactatccctgacctggaaccatctcggaagtataagtttctgctcttcggcattcaagacggtaagcgtaggtcccctgttagtgtggaggccaagacagtggcccggggcgatgcctcacccggagcacctccaaggctcggagaactgtgggttaccgatccaacgcctgactcactgaggctttcttggaccgtgcctgagggccagttcgacagctttgtggtccagtttaaggataaagacggacctcaagtagtgccggtggagggtcacgaaaggtccgttacagtcacaccgttagatgccggcagaaaatacagatttttactgtatggtttacttggcaaaaagagacacggccctctcaccgccgacggcacaaccgaggctaggagtgcaatggatgatacaggaacaaaacggccacccaagccacgtttaggagaagagctgcaagtaacaactgtaacgcagaatagcgtgggcctcagctggaccgtgcctgaaggccagtttgactccttcgtcgtccagtacaaagacagggatgggcagccccaggtggtccccgtggaagggtcgctgcgtgaagtgtccgtcccgggcctggacccggcccaccgctacaaactgcttctgtatggactacaccatgggaaacgggtgggacctatcagtgccgtggcaatcaccgccgggagggaagagaccgagactgagactaccgcgccgactccgcccgctcccgagcctcacttgggtgagctgactgttgaagaagctactagccataccctacacctttcctggatggttacagaaggcgagtttgacagttttgagattcagtacaccgaccgagacgggcaactgcaaatggtacggatcggcggagaccgcaacgatataactttatccggactggaatccgatcatcgctacttggtaaccctctacgggttttccgacggtaagcatgtcggtcccgttcacgtagaagccttaactgttccggaggaggagaaaccttccgaacctccaaccgccacaccagagccacctatcaagccccggctgggagagttgacggtcaccgatgctacccctgattctctgagcctgtcgtggaccgtgcctgagggacagttcgatcattttctcgtccagtacaggaacggcgatgggcaacctaaagctgtgagagtgcccgggcatgaagaaggcgtcaccatcagtggcctggaaccagaccacaagtacaaaatgaatctttatggtttccacgggggccagagaatggggcctgtgtctgtcgtaggagttacggccgcagaggaagaaaccccctcaccaacagaaccctccatggaagccccagaaccagcagaggagcccctccttggagagctcacggtaaccgggtccagtcctgacagcctgtccctctcatggacggttccccagggccgattcgactcattcactgttcagtataaggacagggatggtaggccacaggtggtacgtgttggaggcgaagaatctgaggtcaccgtcggaggactggagcctgggcggaagtacaagatgcatctgtatggactccatgaaggtaggcgtgtgggacccgtatcagcagtaggagtcaccgccccagaggaggagtctcctgacgcacccttggccaagctccgcttaggccagatgaccgtgcgagacatcacttctgacagcctttccctttcatggaccgtgcctgaaggtcagtttgaccacttcctggttcagtttaaaaatggcgatgggcaacctaaggctgtgagagtgcccgggcacgaagacggtgtcaccatcagtggacttgagccagatcataaatacaaaatgaacttgtacggcttccacgggggccagcgtgtaggccctgtgtctgccgtgggcctcacagcccccgggaaagatgaggaaatggcacctgcaagtacagagccccccacccccgagcctcctattaaaccaagactcgaggaactgacagttacagacgcaaccccggatagcctgtcgctgagttggacagtccccgagggacagttcgatcatttcttagttcaatacaagaacggcgacggtcagcccaaggcaaccagggtgccgggccatgaggatcgggtgacgatcagcggcctcgaacccgataataaatacaaaatgaacttgtatggcttccatggaggtcaaagggtgggacctgtaagtgccattggggttactgcagcagaagaggaaacaccaagcccaaccgagcctagtatggaggcacctgagccccccgaggagcccctcctgggcgagctcacggtgacaggatccagcccagacagcctgtcattgtcttggaccgtgcctcagggtaggttcgattcatttaccgtccagtataaggaccgggacggaaggccccaggtggtgcgggtgggaggggaagaatccgaggtgacagtgggcggcctagaacccggccgcaaatacaaaatgcacctgtatggcctccatgagggacggcgggtcggtcctgtttctacagtgggagtgaccgcaccccaggaggatgtggacgagactccaagccccacggaacctggaacagaggcccctgaacctcccgaggagccactcctgggcgagctgacagtaacgggcagcagcccagattcgctcagtctgtcttggacagtgcctcaaggtcgcttcgattcctttacggtccagtataaggatagggatggacgcccccaagcagtccgcgtcggtggccaagaatccaaagtaacggtgaggggccttgaacccggtcgcaagtacaagatgcatttgtacggtttgcatgagggcaggaggctcgggcctgtgtcagcggtgggcgtgacagaggacgaagcagagacaacccaggcggtgccgaccatgactcctgaacccccaatcaaaccacgactgggagagctgaccatgacagacgctaccccagattctctgtcccttagttggacagtcccagagggccagtttgaccattttctggtgcagtaccggaacggtgacggacaacctaaggccgtgagggtgcccgggcacgaagatggagtgactatttctgggctagaaccggatcataaatacaaaatgaatctgtatggattccacggtgggcaacgtgttgggccgatctcagtgataggcgtgactgctgccgaagaagaaactccgtctcccaccgaactgtcaactgaggcacccgagcccccagaagagcctttactgggggagctgaccgtgacaggctccagcccagacagccttagcttgtcatggacaatcccgcagggacatttcgacagttttacagtgcagtacaaagatcgggacggtcgtccgcaggttatgagggtccgcggtgaagagagtgaggtgacagttggcggtctagagccaggacgaaaatataaaatgcacctgtacgggctgcatgaaggtcgcagagtgggtcctgtgtccaccgtcggagtgactgttccaacaactacacctgaacctccaaacaagcccaggctgggggagttaacagtgacagacgccacacccgatagtctatcattgagctggatggtgcctgagggtcagttcgatcactttttggtccagtatcgcaatggcgacggccagccgaaagtggttcgggtgccagggcatgaggatggagtgactatctccggtctagagcccgaccacaagtataagatgaatctgtacggctttcacggtggtcagcgcgttggtccaatctcagtaataggcgtcactgcagcggaggaggagaccccagccccaacagagccatcaacagaggcgccagagccaccggaagagcccttgctcggagaacttaccgttaccggctcatctcctgactcgctgtctctgtcgtggactatcccccagggcaggtttgattcatttaccgtccagtacaaggatagagacggccggccccaagtcgtacgcgtgcgtggggaagaatctgaggtcaccgtaggggggctcgaacccggatgcaagtacaaaatgcacctgtatgggcttcacgagggccaacgggttggtccagtgtcggcagtgggtgtgactgtccctaccatgacccctgagccccccatcaagcccaggctgggcgagctcacggtgacagatgcaacacctgactcactcagcttgtcttggatggtaccagaaggccagttcgaccactttctagttcagtatcgcaatggggacgggcagccaaaggctgttagagtccccggacacgaagacggcgtgaccatttctggactcgagccggatcacaagtacaaaatgaacctgtatggattccacggtggccaaagagttggccctgtgtctgctatcggcgtaaccgaggaggagaccccttctcccacggagccgtccactgaagcgcccgaagctccagaagagcctctgctcggcgaacttactgttacgggttcttcccccgattccctgtctctcagctggaccgtaccccaagggcgtttcgacagctttaccgtgcagtacaaggacagggatggtcaaccccaggtggttcgagtccgcggagaggagtccgaggtaaccgttgggggtctcgagcctgggaggaagtacaagatgcacctatacgggctccatgaagggcagagggtgggtccggtctctacagtgggaattaccgcccctctgcctaccccgctgcccgtggagcccagactcggagaactcgccgtcgcggccgtgacttcagactctgtggggctgtcttggacggtagcccaaggcccgtttgactcttttctggtgcagtatcgtgacgcgcaagggcagccgcaagctgtgcccgtttcaggtgacctgcgtgctgtcgccgtatccggtctcgatcccgcaaggaaatacaaattcctgttatttggactgcaaaatggcaagagacacggtcccgtaccagtcgaggccaggactgccccagataccaaaccctcgcccagattgggtgagttgaccgtcacagacgccacaccagactctgtgggtctgtcatggactgtgcctgaaggtgagttcgactccttcgtggtgcagtacaaggataaggacggccggctccaggtggtaccagtggcagccaatcaacgcgaagtcaccgtccagggcctggagcccagccggaaataccggttcctcctgtacggacttagtggtcgtaagcggctcgggcctatctcagccgattcaaccaccgctcctctggagaaggagctccctccccacttgggggaactgacagtagctgaggaaacctcttcctctcttagactgagttggaccgttgcacagggaccgttcgacagctttgtggtacagtatcgcgacaccgatggtcagcctcgtgcggtgcccgttgctgcagatcagcgcacagtgactgtggaggatctcgagccgggcaaaaagtataaatttttactctacgggttgctgggcggaaagcggctcggcccagtgagtgcactgggcatgaccgcccccgaagaagacacccctgctccagagctggctcccgaggcacctgagcccccagaagagcccaggctcggtgttctcactgttactgataccacacccgacagcatgcgcctttcatggagcgtggcacaagggccattcgacagtttcgttgtgcagtatgaagatacgaacgggcagccccaggccctgctggtagacggcgaccagtctaagatcctgatttcagggttggaaccctctacaccataccgcttcctcctgtacgggcttcatgagggaaagaggctggggccgctgtccgccgagggaaccacaggacttgctccggccggacagacaagtgaggaaagcaggccccgcctctcacagctttcggtgacagatgtgacgacttccagcttgaggctgaattgggaagctcctccaggcgcatttgattcctttctgttgcgctttggcgtgccctcaccatccactttggagcctcaccccaggcctctgctgcaacgcgagctgatggtacctggcacccggcactctgctgtcctgcgggatttgagatcaggaacactgtattcacttactctctatgggctgcgcggaccacataaagctgattccatccaaggcacggccagaacattaagcccggtcctggaatcccccagagatttgcagttttccgaaataagggaaacttctgctaaggtaaactggatgccaccgccctctcgtgccgattcattcaaggtgtcctatcaacttgctgacggaggagaacctcagtccgtccaggttgatggccaggctcgaacgcagaaactccaggggctgattccaggagccaggtacgaggtgactgttgtctccgttcgtggatttgaagagtccgaaccgctcactggattcttgactactgtccccgatggccccacccaactcagggctctgaacctgactgaggggttcgcagttcttcactggaagccccctcagaatccagtcgatacctacgacattcaggtcacagcgccaggcgcacctccactgcaggccgagacccctgggtcagccgtggattatcctttacacgatctggttctgcacactaactatactgctacagtccgcggcttgaggggccctaatttgacaagccctgccagtatcaccttcaccacaggactggaggccccccgagatcttgaagccaaagaagtgactccaaggacggccctcttgacctggaccgaaccaccggtgcgccccgcaggttatctgcttagctttcacacaccaggaggacaaacccaggagatcctgctcccaggggggatcacttcacatcagctcctgggtctctttccttcaacatcttacaatgctaggttgcaggcgatgtggggacagtcactgctcccgccagtgtccacttcctttactacagggggcctaaggattccttttccccgggattgcggcgaagaaatgcagaacggggccggcgcatcccgcaccagcaccattttcttgaatggcaacagagagcgcccacttatagtgttctgcgatatggagacggacggcggcggatggctcgtcttccagaggaggatggacggccagacagacttttggcgtgactgggaagattatgcccacggatttggcaacatctccggcgagttctggctgggtaacgaggccctccactcccttactcaggccggagactacagcatgcgggttgaccttcgagctggcgacgaggccgttttcgctcagtatgatagctttcacgtcgattccgcagcggaatattataggctgcatctggaggggtatcacggaactgctggcgattcaatgagctatcacagtgggtccgtctttagcgcgcgcgatcgcgacccaaactcccttttaatcagttgcgcagtcagttataggggcgcctggtggtatagaaactgccattacgctaacctgaacggcctgtacggtagtacagtggatcaccaaggggtttcatggtatcactggaaaggttttgagttttctgtgcctttcaccgagatgaaactgagacccagaaatttccggagtccagctgggggcggctag

SEQ ID NO: 137528 - DNA, 27 bp, synthetic construct
  misc_feature 1..27: note = Description of Artificial Sequence: Synthetic coding sequence
  source 1..27: mol_type = other DNA
atgatgcctgcccaatatgctttgtag

SEQ ID NO: 137529 - DNA, 1905 bp, synthetic construct
  misc_feature 1..1905: note = Description of Artificial Sequence: Synthetic coding sequence
  source 1..1905: mol_type = other DNA
taatcgtcccctctcggtctcctaggcactacggatgaacctcctcctagcggtccctccacaacacagggcgcgcaggcaccacttctccagcagagaccccaagagctaggcgagctgagggtcctgggccgagatgagacggggaggctacgcgtggtgtggactgcgcagcccgacacattcgcctactttcagctgagaatgagagtgccagaagggccaggtgcccatgaggaggttcttcccggcgacgttcgccaggctctggtgcctccacctccacctgggacaccatatgaactatccttgcatggcgtccctcctggggggaaaccctcagatcctattatctatcagggcatcatggacaaggacgaagagaaacccgggaaaagctcaggaccccctaggctgggggagctgactgttacagatcggacatccgacagtctattactccgttggacagtacccgaaggggagtttgacagcttcgtgattcaatacaaggaccgggatggacagccccaagtggttcctgtggaggggccgcagcggtctgctgtgattaccagcttagatcccgggagaaagtacaaattcgttttgtatggatttgtcggcaagaaacgtcatgggcctcttgtcgcagaagctaaaatattaccccagagtgatccttctccaggaaccccccctcgattaggtaatctttgggtcactgatcctactccagattccctgcacctgagttggaccgtgcctgagggccagttcgatacattcatggtgcaatatagggacagagatggacgcccccaggttgtccccgtggaaggacctgagcggtctttcgtggtgagttcattagatccagaccataagtacagattcacgctatttggcattgctaacaagaaacgctacggccctctaactgcggacggcacaaccgccccagagagaaaagaggaacctccaaggccagagttcctggagcagcccctcctcggagagttgaccgtgacaggcgttacacctgatagcctgagactgtcttggactgtagcccaaggcccctttgactccttcatggtgcagtataaagacgcacaggggcagcctcaggctgtgcctgtggccggcgatgagaacgaggtgacagttcctggactggatcccgatagaaagtacaaaatgaacctgtatggcttgcgcggccgacagagagtcggacccgagtcagttgttgccaaaaccgccccacaggaggatgttgatgagaccccaagccccacggaactcgggaccgaagctccagagtctcctgaagaaccacttctgggggagctgacagtgactggtagcagtcccgactctcttagcctgttctggactgtcccccagggtagctttgattccttcaccgtgcagtacaaggatagagatggccgcccccgtgccgttcgggttggtgggaaggagagcgaggtgactgtgggcggtctggagcccggtcataagtataagatgcacctatatggactccatgagggacagcgagtgggtcctgtctctgccgtgggcgtcaccgccccacagcaggaagaaacccccccagctaccgaatctcctttggaacctagactgggggagctcacggtaactgacgtcacacccaatagcgtgggattgtcttggacagtgccggagggccagtttgatagcttcattgtccaatacaaagacaaagatggacagcctcaggttgtgccagtggcagccgaccagcgcgaggtgaccgtgtataaccttgaacccgaacgcaaatacaagatgaatatgtacggactccacgatgggcaacggatggggccactgtctgtggtcattgtcacctag

SEQ ID NO: 137530 - DNA, 27 bp, synthetic construct
  misc_feature 1..27: note = Description of Artificial Sequence: Synthetic coding sequence
  source 1..27: mol_type = other DNA
atgatgcctgcccagtacgccttgtag

SEQ ID NO: 137531 - DNA, 12669 bp, synthetic construct
  misc_feature 1..12669: note = Description of Artificial Sequence: Synthetic coding sequence
  source 1..12669: mol_type = other DNA
atgatgccagcccagtacgccctgaccagctctctggtgcttctggtactcctttcgaccgctcgcgcagggcctttctcaagtcgctccaatgtcacccttccggcccctcgcccacccccccagcccggcggacacacagtaggtgccggggtcgggtcaccatctagccaactatatgaacacacagtggaagggggagagaagcaggtcgtattcacccaccggataaatctgccgccttcaactggctgcggatgcccacctggcaccgagccacccgttttggccagcgaagtccaggctctgcgggttagactggagatcttggaagaactcgtcaaaggactgaaagagcagtgtacagggggctgctgtcctgcctctgcacaagctggcacaggccagactgacgttcgtactctgtgctcactgcacggcgttttcgatctgtcacgatgtacatgtagctgtgagcctgggtggggcggaccaacctgctctgatccaacagatgcggaaatccctccctcctccccaccttccgcctcagggagctgcccagacgactgtaacgatcaaggccggtgcgtgcgaggccgatgtgtgtgcttccctggctacactggaccatcatgcggttggcccagttgtccaggcgattgtcaggggcgtggaaggtgtgtccaaggcgtatgtgtttgtcgggccggcttcagcgggcctgactgttcgcagcgatcttgcccccgcgggtgtagccagaggggaaggtgtgaaggcggcagatgcgtatgtgatcctggttacaccggtgacgactgcggaatgcggtcttgtcctcgcggctgtagtcaacgtggccggtgcgagaacggacgatgcgtgtgtaatcccggttacacaggagaggactgtggggttaggtcttgcccacgggggtgcagtcagcggggacggtgcaaggacggtcggtgtgtgtgcgaccctggctatactggcgaagactgcggcacccgttcctgtccctgggattgtggcgaaggggggaggtgcgtggatggacggtgcgtctgttggcccggctataccggcgaagattgctccacgcgaacttgtccacgtgattgtagggggaggggccgctgcgaggacggcgagtgcatttgtgatacaggatactccggcgacgattgtggagtgcgcagctgtcctggagactgcaaccaacgaggtagatgcgaggatggccgatgtgtctgttggcctggatacacagggacggattgtggatcccgggcctgtcccagagactgtcgggggcgtggtagatgtgaaaacggcgtatgtgtgtgcaacgcaggttacagcggcgaagactgcggcgtcaggtcctgtccgggtgattgccgggggcgaggccggtgtgaatcaggcagatgcatgtgttggcccgggtatacaggccgagattgtggaacccgcgcttgccccggagattgccgtgggaggggtcgctgcgtggacggacggtgcgtttgcaaccccggcttcactggcgaagattgcggttcaaggcgttgtcccggcgactgccgggggcacggactgtgcgaggatggagtctgtgtgtgtgatgctggctacagtggcgaagattgcagtactcgaagttgccctggcggttgtcgtggacgagggcagtgcctcgacggccggtgtgtttgcgaggatggctattccggggaggattgtggtgtgagacaatgtcccaatgactgctctcaacatggagtgtgccaggacggggtttgtatctgctgggaaggctatgtctcggaggattgttcaatccggacttgcccatctaattgtcatggtagggggcgctgcgaagagggtcggtgtttgtgtgacccagggtacactggccctacctgcgccacccgcatgtgccccgccgactgccggggacggggtcggtgtgtacagggtgtgtgtctttgtcacgtaggttatggcggtgaggattgtggacaagaggagccccccgcctctgcttgtcccggaggatgcgggccccgggagctgtgtcgggccggtcagtgcgtgtgcgtagagggtttccggggtccagactgtgcgatacagacctgtcctggcgattgccgcgggcgaggagaatgccacgatgggtcatgtgtatgcaaagacggttacgcaggcgaggactgtggcgaagaagtccccaccatagaagggatgcgcatgcatctgcttgaggagaccactgttcgaactgagtggacacctgctcccggtccagttgacgcgtatgaaatccagtttatccctacaaccgaaggcgcctcaccgccattcacagcccgcgttccctcctccgcctcagcctacgatcaaagagggctggcccctggccaagaatatcaggtcactgtccgggctttgagaggaacctcatgggggctccctgcttcaaagacaatcaccaccatgattgacggccctcaggatctccgcgtagtggccgtgaccccaactacgctggagctcggatggttgcgcccacaagccgaggtggataggttcgtcgtgtcatacgtgagcgctgggaaccagcgggtgaggttggaagttcctccagaggctgacggcaccctcctcactgatctcatgccaggggtcgaatatgtggtgactgtgacagccgaacgcggccgcgccgtgagttatcctgcttcagtccgagccaacactggctcgtcccctctcggtcttctgggcaccacagacgaaccccccccttctgggccaagtaccactcagggagctcaggcccctctcctgcagcaacgaccgcaggagctgggggagctcagagtgcttggaagggacgaaactggccgtttgcgagtggtctggactgcccaacccgacacctttgcctacttccagctccgcatgcgggtgccggagggcccaggtgctcatgaggaggtgttgccaggtgatgtgcgccaggcactggtccctcctccaccaccaggaaccccatatgagctgagtctgcatggcgtgccccctggcggcaaacctagtgacccgataatctaccagggtataatggacaaggatgaagaaaaacctggaaagtcatctggccctcccaggctaggcgagcttactgttaccgataggacgagcgacagtctgctgcttagatggacagttcccgagggcgaattcgactctttcgttatccaatacaaagaccgagatggacaaccccaagtggttcctgttgagggaccccagcggagcgccgtgatcaccagcctcgatccgggccggaaatacaaatttgtactgtacgggttcgtgggtaaaaagcgacatggccccttagttgccgaggcaaaaattctgccccagtctgacccatctcctggtactcctcccagacttggtaacctatgggttactgatcccacgcctgatagtctgcacctatcatggactgtgcctgagggtcagtttgataccttcatggtacagtatcgcgatcgagacggccgcccgcaggtggtgccagtggagggccccgagcgcagcttcgtcgttagtagtcttgatcctgatcataaataccgctttacactttttggtattgctaataaaaaacgatacgggccactgacggccgacggaaccacggcccccgaacgtaaggaagaaccccctcatcctgaatttctggaacagcctctcctcggagagttaacagttaccggggtgacgcccgattccctgcgcctgtcatggacagtagctcaagggccattcgactcattcatggtgcagtataaagatgctcaaggacagccgcaggctgtgccagtcgccggggacgagaacgaggtaaccgtgccaggactcgaccccgaccggaaatataaaatgaatctgtacggcctaaggggccgccagagggtggggccagagtctgttgtggctaaaacagcccctcaggaggacgtggatgaaactcctagccccaccgagctgggcactgaagcgcccgaatcacccgaagagcctctcctcggagaactaacggtcacaggttcgagccctgacagtctgtccttattctggaccgtgccccaggggagtttcgatagtttcactgtacagtacaaggaccgtgatggccggccacgggccgtgagagtgggaggaaaagagtcggaagtgaccgtgggcggccttgagccgggccacaagtataagatgcatctgtatgggcttcatgagggccagcgcgttggccccgtgtctgcagtgggcgttaccgctcctcagcaggaggagacgccccctgcgaccgaatctcccctcgagccccgcttgggagagttgacagtgaccgacgtcactcctaatagcgtcgggctctcctggacagttcctgaaggacagtttgatagtttcattgtgcaatacaaggacaaggatgggcagccccaagttgtacccgtagctgctgatcaaagagaggttacagtttataatctggagccagagcggaagtacaaaatgaacatgtacgggctccacgacggccagcgaatgggccccttgagcgtggtgatcgtgacggccccactgcctcccgcacccgcaaccgaagcaagtaagccaccgctcgaaccaagactgggcgagctgacggtgaccgatatcacgcctgactccgtcggattgtcatggaccgtcccagagggggagttcgactcctttgtagtccagtacaaggacagggacggccagcctcaggtggtgccagtggcagcagatcagcgcgaggtcactatccctgatctggagccatcccggaagtacaaattcctgctgtttggcattcaagatggaaagagacgctcacccgtgtctgtcgaggcaaaaacagtagcaaggggtgacgcgtcgcctggtgcgcctcctaggctgggagagctgtgggtgaccgatccaacccctgattccctgcggctctcctggactgtacctgaggggcaattcgactctttcgtggtccagtttaaagacaaagatggcccacaagtcgttcctgtggaaggtcatgaaaggagcgtgactgtgacaccactagacgcagggagaaagtatcgcttcctgctctatggacttcttggaaagaagcggcacggcccactgactgcggacgggactaccgaagccagatcagctatggatgacacggggaccaagcgcccacctaagcccagactcggagaagaactgcaggttacaacagtaacacagaactctgttggacttagctggacggttcctgaaggccagtttgatagtttcgtggttcaatataaggaccgagacggacagccacaggtggtcccagtggaaggatccctccgagaagtatccgtcccgggccttgatccagcacatcgatataaattgttgctctatggcttacaccatggcaagagagtgggccccatcagcgccgtggctattaccgcaggcagggaagagaccgagaccgagacaacggcacctaccccccctgcaccggaacctcatctgggcgagctgactgtggaggaggccaccagtcacacgctccacttatcttggatggtaacagagggcgagttcgactcctttgaaatacagtacaccgatcgcgacgggcagctccaaatggtgagaattggaggggataggaacgacattactttaagcgggctcgaatctgatcataggtaccttgtgactctctatggattttccgatggcaagcacgtggggccggtgcacgtggaggctcttactgtgccagaagaggaaaagcctagcgagccccccacagccactcccgaacctcctatcaaacctcggctaggagagctaacagtgacagacgccactcccgattctctgtccctcagctggactgtcccggaggggcagtttgaccacttcctggtccagtacaggaacggcgatgggcagccgaaggctgttcgggtccccggccatgaagagggggttaccatttcggggctggagcctgatcacaagtacaagatgaacttatatggcttccacgggggtcagcgcatgggccctgtgtcagttgtcggagtcacggctgccgaggaggaaactccaagcccaacagagccatccatggaggcccccgagcccgccgaagagccgttgctcggcgagctgacagtgaccggcagcagccccgactccctctccttgagctggacagttccccagggtaggtttgatagctttaccgttcaatataaggaccgagatgggaggccccaagttgtaagggttggaggtgaagagtcagaagttaccgtcggcggtctggagccagggcgcaaatacaagatgcatctgtacggtcttcatgagggacgcagggtggggccagtgagtgccgtgggggtgaccgcccccgaggaggaatcccctgatgcacccctcgcaaaacttagactgggccagatgaccgtcagagatattactagcgactcgttgagtctttcgtggacggtcccagaggggcagttcgatcacttcctcgtgcagttcaagaatggcgacggacagcctaaagccgtgcgtgttcctggccatgaggacggagttacaatttccgggctggagcctgaccataaatacaaaatgaatttgtatggctttcatgggggacagcgggtggggccggtcagcgcggtcggtcttacagccccaggaaaggacgaggagatggcccctgcctccacagaaccccccacacccgagcccccgattaagccaaggctggaagaacttaccgtgacagatgcaacgcccgattcgctcagcctttcatggaccgtgcccgaagggcagtttgaccatttcctggtgcagtacaagaacggagacggccagccaaaagcaacacgagtgcctggacatgaggatagagtgacgattagtggactagagccggacaacaaatacaagatgaacctgtacggatttcacggcggccaacgggtgggtcccgtgagcgcaattggagttactgcggccgaagaagagacaccaagtcctaccgaaccttcaatggaggccccagaaccccccgaagagccacttctgggggagctgacagtcaccggatcttctccagacagtctgagcctgagttggaccgtcccacaagggcggttcgacagttttacagtgcagtataaggatagagatggccgcccccaggtggtgagagtcggtggtgaggagagtgaagttacggtggggggacttgagcctggccggaagtacaaaatgcacctatacgggctccacgagggtcgaagggttggtcctgttagcacggtgggtgtgactgctcctcaggaggacgtagatgaaactccctctcctactgagcctggaactgaagctccagagcccccagaagaacctctcttaggggaactgacagtaacaggaagctctccggacagtctgtcactgagctggaccgtcccccaaggtcgtttcgattctttcacagtgcaatataaagatagagatggtcgcccacaagcagtccgggtgggcgggcaagaaagtaaggtgaccgtgagaggtttagagccaggtaggaagtacaaaatgcacctttacggtctccatgaggggaggaggttggggccggtgtcggctgtaggagtgacagaagacgaggccgaaaccacccaggctgtgcccaccatgacacccgaacccccaatcaagcccagattgggcgaattgactatgactgatgctactcccgacagcctgtcgttatcatggaccgtacccgagggacagttcgatcattttctcgtccagtaccgcaacggtgatggacaacctaaggcggtcagggtgcctggccatgaggatggtgtgaccatttcagggttagaaccagaccataaatataaaatgaatctgtacggctttcacggcggtcagcgcgtgggccccatttctgtcatcggcgtgacggcagctgaggaagaaaccccttctccaacagaattatccactgaagcaccagaaccgcctgaagagcctctcttgggagaacttaccgtgacaggcagtagcccggattcattgagtctttcatggaccattcctcaaggccactttgactccttcactgttcagtacaaagacagggacggccggcctcaggtcatgagggtgcgcggagaggaatcggaagttaccgttgggggcctggagccgggacgaaagtacaaaatgcatctatacggcctgcacgaagggaggcgggtggggccagtctcgaccgttggggtgaccgttcccactactacccccgaaccacctaacaagcccagactcggggagctgaccgtgacagatgccacacccgattctttaagcctctcgtggatggtcccggaggggcagtttgaccattttcttgtgcaatacagaaacggggatggccaaccaaaggtggtgcgtgtgcccggccacgaagatggagtcaccatttccggcctcgagccggaccataagtacaagatgaatctgtacgggtttcacggaggacagagagtggggccgattagtgtgatcggggtgaccgctgccgaagaggagacacccgcccccaccgagcccagcacagaagcacccgagccccccgaagagcccctgctcggcgagttgacagttacagggtcgtcccctgattctctgtccctttcgtggaccatccctcagggaagatttgatagctttaccgtgcagtacaaagatagagatggtaggccgcaggtcgtccgcgtgcggggtgaagagtcagaggtgactgtgggcgggctggagcccggctgcaagtataagatgcacctgtacggtctgcacgaggggcagcgggtcggaccagtttctgctgtcggggtcaccgtaccgaccatgacccctgagccccctattaaaccccgcctgggagaattgactgtgactgatgcaactccggacagcctgagtctgagctggatggtccccgaaggacaattcgatcatttcttagtccagtatcgcaacggcgatggacagcctaaggctgttagagtgcccgggcacgaggacggcgtcaccataagcggcctcgaacccgatcataagtataagatgaacctgtacggttttcatggaggacagagggttggacccgtcagcgcgatcggcgtcacagaggaggagacaccctctcctacggagccaagtactgaggccccggaagccccagaggaacccctgttgggcgagctcacagttaccggaagttccccagatagtctatctctgtcttggaccattccccagggccgctttgacagtttcacagtgcagtacaaggatagggacggccagccccaggttgtaagagttagaggtgaggaatccgaagtaacagtagggggccttgagcccggcagaaagtataagatgcatctctatggcctgcatgaaggacaaagggtgggcccggtttccacagtgggaattactgctccgctgccaaccccactcccagtggagcccagactgggcgagctggctgtggcggctgtgacctccgacagtgtggggctctcctggaccgttgcccagggcccttttgactcatttctggtacagtatcgggacgcccaagggcaaccacaggccgtgcctgtttctggagacctgagggcggtcgccgttagtgggttggaccccgcaaggaaatataaattcttgctgttcgggctgcagaatggaaagagacacggacctgttcccgtggaggctcggaccgcccccgataccaagcctagtccacggctgggggagctcacagtaactgatgccacgcctgacagcgtggggctgtcctggactgttccagaaggagaatttgattcgtttgttgtacagtataaagataaggacgggagactacaggtagtgcccgttgctgctaatcagagagaagtgacagtgcagggtctggaacctagccgcaagtaccgctttttgttgtacggattaagtggtcggaaacgcctcgggccgatctctgcggactccactactgcccccttggaaaaagagctcccacctcacctcggtgagctgactgtggcagaggagacatcctcctccctgcggctatcttggaccgtggctcaagggcccttcgattcttttgtcgttcaatacagagatacggatggccaacctcgggctgtgccagtggccgccgaccagcggacggtcacagtcgaagacctagagcccggtaagaagtacaaatttcttctgtatggactgctggggggaaaacgtcttggacctgttagtgcactaggcatgaccgcccccgaggaagatacccccgctcccgaacttgcaccggaggcccccgagcctccagaggagcccaggttaggagtgctaactgtgactgatactactcccgactcgatgcgcctctcatggtcagtcgcgcaagggccctttgattctttcgtggttcagtacgaggacacgaatggacagcctcaggcgctgcttgttgatggggaccagtccaagatcttaataagtggtttggagccttccactccttacagatttctgctatacggacttcacgaaggaaagagactgggccctcttagtgccgaggggaccaccggactggcccctgccgggcagacgtcagaagaatctaggccaaggttgtcccagctttctgtgacagacgtcacaacgtccagtctccggctaaattgggaggctcccccgggagcgtttgacagctttctcttgaggttcggcgttccttcaccttctactcttgagcctcatcctcgccccttgcttcagagagaactgatggttccagggactcggcacagtgccgtactgcgggatctcaggtctgggacgctatactcgctgacgctgtacggccttagaggtcctcacaaggccgattccattcaaggcaccgctcgcaccctgagccccgttctggagagccctagggatctgcagttcagtgaaattagggaaactagcgcaaaggtgaattggatgcctccaccatccagggcagattcatttaaagtgtcctaccaactggccgatggcggagagccccaatccgtgcaagtcgacggccaggcccggacacagaaattacaaggacttatcccaggcgcacgatatgaagtaacagttgtgtccgtgcgggggtttgaagagtctgaaccccttaccgggttcctgactacggtcccagacggccccacacagctgcgggccctgaatctgaccgaggggttcgccgtgttacattggaaaccccctcagaatcctgttgatacctatgacatccaggtcactgctcccggagccccaccactgcaggcggaaactcccgggagtgccgtggactacccgctgcatgacctggtgctacatacaaactatacggccacagtgcgaggactgagggggccaaatttaacctcaccagctagtatcacattcactactggtctggaggcgccccgtgatctggaagcaaaagaagtcaccccaagaacggccctgcttacctggactgaaccccccgtgcgaccggccggctacctgcttagcttccatacgccggggggccaaacacaagagatactgctcccaggcgggatcacgtcccatcaactactgggtctttttccttccacctcatataatgctagactgcaggcaacatggggccaaagcttgctcccccctgtcagtacctcttttacgactggaggtctgcgtatccctttccctcgagactgtggcgaagaaatgcagaacggcgccggcgctagccggacaagcactatatttttaaacgggaaccgggagcgcccattgaacgtgttctgtgatatggaaactgacggaggcggatggctggtatttcaacgacgtatggacggacagacagatttttggcgcgactgggaagactatgcccacggctttggcaacatcagtggagagttttggctcggaaacgaagctctacactcactgacgcaggccggtgactattcgatgcgtgtcgaccttcgcgcaggcgatgaggctgtattcgcgcagtacgattcgtttcatgtggactccgcagctgagtactaccgcctccatcttgagggatatcatgggaccgcgggcgatagtatgagttaccatagtggatctgttttcagcgcaagggaccgggacccaaattccctcctgatcagctgtgccgtgagctataggggcgcatggtggtaccggaactgtcactacgctaacctgaatggactttacggaagtacagtggatcaccagggcgtgtcatggtaccactggaaggggttcgaattctctgtgccattcacagaaatgaaactgcgtccgcgcaacttccggtcccccgccggggggggttag

SEQ ID NO: 137532 - DNA, 27 bp, synthetic construct
  misc_feature 1..27: note = Description of Artificial Sequence: Synthetic coding sequence
  source 1..27: mol_type = other DNA
atgatgccagctcagtacgccttatag

SEQ ID NO: 137533 - DNA, 6843 bp, synthetic construct
  misc_feature 1..6843: note = Description of Artificial Sequence: Synthetic coding sequence
  source 1..6843: mol_type = other DNA
atgatgccagcccagtacgctctcacaagcagcctagtactgctggtcctcctgagtacggcccgggccggaccttttagtagtaggagcaacgttactctgccagctccacgccctcctcctcaacccggcggccacacggtgggagccggagtcggatctccctctagtcagctgtatgagcacaccgttgagggaggtgagaagcaagtcgtcttcactcaccgaatcaatctccccccaagtaccggttgcgggtgccctccaggcacagagccgcccgtgctagcttctgaagttcaggcactgcgggtccgcctagagattttggaagaattggtgaaagggctgaaagaacaatgcactgggggctgttgccccgcttcagcacaagccggtactggtcagacagacgtaaggaccctttgcagtttacatggagtgtttgatttgtccagatgcacgtgcagctgcgagcctgggtggggcggcccaacatgcagcgacccaaccgatgctgaaatccccccatcttccccacccagtgcgagcggcagctgtcctgatgattgtaacgaccaagggcggtgcgttagagggagatgtgtgtgttttccaggatataccggaccatcctgcggctggccctcctgcccaggcgattgtcaggggcgagggagatgcgtgcagggcgtgtgtgtctgccgcgcaggcttctccggtccagactgcagccagaggtcctgtccaagaggctgttcccagagaggacgatgtgagggagggagatgcgtgtgtgaccctggttacaccggtgatgattgtggaatgagatcatgtcctcgaggctgtagccagaggggccgttgtgagaacggcagatgcgtgtgcaacccgggctacacaggagaggattgcggggtacggtcctgcccaagaggatgcagtcaaagaggacggtgtaaggacggcagatgtgtctgtgatcctggatatacaggtgaagattgcggtacacgcagctgcccttgggactgtggagaaggcggtcgctgtgtggatggtaggtgcgtatgctggccaggctacaccggtgaagactgctctaccaggacatgcccacgggattgccgagggcgggggcggtgcgaagatggagagtgcatctgcgacaccggatatagcggagacgactgtggagttaggagctgccctggggattgtaatcaacgtgggcgttgcgaggacgggaggtgtgtgtgttggcccgggtacaccggtacagactgcgggtcccgtgcttgtccgagggattgccggggccggggcaggtgtgagaatggggtgtgtgtctgtaacgctggctactctggggaggattgcggcgtccgctcttgccccggcgattgccgcggacgcgggcgatgtgagagtggaagatgtatgtgttggcccggctacacaggaagggactgtggcaccagagcatgccccggagactgtcgcgggcgtgggcgctgcgtggatggtcgctgcgtttgtaatccagggtttacaggtgaagattgcgggtcgcggaggtgccctggcgactgccgcggccacggactctgtgaggatggcgtgtgtgtgtgtgacgcagggtacagcggcgaagactgttccacccgctcctgtccggggggctgccgggggagaggacagtgtctggacgggcggtgtgtttgtgaggacggctactctggtgaggattgtggagtccggcaatgtcctaacgactgctctcagcacggcgtgtgtcaagacggcgtttgtatctgctgggagggttatgtgtcagaagactgttccatccggacctgcccaagtaattgccacggccgcggtagatgtgaggaaggccgatgcttgtgtgatccaggctataccggtcctacgtgcgccacacgtatgtgccccgcagactgcagaggaagaggccgctgtgtgcagggcgtttgtctgtgccacgtcgggtatgggggggaagattgtggccaggaggagccccccgcgagtgcctgcccaggtgggtgcgggccgcgcgaactatgccgcgcaggacagtgcgtctgcgtggaaggtttcaggggaccagactgtgccatacagacctgtcccggtgactgccgagggcgaggtgagtgccacgatggatcttgtgtatgtaaggacggctacgcaggggaggattgtggcgaggaggtgcctactatcgaaggaatgaggatgcaccttctcgaagagactactgtccggactgagtggacccccgcaccgggccctgttgacgcctacgaaatccagttcatccctaccacagaaggcgcctctcccccatttaccgccagggttccatcatcagcctccgcatacgatcagcggggtctggctcctggacaggagtaccaagtaactgtgagagccttgcgggggacctcatgggggctgccggcaagtaaaacaatcaccacaatgatagatggccctcaggatcttcgagttgtggctgtcacccctacgaccctggagctgggctggttaagaccacaggctgaggttgacagattcgtggtgtcatacgtgagcgcgggtaatcagcgagtgcgtctggaagttcccccagaagccgacggcacactgctgaccgatctgatgccaggcgtggagtatgtagtgacggtcaccgcggaacgcggacgggcggtcagttatccggccagcgtgagggccaacacaggcagcagtcctctgggcctgctcggaaccaccgacgaaccccctccctctggcccttctacaacacaaggcgcccaggcccccctgctgcagcagcggccgcaggagcttggggaactgagagtactagggcgcgacgagaccggccgtctgagagtggtatggaccgcccagcccgataccttcgcctattttcagctgagaatgcgtgtgccagaagggccaggggctcatgaggaagtgctccctggagacgtgaggcaggccctcgtgccaccccccccacccggcaccccctacgaattgtccctccatggcgtccctccagggggcaagccttcggatcccatcatatatcagggcattatggataaagatgaagaaaaacctggaaagagctctggccctccacgcctgggggagctgaccgtgaccgatcggacctcagactcattgctgcttcgctggacggtgcccgaaggagaattcgatagctttgtcatacagtataaagacagagatggacagcctcaggtcgtgcccgtcgaaggtccccaacgaagtgcagtcattacaagcctggacccaggccggaaatataagtttgtgctgtatgggttcgtgggcaagaagcgtcatggacccttggtcgccgaggcgaagatcctgcctcagtccgatccgtctcctgggacaccaccacatctcgggaatctgtgggtgaccgatcctacaccagacagcttacatctgagttggacagtacctgaggggcaatttgacacattcatggttcaatacagagatagagatggcaggccccaggtggtgccagtggaaggcccagaacgctcctttgtggtttcctcactggacccagatcataaatataggttcacgctgttcggcatcgctaacaaaaagaggtatggccccctgaccgccgacggaactacagcacctgagcgaaaggaagagccccctcgccctgaatttctcgagcagcctctgcttggtgagctgactgtcacaggcgtgactccagactccctcagactgagttggactgttgcacaaggacccttcgactcctttatggtacagtacaaggatgctcagggccagcctcaggcagtgccggttgcgggggacgaaaacgaagtaaccgttccagggctcgaccccgaccgaaagtataaaatgaatctctacggtttacgaggcaggcagagggtcggacccgagtccgtggtagccaaaaccgctcctcaagaagacgtggatgagactccctctcccaccgaattgggaacggaggcacccgagtccccagaagagcctctcctgggtgaactgactgtgaccggatcctcccctgattccctgtctcttttctggaccgtgccgcaggggtcgttcgattctttcaccgtccagtacaaggaccgggacggtaggccacgtgcagttcgggttggcggcaaggaatccgaggtgaccgttggaggacttgaaccaggccacaaatataaaatgcatctctacggactgcacgaaggccagcgggttggacctgtcagtgcagtcggcgtgacggcccctcagcaggaagagactccacctgctacggaaagccccctggagcctcgcctcggtgagctaactgtaacagacgtaacccccaatagtgtcggattatcgtggactgtccccgaaggccagttcgatagctttattgttcagtacaaggataaggacggccaaccacaggttgtgccagtcgccgccgaccagagggaagtcactgtctataatttagagcccgagcggaagtacaaaatgaatatgtacgggctgcatgatggacagcgcatgggtccgctgtccgtagtgattgtgacagcccctctcccccctgccccggcgacagaagctagcaaaccaccgctggaacctaggctgggagaactgaccgtcacggatataacccccgacagcgttggattaagttggaccgttcctgaaggggagttcgacagctttgttgtccaatataaggaccgggacggtcaaccccaggtagttcctgttgctgccgatcagcgtgaagtaaccatcccagacttagagccctcccgaaagtacaaattcctgctgtttggaatccaagacggcaagcgccgttcgcctgtgtcagtagaggcgaaaacagtggcgaggggagatgcctctcccggagctcctcctagacttggtgagctgtgggtgacggaccctaccccagacagcctgaggctgagctggactgttcccgagggacagttcgactcattcgtggtgcagtttaaggacaaggacggtccccaggtggtccccgtagaggggcacgagcggtctgttacggttacacctcttgacgcaggtcgcaaatacagatttctactgtatggtctactcggaaagaaacgccacggaccgctgacagccgatgggacgacagaggctcgatcagctatggatgatactgggactaagcgccccccaaagcctaggctcggagaagaactccaagttacaaccgtcacccaaaattctgtgggcttgtcctggaccgtacctgaggggcagttcgactcattcgtggttcagtacaaggatcgcgatggccagccacaggtcgtccctgtggagggaagtctccgggaagtgtccgtgccagggttggaccccgctcatagatataagttgttgctgtacggactccaccacggaaagagggtggggccaatcagtgcagtggcaatcacagctggtagagaagaaacagagacagagaccaccgcccctacgcctccagcaccggagccacatctcggtgagttgacagtggaagaggctaccagtcataccctccatctgtcttggatggttactgaaggcgagttcgattcattcgaaattcagtacacggaccgggacggccaactgcagatggtcaggattggcggggaccgcaacgacattaccctgagcggcttagaatcggaccatagatacttggtgactctgtacggattctcagacggcaaacacgtgggccccgtgcacgtcgaggccctcacagtaccggaggaagagaagccctccgaacctcctactgctaccccagaaccgcctataaagccaaggctcggagaactgactgttacagacgccacgcctgattcactgtctctgtcttggactgtgccagagggccagttcgatcacttcctagtgcagtaccggaatggcgacgggcagccgaaggctgttcgggtgcctgggcacgaagagggagtaacaatttcagggctggaaccagatcacaagtacaagatgaatctctacggttttcacggaggtcagagaatgggtccagtgtcggtcgtgggcgttaccgcagctgaagaggagacaccaagccctacggagccaagtatggaggccccggaacctgccgaggagccacttctaggcgagctgacagtcactggctccagtccggactccctcagcctgagctggacagttcctcagggacgttttgattccttcacagtacagtacaaggatagggacgggagacctcaggtcgtccgcgttggaggcgaggagagcgaagttaccgtggggggcctcgagccgggtcgcaagtataagatgcacctgtacggcctgcacgaggggcggcgcgttggacctgtaagtgctgtgggtgtgaccgcacccgaagaggaatctcccgacgcccccttggcgaaacttaggctcggtcaaatgacggtgcgagacatcacatctgattcattgagcctgagttggactgtgcctgagggccaattcgatcactttttagtccagttcaagaatggcgatggacaacccaaagcggtgagggtgcccggacacgaggatggagtcaccattagcgggttggaacctgatcataaatacaagatgaatctttatggcttccatggcggtcagagagttggacctgtttcagcagtaggtttaacgtag

SEQ ID NO: 137534 - DNA, 2022 bp, synthetic construct
  misc_feature 1..2022: note = Description of Artificial Sequence: Synthetic coding sequence
  source 1..2022: mol_type = other DNA
atgaggttgagttggtctgtcgctcagggaccttttgactcctttgtggtgcagtacgaagatacgaatggacaacctcaggcattgctggtggacggtgaccagtctaaaattttgatatccggactggaaccgagcacgccctataggttcttattgtacgggctgcacgaagggaaacgcctaggaccactgtccgccgagggcaccacaggactggctcccgccggccagaccagcgaagagagtaggcctcggctgagccagctctccgtgaccgacgtgacaaccagcagcctgcgattaaactgggaggctcctcccggggctttcgattcattcttgcttcgtttcggagtgccaagtccttcaaccctcgaaccacacccccggcctctgctgcagagggaactgatggtgccaggcactaggcatagcgcagtcttgcgagatctccgcagtgggaccttgtacagcctgaccctctatggccttagaggtccccacaaggctgacagtattcagggtacagccaggactctctcccctgtgcttgaaagccccagggatctgcagttctctgaaatcagagagacatcagctaaagtaaactggatgcctcccccctctagggccgattccttcaaagtttcataccagctcgccgacgggggcgagcctcagagcgttcaggtggacgggcaagcacgtacacagaagctacagggcctcatacctggcgcacgctacgaggtcaccgtggttagcgtgcgtggcttcgaggaaagcgaacccctgacaggattcctcacaaccgttcccgatggacccacgcagctaagagccctcaatctcaccgagggatttgcagttttgcactggaaacctccacagaacccagtcgacacatacgatatccaggtgacagcccccggagcccctccccttcaagcagaaaccccaggatcagctgtagattatccattgcacgatcttgtgctccacaccaattatactgcaactgtgaggggcctaaggggtcccaacctgacctccccggcttcaataacatttacgacgggtctggaagcccctagagacctcgaggctaaggaggttaccccacgcaccgccctgctgacttggacagaaccaccggtgcggccagctggctacctgttgtcattccacacgcccggcggtcagacccaggagatcctgctcccaggcggcatcactagtcatcagctccttggactctttccttctacgagctataatgcgaggttgcaggccatgtggggccagagtctgttacctcccgtgtccacttccttcaccaccggcggactgagaattccatttccccgggactgtggggaggagatgcagaacggagcgggcgcctctcgaaccagcacaatattcttgaatgggaacagagagcggccgctcatcgtgttctgcgacatggaaaccgacggcggcgggtggcttgtctttcagagacggatggacggccagacagacttctggcgggactgggaggattacgctcatgggtttggcaacatcagcggcgaattctggctcgggaacgaggcgctccatagcctgactcaggccggggattatagcatgagggtggatcttcgcgccggtgacgaggccgtgtttgcccaatacgacagcttccatgtggattccgctgctgaatactacagactacatcttgaagggtaccacggtaccgccggcgattccatgagttaccatagcggaagtgtcttttcagcccgggatcgggatcccaattcactccttatctcctgcgcagtttcttacaggggggcttggtggtacagaaactgccactacgctaacctcaacggactttacggctccaccgtggatcaccagggagtatcttggtaccattggaaaggcttcgagtttagcgtcccttttaccgagatgaagctacggccgaggaacttccgcagccctgctggggggggctag

SEQ ID NO: 137535 - DNA, 654 bp, synthetic construct
  misc_feature 1..654: note = Description of Artificial Sequence: Synthetic coding sequence
  source 1..654: mol_type = other DNA
gcccccggaaaggacgaagaaatggcacccgccagcacagagccccctacccctgagccacccattaaaccaaggctagaggagctgactgtgaccgacgccacaccggacagtctatccctatcatggacggtcccagaagggcagtttgaccatttcttagttcaatacaagaacggagacggccagccaaaggctacgcgggtccccgggcacgaagacagagtcacaatttccggactcgagccagacaataagtacaagatgaacctctacggtttccacggaggccagcgagtcgggccagtatcagctattggcgttacggctgcagaggaagaaaccccctcccctactgaaccaagtatggaagccccagaaccacctgaagagccgttgctgggggagttaactgtcaccggatccagccctgactctctgtctctctcttggactgtaccccagggccggttcgactcattcactgtccaatacaaagaccgtgacggccgacctcaggttgtccgagtcggcggcgaagaatccgaggtcaccgttggcggcttggaacctggtcggaaatacaaaatgcatctctacggactgcatgagggccgccgcgtgggccccgtcagcaccgtgggagtgacatag

SEQ ID NO: 137536 - DNA, 12729 bp, synthetic construct
  misc_feature 1..12729: note = Description of Artificial Sequence: Synthetic coding sequence
  source 1..12729: mol_type = other DNA
atgatgcccgcgcaatatgcccttacatcctccctggtattgctggttctcctgagcactgcacgggccggccccttctcaagtcgcagtaatgttactttgcccgctcctagacctcccccccagccaggcggccataccgtgggagccggcgtaggatcacctagtagccaactctacgagcacaccgtggagggaggtgagaaacaggtggtctttacccatcgaattaacttgcctccatccaccgggtgcggatgtccacctggtacggaacctccagtgttagcaagtgaagtgcaagcactcagagtgcggctggaaatactggaagaactggtgaagggactgaaagagcagtgcacaggaggatgctgtcccgcgagcgcgcaggctggcaccggacagaccgatgttcgaactctctgcagcttgcatggagtttttgacctgagccggtgcacatgctcctgtgagcccggctggggcgggcctacatgctccgaccctaccgacgctgagattccgccttctagccctccaagtgcctcaggctcctgtcccgacgattgtaacgaccagggcagatgcgttagaggacgctgcgtgtgcttccctggctatactggaccctcttgcggctggccatcctgtcccggagattgccaggggcgtggacgctgcgtgcagggcgtctgtgtctgccgcgctggtttctccggtcctgactgttcacagcggtcctgtccccgaggctgctctcagagaggaaggtgtgagggtgggagatgcgtatgtgatccaggatacacaggagacgactgtggcatgcggtcatgtccaagaggttgttcccagcgaggtcggtgtgaaaatggccggtgtgtttgcaaccccggctacactggggaagactgtggtgtgcggtcgtgcccccggggctgcagccagaggggtagatgcaaagacgggcggtgtgtttgcgacccgggttatactggcgaggattgcggcacgcgtagttgtccatgggactgtggcgaaggcggaagatgcgtggacggcagatgtgtatgctggccagggtataccggcgaagactgttccactcgcacctgccccagagattgcaggggccggggccgctgtgaagatggcgaatgtatttgtgacaccgggtactccggagacgattgcggcgtgcgctcctgcccgggagattgcaaccagcgaggcagatgtgaagatggtcggtgtgtttgttggcccggatacactggcacagattgtggatccagggcatgtcctcgagactgtcgcgggcgggggcgctgcgaaaacggtgtgtgcgtctgcaatgccggatacagtggtgaggactgcggagtgcggtcttgcccaggagactgtagggggagaggtcgctgtgaatcaggacggtgtatgtgttggcccggctatacaggtcgtgactgtggcaccagagcctgtcccggtgactgccgcgggagagggaggtgtgtcgatggaaggtgtgtctgcaatcccggcttcaccggcgaggactgtggctcccgaaggtgccccggtgactgtcgcggtcacggcctctgtgaggatggggtctgtgtgtgtgacgcaggatattccggggaagattgttcgacaagatcctgtccgggggggtgtcggggccgaggtcagtgtctggacggtcgctgcgtgtgcgaggatggctattcaggcgaagattgcggtgtgcgacagtgtcccaacgattgttctcaacacggtgtgtgtcaggatggcgtctgcatctgttgggaaggatatgtgagcgaggactgctccatcagaacttgcccatctaattgccatggaagaggaagatgtgaggagggaaggtgtctatgtgatcctggctataccggccctacctgtgcaactcgtatgtgtccagcggattgcagaggtcgtggacgctgtgtccaaggagtgtgcctatgtcacgtgggctatgggggtgaggactgcggtcaggaggagcccccagccagcgcatgtcccggagggtgcggcccccgagagttatgtcgggccggccagtgcgtgtgtgtggaaggctttcgcgggcccgactgcgccatccagacctgccctggcgattgtcggggccggggtgagtgtcatgacggtagttgcgtctgcaaagatggatatgcgggtgaagattgtggcgaggaggtgccaacaatagagggcatgcggatgcacctgctggaggagacaaccgtccgtactgaatggactccggctccaggaccagtcgatgcttacgagatccaattcattcccacaactgagggcgcaagtccacctttcaccgctcgagtgccttctagcgccagcgcttacgaccagcgagggttagccccagggcaggaatatcaggtaacggtgcgcgcattgcggggaacatcctggggattacctgcctctaaaactattacaacaatgatcgatggtccccaggatctgcgcgtggtggccgttacgcctacaactctcgagcttggttggttaaggccccaggctgaagtcgaccgcttcgtagtctcatacgttagcgcgggtaaccaacgtgttagactggaggttcctcccgaagctgacggcacactgctaaccgatttgatgcccggagtcgagtatgtcgtaactgtgacggcggagcggggtagggccgtctcgtacccagcatctgtgcgcgcgaacaccggctcgtcccctttgggcctgcttgggacgaccgacgaaccacctccttctggaccatctactactcaaggcgctcaggctccccttctgcagcaacggccacaagagctgggcgagctccgggtgctgggtcgggatgaaacagggagactgagagtggtctggacagctcagccagatacattcgcatactttcaactcagaatgcgcgtgccagaaggcccaggagctcacgaagaggtactccctggtgacgtgcgacaggccctcgtgcccccccctcctcctggtactccttatgaactctccttgcacggggtcccacccggcggcaaaccctccgatccgatcatctaccagggcattatggacaaagacgaggagaagccaggtaagagctcgggacccccgagactcggggaactgactgtgactgaccgtaccagtgattcacttctgctgaggtggacggtccccgagggcgagttcgactctttcgtgattcaatacaaggaccgagacggacaacctcaggtggtgccggtcgaaggcccgcagaggtctgctgtgatcaccagtctggacccaggcaggaaatataaattcgtgctctacggctttgtggggaagaagcgccatgggccactggtagccgaagcgaaaatcctcccgcagtccgacccatcacctggcacccccccgcgcctgggtaacctctgggtaacggatcccactccggacagtctgcatttgagctggactgtgcccgaaggccagttcgacactttcatggtccagtaccgagaccgggacgggcgaccccaggtcgttcctgtagagggcccggagcggtcatttgttgtctcttctctggaccctgaccacaagtaccgcttcaccctgttcgggatagctaataagaagcggtatgggccattgaccgcagacgggaccacagctccggaacggaaagaggaacctcccagacccgaattccttgagcagcctctgctgggggaactgactgtgaccggcgtgacaccagattccctaagattgtcatggaccgttgcccaaggcccgttcgattcctttatggtccagtataaggatgcccaaggacagcctcaagccgtgcccgtagcaggtgacgagaacgaagtgacagttcctggattagatcccgacaggaaatataagatgaatctgtatgggctgagaggccggcagcgggtgggaccagagtccgtggtagcaaagactgcaccccaagaggacgtggacgagacaccttcacccaccgagctcggcaccgaggcccctgaatcgccagaggagcctctactcggggagttgactgtcactgggagctcccccgatagtctgtcgctgttttggacagttcctcaaggatcgttcgatagcttcaccgtgcagtacaaggatagagacgggcggcctcgtgcagtacgtgtcggagggaaagaatctgaagtaaccgttggtggactagagcccggacataagtacaagatgcatctctatggcctgcacgagggtcagcgtgtggggcccgtgtcagcggtgggggtgacagctccgcagcaagaagagacaccacctgcaacggaatccccgttagagcctagattaggagagctgacagtgaccgacgtgaccccaaatagcgttggactgtcatggaccgtgccggaggggcagtttgactcatttattgtccagtacaaagacaaggatggacagccccaggttgtcccagtcgccgctgatcagcgagaggtaaccgtctataacttagaacctgaacgcaaatacaagatgaacatgtatggtttgcacgatgggcagaggatgggtcctctctcggtcgtgatcgtcacagcccccttacctccagccccggccactgaagcgtcaaaacctcccctggagcctcggctgggagagctaacggtgaccgacattaccccggattcagtgggcctgtcatggaccgtgccagaaggagaatttgattcctttgtggtgcagtacaaagatcgcgatggtcaaccccaggtcgtgcccgtggcagcagaccagcgggaggtgactattcccgatctggaaccgagccgcaagtataagttcctcctgttcgggatccaggatggcaaaagacggagtccagtgtccgttgaggcgaaaaccgtggctaggggagacgcttctcctggagcaccacccagactgggcgagctctgggtgactgaccccacgcccgattctttacgtctatcatggacagtgcccgagggtcagttcgactccttcgttgtacaatttaaggataaggatggcccacaggtagtcccagtggaaggccacgagcgcagcgtcacagtaaccccactggacgcagggcgcaaatatcgttttttgttgtatgggctgctggggaaaaaacgacacggcccacttacggccgacggtacgactgaggccaggtctgcgatggatgatactggcaccaagagaccccccaaaccgagactgggagaggagctgcaggttacaaccgttacccagaattctgtaggcttatcttggaccgtgccagagggtcagttcgatagcttcgtggtgcagtataaggacagggatgggcagccacaggtggtccctgtcgagggtagcctaagagaagttagcgtgcccgggctggaccccgctcatcgttataagctgttgctgtacgggcttcatcatgggaagcgagtaggcccgatctctgctgttgcgattacagccgggagggaggagacggagactgagaccaccgctcctacaccaccggcaccagaaccacaccttggtgaactgactgtggaagaggccacaagccatacacttcatctgtcttggatggtgacagagggcgaattcgattcatttgagatccagtatacagatagagacggccagttgcagatggtgcgcattggcggtgacaggaacgatatcacactgtctggcctggagagcgatcatcgatacctggtgacactgtatggatttagtgacggtaaacatgtaggaccagtgcatgtagaggctctgaccgtcccagaggaagagaagccaagcgaaccaccaaccgctacgcccgaacctcctatcaaacctaggctcggcgagctaacagtgactgacgccacacctgactcgctttccctatcttggacagtcccagaaggccaatttgaccattttttggtacaatatcgcaatggcgacggccagcccaaagctgttcgggtgcctggccatgaggaaggcgtgacaattagcggactggagccagaccacaagtacaaaatgaatctgtatggtttccacggaggacagcgcatgggtcctgttagcgtggtgggggtcacagcagctgaggaggaaactccttctcctacagagccgtctatggaggcccctgaaccagcagaggagcctttgcttggcgagctcacagtgaccggctcctctcctgacagtctttctctgtcgtggacagttccccagggtcgcttcgactcatttaccgtgcagtacaaggatcgggatgggcgtccgcaggttgtgagagtcggtggggaagagtccgaggttaccgtcggaggtttagaaccaggccggaagtacaagatgcacctgtatgggctgcacgagggacgtcgcgttggacccgtgtcagccgttggggtgaccgcacctgaggaggagtcaccagatgcacctctcgcaaagctgcggttgggtcaaatgactgtgcgcgacataacctccgactctctgagcttgtcatggactgtgccagagggacagtttgaccattttttagtgcagttcaaaaacggagatgggcagcccaaagccgtgcgagtccccggccatgaggatggagtgactatcagcggtcttgagccagatcataaatacaaaatgaacctgtacggattccatggtggccagcgggtgggacctgtgagtgctgtgggactgactgctcctggaaaggatgaggagatggccccggcatcaacagaaccacctacccctgaaccccccatcaagcctcggctcgaggagctcactgtgacagatgcaacccctgatagtctaagccttagctggactgtgccagaaggtcagttcgaccactttctggtgcagtataaaaacggggacggccagccgaaggccactcgggtacccggacacgaggacagagtgaccatctccggtctcgaacctgacaacaaatacaagatgaatttgtatggatttcatgggggccagcgggtcggaccagtttccgcgatcggcgtgaccgctgcagaagaggagaccccttcacccacagagccaagcatggaggccccagagcctccagaggaacccctgctgggagagctgaccgtgactggctccagccccgattccctttccctcagttggacagtgcctcagggtagatttgatagtttcaccgtccaatacaaggaccgagatggccgcccacaggtggtgagggttgggggagaggagtctgaagtcactgttggcggccttgagccgggccgcaaatataagatgcacctgtacggactgcacgagggtaggcgggtgggtcctgtgtccacagtgggggtcaccgcaccccaggaagacgtagatgaaaccccttctcccaccgaaccaggaactgaggccccggagccacctgaagaacccctgttgggggagctcactgttaccggaagctctcccgactctctttccttatcctggactgtgccgcagggccggtttgatagcttcactgtgcaatacaaggatagagacggacgaccgcaggctgtccgtgttggggggcaagagtctaaagtaaccgttcggggtttggagccagggaggaaatacaagatgcacttatacggcctgcacgagggccggcggttaggcccagttagtgcagtaggggtgaccgaggacgaggccgaaacgacacaagccgtgcctactatgacacctgaacctcccattaagccaaggctgggagaactcaccatgacggacgccacgcctgattccctgtccttgtcttggaccgtgcccgagggacagttcgatcacttcctagtgcagtacagaaacggcgatggacagcccaaagccgtcagagtccctggacacgaggacggagttaccatctccgggctcgagcctgatcacaagtataagatgaacctgtatggcttccatggcgggcagcgtgtaggccccataagtgtgatcggggtcaccgccgccgaggaggagactccttctcctacagagctaagcacggaggcccctgaacccccagaggaacctttgctcggcgagctaacagttaccgggagctcacctgacagcctttcgctgtcatggacaatccctcaaggacactttgactccttcacggtgcagtacaaggacagagatggaaggccccaggtgatgagggtcagaggagaagaaagtgaagtgaccgtcggggggctggagccaggccgaaagtacaagatgcacttgtacggactgcatgaaggtaggcgcgttggccctgttagtaccgtcggtgtgactgaagacgaggccgagaccactcaggctgtaccaactaccacgcctgaaccccctaacaagcctcggctgggcgagctcacagtgaccgacgctacaccagattcattaagcctgagctggatggtgcctgagggacagttcgatcacttcctggttcagtatcgtaatggagatggccagcctaaggtcgtccgagtgcccggccacgaggatggagttacgatttctggactggaacccgatcacaagtacaaaatgaatctgtacggctttcatggcgggcaaagagtcgggcctatttccgtgatcggagtaactgctgcagaggaggaaacgcctgccccgaccgagcccagtaccgaagctccagaaccaccagaggagccactgctaggcgaactgacggtgacggggtcttcgccagacagcctgtccttgtcatggacaatccctcagggcagatttgattcgtttaccgtccaatacaaggacagagatggcagacctcaggtggtgagagttcgcggcgaagaatcagaggtcacagtgggcggactggaacccggctgcaaatataaaatgcacctctacgggttacacgagggacaacgggttggacccgtttcagccgttggggtgactgcccctaaagatgaggcagagactacccaggccgtgcccaccatgacacctgaaccacccattaaaccacgattgggagagctcactgtaactgacgccacccctgatagtctgtctctcagctggatggtcccggaaggtcagttcgatcactttctggttcagtatcgtaatggagatggccagcccaaggccgtgcgtgtccccggacacgaagatggggtgaccatctctggactggagccagatcataaatacaaaatgaatctttatgggtttcacggaggccagagagtaggtcctgtctcagcaattggcgtgaccgaggaggagacgcccagcccaaccgaaccctctaccgaagcacccgaggccccagaggagcccctgctgggagaactgactgttactgggtcttcccccgattccctttctttgagttggactgttcctcagggcaggttcgattcctttaccgtccaatacaaagaccgcgatgggcagccacaggtggtgagagtgagaggtgaggaaagcgaggtgacagtcggcggactagagcctggcaggaaatacaaaatgcacctgtacggcctgcatgaggggcagcgggtaggacctgtgtctacagtggggataacggctcccctgccgacacccctgcccgtcgagccccggctgggcgagctcgctgtggccgctgtcacatccgactccgtgggcctcagttggacagtagctcaaggaccattcgactctttcctagtccagtaccgcgatgcccaggggcagccacaggccgtgcccgtaagcggggacctcagagccgtcgcggtgtctggcctggatcctgcccgaaaatataaatttttgttgttcgggctccagaacggtaagcgtcatggtccagtgcccgtggaggcacgaactgcacccgatacaaaaccaagtccacgccttggagagctcacagtgacagatgccactccagatagtgtagggctgagttggacagtgcccgaaggagaattcgactcattcgtggtgcaatataaggacaaggatggtcgactacaggttgtgccagtggccgctaaccaaagggaagtgactgttcaaggccttgaaccctccaggaaatataggtttctgttatacggattgagcggccgtaagagattgggccccatatctgcagatagcacgactgccccattggagaaggagctgccaccccacctcggagaattaacagtagctgaagagactagtagcagtctgcggctgagctggacagtggcccaagggccctttgatagttttgtggtccagtatcgcgacaccgatggacaaccccgcgctgtgcccgtcgccgcagatcagaggaccgtgacagtcgaagatttggaacccgggaagaaatataagtttctgttgtatggcctgctaggcgggaaaagattggggcccgtatcagctctgggaatgaccgcccccgaggaggatacccccgcacccgaattagcacccgaggctcctgagccaccggaggaacctcggttgggcgttctgactgtgaccgataccacgccagattctatgcgcctctcctggtcggtggcccagggcccgttcgactctttcgtggtgcaatacgaggacaccaatggccagccacaggctttgctggtggacggagaccagtctaaaatcctaatctccggcttagagccttcgacgccttacagatttctcctgtacggacttcacgaaggcaaaaggctggggcccctaagcgccgaggggacaaccggacttgccccagcagggcagactagcgaagagtcccgaccgagactaagccaactttcagtcactgatgtcaccacctcatcccttaggctaaattgggaagccccacctggcgcatttgattcatttcttctgcgatttggagtccctagcccaagcacgctagaacctcatccgaggcctctcctgcagagggaactcatggtgcctggcactagacattcagcagtcttacgagacctgaggtctgggacactctactcattgaccctgtatggcctgagagggcctcataaggccgactctatccagggaacagcacgcaccctgagccccgttctggaaagcccccgcgacctccaattcagcgagatccgggagactagcgcaaaagtcaactggatgccaccaccctccagagcggacagttttaaagtgagctaccagctagccgatggaggggagccacagtccgtgcaggtggatggacaggccagaactcagaagctacaaggcctgatcccgggggctcggtacgaggtgactgtggtgtccgtccgcggctttgaggagagcgaaccactcactggtttcctgacaactgtgccagatgggcccacgcagctgagagctctcaacctcacagaaggatttgcagttctgcattggaagcctccccaaaaccccgtggatacttatgatattcaagtcacagcccccggtgcacctccactccaggcggaaacaccaggaagcgcagtcgactatcctcttcacgacctggtcctgcatacaaattacactgccacagtacgcggacttcggggtccaaacctgacaagtcccgcatctatcaccttcactactggtctcgaggccccaagagatttggaagcgaaagaggtcacaccacgcacggctctgcttacctggaccgagcctcccgtgaggcccgccgggtatctgcttagctttcacacccctgggggacaaactcaggagatactgttgccaggtggcattacatctcaccaactcctgggcttatttccttccacctcctacaatgcccggctgcaggctatgtggggccagagcctactgccgccagtttccacctcctttacaactggcggcctgcgaatcccatttccccgagactgtggagaagagatgcagaatggagccggtgcgtctcgcaccagcacaatctttctcaacgggaacagggaacgccccctgattgttttctgtgacatggagacagatggcggtggctggcttgtcttccagaggcggatggacggtcagaccgacttttggagagactgggaggactacgctcacggtttcgggaacatttctggcgagttctggctcggaaacgaggccctgcattctttgacccaagccggagactatagcatgcgtgtggatctgcgggctggagatgaagccgtgttcgcacaatacgactccttccacgttgattcagccgctgagtattaccgtctgcatttggagggctaccacggcacagcaggagacagcatgagctatcactccggctcggtgttctccgcacgggatcgcgaccctaacagcctgctgatctcctgcgccgtctcttatcgaggcgcatggtggtaccggaattgtcactatgccaatctgaacggcttgtatggctctacagtagatcaccagggtgtctcttggtatcactggaaggggttcgaattctccgtgcccttcacagaaatgaagctgcgtccgcgcaactttcgcagccccgccggcgggggatag

SEQ ID NO: 137537 - DNA, 12729 bp, synthetic construct
  misc_feature 1..12729: note = Description of Artificial Sequence: Synthetic coding sequence
  source 1..12729: mol_type = other DNA
atgatgcctgcccaatatgcgctaacctcttctctggtcttattagtgctgctgtcaacggctcgagctggtccctttagtagtcgaagcaatgtaacacttcctgcccctcggccacccccccaaccagggggacataccgtcggggcaggcgtcggcagtccatcatcacagctctacgagcatacagttgagggaggtgagaagcaagtcgtcttcacccatcgcatcaatcttcctcccagcaccggttgtggctgcccccccggtaccgagcctcccgttctagcttcagaagtgcaggccctcagagtccgtctggagattctcgaggaactggtgaaaggtctaaaagaacagtgcactgggggctgctgtcctgcgagcgcccaggcaggcactggtcagacggatgtgcggacattatgcagtttgcacggggtattcgatctctctcggtgtacttgcagctgtgagcctggctggggcggacccacgtgttctgaccctacagacgcggagatccccccatcatcccctccatcggcgagtggaagttgtcccgacgattgtaacgaccagggcaggtgcgtacgcggccgatgtgtctgctttccaggatacactggccctagttgcggctggccatcttgcccgggagattgtcagggacgagggagatgtgtgcagggcgtgtgcgtgtgcagagccggtttttccggccccgactgctctcagagaagctgccccagaggctgttctcaacgaggtaggtgtgaaggcggccgatgcgtgtgtgacccaggctatacaggagacgactgcgggatgcggagctgtccaagggggtgctctcagcgcgggagatgtgaaaatggacggtgcgtgtgcaacccaggctacgctggagaagattgtggtgtgaggtcatgtccgagagggtgctcacaacgggggcgctgtaaggacggcagatgtgtctgtgaccctggctatacaggagaggattgcggtacacgttcctgcccatgggattgcggggaaggcggtcggtgtgtggacggacggtgtgtatgctggcccggatacaccggtgaggattgcagtaccaggacttgccctcgagactgtaggggaaggggccgctgcgaagacggtgaatgtatttgtgacactggctatagcggcgatgactgcggggtacgttcatgtcccggcgattgcaaccagaggggacggtgtgaggatggacggtgtgtctgttggcccggatacaccggaacagattgcggctctcgggcatgcccccgggactgcagaggaagaggcagatgcgaaaacggtgtgtgcgtatgtaacgccgggtactctggagaggactgcggagtgaggtcctgtcccggcgactgtcgggggaggggacgttgtgaatctggaagatgtatgtgctggcctggatataccggaagagactgtggaacacgtgcctgcccgggcgattgcaggggacgcggaaggtgcgtggacggtagatgtgtgtgcaaccctggcttcacaggagaggactgcggcagcaggcgatgcccaggggactgccgcggccacggcctgtgtgaggatggagtttgcgtctgtgatgctggatatagtggcgaggattgttctacgagatcctgtccaggcgggtgcaggggcagaggccagtgcctagacgggaggtgcgtgtgtgaggatggctactccggcgaggactgtggcgtgcgccaatgtcccaacgactgctctcaacacggcgtgtgccaagatggtgtctgtatctgttgggaaggctacgtgtccgaggattgcagcattaggacatgcccatccaattgccacggacgaggaaggtgtgaggagggtcgatgcctgtgcgatcccggatacaccggccccacctgcgccacacgaatgtgtcctgccgattgccgcgggcgagggcgctgtgtacaaggagtctgcctttgtcatgttgggtacgggggcgaagattgtgggcaggaggaaccaccggcctctgcctgtccaggaggttgcggacctcgggagctctgtcgggccggtcagtgcgtgtgcgttgagggtttccgtgggcccgattgtgcgattcagacctgtccaggggattgcagagggagaggggaatgtcacgatggatcatgcgtgtgtaaagatggatatgcaggagaagattgtggagaggaggtgcccacgattgaaggcatgagaatgcacctgctagaagaaaccactgtgcggacggaatggactccagcccctggacctgttgacgcctatgagattcaattcatcccaacgaccgagggcgcatcccctccttttaccgcgcgcgtgccctcatccgcctctgcctacgatcaacgtggcttagcaccgggacaggagtaccaggtcactgtcagggcgctccgcggcacaagctggggactacctgcctccaaaactattacaactatgatagacgggccacaggacctccgggtagtcgcggtgacccctaccacactggaattgggctggcttcggccccaagctgaggtggaccgattcgtggtgtcgtacgtgagcgcggggaaccagcgggttcgcctcgaagtccctccagaagccgacggaaccctgctgaccgacctcatgcccggcgtggagtacgtggtcactgtaacggcagagagagggcgtgctgtttcttatccagcttccgtccgtgcgaacacagggtcttccccactgggcctgcttggcaccacagacgaaccccccccgtccggcccaagtacaacacaaggagctcaggcccctttactccaacagcgcccacaggaacttggagagttgagggtgcttggccgggatgaaactggcagactgcgggtggtgtggacagcgcaacctgacacattcgcctactttcagctccgtatgcgcgtgcccgagggtccaggagcccacgaggaggttctaccaggggacgtccggcaggccctcgtccctccaccccctcccggtaccccctacgagctctctctccacggcgttcccccagggggcaagccgagcgaccccatcatctaccagggcataatggataaggatgaagaaaaacccggaaagagctcaggtcccccaagactcggggagctgaccgtgaccgatcggacatccgactctctcctgttaaggtggaccgtccctgagggcgagttcgactctttcgtgatccagtacaaagacagagacgggcagccccaggttgtccccgtcgagggacctcaacgcagcgctgtcattacctcccttgatccaggtagaaaatacaagtttgtgctgtatgggttcgttggtaagaagcgccatggcccactcgtggccgaagcgaaaatattgcctcagtccgatccttctccgggcactccgccacatctgggtaacttatgggtgacagaccccacgccagatagtctgcatttgtcatggaccgtgccggagggccagttcgacacttttatggttcagtatcgtgacagagatgggcgcccgcaggtggtcccagtcgaagggccagagagaagctttgtggtgagcagcctcgacccagatcataagtacaggtttaccctatttggcatcgcaaataaaaagcgatacggcccgctcaccgctgacggcacaaccgccccagagagaaaagaggagccccctaggcccgagtttctagagcagcccttgctcggggagctaacggtaaccggagtgacccctgattccctcagactgtcctggaccgtggctcaggggccattcgattcctttatggtgcaatataaggatgcccagggacagccgcaggccgtccctgtagccggcgatgaaaatgaagtcacagttcccggtctagatccggatcgtaaatacaagatgaacctgtacggactgagaggaaggcagcgggtcggcccagagtcagtagtggctaagaccgccccccaggaagatgtagatgagaccccttctccgaccgagcttggcactgaggccccagagagcccagaagagcccctcctcggcgaattgaccgtcaccggcagctcccccgacagcttgagcctattctggacggtacctcaaggctctttcgattcctttaccgtccagtacaaggatcgcgatggacgccctagggcagtccgggttggagggaaggaatcagaagtgaccgtgggtggcctagagccagggcataaatacaagatgcacctgtatggtctgcatgagggacagcgtgtgggaccggtatctgccgtgggggtaaccgccccacaacaggaggaaacacctcctgctactgaaagtcctttggagccaaggctgggcgagctgacggtaacagatgtcaccccaaattcagtgggcctgtcatggacagtccctgagggccagttcgacagctttattgtacagtacaaggataaggacggccagcctcaggttgtgcccgtcgccgctgaccaacgagaagtcaccgtctacaaccttgagcccgagaggaagtacaaaatgaacatgtacggtcttcacgacggtcagaggatgggccccctatccgtggtgattgtgacagcaccgctcccacctgcccccgcaactgaggccagcaagccaccactggagcctcggctaggtgagctcaccgtcacggacatcacccccgactccgtgggactgagctggactgttcctgagggcgagtttgatagtttcgtggttcagtacaaagaccgggacggacagcctcaggtagtgcccgtggccgctgaccagagagaagtgactatcccagatttggaaccctcccgcaaatataaattcctcttgttcggcattcaggatggtaaaaggaggtcacctgtgagcgttgaggcaaagaccgtcgcccgtggtgacgcgtcgcccggcgccccaccccgccttggagaattatgggtgactgatcccacacccgattctctcagattgtcatggactgtccccgaggggcaatttgactccttcgtcgtgcagttcaaggacaaggatgggcctcaagtagtccctgtcgagggacatgagcgcagtgtaaccgttacacccttggatgctggacgtaagtaccgattcctgttgtatggcctgcttggtaaaaagagacacgggcccctcacggcagacggcactacagaggcaagatccgccatggatgataccggtaccaagcgaccacccaagcctaggctgggagaagagctgcaggtgactacagtcacccaaaactccgttgggttgtcttggacagtgcctgagggccagtttgactcctttgtggtccagtataaggaccgggacgggcagccacaggtcgttccggtggagggctctctccgagaggtgagcgttcccggattggacccagctcataggtataaactcctgctgtacggccttcatcatggcaagcgagtaggccccatttcagcggtggctatcacggctggtcgggaggaaaccgagaccgagaccactgccccaacacccccggcccctgagccccacctcggagaactaactgtcgaagaggccacgagccataccctccacctgtcttggatggtgacagagggagaattcgattccttcgagatccaatatactgatcgcgatggtcagcttcagatggtgcggattggtggagatcgcaacgatatcacgctctctggcttagagtctgaccacagatacctggttacactgtacgggttttcagatggtaagcacgtgggtccagtgcatgttgaggccttaaccgtgcctgaagaggagaagccaagtgaacctcccaccgctacccccgaaccacctatcaaaccccggttgggggagcttaccgtgactgacgccacccctgactcactcagtctttcatggacggtgcctgaagggcaattcgatcactttctggtgcagtatcggaacggggacggccagcccaaggcagtgcgggttccgggacacgaagagggcgtgaccatcagcgggttggaacccgatcacaagtataaaatgaatctctacggtttccatggaggacaacgtatgggaccagtcagcgttgtcggtgttaccgccgccgaagaggaaactccgtctcccacagaaccctctatggaggccccagagccggccgaggaacctctgctcggcgaactcacagtcacgggatccagccccgacagtctctcacttagctggacggtacctcagggccgctttgatagctttactgtgcagtacaaggatagagatggccggccccaggtagtccgagtgggcggggaagagagcgaggtgacagtagggggtctggagcccggaagaaagtacaaaatgcacctgtacggtctgcacgagggtagaagagtaggtcccgtcagcgccgtcggggtgactgcgcccgaggaggagtctccagacgcacccctggccaaattgcgccttggtcagatgactgttcgggacatcacctcagacagtctatcgctgtcctggaccgtcccggaaggccaatttgatcactttcttgttcagtttaagaatggggatggccaacccaaggcggtgcgagtccctggccacgaagatggtgtaactatcagcggactggagccggaccataagtataaaatgaacctgtatggctttcatggcggccagcgagtcggtcctgtgagtgcggtaggtttaactgctcccgggaaggatgaggaaatggctccagcatctacagagccacctactcctgagccgcccattaagcctagactcgaagagttgacggtcacagatgcaacgcccgacagtctgagtttgtcatggactgttccggagggccaatttgaccattttctagtgcagtataaaaacggggatgggcagcccaaagccacccgggttcccggccacgaagacagagtgactatttctggtctcgaacctgacaataaatacaaaatgaacctgtacggtttccacggggggcaacgggtggggcctgtgtcagcgatcggcgtgactgcagcggaggaggaaacacccagtcccaccgaaccttctatggaagcccccgagccacccgaggagccactgctaggcgaattgacggttacagggagtagtccagactccctttccctgtcttggactgtacctcaaggccgctttgactctttcaccgtgcagtataaggatcgtgatggccggcctcaggtggtgagagtaggcggcgaagagtcggaggtcactgtcggcgggctagagcccgggcgtaagtataagatgcacctatacggcctgcatgaaggccgacgcgtggggccagtaagcacagtgggagtcacagcccctcaagaagatgttgatgaaaccccttcacctacagagccgggcacagaggcccccgaaccgccggaagaacctcttcttggcgagttgaccgtcacaggttcgagtcccgatagcctgagcttgagctggaccgtcccgcagggccgattcgacagctttacggtgcaatacaaggatcgggacggccggccgcaagctgtcagagtgggcggccaggagtccaaagtgacggtgaggggcttagaacccgggcgaaagtacaaaatgcacctgtacggactgcacgaggggcgccggctgggacctgtgtccgccgtaggagtgacagaggatgaggccgagaccactcaggccgtgcccactatgacgcccgaaccgcctatcaaaccaagattgggagagctgaccatgaccgacgcaacacccgactcactgagtctgtcctggaccgttccggagggacaattcgatcattttctggttcagtaccgaaacggtgacggtcaacccaaggcagtccgggtgccaggtcatgaggacggcgtcaccataagcgggctggaacctgaccacaagtacaaaatgaatctgtacgggtttcatggggggcagagagtaggccctatcagcgttattggtgtcacagcagcggaggaagagacaccaagccccaccgaactgtctaccgaagcacctgaaccacctgaggaacctctgttgggggagctgaccgttactggctctagccccgactcgctgagtctgtcatggaccatcccgcagggccacttcgactcttttactgtccagtataaggatcgagatggcagaccccaagttatgagagtgaggggcgaggaaagcgaggtgacagtcgggggcctggagcctggaagaaagtataagatgcacctctacggattgcatgagggaagacgtgtgggccccgtatcaactgtaggggtgacagaggatgaggccgaaaccacacaggcggtcccaacaaccacgccagaacccccaaataagccccggcttggtgaacttactgtcacagacgccaccccagactctttatcactgtcctggatggtaccggagggacagttcgatcatttcctagtgcagtatcgcaacggggacggacaacctaaggtagtcagagtgcccggccatgaggacggggtgaccatatccggtctggaacccgaccataaatataagatgaacttatatggctttcatgggggtcagagagtaggtccaatttctgtgattggggtaactgctgccgaggaggagaccccggcacctacagagcccagcactgaagcaccagagcctcctgaagagccccttctcggcgaattgactgtcaccgggtcatctcctgattcactttcactatcttggacgatcccacaaggccggtttgattcatttacagtccagtacaaggacagggacggccggccacaggtagtccgagtgcggggggaagaatcggaggtcacggttggagggttggagcctggctgcaagtacaaaatgcatctatacgggctccacgaaggccagagggttggccctgtgtccgctgtgggcgtgaccgcgcccaaagacgaagccgagactacccaggcagtgccaacaatgactcccgaaccacccattaaaccccgactgggggaattgactgttaccgacgcaaccccagattctttgtctctgtcctggatggtacctgagggccaatttgatcatttccttgtccagtatcggaatggagacggtcagcccaaagctgtgagagtccccgggcacgaggatggtgtgacaataagtggtctcgagccagaccacaaatataaaatgaacctctacggcttccatggtggccaacgggtagggcccgtaagtgctatcggcgtgaccgaggaggagacaccttcccctaccgaaccgagcacagaggcccctgaagcccctgaggagccccttctcggagagctcaccgttaccgggagttcgcccgacagtttgtcattgagctggactgtccctcagggccgtttcgactctttcaccgtgcagtataaagacagagacggccagccacaggttgtgagggtgagaggtgaagaaagtgaggtcacagtggggggactcgagcccgggcgtaagtacaaaatgcatttgtacggcctccacgaaggccaaagagtgggcccagtctccacagttggcattaccgcccctttgcctaccccacttcccgttgagcctaggctcggcgagcttgccgtagcagctgtaacatccgacagcgttggactgtcctggacggtggcacagggtcctttcgactcattcctcgtgcagtaccgggacgctcagggacagccacaagcggttccagttagtggcgatctcagggctgtggccgtgagtggcctagaccccgcacggaaatacaagtttctgctgttcggccttcagaatggaaaacgccacggtccagtcccagtggaggcccgaacagccccagacactaaaccgagtccgagacttggggaactgacagtgactgacgccactcctgatagtgtgggtctctcctggacagtgccagagggcgaattcgacagtttcgtggtgcagtacaaggacaaggatgggaggcttcaggtcgtgcccgtggctgcaaaccagagggaagtgactgtgcagggccttgagccttcccgcaagtatagattcctactgtatgggctgtctgggaggaagcgcctggggcccatttcagccgattcaacgacagcaccactagagaaggagctgccaccacatctgggggaactcacagtagcagaagagacctcttctagtttaagactgtcctggaccgtggcgcagggaccctttgactcctttgtcgtgcagtatcgcgacacggatggacaacctcgagccgttcccgtagccgctgatcagagaacagtaacggttgaagacctggaacccggcaagaagtataaatttctgctgtatggtctcttaggcggtaaaaggctggggcccgttagtgccctggggatgaccgccccagaagaggacacccccgcccccgaattggctcctgaggctcccgaacccccggaagagccacgcctgggagtccttaccgtgaccgatacaactcccgactcaatgagactgtcatggtccgtggcacaaggccccttcgactccttcgtcgtgcagtatgaggacacaaatgggcagcctcaggctctgctggtggatggtgatcagtccaaaatcctgatttccggactggagcccagtacgccatatcgttttctgctgtatgggctgcatgaaggtaagaggctgggaccactgagcgcagaaggaaccacaggattggcccctgctggacagacgagtgaggaatccagacctagactctctcagctgtccgtgactgatgtaaccacaagttccctgcgcctaaactgggaggcaccacccggtgctttcgacagcttcctcctgcgtttcggggtcccatctcctagtacacttgaaccacatcccaggcccctgttgcaacgggagctgatggtgccaggaacccggcatagcgccgtgctgagggatttgcggtccgggaccctctattcactgacgctctacggccttagggggccgcacaaagccgactcaatccagggtaccgctcgtacactgtccccggtattagagtctccccgcgatttacagttcagtgaaattagagagactagcgccaaggtgaattggatgccccctccatcacgcgctgactcttttaaggtcagctatcagcttgcagatgggggcgagccccagtctgtgcaagtggacgggcaggcacgcacacagaaactgcagggcctgatccccggcgctcgttacgaagtaacggtggtgtccgtaaggggatttgaggagagtgagccccttaccggttttctgactaccgttccggatgggcctacgcagcttagggcattgaatctgacagagggctttgcagtgcttcattggaagccaccacagaacccagtggatacttacgacgtgcaggtcaccgccccaggtgcccccccactgcaggccgagactcctggaagcgctgtggactaccctctgcatgatttggttctacataccaactacactgccaccgtacggggtttacgtggtcctaacctgacctcacccgcttccatcactttcactaccggactggaggccccaagagacctggaagcgaaggaagtgactcccagaacggctctgctgacatggactgagccccctgtcagaccagctgggtaccttcttagtttccatacgccaggtggacagaaccaggaaatcctcctgcctgggggtatcactagccaccaactgctcggtctgtttccatctacctcctataacgcacggctacaggcaatgtggggtcaatctttgctcccgcccgtttctacttcttttacaacaggagggttaaggatccctttccctcgagactgcggcgaagaaatgcagaacggcgcgggagcaagcaggacctcgacaattttcttaaacggcaacagagaacgccctttgaacgtgttctgcgacatggaaacggacggcgggggctggctggtgttccaacggcgcatggacgggcagaccgatttttggagagattgggaagattacgctcacgggtttgggaatatcagcggcgaattctggctaggcaatgaggctctacactcactgacccaggccggagactacagtatgcgtgtcgatctgagagcgggcgatgaagctgtgttcgcccaatatgatagcttccacgtggacagtgccgctgagtactatcgcctccacctggaagggtaccatggtactgccggagactccatgtcctatcacagcggctctgtgttctcggctcgcgacagagatcccaattctcttctgatttcgtgcgcagtttcttataggggagcatggtggtataggaattgtcactacgctaatttgaacgggctgtatggatctaccgtggatcaccaaggggtctcttggtatcattggaagggcttcgagttttctgttccctttacggaaatgaaacttcgaccccgcaacttccgctccccagctggtggcggctag

SEQ ID NO: 137538 - DNA, 843 bp, synthetic construct
  misc_feature 1..843: note = Description of Artificial Sequence: Synthetic coding sequence
  source 1..843: mol_type = other DNA
atggtaaccgagggcgagttcgatagttttgagatccagtacactgaccgagatgggcaactgcagatggtaagaataggtggtgatcgcaatgatatcacactgagcgggctggaaagtgaccacaggtacctggtgacactctatggcttctcagatgggaagcacgttggaccagttcacgtcgaagcgttgacagtgcccgaggaggaaaagccttcagagccccctaccgccacgcctgaaccccctatcaaaccgcgactgggtgaactgacagtcactgacgctacccccgactccctctccctctcgtggactgtcccagagggccagtttgatcattttttagtgcaatatcgaaacggcgatggtcagcctaaggccgtccgggtgcctggacacgaagagggcgtcaccatatccgggctggagcctgaccacaagtataaaatgaacctatatgggtttcatgggggacagaggatggggccagtgtccgtcgtgggggtgaccgccgctgaagaagaaacaccctcgcccaccgaaccctctatggaagctcctgagcctgccgaggagcccttattaggtgaactgaccgttactggttctagccctgattcactaagcctcagctggacagtgcctcagggccgcttcgactcctttactgtgcagtacaaagatagggacggtagaccccaggtcgtccgcgtaggtggggaagagtccgaggtcaccgtgggcgggctcgaacccgggaggaaatataaaatgcacttgtatggacttcacgagggaagaagagtgggtccagtttccgcagtgggcgtgacatag

SEQ ID NO: 137539 - DNA, 12729 bp, synthetic construct
  misc_feature 1..12729: note = Description of Artificial Sequence: Synthetic coding sequence
  source 1..12729: mol_type = other DNA
atgatgcccgcccagtatgcgttaaccagtagtctggtcctactcgtcctcttgagtacagcaagagcaggcccgttctcctcgcggagcaacgtcacactccccgcgcctcgtcctcctccccaacccggtgggcacacagtgggcgccggggtgggctcccccagctctcagctctacgagcatacagtggagggcggagagaagcaagtggtttttacccataggatcaaccttcctccatccaccggatgcggttgtccacccggcaccgagccacccgtcctggcttctgaggtacaggcgttgagagtgagactcgagattcttgaggaattagtgaaaggtctaaaagagcaatgcaccggcggctgctgccccgcaagcgcccaggccggcacaggacagacagatgtaagaacactctgcagtctccacggcgtcttcgacctgtcgcgctgcacctgcagctgcgagccaggatggggtggccccacatgttccgaccctacggacgcagagatcccccccagctcccctccatccgcctcgggttcctgtcccgacgactgcaatgaccagggaaggtgcgtgaggggccggtgtgtgtgtttccccggatatacgggtcccagttgcggctggcccagctgcccaggcgactgtcaaggccgtggccggtgcgttcagggagtgtgtgtgtgtagggcaggtttcagcggaccggattgttcccagcgcagttgcccacgcgggtgttctcagcgtgggcgctgtgagggcggacggtgtgtgtgcgaccccggatacactggcgatgactgtggcatgcgctcttgcccccgtgggtgtagtcagcggggccgctgtgagaacgggcgctgtgtttgtaatccaggctacactggcgaggactgcggcgtccggtcctgtcctcggggttgcagtcaaagagggcggtgcaaagacggcaggtgtgtgtgcgacccgggctatactggggaggactgtggaacgcgtagctgtccttgggattgcggggaaggcggccggtgtgtggatggaagatgtgtctgctggcccggttacactggagaggattgctctacgagaacatgcccaagggattgccgagggcgcggcaggtgcgaggatggcgagtgtatctgtgacaccgggtacagtggcgatgattgtggcgttcgctcttgccctggggattgtaaccagcggggtaggtgcgaggatggccgctgcgtctgttggccagggtatacagggactgattgtggctctcgggcttgccctcgcgactgtaggggcagaggcagatgtgagaatggggtttgtgtgtgtaacgctggctactctggagaggattgtggtgtgcggagctgtcctggcgactgccgcggcagaggtagatgcgaatccgggcgctgcatgtgttggccagggtacaccggccgtgattgtggaacaagggcgtgtcccggtgactgtcgcggccggggaaggtgcgtggatggcagatgcgtctgtaacccaggcttcaccggagaggattgcggaagcaggagatgtccaggcgattgtaggggacacgggttatgtgaagacggagtctgtgtgtgtgatgcagggtactcgggcgaagattgcagcacaaggagctgtcctggggggtgcagaggaagagggcagtgtctggacggccgctgcgtatgtgaggatggttattcaggagaagattgtggggttagacagtgtcccaatgactgcagccagcacggcgtttgtcaggatggggtgtgtatctgctgggagggttatgtgtccgaagactgtagcatcaggacctgccctagcaactgccacggacgagggagatgcgaagagggcaggtgtctatgcgatccaggatacactgggcctacgtgcgccacaagaatgtgtccagctgactgccgcggcagagggaggtgtgtacagggtgtatgtttgtgccatgtcgggtacggcggcgaggactgtggtcaagaggagcctcccgctagtgcatgtcccggcggttgtggaccaagggaactgtgccgcgccggtcagtgtgtctgtgtcgaaggatttcgcggacccgactgtgccatccagacgtgccctggcgattgccgcggtaggggcgaatgccacgatggctcctgtgtgtgtaaagatggctacgccggcgaagattgtggggaggaggtgcctactatcgagggcatgagaatgcatctgttggaggaaactacagtgcgcaccgaatggacccctgctccggggccagtcgatgcatatgaaatccagttcatcccaactaccgaaggtgcctcgccacccttcacagcaagagtgccgagctctgcctccgcatacgaccagcggggattagcccctggacaagagtaccaagtgactgtgcgcgctcttcggggcacctcatgggggctgcctgcctccaagacaattactaccatgattgatggcccacaagacttgagagtggtggcagtgacccccacaaccctggagctgggctggttacgcccccaagccgaggtggatcgtttcgttgtgagttacgtgtcagctggaaatcagagagttcgccttgaggtgcctcccgaagctgacggcacccttctaaccgacctgatgcccggggttgaatacgtggtcactgtaaccgccgagcgcgggagggccgtgtcctaccccgcaagcgtgcgagcaaacaccggctccagtccgctcggcctactgggaacaacagatgaaccacctccctccggtccaagtactactcagggcgcccaggcgcctttactgcaacaacggccacaggagctcggagaactgagagtactgggtcgggacgaaaccggccggctgagagttgtgtggaccgcacaaccagatacctttgcctatttccagctcagaatgagggtcccagagggtcctggggcccacgaggaggtcctccctggagacgtgaggcaggctctcgtgcctccgccaccccccggaacgccgtacgaactcagtctgcatggtgtgcctcccggagggaagcctagcgacccaattatctatcaaggtatcatggacaaggacgaggaaaagcccggcaagtcttctggtccgccacggctgggcgagctcaccgttaccgatcgaaccagcgactccctgctgctgcgctggaccgtgcctgagggcgagtttgactcttttgttatccagtataaagatcgcgatgggcagccacaggtcgtacccgtagaaggtccccagcggagtgcagttatcaccagtttggaccctgggcggaaatacaaattcgtcctctatgggttcgtgggtaaaaagcggcatggccctttggtggctgaagccaagatcttgccacaatctgacccatctcccggtactccaccacgcctaggcaatttgtgggtaaccgaccctacgccagactctctgcatctgagttggacagtgcccgaaggtcaatttgacacatttatggtgcagtatcgggatcgggacggtcggccacaggtggtcccagtcgaaggacctgagcggtccttcgtcgtttcctcactcgatccagaccataaataccggttcaccctcttcggcatcgccaataagaagcgctatggcccactgacagctgacgggactacagcacccgagcgcaaagaagaacctccacaccccgagttcttggaacagccactgctcggcgaactgactgtgacaggcgtcacccccgattcgttgcgcctgtcttggacagtagctcagggcccctttgatagctttatggtccaatacaaggacgcccaaggccaaccccaggctgtgccagtggccggcgacgaaaatgaagtcacggtcccaggcctggatccggaccgtaagtacaaaatgaatttgtatgggcttaggggcagacagagggtgggccctgagagcgtcgtggcgaagacagcacctcaggaagacgtggatgagactccctcccctaccgagttggggacggaagccccggagtcacccgaggaacctctattgggcgaattaaccgttaccggctcctcaccagattcattatcactcttttggactgtgccacagggatccttcgatagttttactgtccagtataaggaccgggatgggagaccaagagcggtccgggtcggaggaaaagaatccgaggtgactgtgggcggtttagagcctgggcataaatacaagatgcatctgtacgggctccacgagggccagagagtgggacctgtgagtgctgttggcgtcacagccccacaacaggaggagaccccgcctgcgacagaaagtccactggagccaagattgggagagctgaccgtgacggacgtgacgccaaactctgttggactgtcatggactgttcctgaaggacagttcgactcctttatcgtacagtacaaggacaaggacggccaaccacaggtagtgccagttgccgccgatcaaagggaagtcaccgtctataatcttgagccagaacggaaatacaagatgaacatgtatggcctgcatgatggacagaggatgggtccactgagcgtcgtcatcgtaacagcacccctgccccctgctccggctaccgaggcatctaagccgccgctggagccgagactcggggagctgaccgtcactgatattacacccgactcggttggattatcctggactgtgccagagggagagttcgattcctttgtcgtgcaatacaaagatcgggatggccaaccacaggttgtccccgtagctgccgaccagagagaggtcactataccggacctggagcctagtcgtaagtacaaattcctgttgttcgggatccaggacgggaagagacggagtcccgtttccgtggaggcgaagaccgtggcaagaggtgacgccagccctggcgcccctcctcgtctgggggaactgtgggtcactgaccctacacccgactcactcaggttaagctggaccgtccctgaaggacaattcgattcctttgtcgtgcagtttaaggataaagatgggccccaggtagtacctgtggaaggacatgaacgctctgttaccgtgactcctctcgacgcgggccggaagtatcgcttcctgctgtacggcttattgggcaaaaaaaggcatgggcctttgactgcagacggaacaaccgaggccaggtccgccatggatgacacgggcaccaaaagaccgcccaagcctcggctcggtgaagaactgcaggtaaccactgtgacgcaaaattcagtgggcctgtcatggacagtgcctgagggacagttcgacagcttcgtagtgcagtacaaagatcgggacgggcagccacaggtggtcccagtagaaggctcactgcgtgaagtctctgtcccaggactcgaccccgcacatcgctacaagcttctgctgtatggtctccaccacggcaaacgggtgggccccatctctgccgtggcgatcacagctggaagggaggagacggaaaccgaaaccaccgcgccaactccacctgcgccagagccacacctgggggaactgactgttgaggaagccaccagtcacacattacatctaagctggatggtgacagaaggcgagttcgattcttttgaaatccagtacactgatagagacggccaattgcaaatggtgagaatcgggggcgatcggaatgacatcacacttagcggtttggagtcggaccatcgctaccttgttaccttatatggattttcagatggtaagcatgtaggccctgtccatgtcgaggcgctgacagtaccagaggaggaaaagcccagcgagcctccgacggctacccccgaaccccctataaaaccacggctgggagagctcaccgttacggacgcaacccctgatagtctaagtttgtcttggaccgtgcccgaaggacaatttgaccattttctcgtgcagtaccggaacggggatgggcagccaaaggctgtgagggtccccggccacgaagagggtgtaacgatctctgggctcgaaccagatcataaatacaagatgaacctctatggtttccatggaggccagcgcatgggtcccgtctcagtggtcggcgtgaccgctgcagaagaggagaccccctctcctactgaaccatctatggaggcaccagaacccgcagaagagccacttctgggcgaactgactgtgacagggagtagccccgacagtctgagcttgagctggacagttcctcagggacgttttgactcatttaccgtacaatacaaagaccgcgacggacggccacaggtggttcgggtaggcggtgaagaaagcgaggtgacggtgggaggcctggagcccggccggaagtataaaatgcacctatacggcctacacgagggaagacgcgtcgggcccgtgtccgcggtcggcgtgacggctcccgaggaggaaagtccagacgcccccttagcaaaacttaggctcgggcaaatgaccgtcagggatattacctcagatagcctctcactctcttggaccgtgccagaagggcaattcgaccactttctcgtccaattcaagaatggggacggtcaaccaaaagccgtgcgtgtgccaggccacgaggatggggtgacaataagcgggttagaacctgatcacaagtataagatgaacctctacgggtttcacgggggccagcgcgtaggacccgtgtctgccgttgggctgactgcacccggtaaagacgaggagatggctcctgccagtaccgagcccccgacgcccgagcctccaataaaaccccgactggaggagctgacggtcactgatgctacaccggactctctttctctgagttggaccgtcccggagggacagttcgaccactttctggtgcagtacaagaatggcgatgggcaacccaaggccacacgggtcccagggcatgaagacagagtaacaattagtgggctggagcctgataacaaatacaagatgaatctgtacggcttccacggcggtcagcgtgtcggcccagttagcgctatcggggtcacggctgcagaggaagagacccccagccctacagaaccttcaatggaagctccggaaccccccgaggagcctctgcttggagagctgacagtcacgggctcctcacctgattctctgtcactctcgtggaccgtgccacagggcagattcgactcattcaccgttcagtataaggatagggatggtaggccgcaggtcgtgcgagtgggaggagaggagtctgaggtcaccgttggcggcctggagcctggtaggaagtacaagatgcacctttacgggctccacgaagggagaagagttggccccgtctctactgttggagttacagcacctcaagaggacgtcgacgaaacgccttccccaacagagccgggaactgaagcaccagagccacctgaagagccactcctaggcgagctgacagtgactggtagcagccccgatagcctatctctgtcttggacggttccccaggggcgcttcgactcgttcactgtacagtacaaagacagagacgggcgtcctcaagcggtgcgggtgggtggtcaggagagtaaggttactgttagaggtctcgagccaggaagaaagtataagatgcacttgtatggcttgcatgaaggacggcgtttgggacccgtttccgcagtgggcgtaacggaggacgaggccgagacaacccaggccgtcccgactatgacacctgaacccccaatcaagccacggctcggggagctcaccatgacagatgcgacgcctgactccctgtctttgtcctggaccgtccccgaggggcagtttgaccactttctggtgcagtatagaaatggcgacgggcaacccaaagctgtcagagtccctggacacgaggatggggttaccatcagcggactggaacccgaccacaagtataaaatgaatctctacgggttccacggcggacagcgggtcggtccgataagcgtgatcggggtgaccgcagccgaagaagagactccatccccaacagaattgtccaccgaggctccagaaccacctgaagagccactcctaggagagctgacggtgaccggcagcagcccagattctctcagtctgtcatggacaatcccccagggacacttcgattcattcactgtccagtataaagacagggacggacgcccccaggttatgcgagtcaggggcgaggaaagtgaggtgaccgtgggcggccttgagccagggaggaaatacaaaatgcatctgtacggactgcatgagggccgtagggtgggcccagtttcaacggttggagtgaccgaggatgaggctgaaacgactcaggcagtaccgacaaccacgcctgaaccgccaaacaagccgcggctgggagagctcacagtgaccgatgccacaccggatagcctgtctctcagctggatggtccctgaaggacagtttgatcacttcctggtccagtaccggaacggagatggacagcccaaagtggtgagagtgccagggcacgaagacggagtgactattagtgggttggaacccgatcacaagtataagatgaacttgtatgggtttcacggggggcagcgagtcggaccgatctccgttatcggggtgaccgccgcagaggaggaaacacccgcccccaccgagccatccaccgaggcccccgagccacctgaagagcctctcctgggagagctaactgtgacgggttcatctcctgactcactcagcctctcctggaccattccccagggccgcttcgattcatttaccgtgcagtacaaagatagagacgggcgccctcaggtggtgcgcgtaaggggagaggaatccgaggtaaccgtagggggattagaaccgggctgtaagtacaagatgcatctgtatggcttgcatgagggacagcgggtgggacccgtttccgccgtcggtgtgacagctcccaaagatgaagccgagactacacaagccgttcctactatgacccccgaacctcccatcaaacctagactaggggaactgacggtcactgatgcgacccctgactcactttccttaagctggatggtgcccgagggccagttcgatcatttcctggtccaataccgcaatggagacggccagccaaaagccgtgagggtgccaggacatgaggacggggtcacaatctcggggctcgaaccagaccataagtacaagatgaacctgtacgggttccacggcggacagagggtgggcccggtgtccgctattggcgtgaccgaggaagaaacaccctctcccacggaaccgtctacggaagcacccgaagctcctgaggaacccctcctgggagagctaacagtcactgggtccagccctgatagcctgtctctgagttggacaattccgcaggggcgcttcgatagtttcactgtccagtacaaagaccgagacggccagccacaggtcgtccgtgtaaggggagaggaaagcgaggtaacagtgggtggcctggaacccggcaggaaatacaagatgcatctctatggactacatgagggccagagagtgggacctgtgagcaccgttggcatcacggccccgttgcctactcctctgcccgtggaaccccggctcggggagcttgctgtggcagccgtaaccagcgatagtgtcggcctctcctggacagtagctcaagggccatttgattccttcctcgtgcagtatagggatgcccaagggcagccacaagccgttccagtttctggagacctaagagccgtggctgtaagtggcctggatccagctagaaagtacaagttcttactttttggtcttcagaacggcaagcgccacggacctgttcctgtcgaagccagaactgcaccggacaccaaacccagcccgcgccttggcgagcttaccgtcaccgacgcgaccccagactctgttgggctatcatggacagtgcccgagggtgaattcgactcattcgtggtgcaatataaagacaaggacggtcgtctgcaggtagttcccgtggccgctaaccagcgcgaggttactgtccagggtctggagccttcacggaaatatcgatttctcctctatggtctgagcggcaggaaaagactgggcccaatctccgctgattctaccacggccccacttgagaaggagctcccacctcatctcggcgaattaaccgtggccgaggagacttccagtagcctgaggctgtcctggacagttgcgcagggaccatttgacagctttgtggtgcagtatcgagatacagacggtcagccacgggccgtgcctgtggcagcggatcaacggacagttaccgtagaggaccttgaacctggcaagaaatacaagttcctgctttatggcctcctggggggcaaacgccttggacccgtttccgcactgggcatgactgcccctgaggaagacacacctgcgccggagttagctccagaggccccagagccccctgaggaacctcggcttggcgttcttacggtgacagatacaacgccagacagcatgagattgtcatggagtgtggcccaggggccctttgactcattcgttgtacaatacgaagacactaatggacagcctcaggctctgctcgtcgatggagaccaaagtaagattctgatatctggactggaacccagcacgccatacagatttctgttgtacgggttgcatgagggcaagcggctgggaccactgtcagccgagggcaccaccggactggcccctgcgggccaaacctctgaagagtcccgtccacgtctttcccaactctccgttactgacgtgaccacatcttcactacggctgaactgggaagcaccacctggcgcttttgactccttcctcctgcgttttggcgtcccatctccttccaccctggagcctcacccaagaccactgctgcaaagagagctcatggttcccggcacacgacactcggcagtcctgcgtgaccttcgcagcggtacgctatatagtctgactttgtacggtttgaggggaccacacaaagccgattctatacagggcactgcccgcacactctctcctgtcctagaatcccctagggacctccagttttccgagattagggaaacaagcgcaaaagtgaattggatgccccctccaagcagggccgattcattcaaagtgagctatcagctggcagacgggggagagccccagtcagtacaggtagatggccaagcccgaacgcagaagttacagggcctcatccccggagcaaggtacgaggtgaccgtggtgtccgtcagaggattcgaagagagtgagcctctgacaggcttcctgactaccgtgcccgacgggcccacccagctgcgcgccttaaacctcaccgagggattcgccgttctgcattggaagcccccgcagaatcctgtggatacctacgacatccaagttacagctcctggagcgcctccactccaggccgagacccctgggagcgctgtggattaccctttacacgacctcgtccttcataccaattatacggccacggtcagaggtctgcgcgggcccaacctgaccagccccgcgtctattacattcaccacagggcttgaagccccgcgcgacctggaagcaaaagaggtcacacccagaaccgcattgctgacctggacagaaccaccagtcagacccgccggctacctgctgtcattccataccccaggcgggcagactcaagagatcttgctgcctgggggcattacgtcacaccagcttcttggcttatttccatctacctcatataacgccaggctgcaggccacttgggggcagtctcttcttccaccagtgagtacttcctttaccaccggggggctcagaatccccttcccacgcgactgcggcgaggaaatgcagaacggggccggtgcctccaggacttccaccattttcctgaatggcaatcgagaaaggcctttaaacgtgttttgcgatatggaaacagatggggggggttggctcgtttttcagaggaggatggatggccagacagatttctggcgagactgggaggactatgctcatgggttcggcaatatctccggcgaattctggctcggcaatgaggctctgcatagtttgacccaggcaggcgattattccatgcgggtcgatctgcgggcgggcgacgaggccgtttttgcacagtatgattcttttcacgttgatagcgctgccgaatattacagactgcatctggagggctaccacggaacagccggagacagcatgtcctatcactcgggaagcgttttctccgcaagggacagagacccaaatagtctccttatctcctgcgctgtaagttatcgcggagcttggtggtacaggaactgccattatgccaatctgaacggcttatatggtagcacggtagaccaccagggagtcagctggtatcactggaaagggttcgagttttcagtaccttttacagagatgaagttgcggccgaggaacttcagatctcctgcgggaggcggatag

SEQ ID NO: 137540 - DNA, 2022 bp, synthetic construct
  misc_feature 1..2022: note = Description of Artificial Sequence: Synthetic coding sequence
  source 1..2022: mol_type = other DNA
atgagactgagttggtctgtggcacagggaccattcgattccttcgtagttcagtatgaagatactaacggtcagcctcaggccctgctcgtggatggcgatcagtctaaaattctcatttccggcctggaacccagtacaccgtacaggttcctcttgtatggcctgcatgaggggaaacgtctggggcccctatccgccgaaggaactacaggcctcgcaccagcgggacaaacgtcagaagaatccaggccaagactgtcgcagctgtctgtgaccgacgtgacaacctcatccctgagactgaattgggaggcgccacctggggcgtttgactcatttttattgcgtttcggggtgccatctccgtcaacccttgagccccaccctagacccctgcttcagagagagttaatggtgcccggtacccgacacagcgctgttcttcgcgacctccggagtggcacactttacagcctgactctctacggactgcgtggaccacacaaagccgatagcatccagggtaccgcacggacgctctcaccggtgctggaaagcccgagggaccttcagttctctgagattcgggaaacgagcgccaaagtaaactggatgccgcccccatctcgggccgattctttcaaagtgagctaccagcttgcggacggcggggaacctcagtccgtgcaagtcgacggccaggccagaacccagaaactccagggactcatccccggagctcgttatgaggtcacagtggtgtcagtccgcggatttgaggagagtgaacctctcaccgggttcctaacaacagtacctgatggcccgacccagctgcgcgcgttgaatctaacagaggggttcgctgtgctccattggaaaccccctcaaaatcccgtggatacctacgacgtgcaagtgaccgctcccggggccccccccttgcaagccgaaactccaggctctgctgtagactatccactgcacgaccttgtgttgcatacgaactacaccgcaacggtgcggggcttacggggcccaaacttaactagtcccgcttctattaccttcacaacgggcctcgaagccccgagagaccttgaagccaaagaagttacgccccggacagccctgctaacctggactgagccaccagtccgccccgccggctacttgctcagttttcacactcccgggggccagaaccaagaaattttacttccggggggcatcacaagccaccagttgttgggcctcttcccatccacatcatataacgcacggctgcaggccatgtgggggcagtcactgctgccgcccgtgagtacctcgtttacaacgggaggcctcaggattccttttcctcgggactgcggggaggagatgcagaacggcgccggggcctcccggactagcacaattttcctgaacggtaatcgggaaagacccctgaacgtattctgtgacatggagacggacggtggtggttggctggtattccagcggcgaatggacggacagaccgatttctggcgagattgggaggattatgcccacggcttcggaaacatctctggagaattctggctcggtaatgaagctctccacagcttaacgcaagccggagattattctatgcgcgtagacctgcgtgcaggagacgaggctgtgttcgcacagtatgacagcttccacgtagacagcgcagccgagtactaccgcctgcaccttgagggttatcacggcactgccggcgactccatgagctatcattcgggctcagtgtttagtgcgcgcgacagagacccgaacagcctgttgatttcctgcgcagtgagctacagaggtgcttggtggtatagaaactgtcattatgcaaatctgaacgggctgtatggctccacagtagatcatcaaggagttagctggtatcattggaaaggcttcgaatttagtgtgcccttcactgaaatgaagctgcggcctcgcaatttccggtctccggccgggggcggttag

SEQ ID NO: 137541 - DNA, 654 bp, synthetic construct
  misc_feature 1..654: note = Description of Artificial Sequence: Synthetic coding sequence
  source 1..654: mol_type = other DNA
gccccaggaaaggatgaggagatggctcccgcctcaaccgagccccccacaccagaacctccaattaaaccgcgcctggaggaactcacagttactgacgccacgccggattctctctcgctgagctggacagtgcccgagggtcagttcgaccactttctggtgcagtataaaaatggagacggccagccgaaggctacacgggtccccggccacgaagatcgggtgacgatcagcgggctcgagcctgacaacaagtataagatgaacctctatggattccatggcggacagcgcgtgggaccagtcagtgctatcggcgttaccgccgccgaagaggaaaccccgagccccacagagcccagtatggaagctcctgagccacctgaagaacccctgttgggcgaactgactgtgactggtagtagtccagatagcctaagcctctcttggacggtgcctcaagggcggtttgattcttttacggttcagtacaaggacagggacggtcgcccccaggtggtacgcgtcggaggagaagagagcgaagtgaccgtcgggggactcgagccaggccgcaaatacaagatgcacctgtacggactgcacgaaggaaggagagtgggccccgttagcaccgtgggcgtcacctag

SEQ ID NO: 137542 - DNA, 942 bp, synthetic construct
  misc_feature 1..942: note = Description of Artificial Sequence: Synthetic coding sequence
  source 1..942: mol_type = other DNA
actgagccaggtacagaggctcccggaccgccagaggagccgcttctgggcgagctaacagtcacaggatcttcccctgactcactgtcattaagctggacagtgccgcagggacgtttcgactcattcactgtgcagtacaaagatcgcgatggaagaccacaggccgttcgcgtgggtggtcaagaaagcaaggtgacagttcgggggctggagcccggcaggaagtacaagatgcacctgtatggcctgcatgagggccggcggctgggtccggtttcggcggtgggcgtgactgaagacgaagcagagactactcaagccgtgcctacaatgacacccgaaccaccaatcaaaccccggctaggggagctcaccatgacagacgcgaccccagacagcctttctctctcgtggacagtgcccgaaggacagtttgatcatttccttgtgcagtaccggaacggtgatggtcagcccaaagcagtcagggtgcctggtcatgaggacggcgttaccatctcaggcttggagcctgatcacaagtataaaatgaacctctacgggtttcacggcgggcagcgagttggtccgatatccgtgatcggagtcacagctgcggaggaggagacgcccagtcccaccgaattgtctactgaggctcctgagcctcccgaggaaccgctgcttggtgaattgaccgttaccggaagcagccccgacagcttatctttaagctggacgataccccagggacatttcgacagcttcacggtccaatataaggatcgagatggcaggccccaggtgatgcgagtgaggggcgaggaaagtgaggtgacggtgggggggctcgagcctggtagaaaatataaaatgcatttgtacggactgcacgaagggcggagggtgggccctgtgtctaccgtgggggtgacatag

SEQ ID NO: 137543 - DNA, 942 bp, synthetic construct
  misc_feature 1..942: note = Description of Artificial Sequence: Synthetic coding sequence
  source 1..942: mol_type = other DNA
atgacacctgagcctccaattaagccccggctgggcgagttaaccatgacggacgccacccctgacagcctgtctttaagctggactgtgccagaaggccagttcgaccatttcctcgtgcagtaccgaaatggagacgggcagccaaaggcagtccgggtcccaggtcacgaggacggtgttacaatctcgggactcgagcctgatcacaaatacaagatgaacttgtatggctttcatggcggtcaacgcgtcggccctatttctgtaacgggcgtgaccgcagcagaggaggaaaccccctcccccactgaactgtcaaccgaagccccagagccccctgaagagcccctcctaggagagctgaccgttaccggatcttcccccgactctctctcactcagctggacaattcctcagggccacttcgatagcttcaccgtccagtataaagacagagacggtagaccgcaggtcatgcgggttagaggagaggagagcgaagtaaccgtgggcggcttggagccgggtagaaagtacaaaatgcatctttatggattacacgagggtagaagagtgggaccggttagcaccgtgggagtcactgcccccgaagacgaagaggaagagacccccgccccaaccgagcccagcacagaggccccggagccacccgaagaaccccttctgggcgagctgacagtgactgggtcgtcacctgacagcttgagtctgtcatggaccattccacagggtcggtttgactcttttactgtgcagtacaaggacagagatggccgaccccaagttgtacgcgtgcgaggggaagaatcagaggtaacagtgggcgggctcgagcctggttgcaaatacaagatgcacctgtatggcctgcatgagggacaacgggtgggacctgtgagtgccgtgggtgtcacatag

SEQ ID NO: 137544 - DNA, 1281 bp, synthetic construct
  misc_feature 1..1281: note = Description of Artificial Sequence: Synthetic coding sequence
  source 1..1281: mol_type = other DNA
gctggcgaggattgtggagaagaggttcctacaattgaagggatgcgaatgcatctgttggaagagacaacagttcgaaccgagtggactccagcgccaggcccggtcgatgcctatgagattcaatttatccctacgactgagggcgcctccccccccttcactgcgcgggtgccgagtagtgcatctgcttacgaccagagaggattagccccaggtcaggaataccaggtcaccgtgcgcgcgctccgaggaactagttgggggctccccgctagtaagacaataactactatgatagatggaccacaggaccttcgagtggtggccgtgacgcctaccacactggaactcggttggctgcgtcctcaggctgaagtggacagatttgtggtaagttacgtgagcgctggcaatcaaagagttcgacttgaggtccctcccgaggcagacggaaccctcctcaccgacttgatgcctggcgtggagtacgtagtcacagtgactgctgagaggggacgggcagtcagttaccctgccagcgtgcgcgctaataccgggtcatcacctttgggtcttctgggtaccaccgacgagcctcctccgtcaggtcctagcactacccagggtgcacaggcaccactactccagcaacgcccacaagagcttggtgaactgcgcgttttgggcagagatgagacaggcaggctacgggttgtttggaccgcccagcccgacacttttgcatatttccaactccgaatgcgagtaccggaaggcccaggagcccatgaggaagtcttacctggggatgtgaggcaggccctggtgcccccacctccccctggcacaccctacgagctgtccctccatggcgtaccaccgggcggcaagccctccgacccaataatctaccagggaatcatggataaagatgaggagaaacctggcaaatccagcgggcccccacggcttggagagctgaccgttacagaccgaacctcggatagcctgctgttgcgatggactgttcctgaaggagagtttgattcatttgtaatacagtacaaggatcgtgacgggcaacctcaggtggtccctgtcgagggcccacagcgctccgccgttataacatccttagatccgggccgcaaatacaaatttgtgctgtatggtttcgttggcaaaaagagacatggcccactggtcgctgaagccaagattctacctcagagcgaccccagcccaggcactccgcctcaccttggcaatctgtggtag

SEQ ID NO: 137545 - DNA, 2598 bp, synthetic construct
  misc_feature 1..2598: note = Description of Artificial Sequence: Synthetic coding sequence
  source 1..2598: mol_type = other DNA
ctgtatgggttgagaggtaggcagcgcgtcggcccagagagcgtggttgcaaagaccgccccacaggaggacgtggatgaaactccgtcacctacggagcttggtacagaggctccagaaagtcccgaggagcccctgttgggagaattaacggttacaggctccagcccagactcactcagcttgttctggacagttcctcagggctcgttcgacagttttacggtgcagtacaaagatagagacggcagacccagagccgtgcgggtcggcggaaaagagtccgaggttactgtcgggggactggagcctggccacaaatacaagatgcacttgtatggcctccacgagggccagcgtgtgggacccgttagcgctgtgggcgtgaccgctccacagcaggaggagactcctcccgcaacagagtctcccctcgagccgcgtctgggagaactcacagtcaccgacgtcacccccaattccgttgggctctcctggactgttcctgagggtcagtttgactcatttattgtgcaatacaaagataaggacggtcaacctcaggttgtgcctgtggcagccgaccagagggaggttaccgtgtacaacctcgaacccgaacggaaatataagatgaacatgtacggcctgcacgacgggcagaggatgggaccccttagcgtggttatagtgacagcacccttaccgcccgctcccgcaacggaggccagcaaacccccattggaacccagattaggtgagctgactgtgactgatataacacctgactctgttggactgtcatggaccgtgccggagggggaattcgacagctttgtggtacagtataaagaccgagatggccagcctcaagtggtgccagtagctgccgatcagagagaagtcactatcccagatctggaaccgtctcgaaaatataagtttctcctgtttgggattcaggatggcaagcggcggtctcccgtgtccgtggaagccaaaacagtggctagaggggacgcgtctccaggcgcccctccgaggctgggcgagctctgggtgaccgacccaactcccgactcgctcagactgtcttggaccgtgcctgagggccagttcgatagctttgtagtgcagttcaaggacaaggatggcccccaagtcgtgccggtggaaggacacgaaagatccgttaccgttacgccactggacgcagggcggaagtatcgctttttgctgtatggactcctgggaaaaaaacgacatggtcccctgaccgcggatgggaccaccgaggccagatccgctatggacgacaccggcacgaagcggcctcccaaaccaaggctgggtgaagaactgcaggtcaccacggttacgcaaaactctgtggggctgagttggacagtccctgagggccagttcgacagttttgtggttcagtacaaagatagggacggacagccacaggtggttccagtggagggatccttgcgtgaagtgtcggtacccggcctggatccagcccaccgttataagttacttctgtacggtctgcaccacggaaagagagttggacccatcagtgcagtcgctattaccgccggccgtgaggaaacagaaactgaaacaaccgcccctacaccccccgcccctgagcctcacttgggagagctgacagtggaagaagctaccagtcatacgctgcacctttcatggatggtcacagagggagaattcgattcttttgagatccagtacaccgaccgggacggccagctgcagatggtgcgcataggcggagatcggaacgatattacgcttagtggtttagaatctgaccacaggtacctggtgaccttgtacggctttagcgatggaaaacacgtaggtccagtacatgtagaggccctgactgtgcctgaggaagaaaagccatcggagccacccacggccactccagagccacctattaaaccacggctgggggaattgaccgtgaccgacgcaacacccgacagccttagcctgtcttggacggtgcctgaaggccagtttgatcacttcctggtgcagtaccggaatggagatggacagccgaaggctgtgagagtccccggacacgaagaaggggtgaccatatcaggtctcgaaccagaccacaaatacaagatgaacctttatggattccatggcgggcagcgcatggggcctgtctcagtggtgggcgtgacagcagcggaagaggagacgccatccccgaccgagcccagtatggaggctcctgaaccagctgaagagcctttgctcggcgagctcactgtgactggcagttctcctgattctctgtcattgagttggactgtgccacaaggaagattcgactccttcaccgtgcaatacaaggaccgtgacggacgcccgcaggtagtaagagttggcggagaagagagcgaagtcacagtggggggcctggagccaggtcgaaagtacaaaatgcatctctatggacttcacgagggcaggcgagtcggccctgtctctgcagttggcgttaccgcgccagaggaggagagtcccgatgcccccttggcatag

SEQ ID NO: 137546 - DNA, 5208 bp, synthetic construct
  misc_feature 1..5208: note = Description of Artificial Sequence: Synthetic coding sequence
  source 1..5208: mol_type = other DNA
atgagcgtaagtcgcactatggaggacagttgcgagttagacctagtgtatgtgactgagcggattattgccgtgtcgtttccgtccaccgccaacgaggagaatttccgcagcaacctgagggaggtggctcagatgctgaagagtaagcacggcggcaactatcttctcttcaacctatccgaaaggaggcctgacattacgaagctgcatgctaaagttctcgaatttgggtggccagacctgcatacccccgcacttgaaaagatttgttccatttgcaaggctatggatacatggttgaacgccgatccccacaacgttgtcgtcctgcacaacaagggaaaccgaggcagaatcggtgtggtcattgctgcttacatgcactattctaacatatccgcctccgctgatcaggccctggacagattcgccatgaaaaggttttatgaggacaaaattgttcctatcggtcagccttctcagcgacgctacgtgcattatttttctggcctgctgagtggcagcatcaagatgaataataaacctctatttttacatcacgtgatcatgcatgggatccctaattttgagtcgaagggcggctgccggccctttctccgcatctatcaggccatgcagccagtatacacttccggcatctacaatatccccggcgactcccagacttctgtatgtataacgattgagccgggcctcttgctcaagggtgacatcctcctgaagtgctaccacaagaagttccgcagccccgctagggatgtgattttccgggtgcagtttcatacttgtgccattcacgatctgggtgttgtctttggaaaggaagacttggacgatgctttcaaagatgataggtttccagagtacgggaaggttgagttcgtgttctcttatgggcccgaaaagatccagggaatggaacatctggagaacggaccttccgtctccgtggactataacacatcagatcctctcatccggtgggatagttatgataatttctccgggcatcgtgacgatggcatggaggaggtggtgggtcacacccagggtccactcgacggcagcctatacgcaaaagtgaaaaaaaaggattcattgcatggaagtaccggagccgttaacgccacgcgccctactctgagcgccacacccaaccacgttgagcacaccctgagcgtatcttctgacagtgggaactcaacggcaagcactaagacagacaagactgacgagcccgtgcctggagcctctagcgcgaccgctgcactgtctcctcaggagaagcgtgagcttgatcggctgttaagtggcttcggactcgagagggaaaagcagggagccatgtatcatactcagcacctgagaagcaggcccgccggtggcagtgcggttccctcaagtggacgccacgtagtacccgcacaggtccatgtaaacggaggcgccctggcatcggaacgggaaaccgatatcctcgatgatgagctcccaaatcaagacggacatagtgcaggcagtatgggaacactgtcttccctggacggcgtcacaaatacctccgaggggggctaccccgaagccctatcgcctctcaccaacggattggataaaagttaccccatggagccaatggtgaacggtggcggatacccctatgagtctgcatcacgcgcagggccagctcacgcgggacataccgccccgatgcgcccttcctactcagcccaggaagggttagccggctaccagcgcgagggcccacaccccgcatggccccaacctgtcacaacgtcccactatgctcacgacccatcaggtatgttccggtcgcagtccttctctgaggccgagccacagctgcctccggctccagtccgcggcggctcttcacgagaggcggtgcagcggggactgaactcatggcaacagcagcagcaacaacagcaacaacctcgaccgcctccacgacagcaggaaagagcccaccttgagtctttggttgcatctcggccttctcctcagccgctggcagaaacgcccattcctagcctcccagagtttcctcgggccgcctctcaacaggaaattgagcagagcatagaaacactgaatatgctcatgctggatcttgaacctgcgagcgcagcagcccctctccataagagccagagcgtgccaggtgcctggcctggggcatctccgctgagttctcaaccactgtcaggcagttccagacagtcccatccgctgacacagtctagatcaggttatattccatccgggcactctcttgggacgcctgagccggccccgcgcgccagtctcgagtcagtgcctccgggaagatcctactctccctacgattaccaaccctgcctggccggccctaaccaggacttccatagtaaatcccctgcctccagtagtctacccgctttcttgcctactacccacagtcctccaggccctcaacagcctcccgcttccctgcctggtctaaccgcccagcctttgcttagtccaaaggaagcaaccagcgatccttctcgcactcctgaggaggagccccttaatctggaggggctcgtggcccaccgtgtggcgggggtccaagcccgggagaaacagccagccgagccccccgcccctctaaggagacgagctgcctctgacggccaatacgagaatcagtcgcctgaggccacatccccccggagccctggggtccgcagcccagttcagtgcgtgagccctgagctcgcccttactattgcactgaatccaggcgggagacctaaggagccccaccttcacagttataaggaggcttttgaggagatggaagggacttccccttcctcccctcctccctcaggtgtccgcagtcctcctggattggctaagaccccactcagcgcactgggactgaaacctcacaatccagccgacattcttcttcaccccacaggggtaacacgccgacgcattcagcccgaggaagatgagggaaaggtagttgtgagattgtcagaggagccaagatcctacgtggaatcagtggcccgcacggccgtggctggcccccgggctcaggacagtgagcccaagtcctttagtgctcctgcgacgcaggcctatgggcatgaaatccccctgcggaacggcactctgggcgggtctttcgtctcgccctcccccctgtccaccagcagcccgatcctgtctgccgactcgacctccgtggggagcttcccttccggagagtctagtgatcagggtccacgcactccaacccaacctctcctggaatccggatttcgttcagggtcgctcgggcagccatccccatctgctcagcggaactaccagtcatccagcccgctgccaactgtgggtagtagttattcctcacccgactacagcttacagcattttagttccagcccagagagtcaggccagagcccagttttcagtggcaggcgtgcacacagttccaggctcgccacaagcccgtcaccgtaccgtgggaactaatacacccccatcacctggattcggatggcgcgccatcaatccaagtatggccgcccccagctcccccagtctgagccaccaccagatgatgggccccccaggaacagggtttcatggctctactgtatcaagcccacagagcagtgcggccaccaccccaggttcccccagtctgtgccggcaccccgccggcgtgtaccaagtcagcggcctgcataataaggtggccacaacaccaggctcgccgagcctgggaaggcatccgggtgctcaccagggcaacctggcgagcggtctacattccaatgccattgcgagccccggttcccccagcctgggtcggcacctgggcggcagcggtagtgtcgtgcctggctcgccatgcttggatcggcatgttgcttatggcggttatagcaccccagaagacaggagacccactctcagtcgccagtcttctgcttccggatatcaggcaccttccacaccatctttcccggtttcacctgcctactatcccggcctgagctctccagccacgtctcccagcccagatagtgccgccttccgacaggggtcccctacccccgccctgcccgagaagcgccgcatgagtgtgggcgacagagccggcagtctcccaaactacgccaccattaacggtaaggtgtcaagccctgtggcaagcgggatgtcatccccttccggagggtcgactgtgagctttagtcatactctgcccgacttctctaagtatagtatgcccgataactctccagagacaagggctaaggtgaaatttgttcaagatactagcaagtattggtacaagcctgagattagcagagaacaggccattgcgctcttgaaggatcaggagcccggcgcctttatcattcgtgactcacacagcttcaggggagcttacgggttagccatgaaggtcagctctcctcccccgacgatcatgcaacagaacaagaagggggacatgacccacgagctggtacggcatttcctgatcgagaccggacccagaggcgtcaaactgaagggctgccccaacgaaccaaactttgggtctttgtctgcacttgtgtatcagcatagcattattccccttgcattgccttgtaagttggtgatcccaaatcgcgatcctactgacgagagcaaggacagctcgggtccagccaactcaaccgccgatctgctcaagcaaggtgctgcctgcaatgtactgttcgtaaattctgttgatatggaatccctgaccgggccacaagccatctccaaagcaacctcagagaccctggctgctgatccaacgccggcagccacaattgtgcacttcaaggtcagcgcacaaggcattacgctcaccgataatcagcgaaaacttttctttaggcgccattacccgcttaatacagtaactttttgtgacctcgacccacaggagcggaaatggatgaagacggagggaggggctccggccaagctgttcggatttgtggcgcggaaacaggggtctaccaccgacaatgcctgtcatcttttcgcagagctcgatccaaaccagcccgcatccgccatcgtaaatttcgtcagcaaggtaatgctcaacgctggtcagaagcgctag

SEQ ID NO: 137547 - DNA, 1251 bp, synthetic construct
  misc_feature 1..1251: note = Description of Artificial Sequence: Synthetic coding sequence
  source 1..1251: mol_type = other DNA
atggtgccattccagcagagaaaggactgtgtcctggaaggctcgactagggtgacaccttccgtgcagccacacctgcagcccatccgcaatatgagcgtgagtcggactatggaagattcttgtgaactcgatctggtgtatgtaaccgagagaattatcgcagtcagcttcccttctacagcgaatgaggagaactttaggtcaaacctgcgggaggtggcccagatgctgaaaagcaagcacgggggcaactacctcctgtttaacctatcggagcgcaggccggacatcacgaagctgcatgctaaggtgcttgaatttgggtggcccgatctccacacaccagctctggaaaagatctgctcaatctgcaaggcgatggacacatggctgaacgccgacccccataatgtcgttgtcctgcacaataagggcaacaggggcaggatcggtgtggtgatcgccgcctatatgcactactctaacatatcagcctcagctgaccaggcactggatcgattcgccatgaagagattctatgaagacaaaattgtgcctatcggacaaccatcccagagacgctatgttcattacttctccggcctcttgtccgggtccatcaaaatgaacaataaacctctgttcctgcaccacgtgatcatgcatggtattccgaactttgagagcaagggggggtgtcgcccgtttcttaggatttatcaagccatgcagcctgtctatacctctgggatatataacattcctggcgattcccagaccagcgtgtgcatcactattgaacccggattactgcttaaaggtgatattctgcttaagtgctaccataagaaattcagaagcccagctcgagatgtgatctttagggtacaatttcatacctgcgcgatccatgacctcggagtagtcttcggtaaagaggatctggatgatgctttcaaagatgatcgcttccccgagtatggcaaagtggagttcgtcttctcatatggcccagagaagatccaaggcatggaacacctggagaacggccccagcgtgtccgttgattacaacactagcgacccactcattagatgggacagttatgacaatttttctggacatagggacgacggaatggaagatggaaacaaacaaaacacaaattcccagtccatcggtagtattagtggcggcctcgaggatcagtatacctggccagatacacattggccttctcaatcctag

SEQ ID NO: 137548 - DNA, 312 bp, synthetic construct
  misc_feature 1..312: note = Description of Artificial Sequence: Synthetic coding sequence
  source 1..312: mol_type = other DNA
atgtctgtcagtagaactatggaagactcctgtgagctggacttggtttatgtcaccgagcgcatcattgccgtgagctttccaagcaccgcaaacgaggaaaatttccggagtaatttaagggaggtggcccagatgcttaagtcaaagcacgggggcaattacctcctgtttaacctgtcagagcgaaggcccgatatcacaaaactgcacgctaaggtcctggagtttggatggccagacctccacacaccagcccttgaaaaaatttgcagcatatgcaaagcaatggacacatggctgaatgcttag

SEQ ID NO: 137549 - DNA, 5145 bp, synthetic construct
  misc_feature 1..5145: note = Description of Artificial Sequence: Synthetic coding sequence
  source 1..5145: mol_type = other DNA
atgagcgtgtcaagaaccatggaagattcctgtgagctcgatctggtctatgtgactgaaaggattatcgcggtctctttcccgtcaactgccaatgaagaaaatttccggtctaatctccgggaagtggcccagatgctcaaatcaaagcacggcggtaactacttgcttttcaatctcagcgagagaaggccagacattaccaagttgcatgcgaaagtccttgagtttggatggcctgaccttcatactcctgcattggagaaaatatgctctatatgtaaggctatggatacctggctgaacgccgacccccataacgtcgtcgtcctgcacaacaagggcaaccggggcagaatcggcgtggtaatcgccgcctatatgcattattcaaacatatctgcaagtgcggaccaagccctggataggttcgctatgaagcgtttctacgaggataagattgttccgattggacagcccagccagaggaggtacgtgcattacttctctggcctgttgtcaggatctatcaagatgaacaacaagcccctgttcctgcatcacgttatcatgcacggaatacctaattttgaatccaagggagggtgtaggccattcctgcgcatctaccaagccatgcagcctgtgtacacgtcggggatatataacatcccgggcgattcacagacgtccgtttgcattaccattgagcccggattactgctcaagggggacatactcctaaagtgctatcataaaaaattccgaagcccagcccgggatgtgatcttcagagtccagtttcacacgtgtgccatccacgatctcggagtcgtgttcggaaaagaggatctcgacgatgccttcaaggatgatagattccccgagtacgggaaggtggaattcgtgttcagttacggcccagaaaaaattcagggtatggagcatctggagaatggcccatctgtgtccgtcgattacaacacctcagaccccctgatcaggtgggattcctatgataatttctcgggacacagagacgacggcatggaggaggtcgtcggtcacacccagggccccctggacggaagtctgtacgccaaagttaagaagaaggactccctccacgggagcacaggagctgtgaatgccaccaggcccaccctaagcgcaacgcctaaccatgtggaacataccttgagtgtgagttctgacagcggtaattccacggcctccacaaaaacagataaaacggatgagccagtacccggggcaagtagcgctaccgccgcactctccccacaagagaagcgtgaactggatagactgctgtccggtttcggcctggagcgggagaaacagggggcaatgtaccacacacagcacctgagatcccggcctgccggcggctctgccgtacccagtagtgggagacacgtagtgcccgctcaggtgcacgtcaacggcggggcactggcctctgaacgagagacagatattttggacgatgagttaccgaaccaggacggccattctgctgggagtatgggcactctgagctcactggacggagtcaccaataccagcgagggcggatatcccgaggctctcagccctcttacaaatggtctagacaaatcctaccctatggagccaatggtgaacgggggtggttatccctacgagagtgcttccagagcaggccctgctcatgcgggacatacagcccctatgcgcccatcctattcagcgcaggaaggattggccgggtatcaacgtgaaggcccccaccccgcatggccacagcctgtgacgaccagccattatgcccatgatccatccggcatgttcaggtctcagagcttcagcgaagccgaaccccagttgccacccgccccggtgagaggaggatctagcagagaagcagtccaacggggtctgaacagctggcagcagcagcagcagcaacagcagcagccacgcccacctccccgtcagcaggagagggcacacctggagtcgttggttgcatcacgcccaagcccccaacctctggcagaaacacctattcctagcctccctgaatttccccgggccgcaagccagcaagagatcgagcaaagtattgagactttaaatatgctcatgcttgatctagagcctgccagtgctgctgcccccctccacaaatcccaaagtgtgccaggagcatggcctggggcctcacctctgtctagtcagcctttgagcggttcttcgcgccagtcccaccctctcacccagagtcgctccgggtatatcccaagcggccattctcttgggacccctgagccagccccaagggcttccctggaatcggtgccaccaggccggtcctacagcccgtatgactatcagccctgcctggctggccccaaccaagatttccatagtaagtccccggcatcaagctcgctgccggcctttcttccaactactcattcaccccccggcccgcaacagcctccagcttcgctgccaggcttgacggcacagccactcctctccccaaaggaagcaacctccgatccgagccgcacccccgaggaagagccgcttaacctggaagggctcgttgctcaccgcgtggcaggcgttcaagcccgcgagaaacagcctgcagaaccccccgctccactacggcggcgcgctgcgtctgacggtcagtatgaaaaccagtccccagaagccacaagtccaaggtcacctggtgtgcggtcccctgtgcagtgtgtctccccggagctggcattaacaattgcgctgaatcccggaggacgacccaaggaaccccatttgcactcatacaaggaagccttcgaggagatggaggggaccagcccctctagccctcccccaagcggtgtgcggagcccacccggactggccaaaacacctctctccgcactcggactgaagccgcacaacccagccgacatcctgctgcaccccaccggcgaacctaggagctacgtcgaatctgtggctcgaacagctgtggcagggcctcgagcacaagatagtgagccaaagtcattttccgccccagcaacccaggcctatggccatgagatcccactgaggaatggaacactcggaggttcattcgtgtccccaagtcctctctcaacatcctcaccaatcctttctgctgatagcacatcagtgggaagttttcccagtggtgaatcttccgaccagggcccaaggacacccacacagcctctgctcgagagtgggtttaggagcgggagcttggggcaaccttcgccctccgcccagagaaactaccagtctagctcaccactgcccactgttggctcgagctattcctctccggattacagcctgcagcacttctctagctctcccgagagtcaagctagagcccagttctcagtggccggggtgcacaccgtccccggaagccctcaggctcgccatagaactgtcgggacaaacacccccccaagccctggctttggatggcgagccatcaatcctagtatggccgcccccagcagcccttcactcagccatcaccagatgatggggccccccggcaccggatttcacggaagcacagtgtccagtcctcagtcatccgccgcaaccaccccagggtcgccatctctgtgccgtcatcctgccggcgtttatcaggtctcaggccttcataataaggtagcaacgacaccaggctctccatccctaggtagacaccctggagcacatcaagggaatctggcgtcgggactgcactctaacgccattgccagtccaggctccccctccttagggcgccacctcggaggatccggatcagttgtgccaggatcaccatgtctggaccgccatgtggcctacggaggatactctaccccggaagaccgaaggcccacactctccaggcagagctccgcgtccgggtatcaggcaccatctacgccatccttccctgtctccccagcttattatcctggactgtcctcccctgcaacgagcccctctcccgactctgccgcattccgtcagggctctccgactccagccctgcctgaaaagagacggatgtccgtgggagaccgcgccgggagcttaccaaactatgccactataaacgggaaggttagtagccccgtcgctagtggcatgtcctccccatctggaggctccactgtatcatttagtcataccttaccagattttagcaaatactctatgcccgacaactcaccagaaacacgcgccaaggttaagttcgtgcaggacacctctaagtattggtacaagcccgagatatctcgtgaacaggcaattgccctacttaaagatcaggagcctggagcattcatcatccgggactctcatagcttcagaggagcttatggcctggccatgaaggtaagttccccccctccgaccatcatgcagcagaacaaaaaaggggacatgacccacgaactcgtccgtcactttctgatcgaaacaggtccaaggggcgtgaaactgaaaggatgcccgaacgaacctaactttggcagcctgtccgccctggtgtatcaacactctatcataccgctggcgctgccctgtaaactcgtgattccaaatagggaccccaccgacgaatccaaagattcatccggcccagccaattccactgccgatctgttaaaacagggagccgcctgtaatgtgctttttgtcaactccgtggacatggaatccctgaccggccctcaagccatatctaaagcaacttctgaaactctggcggccgacccaacccctgccgccacgatcgtgcattttaaggtatcagctcagggcattacgctcaccgacaaccagaggaagctctttttcagacgacattatcctctgaacaccgtcactttttgcgatttagacccacaggaacggaagtggatgaagaccgaaggtggggctcctgctaagttgtttggcttcgttgcaagaaaacaaggatctacgacagacaatgcttgtcatctcttcgccgagctggaccctaatcagcccgcaagcgccatcgtgaattttgtatctaaggtcatgttaaacgcaggccagaagaggtag

SEQ ID NO: 137550 - DNA, 186 bp, synthetic construct
  misc_feature 1..186: note = Description of Artificial Sequence: Synthetic coding sequence
  source 1..186: mol_type = other DNA
atgagcgtttctaggactatggaagatagctgcgagctggatctagtgtacgtaacagaacgcatcattgccgtgtcttttccaagtaccgccaacgaagaaaatttcaggtccaatttgcgagaagtcgcccagatgctcaaaagcaaacacggtgggaattatctgctttttaacttgtcatag

SEQ ID NO: 137551 - DNA, 75 bp, synthetic construct
  misc_feature 1..75: note = Description of Artificial Sequence: Synthetic coding sequence
  source 1..75: mol_type = other DNA
atgagtgtatctagaaccatggaggactcgtgtgaactcgatctcgtgtacgtgaccgagcgcatcatagcgtag

SEQ ID NO: 137552 - DNA, 4338 bp, synthetic construct
  misc_feature 1..4338: note = Description of Artificial Sequence: Synthetic coding sequence
  source 1..4338: mol_type = other DNA
atggaggaaggccatgggttggatctgacctacattactgagagaatcatcgccgtgtcattcccagccggctgctcagaggagtcttatctccacaatctacaggaagtgacccggatgctgaagagtaaacacggtgataactatttggtgctcaatctcagcgaaaagaggtacgacctgacaaaactcaacccaaagataatggacgttggatggcctgagctccatgcacctcccttggataaaatgtgcactatttgtaaggcccaggagtcctggctcaactcaaatctacagcatgtggtggtcatccattgtcgcgggggcaagggccggatcggagtggtgatctcttcctacatgcacttcactaatgtgtccgctagcgccgaccaggcgctggaccgatttgctatgaagaagttttacgatgataaagtctccgcattgatgcagccttcccaaaagcggtatgtccagttcctgtcgggattgctatctggctccgttaagatgaacgcgtccccattgttcctgcatttcgtgatactgcacggaacaccaaactttgacactggtggtgtgtgtaggcccttcctgaagctttatcaggcaatgcaaccggtgtatacttctggtatttataatgtgggacctgaaaacccatctaggatctgtattgtgatcgagcccgcgcaactgttgaaaggggacgtgatggtcaagtgttaccataaaaagtatagatccgcaacaagggatgtgatcttccgtttgcagtttcatacaggtgccgtgcaagggtacggtctggtttttgggaaggaagatctcgataacgcatcaaaagatgacaggttcccggactacgggaaggtagagttagtcttttcagctacccccgagaagatccagggtagtgagcatctgtacaatgatcacggagttatcgttgactataacactactgacccactgattagatgggacagctatgagaacctgagtgcggacggtgaagtcctacacactcagggacccgtggatggctcactctacgccaaggtgaggaagaaatcaagttcagaccccggcatccctggcggtccccaagcgatcccagccactaattccccagaccattcagaccatacacttagtgtaagctccgacagtggacactcaactgcgtccgcacgcaccgacaagaccgaggaaagactggctccaggcacaagaagaggtctgtcagcacaggagaaagcggagctggaccagcttctttcaggatttggcctcgaggatcctggaagctccttaaaggagatgacagacgcccgttctaagtattctggaactcggcacgttgtgcccgctcaggtgcacgtgaatggtgacgccgctctcaaagaccgagaaactgatatactagatgatgagatgccccaccacgatctgcactcggtcgactccctggggaccctttcaagttcagagggtccccagtcagcacaccttggacccttcacatgtcataaatcctcccagaactctctgttgtctgacgggttcggtagcaacgtgggcgaggacccacaggggacattagtgcccgaccttgggctgggtatggatggaccgtatgagagagaacgaacctttggttctcgcgagcctaagcagcctcagccactgctcaggaagcccagcgtgagtgcccagatgcaggcctatggtcagagcagttacagtactcagacgtgggtcaggcaacaacaaatggtggttgcacaccagtactctttcgcccctgacggcgaagccagattagtcagtcggtgccctgctgataatccaggactggtgcaggcccaaccacgcgttcccctgacacccacacgtggcacatccagccgggtggcagtgcagagaggagtagggtctggcccacacccgcctgacactcagcagccatcaccttccaaagctttcaagcctcgattccctggcgatcaggtcgtcaatggggccgggcctgagctgagtacaggaccttcgccgggctctcctaccttagatatcgatcagtcgattgaacagctgaatagacttattctagaactcgacccaaccttcgagcccatacccactcatatgaacgccctggggtcccaagcaaacggaagcgtatcaccggattccgtgggagggggcctccgtgcaagttcacggctgcctgataccggagaaggacccagccgcgcaacagggaggcagggcagttcagccgagcaacccctgggcggccggctgcgtaaattgtctctgggccagtacgataacgacgctggaggccagcttcctttctctaagtgcgcatggggaaaggccggtgttgactacgccccaaatctgcccccctttcctagccctgccgacgttaaggaaaccatgacaccaggatatccccaggatctcgacatcatcgatggccggatcttaagttcaaaagagagcatgtgctccacacctgcttttccagtgtccccagaaaccccatacgtcaagacagctttgcgacacccacccttttcacctccggaaccgcccctgtcaagtccagcctcacagcataagggtgggcgggagccaaggtcatgtcccgagactctgacacacgcagtaggaatgtccgagtcccctattggacccaaatctacaatgctccgggccgacgcttcgtcgacccccagtttccaacaggctttcgcctctagctgcactatcagcagcaacgggccagggcagcgccgagagagctcgagcagtgccgagcgtcagtgggtcgaatcatccccaaagcctatggtcagcctgctagggtccggcagacccaccggcagcccactgtctgcagagttctcaggtactcgtaaagattctccggtgctgtcctgctttcctccctccgaactgcaggctcccttccattctcacgagctctctttagcagagccccccgactcgcttgccccaccttcgtcccaagcctttcttggcttcgggactgcacctgtgggctcaggactgccgcctgaggaggatcttggtgccctcctggctaactcgcacggggccagcccgaccccatcaattccactgactgccaccggggctgcagacaacgggtttcttagccataacttcctaaccgtcgcccctggtcattcctcccatcattcaccaggcctacaagggcagggggtgaccttgcccggccaacctccgttgcctgaaaaaaagagggccagtgaaggggacaggagcctaggatctgtttcgccgtcctcatctggtttctctagcccgcatagcggatcgaccatcagtataccgttcccgaatgtgctccccgacttcagcaaggcgtcagaagccgccagtcctttgcctgacagtcctggggataagctcgttatagtgaagtttgtccaagatacctcgaaattttggtataaagctgacatatctcgagagcaagcaatcgcgatgctcaaggacaaagagccagggagctttatcgtgagagactcccactcattccggggggcctatggactggctatgaaagttgccacgcctcccccgtctgtgctacagctgaacaaaaaggccggagatctcgccaatgaactagtgcggcatttcctcatagagtgtaccccgaaaggggttcgcctgaagggctgttctaatgaaccctatttcggcagtctcaccgcactagtatgccagcattcaataacacctttggctctgccatgtaaactcctcattcctgagcgagatcctctcgaggagattgctgagtcttctccccaaactgcagcaaactctgcagcggagctcctaaagcagggcgccgcttgcaatgtgtggtatctgaattccgttgaaatggaatcccttacgggacaccaggctatccagaaagctttatcaatcaccctggtacaggagccaccacccgtcagtactgttgtccacttcaaggtgagcgcccaggggataacccttacagataaccagcgtaagctgttttttaggcggcactatcccgtgaacagtgtgattttctgcgctttagatccccaggatcgcaaatggatcaaggacggcccgagctccaaggtgttcggcttcgtcgcaagaaagcagggttccgctaccgataacgtgtgccaccttttcgctgaacacgatcccgagcagcccgccagcgccatcgttaacttcgtgagcaaagtcatgatcgggtcccctaaaaaggtgtag

SEQ ID NO: 137553 - DNA, 3618 bp, synthetic construct
  misc_feature 1..3618: note = Description of Artificial Sequence: Synthetic coding sequence
  source 1..3618: mol_type = other DNA
atggaagaaggccacggcctggatctaacttatattaccgaacggatcattgccgtgtccttccccgcaggatgctcagaggagtcttacctacataatctacaagaggtaactagaatgctgaagtcaaagcatggagataactacctggttttgaacctctctgagaagcgctacgatttgaccaaacttaacccaaaaatcatggacgtcggctggccggagctccatgccccgccgctggacaagatgtgtaccatttgtaaggcacaggagagttggctgaattctaatctgcagcacgtggtggtaattcactgtcgcggggggaaagggcgtattggcgtagtcatttcctcttacatgcacttcaccaacgtgtctgcctccgcagaccaagcactggacagatttgctatgaagaaattttacgatgacaaggtgagcgccctgatgcagccgagtcagaagaggtacgtgcaatttttatcaggcctactgagcgggtctgtgaaaatgaatgcgagtcccctgtttttgcattttgtgatcctccatggtactcccaattttgacacaggtggcgtgtgcagaccttttctcaagttgtatcaagctatgcagccagtctacacatctggaatatataacgttggtccagagaacccctcacggatctgtattgtgatcgagcctgctcaactcctgaaaggagacgtgatgatgccccaccacgacctgcattctgtggatagcctcggcacactgtcttcgagcgaggggcctcagagcgctcatctgggcccattcacttgtcacaagagtagccaaaattccctgttgagcgacgggttcggctcaaatgtcggggaggatccccaggggaccctggttcctgatttaggcctcggcatggatgggccgtacgagcgcgaaagaactttcggtagcagagagccaaagcaaccccagcctctgctccgaaagccttctgtatcagcccagatgcaagcgtacggccaaagcagctattctacccagacatgggtcaggcagcagcagatggtggtggcgcatcagtacagctttgccccggacggagaagctcggttggtgagccgatgtcctgctgacaatccgggcctggttcaggcacagccacgagtcccactgactccaacgcgaggaaccagctctcgggtggctgtccagcggggagtcggctcaggaccacaccctcccgacacacagcaacccagcccgtctaaagcctttaagcctaggttccctggtgaccaggtcgttaatggggccggccccgagctcagtactggtccatcccccggatccccaactctggacatagaccagtctattgagcagctgaatagactgattctggaactggaccccactttcgaacctatcccgacccatatgaatgctttaggcagccaagccaacggatctgtcagtccagactctgtgggcggcgggctgcgcgcttctagtcgcttgccggatacaggcgagggccctagcagagctactggaagacaaggaagctcagccgagcagcccctgggcgggaggctgcgcaagttgagcttagggcagtatgataatgacgctggcggccagctcccattctcgaaatgcgcgtggggaaaggctggcgtggattacgctcctaacctgcccccattccctagccccgccgatgtgaaggaaaccatgacccccggatacccacaggacttggacattattgacggacggattctgtcctccaaagaatccatgtgttcaactccagcctttccagtaagtcctgaaacaccctacgtgaaaacagcattaaggcaccccccgttctcccccccggagcccccactgagcagtcctgcatcacagcacaagggggggagggagcctaggtcctgcccggaaactctgacacacgctgttgggatgtccgaatccccaatcgggccgaaaagcaccatgcttagagccgacgccagctctacgccatccttccagcaggccttcgcctcttcctgtacgataagctcgaacggccctggccagagaagagagtcctcttcaagcgctgagaggcagtgggtggaaagttcgccgaagccgatggtgagcctgctgggctcaggtcgaccgacaggctctccactgtccgcggagtttagcggtacgcgaaaagattctcctgtcctctcttgttttccccccagcgagctgcaagccccttttcacagtcacgagctgagtctggccgagcctccagactcgcttgccccacccagctcacaagcatttcttggcttcgggactgccccagtgggaagtggcctgccccctgaggaggatttgggtgccctcttggcaaactcgcatggcgccagcccgaccccttcaatacctttaactgctacaggcgcggcggataacggttttctaagtcacaattttttaacagttgcaccaggacacagcagccaccacagtccaggcctccagggccagggcgtgaccttgcctggtcaaccgcctctccccgagaagaaaagggcgagcgaaggagatcgcagcttaggatccgtctcccccagttcctccggtttttctagtccacactctggctccaccatcagcattcccttccccaatgtgctacccgatttttccaaggcctccgaagcagcgagcccactgcctgatagccccggggataagcttgtgatcgtaaagttcgtgcaggacacctccaaattctggtacaaagccgacatctccagagagcaggcaattgcaatgctgaaggataaggagcccggaagtttcattgtgcgtgattcacactcgtttagaggcgcctatggcctggcaatgaaggtggccactcctcctccgtctgtcctccagttgaacaaaaaagctggcgacctggcaaacgagctcgtacgacacttcctaattgagtgcactccaaaaggcgtgaggctgaagggatgctcaaatgaaccgtatttcgggagtttgacggcgctggtctgccagcattctattactccattagccctgccctgcaaacttctcattccagagcgggaccctctggaggaaatagcggaaagttccccacaaactgctgcgaactcggccgccgagctgcttaagcaaggagccgcatgcaacgtgtggtatctgaacagcgttgaaatggagtctttaacaggccatcaggcaatccagaaagcactctctataaccctggttcaggagcctccgcctgtgtctacagtggtccacttcaaggtcagtgctcagggcattactctcactgacaaccagcgcaaactgtttttccggcgccactaccccgtaaactcagtgatcttctgtgcattagatcctcaggatcgaaagtggatcaaggacggcccatcttccaaagtattcggcttcgtagctcggaaacaaggtagtgccaccgacaatgtgtgccatctgtttgccgaacacgatcctgagcagccagccagcgctatagtgaacttcgtatctaaagtgatgattggatccccaaaaaaggtgtag

SEQ ID NO: 137554 - DNA, 4338 bp, synthetic construct
  misc_feature 1..4338: note = Description of Artificial Sequence: Synthetic coding sequence
  source 1..4338: mol_type = other DNA
atggaggagggccacggactggacctgacttatattaccgagagaattattgcagtgagcttccccgcaggatgctccgaagagtcctacttgcacaacctccaagaggtgaccaggatgttgaagagcaagcatggggacaattatctggtacttaatctcagcgaaaagcgttatgatctgacaaaacttaaccccaaaatcatggacgtggggtggcctgagctgcacgcccctcccctggacaagatgtgtacgatctgcaaagcccaggagtcatggttgaatagcaacctccaacacgtggttgtgattcattgtcgcggcggtaaagggaggatcggcgtcgtgatctcttcgtatatgcattttaccaatgtgagcgcctcagcagaccaggcgctggatcgattcgcaatgaagaaattctacgatgataaggtctcagccttgatgcagccatcccagaagcgctacgtacagtttctttcagggctactgagcggctcggtaaagatgaacgcctcccccctgtttctgcacttcgtaatcctgcatggcaccccaaacttcgatacgggcggcgtatgccgtccgtttttgaagctgtaccaggccatgcagccggtatacacatctggcatctacaatgtcggtcccgagaatccctcaaggatttgtatcgttattgagccagctcagctgctcaagggagatgtgatggtcaagtgctaccacaaaaagtacaggtctgccacaagggatgtgatttttagactgcaattccacacaggtgccgtgcaggggtatggactggtgtttggaaaagaggatttggacaacgccagcaaggatgaccggtttcccgattacgggaaagtggagctggtgttcagcgccaccccggagaagatccagggatctgaacatctgtataatgatcacggggtgatcgttgactacaatacaaccgatccactcatccggtgggattcttatgagaatctgtcggcagacggtgaagtccttcatacccaaggccccgttgacggcagcctttacgcaaaagtgcgtaaaaaaagcagctccgatcccgggattcccgggggacctcaggccatccctgcaaccaattctccagatcacagtgaccacaccctgtcagtcagctctgactcgggacactccacggctagcgcgaggacagataaaaccgaagagcgactggctccgggcactcgacggggactttccgctcaggagaaagccgagcttgaccagctgttaagcggttttggtctcgaggatcccggctcttctttgaaggagatgacagacgctcgctccaaatatagcggcaccaggcacgttgttccagcccaagtgcacgttaatggggatgccgcgctgaaggacagagagactgacattcttgatgacgagatgccacatcacgatctgcacagcgttgactctttgggaactctaagttcgtccgaagggccccagagcgcacacctgggccctttcacctgccataagtcctcacagaattccctgctgtccgacggctttgggagtaacgtgggggaggacccacaaggaactctggttcccgatttgggcttgggcatggacggcccttatgagcgtgagagaacgtttggatcgagagagcccaaacaaccgcaaccattgctgaggaaaccttctgtatcagcccagatgcaggcatatggacagtcatcttactccacccaaacatgggtcaggcagcagcagatggtggtcgcacaccaatactcatttgcgccagacggcgaggcccgcttggtctcccgctgccccgccgacaacccaggcctggttcaggcccagccccgggttcccttgaccccaacgagaggtacaagctcacgggtggctgtgcagcggggcgtggggtcgggtcctcaccctcccgatacgcagcagccgagcccgtctaaagcctttaagcctcgctttccgggagatcaggttgtgaacggtgctggacccgaacttagtacgggccccagccccggtagtccaacgctggatatcgaccagagtatcgagcagttgaaccgtctgattctcgaactggatcccacttttgaaccaattcctacccacatgaatgctctgggctctcaggcgaatggctccgttagccccgattcagtcggtggcggtttgcgggcatcatctaggctgcccgacacaggtgaagggccgagcagggcaacagggcggcagggaagctccgcagagcaaccactcggcggaaggttgcggaaactgagtctggggcagtacgacaatgatgccggcgggcagctgccatttagcaaatgtgcctgggggaaggcgggcgttgattatgcgccgaacctcccaccctttccaagccccgcagatgtcaaggagacgatgacgcctgggtacccccaggacctggacatcatagatggcaggatcctttcatctaaagaatccatgtgtagcactcccgccttcccggtttccccagagaccccgtacgtgaaaacagctcttaggcatccacctttcagcccccccgagccgccgctttccagcccagcctctcagcacaagggaggaagggagccacgcagttgtcctgaaacgttaacccacgctgttggcatgtccgaatctccaataggaccaaaatctacaatgctgcgggcagacgccagctccacaccctcatttcagcaggcttttgcaagttcttgcaccatttcctcaaatggaccaggacaacgacgggagagttccagcagcgccgaaaggcagtgggtcgaatctagcccaaaaccgatggtgtctttattaggatctgggaggccaactggttcaccgttgtcagctgaattctctggaactcggaaggactcccctgtacttagttgtttcccaccctccgaactgcaggcacccttccatagccacgagctttcactggccgaaccccctgactctctcgccccaccctctagtcaggcatttcttggtttcggaaccgctccagttggttcgggtctccctccagaagaagatctcggagcattgctcgctaacagtcatggggccagtcctactccaagcataccccttacggcgactggggcagcagataatgggtttctttctcataactttctgaccgtggcccccggccatagctcacaccactcaccaggcctccagggccaaggagttacactcccaggccagccgccactgcctgagaaaaaaagagccagtgagggagatcgctccctgggttccgtgtccccatcctccagtggctttagcagccctcactcaggaagcactatctcaatacccttcccgaatgtcctgcccgatttctcaaaggcttcagaggcagcatcccctttgccggactctcccggagataagttggtgatcgtgaagtttgtgcaggatacttctaaattctggtacaaggcggacatctctagggaacaagcgattgcaatgctcaaggacaaggagccaggttcttttatcgtgagggacagccacagcttcaggggtgcttatggattagcgatgaaggtcgccacccccccgccttctgtcctccaactgaacaagaaagccggcgacctcgccaacgagttagtccgtcattttctgatagagtgtacacctaaaggcgtgagactgaagggatgtagcaatgagccgtacttcggaagcctgaccgctctggtgtgtcagcattccatcacccccctcgctctgccatgcaagctcttgattcctgaacgggaccctctggaggagatcgccgaaagcagcccccaaacggctgcgaactcagccgccgagctgctgaagcagggcgccgcctgcaacgtgtggtacctcaacagcgtggaaatggaatcgttaacagggcaccaggccatccagaaagcgttgagtataactctggtgcaggaaccacctcctgtgtccaccgtggtacactttaaggtatcagcccaggggataacactcacagacaatcagagaaaactcttcttccggagacattaccctgttaacagcgtcatattctgtgccctggatcctcaggacagaaaatggattaaagacgggccctcctcgaaagtgtttggatttgtcgctcggaagcaagggagtgctacagacaacgtgtgtcacctgttcgccgagcacgatcccgaacagccggccagcgcgattgtgaatttcgtgtctaaggtaatgattggcagtccaaagaaagtatag

SEQ ID NO: 137555 - DNA, 327 bp, synthetic construct
  misc_feature 1..327: note = Description of Artificial Sequence: Synthetic coding sequence
  source 1..327: mol_type = other DNA
atggaagaagggcatggactcgatctgacctacattactgaaaggattatcgctgttagttttcccgcagggtgctccgaggagtcctacctccataatctgcaggaagtgaccaggatgctcaaatccaagcatggtgacaattacctcgtgttgaaccttagcgagaaacgctatgacctgacaaagttaaatcccaagattatggatgtgggatggcccgaattacatgcaccaccgctggacaagatgtgtactatatgtaaggctcaggaatcctggcttaacagcaacctgcagcatgtagtggtgattcattgcagatag

SEQ ID NO: 137556 - DNA, 417 bp, synthetic construct
  misc_feature 1..417: note = Description of Artificial Sequence: Synthetic coding sequence
  source 1..417: mol_type = other DNA
atggaggagggccacggcctggacctgacctacatcactgaaaggatcatcgccgtctcattccccgccggatgttctgaggaatcctacttgcataatttgcaggaggtgaccaggatgctgaagtctaagcacggcgacaattatctggttttaaacctgtcagaaaagcggtatgacctgaccaagctgaatcccaagattatggatgtcggctggcccgagctgcacgccccaccattagacaagatgtgtacaatctgcaaggcccaggaaagctggttgaactcaaacctgcaacacgttgtggtaatccattgcaggggggggaaaggccggataggcgtggtgatttcttcgtacatgcattttacaaacgtttctgcatctgctgatcaagctctcgataggttttag

SEQ ID NO: 137557 - DNA, 753 bp, synthetic construct
  misc_feature 1..753: note = Description of Artificial Sequence: Synthetic coding sequence
  source 1..753: mol_type = other DNA
atggaggaaggccacggcctcgacttgacgtacatcaccgagcgaatcattgccgttagctttcctgcaggctgtagcgaagagagctacctgcacaacttacaggaggtaaccagaatgctcaaatcaaaacacggcgataactaccttgttctaaatctgtccgagaaaaggtatgacctaactaagctgaacccaaaaattatggacgttgggtggccagagctgcacgcaccccccctagataagatgtgcactatttgtaaagcccaggagtcctggctgaactcgaacctccagcacgtagtggtgatccactgtaggggtgggaagggccggatcggagtggtgatttcttcctacatgcactttactaacgttagtgcaagtgccgaccaggccctggatcgcttcgccatgaagaaattttacgatgataaggtgagcgcacttatgcagccaagccagaagcgctacgtccaatttctaagtggtctgctttcagggtcagtgaagatgaatgcctcccccctgtttttacactttgtcatcttgcatggcaccccgaatttcgacaccgggggcgtgtgccggcccttcttaaaactgtatcaggcaatgcagcctgtatacactagcgggatatacaatgtgggcccagagaatccctcacgtatctgcatcgttattgaacctgcacaactcctcaagggggacgtgatggtgatgaactacaacatcgctaacatttag

SEQ ID NO: 137558 - DNA, 753 bp, synthetic construct
  misc_feature 1..753: note = Description of Artificial Sequence: Synthetic coding sequence
  source 1..753: mol_type = other DNA
atggaagagggacatgggttagacttgacttatattactgaacgaataatcgccgtgagctttccagcaggatgctctgaggaatcatacctccataacctccaagaggtgactaggatgttaaaaagcaaacacggcgataattatctggtgttgaacctcagtgagaaaagatacgacctgaccaagctcaatcctaaaattatggacgtgggctggccagaattgcacgccccacccctggacaaaatgtgcaccatttgtaaagcacaggagagctggcttaactcgaacctgcagcatgtagtggtaattcactgccggggcggcaagggcagaatcggagttgttatttctagctatatgcatttcacgaacgtttcagcttcagcagatcaggctctcgaccggttcgccatgaagaagttttatgacgataaagtaagtgcattaatgcagccctcacagaaacgttacgtccagttcctctcaggcttgttgagcggatccgttaagatgaatgcctctcctctgtttctgcattttgtgattctacacggaactcctaactttgacacagggggagtgtgccgtcctttcctgaagctgtaccaggctatgcaaccagtctacaccagcgggatttacaatgttggcccagagaacccgtctcgaatatgtatagtgatagagcctgcacaactcctaaagggggatgtcatggtgatgaactataacattgccaacatctag

SEQ ID NO: 137559 - DNA, 3816 bp, synthetic construct
  misc_feature 1..3816: note = Description of Artificial Sequence: Synthetic coding sequence
  source 1..3816: mol_type = other DNA
agccaggcgctgaacgagcgtatgaattggctgtgcagaaatcaggatcctaacccgccaccccagcctgaggagctcacttcctccctgcatgcatttaaaaataaagctttcaagaaatctaaagtctgcggtgtttgcaagcagatcattgatggccaggggatttcatgcagggcgtgcaagtactcctgtcacaaaaagtgcgaggctaaggtggtgatcccctgtggagttcaggtgcgcctggagcaggcccccgggagtagcacactctctagttcattgtgcagggacaaacctctcaggcctgtgatcctgtccccgaccatggaggaaggacacggtctcgacctcacttacattacggaacgaattatagccgtcagctttcccgccggctgcagtgaggagagctatctgcataacctgcaagaggtcactcgtatgcttaagtccaagcacggtgacaattatctggtgttgaacctttccgagaagcggtacgacctgactaaactgaatcccaagatcatggacgtgggctggcccgaactgcacgcaccaccgcttgacaaaatgtgtacgatttgcaaggcgcaggaatcttggcttaactctaatcttcaacacgtcgttgttattcactgtaggggaggtaagggcaggattggggttgttatcagctcttatatgcactttactaacgtgagtgccagcgccgatcaggcacttgacaggtttgccatgaaaaaattctacgacgataaagtttctgctttgatgcaaccgtctcagaaaaggtacgtacaatttctttcaggtcttctttctggctccgtgaagatgaacgcatcccctcttttcctccactttgtcattctacatggcacccccaactttgacactggaggggtctgccgacccttcttgaaattgtaccaggccatgcagcccgtgtacacttccgggatctacaacgtggggccagaaaacccctcccggatctgtattgtgatcgagcccgcccagctgctgaagggtgacgttatggtgaagtgctaccacaaaaagtaccggagcgccactcgagatgtcatcttcagactgcagtttcacaccggggccgtgcaaggttacggactggtgttcggaaaggaggacctcgataatgcttctaaggacgaccgctttccggattacggtaaggtagagctggtgtttagtgctacccctgagaaaatccaggggtccgaacatctatataatgaccatggcgtgatcgtggactataataccaccgatcccctgattagatgggattcttacgagaatctttccgcagacggcgaggtgctgcatacccagggcccggttgacgggtccctatacgccaaggtgcggaagaagtcgtctagcgaccctggcatacccggagggccccaggctatcccagccaccaattccccggaccacagtgatcacacactctctgtcagcagcgactcaggacactctacagccagtgccagaacagacaagactgaagagcgtctagcccccggcacccgtagaggcctgagtgcccaggagaaggccgagctcgaccagctgttaagcggctttggactggaggatcctggcagctcattaaaggagatgactgacgcaagatctaagtatagcgggactcgacatgtggttccagctcaggtccacgtgaatggagatgctgctctcaaggatagggaaaccgacattctagacgacgaaatgccccaccatgatctgcattctgttgacagtttaggaacattatcatcatcggagggcccccagtccgcccatctcggacccttcacttgtcacaaatcttcacagaactctctgctttcagatgggtttggttctaatgtcggcgaagacccacagggcaccctcgtgcccgacctgggacttgggatggatggtccctatgagagggaacggacctttgggtcccgggagcctaaacagccccaacccctgctgcgtaagccatcagttagcgcccagatgcaggcatacggccagtcttcttactcaacgcagacctgggttcggcaacaacaaatggtagtggcccaccagtactcctttgcccccgacggcgaggctcggctggtgtcaaggtgtcccgcggacaaccccggactggttcaggcccaaccccgtgtaccacttacaccaacccggggaacgtccagccgagtggcggtgcagcggggggtgggttccggaccacacccacccgacacgcagcaacctagtccctccaaagccttcaagccacgattcccaggcgaccaggtggtgaacggcgccgggccggaactctctacgggccctagtcctggatcacccactctcgatatcgatcagtcgatcgaacagctcaaccgcctcatcttggaactcgatcctacttttgagcctatcccaacgcatatgaatgcattgggctcgcaagctaatgggagcgtcagcccggacagcgtggggggggggttaagagcaagttcgcggttgccggacactggagaaggaccttcacgcgctaccggtcggcagggctcctccgctgaacagccactaggaggtcgccttcgcaagctttcactgggacagtacgataacgacgcaggagggcagctgcctttctcaaagtgtgcttgggggaaagccggggtggattacgctccgaatcttcccccgttcccctcaccagcagatgtgaaggaaacgatgacccctggctaccctcaggatctggacattattgatggtcggattcttagctccaaggagagtatgtgttccacacccgccttccctgtgtctcccgaaaccccatacgtcaagactgccctgcgccatcccccttttagcccccccgagcccccactttcctccccagcttcccagcataagggcggccgagaaccacgttcttgtccggagacccttacccacgccgtggggatgtctgaaagtcctattggaccaaagagtacaatgctgcgggctgatgccagctcgaccccgagctttcagcaagcattcgcaagctcttgcactattagcagtaatggcccaggccagcggcgcgaatcatcgagctccgctgagagacagtgggttgaaagcagtcccaagccaatggtcagcttgctgggaagtggcagacccactggtagcccactgtcagccgaattctcaggcactcggaaggactcaccagttcttagttgctttccaccctcagaactccaggcgccgttccattcacacgaattatcgttggctgaacctccggattctctcgcccccccctcaagccaggcttttttgggattcggcacagcacccgtcgggagcggacttcctccggaagaggatcttggcgccctcctggctaattctcatggcgcctccccgacaccatctattcctttgactgcgacaggcgccgccgacaatggatttctgagtcacaatttcctgacagtcgcgccaggacattcatcccaccattcacccggccttcagggacaaggcgtgaccttacctggtcaaccacccttgcctgaaaagaaacgggcttccgaaggagataggtccctgggttctgtgtccccatctagttcaggcttttcgtcaccacactctggctctactatttctatcccattcccgaacgtgttgcctgacttttccaaggcctctgaagcgcccaccttctaccagacctccaagccagatatccccgggccgtag

SEQ ID NO: 137560 - DNA, 2760 bp, synthetic construct
  misc_feature 1..2760: note = Description of Artificial Sequence: Synthetic coding sequence
  source 1..2760: mol_type = other DNA
atggatggaccttacgaaagagaacgcaccttcggaagtagggagcccaagcagccccagccactgctcaggaagccttccgtcagtgcccagatgcaggcctatggtcagtcgagctacagcacgcagacatgggtgagacaacagcagatggtggtggctcaccagtattcttttgcccccgacggagaagcacggctcgtcagccgatgccctgcggacaaccctggcttagtgcaggcccaacctagagtgcccttgaccccaactaggggcactagcagccgggtagctgtccagcgaggggtgggcagcgggccccacccaccggatactcaacagccgtctcccagtaaagcttttaagcctcgattcccgggagatcaagtggtgaacggcgctgggcctgaattgtcaacaggcccaagccccggatctcctactcttgacatcgatcagtctatcgagcagcttaatagactcatcctcgagttagacccaacattcgagcccattccaactcacatgaacgccttgggatcacaggccaatggcagtgtcagtcccgactctgtgggaggtgggctgcgtgcttcttcccgcctcccagacactggcgagggtcccagcagagccacaggccgacagggctcatccgccgagcagcctctgggtggccggctgcgaaaactgagtctgggacaatacgataacgatgctggcggccagttacccttttctaaatgtgcctggggcaaggcaggggtcgactatgctcctaacctaccaccgttcccctctcctgccgatgtgaaggagactatgacacccggatatccccaggacctggatatcatcgacggtcggatcctgagttccaaggagagcatgtgtagcaccccagctttccccgtcagccctgagactccttatgtgaaaaccgctctgcgccacccacctttctccccacctgagccccctctatcctcccccgcatcccagcataaaggagggagagagcctcgcagctgtcctgagaccttgactcatgccgtcggcatgagtgagtccccaatcggccccaagtctaccatgctccgggcagacgcatcgtcaacacccagttttcaacaggccttcgccagctcgtgcacgatttcttctaatggaccgggacagcgtcgcgagtcctcctcctccgcagagagacagtgggttgaaagctccccaaaacccatggtaagcttgctggggtccggacgtcccaccggctcaccactcagcgccgagttcagcggcaccaggaaggacagtcctgtgttatcatgctttccgccttctgaactgcaggcccccttccactcccatgaacttagcttagccgagcccccagattctctcgctccaccgtcatcccaggctttcctgggcttcggaaccgcccctgttgggtctggcttacctccagaggaggatctgggcgctcttttggcaaacagccacggcgcaagccccacaccaagcatccccctcacagccaccggagccgccgataatggattcctttcccataattttttaaccgtggccccggggcattccagccatcattcacctggcctgcagggccagggcgtaactctgccggggcagcctcctctgcccgagaagaagcgggcctctgagggtgatagaagtcttgggtctgtctccccaagctcatctgggttttcatctccacatagtgggtccactataagcattccgttccccaatgtgctccccgacttctctaaagccagcgaagctgcgagccctctgcctgacagccccggggataagttggtgatcgtgaagttcgtgcaggacaccagcaaattttggtacaaggcggatatcagccgagagcaagccattgctatgctgaaagacaaagaacctgggagcttcattgtgcgagattcccactcatttaggggcgcctacggtctggctatgaaggtcgctacccctcctcctagtgtgctgcagctgaataagaaggccggggatctggccaacgaactggttcggcactttctcatcgagtgtacaccaaagggcgtccgtctaaagggatgttccaatgaaccttattttggctcattgacagctctcgtttgtcaacactcaataacaccgctggccttaccttgcaagctcctgatccccgagcgggacccactcgaggaaattgctgagagctcccctcagactgccgcaaacagcgctgcagagctcttgaagcagggcgccgcatgtaacgtgtggtacctaaactctgtggaaatggaatcgttaaccgggcatcaggccatccaaaaagcactgtctatcacactggtgcaggaaccccctcctgtgtctacagtggtgcattttaaagtgtccgctcaaggaatcactcttactgacaatcagcgaaaactgttctttagacgccattaccctgtaaatagcgtgatcttctgcgccctggacccacaggataggaaatggatcaaggacggccccagctccaaggtgtttgggtttgtggctcgcaaacaggggtcagcgaccgataacgtgtgtcacctatttgctgagcacgatccagaacagcctgcaagagaaagccagagacacagaggtgctcgggacggtccacacgaagcaatgcccagacgccacagtggatcacccgccaacgttctgtttgagcttatcggacaggtgtag

SEQ ID NO: 137561 - DNA, 2148 bp, synthetic construct
  misc_feature 1..2148: note = Description of Artificial Sequence: Synthetic coding sequence
  source 1..2148: mol_type = other DNA
atgtctcaggttatgagctcccccctcctggctggagggcatgctgtgtccctggcaccctgcgacgaacctagaaggaccctgcatccagcacctagtccgagcctcccgcctcagtgcagctactatacaacagagggttggggcgcccaggctctgatggctcctgttccctgcatggggccacccggtcgtctgcagcaggcgcctcaagtggaagctaaggcgacgtgcttcttgccctccccaggtgagaaagcactcgggacgcctgaggatctcgacagttatattgacttcagtttagagtcattaaaccagatgatccttgaactggatcccacattccaattgttgcctcccggaactggaggaagtcaggcagagttagcacaatctacaatgagtatgcgtaagaaggaggagtctgaggcactggatatcaaatacatcgaagtgacatccgcgcggtcacgttgtcacgacggccctcagcactgctctagtccctctgtgactccgccctttggaagtctgaggagcggtggactgctcttgagcagggatgtgcctcgcgagacgcgatcttcaagcgagtccttgattttttcgggaaaccagggtcgtggacatcagcgcccactccccccctccgaagggttatcgccccggccccctaactcaccaagcatatcaattccttgcatgggctctaaggcatcctctccacatggtctcggaagtcctctggttgcatccccccgcctggagaaaagactcggaggtctcgctcctcagcgaggtagtcgtattagtgtgctgagcgctagtcccgtgtccgacgtatcgtacatgtttggttcaagccagtcactgttgcattcgtcgaattcatcccatcaatccagctctaggagtctcgagtcgcctgctaacagtagttcatcactgcactccttaggctcagtctctctctgcactaggccaagtgattttcaagccccccgaaatcctacccttaccatgggtcaacctcgtaccccccatagtcctccgctggctaaggaacacgcctcttcatgcccgccttcaatcaccaatagcatggttgatattcccattgtacttattaacgggtgccctgagcctggttcatccccccctcagaggaccccaggccatcaaaactctgtgcagcctggagctgcatctccatccaacccttgccccgccacacggagcaacagccagaccctttccgacgctcccttcacaacttgcccagaaggaccagctagggatatgcaacctacgatgaaattcgttatggataccagcaaatactggttcaaaccaaatatcacccgtgaacaagccatcgaacttttgagaaaggaggaaccaggggcattcgttatacgcgactccagcagctacaggggcagttttggacttgccctgaaggtgcaagaggtgcccgcttcggcccagagtaggccaggagaagactcaaatgatttaattaggcactttctgattgagagtagtgcaaagggtgtccatctgaaaggtgctgacgaggaaccctacttcggttcactgtctgcttttgtttgccagcatagcataatggccctggcacttccgtgcaagctgactataccacaaagagaacttggtggggccgatggagcaagcgactccacagattcgccggcatcttgccagaagaagtcagctgggtgccacactctgtatcttagctcagtgtccgtggagactttaacgggcgcgctggcagtgcagaaagccatttctaccacattcgagcgagacatactgccgacgcccacagtcgtacacttcaaagtcacagaacagggcataacgctaactgatgtccaaaggaaagtcttctttcgacggcattacccactgacgacattgcggttttgcgggatggacccggagcagagaaaatggcagaaatactgcaaaccatcgtggattttcggtttcgttgcaaaaagtcagactgagccccaggagaatgtgtgccacctgtttgccgagtacgatatggttcagcctgcctctcaggttatagggctcgtaacggccctgttacaagacgcggagagaatgtag

SEQ ID NO: 137562 - DNA, 2148 bp, synthetic construct
  misc_feature 1..2148: note = Description of Artificial Sequence: Synthetic coding sequence
  source 1..2148: mol_type = other DNA
atgagccaggtaatgtccagcccccttctggccgggggacacgccgtgtcattagctccatgcgatgaaccacgacgtaccttgcacccagccccgtccccttctctgccgccacaatgttcttactacacgaccgaagggtggggggcccaggcgttaatggctccagtcccttgtatgggaccaccaggccggctgcagcaggctccccaggtggaggcaaaagcaacatgcttcctcccaagcccgggcgagaaagcactggggacaccggaggatctcgactcctacatcgatttttccctggagagtcttaatcagatgatactggaactcgacccaacatttcagctgttgccgcccggtacaggggggtcccaagcagagctggcccagagtaccatgagcatgcgaaagaaggaagaaagcgaggccctcgacattaaatatatcgaggtgacctcagcacgcagtaggtgccatgatgggccacagcactgtagcagcccttctgtgactccgccattcggcagtcttcgatccggcgggctcctgctctctcgagatgtgccccgcgagactaggtcctcgagtgagtctttgattttctccggcaatcagggcagggggcaccagcgccccttacccccctctgaggggctgagtccgaggccccctaattccccgagcatcagtatcccatgcatggggtcaaaagcaagcagtccccatggactcggctcgcccctagtggcaagccctcggttagaaaaacggctggggggcctcgcccctcagcgaggctcccgaatctccgtgctgagcgccagcccagtgtctgatgttagctatatgttcgggtcatcccagagcctcctccactcttccaactcaagtcaccaatcaagctccaggtctctagagtctcccgctaacagcagtagcagcctccattcattagggagcgtttctctgtgcactagaccctctgacttccaagcccctagaaatcccactctgacgatgggccagccccggaccccccacagccctcccctggccaaagaacatgccagcagctgccccccaagcatcacaaactcaatggttgacataccgatcgtcctcataaatggctgccccgaacccggctctagccccccacaaagaacgccgggacatcagaattcggttcaaccaggggcggcatcacctagtaacccatgtcctgctactcggtctaacagccaaaccctttctgacgccccatttacgacatgccctgagggcccagctcgtgatatgcagcctaccatgaagttcgtgatggacacatcaaaatattggtttaagccaaacattacgcgcgaacaagccatagagcttctccgcaaggaagaacctggggcattcgttattagggactcttccagctaccgtggttcatttggactcgccctcaaagttcaagaggtgcctgcgtcagcccaatcccgcccaggagaggatagtaatgatcttatacgccatttcctgatagagagctccgcaaaaggggtgcatctaaaaggggcagatgaagagccatatttcggatcactttctgctttcgtctgtcaacattccatcatggcactggccttgccgtgcaagctgaccattccacagcgcgagcttggcggagcggatggcgctagcgatagtactgattctccggcttcatgccaaaaaaagagcgccggttgccatacactgtatcttagctctgttagcgtagagaccttaaccggagccttggctgttcagaaagctatttcaacaacattcgaacgcgacatcctgcctacacccaccgtggttcactttaaagtgactgagcagggaattactctgaccgatgttcagcgtaaggtctttttcagaaggcattaccctcttaccacactccggttctgtggtatggatccagaacagagaaagtggcaaaagtactgtaaacccagttggatattcggctttgtagccaaatcccaaaccgagccccaggaaaacgtgtgccacctatttgccgagtatgatatggttcaacccgcttcacaagtgatcgggctggtcacagcactcttgcaggatgcagagcgcatgtag

SEQ ID NO: 137563 - DNA, 387 bp, synthetic construct
  misc_feature 1..387: note = Description of Artificial Sequence: Synthetic coding sequence
  source 1..387: mol_type = other DNA
atgaggccagtgcccgtgcggggcgtgcatagtctgcacccgcgaccttttggagggcctgtctcactgccctggcttcgcaccggcagatgccggtggggactggggctgtaccgacagcctagcctgttgcctgaagaaatctgtggcgtattcttcagacgccactatccattgaccacattgcgcttctgcggtatggacccggaacagagaaaatggcagaaatactgtaaaccctcttggatcttcggattcgtcgccaaatcccaaaccgagccacaagaaaatgtgtgccacctgtttgctgaatacgatatggtacaacctgcttcccaagttatcggtttggttactgccctattacaggatgcggagagaatgtag

SEQ ID NO: 137564 - DNA, 4230 bp, synthetic construct
  misc_feature 1..4230: note = Description of Artificial Sequence: Synthetic coding sequence
  source 1..4230: mol_type = other DNA
atgaaatcctccgggcccgtagaaaggctcctgagggccttaggacgacgggactcaagtcgggccgctagccggccacggaaagcagagccacactcctttagagaaaaggtgtttagaaagaagccacccgtgtgtgctgtgtgcaaagtaaccatcgacggtactggggtgtcatgccgcgtgtgtaaagtggcaacgcatcgcaagtgtgaagccaaagttacttcggcatgccaggctctgccacctgtcgaactccgccggaacaccgcccctgtccggcgcatcgaacatctgggctccacgaaaagtctaaaccactccaagcagaggtctaccctgccgcgttccttctcattggacccattaatggagaggcgctgggaccttgacttgacctatgttaccgagagaattcttgctgccgcatttcctgctagacccgacgagcagaggcacagaggacacctccgggaactggcacatgtgctgcagagtaagcacagagacaagtatctgctctttaacctgtccgagaaacggcacgatctaacccggctgaatcctaaggtgcaggacttcgggtggcctgagttgcacgccccaccgctggacaagctgtgtagcatttgtaaggcgatggaaacttggctgtcggcagaccctcagcatgtggtggtgctgtattgcaaggggaataaaggcaaattgggggtcatcgtctctgcctacatgcattacagcaagatctctgccggcgctgaccaggccctggcgactcttactatgcggaagttttgtgaggacaaggtcgctaccgagctccagccgtctcagcggcgatacattagttattttagcgggctgctatcaggcagcatcagaatgaactcaagccccctctttctccattatgttttgatccctatgcttcctgctttcgagcccggcacaggttttcagccgtttctcaagatctaccagagtatgcaacttgtgtacacatctggcgtctatcacatagccgggccaggcccacagcagctatgcatatcactggaacctgcgctcctgctcaagggggatgtgatggttacatgttaccataaaggcggcaggggcacagaccggacccttgtctttcgggtccaattccacacttgcactattcacgggccacagttgacatttccaaaggatcagctcgacgaggcgtggaccgacgagagattcccatttcaggccagcgtggaattcgtgttttccagctcccccgaaaagataaaaggttccacaccccggaacgatccgagtgttagtgtggactacaacactacagaacccgccgttcgctgggactcttatgagaacttcaatcagcatcacgaggacagcgtcgatggctccttgacgcacacccgcgggccgttggacggctccccttatgctcaggtacaaagacctccacgccaaaccccccctgcaccctcacccgaacctccacctcccccaatgctttcagtgtcctctgattccgggcattcttcaactctgacgaccgaacctgccgcagagagtccaggacggcctccccccacggctgccgagcgccaggagctggataggttgctgggcggctgcggcgtggcctctggcggccgtggagcaggacgcgagactgctattttagatgacgaagagcagccaactgtgggcggaggtcctcacctgggggtgtacccgggccatcggcccggactgagtaggcactgttcatgcagacagggctatcgagagccttgcggggtgcccaatggtgggtactatcgcccagaaggcacactagagcgaaggagactggcctatgggggttatgaaggctccccgcagggctatgcagaagcctcaatggagaaaagaagactctgccgatcacttagcgaagggttatatccttatccacctgaaatgggaaagcccgccaccggagatttcggttatcgagcaccaggatatagggaggttgtgattttggaggatcccggactccccgcactgtacccttgcccagcatgcgaagagaaactggctctcccgactgcggccttgtacggactgcgtctcgagagggaagctggggaaggctgggcctcagaagcaggcaaaccattacttcatcctgtgcggcccggacatcccctcccgctcctgctccctgcctgtggacatcatcatgcccccatgcctgactattcttgcctgaaaccacccaaggccggcgaggagggccacgagggctgcagctacaccatgtgtccagagggccggtacgggcaccccggctacccggcactggtcacctattcttacggcggggcagtgccatcctactgtcctgcctacgggcgggttccacactcctgtgggtctccgggggaaggcagggggtacccttcaccgggcgcccatagcccccgagcagggagcatttcgccgggatcccccccgtatccccagtcccgaaagctgagctacgaaatccccaccgaagagggtggcgatagatatccccttccagggcacctggcgtctgcaggccccctggcctctgctgagtcactggagcctgtaagctggcgggaaggaccctccggtcattcaacacttccaagatcgccaagggacgctccctgcagcgcatcaagtgaattatctggaccgagtactcccctgcatacctcgtctcctgtgcaggggaaggagtctacaaggcgccaggacaccagatctccaactagtgcccccacacaaagactgagcccgggggaagccctccctcccgtatcacaggctggcaccggcaaagccccagaactgccaagtggcagtggaccagaacctctggcccccagcccagtctctcccaccttccccccctcatcccctagtgattggccgcaggaacggtcacccggaggtcattcagacggagccagcccccggagtcccgtaccaacgaccctaccaggccttagacatgccccttggcaaggccctagaggccctcctgactcaccggacggatcacccctcacgccagttccttcccagatgccctggttggtcgctagtcctgaaccgccccagagttcacccactccagcattcccgctcgccgccagctatgacactaacgggctgtctcagcccccactgcctgagaagaggcacctgccaggccctgggcaacaacccgggccatggggtccagagcaagcgtcttccccagcacgaggcatttctcatcatgtgaccttcgctccacttctctcagacaatgtgcctcagacaccagagccgccaacccaggaatcgcaatctaacgtgaagttcgttcaggatacgtcaaagttttggtataaaccccatctgtccagggatcaggctatcgctctgcttaaagataaagaccccggagccttcctcatcagggattctcactccttccaaggggcctatggtcttgccttaaaggtagccacccctcctcctagtgcgcagccatggaaaggagaccccgtagaacagctcgtgaggcattttttgattgagacagggcccaagggagttaaaattaagggatgtccttcagaaccttacttcgggagtctgtcagccctggtatcccagcacagcatttcccccattagcttaccctgttgcctgaggataccgtccaaagaccctctcgaggagactcccgaagcgcccgttcccacaaacatgagcacagcagccgacctgctgaggcagggagccgcctgcagcgtgctgtatctgacaagcgtcgaaacagagtctttgactgggcctcaggcagtcgccagagctagtagtgcagccctgtcttgcagtcccagacccacccctgctgtcgtgcattttaaggtgtctgcccagggtattacccttacagacaaccagcgaaagctgttctttcggcgacattacccagtcaactccatcacattttctagtacagatccacaggatcgtcgttggaccaacccagacggtacaacttcaaaaatctttggatttgtggcaaaaaaacctgggagcccttgggagaatgtatgccacctcttcgcagagctggaccctgatcagcctgctggtgctattgtgacgtttatcactaaggtgctcctcgggcagagaaagtag

SEQ ID NO: 137565 - DNA, 4260 bp, synthetic construct
  misc_feature 1..4260: note = Description of Artificial Sequence: Synthetic coding sequence
  source 1..4260: mol_type = other DNA
atggatggaggcggcgtctgcgttgggcggggggatctgctgtcatcacctcaggctctagggcagttactgcggaaggaatccaggccacgacgggcgatgaagcccagaaaagcagagccccacagctttagggagaaagtgtttcgcaaaaagcctccagtatgcgctgtgtgtaaagtaaccatcgacgggaccggggtaagctgccgcgtctgcaaagtagccactcaccggaaatgcgaggccaaggtgacatcggcatgccaggcactgccacccgtggagctacgtaggaacacagcacccgttcgacggatagagcaccttggttcaactaagtccctaaaccacagcaagcaacggtcaactctccccaggtctttctccctagatccgctaatggagaggcgctgggatctggacctgacctacgttaccgagaggatcttagccgctgccttcccagccagaccagacgagcagcgccacaggggccatctgcgggagctggcacacgtgttacaatcgaagcaccgagataaatatctcttattcaatttatccgaaaaacggcacgatcttacccgcctgaatcccaaggtacaggattttgggtggcccgagttgcacgcccctcccctcgataaactatgcagcatctgtaaggccatggagacctggctgagcgctgatccacagcatgttgtggtcctgtactgtaaggggaacaagggcaagctgggagtgattgtctctgcgtatatgcactattcaaagattagcgccggtgcagaccaggcactggctacactaaccatgagaaagttctgcgaggataaagtggctacagaactccagccatctcaaagaagatatatcagctatttttctggcctgctgtccggatccatacgaatgaactcgagccctctgtttctgcattatgtgttgattcccatgctacctgcatttgaacccggcactggatttcagcccttcttgaagatatatcagagcatgcagctggtttataccagtggcgtctaccatattgctggtccaggtccccagcaactctgtatctccctcgagccagccttgcttctcaaaggagatgtgatggtgacctgctatcataaaggaggtcgggggaccgatcgcacgctggtgttcagggttcaattccacacatgcacaatccacggaccacagttaacattccctaaggatcagttagatgaggcctggacggacgaaaggtttcccttccaagcaagtgtggagtttgtcttttctagctcgcctgaaaagattaagggctccacaccgaggaacgacccttcagtttcagttgattacaacacgacggagcccgctgttcgatgggattcatatgagaatttcaatcaacatcacgaggactccgtggatggatcgctaacccacaccagaggtccactggacggctcgccctatgcacaagttcagaggcctcccaggcagacaccaccggccccgtctcctgaaccgccaccaccaccaatgctgtctgtgtcaagcgactccggacacagcagtactcttactacagagcccgccgcggagtcgccaggtagaccccccccgaccgctgccgagcggcaagagttggatcgtctattgggggggtgcggtgtggcaagcgggggacgaggcgccgggagggaaaccgccattcttgatgatgaggagcagccaactgtcgggggaggaccacatctcggcgtgtacccgggccatcgaccagggctcagccgccactgttcttgtcgtcagggctaccgcgagccctgtggggtgcccaatgggggatactacaggcctgagggtacacttgagcggagacggctggcctacggcggatacgaaggctccccgcagggctacgccgaagcctcgatggaaaaacggcggctctgcaggagccttagcgagggtctctatccctacccaccggaaatgggaaagccagctactggagatttcggctacagggccccagggtaccgcgaagttgtgattttagaagacccgggtctccccgctctgtacccctgccccgcgtgcgaggagaagctggccctcccgacagccgccttgtacggactgaggctggagcgtgaggccggggaggggtgggcaagtgaggcaggcaaaccattactccacccagtcaggccaggtcatcctctgcccctgctactgccggcctgtggtcatcaccacgctcccatgccggattatagttgcctgaagcctccgaaggctggagaggaaggccacgagggatgcagttacaccatgtgtcctgagggtagatacggtcaccctggttatccggctctagtaacttatagttacggcggcgccgtgccgtcatactgccctgcttatggccgtgtcccacacagctgcggatccccaggggagggacgtggctatccatcccctggtgctcactcacctcgtgccggatctatctctccgggatcacccccataccctcagagccgaaagctttcctacgaaatccctaccgaggaggggggcgaccggtaccctctcccaggacacctggcctccgcgggtccgctcgcatccgccgagtctctggaaccagtgagttggcgggaaggcccttccggccatagcacactacccagaagccctagagacgctccctgttctgcaagctccgagctgtcaggcccttccacccccctgcatacctcttctccagtccaaggaaaagaatctactcgaagacaagatactaggtctcctaccagtgcccctacccagcgattaagccctggcgaggccttgccccctgtgtcgcaggccggtactggtaaagctccggagttacctagcggttccgggcccgagcccttggcaccatctccagtaagtcccaccttccccccgtcctcaccgtccgattggcctcaggaacggtcacctggcggccatagtgacggtgcttcaccgaggtctccagtccccaccaccctgcctgggctgcggcacgccccctggcagggccctagagggccacctgactcacccgatggatccccactcactccagtgcccagccaaatgccttggctcgttgcatccccagagcccccgcagtccagtccaacccccgcctttcctctcgccgcttcttatgacaccaatgggttgtcacaaccacccctgccggaaaagcgacatctgcccggacccgggcagcagcccggcccctggggacctgagcaagccagcagcccagccagaggcattagtcaccacgttaccttcgctccactgctatcagacaacgtcccacagacacctgaaccaccaacacaagagtcccagagtaatgtcaaattcgtgcaggatacatccaagttctggtacaaaccacatttatctcgggaccaggctattgcactactcaaggataaagaccctggcgcgtttctgattcgagacagccactcctttcagggcgcctatgggcttgctttaaaggtggctacacctcccccatcggctcagccctggaaaggcgatcccgtggagcaactggtgcggcactttcttatcgaaaccggacccaagggtgtcaagatcaaggggtgcccctccgagccttatttcggaagtctctcggccttggtgtcacaacactctattagccccatttcactgccctgctgcctgcgaattccctccaaagacccactggaagagactcctgaggcacctgttcctaccaacatgagcaccgcggctgatctgctgcggcagggagcggcctgttccgtgctgtacctgacctccgtggaaacggagtcactcacaggaccacaggcagtggcgcgggcaagtagcgcagcactcagctgcagcccgcgtccaacacccgctgtcgtacatttcaaggtgtcagcacagggcattaccctcactgataatcagcggaaactgttttttagacgccattatcccgtgaatagcataacattttcatcaacggacccccaggaccgcaggtggacaaatccagacggaaccacatctaaaatttttgggtttgtggctaagaaaccaggttcgccttgggaaaacgtttgccacctgttcgctgagctggaccctgatcaacctgctggcgcaatcgtgacctttattaccaaggtcctgctcggccagaggaagtag

SEQ ID NO: 137566 - DNA, 3858 bp, synthetic construct
  misc_feature 1..3858: note = Description of Artificial Sequence: Synthetic coding sequence
  source 1..3858: mol_type = other DNA
atggaacgtcgttgggacctggacctgacgtacgttacagagagaattttggccgccgccttccccgcaaggcctgatgagcaaagacatcgtggccatctgagggaactggcccatgtgctgcagagtaaacaccgggacaagtaccttctcttcaacttatccgaaaaaagacatgatctgacacgtttaaatccgaaggtccaagacttcggctggccggagttacacgctcctccattggacaagctgtgcagcatatgcaaggctatggaaacctggctgtcagcagacccccagcatgtggtcgtcttatactgcaaggggaataaggggaaactgggggtgattgtcagtgcgtacatgcactactccaagattagtgcaggcgctgatcaggccttagccacgctgaccatgagaaagttctgcgaggacaaagttgctacggaacttcaaccgtctcagcggaggtacatcagttatttctcaggcttgctgtcaggaagtataaggatgaacagctctcctctgttcttgcactatgtgctgattccaatgttgcccgcttttgagcccgggaccggctttcagccttttctaaaaatctaccaaagcatgcagctggtatacacctccggggtgtaccatatagcgggacctggtccacaacagctgtgtatctctctcgagcccgctctccttctcaagggtgacgttatggtaacgtgctatcacaaaggcggaaggggcactgatcgcactctggtctttagagtccaatttcatacttgtactatccacgggcctcagcttacctttcctaaagatcagctagatgaggcatggacagacgaacgcttcccgttccaggcctctgtagagttcgtgttcagcagcagccctgagaaaattaaaggaagtaccccaagaaatgatcccagcgtttccgtggattataacaccaccgagccggccgtacggtgggattcctatgaaaacttcaatcagcaccatgaagactccgtagacggcagtttaactcacacccgcggcccccttgatggctccccttatgcgcaggtgcagaggccccctagacagactccccctgctccctcgcctgagccccctcctccccctatgctgtcggttagctcagatagcggacactctagcaccttaaccacggaaccagccgccgagtcccccggcaggccaccacccacggccgccgagcggcaggagctggacaggttactgggaggctgtggggtggcgtcaggaggccggggagccggccgagagacagctattctcgatgatgaagagcagcccacggtggggggcggcccacatctgggggtctatcccggacacagaccaggcttgtctaggcactgtagctgccggcagggataccgcgaaccgtgcggggtgccaaacggcgggtattacagacctgaaggcaccctcgagcgccggcggttagcctacgggggctatgagggtagccctcaaggttacgccgaggcgagtatggagaaacgacgactgtgtaggtcactgtcggagggcctgtatccctatccgcccgaaatgggcaaaccagcaacaggcgacttcggttaccgggcgcctggctaccgcgaagtcgtgattttagaggaccctggattgccagctctttatccatgcccagcctgcgaggagaagctcgccctgcctactgcggcactctatggactccgtctcgagagagaagctggagaaggatgggccagcgaagccggtaagccccttttacatcccgtgaggcccgggcaccccctccctctgctcctgccagcctgtgggcatcaccacgcgcccatgccggactacagctgcctgaagccacctaaggcgggcgaggagggccacgaggggtgctcttatactatgtgccctgaaggaaggtacgggcaccccggctatccggcactagtgacctatagctatggaggggctgtcccttcatactgcccagcatatgggcgggtgccgcattcctgcggcagccctggggaagggcgaggctatccttcccccggcgctcactctccccgggccgggtccatctcccccggttcacccccctacccccaatcacgcaagctcagttatgagatcccaactgaggagggcggcgatcggtaccccttgccaggacacctcgcgtccgccgggccactcgcatccgctgagagtcttgaacccgtgagctggcgagagggcccctctgggcattccacactgccccgcagtccgcgggacgcgccttgtagcgccagttcagaactgtcagggccgagcacgcccctacatacttcttcacctgtgcaaggaaaggagtctacccggcggcaagacacaaggtctcctacaagcgccccaacccagcggctgtcccccggagaggccctgcctccggtctcccaggctggcacgggcaaggccccagagcttccaagcggaagtggcccagaaccactggctccctcccctgtctcccctacattcccaccatcctcgcctagcgactggccacaggagaggtcccccggagggcattcagacggggcatcccctagatcacccgtccctacaacactccccggattgcgccatgccccttggcagggcccacggggccctcccgattcacccgacggctccccactcaccccagtgccatctcagatgccatggctcgtggcgtcccctgaaccccctcagtcttctcccaccccagcattccctctggccgcctcctatgatacaaacgggctcagccaacctcccctgcctgagaagaggcatctacctggaccgggacagcaaccgggcccttggggccctgagcaggcctccagtccagctcgcgggatcagtcatcacgttacgttcgcacctttgctgtcagacaacgtcccccagactcctgagcccccgactcaagagtcccagtccaacgtgaagttcgttcaagacacctccaaattttggtacaagccccatttgtcacgggatcaagccattgccctgttgaaggacaaggatcccggcgcatttttaatccgggatagccacagcttccagggtgcttatggcctcgccctcaaagtggcaactccccctcccagcgctcagccctggaagggcgacccagtggagcagttagtgcgccactttctaatcgagaccggcccgaaaggcgtaaagataaaggggtgccccagtgaaccctactttggcagtttgagtgccctcgtgtcacaacactcgatttcccctatcagcctgccatgctgtctcagaattccctctaaggaccctcttgaggaaactccggaggctcctgtccctacaaacatgtcaaccgctgcggacctgctcagacagggggccgcctgctcggtgctctatctgacttccgtggagaccgagagtctcactgggccgcaggctgtggcacgagcctccagcgctgccctcagttgcagccccagaccaactcctgccgtcgttcacttcaaagtttcagcacaggggatcaccctaacagacaatcaaaggaaactgttcttccggcgccactacccggtcaactctataacattcagcagtactgatccacaggacagaagatggaccaatcctgacggcaccacctccaagatatttgggttcgtggcaaaaaagccaggtagcccttgggagaacgtctgtcacctgtttgccgagctggacccagaccagcccgctggagcgatcgtcactttcattactaaagtcctgcttggacagcggaagtag

SEQ ID NO: 137567 - DNA, 2346 bp, synthetic construct
  misc_feature 1..2346: note = Description of Artificial Sequence: Synthetic coding sequence
  source 1..2346: mol_type = other DNA
atgaaatcgagcggacctgttgagcggctcttacgcgccttaggcagaagagattcctcacgagctgccagcaggccaagaaaggctgaacctcacagcttccgggaaaaagtttttcgtaagaagcccccagtgtgtgcagtgtgtaaagttactattgacggtactggcgtgtcctgtagggtctgtaaagtggcaacccataggaaatgtgaggccaaggtgacaagcgcatgccaggcactgccaccagtggaactcaggaggaacacagccccagtgcgacggatcgaacacctcgggtcaacgaagagcctcaaccattctaagcagcggtctacactcccgcgaagcttttctcttgacccgctgatggaaagacgctgggatttggaccttacatacgtcactgagcggatactagctgccgcctttcctgcccgacccgacgagcagcgccatcgggggcacttgagggaactggctcatgtgttgcagtccaaacatcgggataaatatctgctatttaacctatccgagaagcgccacgacctgacaaggctgaaccctaaagtgcaggacttcggctggcccgagctccatgctcctcccctggacaagctttgctcaatttgtaaggcgatggaaacttggctgtccgcggacccacagcatgtggtggtgctgtactgtaaggggaacaagggtaagttgggagtaatcgtctccgcatatatgcactatagcaaaattagtgcgggagcagatcaggctctggcaacattaaccatgagaaaattctgtgaagataaagtcgccaccgagctacagccttcccaacgaagatacatttcctacttctcgggcctgttgtccggttccattcgaatgaactcttcccctctgttcttacactatgtccttattcccatgctgccagcctttgagcctggcacagggttccagccctttctaaaaatttatcagagcatgcagctcgtgtatacttccggcgtttaccatatcgctggccctggaccacagcagctctgcatttccctggaacctgcactcctgctaaagggggatgttatggtgacctgttaccacaaaggcgggagaggaacagatcgtacgctcgtgttccgcgtccagttccacacctgtaccatccacggtccacaacttacttttccaaaggatcagctcgatgaggcatggacagacgaacgtttccccttccaggcaagtgtcgagtttgtgtttagcagttctcctgaaaagatcaaaggatccacacctagaaatgacccatctgtctcggtggactacaataccaccgagcctgccgtgcggtgggactcttacgaaaatttcaatcagcatcatgaagactctgtcgacggatctttaacacacacccgaggccctctcgatgggtcgccttatgctcaagtgcagcgcccacctcgacagacccctccagcaccctcacccgagcctccaccaccccccatgctgtcagtcagctcagattctggccatagtagcacccttaccaccgaacccgctgccgaatcgcccggtcgacccccgcccaccgcagccgaacggcaagagctcgaccgcctgttaggtggctgcggagtggcttccggaggcaggggagcagggcgcgagaccgcgattctagatgatgaggagcaacctacagtgggcgggggaccgcacctcggagtttatccgggtcacagaccgggcttgagtaggcattgttcctgccgccagggctatcgcgaaccttgcggagtgcccaatggaggatactaccggcctgaggggactttggaacgcaggagattggcttatggcgggtatgaaggttcgccacagggatacgcagaagctagcatggaaaaacgacggctttgcaggagcctgtcagagggcctttatccttacccccccgagatgggaaagccagctacaggagactttggctatcgggctagctcagctgcacttagctgctctcccaggcctacgccagcggtggttcacttcaaggtttctgcccaaggaatcactctcacagacaatcagcggaagctgttttttaggcgacactatccagtcaatagcattacattcagttccactgacccccaggaccgaaggtggacaaatcctgacggcaccacctccaagatctttggattcgtcgctaagaagccagggtccccctgggagaacgtgtgtcatctctttgccgagttggaccccgaccagcctgccggggccattgtcacgttcattaccaaggtattgttagggcaaaggaaatag

SEQ ID NO: 137568 - DNA, 4200 bp, synthetic construct
  misc_feature 1..4200: note = Description of Artificial Sequence: Synthetic coding sequence
  source 1..4200: mol_type = other DNA
atgaagtcatctggacctgtcgaacgcctgctgagggcccttggccggcgggacagttcccgtgctgctagtagaccccgcaaggctgaaccacacagtttccgggaaaaagtgttcaggaagaaaccgcctgtgtgtgcagtctgtaaggtgaccattgacggcacaggcgtgagctgcagagtctgcaaagtcgccactcatcgaaagtgtgaggccaaagtcactagtgcttgtcaagcacttccaccggtggagctccggcgaaatacggctcccgtgagacgcatcgagcacctggggtcaactaagagcttgaatcactcgaagcagcgtagcacccttccgcgctcattctccctggatcccctcatggagaggcgatgggatcttgacctgacttatgtaaccgaaagaattctcgccgctgctttcccagcacgccctgacgagcagcgccaccgcggtcatctgcgggagctggcccatgttcttcagtccaaacaccgagacaaatacttgctgttcaacctgtccgaaaagagacacgatttaactcgtctgaatccaaaagttcaggattttgggtggccagaactgcacgcccctcccttggacaaactgtgcagcatttgcaaagccatggaaacttggttgtcagctgatccacagcatgtcgtagttctctattgcaaaggaaacaaagggaaactaggggtcattgtaagtgcttacatgcactattccaaaatctctgccggagccgaccaagccctcgccactttaacgatgagaaagttttgcgaggataaagtggccactgagttgcagccgtcccagaggcgctacatttcctatttttcaggtttattatctggaagcattcggatgaatagttcacccttatttctgcattacgtgcttatacccatgttaccggcctttgagccggggacgggatttcagccgttcctgaagatttaccagagtatgcagctggtctacacctccggagtgtaccacattgctggtccagggccacagcagctctgtatatcgctggagccagcgctgttactgaagggggatgtaatggtcacgtgttatcataaaggcggtcgcggtactgatcgaacgttggtgttccgcgtgcagttccacacatgtaccattcatggtccacagctgacgtttcctaaggaccagctcgatgaagcttggacagatgagcggtttccgttccaggctagcgtcgagttcgttttcagcagttcccccgaaaaaatcaagggctccaccccccgcaacgacccgtccgtgtcagttgattataatactacagaaccagccgtgcggtgggattcttatgaaaatttcaatcaacaccacgaggatagtgtcgacggatccctcacacatacaagaggcccgcttgacggaagcccttacgcgcaggtgcagcgacccccaagacagaccccccctgctccctctcctgagccaccccctccaccaatgttgagtgtatcctccgacagcggacatagctccacccttactactgaaccagccgccgaaagcccagggcgacctccacccactgctgcggaacggcaagagttggaccggcttctcgggggatgcggagtcgcgtccgggggtcgaggtgcaggccgggaaactgctattcttgatgatgaggagcagccaacagttggcgggggtccccacttgggcgtgtaccccggtcataggccagggctgtctcggcactgctcatgcaggcagggctatagggaaccttgcggcgtgcccaacggtggatactatcgtccagaaggaacattagaacgccggcggttagcctatggaggctacgaaggctctccgcaaggctacgcagaggcatcaatggaaaaaagacgcttgtgccgatccctgagcgagggtctatacccttatccaccggagatgggaaagcccgcaacgggagattttggctacagagcaccaggttatcgcgaggttgtgattttggaggacccagggctgccagccttgtacccttgcccagcgagcctttacggtctgcggctggagagggaagctggggaaggctgggctagcgaagctggaaagcccctgctgcacccagtgcgaccaggtcatcctcttcccctgctcctccctgcctgcggtcatcatcatgcccccatgcccgactacagctgtctcaaacctcctaaagctggtgaagaggggcacgagggatgctcctacactatgtgcccagagggccgctatgggcaccctggatatccagcgctggtgacctattcctatggcggcgccgttcccagctactgtccagcctacggacgtgtccctcactcttgcggcagtccaggggagggccgcggctaccctagcccgggggcacactcccccagagccggcagcatttcccccggcagccctccctatccccaatctaggaagctgagctacgaaatccctacagaagaaggcggtgatagatatccactgccaggccacctggcctctgcagggcctctcgcctccgctgaatctcttgagcctgtgagctggagagaaggtccttccggtcattccactctcccgagatccccgcgggatgcaccgtgctcagccagtagtgaactgagcgggccttcaacacccctccacacctcatctcctgttcaaggaaaggagtccaccagacgtcaggacaccagaagtccaacttctgcacccacgcaacgactctccccaggcgaggctttgccaccagtatcccaggctggaacaggcaaggcgccagagctgccgtccggtagcggcccagaacccctcgccccctctcccgtaagtcccacatttcctccatccagtccctcagattggccacaggagcgctcccccggtggtcactccgacggcgcgagcccacgctctccagttcccacgaccctacctgggctgcgacacgctccatggcagggtccaagaggcccaccagattcaccagatgggagccctctgacgccggtccctagccagatgccttggctggtggcttcgcctgagcccccacagtctagtcccaccccagcctttccccttgctgcaagttatgatactaatgggctctctcagcctcccctccccgaaaaacgacacttgcctgggcccggccagcaacccgggccatggggtccggagcaggcatcttcccctgcacgcggaatctcacatcatgttactttcgccccattgcttagtgataacgtaccgcaaaccccggaacctcctacacaggaatcacagagcaacgtcaagtttgtgcaagacacctcaaaattttggtataaaccacatttgagccgggatcaggccattgctctgctgaaagacaaagaccccggagcgtttctgattcgcgattcccacagttttcagggggcctatgggctggcactcaaggtggctaccccacctccttctgcccagccgtggaaaggcgacccggttgaacagttggttaggcattttctgatcgagaccggaccaaagggggtcaagatcaaaggctgtcccagcgagccttacttcgggtccctgtctgctctcgtatcccagcacagtatctccccgatttctctgccttgttgcctgaggatacccagcaaagacccacttgaagaaacccctgaggctcctgttcccaccaatatgagcactgctgccgatctgctgcggcagggagcggcctgttcggtcctttatctcacaagcgtcgaaacagaatctctgacagggccgcaggccgtggccagagcttcttcagcagcgctgagctgctcccctcgccccacccctgctgtggtccattttaaagtgtctgcccagggtattaccctaacagacaatcaacgaaaactgtttttccgacgtcactaccccgtcaacagcatcaccttttccagtaccgaccctcaggacaggcggtggaccaatcccgacggcaccaccagcaagatttttggcttcgttgccaaaaagcccggttctccctgggaaaacgtttgccacctgtttgccgaactcgatcccgaccaacctgccggtgccatcgttacattcattacaaaggtgttgctaggacaacgcaaatag

SEQ ID NO: 137569 - DNA, 567 bp, synthetic construct
  misc_feature 1..567: note = Description of Artificial Sequence: Synthetic coding sequence
  source 1..567: mol_type = other DNA
atggattgccgtaaaatggctagatttagttattctgtcatctggatcatggcaatcagtaaggtgttcgagctgggtcttgtggccggactgggacaccaggaatttgcccgacctagcagggggtacctggcttttcgcgatgatagtatttggcctcaggaagaacccgctataaggcctaggtcatcacagcgggtgccgcctatgggaatacaacattcaaaagagttgaatagaacttgttgtctcaacggcggtacttgtatgcttgggagtttctgcgcctgcccgccctcgttttatgggagaaattgcgagcacgacgtgaggaaagagaattgcggcagtgttccgcatgacacgtggttgccaaaaaagtgttcgctgtgtaaatgttggcatggccagctgagatgctttccccaagcttttctcccggggtgtgacggcctcgtcatggatgaacacctggttgcctccaggacccctgagctccccccaagcgcacggaccaccactttcatgctggtgggtatttgtctctccattcagagttattactag

SEQ ID NO: 137570 - DNA, 519 bp, synthetic construct
  misc_feature 1..519: note = Description of Artificial Sequence: Synthetic coding sequence
  source 1..519: mol_type = other DNA
atggccatctctaaggtattcgaacttggcctggtggccggactgggccatcaagagttcgccaggccatccagaggctatctggctttcagagacgacagcatctggccacaggaggagccagcgatccgtccacggagttcacaaagggtgcctcccatgggcatacagcacagtaaggaactcaatcgcacctgttgcctcaacggaggcacctgcatgttgggaagcttctgtgcatgtcccccatctttttatgggaggaattgcgagcacgatgttcggaaggaaaattgtggctcagttcctcacgatacgtggctgccaaagaagtgcagcctgtgcaagtgttggcacggtcagctgaggtgctttccccaggctttccttcctggttgcgacggcctggtgatggacgagcatctggtggccagccgcacacccgaactgccccctagtgctagaactactacgttcatgttagtaggaatctgcctgagcattcagtcttactattag

SEQ ID NO: 137571 - DNA, 645 bp, synthetic construct
  misc_feature 1..645: note = Description of Artificial Sequence: Synthetic coding sequence
  source 1..645: mol_type = other DNA
atgggggctgcacattcagcatctgaggaagtgagagagttggaggggaaaaccgggttttccagcgatcagattgagcagctgcatagaaggtttaaacagttatctggagatcaacctacgatccgcaaagagaacttcaacaacgtgcctgacctggaactgaacccaatccggtcgaagatcgttcgggcattcttcgacaataggaaccttagaaaaggacccagcggcctggccgacgaaataaactttgaggatttccttacaataatgagttattttcgaccgatcgacactacaatggacgaggagcaggtcgaactctctcgcaaagaaaaactgcggtttttgtttcacatgtacgactctgactcagatggcaggatcaccttagaggagtaccgcaatgtggtggaggaacttctgagcggaaatcctcacatcgaaaaggagtcagcgaggagtattgcagacggtgccatgatggaggccgcgtctgtgtgcatggggcagatggagcctgatcaagtctacgaagggatcacctttgaggacttcctgaaaatatggcaaggtatcgacatcgagaccaagatgcacgtgagatttcttaatatggaaacgatggccctctgtcactag

SEQ ID NO: 137572 - DNA, 804 bp, synthetic construct
  misc_feature 1..804: note = Description of Artificial Sequence: Synthetic coding sequence
  source 1..804: mol_type = other DNA
atgagacctaggagcggtcctacgagaaacccaagattgagagcttttgcaggcgtgccgactaggggacgcacacggggtcagtccagaagatgcgccgccgaagccagtgcaggccctgaaagagacgccaggcctggagctcccgccgcggggacgatgggcgccgcacacagcgcatccgaggaggtgagagaacttgaaggcaagacgggattctcctctgaccaaattgagcagctgcacaggaggtttaaacagctgagcggggatcagccgactatcagaaaagagaacttcaataatgtgcccgatctagagttaaatccgatcagatcaaaaattgtgcgtgcatttttcgataatcgaaatctgcggaagggtccctcaggcctggctgatgagattaattttgaggacttcctcactataatgtcttatttccgtcctatagacaccactatggacgaagagcaggtagaattgtctcgaaaggagaagctccggtttctattccatatgtacgactctgattccgacgggaggatcacccttgaggaatatcgaaacgtggtcgaggagctcctctccgggaatcctcatatcgagaaggagtccgccagaagcatcgccgacggcgccatgatggaagctgcgtcagtgtgcatgggccaaatggaaccagatcaggtgtacgaaggaatcacgtttgaggactttcttaaaatatggcagggaatcgatatcgaaaccaaaatgcatgtccgcttcctgaacatggaaactatggcattgtgccattag

SEQ ID NO: 137573 - DNA, 564 bp, synthetic construct
  misc_feature 1..564: note = Description of Artificial Sequence: Synthetic coding sequence
  source 1..564: mol_type = other DNA
atgggcgctgcacattcggcctcagaggaggtccgagaactggaaggaaaaacaggattctcgagcgaccagattgaacagctccatcgtcgctttaaacagttgtccggggaccagcccactatcaggaatctccgtaaaggtccttctggactggccgatgagattaactttgaggattttctgactattatgtcctatttcaggcccatagatactactatggatgaggagcaggtggagctgtccagaaaggaaaagctgaggtttctgtttcatatgtacgatagcgattcggacggtcgcataacattggaggaatatagaaatgtcgtggaggaactcctgtcaggtaatccccatattgagaaggaatctgccagaagcatcgctgacggagccatgatggaagcggcatctgtatgtatggggcagatggagcctgaccaggtgtatgagggcattacatttgaagattttttgaagatctggcaaggcatagacattgagaccaaaatgcatgtgaggtttttgaatatggagacaatggctttgtgtcactag

SEQ ID NO: 137574 - DNA, 1266 bp, synthetic construct
  misc_feature 1..1266: note = Description of Artificial Sequence: Synthetic coding sequence
  source 1..1266: mol_type = other DNA
ctgaacctagaggtgaaattcaagaaaatgggtctaggacacgagcagggtttcggtgccccgtgccttaaatgcaaggagaagtgcgagggctttgagttgcacttctggagaaaaatctgccgcaattgcaagtgtgggcaagaagagcacgatgtgctgctgagcaacgaagaggatagaaaggtggggaaactttttgaagataccaagtacactactctcattgccaagctgaaatcagacgggataccaatgtataagagaaatgttatgatcttgacaaatccagtggccgcgaagaaaaatgtgtccattaacactgtgacctatgagtgggcgcccccagtccagaatcaggcactagcacgtcagtatatgcaaatgctgccaaaggaaaaacagccagtagcaggaagcgagggagcccagtaccggaagaaacagttagcaaaacagctcccagcccacgaccaggatcccagcaaatgtcatgaactatcaccacgggaggtgaaggaaatggaacagtttgtgaagaagtacaagtctgaggctctcggcgtgggagacgtgaagctgccatgcgagatggatgcccagggaccaaaacagatgaatatacccggaggcgaccgaagtacccccgcagcagtcggggcaatggaagataaaagtgctgaacacaagcgaacacagtactcctgttactgttgtaaacttagtatgaaggagggagacccagccatctatgctgagcgcgctggatatgacaagctgtggcaccctgcctgcttcgtttgttccacctgtcatgaactgctggttgacatgatttacttctggaagaacgaaaagttgtattgtggccgccactattgtgattccgaaaaacctcgatgtgctgggtgtgacgagctgatttttagtaacgaatacacgcaggcggagaaccagaactggcaccttaaacacttctgctgcttcgactgtgattccatactggcaggagagatctacgtcatggtaaacgataaacctgtctgcaaaccctgctatgtaaagaatcacgccgtcgtttgtcaaggatgccacaatgctatcgacccggaggtgcaaagggtgacttacaacaatttctcctggcatgcttcgacggagtgtttcctctgttcctgttgtagcaaatgtctgataggacaaaagttcatgcctgtggagggcatggtgttctgctctgtagaatgcaaaaagaggatgtcctag

SEQ ID NO: 137575 - DNA, 1266 bp, synthetic construct
  misc_feature 1..1266: note = Description of Artificial Sequence: Synthetic coding sequence
  source 1..1266: mol_type = other DNA
atggatcttgagaacaaagtgaaaaagatgggtctgggccatgaacagggattcggcgctccgtgcctgaaatgcaaagagaaatgtgagggctttgagctccacttttggaggaagatctgccgcaattgtaagtgtgggcaagaagagcacgatgtcctgctcagcaacgaagaggacaggaaggtggggaagcttttcgaggatacaaagtataccacgctcatcgcaaagctgaaaagtgacgggattcctatgtataagcgcaatgttatgattctcactaaccctgttgcagctaaaaagaacgtgtccatcaacaccgtcacatacgaatgggctccccccgtacagaatcaagcattagctcggcagtacatgcagatgctacccaaggagaagcagcctgtagcaggttctgaaggagcccagtaccgaaagaagcagctggcaaagcagctccctgctcacgatcaggatcccagcaaatgccacgaactgagtccgcgggaggtcaaggaaatggaacagttcgttaaaaaatacaagtcagaagcactcggcgtcggggacgtaaagctgccgtgcgagatggatgctcagggacccaagcagatgaatatccctggcggggaccgcagcacccccgctgctgtcggcgccatggaagataaaagtgcagaacataaaaggacacaatattcctgttattgctgcaagctatccatgaaggagggggatccagccatatacgcggagcgggctggctatgacaaactgtggcaccccgcttgcttcgtctgctcgacatgccacgagctgttggtggatatgatctacttttggaaaaacgagaaattgtattgtgggcgtcactactgtgacagcgagaagcccagatgcgctggctgcgatgaattgatctttagtaatgagtacacacaggcagagaatcagaactggcatcttaagcatttctgttgctttgactgtgacagtatcctggccggagagatctacgtaatggtcaatgacaagcccgtgtgtaaaccctgctacgtgaaaaaccacgcggtagtgtgtcaagggtgccataacgcaatagatcccgaggtccagcgcgttacctacaataatttttcttggcatgctagtacggaatgcttcttatgttcttgctgcagtaaatgcctgattgggcaaaagtttatgcctgtagagggaatggtgttttgtagtgtagagtgcaagaaaagaatgagttag

SEQ ID NO: 137576 - DNA, 1239 bp, synthetic construct
  misc_feature 1..1239: note = Description of Artificial Sequence: Synthetic coding sequence
  source 1..1239: mol_type = other DNA
atggggcttggacatgaacagggctttggagccccctgtctaaagtgcaaggaaaagtgtgaagggtttgagctgcatttctggaggaagatttgccggaactgcaaatgtggtcaggaggagcacgatgtcctgctcagcaacgaggaggaccgaaaggtcggaaagctgttcgaggacaccaaatataccactctgatcgccaagctgaaaagtgacggcattccgatgtacaagaggaacgtgatgatcctcacgaaccccgtggcagcaaagaaaaatgtctcaatcaatacagtcacatacgaatgggcaccacccgtacaaaatcaggccctggccaggcaatatatgcagatgttacctaaggaaaaacagccagtcgctggctctgagggagcccaatacaggaagaagcagctggccaaacagctcccagcccacgaccaggatccatctaagtgccacgagctgtcacctcgggaggtgaaggagatggaacagttcgtcaagaaatacaagtctgaggccttaggggtgggtgatgtcaagcttccatgtgagatggatgcgcaggggcccaaacagatgaatatcccaggtggagacaggagcaccccagcagccgtgggggccatggaggataaatcagccgagcacaaacgaacacagtattcttgctattgctgcaaattaagcatgaaggagggagacccagctatctacgctgaacgggctgggtatgataaattgtggcaccccgcatgctttgtgtgtagcacctgccacgagttgctagttgacatgatctatttttggaaaaacgaaaaactctactgcggtagacactattgcgactccgaaaagccacgatgtgcaggatgcgacgagttaatcttctcaaatgagtacactcaagcggagaatcagaattggcatctgaaacacttctgttgtttcgactgcgattcaatactcgccggtgagatctatgtgatggttaacgacaaacctgtctgcaaaccttgttacgttaaaaatcacgcagtggtgtgtcaggggtgtcacaacgcgattgaccctgaggttcagcgcgttacctacaataatttctcttggcacgccagcaccgagtgttttctctgcagctgctgctcgaagtgcctgattggccagaagtttatgccagttgagggtatggtgttttgttctgtcgaatgcaagaaacgaatgagttag

SEQ ID NO: 137577 - DNA, 540 bp, synthetic construct
  misc_feature 1..540: note = Description of Artificial Sequence: Synthetic coding sequence
  source 1..540: mol_type = other DNA
atgaaggaaggtgaccctgctatctacgcagagagggccgggtacgacaagctgtggcatcccgcttgttttgtttgcagcacgtgccacgaactgctcgtggacatgatctatttttggaagaatgagaagttgtactgcgggagacactactgcgactcagaaaaacctagatgcgccggttgtgacgaactcatcttcagcaatgagtatacacaggcagagaatcaaaattggcacctcaaacatttctgttgtttcgactgtgactctatacttgcaggcgaaatctacgtcatggtaaatgataagcccgtttgcaaaccctgttacgtaaagaatcatgctgttgtatgccaggggtgccataacgcaattgaccctgaagtccagagggtcacgtataacaatttctcatggcacgcatctacagagtgctttctgtgttcttgttgcagtaagtgcttaattggacaaaaattcatgcccgtcgagggaatggttttctgcagtgttgaatgtaagaaacggatgagttag

SEQ ID NO: 137578 - DNA, 804 bp, synthetic construct
  misc_feature 1..804: note = Description of Artificial Sequence: Synthetic coding sequence
  source 1..804: mol_type = other DNA
atgggagctcgtcagattcagacttcttccagtcaaacatctcctgaagaagcgatgggcactcctcggatccaacacctgcttatcctgctcgtcctgggggcgagcctcctgacctctgggctcgaactgtattgtcagaagggcttatcaatgacagtggaggccgaccctgccaacatgttcaactggaccaccgaggaggtcgaaacctgtgataagggggccctctgtcaggaaactattctcattatcaaggcgggtacagagactgccatcctggctacaaaagggtgtattccagaaggcgaagaggcgattactatcgtgcagcactcatcaccgcctggactgattgtgacgtcctactccaactattgcgaagacagtttttgcaacgacaaagatagtctatcccaattctgggaattctcggaaacaaccgcgagcaccgttagcactacgttgcattgccctacttgtgtagccctgggaacctgcttcagcgctcccagtctaccttgcccgaacggcacgaccaggtgttatcagggtaaactggaaataaccggcggggggatagagtcatctgtggaagtcaagggttgcaccgcgatgatcgggtgccgcctgatgtctggaatactcgccgtgggtccaatgttcgttcgagaggcatgtcctcatcagctgctaacgcagcctaggaaaactgagaacggcgccacgtgtctgcctattccagtgtgggggctgcagctgcttctcccgttgctgctcccctcgtttatccatttttcttag

SEQ ID NO: 137579 - DNA, 789 bp, synthetic construct
  misc_feature 1..789: note = Description of Artificial Sequence: Synthetic coding sequence
  source 1..789: mol_type = other DNA
atccagacttcttcaagccagactagccctgaggaggctatgggcacccccaggatccagcacctcttaatcctcctggtgctgggcgcctctctgttgacctcggggctcgagttatactgccagaagggcctctctatgacagtcgaggctgatcccgccaacatgttcaattggactaccgaggaggtggagacctgtgacaagggcgctctgtgccaggagacaattctaattattaaagcagggactgagacagcaatcttggccaccaagggctgtatccctgagggggaagaagctattacgattgtacaacatagtagtccacccgggttaatagtcacctcttatagcaattactgcgaggactcattttgcaacgacaaggatagcctctcccaattctgggagttctccgaaacaactgcgagtacagtgtcaaccaccctccattgtcctacctgtgtggccctgggaacctgcttctccgcccccagcctgccctgccccaacggtacaactcgttgctaccagggaaagcttgagatcacgggcggaggcattgaatcaagcgtggaggttaaaggatgcaccgccatgataggctgcaggctgatgtctggaattcttgcagtgggccccatgtttgtcagagaggcatgcccccaccagctacttacgcaaccccgaaagaccgaaaatggtgccacctgtctgccaatcccggtgtggggacttcagctgttactacctctgcttctgccgtcgtttatccatttctcatag

SEQ ID NO: 137580 - DNA, 750 bp, synthetic construct
  misc_feature 1..750: note = Description of Artificial Sequence: Synthetic coding sequence
  source 1..750: mol_type = other DNA
atgggtacgccacgaatccaacacctgttgattctgttggttctgggggcctccctgttaaccagcggtctagagctgtattgtcaaaaaggcctgtccatgactgtggaggccgacccagcaaatatgttcaattggacaacagaagaagtcgagacttgtgacaaaggagctttatgccaggagacaatcctcattatcaaagccgggacggagaccgccatcctcgccaccaagggctgtatacccgagggggaagaggccattaccatcgttcagcactctagcccccctggactgatcgtcacctcatacagcaactattgtgaggacagcttttgtaatgacaaggattccctgtcccagttctgggagtttagtgagacaactgctagcaccgtttccacaacgttacactgtcccacttgcgtcgccctgggcacgtgctttagcgccccatctctcccttgtcccaatgggacaacacggtgctaccagggaaaactggagatcaccggtggagggattgagagctcagtggaggtgaaaggttgcacagcaatgattggatgtcggttaatgtcaggcatcctggcggtcggcccaatgtttgtgagagaagcttgccctcaccagttgctcacccaaccgcggaagacagagaatggtgcaacatgtctgcctatcccagtgtggggtcttcagcttctgctgccccttcttttgccttcgtttatccatttttcatag

SEQ ID NO: 137581 - DNA, 804 bp, synthetic construct
  misc_feature 1..804: note = Description of Artificial Sequence: Synthetic coding sequence
  source 1..804: mol_type = other DNA
atgggggcaagacagatccaaacctctagctctcagactagcccggaggaggctatgggcaccccaagaatccaacacttgctaattctcctcgtgctgggagccagcctccttacttctggcctggagctctactgccagaagggcttaagcatgacggtcgaggctgaccctgccaatatgttcaattggacgacagaagaggtagagacttgcgacaagggggcactgtgccaggaaaccatccttatcatcaaggctgggacagaaactgccattctggcaactaaggggtgtatccccgaaggagaggaagctatcaccattgtccagcactcttctccaccaggcctcatcgtgactagctactctaactattgtgaagattctttttgcaacgacaaggattcactcagccagttctgggagttcagtgagactaccgcctcaacagtgtctactacattgcattgccctacttgtgtcgccttaggcacatgttttagcgccccctcgctgccatgcccaaatggcacgacccggtgctaccagggcaaactagagataactggaggggggatagaatcatctgtggaagtcaagggctgcactgccatgattgggtgcagattgatgtctggcatcctggctgtcgggcccatgtttgtgcgggaggcttgccctcaccagctactgacacagcctcggaagactgagaacggcgccacatgtctgcctattcccgtttggggcttgcaactgcttctccccctgctcctgccctcctttatccacttcagttag

SEQ ID NO: 137582 - DNA, 2823 bp, synthetic construct
  misc_feature 1..2823: note = Description of Artificial Sequence: Synthetic coding sequence
  source 1..2823: mol_type = other DNA
atgatatctgcccactgtaatcttcggctgctctgtagctccgactcatccgcaagcgcaagtcaagtcgccggcactacggaggttgtcgagaatttggtcactaacgataattctccgaacatcccagaagccattgacagacttttctcagatatcgctaatattaatagggagtcaatggctgagatcacagatattcagatcgaagagatggctgttaacctgtggaactgggcgctcactataggtggaggctggctcgtcaacgaggagcagaagattcgccttcactatgtcgcttgcaagctgctgtccatgtgtgaggccagcttcgcctccgagcaatcaatccagcggttgattatgatgaacatgcgcattggaaaagagtggcttgatgccggaaacttcttaatagccgacgagtgctttcaggccgctgtcgctagccttgagcaactctacgttaagcttatccagagatccagtcctgaagcagacctcacaatggaaaagatcacagtagagtcggaccactttagagtgctttcatatcaggcagagtccgctgttgcccagggcgactttcagcgagctagtatgtgcgtgcttcaatgtaaagatatgctcatgcgactgccccagatgacctcaagcttgcatcatctatgctataacttcggagtggagacccagaaaaataataagtatgaagagtctagcttctggctctcacaatcctatgatatcggtaaaatggataagaaatctaccggccctgagatgctggcaaaggtgctcaggctcttagccacgaattatctcgactgggatgatacaaagtattatgacaaagccctgaatgcagtgaaccttgctaacaaggagcacttgtcctctcccggactgttcctgaagatgaagatcctgttgaagggagagacatccaacgaagagttgctggaagcagtcatggaaatccttcacctggatatgcccctggatttctgcttgaacatcgcaaaactcttgatggaccacgaacgagaaagcgtcggattccacttcctgaccataatccatgagaggttcaagtctagcgagaacattggaaaagtgcttatcctacacaccgacatgctcctgcagcgcaaagaagagctgctggcaaaggagaaaatcgaggaaatatttctggcccaccaaaccggcaggcagttaacagcagaaagcatgaactggctgcataacattctatggagacaggcagcctcctccttcgaggtgcaaaactatactgatgcgctgcagtggtactactactctctccgcttctattcaaccgatgaaatggacctggattttaccaagctgcaacgaaatatggcttgttgctacttgaacctccagcagttagataaggcaaaggaagcagtcgctgaggcggagcggcacgatccaaggaacgtgtttacacaattttacatcttcaagatcgcagtgatagaaggtaattccgaaagggccctgcaggctatcatcactttggaaaacattctcacggacgaggaatccgaagataacgatttggtcgccgagagaggatcacccacaatgcttctgtccctggccgcgcagtttgccttagaaaatgggcagcaaattgtcgccgaaaaagcactggaatacctcgcccaacactcagaagaccaagagcaggtgctgaccgcggtgaagtgtcttttgcgatttctcctacctaagatcgccgagatgcccgagtccgaagataagaagaaagaaatggatcgcttgctgacatgcctcaacagagcatttgttaagctcagccaaccatttggagaggaggccctgagtctggagtcgagagccaacgaagcccagtggttccgcaaaaccgcgtggaacctcgctgtgcaatgtgacaaggaccccgtgatgatgagagagttcttcattctttcatataaaatgtcccagttttgccctagcgaccaggtgatcctgatcgccagaaagacttgtctgctcatggcggttgctgtggacctagagcaggggaggaaggcctcaacggcttttgagcagacaatgttcctgagccgtgcccttgaggagattcagacttgcaatgacatccataactttctgaaacaaacaggtactttttctaatgacagttgtgaaaagctactactcctgtatgagtttgaagtgcgcgccaagctgaacgatcccctgttagaaagttttcttgagagcgtgtgggaactgccacatctagaaaccaaaacattcgagacaattgccataatcgccatggagaagccggcgcactatcccctcattgctctgaaggctttgaaaaaagctctcctgctgtacaagaaggaggaacctatcgacattagccagtactccaagtgcatgcacaatctcgtcaatctgagcgtccctgacggagcctccaatgtcgagctgtgtcctctggaggaggtgtgggggtattttgaagacgccctgtctcatatctcccgcaccaaagactaccccgagatggagatcctgtggctgatggtcaaatcttggaatacaggcgtgctgatgttcagccggagtaagtacgcaagcgccgaaaaatggtgtggcctggccctgcggttccttaaccacctcacgtcctttaaagagtcctacgagacccagatgaatatgctgtacagccagttggtggaggctctttcaaacaacaagggacccgtttttcatgaacatggctattggtctaagtcggattag

SEQ ID NO: 137583 - DNA, 1848 bp, synthetic construct
  misc_feature 1..1848: note = Description of Artificial Sequence: Synthetic coding sequence
  source 1..1848: mol_type = other DNA
atggaaattctgcacctcgatatgccactggacttctgcttgaacattgccaaactcctcatggaccatgaaagagaatctgtggggttccattttctgaccatcatccatgagaggtttaaatcttccgaaaatatagggaaagtcttgattctgcacactgacatgctccttcagcggaaggaggaactgctggcaaaggagaagattgaggaaatcttcctggcgcaccagacagggagacaactgacggcagagtccatgaattggctgcataatattctttggcgccaagccgccagctcttttgaggtgcaaaactatacagacgctctgcagtggtactactatagtcttcgcttctacagtacggatgagatggacttagacttcacaaagttgcagcgtaacatggcttgttgttacttaaacctccagcagctggacaaagcaaaagaggccgtggcagaggccgagcggcacgacccccgcaatgtgttcacccagttctacatttttaagatcgcagtcattgagggcaattcagagcgcgctctccaggccattataaccttggagaacatattgacagatgaggaatctgaggataatgatctcgttgctgagcgggggagtccaacaatgttactctccctggcggctcagttcgcgctcgagaacggtcaacagatcgtggccgagaaagctctcgagtacctggcgcagcatagtgaggatcaagaacaggttttaactgcagtgaagtgcttgctccgctttctcctgcctaagatagccgagatgccagagtccgaagacaaaaagaaagaaatggatagactgctgacctgcctgaatcgtgcctttgtcaaactgagccagccatttggtgaggaagctctatcattagagtcccgcgcaaacgaagcccagtggtttaggaagacggcctggaatttggctgtgcagtgtgataaggatccggttatgatgcgagagttttttatcctttcctacaagatgtcacagttctgcccttccgaccaggttatcctcattgcgagaaagacatgcctgttgatggccgtcgccgtggacttagaacaagggagaaaggcctcaactgccttcgaacagacaatgttcctgagccgggcgctcgaggaaatccagacttgtaatgacattcacaatttcctgaaacaaaccgggaccttttcaaacgattcatgcgagaagctcctgttactgtatgagtttgaggttcgggccaaattaaatgacccgctgctggagagcttcttggagtccgtgtgggagttgcctcatctggagaccaaaactttcgaaaccatagccatcattgccatggagaagccggcccattacccgctcattgcgctaaaggcgctcaagaaggccttgctgctgtacaagaaggaggagcccatcgatattagccagtatagcaaatgcatgcacaatcttgtgaacctgagtgtgccagacggggcttccaatgtcgaactttgtcccttggaggaggtctggggctacttcgaagacgctctttcccacatcagccgcacaaaagattatcccgagatggagatcctgtggctgatggtcaagtcctggaacacaggcgttttgatgttcagccgctctaagtatgctagcgctgaaaagtggtgtggacttgcactgagatttctaaaccacctgacttcttttaaagagagttacgagacgcagatgaatatgctgtactcacagctggtggaggctctctccaataataagggccctgtgtttcacgaacacggatactggtctaagtccgactag

SEQ ID NO: 137584 - DNA, 2778 bp, synthetic construct
  misc_feature 1..2778: note = Description of Artificial Sequence: Synthetic coding sequence
  source 1..2778: mol_type = other DNA
atggataacgatgacttcttcagcatggattttaaagaggtcgttgaaaatctggtgaccaacgataattccccaaacatccccgaagcaatcgatcgactgttctccgatatcgccaatatcaaccgcgagtccatggctgagatcaccgatattcagatagaggagatggccgtcaacctctggaactgggccttaaccattggtggggggtggttagtcaacgaagaacagaagataaggctccactacgtggcctgtaagcttctttccatgtgcgaggcctcgttcgcatctgaacagtccattcagagattgataatgatgaacatgagaattgggaaagagtggctcgacgctgggaactttctaattgcggacgagtgcttccaggcggccgtggcttcactggaacaactttacgttaaactcatacaaagatcctctcctgaagccgacctaaccatggaaaagatcacggtggagtccgatcactttcgggtgctgagctatcaggccgaatctgctgtggctcagggtgattttcagcgagcctccatgtgcgttctgcaatgcaaggacatgttgatgagactgccacaaatgactagttctctgcaccacttatgctacaatttcggtgtagagactcagaagaataacaagtacgaggagtcatccttttggctgtcccagagctacgatattggcaaaatggacaaaaaatctactggccccgaaatgctggccaaagtcctcaggctgctcgccaccaattacctagattgggacgacaccaagtattacgacaaggccctcaatgctgtgaacctggctaacaaagaacacctgagctctcccgggttattcctcaaaatgaaaattctgctgaaaggggaaacaagtaacgaagagctgctggaggccgtcatggagatcctccatctcgacatgcctctcgatttctgcctaaacatcgctaaactactcatggaccatgagcgagagagtgttggtttccattttctgaccattatccacgagcgcttcaagagctccgaaaatatcggtaaggtgctgatcttacatacagacatgttacttcaaaggaaggaggaactgctggccaaggaaaaaattgaggagattttcctcgcccaccagaccgggcgacagcttaccgcagagtccatgaattggctgcataacattctttggaggcaggctgcttcatcctttgaggtccaaaactacacagatgcacttcaatggtactactacagcctgcggttctactccacagatgaaatggatctcgactttaccaagttgcaaaggaatatggcttgctgctacctgaacctgcaacagctggataaagcaaaagaggctgtggccgaggccgaaaggcacgatccaagaaatgtgtttacacagttttacattttcaagattgcagtaatcgaaggtaactccgagcgcgccctccaggctatcatcacacttgaaaacatccttacagatgaggagtccgaggacaatgatctggtggcagagcgcgggtcgcctacaatgctacttagcttggctgctcagttcgctctcgaaaatggccagcagattgtggcagaaaaggcgctcgagtacctcgcgcagcactctgaagatcaggaacaggttttaactgctgtgaagtgcttactgcgtttcctcttgcctaagatcgcagagatgcccgagtctgaagacaagaaaaaagagatggaccgactactgacgtgtcttaatcgggcctttgttaagcttagccagccttttggtgaagaggcactgtctcttgagtcccgtgccaatgaggcccagtggttccgaaagactgcatggaatctcgccgtgcagtgtgataaggaccctgtaatgatgcgagaattcttcatcctgagctataagatgtctcaattttgtccatccgaccaggtgatattaatagccaggaaaacttgcctactcatggctgtggccgtggatcttgagcagggacgaaaagcatccaccgcttttgagcagacgatgttcctctcaagggcactcgaggagattcagacatgcaacgatattcacaattttttgaagcaaactgggaccttctccaatgatagctgcgaaaaactactcctcctctacgaatttgaagtgagagccaagttgaacgatcccctcctcgagagcttccttgaatcagtatgggaactgccccacctcgagactaagacatttgaaacaattgccattattgctatggagaagcccgcacactaccccttgatcgctttaaaagccctgaaaaaggcattactgctgtacaagaaagaggagcccatcgacattagtcagtacagtaaatgtatgcataacctggtcaacctgagcgtgcccgatggcgcaagtaacgtagaactgtgcccactagaagaagtctggggatacttcgaggatgccctgtcacacatctctcggaccaaggattatccagagatggagatcctgtggctcatggttaagtcatggaacaccggagtgctgatgttcagtcgttctaagtacgcatccgctgaaaaatggtgcggtttggccctccggtttctcaaccatctgacgtccttcaaagaatcttacgaaacccagatgaacatgttatacagtcaactggtggaagcgctctctaacaataaggggcctgtcttccatgagcatggatactggtccaagtctgactag

SEQ ID NO: 137585 - DNA, 2823 bp, synthetic construct
  misc_feature 1..2823: note = Description of Artificial Sequence: Synthetic coding sequence
  source 1..2823: mol_type = other DNA
atgatatctgctcattgtaacctccggctgctgtgcagctcggattcttcagcatcagcctcccaggtagctgggaccaccgaggtggtcgaaaacttggttaccaacgataattctccgaatataccagaggctattgataggctgttctccgacatcgctaacattaatcgagaaagtatggccgaaattaccgacatccagattgaggagatggctgttaacttgtggaattgggccctcaccataggcggcggatggttggtcaatgaagagcaaaaaatcaggctccactatgtcgcatgtaagctgctttccatgtgtgaagcctcatttgctagcgagcagagcatccaaaggctgatcatgatgaacatgcggatcggaaaggaatggctagacgcaggaaatttcctcatcgctgacgagtgtttccaggcagcagtggcttctctggaacagctatacgtcaagctgatacagcgctcaagtcccgaggctgacctgactatggaaaaaatcacagtggagagtgaccacttcagggtgctgagctatcaggctgaaagtgcagtcgcccagggcgacttccaacgtgcttctatgtgtgtcctgcagtgtaaggatatgctaatgcgattaccacaaatgacttccagcttacatcatttatgctacaactttggcgtggaaactcagaaaaataataaatatgaagagagttctttctggttaagccagtcatacgatattggcaagatggacaaaaagtccaccggaccagagatgctggccaaggttttgagacttctcgccactaactatctagactgggatgacacaaagtattacgacaaagcccttaacgccgtgaatctggcgaacaaggagcacttgagcagtcccggcctgtttcttaagatgaaaatactacttaagggggagacttctaacgaggagctgctcgaagcagtgatggagattttacatctcgatatgcctctcgacttttgtcttaatattgctaaactgctcatggaccatgaaagagaatctgtggggtttcattttctgacaatcatccatgaaaggtttaagagtagcgagaacatcgggaaggtcttaatccttcacacagatatgctcttgcagcgaaaagaagaactcttggcaaaggagaagattgaagaaatattcctcgcacaccaaactggaagacagttaaccgccgaaagcatgaactggttgcataacatcctctggaggcaggctgccagcagtttcgaggtgcagaattataccgacgcactgcagtggtactattattcactgagattttatagcaccgatgaaatggacctggacttcactaaactgcaaaggaacatggcgtgttgttacctgaacctgcagcagttggacaaagccaaagaggccgttgcagaggccgaacgccatgacccgaggaatgtgttcacacagttctatatttttaagatcgcagtcattgagggcaattctgagcgagcacttcaggcgattatcacattagaaaacatattaacagacgaggaatcagaggacaatgacctagtggccgagaggggcagtcctacaatgttgctcagcttagccgcccaattcgcattggagaacggccagcagatcgtggcagagaaggctctagaatacctggcccagcatagcgaggatcaggaacaggtcctgacagcagtcaagtgtttactgcgattcttacttcctaagattgcggagatgcccgagtctgaggataagaaaaaggagatggaccggctgctgacctgcctgaacagagcctttgtcaagctgagccaaccttttggggaggaggctctatctctggaatctcgcgcgaacgaggcccagtggttccgcaaaaccgcttggaatctcgctgttcaatgcgacaaagatcccgtgatgatgcgcgagtttttcattctgagttataaaatgtcgcaattctgtccctctgaccaagtaatactcatcgcccgcaagacatgcttgttgatggccgtagccgtggacctggaacagggacggaaggcttccactgcctttgagcagacaatgttcttgagtagggctcttgaagagatccagacctgtaacgacatccataattttctgaagcagacaggaacctttagtaacgattcatgtgaaaaactccttctgctctatgaatttgaggtcagagctaagctgaacgatccactgctggaaagctttcttgagtctgtgtgggagctgccccacctagaaaccaaaaccttcgagacaattgcaataatcgccatggagaaacccgcccactacccactgatcgccctcaaggccctgaagaaggctctcctgttatacaaaaaggaggagcctatcgatattagtcagtatagcaagtgcatgcataacctggttaatctcagtgtaccagatggggcctccaacgtggaactctgccccctcgaggaggtgtggggatactttgaagatgccctttcccacataagtaggacaaaagactaccctgagatggaaatcctttggcttatggtcaagagttggaacaccggcgtgctgatgttctcaagatcaaaatatgcctctgcagagaaatggtgtggattagccttacggttccttaatcacctgaccagcttcaaggaatcgtatgagacccagatgaatatgttatatagccagctcgtggaggctctttccaataataagggtcccgtgttccacgagcacgggtattggtcgaaaagtgactag

SEQ ID NO: 137586 - DNA, 372 bp, synthetic construct
  misc_feature 1..372: note = Description of Artificial Sequence: Synthetic coding sequence
  source 1..372: mol_type = other DNA
atgatggcaaatcacttagtcaagcccgacaatcgaaactgcaagcggccgcgcgagctggagagtcccgtgccagattctccacaactgtctagcctggggaagagcgacagctcattttccgaaatctccggcctgttttacaaggacgaggccttagaaaaagacttgaatgatgtctccaaggagattaatctgatgttgtcaacctatgctaagctactatcggagcgtgcggccgtggacgcctcatatatagacgaaatagacgagttgttcaaggaggccaacgctatcgaaaacttcctgatccagaagcgggagtttctgagacaaaggttcaccgtcatcgctaatacactgcatagatag

SEQ ID NO: 137587 - DNA, 372 bp, synthetic construct
  misc_feature 1..372: note = Description of Artificial Sequence: Synthetic coding sequence
  source 1..372: mol_type = other DNA
atgatggctaaccacctcgtcaagcccgataaccgtaactgcaaaaggccgcgtgaactggaaagccctgtaccagacagccctcagctgtcctcacttggaaaatctgattccagcttctccgagatttcaggtcttttttacaaagacgaagcactagaaaaggatctcaacgacgtgtcgaaggaaattaacctgatgcttagcacatatgcaaaactcctgagcgaacgggcggcagtggacgcctcatatattgacgaaatcgatgagctctttaaagaggctaacgccatcgaaaattttttgatccaaaagagggagtttctaaggcagaggtttactgttatcgctaacaccctacaccgatag

SEQ ID NO: 137588 - DNA, 1059 bp, synthetic construct
  misc_feature 1..1059: note = Description of Artificial Sequence: Synthetic coding sequence
  source 1..1059: mol_type = other DNA
atggccctgaggcctgaggatcccagcagcgggttccggcacagcaatgtggtggcctttatcaacgaaaaaatggcgagacacacaaaggggcctgaattctacctggagaacatctcactctcctgggaaaaagttgaggacaaactgagggcgatattggaggattccgaagtgccaagcgaggtcaaagaggcctgcacatgggggagcctggcgctcggggtaagatttgcccaccgacaggctcagttgcagagacacagggtgcggtggttacacggattcgccaagctccacaaaagtgccgcacaggccctcgcctcagatctgaaaaaactgcgggagcaacaggagaccgagcggaaagaagccgcttcccggctcagaatggcgcagacttctctcgtcgaggtgcagaaggagcgcgacaaggagcttgtcagcccccacgaatgggaacagggtgccggctggccaggcctggctaccgccgggggcgtttgtaccgagggggctgccgaagaggaggaagaagccgccgttgctgctgcaggggctgctggcggtaaaggcgccgaggaggaacagcgcgggtgttggcgtctgtggctgccactgtggagaccttggctaccactgtggcgtttaggcctgcccccctggcgcccatcgagccccacatggcgccccggcctgccgccgtggcggccccagagatcctggagggagtcctcttgctcatccctggagatgctgatcaggaaatctacgcccattggaggaagaagaagggaaatatcaggccgctccaaacagcctcatctcatcagcctggaaccacgaacccccggcccagagccccaccaaaatctatttctctcatctagccttccccacacacatactcatacacaagccctgtttcccccttcacaaacatacccgctctacccactacacaaacagcaaagccagcaccagtttaggctctcatgtctccccaccggacgaccccttattctggcctgcgggctaatggggggccccacagagtag

SEQ ID NO: 137589 - DNA, 1059 bp, synthetic construct
  misc_feature 1..1059: note = Description of Artificial Sequence: Synthetic coding sequence
  source 1..1059: mol_type = other DNA
atggcacttcgacctgaggacccatcatccggcttcaggcactcgaacgtggtagccttcatcaacgaaaagatggccaggcacacaaaaggccccgagttttatttggaaaacattagcctgtcttgggaaaaggtagaggataaacttagagctatactggaagactcagaggtaccatccgaggtgaaggaggcctgtacatggggtagtctcgcgctcggcgtacgctttgcacaccgtcaggcccaactgcagcgccaccgagttcggtggctccacgggttcgctaaactgcacaagtctgcagcacaagcactcgcaagcgacctcaagaaactcagggagcagcaggagacagagaggaaggaggccgcctcccgcctgagaatggcccagacatcattagtcgaggtccagaaagaaagagataaggagcttgtgtcccctcacgagtgggaacagggagccgggtggccgggactggctaccgcgggcggtgtctgcacagagggcgctgccgaggaggaggaggaggcagccgtagctgccgctggggctgccggcggcaaaggggcagaggaggagcaacgaggatgttggcggttatggttacccctgtggcgaccttggctcccactgtggagattgggcctcccaccttggcggccctctagtcctacctggaggcccggactgcctccatggagacctcagcgtagctggcgggaaagctcctgctcttctctcgagatgctcattcggaaatcaacgccgattggcggccgaagacgcgaaatttccgggagatccaagcagccccatctcatttccctggaacccaggacccccgggccagagcctcatcaaaacttatttctatcgagcagtttgccacacactcacactcatacccaggcgctctttcctccgtcccaaacgtaccccctgtaccctcttcacaaacagcagagccaacaccagttcaggctgtcctgcctgcctacaggtcgcccccttatcttagcctgcggattaatgggggggccaacagaatag

SEQ ID NO: 137590 - DNA, 1230 bp, synthetic construct
  misc_feature 1..1230: note = Description of Artificial Sequence: Synthetic coding sequence
  source 1..1230: mol_type = other DNA
atggcccttcgccccgaggatccgagttcaggcttcaggcacagcaacgtcgtcgctttcattaatgagaaaatggcacgacacacaaaaggacccgaattctacttggaaaatatctctctcagctgggaaaaagtggaagataagctgcgggccatcctggaagactcagaagtgcccagcgaggtgaaggaggcctgtacatgggggtctctcgcgttgggagtacgcttcgcccacagacaggcccaacttcagaggcacagagttaggtggttacacggcttcgctaagcttcacaagagtgcagctcaggcattagctagcgacctgaagaagttgagggaacagcaggagacagagagaaaagaggctgcctcccggctaagaatggctcagacttccttggttgaggtacaaaaggaacgcgacaaggagctcgtgagtccgcacgagtgggaacagggggctgggtggcccggacttgccaccgcaggcggcgtgtgtacagagggtgcggccgaggaagaagaggaggccgctgtggccgctgctggagctgccggtggtaagggcgcagaggaggagcagagagacgtggaagtggtggccgctcccgttgaggccatggcccctcctgttgaagccggcgcggcccctatggagacccaattccctcacgtggaggcgagggcagcaagtatggagaccacagaaaaacttgagcggatcctacttcagctgcttggtgacgccgatcaggagaagtacacgtactgggggcagaaagaaggggatttgaggtctgtggaaacggctaccagctatttttccgggactaccaatccctggagtcgtgcaagctctgagcccttacccgtccagcttccggctagctatagctacagctactcctcccctttttcatccttttctgatattcctactataagtcccccgcaggccacagtcaccgcacctgtgccgccgcagttgcctagcgattgggaggccttcgatacctctctgtggtcagacggtggcccacaccgcattgaccaccaggaacacccccgggatcgacgttattctgaacctcatcaacagagaccacctgtctatcgtaggcccggggactgggactgtccgtggtgtaatgcggttaatttttccaggagggatacttgcttcgactgcggtaagggaatctggctgcagaaaccacattag

SEQ ID NO: 137591 - DNA, 939 bp, synthetic construct
  misc_feature 1..939: note = Description of Artificial Sequence: Synthetic coding sequence
  source 1..939: mol_type = other DNA
atggctctgagaccagaggacccctctagcggctttaggcacggaaacgtcgtcgccttcattattgagaaaatggccagacatacaaaaggccccgaattttacttcgaaaacataagtctgtcgtgggaggaggtggaggacaaactccgggccatcctggaggattctgaggtgccgtccgaggttaaggaggcatgcacctggggctcgctggccctgggagtgcgtttcgcgcataggcaggggcagctccaaaaccgacgcgtgcaatggctgcaaggattcgcgaaactccatcgtagtgctgcactcgtcctggcttctaacctgactgaacttaaagaacagcaggaaatggagtgtaacgaggccacctttcaactccagcttaccgagacatcgcttgctgaagtgcagcgagagcgtgacatgctacgttggaaattattccatgccgagctagctccacctcaggggcaaggtcaggccacagtgttccccggtctcgctaccgccggtggagattggaccgagggcgcaggcgagcaggagaaagaggcggtcgctgccgccggagctgcaggcgggaaaggcgaggaacgctatgctgaagcaggccccgccccggcagaggtcttgcagggtctagggggcgggtttagacagccccttggggcgatcgtggcaggaaagctacacttgtgtggtgccgaaggagagcgtagccaagtgtctacaaacagccacgtatgtctactgtgggcctgggtgcacagcctgacgggcgctagcagctgtccagccccatatcttatccatattctgatccctatgccttttgttagattgctgtcccacacacagtatacacctttcacctccaagggccaccgcaccggctccaattcagatgccttccaactaggcggactgtag

SEQ ID NO: 137592 - DNA, 4494 bp, synthetic construct
  misc_feature 1..4494: note = Description of Artificial Sequence: Synthetic coding sequence
  source 1..4494: mol_type = other DNA
atgtcccgcgccgtccgtctgcctgtgccctgcccagttcagctagggacacttcgaaatgactccctcgaggcacaattacacgaatacgttaaacaggggaactacgttaaggtgaaaaagatcctcaagaagggtatttatgtggacgccgtgaacagcctaggtcagaccgctttgttcgtggccgctcttttgggactgcgaaaattcgtcgacgtcctggttgactacggctctgatcctaatcatagatgttttgacggaagcactcccgtgcatgccgctgctttcagcgggaaccagtggattctgtccaagctccttgacgccgggggtgatctcaggctccacgacgagagggggcagaacccaaagacctgggctcttaccgcaggcaaggaaaggtctacccagatcgtagaattcatgcaacgttgtgcttcccacatgcaggcaataatccaaggattttcttacgacctcctgaagaaaatcgacagcccgcaacgccttgtgtattccccaagctggtgtggcggcctggtgcaggggaatccaaatggctctcctaatcggctgctgaaagcaggggtgatctctgcacagaacatctattcatttgggtttggaaaagcgatgccttggtttcaattctatttgacaggggctacacaaatggcctacctgggatccttgcctgtaatcggggagaaggaagtgattcaagccgatgacgaacccaccttttcatttttcagtgggccctacatggtcatgacaaaccttgtgtggaatggctctagagtcaccgtgaaggagttgaatttgcccacccaccctcactgctctcgccttcgactggccgacctattgatagccgagcaggagcactcaagtaaactgcggcacccttacctgctgcagctaatggcagtgtgtctatctcaggacctggaaaaaacaaggctcgtatacgagcggatcaccatcggaactctcttcagcgtcttgcatgagaggcgaagccaattccctgtgctgcatatggaggtgatcgtccatttgctcttgcagataagtgatgctctccggtacctccacttccagggattcatacacagatcgttgtcctcttacgctgtacatatcatcagtcccggtgaggcccgcttgactaacttggagtatatgctcgagtctgaggacagaggggtccagcgcgatctcacacgcgtgcctctgcccacacagctttacaattgggcggctccagaagtgatcctgcagaaggccgctactgttaaaagcgacatctacagtttctccatgattatgcaggaaatcctgacagacgacattccctggaaggggctggacggctccgtggtgaaaaaggcagttgtgtcgggcaattaccttgaggcagatgtccgcttgcctaagccgtattatgacatcgttaaatctggcattcacgtgaaacaaaaagacagaaccatgaatctgcaggatataaggtacattctgaagaacgacctgaaggacttcacgggtgctcagcgcacgcagcctaccgagagcccacgggtccaaaggtatggccttcaccctgatgtgaacgtgtacctggggctcacctccgagcatccacgggaaactccagatatggagatcatcgaacttaaggagatgggcagtcagcctcattcaccaagggtgcacagcctcttcacggaaggaaccctggacccccaggcccctgacccatgtctcatggcacgcgagacccagaaccaagacgccccttgcccagccccattcatggctgaagaggccagctccccctcaacaggtcagccttccctctgtagctttgaaataaacgagatatactctggctgcctgatcctggaggacgacatcgaggagccaccaggtgctgcttcatccttggaagctgacggccccaatcaggttgatgagctgaagtccatggaggaggaactcgacaagatggaacgtgaggcttgttgttttggatctgaagacgagagcagttcaaaggcagagacagaatatagcttcgacgattgggactggcagaatggcagcttgtccagcctttctttgcccgagagcacacgtgaagctaagagcaatttgaataacatgtcaacaaccgaagagtatcttatcagcaaatgcgttctcgatcttaagatcatgcagacaatcatgcacgaaaatgatgataggctccggaatatcgaacagattttagacgaggtcgaaatgaagcagaaggagcaggaggagaggatgagcttatgggctacatccagggaattcacgaatgcctataaactaccactggcagtgggtccaccctcgctcaattatattcccccggtgttgcaactgagcggtggccagaaaccagacaccagcggtaactaccctactctgccccggttcccccgcatgctccctacgttgtgtgaccctggtaaacaaaacactgacgagcagttccagtgtacacagggagctaaggactccctcgagacaagcaggatacagaataccagttctcagggccggcccagggagtcaaccgcccaggccaaggcgacacagtttaatagcgctctcttcaccctcagttctcacagacagggcccttcagctagcccaagttgccactgggattccacccgaatgtcggtcgaaccagtgtccagcgaaatttacaatgccgaaagccggaacaaggacgatgggaaagtgcacctgaaatggaagatggaggtgaaagagatggccaaaaaggcggccactgggcaactgaccgtgcctccctggcatccccagtcgtccctgacactggagagcgaggccgagaacgagcctgatgctctgttgcagcctcccatcagatcgccagagaatacagattggcagcgggttatagaataccacagggagaacgatgaacccaggggaaacggtaagttcgataaaactggcaataacgactgcgacagcgatcagcatgggaggcagcctagactcggatcttttacttccattcggcacccgtctccgcggcaaaaggagcaacctgagcactcagaagcctttcaggcatcttcggacacgctggtcgccgtggagaagtcctatagccatcagagcatgcagtcaacgtgttcaccagagtcctcagaggacatcaccgatgagttcttaacaccagacggagagtacttctacagctctactgctcaggagaacctggctcttgagacatccagtcccatcgaggaagactttgaagggattcagggcgccttcgcacaaccacaagtgagcggagaagagaagttccaaatgcggaaaattttgggtaaaaacgctgagatcctgcctagaagccaatttcagccagtgcggtccacagaagatgagcaggaagaaacatccaaagagtccccaaaagaactgaaagagaaagatatctccctgactgacatccaagacttaagcagtattagttacgagcctgattcttcttttaaagaggcgagttgtaaaacgcccaagattaatcacgcacccacctctgtctccacccccctgtcgccaggcagcgtgtcaagcgcagccagccagtataaagactgtctggagtccataacatttcaagtgaaaactgaattcgcttcctgctggaattctcaggagttcatacagactctgtccgacgattttataagcgttcgagagagagccaaaaaactggacagcctgctaacttctagcgaaacccccccaagtaggttaaccggactcaaaaggctgtcgtctttcatcggtgccgggtcaccatcactggtgaaggcctgcgactcttcaccaccacacgctacacagcggaggagcctcccaaaggtggaggctttttcccagcaccacatcgatgaattgcctccaccttcacaggaactgctggacgacatcgaactgctcaaacagcagcaaggatcctccaccgtgctgcatgagaacactgcatctgatggcggcgggacagccaacgaccagaggcacctggaagaacaggagacagacagtaagaaggaagatagcagcatgctcctttctaaagagactgaggatctcggagaggacaccgagcgggcgcactccaccctggacgaggacctggaacgatggttacaaccccccgaagaaagcgtggagctgcaggacttgccaaagggctctgagcgggaaacgaacatcaaggatcagaaagtgggtgaggaaaaacgcaaaagagaagattctatcacgccggaacggcgcaaaagcgagggggtcttaggcaccagcgaggaggatgagcttaagtcttgcttctggaagcgtctcggttggagcgagagcagtcgtattattgttctggatcaatcagacctatccgactag

SEQ ID NO: 137593 - DNA, 4356 bp, synthetic construct
  misc_feature 1..4356: note = Description of Artificial Sequence: Synthetic coding sequence
  source 1..4356: mol_type = other DNA
atgtcacgcgcagtccgcctgcctgttccctgcccagtgcagttaggtacactgcgcaacgattcattggaagcgcagttgcacgaatatgtgaaacagggtaattacgtgaaggtgaagaagattctaaaaaaagggatctatgtcgacgccgtcaactcactaggccagactgcgctgtttgtcgccgctcttctgggactgcgtaagttcgttgacgtgctggtggactatggttcagacccaaaccatcggtgttttgatgggagcactcctgtccacgccgctgctttttcaggtaatcaatggattcttagtaagctgctcgatgccggtggtgatcttaggttacatgatgaacggggtcagaaccctaagacttgggccctgactgcaggaaaagaaagatctacacagattgtggaattcatgcagagatgcgcaagtcatatgcaggccattatacaaggctttagttacgatctccttaagaaaattgattcccctcaacgtttggtctacagccccagctggtgcggagggctggtgcaggggaacccaaatgggtccccaaaccgactccttaaggccggagtcatttcagcccagaacatctactcatttggctttggcaagttttacctgactggagccacgcagatggcttacctgggctccttacctgtgatcggcgagaaggaggtgattcaggcagatgatgaacctacgttcagcttcttttccgggccgtatatggtcatgacaaacctagtgtggaacggctctagggttaccgtgaaagagctgaatttacctacccaccctcattgttcccggctcaggttggcagacttacttatagcggaacaggagcacagctcgaagcttagacatccctatctactccagctgatggctgtctgtctgtctcaggacctggagaaaacaagactagtctatgagaggattacaataggaaccttattcagcgtgctgcatgagcgaagaagtcaattcccagtcttgcatatggaggttatcgttcacctcctgctccagatcagtgacgctctcagatacctgcactttcaagggttcatacaccggtcgctgagctcttatgccgtgcacatcatttctcccggagaagctcgcctgacaaatcttgaatatatgttagagtctgaagatcgcggtgttcagcgggacctcactagagtaccgttacccactcagctttacaattgggcggcccccgaggtcatcctccagaaggccgctaccgtgaagtctgacatatactccttcagtatgatcatgcaggaaatccttactgatgacattccttggaaaggacttgatggctccgttgtcaaaaaggctgttgtttccggaaattatcttgaggccgacgtgagactgccaaagccttactatgatatagttaaatctggaatacatgtgaagcagaaagataggaccatgaacctacaagacattcgctacatactgaaaaacgatctcaaggactttacgggagcacagaggactcagccgaccgagagcccacgagtgcagcgatacggcctgcatcccgatgtcaacgtgtacctggggctgacaagcgagcaccccagggaaacacccgacatggagatcattgagttgaaggaaatgggttcacaaccacactctccgcgcgtgcattctttgtttaccgagggcacccttgacccgcaggctcccgacccatgcctcatggccagggaaactcaaaaccaggatgcaccatgtcccgcacctttcatggctgaggaggctagtagtccctctaccggtcaaccttctttgtgttcattcgagatcaatgagatctacagcggctgcctcattctcgaggacgacatcgaagagccgcccggggcagcgtcatcgttggaagcagatggtccaaaccaggttgacgaattgaaaagtatggaagaggagctcgataaaatggaaagggaagcatgctgttttgggagcgaggatgaatcttcgagtaaggccgagactgaatatagctttgatgattgggattggcagaatggaagcctatccagcttatctctgccagagagcaccagagaggccaagagcaacctgaacaacatgtccactacggaggagtatctgatttccaaatgtgtgcttgacctgaaaattatgcaaactatcatgcacgagaacgacgaccggctacgaaacattgaacaaattcttgatgaggttgagatgaagcagaaagagcaagaggaacgcatgagcctgtgggctacatctcgcgagttcaccaatgcgtataagcttccactagcagtgggtccaccgtcactgaattacattccaccagtgctgcagctgtcaggagggcagaaaccagatacgtcgggaaattatccgacccttccaaggttcccccgcatgctcccgacgctttgcgatccaggtaagcaaaacacagatgagcagttccagtgtacccagggggcgaaggacagcttagagaccagcaggatacaaaacacctcttctcagggccgaccacgagagtctaccgcgcaggcgaaagcaacccagttcaatagcgcccttttcactcttagttctcataggcaggggcccagcgcctcaccctcctgtcattgggacagtacccgcatgtctgtggaaccagtgtcctccgaaatctacaacgcggagtctcggaataaggatgatggaaaagtgcatctcaagtggaagatggaggtgaaagagatggcaaaaaaggcggcaactggccagcttacagtgcccccttggcacccccagtcttcactcacgctggaatccgaggcggagaacgagccggacgctctgttacaacccccgatcaggtcccccgagaacaccgattggcagagggtgatcgaataccatagagaaaacgacgagccgaggggaaatggaaagttcgacaagacggggaataatgattgcgactccgaccaacacggacgtcagccacgcctgggctccttcacaagtatacggcacccctcacctagacagaaggaacaacctgagcattctgaagccttccaggcatccagcgatacactcgtcgccgtcgagaaaagttattccacctcctcccctatcgaggaggatttcgaagggatccagggcgctttcgcccaaccgcaagttagtggagaagagaagttccagatgaggaagatccttggcaagaacgccgagattctacctcggtctcagtttcaacccgtgcggtccaccgaggatgagcaggaggaaacaagcaaagagtcgcccaaagagctaaaggaaaaggatatatcactcaccgacattcaagatctgagctcaatcagttacgaacccgactccagctttaaagaggcctcttgtaagaccccaaaaataaaccacgcaccaacctcagtgtccacacctctatcccccggcagtgtttcatcagccgcaagtcaatataaggactgcctggaaagcattacatttcaggtgaagacggagttcgcaagttgctggaatagccaggaattcatccagactctgtctgatgacttcattagcgtacgtgaaagggccaagaagctagacagtctcctcacaagtagcgaaacccccccttcgcggctgaccggcctaaagcgcttatcctccttcattggagccgggtctccttccttagtcaaggcctgtgactcatccccaccccacgccacccagcgacgctcattacccaaagttgaggcattttcacagcaccatattgatgaattgcccccaccgtcccaggaactgttggacgatatagaactgctgaagcagcagcaagggtcaagtactgtgctgcacgaaaacactgcctcagacggggggggcaccgccaatgaccagcggcatctggaggagcaagaaacagattcaaagaaagaagatagctcaatgctattgagtaaggagaccgaagacctgggagaagatacggaaagggcccactctactctagacgaggatcttgagcgctggctgcagccacctgaggagtctgtcgaacttcaagatctgcctaaaggctctgaaagggaaactaatatcaaagaccagaaagtgggggaagaaaaacgcaagcgcgaggactctatcactcccgagagacgcaaatccgaaggagtgctggggacaagcgaggaggatgagctgaagagctgtttctggaaaagactggggtggagcgagtcatccaggatcattgtccttgaccaatcagacctgagcgactag

SEQ ID NO: 137594 - DNA, 4476 bp, synthetic construct
  misc_feature 1..4476: note = Description of Artificial Sequence: Synthetic coding sequence
  source 1..4476: mol_type = other DNA
atgtctcgcgctgttcgcctcccagtcccatgtccagtccagctgggcaccctcaggaatgacagtctagaggcccaactacatgagtacgtgaagcaaggcaactatgtgaaagtgaagaaaatcttaaagaagggcatctatgttgacgctgtgaactccctgggacagacggcccttttcgtggccgctttgctggggctgaggaaattcgtcgacgtgctagtggactatgggtctgatcctaaccaccgctgctttgacggttccactcctgtccatgcggcagctttctcaggaaaccagtggatactctctaaactgttggacgctgggggggacctcaggctgcacgatgagagaggccaaaatcccaagacatgggcgctgacagcaggcaaagagaggtctacgcaaattgtcgagttcatgcaaaggtgtgcatcccacatgcaggccatcattcagggattttcctatgatctgctgaagaagattgatagtcctcaacggcttgtgtactcaccttcatggtgcggtggactcgtccagggcaatccaaatggttccccgaatcgcctgcttaaggcaggtgtgattagcgcccagaacatttattctttcggattcggtaaattctatctgacaggcgcgactcagatggcctacctcggttccctgccagtgattggagagaaggaagttattcaggctgatgacgaacccaccttctcttttttttcaggaccctacatggtgatgactaatctggtgtggaacggcagccgggtgacggtgaaggagctcaacttaccaacccatccccactgctcaagactgcggttagcagaccttttgattgctgaacaagagcacagcagcaaattaagacacccatacctgttacaactgatggccgtctgtctgtctcaggacctcgaaaagacgcgcctggtttacgagaggattaccatcggtactctgttctctgtgttgcacgagcggagaagccagttccctgttctacatatggaggtcatagttcatctacttttgcaaatttcagacgcccttcgttatctccatttccagggctttatacaccgctccctcagttcatatgcagtgcacataatttcacctggcgaggcccgtttaacgaacctggaatatatgctggagtcagaagaccggggcgtccaaagggacctgaccagagtgccactgccgacacagctgtacaattgggccgccccagaagtgattctgcagaaagcggcgactgtgaaaagcgacatttacagcttctccatgattatgcaagagatactgaccgatgacatcccttggaaaggcctggacggatccgtggtcaagaaagccgttgtatctggcaactatctagaagccgacgtgcgcctgccaaagccttattatgacattgtcaagagtggaatccatgtgaaacagaaggatagaacaatgaacctccaggacatccggtacatactgaagaacgatttgaaggacttcactggagcccagaggacgcagccaacggaaagccctagagttcaacgatacggcttgcaccctgatgtgaatgtgtacctcgggctgaccagcgagcaccctcgcgaaacaccagacatggaaatcatcgagctgaaagagatgggcagtcagccccatagcccaagggtgcacagcctattcacagaggggactctcgacccacaagcacctgatccctgcctcatggcccgggagacacagaaccaggatgccccttgcccagcaccatttatggccgaagaagcttctagtccaagcaccgggcagccttcactttgctcattcgagataaacgagatttatagcggatgcctgattctcgaggacgacattgaagagcccccaggcgcagcaagttccctggaagccgatggacctaaccaggtggatgaacttaagagcatggaggaagagttggacaagatggagcgagaggcttgttgcttcggctccgaagatgaatcctcctccaaggccgagaccgagtatagctttgatgattgggactggcagaacgggagccttagctcccttagcctcccagaatcaactagggaggcaaaatctaatctgaacaacatgagcacaacagaggaatacctgatcagtaaatgcgttctggaccttaaaataatgcagaccatcatgcacgagaatgatgaccgactgaggaatatcgagcagatccttgacgaagtcgagatgaaacagaaggagcaggaagagagaatgtctctgtgggccacaagccgggagttcacaaatgcgtataagctgcccctggcagttggacccccatcccttaactacatcccacctgttctgcagctatcaggcgggcagaaaccggatacgtcggggaattacccaacattaccgcgtttcccacggatgttgccgactctgtgtgaccccggaaaacaaaacaccgatgagcagtttcagtgcacacagggagctaaggactcacttgagacgtccaggattcagaacacaagctcacaggggcggcccagggaatccaccgcccaagcaaaggccacccaatttaacagcgccctattcacactaagtagccaccggcagggcccctccgcctccccgagttgccattgggactcaactaggatgtcagttgaaccggtgagcagcgagatctataatgcggaatctagaaataaagatgatggaaaggtacatttgaaatggaagatggaggtgaaggaaatggctaagaaggcggccactggccagcttacagtgccgccttggcatcctcagtcctccctaacactcgagagcgaggccgagaacgagcccgacgccctgctgcagcctccgatcaggagccccgagaacactgattggcagagagtcattgagtatcacagggagaatgacgaacctaggggaaatggcaaattcgataaaactggcaataacgactgcgattctgaccagcacggcagacagcctaggctcggctctttcacttctataagacacccatccccaagacagaaggaacagcccgaacacagtgaagctttccaggctagcagtgataccttagtagccgttgaaaaatcatattcccatcagtctatgcagagcacatgtagccctgagtccagcgaagatattacagacgagtttcttacacctgatggggaatacttttattcaagcacggcccaggaaaatctcgctctagagaccagttccccaatcgaggaagactttgagggaatccagggagctttcgcacagcctcaggttagcggggaggaaaagttccagatgcgtaagattttaggtaagaatgcggaaatcctgcctcgttctcagtttcagcccgtgcgctccaccgaggacgaacaagaggagacaagcaaggagtcccccaaagaactgaaagagaaggacatttcactgacagacattcaggacctgagctctatttcctatgagcccgacagttcttttaaagaggcatcctgtaagactcccaaaatcaatcatgccccgacctctgtgtcaactccccttagcccgggtagtgtaagtagcgccgcgtcacaatataaggattgtctggaatctattacttttcaggtgaagacagagttcgctagttgctggaactcgcaagaattcatccagaccctgagcgatgatttcatcagtgtgcgggagagagcaaagaaactggactcgctgctcacctcctctgagacccctccttcaaggctgaccggtttaaagagactgtcctccttcatcggagccgggagtccatccctggtgaaggcttgtgatagctctccaccccacgccacccaaagaagaagtctgcctaaggtggaagccttctctcagcatcacattgatgagctgcccccaccctcccaagagttgcttgatgatattgagcttctaaagcaacagcagggaagctctaccgtgcttcacgaaaacactgcatcagacggcggaggtacagccaacgaccaacgtcacttggaggaacaggaaaccgacagcaaaaaagaagactcttccatgttgctctctaaggaaaccgaggacctcggggaagatacagagagggcacactcgacattagacgaggacttagagcgctggctgcagcctcccgaggagagcgtggaattgcaggatcttcccaaaggctcagagagggagacaaacatcaaggaccagaaagtaggcgaggagaaacggaaacgggaagattccatcacacccgagcgccggaagtccgagggagtgctcggcacaagcgaggaggacgagcttaaatcatgtttttggaaacgcttgggttggtccgagtccagcaggattatcgtgctggaccaaagtgatctctccgattag

SEQ ID NO: 137595 - DNA, 8370 bp, synthetic construct
  misc_feature 1..8370: note = Description of Artificial Sequence: Synthetic coding sequence
  source 1..8370: mol_type = other DNA
atgccatccgacgccaaagattcagttaacggtgatctgctcctgaattggacaagtctgaagaatatcctctctgggctcaatgccagtttccctcttcacaacaacactggttccagtaccgtcactactagcaagtctatcaaagacccacggctgatgaggcgggaggagtccatgggggaacagagcagcaccgctggacttaatgaggttctgcagttcgagaaatccagcgacaatgttaactctgagattaaaagtacaccctctaattcagcctcttcctccgaggttgtgccgggagattgcgctgtgcttaccaacggtctggatactccttgtttcaagacatctgttaacgatagccaaagctgggcgcataatatgggctcagaagactatgactgtatacccccaaacaaggtcacaatggccggccagtgcaaagaccagggcaattttagttttcctatcagtgtgtcaaatgtggtttcagaggtggaaaatcagaaccacagcgaggaaaaagctcaaagggcacagcaagagtcagggaacgcatacaccaaggaatattcaagccacattttccaggattcgcaatcatcagacttgaagacgatctaccaaactggatgtcagacaagtacagtctttcctttgaagaagaaagtgtccatagacgagtacctgcagaatactggaaaaatgaagaactttgcagatctcgaggatagttccaagcacgaagaaaaacaaaccagttggaaagagatcgataatgactttactaatgaaactaaaatcagtcctatcgacaattatatcgttttgcaccaggaatacaaagagtccgagtcacataactcttttggaaaatcttgcgataagatcctaatcactcaagaactggaaatcaccaaaagttcaacttccaccattaaggataaggatgaacttgaccacctagccctggaatggcagatcaccccatccttcgagtctctctcccagaagcacccacaacactccgtggagtatgagggtaacattcatacctcattagccattgcccaaaagctcatggaactaaagctgggcaagatcaaccagaactacgcgtcaatcatcacagaagcatttccgaaacccaaggacataccacaggccaaggagatgttcattgacactgtgatttcatcttacaacatcgaaaccgcccacgatagtagtaactgctcgataactcgggagcacatttgcgtgcaccggaaaaacgaaaacgagcctgtgtcattggagaatatccaacgggattacaaggagacggcttacgtagaggatcggggccaggaccataatcttttttgcaactcccagctcagcaatgacatctggctgaacgtgaacttcaagaaacagaccgaccgggagaaccaaaacgaggccaaggaaaattctgccagctgcgttgaaaataacatcgagaacatttacggagataaaaagcaggatagtcataccaacgagaatttctctaacatcgacgaaaaagaggataaaaactaccacaatattgagattctgtcatccgaggaattcagcacaaagtttaatctgatctgccgtgaggacaacgctgtgtcagccgcaacagcgctgcttgagtctgaggaagacactatctcagctgtgaagcagaaagacaccgaaaacacaggccgaagcgttgagcatctcgctagcacgacatttccaaagactgcaagtagctctgtctgtgtagcctccaatgcggctatacagattgcaagcgctacgatgcccgcattatctcttaataacgacgaccatcagatataccaattcaaggagacatgttcgagcgagtctcccgactttggcctccttgtcaaacatcgcgtatcagactgtgaaattgataccgataaaaataaaagccaagaatcctttcaccagagtatcaacgagaacctcgtcctccagtccattgaactcgagtcagagatcgagattgaacttgaggattgtgatgacgccttcattttccagcaggatacccattcccatgagaatatgctctgcgaggaattcgtgaccagctataaggccctgaagtcccgaatttcctgggaaggtcttcttgctctggacaacggcgagatggaagttctagagtctactacagggagagaaaattcagaccagcattattcaaaagaatccaattacttctatagtagcacccagaacaacgagaccgaacttacttcaccgatcctgcttccagacctgcagatcaaaataaccaatatcttccgtcctgggttcagcccaaccgccgattccctcgccctgaaggattccttttgtacacatgtgacggaggcgacgaagccggagatcaataaggaagacggggagatactgggattcgatatttactcacagccctttggtgagaacgcggattacccctgcgaagataaggtggataacatccgccaggagtctgggccagtgagcaatagcgaaatctccctgagctttgatctgtccagaaataccgatgtcaaccacactagtgagaatcaaaattccgagagtctgttcacggaaccgtcgaacgtgaccaccatagacgacggttcgagatgctttttcaccaaatcaaagactgactacaacgatacgaagaataaaaaggaggttgagagcaggatatctaaaaggaagctccatatctccagtcgggaccagaatattccacacaaggacctcagaagacacaagatatacggcaggaaaagaaggctgacatctcaggacagcagtgagtgttttagcagtctgtctcagggtaggattaagacttttagccaaagcgagaaacacataaagagcgtgcttaatatcctgagcgatgaggccagcctgtgcaagtctaagtgcttgtccagaaagctggataaagctgtcgtgcatctcaagaaggcccaccgaagagtacataccagtctccagctgattacgaaagtgggtgaagaaagaaagggccccttacctaagtcatacgcaattatttgcaacaacttctgggaatcatgtgatctgcaggggtattcaagcgtctctcagcggaagtattactccactaagcatttctcttctaaacgcaaatacgacaaaaggcggaagaagcgcgcacccaaggccgatatcagtaagagtctgacacacgtgtcaaaacacaaatcgtacaagacttccggtgagaaaaaatgtctgagtcggaagtctatggctagcagtgtgagcaagagccacccaacgacctcgcacatgggggagttctgcaatcaagaacacccagaaagccagcttcccgtttcttcgacctctcagtctactagccaatcagtttattacaatagttccgtgagtaacccctccctatctgaagaacatcagccgttctcgggcaagacggcttaccttttttcccctgatcattctgacgagaaactgattgagaaagaaaaccagatcgacacagccttcctgtcatcgacgtccaagtatgagaaactcgaaaaacatagtgctaaccacaatgttaaggatgctactaaggagaactcgtgtgatgcaaatgaggtgattaatgagtccaattcagtgtccctctcttgtatcaaggaaaacatcaacagtagcacgggcaatgactgcgatgccacatgcatcgggcacacaaaagccaagaccgatgtactgatctctgtgcttgacagtaatgtcaaacattttctcaatgatttataccagcagggcaacctgatcttgtccgactgcaagcgcaatctggaggtgaaatggactgaccctatagaacgacccaagcaaaacattatcacgggcaattttcttatggggcccctgaacctcactttaatcgcatccaagaaatacagcatcccacaactgtccgctgcagctgtcacagattcagaaggggagagctcaaaaagctatttagataagcagagaattctgacagtggatagctttgcagccagctcaaccgtccctcactgtgagcagtcgtgtcgcgagaaggagctcctgaaaacggaacagtgtagcagcgggaattgcttgcatacggacggtaatgagacgaacgtaacagagaactacgagttggacgtggcttccggtacggaagaggataagtcctatggggaaaatatagtcgaattgtccagctccgactcatccctcctgctgaaagataacgtaaaggggtccagctcagaaacctgtatcgtaaagaaagatactgaagacagaattacttggaaagtcaaacaggctgaaaaggccaaggattccgtgtacaagaggtccatgactgaggggagcactgtgaatacagagtacaaaaatcagaagaaccagatcagtgaagaaagctgcttgaacgagaagattattaccacgaacctgatagattctcatctcagtacaaagaatacaaccaccgagtccgtgccactgaagaacaccgtctctaaccccctgaataagcgcgaaaagaagggggagatcaaagtgagcaaggattctcagagcgacctgacacttcattcagagattgcttacattagcaagccggggattctgggcgtgaatcatacccccatactgcctgcccactccgaaacctgtaaggttccaactctgctcaaaaagccagctagttacgtaagtgatttcaaggaaaaacactgcagcgccaaccacaccgccctgatcgctaacctgtctcagatccttcagcgagccgacgaggcctcttccctacagattctacaggaggagactaaggtgtgcctaaatatacttccactctttgtggaagctttcgagcgtaaacaggagtgtagcgtagagcagatcttgatttcacgcgaactgctcgtggaccagaatctttggaacaactgtaaacatactctgaagccttgcgcggtcgacaccttggtcgagctacagatgatgatggagacaatccaattcatagaaaataaaaagcggcatctcgaaggcgagcccaccttacgctcactgctgtggtacgacgagaccctatatgcagagctgctggggaaacctagggggttccagcaacaatcaaacttttaccccgggtttcagggtagactgaaatataatgcgttttgtgaactacaaacatatcacgatcagctggtcgaactgctggaggaaactaagcgggagaagaatagctactatgtgttccttaaatataaacggcaggtaaatgagtgcgaggccattatggagcactgctctgactgcttcgatttttccctgtctgtccccttcacttgcggggtgaactttggtgatagcctggaggatctggagattctgcggaaatctaccctcaagctgattaacgtctgtggcgactcacccaaggtccatagctaccctggcaaacaggatcatctgtggataatcattgagatgatttccagcaaggttaactttataaagaacaacgaggccgtgcgggtgaagatttctctctatggactggaacacatattcttcgatgccgccaagaacctcgtttggaaagaacggacgcaatcatttagtaaaaagtactcacagaaaaaggacgaagagcggcttctcagagtgaacaagtgtgctttctctaagcttcagaagatctacgataccctcagcaaagatctcaataatgaacccatttctcctattggactagaggaggacacgattatagcttctcggaagagcgaccacccaattaacgaagcaacaatcagcatagaaaactcgaaattcaatagcaacttgcttgcccatcctgacatatgttgtatctcagagatactcgaccaggcggagttcgctgatctgaaaaagctccaggacctgactttgagatgtaccgaccatctggagatactcaaaaaatactttcagatgctccaagataacaacatggataatatattcatcacggaggagaacgtgctcgacgttgtgattaaccactcccacgaggctattattctcaaacctgaagcaatcgagatgtacattgagatagtcatggtctccgaaaccattcatttcctgaaaaattcaattgcgaagaagctggataaacagaggttcaggggcatgctctggtttgatctctctctgcttcctgaactcgttcaatgtcaggagaagatggcatcctttagtttcctcaaagacaactcaacagacgtgtgtctgtggaaggttattgaaaccgccgtgtcagagctgaagaaagacttagacattatttgcaaatataacgaagctgtgaactgttcctacgctatccatctgctctccagggagttacaggaactgagcgagatcaagaaacttctcaagaagtctaagtactttatttcaacctacatagacttcgtcccatacatcgcttcaattaactatggctcaacggtcacagagctagagtacaactacaaccagttcagtactctgcttaaaaacgtcatgtctgctcctaggaaggatctcggcaagatggctcacatccggaaggttatgaaaacaatcgaacatatgaaaatgatctgcacaaagaatgccgaactaacaatctctttctttttgtgccagatgctatataataggagaaagatacttcagctgaagaggaaagaaaaaatgaatatccacatcgttaagccaggagagaacaataataagttttcaattagcactatgctaccacccgtgagtgagtgcatcaataagaatatctccaactcctccaagaagagaccatccacggttgacaagtgcgaggactcccaggagcagcaacaggatactacagtgtcctcctgtaaaaaacttaaagtggatatgaaggatgttacaaagataaatcgtgaaaaggccactttcaagcaccctagaacaaccggttcacatcccaagtccgaaaataagatcgtgcctagtagttgcgactcattaaagagaaatcacctaacccccaaaaaggtcgagatgcaacggtctctccccggctctctattgccacttgagaatccgaaggatacgtgcgcctccaagtcagagagcaaaattgacttgaccgtgtcaagcgaccacttctccggtcagcaggagaatttaaattccatgaagaaacgtaacgtgaatttctcggccgctgaaactaagtctgacaaaaaggattgtgcagcatttgccatctgtgatcagaagagcgtgcatggcaccttcagccccgaccacggcaccctgttacagaagtttcttaaaaactcccccgatcctacacaaaagtcatgcctctctgacataaaccccgaaaccgacgtttcactggttcctgatgcaagtgtgctgagtaaaccaatcttctgctttgttaaggacgtacatccagacctcgagatgaacgacacagtgttcgagcttcaggacaatgatatagttaattcctccattaagaactcgtcgtgtatgacatctccggagcccatttgcattcagaataaaatccctactctccagatcaataaactgcagccaacagaaacggagtctgaggacaagtacatgaaagatacactgaatcctaataccgttcacacgtttggcgcctccggacatataaccctcaatgttaaccagggcgctgagtactcgctgagcgaacagcaaaatgacaaaaactcaaaggtcctaatgcagaacgccgccacctattggaatgaattgccacagagtgcatgcaatccgacatataactcgagcgaacatttatttggaacctcctatccctattccgcttggtgcgtctatcagtacagcaattctaatggcaacgcaatcacccagacctaccagggcatcacgtcatacgaggtgcagccgagcccttctggactgctcaccacggtcgccagcactgcccagggcacccattctaacctgctctactcacagtatttcacttattttgccggcgagccccaggccaatggctttgtccctgtgaacggatactttcaaagccagattcctgccagtaatttcagacaaccaatcttttcacagtatgcgagtcatcagccattgccacaggcaacctatccctacctaccaaacaggttcgtgcctccggaggtcccttgggtctacgccccatggcatcaggagtcgtttcatcctggccactag

SEQ ID NO: 137596 - DNA, 1233 bp, synthetic construct
  misc_feature 1..1233: note = Description of Artificial Sequence: Synthetic coding sequence
  source 1..1233: mol_type = other DNA
atggtgctcaaagctgaacatacacggtccccctccgccaccctgcctagcaatgttccctcatgccggtcactgagcagtagtgaagacggccccagtggcccaagtagcctcgccgacggcggtctcgcacataacctgcaggactctgtgagacatagaatcctgtacttgtctgagcaactgcgcgtggaaaaggctagtagagacggcaacaccgtgtcttatcttaaactagtgagtaaggccgatcgccatcaagtccctcatattcaacaagcttttgagaaggtcaaccagcgggctagtgctactatagcacagattgagcaccgcctgcatcaatgccaccagcagcttcaggagttagaggagggctgtcgtccagagggactgttgctgatggctgagagcgaccctgctaactgcgagccaccgtccgagaaagccctgctgagtgaaccccctgaaccaggaggggaagacggcccagtgaacctgcctcacgcctcgaggccttttatactggagtctcgatttcagtccctgcaacagggcacctgcctggagactgaagacgttgcacagcagcagaacctgttgctccagaaggtgaaggccgagctggaggaggcaaaacgctttcatatctctttgcaggagtcctaccactctttaaaggaaaggtcccttaccgatttgcagctattactggaaagcctgcaagaggagaaatgcaggcaagccttaatggaagaacaggtgaacgggcgcctccagggccagctgaacgagatttacaacctcaagcacaatctcgcctgcagcgaggagcgtatggcctatctgagctatgagcgagctaaggaaatttgggagattaccgaaacattcaagagccgcatctctaagttggagatgctccagcaagtgacgcagctggaggcggccgaacacttgcagagccggcctccgcagatgttgtttaaatttctttcaccaagattgtctctggcaacggtgttactggtgtttgtcagtacactttgcgcttgccccagttccttgataagcagtcggctttgcacttgtactatgctgatgctcattggcctgggcgttctcgcctggcagaggtggcgagccatcccagctacggattggcaagaatgggtgccatcccgatgccgattgtattctaaggactcgggcccacccgcggacgggccctag

SEQ ID NO: 137597 - DNA, 1233 bp, synthetic construct
  misc_feature 1..1233: note = Description of Artificial Sequence: Synthetic coding sequence
  source 1..1233: mol_type = other DNA
atggtgttgaaggccgaacacacccggagtcctagtgcaaccttacccagcaacgtccctagctgtcggtcgttgtcctcctcagaggacgggccaagtgggccctcttccctggctgacggggggctggcacataatttgcaggactctgtgcggcataggatcctctatctctccgaacagctccgggtcgaaaaggcaagtcgggatggcaatacagtgtcttatctgaaactggtctctaaagcagatcggcatcaggttcctcacatccagcaggcctttgaaaaggtcaaccagcgcgccagtgcaactatcgcccaaatagagcaccggctccaccagtgtcaccaacaattgcaggaactggaagaaggctgccggcctgaaggcctgttgttgatggctgagagcgatcccgcgaattgcgagccccccagcgagaaggcattattgagtgaaccgcccgagccgggaggcgaggacgggccagtgaacctaccgcatgcctctagaccctttatcctggaatcccggttccaaagcttgcagcaaggaacctgcctcgaaactgaagatgtggcacagcagcagaatttgctgctccagaaagtgaaagcggaactcgaggaggctaagcggttccacatcagcctccaggagagctatcacagcctcaaggagaggagcctcacagacctgcagcttttgctggagagcctgcaagaggaaaagtgcagacaggcgctgatggaagagcaggtcaatggcaggctgcagggccagctgaacgagatctacaacctgaagcacaacttggcctgctcagaagagcgtatggcctacctgtcctatgaacgggctaaggagatctgggagatcactgaaacttttaagtctcgaatcagcaaactggagatgctccagcaggtaacgcagctggaggccgcagagcacctgcaatcacgcccgcctcagatgctgttcaagtttcttagcccgcgcttatctctggccaccgtactcttggtgttcgtttccacactctgcgcgtgtccctcctctctgatttcatcccgtctgtgtacgtgtaccatgctaatgcttattggcttgggagttctggcatggcagcgctggcgcgcaattccggcgaccgactggcaggagtgggtaccgtcccgatgtaggctgtacagcaaagattctgggccccccgctgatggtccctag

SEQ ID NO: 137598 - DNA, 945 bp, synthetic construct
  misc_feature 1..945: note = Description of Artificial Sequence: Synthetic coding sequence
  source 1..945: mol_type = other DNA
atgcgtccggaagggtctctcacctatcgcgtgcctgagaggctgcgtcagggcttttgcggagtaggaagggcggcccaggcattggtttgtgcctccgcaaaggagggcactgcttttcggatggaggccgtccaggagggtgccgctggggtggaaagtgaacaggccgccctaggggaggaggccgttctgctcctcgatgatatcatggccgaggtcgaggtggtggcagaagtcgaagtggtggcagaggaagaaggtctggtagaacggcgggaggaagcacaacgggctcagcaggcagttcccgggcctgggcctatgactcctgagtcggccccagaagaactgcttgccgtgcaggtcgaactcgagcccgtgaatgcccaagcccggaaagctttttctaggcagcgcgagaagatggaacggcgacgtaagccccatttggacaggcggggagcggtgatacagagcgtcccaggattctgggctaatgtcatcgcaaaccatccgcagatgagcgcccttattaccgacgaggacgaggatatgctttcctatatggtgtcactggaggtgggagaagagaagcaccctgtgcacttgtgcaagatcatgctttttttcagatcgaacccttattttcagaacaaagtaattacaaaggaatacctggtgaacattactgagtatcgtgcaagtcattccacaccaatcgagtggtatcctgactatgaagtggaagcataccggcggagacatcataattccagtcttaatttctttaattggttcagtgaccataatttcgctggaagcaacaagattgccgaaatcctgtgcaaggacttgtggaggaacccgttgcaatactacaagcgcatgaaaccaccggaagagggaacagagacgtctggcgattcacagcttttatcatag

SEQ ID NO: 137599 - DNA, 927 bp, synthetic construct
  misc_feature 1..927: note = Description of Artificial Sequence: Synthetic coding sequence
  source 1..927: mol_type = other DNA
atgcgcccggaggggtctctcacgtatcgggtgcctgagcgcctccggcagggcttctgcggagtgggacgtgccgcgcaagctttagtatgcgcctctgctaaagagggcacagccttccggatggaagccgtccaggaaggagccgctggcgtggaatccgaacaggcagcgttaggcgaggaggctgtcctcctgctggacgacattatggccgaggtggaagtagtagctgaagaggagggtcttgtcgaaagaagagaggaagcacagcgggcgcagcaagccgtgcccggcccgggccccatgacccccgagtcggctcccgaagagcttctggctgtgcaggttgagctggaacccgtaaatgctcaggctaggaaggcttttagccgtcaaagagagaagatggagcggcgccgaaaacctcatctcgatcgccggggggcagtgattcagagtgtcccgggcttttgggccaacgtcattgccaaccatccacagatgtcagctttaatcactgatgaggacgaggacatgctgtcttatatggtaagtctagaggtgggggaggaaaagcatcctgtacacttgtgcaagattatgctgttcttcagatcaaacccttatttccagaacaaggtgattacgaaagaatacctcgtaaatataactgagtatagagcttctcactcaacccctatagaatggtacccggactacgaagtggaagcctacagaagaagacaccataactcaagcctcaattttttcaattggttttcggatcacaacttcgccggctccaacaaaatcgctgaaattctgtgcaaggacttgtggcgcaacccccttcagtactacaaacgcatgaagcctcccgaggaaggaaccgaaacctcgggcgatagtcagctgctgtcttag

SEQ ID NO: 137600 - DNA, 2097 bp, synthetic construct
  misc_feature 1..2097: note = Description of Artificial Sequence: Synthetic coding sequence
  source 1..2097: mol_type = other DNA
atgatgcgctctcgctccaaaagccctagacgcccatcgcctaccgcccggggtgccaactgtgacgtagagctcctcaaaacaactactcgcgacagggaagaactgaaatgcatgctcgaaaaatacgaacgccatcttgctgaaattcagggcaatgttaaggtgctgaagagtgagcgggacaagatctttttgctctatgagcaggcgcaggaagaaatcacgcgtctgaggcgtgaaatgatgaaaagctgcaagtctcccaaaagtactactgcccacgccatactccgccgcgtggagacagaaagggatgtggcttttacagacctgcgccggatgacaacagaacgagacagcctgcgggagcgcctgaaaattgcccaggaaaccgcctttaacgaaaaagctcacctcgagcagcgcatcgaggagctcgaatgtacagttcataacctcgacgacgagaggatggaacaaatgtctaatatgactctcatgaaggaaaccatatccacagttgagaaagagatgaagtcattagctcgaaaagccatggatactgagtccgaactggggcgacagaaggccgaaaataacagcctgaggcttctgtacgagaacacagagaaagacctgtcggacacccagaggcatctggctaagaagaagtatgagcttcagctgacccaggagaaaattatgtgccttgatgagaaaattgacaattttactcggcagaacatagcgcaacgcgaagagatctctatccttggggggacattgaatgacctcgccaaggagaaggaatgtcttcaggcctgcctcgacaagaagtctgaaaacattgccagtctgggcgagagtcttgctatgaaagaaaaaaccatttctggcatgaagaacatcattgccgagatggaacaggcttcacgacagtgtactgaagccctcatcgtgtgcgagcaggatgtgtctcgaatgcgccgacaactcgatgagacgaacgacgaactggcacagatagccagagagcgggatatcctggcacatgacaacgataacctccaggagcagtttgccaaggccaagcaggagaatcaggccctgagcaaaaagctgaacgatacacacaacgaattgaacgacattaagcagaaggttcaggataccaatctggaagtgaacaaactcaaaaatatcctgaagagcgaagagtcagagaacagacagatgatggagcagcttcggaaagccaacgaggatgccgaaaactgggaaaacaaagcacggcagtctgaagccgacaataacaccctcaaacttgagctgataactgccgaagctgaaggtaaccgcttaaaggagaaagtggacagcctcaatcgcgaagtcgaacagcatctgaatgctgagagatcatataaaagtcagatctcgacactgcacaaatccgtggtcaagatggaggaagagttgcagaaagtgcagtttgagaaggtgtctgcacttgcggatctgtcttcgacccgggagctctgtatcaagttggactctagcaaggagctgctgaataggcaactcgttgcaaaggaccaggagatcgagatgcgagaaaacgaactggattctgcccactccgaaattgaactactgagaagtcagatggctaacgagcgcatttctatgcagaacctggaggctctgttggtggctaaccgggataaagaatatcagtctcagattgccctgcaggagaaagagagtgaaatccagctgctgaaagagcatctgtgtttagcagagaataaaatggctatacagtccagagatgtggctcaatttaggaacgtagtgactcaactagaggcagatcttgacattacgaagaggcaactaggaacagagagatttgaaagggagcgtgccgtacaggagttgagacgccagaattattcttctaatgcttatcatatgagttcgaccatgaagcctaacacaaagtgccattcacccgagagagcacatcacagaagccccgatcgtgggctggatagatcccttgaggaaaacctctgctaccgggatttctag

SEQ ID NO: 137601 - DNA, 2073 bp, synthetic construct
  misc_feature 1..2073: note = Description of Artificial Sequence: Synthetic coding sequence
  source 1..2073: mol_type = other DNA
atgatgcggagccgtagtaaatctcctcgcaggcctagtccaaccgctagaggtgctaactgtgacgtggaactgctcaagaccacaaccagagaccgtgaagagttaaaatgcatgctggagaagtacgagcgacacctggcggagattcagggaaatgtgaaagtactgaaatccgaacgagataaaatcttcctgctgtacgagcaggcccaggaagaaatcacccgtctgaggcgcgagatgatgaagagttgcaaatcacctaagtcaaccaccgcacatgctatactgcgcagagtggagacagagagagatgtagcctttacggaccttcggcgtatgacaaccgaacgggacagtctcagagagcgcttgaagatcgcacaggagacagcctttaatgaaaaggcccacctggaacagcggattgaggagctcgagtgtactgttcacaacctggacgatgagcgcatggaacagatgagtaacatgactcttatgaaggagaccatcagtactgtggaaaaggaaatgaagtcgttggcacgcaaagctatggataccgagtctgaactgggacgccagaaagccgaaaataactctttaaggttgctatatgagaacacggagaaggacctgtccgacactcagagacatctggcaaaaaagaagtacgagctccagctgactcaagagaaaatcatgtgcttggatgagaagattgataattttacaagacagaatatcgcacagagggaagaaatttccattctcggtggcaccctcaatgacctggctaaggagaaagagtgcttgcaggcttgcttggataagaaatcggaaaacatagccagtttgggggagtcattagctatgaaggagaagacaataagtggaatgaagaatattatcgctgagatggaacaagcatcccggcagtgtacagaggccctcattgtatgtgaacaggacgtgtctcggatgcgcaggcagctcgacgagacgaacgatgaactcgcccagatagctcgcgagcgggatatcctagcacatgataatgacaacttgcaggagcagtttgcaaaggctaagcaagaaaatcaggcactgagtaaaaaacttaatgacacccacaatgaacttaatgacatcaaacagaaggtccaggacaccaatcttgaagttaacaaactcaaaaacatccttaagtccgaagagagtgaaaaccgacagatgatggagcagctacgcaaggctaacgaagatgctgaaaattgggagaacaaagccagacagtcagaagctgataacaataccttgaagttagaactcatcacagccgaagccgagggtaatagactcaaggagaaggtcgattccctaaatcgagaagtcgagcagcatctgaatgcagagaggagctataagtcccagatttctaccttgcacaagtctgtggtgaagatggaagaagagctccagaaggtccagtttgaaaaagtttcagcactcgccgacctatctagtactcgggaactttgcattaagcttgattccagtaaagagctcctgaaccgacaactggtcgccaaagatcaggaaatcgaaatgcgagaaaacgaactggattctgcccacagcgagattgaattactgcgcagtcaaatggctaatgagcgaatctctatgcagaacctagaagcattactggtcgcaaaccgggacaaggagtaccagtcccagatcgctttgcaggagaaagagagcgagatccagctgctgaaagagcacttgtgtctggccgaaaacaaaatggccatccagtcgagggatgtggctcaatttcgtaacgttgtaacccagctcgaagccgatttagatatcaccaagcggcaactgggcaccgagcggtttgagcgcgagagagccgtgcaggagctgcggcgtcaaaactatagcagtaatgcatatcatatgtcctcgacaatgaagcccaacacaaagtgtcattcccccgagagagctcaccacagatcacctgatcgaggtcttgaccgttcacttgagtag

SEQ ID NO: 137602 - DNA, 2097 bp, synthetic construct
  misc_feature 1..2097: note = Description of Artificial Sequence: Synthetic coding sequence
  source 1..2097: mol_type = other DNA
atgatgaggtcccgcagcaagagcccaagaaggccctctccaaccgcaagaggtgctaattgtgatgtggagctactcaaaacaaccacacgcgatagggaggaactgaagtgtatgctcgagaagtacgagcgacacctcgctgagatccagggtaatgttaaagttctaaaaagcgaacgtgataaaattttcctgctgtatgagcaagcccaggaggagattacgaggctccgcagggagatgatgaaatcttgtaagtccccgaagtccaccaccgcccatgctatcctgcgtcgggtagagaccgaacgcgatgtcgcatttacggaccttcgccggatgactacagaacgcgattcccttcgtgaaagacttaagattgcccaggaaactgcttttaacgagaaggctcacctcgagcagaggatcgaagaactggaatgcaccgtgcacaatctggatgatgagaggatggaacagatgtccaatatgacactcatgaaggaaacaatcagcacagtcgaaaaagaaatgaagtcactcgcacgcaaggctatggatacggaatctgaactaggcagacagaaggcagaaaacaactctctccggctcttgtacgagaatacagagaaggacctgtcagacacccagcggcacctggccaaaaagaagtacgaactgcagttaacccaggagaagattatgtgtttggatgagaagatcgacaattttacacgccagaatattgcccaaagggaagagatcagcatcctgggtggaactctgaacgatctggctaaagagaaagaatgtctccaggcttgcttggataagaagagtgaaaacatcgcatcactcggggagagcttagcaatgaaagaaaagactattagcgggatgaagaacatcattgccgaaatggaacaagcctcaaggcagtgcaccgaagctttgattgtgtgcgagcaggatgtgtcacggatgcgacggcagctggacgaaaccaatgatgaattagcgcagatagcacgggaaagagatatacttgctcacgataatgataacttgcaggagcaatttgctaaggctaagcaggagaatcaggccctgtctaaaaagctgaacgatacacacaacgagttaaatgacatcaagcaaaaggtgcaagacacaaacttggaagtcaacaaactgaagaacattctgaagtctgaggagtcagaaaaccgccaaatgatggaacagctgcgaaaagccaatgaagacgccgaaaactgggaaaacaaggcccgtcagtctgaagcagataataatacactgaagctggaactcatcacggccgaggccgagggtaatcggttgaaggagaaggtcgactccttaaacagggaggtggaacagcacctgaacgctgagcgatcttacaaaagccaaatatccaccctgcacaaaagtgtggtaaaaatggaagaggaactccagaaagtccaatttgaaaaggtgtcagccttagccgacctgtcatcaacacgggagctatgcattaagttggacagcagtaaggaattgctcaacagacaactagtggctaaagatcaggagatagagatgcgggaaaacgaattggacagcgcgcacagcgagattgagcttctgcggagccagatggcaaacgaacgcatttccatgcagaacctggaggctctcctggtagcaaacagagataaggagtatcaatcccagatagcccttcaggagaaggagagtgaaatccagctgctgaaggaacacctttgcctggccgaaaacaagatggccatccagtcgcgggacgtggctcaattccgcaacgttgttacccaactggaagctgatttggatataaccaagcggcagctaggaacagaaagatttgaaagagagagggccgtacaggagttgcggagacaaaactattcctccaacgcctaccacatgagcagtaccatgaaaccgaacactaagtgccactcccctgaaagagcacatcatagatcccccgatcgcggtctagacaggagcttggaagagaacctctgttacagggatttttag

SEQ ID NO: 137603 - DNA, 2097 bp, synthetic construct
  misc_feature 1..2097: note = Description of Artificial Sequence: Synthetic coding sequence
  source 1..2097: mol_type = other DNA
atgatgaggagccggagcaaaagccctcggcgacccagccctaccgctcggggcgctaattgcgatgttgaactactgaagacaacaacaagagaccgggaggaactcaagtgcatgctggagaagtatgaacgccatctggccgagatacagggaaatgtgaaggtgcttaagtctgagcgggacaagatctttctcttgtacgagcaagctcaggaagagatcactcggcttaggcgggaaatgatgaaaagttgcaaatctccaaagagtacaacagctcacgctatcctccgcagggtcgaaactgagagggacgtagcctttacagacctgaggcgtatgacaactgagcgggattccctgcgggaaagacttaaaatcgcgcaagagactgcttttaacgagaaagcccacttggagcaacggattgaggagctggagtgtaccgttcacaatctcgacgacgagcgtatggagcaaatgtccaacatgaccttgatgaaagaaacaatctcaaccgtagaaaaagaaatgaagtccctggctcgcaaagccatggacacagaatcagagctcggtcgccaaaaggccgaaaacaactcgttacggttattatacgagaatactgaaaaggacctgtctgatacgcagcgtcatctggctaagaagaaatatgagttgcaactgacacaggaaaagatcatgtgcctcgacgagaagatagataatttcactcggcagaatatcgctcagagggaagagatcagtattcttggcggaactcttaatgatctcgctaaggagaaggaatgtctccaggcttgtttagacaaaaagagcgaaaatattgcatcgctgggtgagtcattggccatgaaagagaaaaccatctccgggatgaaaaacatcatcgccgagatggaacaggcatcaagacagtgtaccgaggccctcattgtgtgcgaacaggatgtgtcaagaatgagacggcagctggacgagacgaatgatgaactcgcacaaatcgcccgggagagagatatcctcgcccacgacaacgacaaccttcaggagcagtttgctaaggccaagcaagagaaccaagcgctgagcaagaagcttaacgacacgcataatgaactcaacgacatcaagcagaaggtgcaggatactaatttagaggtgaacaagctgaaaaacattttgaaaagtgaagagtccgagaacagacaaatgatggaacagctgaggaaagctaatgaggatgctgaaaactgggagaacaaggcccgtcagtctgaggctgataataatactctcaagctggagcttattaccgcagaggcagagggaaatcgtctcaaagagaaggttgactccctaaatcgtgaagtggaacagcacctaaatgccgaaaggtcctataaaagccagatttcgaccctgcacaaatctgtagtgaaaatggaggaggagcttcagaaggtacagttcgagaaggtgtctgccttggcagatttgtcctcaaccagggagctctgtattaaacttgactccagtaaggagctgttaaatagacagttagtggctaaggaccaggagatcgagatgagggagaacgagcttgattcagcacactcagaaattgagctgctcaggagccagatggccaatgaaagaataagcatgcaaaatctggaagcactcctggtcgctaacagagataaggagtaccagagccaaatcgcgcttcaagaaaaagagtccgagatccaactcttgaaggaacacctgtgcctggcagaaaataaaatggctatccaaagcagagatgtagctcagttcagaaatgtagtgacgcagctggaagccgacctcgacattaccaagaggcagctgggaacggagaggttcgaacgtgagcgagcggtgcaagagttgcgtcgacagaattactccagcaacgcataccacatgtcatctaccatgaaacctaacacgaagtgccacagtcccgaacgtgcacaccatcgaagcccggaccggggactcgatagaagcctcgaggagaacctttgctaccgggatttttag

SEQ ID NO: 137604 - DNA, 2097 bp, synthetic construct
  misc_feature 1..2097: note = Description of Artificial Sequence: Synthetic coding sequence
  source 1..2097: mol_type = other DNA
atgatgcgctctaggagcaaatcacctagaaggccttcaccaacagcccgtggcgccaattgtgacgtcgaactgctgaagaccacaacccgtgaccgcgaagagctcaagtgtatgttggagaagtacgagaggcacctcgcagagatccagggcaacgtaaaagtactcaagtccgaaagggataaaatctttctactgtatgagcaggcccaggaggagatcacccgccttagacgggaaatgatgaagtcatgcaagtctcctaaatctacaactgctcacgccatactcagaagagttgaaaccgagagagacgtagcctttactgatcttcgtcggatgacaactgagagggactcattgagagagcgtctcaaaattgcccaggaaacggcatttaacgagaaggctcatctggagcaaagaattgaggaactcgagtgcaccgtgcacaatctcgatgatgagcggatggagcaaatgagcaatatgacattaatgaaagagacaatctccaccgtggagaaggagatgaagtctcttgctaggaaggccatggacacagagtctgagttagggcgccagaaggccgaaaacaattcgctccgcttactgtacgagaacacagaaaaggatctcagcgatactcagagacacctggccaaaaagaagtatgagttgcaactgacccaggaaaagattatgtgcttggatgaaaaaattgataatttcaccagacagaacatcgctcaacgggaagagatttcgatcctgggaggcacgttaaacgatctggctaaggaaaaagagtgtctccaggcatgcctggataagaagtccgagaacattgcctccttgggggagtctctggctatgaaagaaaaaaccattagcgggatgaaaaacatcattgcggagatggagcaggcttctagacagtgtaccgaggccctaatcgtgtgtgaacaggacgtatcgagaatgcggcgtcaactcgatgaaaccaacgacgagttagcccaaatcgcgcgagagcgtgatattttggcccacgacaacgacaacctgcaggaacaattcgccaaggccaagcaggaaaaccaagccttaagtaagaaattgaatgatacacacaacgaactgaatgatataaagcagaaggtgcaagacacgaaccttgaggtcaataagctgaaaaatatcctcaagtccgaagagtcagaaaaccgccaaatgatggaacagttgcggaaagcaaacgaagatgccgagaattgggagaacaaagccaggcagtcggaagccgataacaatacccttaaactggagctgattaccgccgaagctgaaggcaacagactcaaggagaaggtcgatagccttaatagagaagtagaacaacacttgaatgccgaacgatcttacaaatcccagattagtacgctgcataagagtgtcgtgaaaatggaggaggaactacaaaaggttcagttcgaaaaagtttccgccttggctgacctctcctctactagagaactgtgcatcaagttggactccagcaaagagcttctgaacaggcagctggtcgctaaagatcaggagatcgaaatgagggaaaacgagttagatagtgcccatagcgagattgaactgctacggagccagatggctaatgagcgcatctctatgcagaacctggaggccctccttgttgcaaatagggacaaagagtaccaaagccagattgctctacaggaaaaggaatctgagatccagttgctcaaggagcatctgtgccttgcagaaaataagatggccatacagtctagggatgtagcccagttcaggaatgtagtgacacagctggaggcggacctggacataactaagcgccagcttggaacagagagatttgagagagaacgcgctgtgcaggaattacggaggcagaactattcttctaatgcataccatatgtctagcaccatgaagccgaacaccaagtgccatagtccagagcgggcccatcatagatcccccgataggggactggatcgctcactcgaggaaaacctctgctatagggatttttag

SEQ ID NO: 137605 - DNA, 894 bp, synthetic construct
  misc_feature 1..894: note = Description of Artificial Sequence: Synthetic coding sequence
  source 1..894: mol_type = other DNA
atgatgcggtcaaggtctaagtcaccccgcagacccagccccacggcaaggggagccaattgtgacgttgaacttctgaaaacaacaacacgcgaccgggaggaactgaagtgtatgctggagaagtacgagcgacacctggccgaaatccaggggaatgtgaaagtactgaaatcagagcgagacaagatcttcttgctgtacgagcaggcgcaagaggagattacccgcctgcggcgtgagatgatgaagtcttgtaaatctcctaaaagtaccacggctcacgcgattctgaggcgcgtggagaccgaacgcgatgtggcgttcacagatctccggaggatgaccaccgaacgggactctcttcgggagaggctcaaaattgcccaggaaaccgcctttaacgaaaaagcccatctggaacagcgtatcgaagagcttgagtgtactgtccataacctggacgacgaacgaatggaacagatgtctaacatgactctaatgaaggagacgatcagcaccgtagagaaggaaatgaaatcactcgctaggaaggcaatggatacggagagcgaactgggtcgtcaaaaagcagaaaacaatagtcttaggttgctctacgagaacacagagaaagacttatctgacacccaacgccacctggccaaaaagaaatacgagctgcagctgacgcaggaaaagattatgtgcctggacgaaaagattgacaacttcacacgccagaatattgcccaacgtgaggagatatctatccttggggggaccctcaatgatctggccaaagaaaaggagtgcttgcaggcctgcctggataaaaagtccgagaatattgcaagcctgggtgaatcgctggcgatgaaaacagtgtactag

SEQ ID NO: 137606 - DNA, 1881 bp, synthetic construct
  misc_feature 1..1881: note = Description of Artificial Sequence: Synthetic coding sequence
  source 1..1881: mol_type = other DNA
atggccggcgagcgcccacccctcagagggccaggcccggggccgggggaagtgcctggagagggaccacccggacctggtggcactggcggcggcccgggccgaggtcgccctagcagctatcgggccctgcgctccgccgtgtccagccttgcccgagtggatgattttcactgcgccgaaaagatcggcgcgggatttttcagcgaggtttacaaagtcagacacaggcaatccggccaggtcatggttctgaagatgaacaaactcccaagcaaccgcggaaacacacttagggaagtgcagctgatgaataggctgcgccatcccaacatactccggtttatgggcgtgtgtgtgcatcagggacagcttcacgcgctgaccgagtatatgaacgggggaacactcgagcagctgctctcttccccagaacctctaagctggccggtgagattacacttggcactggacatagcgaggggcctgcgctatctgcactccaaaggcgttttccatcgtgacctaaccagcaaaaactgccttgtccgtcgggaggacaggggattcactgccgtagtcggagattttggcctggccgagaaaattccagtttacagagaaggggcaaggaaggagccgctggcagttgtggggagtccctattggatggccccagaagtactgcgaggggagctgtatgacgagaaagctgatgtgttcgcctttggaatcgtgctttgcgagcttatagcaagggtgccagcagatcctgactacttgcctcgcactgaagacttcggactggacgttcccgccttccgcacccttgtcggagatgattgcccattaccattcctactcctcgccattcattgttgcaatctcgagccctctacacgcgccccatttactgagattacccagcacctggaatggatactggagcaactccctgagcctgcccccttgacccggaccgcactgacacataatcaaggctccgttgctagggggggaccctctgcaacactccctaggcctgatccgcggctttcaagatcccgctccgatctgtttttgcccccctctcctgagagcccccccaattggggggacaacctcacaagggtgaacccgtttagtctgcgcgaagacctgcgcggcggcaagattaaattactcgacaccccgtccaagcccgtgctccccctggttccaccctccccctttccctctactcaacttccattggtcaccactcctgaaacactggtgcagcctggcactcccgccaggagatgccgctccctgccctcaagcccggaactgcctcggcggatggaaaccgcgttaccaggcccgggtccgccagccgttggtcccagcgcagaggaaaaaatggaatgtgaggggtcgtctcccgaacctgagccccctggaccagctcctcagttgcctctcgcagtggctaccgacaattttatcagcacctgtagcagtgcttcacagccctggtcccccaggagcggccccgtgctcaataacaaccctccagccgtagtggttaacagcccccagggatgggctggagagccttggaaccgggcccagcactcactcccacgagccgcagctctggagcggacagagcccagtccaccacccagcgccccccgcgaacccgacgaaggactaccgtgcccagggtgctgtttggggccatttagttttggtttcctgagtatgtgccctagaccaacccccgctgtcgccagatatcggaaccttaattgtgaagctgggtcactgctgtgccaccggggccatcatgcgaagcccccaacaccaagcttgcagcttcccggggccaggagttag

SEQ ID NO: 137607 - DNA, 474 bp, synthetic construct
  misc_feature 1..474: note = Description of Artificial Sequence: Synthetic coding sequence
  source 1..474: mol_type = other DNA
tctgctcgagcggctgccctatcacggaacctgcagggacaacgcccactacctctggctgttgctacagacaactttatcagcacctgctcatccgcctctcagccttggagcccacgaagcgggcccgtactgaacaacaaccccccagctgttgtcgtgaattcaccgcagggctgggccggggagccctggaacagagcccagcactctctgccccgcgccgccgctctggagcgcaccgaaccctcaccccctccctccgctccgagagagccggacgaaggcttgccatgccctggatgttgtttgggtccattctccttcgggttcctgtccatgtgtccccggcctacacccgctgtcgctaggtaccgcaatcttaattgcgaagcgggctccctcctgtgccatagaggccaccatgctaaaccccctactcctagtctccagctgcctggtgcaagatcatag

SEQ ID NO: 137608 - DNA, 1077 bp, synthetic construct
  misc_feature 1..1077: note = Description of Artificial Sequence: Synthetic coding sequence
  source 1..1077: mol_type = other DNA
atggacgacgcaaccgtgcttcgcaagaagggctatatcgtgggaattaatttgggaaagggatcatacgccaaagtcaaaagtgcgtactctgaacgcctgaagtttaacgtcgcagtgaagatcatcgaccgcaaaaagacaccaacagactttgtcgaacgtttccttcctagagaaatggatatcctggcaactgttaatcatggatctatcataaagacatacgagatcttcgagacaagcgacgggaggatttacattataatggaattgggggtgcagggcgatcttctggagtttatcaagtgtcagggggcactgcacgaagatgttgcccggaagatgtttaggcagctttcaagcgctgtgaaatactgccacgatttagacatcgtgcaccgcgatctgaagtgtgagaatctactactggacaaagacttcaacattaaacttagcgattttggtttcagcaaacgatgtctgcgtgacagcaacgggcgtattattctgtccaagactttctgcggcagtgccgcttacgctgcccccgaagttctccagtcaatcccctatcagcctaaagtttatgacatatggtctctgggtgttattctgtacattatggtctgtggctctatgccatatgatgactccgatattagaaagatgctgcgtatacagaaggagcacagggtagactttccgaggagtaaaaatctaacttgcgaatgcaaagatctgatttatcggatgctccaaccggatgtatcccagcgactccatatcgacgagatcctctcgcactcttggttgcaacctcccaaaccgaaagccacttcgtcggcaagcttcaagagggaaggcgagggaaagtatagggctgaatgtaaacttgacaccaagacaggtctcaggcccgatcaccgccccgaccacaaactcggcgctaaaactcagcacaggttgctcgtcgtgccggagaatgaaaaccggatggaagatagactcgccgaaacttcaagggctaaggaccaccacatctcgggcgctgaggttgggaaggcatcgacttag

SEQ ID NO: 137609 - DNA, 807 bp, synthetic construct
  misc_feature 1..807: note = Description of Artificial Sequence: Synthetic coding sequence
  source 1..807: mol_type = other DNA
atggaggacttcctgttgtcaaacggttaccagctgggcaagaccattggtgaggggacctattccaaagtgaaagaagccttttctaaaaagcatcagcgaaaagtcgcgatcaaggttattgataaaatgggaggcccggaggaatttattcagagattcctgcctagagagcttcagatcgtgcggacgctggatcacaagaacataatacaagtgtatgaaatgcttgaatctgccgatggtaagatctgccttgtgatggagctcgcggaggggggagacgtgtttgattgtgttttgaacggaggtccactcccggaatcaagagcgaaagctctgtttcgccagatggttgaggcaatcaggtactgtcacgggtgcggtgtggcccatcgcgacttgaagtgcgaaaacgctcttctccaaggcttcaacctgaagctgaccgattttggtttcgcaaaagtgttgcccaagtctcatcgtgagcttagtcagacattttgcggctctactgcttatgcggcccctgaagttctacaaggcattcctcacgacagtaaaaagggcgacgtgtggtccatgggcgtggtgctgtacgttatgctgtgcgcgtctctgccgtttgacgacaccgatatacctaagatgctgtggcagcagcagaaaggcgtcagttttcccactcacctgtccatttccgcagactgtcaagatctgttgaagaggctgctcgaaccagacatgatcctgcgtccatctattgaggaggtgagttggcacccgtggctggcctccacctag

SEQ ID NO: 137610 - DNA, 987 bp, synthetic construct
  misc_feature 1..987: note = Description of Artificial Sequence: Synthetic coding sequence
  source 1..987: mol_type = other DNA
atggggaaaggagacgtactggaagcagcgccaacaacgacagcataccactctctgatggatgaatatggctatgaagtggggaaggccattggtcatggatcttatgggtcagtttatgaggcattttacacaaaacagaaggtgatggttgctgttaagattatttccaagaaaaaagcgagcgatgactacctcaataagttcctcccccgtgaaatccaggttatgaaggtccttcgacataaatatttgatcaacttctatcgtgccatcgagtccacgtcacgggtgtatataattttagaactggcacaaggcggcgatgtcctcgaatggattcaacggtatggggcttgttcagagcccttggcggggaaatggttctcccagttgacgttaggtattgcgtacctgcatagcaaaagcatcgtacatcgcgatctgaagctagagaacttgttgctggacaagtgggagaacgttaagatttctgactttggattcgctaagatggtcccgtctaatcagcctgttggttgttctccctcttaccgtcaggttaactgcttttctcacctctcgcagacatattgtgggtcctttgcttatgcatgtccggaaatcctgcgcggacttccctataatccattcctatctgatacctggagcatgggagtcatcctctacacattggtggtcgcacacctaccattcgatgacacaaacctcaagaaactcttacgcgagacacagaaggaagttacatttccagctaaccataccattagccaagagtgcaagaatctgatattacagatgctaaggcaagccactaaaagagcaacgattctcgatattatcaaggatagctgggtgctgaaatttcaacctgagcagcctacccatgaaattcgtctcttggaggcaatgtgccagctacataacaccacaaaacagcaccagagccttcagatcacaacctag

SEQ ID NO: 137611 - DNA, 1017 bp, synthetic construct
  misc_feature 1..1017: note = Description of Artificial Sequence: Synthetic coding sequence
  source 1..1017: mol_type = other DNA
atgggcaagggcgatgtgctggaggctgcccctaccactacagcttaccacagtcttatggatgaatatgggtacgaagttggcaaagctatcggtcatggcagctacgggtccgtttacgaagcgttttacactaagcagaaggttatggtcgcggttaaaatcattagcaagaagaaagccagcgacgactacctgaacaaatttctgccacgtgagatccaggtgatgaaagtccttagacataaataccttatcaacttctaccgcgcaattgagagtacctcaagagtgtatataattctggaattagcccaagggggagatgtattagagtggatccagcggtacggggcctgcagcgagccactggcaggaaagtggttttcacagctgactttaggtatcgcctacctccactccaagtcaatcgttcacagactaatgccttctctctcagcagccgggcgtgacctcaagctggagaaccttttactcgataaatgggagaatgtgaaaatcagcgacttcggatttgcaaagatggtgccatcaaaccaacctgttggatgctcaccctcttatcgccaggtcaattgcttttctcatttgtctcagacctactgtggctctttcgcttatgcttgcccagagatcctcaggggtttaccatacaacccctttttatctgatacctggtccatgggagtcatactctacacgctagtggtggcacacctgcctttcgatgacacaaacctcaagaagcttcttagagagacccaaaaagaagtaacattccccgcaaatcacaccatctcacaggaatgtaaaaacctgattctccagatgctccgacaggcaacaaagagagcgactatcttggatatcattaaggatagctgggttcttaagtttcaacctgagcaacctacccacgagatacgtttgctggaggcaatgtgtcagctgcataacacaaccaaacagcatcagtcactccaaattacaacttag

SEQ ID NO: 137612 - DNA, 759 bp, synthetic construct
  misc_feature 1..759: note = Description of Artificial Sequence: Synthetic coding sequence
  source 1..759: mol_type = other DNA
atgaaggtgctcaggcacaaatatctgataaatttctatagagccatcgagtcaacaagcagagtgtacatcatattggagctagcccagggcggagacgtccttgagtggattcagagatacggagcctgcagcgagcccctggctggcaagtggttctctcagctgacccttgggattgcctatctacatagtaaatctattgtgcaccgagacctcaaactggaaaatctcctgctcgacaagtgggagaacgtgaagatctccgacttcggcttcgccaaaatggttcccagcaatcagcctgtgggttgcagcccatcttaccgccaggtgaattgcttcagccacctgtctcagacctactgtggatctttcgcgtacgcatgtcctgagattctgcgggggttgccatataatcctttcctgtctgatacttggtccatgggtgtaattctgtacacattggtcgtggcccaccttccatttgatgacaccaatctgaaaaaactcctgcgggagacgcagaaagaagtgacattccccgccaaccacacaatcagccaggaatgcaaaaatctgatccttcagatgctgcgccaggccaccaagcgggctactattctcgacatcataaaagactcgtgggttctgaagtttcagcccgaacagcccacccatgagattaggctgttggaagctatgtgtcagctccataatacaacaaaacaacatcagagcctccagatcacaacttag

SEQ ID NO: 137613 - DNA, 822 bp, synthetic construct
  misc_feature 1..822: note = Description of Artificial Sequence: Synthetic coding sequence
  source 1..822: mol_type = other DNA
atgagcggcgacaaactcctgtcggaattagggtacaagctcggaaggacgatcggtgaagggtcatatagcaaggtcaaagtcgcgacctcaaagaagtataaagggaccgtcgctataaaagtggtagatcgccgcagggcaccccctgatttcgtgaataagttcttaccacgcgagttgagcatactgcgtggcgttcgtcacccccatattgtgcacgtgttcgagttcattgaagtctgtaacggaaagctgtacattgtgatggaagccgctgcaacagaccttttgcaagctgtgcagcgtaatgggcgtatacctggcgtccaggcccgggatttatttgctcaaatcgcgggggccgtcaggtatctccatgaccaccacctggtgcaccgtgatcttaaatgcgagaatgtcctgctgtctccggacgagcgaagggtgaagctaacagacttcggcttcggtcgccaggcccacggctatccggatttgtcgacgacctattgcggtagcgcggcatatgcctccccagaagttctcctcggaatcccctacgaccccaaaaagtacgacgtgtggtctatgggcgtggtcttgtatgtcatggttacggggtgtatgccttttgacgattccgacattgccggactgcctaggcgtcaaaagcgcggggtcttgtaccccgagggcctggaactaagcgagcgctgcaaggccttaatcgcagagctcctacagttttccccctcagctcggccaagcgctggacaggtagctaggaactgctggctccgtgccggagactccgggtag

SEQ ID NO: 137614 - DNA, 822 bp, synthetic construct
  misc_feature 1..822: note = Description of Artificial Sequence: Synthetic coding sequence
  source 1..822: mol_type = other DNA
atgtccggggacaaactgctgagcgaactgggatacaagctgggcaggacgataggtgaggggtcatattccaaggtcaaggtagctacatccaagaagtataaaggaaccgtggccatcaaggtggtggaccgcaggcgtgcgcctcccgattttgtgaacaagttcctgccacgcgaactatcaattctgcgcggggtcaggcacccacacattgtacacgtgttcgagttcatcgaggtatgcaacggcaagctgtacatcgtgatggaggcagccgcaacagacctcctccaggcagtgcagcgcaacgggcggatcccaggggtgcaggcacgtgatctgttcgcacagattgcgggggcagtgcgctatttgcacgaccatcatctggtgcaccgggacctgaagtgcgagaacgtgttgctgagtcctgacgaaagacgagtgaagctaactgactttgggtttggaagacaggctcacggatatcctgacctgtctaccacctactgtgggagtgccgcctacgcctcgcccgaggtgttgctagggatcccctacgaccctaaaaaatatgacgtgtggtcaatgggagtggtcctgtacgtgatggttacaggttgtatgccattcgatgatagcgatatcgccggcctgccacgacggcaaaagcgcggagtgttgtacccagaagggctggaactgtctgaacggtgtaaagctctcatagccgaactgctgcaatttagtccctccgccagaccctccgcagggcaggtagccagaaattgttggctgcgggccggggactccgggtag

SEQ ID NO: 137615 - DNA, 6411 bp, synthetic construct
  misc_feature 1..6411: note = Description of Artificial Sequence: Synthetic coding sequence
  source 1..6411: mol_type = other DNA
atgtctcgctcacgccacgcaaggccttcaaggctggtgaggaaggaggatgtgaacaaaaaaaagaaaaacagccaactgcgcaagaccacaaagggcgctaacaagaacgtggcgtctgtgaaaacactttctccaggaaaactcaagcaattgattcaggagagagacgtaaagaaaaagacggagcccaagccccccgtgcccgtgaggtctctcctgaccagagccggcgctgccagaatgaacctagatcggacagaggtcctcttccagaatcctgaatctcttacctgtaatggtttcaccatggccctcaggagtacctccctatctagacgactaagccagccaccgctggttgtcgcgaagtccaaaaaggttcccctgtccaaaggactggaaaagcaacacgactgcgactacaaaatcctgcccgctctcggcgtgaagcatagcgagaacgattctgtgcctatgcaggacactcaagtcctgcccgatatcgagacacttattggcgtacagaacccatccttgctcaagggaaaaagccaagaaacaacgcaattttggtcccaacgcgtggaggacagtaagataaacatcccaacacatagtgggccagcggctgaaatcctgcctgggcccctggaagggacccgatgtggcgagggactcttctccgaagagacactgaatgatacgtctggttccccaaagatgtttgcccaggatactgtgtgcgcacctttcccccagagggccacccccaaagtcacttcccaaggcaacccgagcattcagctggaggaactcggatcacgagtcgagtccttgaagctcagcgatagctatttggatcccattaagtccgagcacgactgctaccccacatcttctctaaataaagtcattcccgacctaaatctgagaaattgcctcgcgctcggtggctcaacctccccaacatcagtgattaaattcttgttagccggctcaaagcaggccaccctgggggcaaagcctgaccatcaggaagcttttgaagccaccgctaatcaacaggaagtcagcgacacaacatcctttctggggcaggcatttggagctatcccccaccagtgggagcttcccggagctgatcctgtgcacggagaggctctgggtgagacacccgatttgccagagatccctggagcaattcctgtgcagggcgaggtgttcggtacaatattggaccagcaggaaacactcggaatgtctggctccgtcgtgccagatctaccagttttcctcccggttcccccaaatcctatcgctaccttcaatgcaccgagcaaatggcccgagccccagagcactgtgtcctatggtctcgctgtccagggggccattcaaattcttcctctgggatcagggcacacccctcaatccagttccaatagcgagaaaaacagcctccccccggtgatggccatctcaaatgtggagaacgagaaacaagtacacattagtttcctccccgccaacactcagggctttcccctcgctccagagcgaggcctcttccacgcaagccttggcatcgcccagctgagtcaagccgggcccagtaaatccgatcgggggagcagccaggttagcgtgacctccacagtccacgtcgttaatactaccgtcgtgacgatgccggtccccatggtgtccaccagctcatccagttataccaccttgcttcccactctggaaaagaagaagcgcaagcgctgcggcgtatgtgaaccgtgtcagcaaaagaccaattgtggtgagtgtacctactgcaagaatcggaagaacagccatcaaatttgtaagaagagaaagtgtgaggaacttaagaaaaagccaagcgttgttgtccccctggaggtcatcaaagagaataaaaggccccaacgtgagaagaagcctaaggtcctcaaggcagacttcgacaataaacccgtcaatgggccgaagagtgaatcaatggactactcaagatgcgggcacggcgaggaacaaaagcttgagttaaacccacatacagtcgaaaatgtgacaaaaaacgaggacagtatgactggcattgaggtagaaaaatggacacagaataaaaaatcccagctgaccgaccatgttaagggtgattttagtgcgaacgttcctgaggcagaaaagtccaaaaattctgaagtggacaagaagagaacaaagtctcccaagctttttgtccagaccgtgaggaacgggatcaagcacgtccattgtctccctgccgagacgaacgtctcattcaaaaaattcaatatcgaggagttcggaaagacactcgagaacaactcatataagtttctgaaagacacagccaaccacaagaacgctatgtcttctgtagcgacagacatgagttgtgatcacctaaaaggtcggtcgaacgtcctggttttccagcagcctgggttcaattgttcatctataccccattcatcccacagtatcattaatcatcacgcctcaatccacaatgagggggatcagccaaagactccggaaaacataccctcaaaagagccaaaggacgggtcacctgtgcagccttccctactctcgctgatgaaggataggaggctcaccctggaacaggtggtcgcaatcgaagccctgacgcagctgtctgaagccccatccgaaaattcatctcctagcaaaagcgaaaaggatgaggaatccgagcagcgcactgcatccctgctgaactcttgcaaggccattctctatacagtcagaaaggatctccaggatcctaatctccagggtgaacctcccaaacttaatcattgtccatcccttgagaagcaatcttcgtgcaacacagtggtatttaacggccagactacgactctttccaactctcacatcaacagcgcgaccaatcaagcaagcactaagtctcacgagtatagcaaggtgactaactcactcagcctgttcattcctaagagcaacagtagcaagattgatacaaataagtctatagcccaaggcataatcaccctggataattgctcaaacgatctgcatcagctgcctcccagaaacaacgaggtagagtattgcaaccagctgcttgactcatcgaagaagcttgactccgatgatctgtcatgccaggatgctactcacacacaaatcgaggaggacgtcgcaacacagctcacgcagctcgcatcaataatcaaaataaactacatcaagccagaggataagaaggtagagagtactccaacgtccctggtgacctgtaacgtacagcagaaatataaccaggagaagggaaccattcagcagaagccgcccagctccgtgcacaacaaccatggctcttcccttactaaacagaagaatccaacccagaaaaaaactaagtcgaccccgtctagggacaggaggaaaaaaaagcctaccgtcgtttcatatcaagaaaacgaccggcagaaatgggagaagctgtcatacatgtacggaacaatttgtgacatatggatcgctagcaagtttcagaatttcggacagttctgccctcatgattttccaactgtgtttggcaagatctctagctccaccaaaatttggaaacctctcgcccagactcgcagcattatgcagccaaaaacagtcttcccacccctgacgcagattaagctccagcgctatccagaatctgccgaagaaaaggttaaggtggagccattagacagcctttcgttattccaccttaagaccgaatctaacggtaaagctttcactgataaggcctacaattctcaggtgcagctgacagtcaacgcaaaccagaaagctcacccactgactcaacctagttctccccctaatcaatgtgccaacgttatggcaggcgacgaccagatcagattccagcaagtggtgaaagagcagctgatgcaccaacggttaccaacattgcccggcatttctcatgagactcccctgccggaatctgccctgactttgagaaacgtcaacgtagtctgctcgggaggcattactgttgtgtcgacaaaatcggaagaggaagtgtgcagctcctcctttgggacctcagaattcagcaccgtagattccgctcaaaagaacttcaatgactatgctatgaactttttcaccaacccaaccaaaaatctcgtgtcaattaccaaagactctgagcttcctacttgcagctgcctggatagggtgatccagaaggataagggtccatattacacacatctgggggccggcccttccgtggcagcggtgcgtgagattatggaaaaccgatatggccagaaaggaaatgccatacggattgagattgtggtctatacaggcaaagagggaaagtcctcccatggctgtccgatcgcaaagtgggttctgaggagaagctccgatgaagaaaaggtgctgtgcctcgtgcgacagagaactggacatcactgtcccaccgctgtgatggtggtgttgatcatggtgtgggacggcatcccactccctatggctgatcggttatacaccgaacttaccgaaaacttgaaaagttataacggccatccaaccgacagaagatgtacactgaacgaaaaccggacctgcacatgtcagggaatagaccccgagacatgcggcgcttctttttcgtttgggtgttcttggagtatgtattttaacggttgcaaatttggtaggagtccatccccccggcggttccgcatagatccctcctcgccactgcatgagaaaaatcttgaagataatttgcagagtttggctacaaggctcgcgcccatatacaaacagtacgcccccgtggcatatcaaaatcaagttgaatacgaaaatgtcgctagggagtgcagactgggttcaaaggagggacggcctttctctggagtgaccgcctgtctcgacttctgtgcccacccccatcgcgacatccacaacatgaacaatggttccacagtagtgtgcacccttactcgtgaggacaataggtcgctaggcgtcatcccacaggatgagcaattacacgtgcttcctctctataaactttcggatacagacgagtttgggagtaaagaggggatggaggcaaagatcaaatccggagcaattgaggttctcgctccgagacggaagaagcgcacttgtttcacacagccagttcccagatcagggaagaagagggccgcaatgatgactgaggtcctggctcacaaaatccgagcagtggaaaagaaacctatcccaaggatcaagaggaagaataattcgacaacaacaaataattccaagccttcgtcgctgcccacccttggctcaaacaccgagacggttcagccagaggttaaaagcgagaccgaaccacacttcattctcaaatcgagcgacaatactaaaacatatagcctgatgccatccgctcctcatcccgttaaggaggctagtcccggcttcagctggagtcctaagacagcctccgccacacccgccccacttaaaaacgacgcgactgcctcatgcggcttttctgagcgcagctcaactccacattgtacaatgccgtcaggcaggttgagtggagccaatgctgccgctgccgatggccctgggatttctcagctcggcgaggttgctcccttgccaactctcagcgcacctgtgatggagccactgattaattccgagccgtcaactggggtgacagaacctctcacccctcaccagcccaaccaccagccatcattcctgacgtcaccccaggatctggcaagctcacctatggaagaggatgagcaacattccgaggcggatgaaccaccaagtgacgaacccctgtcggacgatccattatcgccagccgaggaaaagctgcctcacatcgatgagtactggtctgatagtgaacatatcttcctggacgcaaacatcggcggcgtggccattgcgccagcccacggctctgttttgatcgagtgtgcccgccgggagctccacgcgacaactccggtggaacatccaaatcgaaatcacccgacacgcctgtcgcttgtgttctaccagcacaagaacttgaacaagccccagcacggcttcgaacttaacaagatcaagttcgaagctaaagaggctaagaataagaagatgaaagcaagtgagcagaaggatcaggccgctaacgagggccctgaacagtcttctgaggtcaacgaactgaaccagattccatctcataaggcacttaccttgacccacgataatgtagtgactgtgtccccatacgcactgactcatgtggccgggccttataaccactgggtttag

SEQ ID NO: 137616 - DNA, 330 bp, synthetic construct
  misc_feature 1..330: note = Description of Artificial Sequence: Synthetic coding sequence
  source 1..330: mol_type = other DNA
atggccgaccgattgtacactgaactcacagaaaatcttaagagctataatggtcaccccactgatagacgatgcacactgaatgagaatcgtacatgcacctgccaggggatcgatcccgagacatgcggcgccagcttttcatttggctgctcttggagtatgtattttaatggatgcaaattcggaaggtctccatctccccgccgctttaggatagatcctagtagcccactgcacacctactacgaacgcattactaagggccggaacccggaaaggagatatatgaagccagaacgcatttcacccggtcatgaggctatgtag

SEQ ID NO: 137617 - DNA, 726 bp, synthetic construct
  misc_feature 1..726: note = Description of Artificial Sequence: Synthetic coding sequence
  source 1..726: mol_type = other DNA
atgcaatgcttcagctttatcaagaccatgatgattttgtttaaccttctgatctttttgtgcggcgccgcactactggccgttggcatctgggtgtctatcgacggggcaagctttctgaaaatatttggtcctctgagctcttctgcgatgcagttcgtgaatgtggggtactttctgattgcagccggggtggtggtgttcgccttgggttttctgggttgttacggagcaaagactgagagtaaatgtgcactggtaacatttttttttattctgttactcatcttcatcgccgaagtggccgccgcagttgtggctcttgtctacaccaccatggccgagcatttcttgacgctgctggtagtgccagccatcaaaaaggactatggtagccaggaggacttcacgcaggtatggaacactacgatgaagggactgaaatgctgtggattcacaaattacacagacttcgaagactccccttacttcaaagaaaatagcgcctttccgcccttttgctgtaatgataacgtgacaaatactgctaacgagacatgtacaaagcagaaggcccacgaccaaaaggtagaaggctgtttcaatcagcttttatatgacatccggacaaacgcagtgaccgtggggggagtggcggcggggattggcggactcgaactcgcggcaatgattgtttctatgtacctgtattgcaacctccagtag

SEQ ID NO: 137618 - DNA, 702 bp, synthetic construct
  misc_feature 1..702: note = Description of Artificial Sequence: Synthetic coding sequence
  source 1..702: mol_type = other DNA
atgtcatcgtacttcgtcaacccaacttttccaggcagccttccttctggacaggatagttttctcgggcaactaccactttatcaagccggctatgatgcattgcgccctttccccgccagttacggcgcttcctccctcccagacaagacctatactagcccgtgtttttaccaacaatcgaacagcgtgctggcatgcaacagagcgtcatatgaatacggggcttcctgcttctactcagacaaagatctttctggtgcttcgccctcagggtcagggaaacagcgggggccaggagattatttgcacttcagtcctgaacagcaatataagccagatagctcttccggccaaggaaaagccctgcatgacgagggggccgaccggaagtatacttctcccgtgtacccgtggatgcagcgcatgaattcttgtgctggggctgtgtatgggtctcacggcaggcggggccggcagacatacacacgctatcagacactggagctcgagaaggagttccattttaaccgctatcttacacggcggagacgcatagagattgccaacgccctatgtttgacagagaggcaaatcaaaatctggttccagaacaggcggatgaagtggaaaaaggagaacaagctgatcaattctacccagccgagtggcgaagatagcgaagcaaaagcaggggaatag

SEQ ID NO: 137619 - DNA, 918 bp, synthetic construct
  misc_feature 1..918: note = Description of Artificial Sequence: Synthetic coding sequence
  source 1..918: mol_type = other DNA
atggcgcgggaagactccgtaaaatgcctgcgctgtttgctgtacgccctgaatctcctgttctggctcatgtctatttctgttctcgccgtgtccgcttggatgagggactatcttaataacgtgctgacactcacagctgaaactcgggttgaggaggccgtgatactgacctactttccagtggtccatccagtgatgattgccgtctgctgttttctgattatcgttggaatgttgggatattgtggaaccgtcaaaagaaacctgctgttgctagcctggtactttggctccctgctggtgatcttctgcgtagagcttgcctgcggagtgtggacatacgagcaggagctgatggtgcccgtacaatggagcgatatggtgaccctgaaagcccgcatgaccaactatggcctgcctaggtaccgctggctgacacacgcatggaatttctttcaaagggagtttaaatgctgtggagtcgtttattttactgattggctggaaatgacagaaatggactggccccccgactcttgctgtgtaagggagttcccaggctgtagcaaacaggcccaccaggaggacctcagcgacctgtaccaagaaggttgcgggaagaagatgtattctttcctgcggggaacaaagcagcttcaggtattaaggtttctcggaatcagcatcggagtaacccagatattggccatgatcctcaccatcactttactctgggccctgtactatgacaggcgggagccagggacggatcaaatgatgtccctgaagaatgacaactcacaacacctctcctgcccctccgttgagctgctgaagccaagcctctccagaatatttgagcacacctcaatggcaaattcttttaatacccatttcgagatggaggagctctag

SEQ ID NO: 137620 - DNA, 339 bp, synthetic construct
  misc_feature 1..339: note = Description of Artificial Sequence: Synthetic coding sequence
  source 1..339: mol_type = other DNA
atggctcgtgaggattccgtgaagtgtttaagatgcctgttgtatgctctcaacctcctcttctggttgatgtcaattagcgtactcgctgtcagcgcctggatgcgcgactatcttaacaatgtactcacccttactgcagaaacccgcgtggaagaggcggtgatcttgacatatttccccgtcgtgcatcccgtgatgatagctgtttgttgcttcctcattatcgtcgggatgctgggttattgcggcaccgttaagagaaacttgctcctgctagcttggtactttggctccttgcttgtcatcttctgtgtggaacttgcttgcggcgtgtag

SEQ ID NO: 137621 - DNA, 288 bp, synthetic construct
  misc_feature 1..288: note = Description of Artificial Sequence: Synthetic coding sequence
  source 1..288: mol_type = other DNA
atggcccgcgaagacagcgtaaaatgcttgcgttgcctgttgtatgctcttaacctgttgttttggctaatgagtattagcgtgctggccgttagcgcctggatgagggactatttaaataacgtcttaaccctcaccgccgagacgcgggtagaagaggctgtcatactgacatatttccctgtggtacatcctgtgatgatcgcagtctgctgcttcctgatcattgtcggaatgctgggatattgcgggaccgtcaagcgcaacctgctgctgcttgcttggtag

SEQ ID NO: 137622 - DNA, 363 bp, synthetic construct
  misc_feature 1..363: note = Description of Artificial Sequence: Synthetic coding sequence
  source 1..363: mol_type = other DNA
atggcgagagaggatagtgtaaagtgtctgcggtgcttactctacgccctgaatctgctgttttggctgatgtctatcagcgttctggccgtatccgcttggatgagagattacctgaataacgtacttaccttgaccgccgagactcgggtggaagaagccgtgatcctcacttatttcccagtggtgcacccagtgatgatagcggtttgctgttttctgattatcgttgggatgctggggtattgcggaacagtgaaacggaacctgctccttcttgcctggtatttcggtagtctactggtcattttttgtgtagagctcgcctgcggcgtgtggacgtatgaacaggagctcatgtag

SEQ ID NO: 137623 - DNA, 444 bp, synthetic construct
  misc_feature 1..444: note = Description of Artificial Sequence: Synthetic coding sequence
  source 1..444: mol_type = other DNA
atggctagagaggactcagtcaagtgtctgcggtgcctcctgtatgcgttgaatctactgttctggcttatgtcaatctccgtcttagccgtgtcagcctggatgcgtgactacctaaataacgtgttgacattgactgcggagactcgggtggaagaggcagtaatccttacttacttccctgtcgtgcacccagtgatgattgctgtctgctgctttcttattatcgtggggatgcttggctattgcggtactgttaagcggaatctactgttgttagcctggtacttcggctcactgcttgtcattttttgtgtcgagctcgcatgcggagtttggacctatgagcaggaacttatggtgcctgtgcagtggagcgacatggtgacattaaaagctagaatgacgaactatggcctgcctagatacaggtggctgacttag

SEQ ID NO: 137624 - DNA, 885 bp, synthetic construct
  misc_feature 1..885: note = Description of Artificial Sequence: Synthetic coding sequence
  source 1..885: mol_type = other DNA
atgcccaggggcgactctgaacaagttcgttattgcgccaggttcagctacctgtggctgaaattttctctgatcatttatagcacagtcttctggctcattggggccctcgtactgtctgttggcatctacgcggaagtcgaacgccagaagtataaaaccctcgagagtgcgtttctggccccagctatcatcctcatactgttgggagtggtcatgttcatggtgtcgttcatcggagtgctggccagcttgagggacaatctgtatctccttcaggcatttatgtatattctgggtatctgtcttataatggaactgatcggaggcgtggtggcgctaaccttcagaaaccaaacaatcgatttcctcaacgataacatccggcgtggtatcgaaaattactatgatgacctggatttcaagaatataatggattttgtgcagaagaagttcaaatgctgtgggggggaggactatagagattggtccaaaaaccagtaccatgattgtagcgcacccggcccactggcttgcggtgtgccttatacgtgttgcattcgcaataccaccgaggtggtgaatacaatgtgcggttataaaactatcgataaagaacgcttcagtgtgcaggacgtgatttatgtgagggggtgtaccaatgccgttatcatctggttcatggataactataccataatggctgggatcttgcttggaatcctgctgcctcaatttctcggggtcctcctgacacttctgtacattacaagagtggaagacattatcatggaacactctgtcactgacgggctgctgggcccaggcgctaagcccagtgtcgaggctgccggaactggatgctgtctttgctacccaaactag

SEQ ID NO: 137625 - DNA, 582 bp, synthetic construct
  misc_feature 1..582: note = Description of Artificial Sequence: Synthetic coding sequence
  source 1..582: mol_type = other DNA
atgggccggttccggggcggactgaggtgtatcaagtatttactactgggttttaacctcctattttggctagctggttcagctgtgatcgcgtttggtctttggttccggttcggtggcgcaattaaagaacttagttccgaagacaagtctccggagtatttttacgttggactttatgtcctcgttggggctggagccctaatgatggcagtgggattcttcggctgttgcggagctatgcgggagtctcagtgcgtgctgggcagcttctttacatgcttactggtgatcttcgccgcagaggtaacgacgggcgtctttgcattcatcggaaaaggcgtggcaattagacatgtccagaccatgtacgaggaggcttacaacgactacctcaaagaccggggtaaaggcaacggaactctgattacatttcattcaaccttccagtgctgcggtaaagaaagcagtgagcaagtgcagcccacctgccctaaggaactgctaggccataaaatattcggaatgatattcagtatggtgctctgttgcgcaatccgcaacagccgcgacgtcatctag

SEQ ID NO: 137626 - DNA, 591 bp, synthetic construct
  misc_feature 1..591: note = Description of Artificial Sequence: Synthetic coding sequence
  source 1..591: mol_type = other DNA
atggggcgctttcgaggcggcctgagatgtatcaaataccttttgctgggcttcaatctcctcttctggctggccggctctgctgtgatagcctttgggctgtggttccggttcggtggtgcgattaaagaactcagttcagaggacaagtccccagagtatttttacgtcggcttatacgtactggtgggggccggggcactgatgatggcagtaggatttttcggttgttgtggcgctatgcgtgaaagccagtgcgttttagggtcagccatacggcacgtgcagacaatgtatgaggaagcatacaacgattacctcaaggaccgtgggaagggcaacgggacactgattactttccacagcacgttccagtgctgcggcaaagaaagctccgagcaggtgcaacctacgtgtcctaaagaactgctgggccataaaaactgtatcgatgagattgaaacaatcatcagcgtgaaactgcagcttattggaattgttggcattggtatcgcgggcctgacaatatttgggatgatcttctctatggttctgtgctgtgccattcggaatagtagagatgtgatctag

SEQ ID NO: 137627 - DNA, 666 bp, synthetic construct
  misc_feature 1..666: note = Description of Artificial Sequence: Synthetic coding sequence
  source 1..666: mol_type = other DNA
atgggtcggtttcgtgggggcttaagatgcatcaagtacttacttcttggattcaacctcctcttttggttggccggttctgcggtcatcgcgtttggactatggttccgttttggaggcgctatcaaagaactctcgtcggaggacaaaagccctgaatatttttacgttggcctctatgtgctcgttggagctggagctctgatgatggccgtgggctttttcggatgctgcggcgccatgcgtgaaagtcagtgcgttctgggtagtttcttcacctgcttactggttatctttgccgcagaagtgacaacaggggtattcgcgtttattggcaagggggtagcaataaggcatgtgcaaactatgtatgaggaggcatacaacgactatcttaaggatcgcggcaaaggtaatggtacacttattacgtttcactctacattccagtgctgcggaaaggaatcaagtgagcaagtgcagccgacttgccccaaggagctgttaggccacaaaaactgcattgacgaaattgagactataatctccgttaaactccaactcattggaatcgtggggatcggcattgccggacttactattttcggaatgatttttagcatggtcctctgctgcgcgatacgaaatagtagggacgtgatttag

SEQ ID NO: 137628 - DNA, 564 bp, synthetic construct
  misc_feature 1..564: note = Description of Artificial Sequence: Synthetic coding sequence
  source 1..564: mol_type = other DNA
ggattgcgctgcatcaagtacctcctgttagggttcaacctgctcttctggttagctggatccgctgtcatcgcctttggattgtggttccgcttcggaggtgcaatcaaggagctgtcatccgaagacaaaagtcccgaatatttttacgtggggttgtacgtccttgtgggggccggcgcactcatgatggccgtcggattcttcggctgctgcggagctatgcgggagagccagtgcgtgctggggtcgttctttacctgcctccttgtgatttttgcggctgaggttacaacaggcgtgttcgccttcatcggtaaaggcgtggctatcaggcatgtgcaaaccatgtacgaagaggcctacaatgactaccttaaagacagaggcaaaggcaatggcaccctgatcacatttcattccacctttcaatgctgcgggaaagagagctcagagcaagtgcagcctacctgccctaaggaactgctggggcataagatcttcgggatgattttttcaatggtgctgtgctgcgcaatccgaaatagcagagatgtgatatag

SEQ ID NO: 137629 - DNA, 762 bp, synthetic construct
  misc_feature 1..762: note = Description of Artificial Sequence: Synthetic coding sequence
  source 1..762: mol_type = other DNA
atgggccagtgcggtataacctccagcaagacagttctggtgttcctcaatctcatcttttggggtgccgcggggatcctttgttatgtaggcgcttatgtcttcattacctacgatgattacgaccatttctttgaggatgtgtacacgctgatcccagcggtcgttatcattgccgtcggggcccttttgtttatcataggcttgataggctgttgcgctaccatccgagaatcccggtgtggccttgctacctttgtgatcatcctcctgctcgtatttgtaaccgaggtagtggtggttgtgctggggtacgtttaccgcgcgaaggtggagaatgaggtggaccgctcgattcaaaaggtttacaaaacatataacggaacaaaccctgatgcggcctcaagggcgatcgactacgtgcagcgccagcttcactgctgtggaatccataattactctgactgggaaaacacagattggttcaaggagaccaagaaccagtccgtgcctctcagctgttgtagagagaccgccagtaactgtaatggctccctcgctcacccgagcgacctctatgctgagggctgtgaggccttggtggtgaaaaaactgcaagagatcatgatgcatgtgatttgggcagcgctcgcattcgccgccatccaacttcttgggatgctgtgcgcttgcattgtgctgtgcagaaggagccgggaccccgcatacgagctcctcataaccggcggcacctacgcctag

SEQ ID NO: 137630 - DNA, 687 bp, synthetic construct
  misc_feature 1..687: note = Description of Artificial Sequence: Synthetic coding sequence
  source 1..687: mol_type = other DNA
atgggacaatgcggcataacctcctccaaaaccgtattggtgttcctgaacctcatcttttggggcgccgccggaatcctgtgttacgtcggggcttacgttttcatcacatacgatgattatgatcacttctttgaagatgtctacacactcatcccagctgttgtcatcatcgctgtgggtgctctgctcttcattatcggactgattggctgctgcgccacaattagggagtctagatgtggcctggcgacagtcgaaaacgaggtggacaggtccatacagaaggtgtacaagacatataacggaaccaacccggatgccgcatcgagagctatcgattatgtgcagagacaattgcattgctgtgggatccataactacagcgattgggagaacactgattggttcaaagaaactaagaatcagagtgtgcccctcagctgttgtcgtgagaccgccagtaattgcaacgggagccttgctcaccccagcgatttgtatgctgaaggctgtgaagcccttgttgtgaagaagctgcaggaaattatgatgcatgtgatatgggccgccttggccttcgccgcaattcagttactgggtatgctgtgcgcctgtatagtgttgtgccgaagatcacgcgatcctgcttacgaactcttaatcactggtggcacctatgcctag

SEQ ID NO: 137631 - DNA, 651 bp, synthetic construct
  misc_feature 1..651: note = Description of Artificial Sequence: Synthetic coding sequence
  source 1..651: mol_type = other DNA
atgtgggaacccatgtcaagcagcctaatgatgacaatgacaaccagcctgaagatgtgtacgcggagcagtctcctctttatcattggtctcatagggtgctgcgcgacaatccgcgagtctcggtgcgggttggccaccttcgtgatcatcttactgcttgtcttcgttacggaggtcgtggttgtggtgctcgggtatgtctatcgggcaaaagtggaaaacgaggtagatcggtccatccagaaggtctacaaaacctataatgggaccaatccagacgccgcctcccgcgccattgattatgtccagagacagctgcattgctgcggaattcataattacagcgactgggagaacacagattggttcaaagagacgaagaaccagtccgtgcctctttcctgctgtcgagaaacagcctccaattgtaacggctccctggctcatcccagcgacttgtatgccgagggctgtgaagcccttgtcgtgaaaaagctgcaggagatcatgatgcacgtgatttgggccgctttggctttcgctgccatccagcagctcctggggatgctgtgcgcctgtatcgttctgtgtcgccgcagccgggaccctgcctatgagctgcttattacaggcgggacatacgcatag

SEQ ID NO: 137632 - DNA, 570 bp, synthetic construct
  misc_feature 1..570: note = Description of Artificial Sequence: Synthetic coding sequence
  source 1..570: mol_type = other DNA
atgggtcagtgtggcatcacctcttccaaaaccgtgcttgtgttcttgaacctaatattctggtttgtgataatattactattggtgtttgtaaccgaggtcgtggtggttgtgctaggctacgtgtaccgcgccaaggtggaaaacgaggtcgaccgctcaatacagaaggtgtacaagacttacaatggtacaaatcccgacgcggcgtctagggcaatcgactacgtgcaacgacaactccactgctgcggcatccacaattatagcgactgggagaatacggactggttcaaggaaaccaagaaccaaagcgtgcctctgtcctgttgcagagagaccgcttcaaattgtaacggatctctcgcccatcctagcgacctctatgccgagggatgcgaagccctggtagtcaagaaactacaggagatcatgatgcacgttatctgggccgccctcgcattcgcagctatacagctgctgggaatgctgtgcgcttgcatagtcctgtgccggcgtagccgcgaccctgcatatgaactcttgataacaggcgggacttatgcctag

SEQ ID NO: 137633 - DNA, 633 bp, synthetic construct
  misc_feature 1..633: note = Description of Artificial Sequence: Synthetic coding sequence
  source 1..633: mol_type = other DNA
atggtctgcggcggattcgcgtgctctaagaacgccctctgcgcactaaacgtggtgtacatgttagtctcgcttctcctcattggggtcgccgcttggggaaaagggctgggcctggtttcttccatacacattatcgggggggtgatcgcagtcggagtttttctgttactcattgctgtagcaggcctcgtaggagctgtaaaccaccatcaagttctgctctttttctacatgatcattctgggcctggtcttcattttccagttcgttatctcgtgctcctgtctggccatcaaccgaagcaagcagaccgatgtcatcaacgctagttggtgggtaatgtccaataagacacgagatgaactggagcgctcatttgactgttgcggtctctttaacctgacaacattgtaccagcaagactatgacttctgcaccgccatttgtaagtctcaaagcccaacgtgtcaaatgtgtggcgaaaaattcttgaagcactctgatgaggcactcaagattctcggaggcgttgggctgtttttcagcttcacggaaattttaggcgtgtggctagccatgaggttccggaaccagaaggatccacgagccaacccaagtgcgttcctttag

SEQ ID NO: 137634 - DNA, 963 bp, synthetic construct
  misc_feature 1..963: note = Description of Artificial Sequence: Synthetic coding sequence
  source 1..963: mol_type = other DNA
atgggcccatggagcagagtacgagtagctaaatgtcagatgcttgtgacctgtttttttatattgcttctggggctgtcagtcgctacaatggtgacacttacctatttcggggcccactttgctgtgatcaggagagcctctctggagaaaaatccatatcaggccgtccaccagtgggcctttagtgctggtttatcccttgttggcctactcactttgggtgcagtgctttcagctgctgccaccgtgcgcgaggcacagggcctcatggcaggtgggttcctgtgcttctcactggccttttgcgcgcaggtgcaggtggtgttttggcgactacactctcccactcaagtagaagacgctatgctggacacgtatgacctcgtctacgaacaggccatgaaagggactagccacgttaggcgccaggagctagcagccatacaggacgtcttcctgtgctgtgggaaaaagagtccattcagtagactcgggagcacggaggccgatctgtgccagggggaagaggctgctagagaggactgtctccaaggaatccgttcctttctccggactcatcagcaggtggcaagctctctgacgagcattgggctagcgctcaccgtttccgccttgcttttctccagttttctctggttcgccatccgctgcggatgctcgctggaccgtaagggaaagtacacccttaccccacgcgcgtgtggcagacagccccaagagccgtcgttactccggtgctcccaaggaggacccacacactgcctccactctgaggcggtcgcaattggcccacgtggttgctctgggagtctgcggtggctacaggagtccgatgccgcccccttaccactatcctgccaccttgctgcccaccgagccctgcagggacggagccgtggaggcctcagcggatgtccagagcgtggcttgtcagattag

SEQ ID NO: 137635 - DNA, 762 bp, synthetic construct
  misc_feature 1..762: note = Description of Artificial Sequence: Synthetic coding sequence
  source 1..762: mol_type = other DNA
atggggccttggagccgcgtccgggtcgccaagtgccagatgctggtgacctgtttttttattctgctactggggctgtccgtcgctaccatggtgacgctcacttacttcggggcacatttcgctgttatccgaagggcctctctggagaagaatccctaccaggctgtgcaccagtgggccttctccgcaggtctgtcactagttgggcttctcacactgggcgcagtgcttagtgccgcagccactgtcagggaagcccagggcctgatggcgggaggctttctctgcttctcccttgctttttgcgctcaagtgcaggtggttttttggcgcctccacagcccgacccaggtggaagatgcgatgttagacacttacgatctggtgtatgaacaggccatgaaaggaacaagtcacgtacggcgacaggaactggcggctattcaggacgtgtttctctgttgcggcaagaaatcacccttctcacggctgggatcgaccgaagctgatctctgccaaggggaggaagcggctcgggaggactgcttgcaggggattagaagcttcttaaggacgcaccagcaagttgcttccagtttaacctctataggcctcgctctgacagtgtcagctttgttattctcaagtttcctctggttcgccattaggtgtggctgctctttggaccgcaaaggaaaatacaccttgactcctcgaagccctggccagaagtccaggtgggcccaatgggtgccctag

SEQ ID NO: 137636 - DNA, 525 bp, synthetic construct
  misc_feature 1..525: note = Description of Artificial Sequence: Synthetic coding sequence
  source 1..525: mol_type = other DNA
atggcaataggcttcgtgggctgtcttggggcaatcaaggagaataaatgtctgctgctcacctttttccttctgctgctgctggtttttctgctcgaagctactattgctattctcttcttcgcgtacacagacaaaatcgaccgctatgcccaacaggacctgaaaaaagggttacacctctatggtacacagggtaatgtcgggctgacaaatgcttggtctattatccagactgacttccggtgttgcggggtctcaaactacacagactggtttgaggtgtacaatgccacccgggtccccgatagctgttgccttgaatttagcgagagttgtgggttacacgcgccaggtacatggtggaaagcaccatgctacgagaccgtaaaagtgtggctgcaggaaaatcttctggctgtagggatctttgggttatgtaccgcgctcgttcagatattgggactcacgtttgcgatgacaatgtactgtcaggtcgtcaaggcagacacctactgtgcctag

SEQ ID NO: 137637 - DNA, 717 bp, synthetic construct
  misc_feature 1..717: note = Description of Artificial Sequence: Synthetic coding sequence
  source 1..717: mol_type = other DNA
atggcaagggcctgcctgcaggcggtcaaatacctgatgtttgcttttaatctgctgttctggctgggtggctgcggcgttcttggcgtgggtatctggctggcagccacacagggctcttttgcgacactgtcatcctctttcccgtccctctccgccgccaatctgttgataattaccggcgctttcgttatggcaatcggcttcgtcggctgcctgggagctattaaggaaaacaagtgtctcctgctgaccttcttcctgctcctgctgttagtctttctcctcgaggccacaatcgccattctcttctttgcttacactgacaagattgacaggtacgcacaacaggacctcaagaagggccttcacctgtacgggacccagggaaacgttggactgactaacgcgtggtcgataatccagaccgattttaggtgctgcggagtatcgaattataccgattggtttgaggtgtacaacgctacaagagttcccgacagctgttgcctggaatttagtgaatcctgcggattgcatgctccaggcacttggtggaaagctccatgttatgagactgtaaaagtctggctccaggaaaatctgctggctgtgggcatctttggtctatgcacagccctcgtacagattttggggctcacatttgccatgactatgtattgtcaggttgtgaaggcagatacatattgtgcttag

SEQ ID NO: 137638 - DNA, 717 bp, synthetic construct
  misc_feature 1..717: note = Description of Artificial Sequence: Synthetic coding sequence
  source 1..717: mol_type = other DNA
atggctagggcatgcctccaggccgtcaagtaccttatgtttgcttttaatctgctcttctggttagggggctgcggcgtgcttggagtcggcatctggctcgctgccacacaaggaagcttcgcaaccctctcctcatctttccctagcctctcagctgctaatttgcttattattaccggtgcctttgtgatggccattggatttgtgggctgtctgggggccatcaaggaaaacaaatgtctcctgctcactttcttcctattattgctgctcgtatttcttcttgaggccactatcgctatcctgtttttcgcatataccgataagatcgacaggtacgcgcagcaagatctgaagaaaggcctgcatctgtacgggacacaaggcaacgtgggcctgaccaacgcctggagcattattcagacagactttaggtgctgtggggtgtctaattatactgattggttcgaggtctacaatgccaccagagtgcccgacagctgctgccttgaatttagtgaaagctgcggcctgcacgcccctgggacttggtggaaggccccctgttatgaaaccgtgaaagtatggctacaggaaaaccttctcgccgtcgggatttttggtctgtgcaccgccctggttcagatcctgggccttactttcgcgatgacgatgtactgccaagtagtgaaagccgatacctattgcgcgtag

SEQ ID NO: 137639 - DNA, 717 bp, synthetic construct
  misc_feature 1..717: note = Description of Artificial Sequence: Synthetic coding sequence
  source 1..717: mol_type = other DNA
atggcccgcgcctgcttacaggctgtcaagtacctgatgttcgcgtttaacctcctcttttggttggggggctgcggagtcctcggcgtggggatttggctcgcagccacccagggaagctttgccactcttagctcctctttcccctccctttccgcggcaaacttactcatcatcaccggagcatttgtgatggctattgggtttgtgggttgtttgggagcgattaaggaaaataaatgccttttgcttactttctttctcttactactactggtgttccttcttgaggctacgatagcaatcttgtttttcgcttacacagacaagatagatagatatgcacagcaggacctgaagaagggcctgcatttgtacggcactcagggcaatgtcggcttgacgaacgcctggagtattattcaaaccgattttcgctgctgtggggtttcaaactacactgattggttcgaggtgtacaatgccactagggtcccggacagctgctgcctcgagttttcggaaagctgcggcctccacgctcccggtacgtggtggaaggcaccatgttatgaaacggttaaggtgtggctgcaggagaacttgcttgctgtcgggattttcggactatgtactgcactggtacagattttgggcttaaccttcgccatgacaatgtactgccaagtcgtgaaggcagatacttattgtgcatag

SEQ ID NO: 137640 - DNA, 717 bp, synthetic construct
  misc_feature 1..717: note = Description of Artificial Sequence: Synthetic coding sequence
  source 1..717: mol_type = other DNA
atggcaagagcgtgcctccaagctgtcaaatacttgatgtttgcctttaacctcctgttctggttgggaggctgcggggtgctgggggtgggcatctggcttgccgccacccagggaagttttgcaactctgagcagctcatttccctccctctcagccgccaatttacttattataacaggcgcctttgtaatggcaatcggcttcgtcggatgcttaggggctataaaggaaaacaaatgcctcttgctaacctttttcttactgctgctgctggtattcctcctcgaagcaacaattgccatcctattcttcgcttatacagataagatcgacagatacgctcagcaggatctgaaaaaaggacttcacctgtatggcacacaaggtaacgtcgggttgacaaatgcctggtcaataattcagaccgatttccggtgctgtggcgtgtctaattataccgactggttcgaagtgtacaatgcgacaagagtaccggactcctgttgtctggaattctcagagtcctgtggacttcacgcaccaggaacctggtggaaagcaccctgttatgagaccgtcaaggtgtggttgcaggaaaatttgctggctgtcggaatcttcggcctgtgtacagcactggtgcagattcttggcctgacctttgccatgaccatgtactgccaagtggtaaaagccgacacttattgcgcctag

SEQ ID NO: 137641 - DNA, 717 bp, synthetic construct
  misc_feature 1..717: note = Description of Artificial Sequence: Synthetic coding sequence
  source 1..717: mol_type = other DNA
atggccagagcttgtctccaggctgtcaagtatctgatgtttgcttttaaccttctcttctggttgggagggtgcggcgtgttgggagtcggtatttggcttgcagccacacaggggtcatttgctacactgtcgagcagtttcccctcgctctcagccgcaaacctactcatcattaccggcgcgtttgtcatggccatcggattcgtcggctgcctcggggccatcaaggagaacaagtgtttgctgctgacattttttctgctccttttgcttgtattcctgctcgaagcaacaattgctattcttttttttgcctatacagataagattgaccggtacgcccagcaggaccttaaaaaaggacttcacctctatggcacacaggggaacgtcggactcactaacgcatggagcatcattcaaacagatttccgatgctgcggggttagcaattacacagactggtttgaagtttataacgctactcgcgtgcccgattcttgttgcttagaattctcagagtcctgcgggttgcacgcgccaggtacatggtggaaagccccctgctacgaaacggtaaaagtgtggctgcaggaaaatctgttggctgtgggaatctttgggctatgtacagcactagtccagatcctaggactcaccttcgcaatgaccatgtactgccaggtcgtcaaagcggatacgtattgtgcttag

SEQ ID NO: 137642 - DNA, 774 bp, synthetic construct
  misc_feature 1..774: note = Description of Artificial Sequence: Synthetic coding sequence
  source 1..774: mol_type = other DNA
atgacaccaagatccgccgggaccagtgcacacggagctgagctgaagcgctgtgggatggcccgcgcatgcttgcaggccgtcaagtatctcatgttcgctttcaacctacttttttggctgggggggtgcggggtcttgggcgttggtatttggttagcagcgactcagggatcattcgcaaccctatcttcatcttttccttccctgtcagcagccaacctcttgatcattacgggcgcttttgttatggctatcgggttcgtgggatgcctgggcgccatcaaggagaataaatgcctattgctcactttcttcctgctgttgctcctcgttttcctgttggaagccacaattgccatcctgtttttcgcatatactgacaagatcgacagatacgcccagcaggatctgaaaaagggcctgcacctgtacggtacacagggaaatgtagggctcactaatgcttggagtataatacagaccgatttcaggtgctgcggggtatccaattacaccgactggttcgaggtctacaatgccacacgcgttcctgatagctgttgtctggaatttagcgagtcctgcgggctgcacgctcccggaacgtggtggaaagctccctgctatgagacagtcaaggtatggctacaggaaaatctgttggccgtggggatttttgggctgtgcacagctttggtgcagatcctgggactaaccttcgccatgactatgtattgccaggtagttaaagctgacacatactgcgcttag

SEQ ID NO: 137643 - DNA, 717 bp, synthetic construct
  misc_feature 1..717: note = Description of Artificial Sequence: Synthetic coding sequence
  source 1..717: mol_type = other DNA
atggcacgggcgtgcctccaagccgtcaaatatctaatgttcgcctttaacttgctgttctggctgggtggctgcggggtgcttggcgtggggatttggctggcagccactcagggcagctttgcgacgctttcttctagcttcccctccctgagcgcggccaatctccttataattaccggtgccttcgtgatggctattggcttcgtggggtgtctcggtgctataaaagagaataagtgtttgctcctgaccttttttctgctgctgttgctggtgtttcttctcgaagccaccatcgctattctgtttttcgcttatactgataagatcgaccgctatgcgcagcaggacctgaagaaagggttgcacctgtacggtacccagggcaatgtcggcctcactaatgcatggtcaatcatccagacggacttcaggtgctgcggcgtttctaactataccgactggttcgaagtctataacgccactagggtacctgacagttgctgtctcgagtttagtgagagctgcggactccatgctccagggacatggtggaaggccccctgttacgaaactgtcaaggtctggctccaggagaacctactggctgtcggcatcttcggtctgtgcacagctctggtgcagatcctaggactgacttttgctatgactatgtattgtcaagtggtaaaagccgatacatattgtgcttag

SEQ ID NO: 137644 - DNA, 525 bp, synthetic construct
  misc_feature 1..525: note = Description of Artificial Sequence: Synthetic coding sequence
  source 1..525: mol_type = other DNA
atggcaattggctttgtggggtgtctgggagccatcaaagaaaataaatgcttattgctgaccttcttcttgcttctgctactggtgtttctcttggaggcaaccatcgccatcctgttttttgcctacacggataaaattgatcgatatgcacagcaggacctgaaaaaggggttgcatctatatgggacacaggggaacgtcggattgaccaacgcctggtccatcattcagacagattttagatgctgtggcgtgagtaattacacagactggtttgaggtctacaacgcaacaagagtgcccgactcttgctgccttgaattctcggagtcctgcggactgcacgccccaggtacttggtggaaggctccttgttatgagacagtcaaagtttggttgcaggagaacttgctcgctgtagggattttcggactgtgcactgcactggttcagatcctgggtcttacatttgctatgactatgtactgccaagtcgtcaaggctgacacttattgtgcttag

SEQ ID NO: 137645 - DNA, 303 bp, synthetic construct
  misc_feature 1..303: note = Description of Artificial Sequence: Synthetic coding sequence
  source 1..303: mol_type = other DNA
atggctatcggtttcgtcgggtgcctgggagccattaaggagaacaaatgtctgctgctgacctttttcctcctcctgctgttggtctttctgctggaagccacaatcgccattttgttcttcgcctacaccgataaaattgacagatatgctcaacaggacctgaaaaaggggttgcacctgtatggcacccagggcaatgtcggactaacaaatgcttggagtatcattcagaccgattttagatgctgcggtgtctctaactacacagattggttcgaagtgtacaatgccaccagatag

SEQ ID NO: 137646 - DNA, 480 bp, synthetic construct
  misc_feature 1..480: note = Description of Artificial Sequence: Synthetic coding sequence
  source 1..480: mol_type = other DNA
atggctcgggcgtgtttacaagcggtcaagtacctgatgtttgcctttaatcttctattttggctcggtgggtgtggtgtcttgggggtgggcatctggcttgctgcaacgcagggaagtttcgctactttgagcagctcttttccatcactcagcgctgctaacctgttgattatcaccggcgcgttcgttatggcgatcggcttcgtgggttgtttgggggcgatcaaggaaaacaagtgtctcctactaacgttctttctgctgctcctattagtgttccttctggaagctaccattgctatcttgttcttcgcctacactgacaaaattgaccgttacgctcagcaagaccttaaaaagggacttcacctgtacgggacgcagggcaatgtcggactgaccaacgcttggtcaattatacagacggatttcaggtgctgcggcgtctcaaattatactgattggtttgaggtatag

SEQ ID NO: 137647 - DNA, 258 bp, synthetic construct
  misc_feature 1..258: note = Description of Artificial Sequence: Synthetic coding sequence
  source 1..258: mol_type = other DNA
atggctcgggcttgcttacaagctgtgaaatatctcatgttcgcttttaacctcttgttttggcttggggggtgtggtgtgttgggtgtaggtatctggttggccgcaacccaaggcagtttcgctacactgtcttctagcttccctagtctgagcgcggctaaccttctgatcatcaccggagcctttgtcatggccatcgggtttgtaggctgcctgggcgcaataaaggagaacaagtgtctcttacttacctag

SEQ ID NO: 137648 - DNA, 807 bp, synthetic construct
  misc_feature 1..807: note = Description of Artificial Sequence: Synthetic coding sequence
  source 1..807: mol_type = other DNA
atgtcagggaagcactataaaggacctgaagtgagttgctgtataaagtattttatcttcgggtttaacgtcattttctggttcctaggcatcacatttctgggcattggactgtgggcgtggaacgaaaaaggtgtcctgtctaatatctcgtccatcaccgacttagggggatttgacccagtgtggctgttcctggtggtcggaggagttatgttcatattgggatttgccgggtgcatcggagctctcagagagaacacattcctgttgaaattcttttctgtgttcttgggcattatcttctttctggagctcacagctggtgtcctggccttcgtgtttaaggattggatcaaggaccagctgtatttctttatcaataacaatattcgcgcctaccgagatgatatcgatttgcagaacttgattgatttcacgcaagagtactggcaatgttgcggcgccttcggagcagacgactggaacctgaacatttatttcaattgcacagattccaacgcctccagagaacggtgtggggtcccattcagctgctgcacaaaggaccctgcggaggacgtcattaacacacagtgcgggtacgatgcaagacagaagcccgaagtcgatcagcaaatcgtcatctatactaagggatgcgtgcctcagttcgagaaatggctccaggacaatttaacgatcgttgccggaatcttcatcggcatcgctctcctgcagattttcgggatatgccttgcacagaatctcgtcagtgacatcgaggctgtgagagccagttggtag

SEQ ID NO: 137649 - DNA, 594 bp, synthetic construct
  misc_feature 1..594: note = Description of Artificial Sequence: Synthetic coding sequence
  source 1..594: mol_type = other DNA
atgttcatcttgggattcgcgggatgtataggcgctctaagagagaacacatttctgcttaagttcttctctgtatttctcggtattattttcttcctggagctgactgccggcgtcctggcattcgtgtttaaagattggatcaaagatcagctgtatttcttcatcaacaacaatatacgcgcataccgagatgacatcgacctgcagaaccttatagacttcacacaggagtactggcagtgctgtggcgctttcggggctgacgattggaatctgaatatttatttcaactgcaccgattctaacgcctccagggagcgctgcggtgtcccattctcatgttgcacaaaagatccagctgaggacgtgattaacacacagtgtggctacgacgcacgccagaagcccgaggtcgatcagcagatcgtaatatataccaaaggctgcgtgccacagtttgaaaagtggcttcaggacaacctgactatcgtcgccggcatctttatcggcatcgccttgttacagatcttcggcatctgtctcgcccaaaatctggttagcgatattgaggcagtgcgcgcgtcttggtag

SEQ ID NO: 137650 - DNA, 801 bp, synthetic construct
  misc_feature 1..801: note = Description of Artificial Sequence: Synthetic coding sequence
  source 1..801: mol_type = other DNA
atggcctctcgtagaatggagacaaagcccgtcattacatgcctcaaaaccctactgattatctactcatttgttttttggaaagaaaaagctgccggattttgcggtagacaggatgtggccatggccctgatcaccggagtcatcctgcttgcagtaggggtatggggcaaactgacactgggaacttacattagtctgattgctgaaaattcgacaaatgccccctacgtgttgatcggaaccggcacaaccatcgtagtgtttgggttgttcgggtgcttcgccacctgtagaggaagcccctggatgctgaaactttatgcaatgtttctctcattggtatttctggcagagttagtggccggcatcagcggattcgtttttaggcacgaaattaaagacacattcctcagaacatacaccgatgcgatgcagacctataacgggaatgatgaacgatctcgggccgtggatcacgtccaacgctccttaagctgctgcggtgtccaaaattacacaaattggagcacgtctccatattttctggagcacggcatccctcccagttgctgtatgaacgagacagattgcaacccccaagatctgcacaacttgaccgtggctgcaacaaaggtcaaccagaaagggtgttacgatctggtgaccagctttatggaaacaaatatggggatcatcgctggagtcgcattcggtatagcattctcccagttgatcgggatgcttcttgcatgttgcctgagcaggttcattacagctaaccagtacgaaatggtgtag

SEQ ID NO: 137651 - DNA, 750 bp, synthetic construct
  misc_feature 1..750: note = Description of Artificial Sequence: Synthetic coding sequence
  source 1..750: mol_type = other DNA
atggctagtcgaaggatggagaccaagccagttatcacttgcttaaagaccctactgatcatctactcctttgtgttttggattacgggggtcattttgttggccgtcggagtgtggggaaaactgacattaggaacatacatctcacttattgccgaaaactctaccaatgccccatacgttcttataggaactgggaccaccatagtggtgtttggcctgtttgggtgcttcgcaacttgccgaggcagtccctggatgctgaagttgtacgcaatgttcttatcactagtgttcctggccgagctggttgcgggtataagtggttttgtgtttagacacgaaatcaaggacacgttcctgagaacttacacggatgccatgcagacttacaatggcaatgatgaacgtagcagagccgtcgatcatgtccagaggagcctttcttgctgtggggtccaaaattatacgaattggtccacttccccatactttcttgagcacggtatcccaccgtcctgctgtatgaacgaaaccgactgcaatccccaggatctccataaccttaccgtggcagccactaaagtcaaccagaagggctgctacgatctcgtgacttcttttatggaaacaaacatgggtattatcgccggagtggcttttggcatagcattcagtcagctgatcggaatgctgctggcgtgttgcctcagtagattcatcaccgctaatcagtacgagatggtctag

SEQ ID NO: 137652 - DNA, 828 bp, synthetic construct
  misc_feature 1..828: note = Description of Artificial Sequence: Synthetic coding sequence
  source 1..828: mol_type = other DNA
atggccaacagaaccgtgtgcaatggccagggccggagtcgggatctgcttcggatcaaaaacatcccaaatgctcccggtcattttctcatagctggagttgggggcagttcatctcagggccgtagcattgaggaggagggcaaaactcacctgggtatcactggcgtcatcttgctggccgtgggcgtttggggcaagctgacgctggggacatacatttcactgatcgcagagaattctactaatgccccctacgtccttataggaactggcactacaattgttgtgtttggactatttggttgttttgccacatgccggggctccccatggatgcttaagttgtatgccatgtttctgtctttggtgttcctggctgagctggttgcaggtatttcggggttcgtctttcggcacgagataaaggacacttttcttaggacttatactgatgccatgcagacctataacgggaatgatgagaggtcacgtgccgttgaccatgtgcaacgctctctgtcctgctgtggagtgcagaattacaccaattggtcaacctccccatatttcctggaacatgggataccgccttcctgctgcatgaacgagacagactgcaacccccaggacttgcataatctgactgttgccgcaaccaaggtcaaccaaaagggctgctacgacttggttacaagcttcatggaaacaaacatgggcatcattgctggagtcgcgtttgggattgcatttagtcaactaatcggaatgctccttgcatgttgcttgtcccgatttataacagccaaccaatacgagatggtatag

SEQ ID NO: 137653 - DNA, 672 bp, synthetic construct
  misc_feature 1..672: note = Description of Artificial Sequence: Synthetic coding sequence
  source 1..672: mol_type = other DNA
atgatcactggggtgattctcctggccgtcggggtgtgggggaaactgactctggggacctatatctcacttatcgccgagaacagcaccaacgcaccttacgtacttataggcacaggcacaacgattgttgtgtttggcttgttcggttgcttcgccacatgcaggggaagcccctggatgctgaagttgtacgccatgtttttgtccctggttttcctggctgagcttgtcgcaggaatctctgggttcgtattccggcatgaaatcaaagacacttttcttcggacttacactgacgctatgcagacctataatggcaacgatgagagaagtcgcgcagttgaccacgttcagagatccctaagttgctgcggcgtacagaactacacaaattggtccacctccccttacttcctagagcacggcatccccccaagctgctgtatgaacgaaacagactgtaaccctcaggatctccataaccttacagtggccgccactaaggttaatcagaaagggtgctatgacctggttacgagcttcatggagaccaatatgggcatcatcgccggagttgcctttggcattgctttcagccagctgatcggcatgcttctggcttgctgcctgagtcgattcattactgcaaatcaatatgagatggtgtag

SEQ ID NO: 137654 - DNA, 714 bp, synthetic construct
  misc_feature 1..714: note = Description of Artificial Sequence: Synthetic coding sequence
  source 1..714: mol_type = other DNA
atggccggagtctccgcgtgcatcaagtattcaatgttcacatttaactttctgttctggctttgtggtatcctcatattggctctggccatttgggtcagagtttctaatgacagccaagcaatcttcggcagcgaagatgttggcagcagcagctacgtcgccgttgacattttgattgcggtgggcgcaattataatgatcctcgggtttctgggttgttgcggtgccattaaggaatctagatgtatgctcctgcttttctttattgggctgctgctgatactgcttctgcaggtggccacagggatcttgggcgcagtctttaagagtaaaagtgaccgcatcgtaaacgagacgctgtatgaaaatacgaagcttctctctgcaaccggggagtccgagaagcagttccaggaggctatcattgtatttcaggaggaattcaaatgctgcggcctcgtgaatggggcggctgattgggggaataacttccagcactatccagagttatgtgcgtgtctggacaagcaaaggccttgtcaaagttacaatggaaagcaagtttacaaggaaacctgtatcagtttcattaaagatttcttagctaaaaacttaataatcgtcatcggaatttcattcggtctagccgtgatcgagatcttggggctggtgttttcaatggtactttactgccaaatcggaaacaagtag

SEQ ID NO: 137655 - DNA, 714 bp, synthetic construct
  misc_feature 1..714: note = Description of Artificial Sequence: Synthetic coding sequence
  source 1..714: mol_type = other DNA
atggcgggagtcagcgcttgcataaaatactctatgtttacttttaactttcttttttggctttgtgggatcctcatcttggcactagctatctgggtacgtgtgagcaacgatagccaggctatcttcgggtcagaggacgttggcagtagctcatacgtcgcagtagatatactcattgctgttggggctattatcatgatcctgggctttctgggatgttgcggtgcgattaaggaatccaggtgcatgctgctcttattttttatcggcctcttactaatccttctcttgcaggtcgcgactggaattctaggcgcggtgttcaaatcaaagtcagaccgcatcgtcaatgagaccctctacgagaatacaaaactgctatctgcgacgggcgagagcgaaaaacagttccaggaggcgatcattgtttttcaagaggaattcaagtgttgtggactcgtaaacggggcggcagactggggaaacaacttccagcactatcctgagctgtgtgcatgcctcgacaagcaacggccttgccaatcatacaatggcaaacaggtgtacaaagagacctgcatttcctttatcaaggattttctcgccaagaatcttataatcgttatcgggattagctttggcctagccgttatcgagattctcggactagttttctccatggtgttgtactgtcagatcggcaataagtag

SEQ ID NO: 137656 - DNA, 714 bp, synthetic construct
  misc_feature 1..714: note = Description of Artificial Sequence: Synthetic coding sequence
  source 1..714: mol_type = other DNA
atggccggcgtgagtgcatgtatcaaatatagcatgttcacgttcaattttctgttctggctctgtgggatcctcatactggcccttgcaatttgggtccgagtatctaacgatagtcaagctatatttggaagtgaggatgtgggtagctcttcttatgtggcagtcgatattttaatagccgtcggggccatcattatgattctcggtttcttgggctgctgtggagcgattaaggagtccagatgcatgctgttgttgttttttattggcctgcttctgattcttttgctgcaagtcgccaccgggatcctgggcgccgtattcaaaagcaaaagtgaccggattgtcaatgagacgctgtacgagaacactaagctcctgagtgccacgggagagagtgaaaagcagtttcaggaggctattatagtctttcaggaggagtttaagtgttgtggtctggtaaacggcgccgcggattggggaaacaacttccagcactacccggaactatgcgcgtgtctggataaacaaagaccctgtcagtcctacaacggcaaacaagtctataaggagacatgcatctcttttattaaggatttcctggctaagaacctgatcatcgtcatcggaatttcattcgggctggcggttatagagatcctagggcttgtgttctcaatggtgctctactgtcaaattggcaacaaatag

SEQ ID NO: 137657 - DNA, 720 bp, synthetic construct
  misc_feature 1..720: note = Description of Artificial Sequence: Synthetic coding sequence
  source 1..720: mol_type = other DNA
atggcacggggttgtctttgttgtctaaagtacatgatgttcctgttcaacctaatcttctggctttgcggttgtgggcttctaggggttgggatttggctgtccgtgtctcaggggaactttgccaccttttccccctcatttccctccctgtccgctgccaacctggtcatagctatcggaactatcgtcatggtgactgggttcttgggctgcttaggcgccattaaagagaataaatgtctgctcctcagcttctttattgtgctgctggtcatcctgctggccgagctgatacttctgatcctgttttttgtttacatggataaagtcaatgagaacgccaaaaaggatctgaaggaagggttattgctctatcatactgaaaacaatgtcgggctaaagaacgcatggaacattattcaggcagagatgagatgttgtggcgtcaccgactacaccgactggtaccccgtgcttggcgagaacactgtgcctgatagatgttgtatggagaacagtcaaggctgcggccgcaacgccacaaccccactgtggcgcactggctgctacgaaaaagtgaagatgtggttcgatgacaacaagcacgtgcttggaacggtcggtatgtgcatcttgatcatgcagatattgggcatggcatttagtatgactctgtttcagcacatccaccggaccggcaagaagtacgatgcgtag

SEQ ID NO: 137658 - DNA, 720 bp, synthetic construct
  misc_feature 1..720: note = Description of Artificial Sequence: Synthetic coding sequence
  source 1..720: mol_type = other DNA
atggctcgcggctgtttgtgctgtctcaagtacatgatgttcttgttcaacctaattttctggctgtgtggctgtggactcctcggggtcgggatctggctctcggtttctcaagggaactttgcaacgttttctccatcttttcctagcttgtctgccgctaacttggtgattgctatcgggaccatcgtgatggttacagggtttctgggctgtctgggggctattaaagaaaataaatgtctgctgttatccttctttatagtactgcttgtcatcctgctggccgaactcattctccttatcctgttctttgtctacatggataaggttaatgagaatgccaagaaagacctcaaggaaggtcttcttctgtatcacactgagaacaatgtgggcttaaaaaatgcctggaatatcatccaggctgagatgcggtgctgcggagtcaccgactacacggactggtaccccgtgctgggtgagaacactgtgccagacagatgttgtatggagaacagccagggctgcggcagaaacgcgacaacccctctttggcgcacgggctgctacgaaaaagtcaaaatgtggtttgacgataacaaacacgtgttaggaactgtagggatgtgcattctgatcatgcagatcttgggtatggctttcagtatgacactcttccagcacattcaccgcaccgggaaaaaatacgacgcctag

SEQ ID NO: 137659 - DNA, 1044 bp, synthetic construct
  misc_feature 1..1044: note = Description of Artificial Sequence: Synthetic coding sequence
  source 1..1044: mol_type = other DNA
atggccctgatgctgagcctagtgttatcgttgttaaaactgggcagcgggcaatggcaggtcttcggacccgacaaacccgtgcaggcactggtgggtgaggatgctgccttttcatgctttcttagcccaaagaccaacgccgaggcgatggaggtccggttcttccggggtcagttcagtagcgtggtgcacttataccgggacgggaaggaccagccgtttatgcagatgccccagtatcagggcagaactaaactggtgaaagactcgatcgccgaaggtaggatcagtctcagactggagaacatcactgtcctcgatgcggggctatacgggtgccgtatatctagccagtcatattatcagaaggctatttgggagttgcaagtatccgctctcggttctgtgcctttgatttcgattactggatacgtggatagagatattcaattgttgtgtcagagttcgggttggttcccacgacccaccgctaaatggaaagggccacaggggcaggacttatctacagacagcagaacaaacagggatatgcatggcctctttgatgtcgaaatttctttgacggtacaggagaacgccggcagtattagctgttctatgcggcatgcccacctgtcaagagaagtggagtctagggtacagatcggtgataccttcttcgaaccgatcagctggcatctggctacaaaggtcctgggaatcctgtgctgcggcctgttcttcggtatcgttggtctgaaaatattcttctccaagttccaatgcaagcgggagcgcgaggcttgggcgggcgccctcttcatggtgccggcgggaacagggagtgagatgcttccacaccctgccgcatctctgcttctggtgctggcctctcgaggacccggtccaaaaaaagagaatccaggcggcacaggtcttgagaaaaaagcccgaaccggccgcattgaacggaggccagagactagatcagggggggatagcggaagccgggacggaagccctgaggccctgaggttttag

SEQ ID NO: 137660 - DNA, 879 bp, synthetic construct
  misc_feature 1..879: note = Description of Artificial Sequence: Synthetic coding sequence
  source 1..879: mol_type = other DNA
atgggcgaaaagtcagagaattgtggagttcccgaggatctcctgaatggtctgaaggtaacagacacccaagaggctgagtgcgcagggccccctgtgcctgacccaaagaatcaacattctcagtcaaaactgctgagggatgatgaagcacacctacaggaagaccagggcgaagaggaatgttttcatgattgttctgccagctttgaggaggaacctggggccgacaaagtcgagaacaaaagcaatgaggacgtcaacagcagcgagctcgatgaggagtatttgatcgagctcgaaaaaaatatgtctgacgaggaaaagcaaaagaggcgtgaagagtccacacgactgaaagaggagggtaacgaacagttcaaaaaaggggattatattgaggcagagtctagctactcacgcgccctcgagatgtgcccttcatgtttccagaaggagcggtctattctgtttagcaatagggccgcggctaggatgaaacaggacaaaaaagaaatggcgatcaacgattgttctaaggctatccagcttaacccttcatatattcgcgccattctcagaagagctgagttgtacgagaaaaccgataaactggacgaggctctggaggattataagtccattttagagaaagatcccagcatccaccaggctcgggaagcttgcatgaggttgccaaagcaaatagaggagcgcaatgagagactgaaggaggaaatgttgggcaagttgaaagatctgggaaacctggtgctgcggccattcggactcagcactgagaatttccagataaagcaggattcctccaccggtagttacagcattaatttcgtacagaatcccaataataacaggtag

SEQ ID NO: 137661 - DNA, 2199 bp, synthetic construct
  misc_feature 1..2199: note = Description of Artificial Sequence: Synthetic coding sequence
  source 1..2199: mol_type = other DNA
atggacgccgacaaagagaaggatctgcagaagtttctcaagaacgtcgacgaaatatccaacctgattcaggaaatgaattccgacgacccagtcgtgcaacagaaggcagtgttggagactgaaaagcggctgctgctgatggaagaggatcaagaggaagacgaatgccggactaccctcaacaagacaatgatctcacctcctcagaccgccatgaaatctgcagaggagataaactctgaagccttcctggcgagcgtggagaaagacgcaaaggaaagggccaagaggagacgagagaacaaggtgctggctgacgccctgaaagaaaaggggaacgaagcatttgctgagggtaattatgagacagccatactgcgttattcagaggggctggaaaagctgaaggacatgaaagtactgtataccaaccgtgcccaagcatatatgaagttagaagattacgaaaaagcgctagtggattgcgaatgggccctcaagtgcgacgagaagtgcacaaaggcttatttccatatgggaaaagcaaacctggccctgaagaattattccgtgtcgcgcgaatgctacaaaaaaatcctagagatcaaccccaagctgcagactcaagtcaagggatacctcaaccaagtggatctgcaggagaaggccgacctgcaggagaaggaggcccatgaactcctggatagtgggaaaaacaccgccgtgactacaaaaaatttgctggagaccctgagcaagccggaccagatacctctgttttatgccggagggatcgagatcctgaccgagatgattaacgagtgtacagaacagacactgtttcgtatgcataacggatttagtattataagtgacaatgaagtgattcgccgatgctttagcaccgccggcaatgacgcagtcgaggaaatggtctgcgtgagcgttctgaagctctggcaagcagtctgtagcagaaacgaagaaaatcagagagtcctggtcatccaccacgacagggcaaggctgctcgccgccctgctctcatctaaggtgcttgcgatacggcagcagagcttcgcactcctcttgcatctcgcacagaccgagtcgggtaggtccctgatcattaaccatctcgatctgacccggttattagaggcactagtgtccttcctcgacttctcagacaaagaagctaacactgctatgggcctgttcaccgacttagcactcgaagagcgattccaggtgtggtttcaagcaaatctgcccggggtgttgcctgcgctcacaggagtgctgaagacagacccaaaagtatctagctcatccgctctgtgccagtgcatcgccataatgggcaaccttagcgccgaacccacaacccgacgccatatggccgcgtgcgaggagtttggcgacgggtgcctgtccctgctggcacgttgcgaggaagacgtggacctgttccgcgaggttatctatactctcctgggactgatgatgaacttgtgtctgcaggctccatttgtaagcgaagtgtgggcggttgaagtgtcacggaggtgcctgtccttgttaaactcgcaggatggtggcatcctgacaagagccgctggtgtgctgagccgcacactgtcctcgtcactgaagattgttgaggaagccctccgggccggagttgtcaaaaaaatgatgaaatttttgaaaaccggcggcgagacagcctcccgatacgccattaagattctcgcaatctgtaccaattcttaccacgaagccagagaggaggtcatcagacttgacaaaaaactttccgtgatgatgaagctgctgtccagcgaggatgaggttctcgtggggaatgcagcgttgtgtctaggaaattgcatggaggtccccaacgtggcaagttccctcctgaaaaccgatttactccaggttttgctgaagctcgccggctcggacactcagaaaactgctgttcaggtgaatgcgggcatcgccctgggcaagctatgcaccgctgagccacgagtgccagccgagagctcgcacctgcagtttggtcgcgaatctgccgcacctgaagccctgagcccccgcaggtgggaggagatgtttcatatgctggtattttccctcagcagcgttgacccaccgcccccccctccgcaaacgtgttatccctag

SEQ ID NO: 137662 - DNA, 324 bp, synthetic construct
  misc_feature 1..324: note = Description of Artificial Sequence: Synthetic coding sequence
  source 1..324: mol_type = other DNA
atggacgccgacaaggagaaggatctgcagaagtttttgaaaaacgtggacgaaatctctaatcttatccaggagatgaactctgatgaccctgtcgtccagcagaaggcagtgttggagaccgaaaaacggctactgctgatggaagaggaccaggaggaagacgagtgcaggaccaccctcaataaaactatgatctccccaccacagactgcaatgaagtcagcggaggagattaattctgaagcgttcttagccagcgtagagaaagacgctaaggaacgcgctaaaagacgaagagagaacaaggtcttggctgattag

SEQ ID NO: 137663 - DNA, 609 bp, synthetic construct
  misc_feature 1..609: note = Description of Artificial Sequence: Synthetic coding sequence
  source 1..609: mol_type = other DNA
atggacgccgacaaggaaaaagatctgcagaagttcctcaagaatgtggatgagatctcaaatcttattcaagagatgaactctgacgaccctgtcgtgcaacagaaagccgtccttgaaacagagaaaagactcctgcttatggaggaggatcaggaagaagacgaatgtagaaccactttaaacaaaacaatgatttcacccccacagacagctatgaagagcgctgaggagattaatagcgaagcttttctggcctcagttgaaaaagacgcaaaggagcgagccaaaaggaggcgcgagaataaggttctcgctgatgctctgaaggagaagggcaatgaagccttcgcggaaggcaattacgagactgctattttaagatactcggagggactggagaaacttaaggacatgaaggttctctacaccaaccgggcccaggcatatatgaagctcgaggactacgaaaaggcacttgtggactgtgaatgggcactgaagtgcgatgagaagtgcactaaagcttattttcacatggggaaggctaaccttgcactgaagaactattccgtatcaagggaatgttacaaaaaaatcctggagtag

SEQ ID NO: 137664 - DNA, 504 bp, synthetic construct
  misc_feature 1..504: note = Description of Artificial Sequence: Synthetic coding sequence
  source 1..504: mol_type = other DNA
atggatgccgacaaggagaaggacctccagaagtttctgaagaacgtcgacgaaattagtaatctgattcaggagatgaacagcgatgaccctgttgtccagcaaaaggctgtcttggagactgaaaaaagactcttgttgatggaggaagatcaggaggaagatgaatgtcggactactctcaataagacaatgattagtcccccacaaaccgctatgaagtcggccgaagagatcaatagtgaagcttttctggctagtgtggaaaaagacgctaaagaacgcgcgaaacgtcggagagaaaacaaggtgctggcagacgctcttaaggagaagggcaacgaggcgttcgccgagggcaattatgaaaccgccattcttagatactccgaggggctggagaaactcaaagacatgaaggtgctatacacgaatcgcgcccaggcttacatgaagctcgaggactacgaaaaagccctcgtggattgcgagtgggcactatag

SEQ ID NO: 137665 - DNA, 2118 bp, synthetic construct
  misc_feature 1..2118: note = Description of Artificial Sequence: Synthetic coding sequence
  source 1..2118: mol_type = other DNA
atggatgccgacaaagagaaggatctgcagaagtttctaaaaaacgttgatgagatctccaacttgatccaggagatgaacagtgatgatcccgttgtccaacagaaggctgtgctagaaacagagaagcgattactattaatggaggaggaccaggaagaggatgagtgcaggacgactctaaataaaaccatgatcagtccgcctcagaccgcaatgaagagtgcagaagagattaactcagaggccttcctggcctccgtggaaaaggatgctaaggaacgagccaaacgccgcagagaaaataaggttttagcggatgcgctcaaagaaaagggaaacgaggccttcgctgaaggaaattacgaaactgccatcctcaggtatagcgaggggcttgaaaagttgaaggatatgaaagtgctttacactaaccgcgcccaggcttatatgaagctggaagactacgaaaaggccctagtggattgtgaatgggcccttaagtgtgacgaaaagtgcactaaggcctacttccacatgggaaaagctaacctggctcttaagaactactctgtctctcgagaatgctataagaaaatcttggagatcaaccccaaattgcagacgcaggttaaaggctatctcaatcaagttgacttgcaggagaaagctgacttgcaggagaaggaggcccacgagctgttagacagcggaaaaaacacagcagttacaactaagaacctgcttgaaacactgtctaaaccggatcagatcccactcttctacgccggcggtatcgaaattttgaccgagatgatcaatgaatgcacagagcaaaccctttttcggatgcacaacggcttttccatcatatctgacaacgaagtgattcggcggtgcttctctacggctggaaatgatgccgtagaagaaatggtgtgtgtgtcggtacttaagctctggcaggccgtctgttccagaaacgaagagaatcagcgggtgttggtgatccatcatgaccgagctaggctgctagcagccctcctgagctcaaaggtcctggccatccggcagcagagcttcgccctgctgctgcatctagctcagacggagagcgggcgctctctgatcataaatcatcttgacctgacgaggctgttggaagctctggtgtcatttctggacttctctgataaggaagctaacactgcaatgggccttttcacagatctggctctcgaggagcgcttccaggtttggtttcaggcgaatcttccaggagtacttccggctttgactggagtgttgaagaccgaccctaaggtttctagcagctccgctctatgtcagtgtatcgccatcatgggcaatttgtccgccgagcctactacgcgtcgacacatggccgcctgtgaggagtttggagatggctgcctcagcctcctggccaggtgtgaagaggatgtagacctcttccgcgaagtgatatacaccttactcggactgatgatgaacctgtgcctgcaagcgcctttcgtttcagaggtgtgggccgtggaggtcagtagaagatgcctgtcccttctgaacagtcaggatgggggtattctgacccgagcagccggggtactcagccgcacattaagctcaagcttaaaaatcgtggaagaagccctcagagctggcgtggtgaaaaaaatgatgaagttccttaaaacaggaggggaaaccgcttctcgttatgcaataaaaatcctggctatttgcacaaacagctaccacgaagctcgcgaagaggtgattaggctcgataagaaactaagcgttatgatgaagctcctgtcctctgaggatgaagtgcttgtcggcaacgcagcattgtgcctagggaactgcatggaggtcccaaacgtggccagcagcctcctaaaaacagacctgttgcaggttctcctaaagctggcaggttctgatacccaaaaaaccgccgttcaggtgaatgctggcatcgccctgggaaaactgtgcacagccgagcctaggtttgccgcccagctgcgcaagctccatggcctggaaattctgaatagcacaatgaagtacatctctgatagctag

SEQ ID NO: 137666 - DNA, 1143 bp, synthetic construct
  misc_feature 1..1143: note = Description of Artificial Sequence: Synthetic coding sequence
  source 1..1143: mol_type = other DNA
atgttcaggttgcttagctggtctcttggccggggcttcctcagagccgccggccggcgatgcagaggatgttcggctagattgctgcctggactggcgggcgggcccggcccagaggtccaagttccaccttcccgggtggcacctcacggcagaggcccaggactgcttcccctcctcgcagctttggcctggttctcccggccggcagcggccgaagaggaagaacagcagggcgccgacggggcagcagcagaggacggcgcagacgaagcggaggccgaaattatacagctgctaaagagggctaagctatccatcatgaaagatgagccagaggaggctgagctgatattgcacgatgcactgcgacttgcctaccagacagacaataagaaggcaatcacctacacatatgatctcatggccaatttggcctttatccgaggtcagttggaaaacgccgagcaactcttcaaggctaccatgtcttatctgctgggcggtggcatgaagcaggaggataacgcgataattgaaataagtctaaagttagccagtatttacgccgcccagaatcggcaggagttcgccgttgctggttacgagttctgtatcagcacactcgaggagaagatcgagagggagaaagagctggcggaggacatcatgtccgtcgaagaaaaggccaatacccacctgctgctaggaatgtgcttggacgcctgtgcccgatatttactttttagtaagcagccctcacaagcacaacggatgtacgagaaggccctccaaatatcagaggaaatacaaggcgagaggcatccccagacaatcgtgctcatgagcgacctggcaaccacactggacgcgcaaggacgatttgacgaggcatatatatatatgcagagagccagtgacctggcccgccagatcaatcacccagaactccacatggtcctttcaaacctggctgccgtgttgatgcatagagaacgatacactcaggccaaggaaatttaccaggaggcgctgaaacaggcgaaactcaaaaaagatgaaatcagcgttcagcacataagggaggagctggccgagctatccaagaaatctcggcctcttaccaactccgtgaaactgtag

SEQ ID NO: 137667 - DNA, 1143 bp, synthetic construct
  misc_feature 1..1143: note = Description of Artificial Sequence: Synthetic coding sequence
  source 1..1143: mol_type = other DNA
atgttcagactcctgagctggtcccttggacgcggattcctgagagccgccggacggcggtgccgcggttgctcagccaggcttctccctggacttgctggcggaccaggacctgaggtgcaggtgccaccctctcgggtcgccccacacggccgaggaccaggcctgctgcctctgctagctgctctggcttggttctcacgtcctgccgcggcagaagaagaagagcagcagggcgctgacggcgctgctgccgaggacggggccgacgaagctgaggcagagattatccagctgttgaaaagagccaagcttagcatcatgaaggatgaacccgaagaagcggagctgatcctgcatgatgctctgaggctggcctatcagacagataataaaaaggccattacttacacatatgacctgatggccaacctggcctttataaggggacagttagagaatgctgagcagctctttaaggctaccatgtcatacctgctcggcggcgggatgaaacaggaggacaatgcgataatagagatcagccttaagctggcatccatctacgctgcgcagaacagacaagagtttgctgtcgccgggtacgagttctgcatctcaaccctcgaggagaaaattgagagagaaaaagagctggccgaagacattatgtcagtggaggagaaagccaatacgcatctccttctggggatgtgcctggacgcttgcgctcgctatctcctgtttagcaaacagccctcacaggcacagcggatgtacgaaaaagctttacaaataagtgaagaaatccaaggcgagcgccatccccaaacaatcgtattgatgagcgacctagccaccacccttgacgcgcagggacggttcgatgaggcttacatttacatgcaaagagcttccgatctggcccgacagattaatcatccagagctacatatggtcctatcaaacctggcggcggtgttaatgcaccgcgagagatacacccaagctaaggaaatatatcaggaagccctgaaacaggctaagcttaagaaagatgagatctctgtacagcacatccgagaggagctggctgaactctcaaaaaagagtcgccctttgacgaattcagtgaaactctag

SEQ ID NO: 137668 - DNA, 1506 bp, synthetic construct
  misc_feature 1..1506: note = Description of Artificial Sequence: Synthetic coding sequence
  source 1..1506: mol_type = other DNA
atggctcagccccatacgacctctgtgccatattttgcaaggtcaccagcacccccgcccccaagccggagcggcgccccccctcaaccccccgcaacactgcgcccgagcaggcgacgaactagacctcctagacccgctgacagacgtgacgctcctgctgattgtgcatacctctggcgcatactgacacctcggagggggagagctcgccgaagtgacgtgggagccaggcacagggcatgtggcagacgagacgtgctgctgtccaggcaggggcctgcgaaccccgaaggcgcccggcgcgtagtgggagggcaggagagagtgtggccagctgtgcgaagggggcgcggcggatcaatgttccggctgctgagctggtctctgggccgcggattcctgagggccgccggaagacggtgcaggggatgcagcgcccgtttattaccagggttggcaggcggaccagggcctgaggtgcaggtgcctcctagccgagtcgcccctcacggacgaggtccaggactgctgcccttactagccgcgcttgcttggttttcaaggcccgctgcagcagaagaagaggagcagcaaggggccgatggtgcagcagccgaagacggtgcagacgaggcagaggccgaaatcattcagctgctcaagagagccaaactaagtattatgaaggacgaaccagaagaggcggagttgattttacacgatgccctcagactcgcgtatcagaccgacaacaaaaaagctattacctacacctatgatttgatggccaacctcgcttttatcagaggacaattagaaaacgctgagcagttgttcaaagccactatgtcctacttactcggcggcgggatgaagcaggaggacaacgccataattgagatttccctgaagctggctagcatctatgcagctcagaaccgccaggaattcgccgtggccggttacgagttctgtatctccaccctcgaagaaaaaatagaacgcgagaaagagctcgccgaggatattatgagcgtggaagagaaggcaaatacgcatctacttttgggtatgtgtttagatgcctgcgcgaggtacctgttattttccaagcaaccatcccaagcccagcgtatgtacgaaaaggcgcttcagatctcggaggaaatacaaggcgagaggcatcctcaaactatcgtgctgatgtccgacctcgcaaccaccctggacgcccaagggagattcgacgaggcctatatttacatgcaacgtgctagcgatctcgcccggcagattaaccacccagagctgcatatggttctgtctaacctggctgctgtcctaatgcaccgggagaggtacacgcaagccaaagagatatatcaagaggctctgaagcaagcaaagctgaaaaaggatgaaatcagcgttcaacatatcagagaagagctagctgagttgtcgaaaaaatcccggccgttgacaaacagcgtgaaactgtag

SEQ ID NO: 137669 - DNA, 501 bp, synthetic construct
  misc_feature 1..501: note = Description of Artificial Sequence: Synthetic coding sequence
  source 1..501: mol_type = other DNA
tgacaggagcgggtgtggcctgccgtgcggcgcggtagaggcgggtccatgtttcgtttactctcatggtctctcgggagaggcttcttaagggccgccgggcgaagatgtcggggctgttctgccagattactgcctggtcttgccggggggccggggcctgaagtccaagtccctccgtcacgggtcgctccgcatggtaggggccccgggctgttgcctctgttagcagccctcgcctggttcagtaggcctgctgctgctgaagaggaggagcagcagggggccgacggcgccgctgctgaggacggagctgatgaagcagaggccgagatcattcagctgcttaagcgtgccaaggtgcggcgtctgagagcactgcggcccgctgagcggggaagtctgtgcgaacgagggctgggagtggccgcgcattacagcctgaggttagcagaggagtggatggaggcaccgagagtgaaactgccccgcatgtcctag

SEQ ID NO: 137670 - DNA, 3951 bp, synthetic construct
  misc_feature 1..3951: note = Description of Artificial Sequence: Synthetic coding sequence
  source 1..3951: mol_type = other DNA
atggactctcaggaattgaaaacactaattaattattactgccaggagcggtactttcaccacgtgctactggtcgctagtgaaggtattaagcggtatgggagcgatcccgtttttcgtttttaccatgcatatggaacactgatggaagggaaaactcaggaagctctacgggaattcgaagcaatcaagaacaagcaggacgtttccctttgtagtctgttggctctgatttacgcccacaagatgtcgcccaaccccgaccgagaagctatactcgagagcgatgcccgggtgaaggagcagcggaaaggggcaggagagaaggcattgtatcatgcaggtctgttcttgtggcacatcggtagacatgataaagcaagagagtatatcgacaggatgatcaagatttcagacgggtcaaaacaggggcatgtgttaaaggcatggcttgacatcacccgaggcaaagagccctatacaaaaaaagccctgaagtactttgaggaggggctccaggacgggaacgacacttttgcacttctgggtaaagcccagtgcttggaaatgaggcaaaactacagcggcgcactcgagaccgttaaccagatcatcgtaaacttcccaagctttcttcccgccttcgtgaaaaaaatgaagctgcagctggccctgcaggactgggatcagaccgtggagactgcgcagcgccttctgctccaagacagtcaaaacgtggaggccctgcgaatgcaggccctttactacgtatgtcgggaaggtgatatcgagaaagcctctacaaaactggaaaatctgggtaacactctcgatgccatggagccgcaaaatgcccagctgttttataacattactctggcattcagccgcacctgcgggcggtcccaattaatcctccagaaaattcagaccctgctggaaagagcttttagcctgaacccccagcagtccgagttcgctacggagctcggataccagatgatattgcagggccgggtgaaggaagccctgaagtggtacaaaaccgccatgacccttgacgagactagcgtgagtgccctagtgggctttatccagtgtcaactcatcgaaggacagctgcaggacgcagatcaacagctcgagtttctgaatgagattcagcagtcaatcgggaaaagcgcggagctaatttacctgcatgctgtcctggccatgaaaaagaacaaaaggcaggaagaggtgattaatcttcttaatgacgtactcgatacccatttctcccaactggaggggctgcccctgggcatccaatacttcgagaagctcaatccagattttctgctggagatagttatggagtatctgtctttctgtcctatgcagcccgcctctccgggccagccactctgccccctcctccgccgatgtatctcggtgctcgaaactgttgttagaacggtgcccgggctcctgcagacagttttcctgatagcaaaggtaaagtacctgtcaggggacattgaagcagctttcaacaatcttcaacactgtttagaacacaacccgtcctacgccgacgcgcacttacttctggcccaggtttacctgtctcaggagaaagtcaagttgtgctcacagagtctggagctttgcctaagctacgacttcaaagtccgggattaccccttataccaccttattaaggcacagtctcagaaaaaaatgggggagatcgctgacgcgattaagactctgcatatggcgatgtccttgccagggatgaagagaattggggcctcaacaaaatctaaggatcgaaagaccgaggtggatactagccacagactgagtatcttccttgaactcattgatgtccaccgattgaacggcgaacagcacgaggcgacaaaagtgctccaagatgccatccacgagtttagcggcacctccgaggaagtgcgcgtgaccattgccaacgcggacctggccctagctcagggcgatatcgagcgagctctgagcattcttcagaatgtgaccgcagaacaaccgtattttatcgaagcgagagagaaaatggcggacatttatctcaagcatagaaaagacaaaatgctgtacatcacctgtttcagggaaatcgcagagcgcatggctaacccacggtctttcctcttactcggcgatgcgtacatgaatatattggaacccgaggaagcaatcgttgcttatgagcaggctttaaaccaaaacccaaaagacggtacgttggcctccaaaatgggcaaagcgctcattaaaacccacaattattctatggcaattacgtattatgaggcggccctgaagacaggccagaaaaactacttgtgctatgacctcgctgagctgctattgaagctgaagtggtatgataaagctgaaaaagtgctccagcacgcccttgcccacgaacccgttaatgagctcagcgctcttatggaagacggacgatgccaggtgttgctcgctaaggtctactccaagatggagaagctgggcgatgctatcaccgcactgcaacaagcccgggagttgcaggccagagtgctgaaacgcgttcagatggagcagccggacgccgttccagcacagaaacacctggctgcagagatatgtgcagaaatcgctaagcactccgtggcccaaagagactatgaaaaggcaataaagttttacagggaagctttagtccactgtgagaccgacaataagatcatgttggaacttgccaggttgtacttagcacaggatgatccagattcttgtcttaggcagtgcgctctgctgctccagtctgaccaggacaacgaggctgctaccatgatgatggcagacttaatgttccgtaagcaggattatgaacaggctgtgttccaccttcagcaactcttggagagaaagccggacaattacatgactctgtctcggctcatagatcttctgcgacgatgtgggaagttggaggatgtgcccaggttttttagcatggccgaaaaaaggaacagccgggccaagctagagccgggtttccagtattgtaaagggttatatctctggtacacaggagagcctaacgacgccttgagacactttaataaggctaggaaggacagagattggggccagaatgctttgtataacatgatcgaaatctgcttaaaccctgataacgaaaccgtgggtggggaagtcttcgaaaatttggatggtgacctcggaaacagcaccgagaagcaggagagcgttcagctcgcagtcagaacagccgaaaaattactaaaagaactgaaaccccagaccgttcagggccacgttcagttgagaattatggagaactattgcctcatggcaaccaagcagaaatcaaacgtcgaacaggccctgaacacattcaccgagattgcagccagcgaaaaggaacatattcctgctcttctgggcatggccaccgcctacatgatcttgaagcaaaccccaagagctagaaaccaactcaagcgaattgccaagatgaactggaatgctattgatgccgaagaatttgaaaaaagctggctcctgctggctgatatctatatccaaagcgccaaatatgatatggcagaggacctgctgaaacggtgtctgcgccacaataggtcctgctgtaaggcctatgagtatatgggctatattatggaaaaagagcaggcctataccgacgccgctctcaactatgagatggcctggaagtatagcaatcgcactaatccagcagtaggctacaaactcgcgttcaattacctgaaggctaagaggtatgttgattcaatcgatatatgtcaccaggtgctggaggcacatcctacatacccaaaaattcgcaaggatatattagataaggctagagcatccctgcggccctag

SEQ ID NO: 137671 - DNA, 765 bp, synthetic construct
  misc_feature 1..765: note = Description of Artificial Sequence: Synthetic coding sequence
  source 1..765: mol_type = other DNA
atgattgagatatgtctgaatcccgacaacgagacagtgggtggagaagtgttcgagaacttggatggcgatctggggaactcaaccgaaaaacaggagtctgtgcagcttgctgtcagaacagccgaaaagcttctcaaagaactgaagccccagacagtgcaggggcacgtgcagctcaggattatggaaaactattgcctaatggccactaagcagaagtccaacgtcgagcaggccctcaacactttcaccgagatcgccgcgagcgaaaaggagcacatcccggctttgctaggaatggccacagcttacatgatcttaaaacagacccccagggccagaaaccaactcaaaagaatcgctaaaatgaactggaatgccattgacgccgaggagttcgagaagtcttggttgctgctggccgatatctacatccagagcgctaagtatgatatggccgaggatcttttgaagaggtgcctccgtcataaccgaagttgctgcaaggcctacgaatacatgggttacatcatggaaaaggaacaagcatacaccgatgccgccctcaattatgagatggcctggaagtattccaaccgaactaatccagcagtgggctataaactagcattcaactacttgaaggcaaaacggtatgtcgacagcatcgatatctgccatcaggtcttagaggcgcatccaacctaccccaagatccgtaaggatattctcgataaggccagggcgagtctgagaccttag

SEQ ID NO: 137672 - DNA, 6078 bp, synthetic construct
  misc_feature 1..6078: note = Description of Artificial Sequence: Synthetic coding sequence
  source 1..6078: mol_type = other DNA
atggataacttcgccgagggcgatttcaccgttgccgactacgctctgctcgaggactgcccccacgtggacgactgtgttttcgctgccgagtttatgagcaacgattatgtgagagttacccagctctattgcgatggggtaggagtgcagtacaaggactacatacagtccgaacggaacctggaatttgacatttgtagcatctggtgttcaaaacctatatccgttttgcaggattactgtgacgccattaagatcaatatcttctggccccttctattccagcaccagaacagctcagtaatttccaggttacacccatgtgtggacgcgaacaactcaagggctagcgagattaatctcaagaaactgcagcatttggagctgatggaggatatcgttgacttggccaaaaaagttgctaacgacagcttcctcatcggagggcttctgaggataggctgtaaaatcgagaataagatcctggccatggaggaagccctcaactggatcaagtatgcgggggacgtcacaatcctaaccaagctgggatcaatcgacaactgttggcccatgctctccatcttctttaccgagtataaataccatatcacaaagattgtaatggaagactgtaatctgttagaagagctgaagactcagtcctgtatggattgcatagaggagggcgagctcatgaagatgaagggtaacgaagaattttctaaggaacggtttgacatcgccattatctattataccagagcaatcgaatatcggccagagaactacttgctctatggtaaccgagccttatgctttctacgcacggggcagtttcggaacgccctcggtgacggcaaacgggcgacaattttgaaaaatacctggccgaagggccactacaggtattgcgacgccctgtctatgcttggggaatacgattgggcactccaagccaatataaaggctcagaaattatgcaaaaatgatcctgaagggattaaagacctgatccagcaacatgtcaaacttcagaaacagattgaagacctacagggccggactgctaacaaggatcccattaaagctttctatgagaatcgtgcgtacactccacggtccctcagcgccccgatatttactacatccctcaactttgtggaaaaagaacgggatttccgtaaaatcaatcacgagatggccaacggggggaaccagaacctcaaagtggcagacgaagcgctaaaggttgatgactgcgattgccaccccgaattcagcccccccagtagccagccgcccaaacacaagggaaaacagaaatccagaaacaacgagtccgagaagttctcatcctcttcacctctgactcttcccgccgacctgaagaacattctcgagaagcagtttagcaaatcctcgcgggccgcccaccaggactttgctaacattatgaagatgttacgcagcctgattcaggacgggtatatggcattgctcgagcagagatgcagatccgcagcccaggctttcactgagttactgaatgggctggacccccagaagattaaacagctcaaccttgccatgatcaactatgtgcttgtcgtctatgggttggccatttccctgcttggcattggacagccagaggagctaagcgaagcggagaatcagtttaaaaggatcatcgagcactaccccagcgagggattagactgcctagcctactgcggtatcggcaaagtgtacctgaagaagaatagatttttagaggcactgaatcatttcgaaaaggcacggactctcatctataggttgcccggggtgctgacttggccaacaagcaacgtcatcattgaggaaagccagccccagaagataaagatgctgttagagaagtttgtggaggagtgcaagtttcccccagtgcctgatgccatctgttgctaccagaagtgtcacggatacagtaagatacaaatttacatcacggacccagatttcaaaggcttcatcagaattagctgctgtcagtattgcaagattgagtttcacatgaattgttggaagaagctcaagaccaccacgtttaatgataaaattgataaggactttctgcaaggcatttgtctgacccctgattgcgagggggtcatctctaaaatcattatcttttcttccggcggtgaagttaaatgcgagttcgaacacaaagtgattaaggagaaggtgccaccacgtcctatcctcaagcagaaatgctcatcccttgaaaagctacgtctaaaggaagataagaagctgaaacggaaaatccagaaaaaagaagcaaagaaactggcccaggaaaggatggaggaagatctacgggaaagcaacccccctaaaaacgaagagcaaaaggaaacagtggataatgttcagcggtgccagttccttgacgacaggattctacagtgtatcaagcagtatgccgacaagattaaatctggaatacaaaacactgccatgctgctcaaggagctcctttcctggaaagtcctttccaccgaagattacaccacctgtttctccagcagaaattttctcaatgaagccgtggactatgttattagacatctgatacaggaaaataacagagtaaagacacgtatcttcctacatgtgctctctgagctaaaagaggtcgagcccaaacttgctgcttggatccagaagctgaattccttcgggctggacgctaccggcacgttcttcagccggtatggagccagccttaagcttttggacttcagcatcatgacatttctgtggaacgaaaagtatggacacaaactggactctatagaaggcaagcagctggattatttctcagagcccgcgagcctgaaggaagctcggtgtcttatctggctattagaagaacatcgcgataagttccccgccctgcacagcgccctggacgaattctttgacatcatggatagccgatgtaccgtactgaggaaacaggattcaggggaagctcctttctcaagcacaaaggtgaagaataagtctaaaaaaaaaaaacctaaggactctaaaccaatgttggttggttcgggaaccacctcagtaacaagcaataacgagattatcacctcctcagaagatcatagtaaccgtaatagcgactccgctggaccctttgctgtgcctgaccatctgagacaagacgtggaagaattcgaagcgctgtacgatcagcattctaacgaatatgtggttaggaacaagaaattatgggacatgaaccccaaacagaagtgttcaaccttatacgactacttcagtcaatttctcgaagaacacggaccacttgacatgtcgaacaaaatgttcagcgctgaatacgagttttttcctgaagagacccgtcagatcttggaaaaagctggggggcttaagccttttttgctgggctgcccccgctttgtcgttattgacaattgcattgccctgaaaaaggtggcctctagactgaagaaaaagcgtaaaaaaaagaatatcaagacaaaagttgaagagataagcaaagccggggagtatgttagggtgaaactgcaactgaaccccgccgcacgggaatttaagcctgatgtcaagtcaaagcctgtcagtgatagttcatctgcaccagcattcgaaaacgttaaacccaaacctgtgtcggcgaacagcccgaagcctgcttgcgaagatgttaaggcgaaacccgtgtcggacaatagcagtcgacaggtcagcgaagatggccaacctaagggggtatccagtaattccccaaagccgggtagcgaggatgctaactataaacgcgtgtcatgtaatagccccaagccggttctcgaagacgtcaaacctacctattgggcccagtcccaccttgtgactgggtattgtacctatctgccttttcagcgatttgacattacccagacccctcctgcctacatcaacgtcctccccggtctgcctcagtacactagtatctacacaccacttgcatctctgtctccagaataccagctgccacggagtgtgccagttgtaccgtcctttgtggccaatgatcgggccgacaagaacgcagccgcttattttgaaggtcaccacttgaacgccgagaacgtggctgggcaccagatcgctagtgagactcaaattttggaaggctcactgggtatcagtgtcaagagccattgttcgacgggagatgctcacaccgtgctttccgaatcaaatcgaaacgacgagcattgtggcaactctaacaataagtgtgaggtcatccctgaatctactagtgccgtgacaaacatccctcacgtccagatggtggcaattcaggttagctggaacattattcatcaggaagttaacaccgagccttacaatcccttcgaggagcggcaaggtgaaatttcccgtattgagaaggagcatcaagttctacaggaccaactccaggaggtctacgagaactatgaacaaataaagctgaaaggactcgaagaaactcgagatctcgaggagaaacttaagcgccatctggaagagaataagataagtaaaacagaactcgattggttcttgcaggatcttgaacgcgaaattaaaaagtggcaacaagagaaaaaggaaattcaagagaggctgaaatccctaaaaaagaaaatcaaaaaggtatcaaatgcttcagagatgtatacccaaaagaacgacgggaaggaaaaggaacacgagcttcatctggatcagtccctggagattagcaataccctcaccaatgaaaagatgaaaatcgaggaatacatcaagaaaggtaaggaagactacgaggagtcccatcagagagctgtggccgcggaggtttccgtcctcgaaaattggaaggagagcgaggtgtacaaactccaaattatggagtcccaggccgaggcatttctgaagaagctaggtctgatcagccgagatcctgccgcctacccagatatggaatcagatatccggagttgggagctatttttgtccaacgtcacaaaagagatcgaaaaagccaagtcacaatttgaagaacaaattaaagctattaagaacggatcccgcctctctgagctgtctaaagtgcaaataagtgaattgtcttttccagcttgcaatacagtacaccctgagttgctgcctgagagctcaggggatgacggacaaggcttggtgaccagtgcatccgacgtcaccgggaatcacgccgcccttcatcgcgacccttccgtcttttcagctggagacagcccaggcgaggccccgagcgctcttctccccggcccgccccctggccagcctgaggcaacccagttaactgggccaaagcgcgcaggacaagcagccctgtcagaacgtagccccgtcgctgacagaaaacagcctgtgcctcctgggagagcagccaggtcaagccagtctccgaagaagcctttcaatagcattattgagcacctcagcgtggttttcccttgttacaactctacggagctggccggctttatcaagaaggtccggtccaaaaataaaaattccctgtccggtttatccatagatgaaattgtccagcgggtgactgagcatatcttagatgaacagaaaaaaaagaagccaaatcccgggaaggataagaggacatatgagccgtcatcagccacaccggtgaccaggtcttcccaaggatcaccctctgtagtcgtagcccctagtcccaaaaccaaaggccagaaggccgaggacgtcccagtgcgaatcgccctgggagcctcctcctgtgagatctgccacgaggtcttcaagtccaagaatgtccgagtcttgaaatgtggtcacaaataccacaaaggttgcttcaaacagtggctcaaagggcaaagcgcgtgccccgcctgtcaaggccgggatctcctgaccgaggagtctccttcaggaaggggttggcccagtcagaaccaggagctccccagctgctcatcgagatag

SEQ ID NO: 137673 - DNA, 6078 bp, synthetic construct
  misc_feature 1..6078: note = Description of Artificial Sequence: Synthetic coding sequence
  source 1..6078: mol_type = other DNA
atggataatttcgccgaaggggattttaccgtggccgattacgccctgctcgaggactgtcctcatgtggatgactgcgtcttcgccgccgagttcatgagtaacgattacgttcgagtcacccagttgtactgcgatggtgtgggggtgcagtacaaagactacatccaaagcgaacgaaacttagagttcgatatctgctctatttggtgttctaagcctatttccgtgctgcaggattattgtgacgccatcaagattaatatcttctggcctctgctgttccagcatcagaattctagcgtgatttcaaggctccacccttgtgtggacgccaacaatagtagggccagtgagatcaatctgaagaagctgcagcacctcgagcttatggaggatattgtcgatctggctaaaaaagtggccaatgatagttttttgatcgggggcctgctcagaatcggctgcaagattgaaaacaaaatcctagcgatggaggaggccctaaattggatcaagtacgccggagacgttacaatcctaaccaaacttgggagtattgacaactgttggcctatgttgagtatctttttcaccgagtataagtatcatattactaagattgtgatggaggattgtaacttgcttgaggaactaaagacccagtcttgtatggactgcatcgaagagggtgagctgatgaaaatgaaagggaacgaagagttctcaaaagaacgcttcgacatagctataatttattacacgcgggccatcgaataccgaccagagaattatctgttgtacggaaaccgcgctctctgcttcctaaggacaggccaattccggaatgctctgggggatggcaaaagagccacgattctcaagaatacgtggcccaaaggacattaccgatactgtgacgcactgagcatgctcggtgaatacgactgggctctccaggccaatatcaaagcccagaagttgtgcaagaacgacccagagggcatcaaggacctaattcaacaacatgttaagctgcagaaacagatcgaagacctgcagggccgaaccgctaacaaggatcctattaaggcattctatgagaacagggcctacacacccagaagcctgtccgcccctatattcactactagcttgaacttcgtcgagaaggagagggattttcgcaagatcaatcacgaaatggctaatgggggcaaccagaatctcaaggtcgccgacgaggccctgaaagtcgacgactgcgactgtcatccggaattctccccacctagctcacagccgcccaaacataagggcaagcagaaaagtcggaataatgagtctgaaaagttctcatcttcttcccccttgactctgccagctgacttaaagaacattttagagaaacaattctcgaaaagtagtcgtgccgctcaccaggatttcgccaacataatgaagatgcttcggagcttaatacaggacgggtatatggcactcctcgagcagcggtgcaggagcgccgcccaggccttcactgagctgttgaatggtttggacccccagaagatcaaacagttaaacttagctatgatcaattacgtgctggtggtatacggtctcgccattagcctgctggggattggtcagcctgaagaattgagtgaggctgagaaccagttcaaaagaatcatcgagcactatcccagtgaaggattagactgcttagcatactgcggcattggcaaagtatacctcaaaaagaataggtttctcgaggcactgaatcacttcgagaaggccagaactctaatctataggctgcctggggtgctcacatggccgaccagtaatgtcattatagaagaatcccagccccaaaaaattaagatgctcctcgagaagttcgtggaggaatgcaaatttccaccagttcccgacgccatttgctgctaccagaagtgtcatggctactccaaaatccaaatttacattacggatccagatttcaagggtttcatccgaatttcctgttgccagtattgtaaaatcgaattccatatgaactgctggaaaaagctgaaaactaccacgttcaatgacaaaatcgataaggacttcctgcaaggaatctgcttaacccctgattgtgaaggcgtgatctccaagattataattttttcttccggaggggaagtcaagtgcgaatttgagcacaaggtcataaaggagaaggtccccccccggcccattctcaagcagaaatgttcctctcttgagaaactgaggctgaaggaagataagaagctcaagagaaagattcagaagaaggaggccaagaaactcgcccaagaacgcatggaagaggacctcagggagagcaacccgccaaaaaacgaagaacaaaaagaaaccgtggacaacgtacagcgatgtcaattcctggacgaccgaatattgcagtgcatcaagcagtacgctgacaagattaaaagcggcattcaaaacacggctatgctccttaaagagctgctaagctggaaggtgctgagcaccgaggactacacaacatgttttagttcacgaaatttcctgaatgaagctgtggactatgtgatcaggcacctgatacaggaaaataaccgggtaaaaacgaggattttcctgcacgtcctttcggaactgaaagaggttgagcccaagctcgctgcctggattcagaaattaaactccttcggtctcgatgctaccgggactttttttagtagatacggtgcatctcttaaactgctggacttctctatcatgacattcctctggaatgaaaagtacgggcacaagttggactccatagaggggaaacagctggactatttttcggaacccgcatcactaaaagaggctaggtgcctgatctggttgctggaagagcatcgagacaagttcccggcattacactcagccctggacgagttcttcgacatcatggattccagatgcacagtgttgagaaagcaagatagcggagaggccccatttagctccaccaaggtaaagaataagtcaaagaagaaaaagcccaaggacagtaagcccatgcttgttggaagtggcaccacttccgtcacttcgaacaacgagatcataacaagcagcgaggatcattccaatcggaattctgacagcgctggaccttttgcggtcccagatcatttaagacaggacgtggaggagtttgaggccctctatgaccaacatagcaatgaatatgtcgtgcgcaacaagaagctctgggacatgaaccctaagcagaaatgttctactctgtacgattacttttcacagtttctggaggagcatggccctcttgacatgtcaaacaagatgttttccgccgaatatgagtttttccccgaggagacacggcaaattctcgaaaaggccgggggtctcaagcccttccttctgggttgtccaaggttcgtggtgatcgataactgtattgctctcaaaaaagtggcctcacgccttaagaagaaacgtaagaaaaagaacattaaaacgaaagtcgaagagatttcaaaggctggggagtatgtgcgcgtcaagctgcagctgaaccccgctgcacgagagttcaagcccgacgtgaagagtaaacccgtgagcgactccagttcagcacctgcgttcgagaacgtgaagcccaaaccggtgagcgccaactcccccaaaccagcatgcgaagatgtgaaagctaagccagtgtcagataactcctcaaggcaagtgagtgaagatggccagccaaaaggagtaagtagtaattcacccaaacctggtagtgaggatgcgaactataaaagggtgtcgtgcaattcccccaagccagtactggaggacgtgaagcccacgtattgggctcagtcccaccttgtcacaggatactgtacctatctgccattccagcggttcgatatcacgcagacccctcccgcatacattaatgtcctgccaggtctgcctcagtacacgagtatatacacaccgctagcttccctgtcgccggaataccaactgcctcgcagcgtccccgttgttcccagttttgtggcgaatgacagagcagataagaatgcagccgcatattttgaaggccaccatcttaacgctgagaatgtagcaggccatcagatcgccagtgagactcagatcctggagggcagtctggggatatcggtgaaatcccattgctcaacaggcgatgctcacactgtgttgtctgagtccaatcggaatgatgaacattgcgggaactctaataacaaatgcgaggtgattcctgagtctacaagcgcagtgaccaatattccgcacgtgcagatggtagccattcaggtgtcctggaacattattcatcaggaagtaaataccgagccctacaatccgtttgaggaaagacagggagaaatcagcaggatcgagaaagagcaccaggtcctacaggaccaattgcaggaagtctacgaaaattatgaacagattaaattgaagggtctggaggaaacgagggatctggaggagaaactcaaacgccacctcgaagagaacaagatttctaaaacagagttagactggttccttcaagacctcgaacgcgagataaaaaaatggcagcaggagaaaaaggagatacaggagagactgaaatctctcaagaagaagattaagaaggttagcaatgccagcgagatgtacacacagaagaatgatgggaaggaaaaagagcatgagctgcacctggaccagagcctggagataagcaacaccctaaccaatgaaaagatgaagatcgaagaatacatcaagaaaggtaaggaggattatgaggaaagtcatcaacgtgccgttgccgcagaagtctccgtactggagaactggaaggagtctgaggtctacaagttgcagatcatggagtcacaagccgaggcattcctgaagaaacttggtttgatcagccgcgacccagccgcctaccccgacatggagagcgatatcaggtcatgggagctgttcttatccaatgtgactaaggagattgagaaagccaagtcgcaatttgaagagcagataaaagccataaaaaatggatctcgcttgagtgagctaagtaaggttcagatttcggagctatcgttcccagcttgtaatacagtgcaccctgaactgttgccagagtcttccggggatgatggtcagggtttagtgacatccgccagcgacgtgacaggcaaccacgccgcactgcatcgggacccaagtgtcttctctgcaggtgattcccctggagaggcaccgtctgctctcttacctggaccacctcctggccagcccgaagcgacacagctgactggccccaagcgtgcgggacaggccgccctgagcgagaggagcccggtcgctgatcggaagcagccggtgcctcctgggcgagccgctcgcagctctcagagcccaaagaaaccttttaattccatcattgaacacctgtccgtcgtctttccttgctacaactctaccgagctcgcagggttcatcaaaaaagtgagatctaagaacaagaattccctctccgggctgtctattgacgaaattgtccagcgcgtcactgagcacatccttgacgagcagaaaaagaaaaagcccaaccccggcaaagacaaaagaacctatgaaccttcctccgcaacaccagttacacgctcaagccagggttccccctctgttgtagtcgctcccagtcctaagacaaaaggtcagaaggcggaagacgtgcctgttcgcattgccctcggtgccagcagctgtgaaatctgccatgaggtgttcaagtctaaaaatgttagagtgctgaaatgcggacacaaataccacaaggggtgcttcaagcagtggctcaaaggacagtcagcatgccccgcttgtcagggtcgagatctgttaactgaggaatccccctcaggtagaggctggccttcccagaatcaggagctcccatcctgttcaagtcgttag

SEQ ID NO: 137674 - DNA, 6078 bp, synthetic construct
  misc_feature 1..6078: note = Description of Artificial Sequence: Synthetic coding sequence
  source 1..6078: mol_type = other DNA
atggataatttcgctgagggcgattttacagtggcagattatgcattgctagaggactgtcctcacgtggacgattgcgtattcgctgcggagtttatgtctaacgactacgtccgggtgacacagctgtattgtgatggggtcggagtccagtataaggactatatccaaagcgagcgtaacctggaattcgacatatgcagcatatggtgctccaaaccaatttctgtactgcaagactattgtgatgctattaaaataaatatcttctggccattgttatttcagcaccagaatagctcagtcatctctagactgcacccatgtgtggacgccaataattctcgcgcaagtgaaatcaacttgaagaaactccagcacttagaacttatggaggatattgtcgacttggccaaaaaagttgccaatgattcatttttgataggcggtttacttagaatcgggtgcaagattgaaaacaagatcctggccatggaggaagcccttaattggattaagtacgccggcgacgtgacaattctaacgaagctgggctcaattgataattgttggcccatgctgagcattttcttcacagagtacaaatatcacattaccaagatagtcatggaagactgcaatttgcttgaggaactgaagacccagagctgcatggactgtatcgaggagggagagcttatgaagatgaagggcaacgaggaattcagcaaggaaagattcgacatagccataatttattacacacgggccatcgaatataggcctgaaaactacctgctctacggaaacagggcactgtgcttcctgcgcactgggcaatttcgtaatgccctgggagacggaaaacgtgccactatattgaaaaacacttggcccaagggacactatcggtattgtgatgcgctgtcgatgttgggcgagtacgattgggcactccaggctaacatcaaggctcagaagctctgtaagaatgacccggaaggtatcaaggacctgattcagcaacatgtgaagctccaaaaacaaatcgaggacctgcagggccggactgccaataaggatccgattaaggccttttatgaaaaccgagcatacactccccgatccttgagcgctcccatttttaccacctctctgaactttgttgaaaaagagcgtgattttaggaaaattaaccacgagatggcaaacggaggcaaccagaacctaaaggtggccgatgaggccctgaaggtagatgactgcgactgtcacccagagtttagccctccaagctcacagccaccaaaacacaaaggaaagcagaagtcccgcaacaacgagtccgagaagttcagcagttctagtcccttgaccctgccagcagatctaaagaatattctagagaagcagttctccaaatcttccagggccgcccatcaggacttcgccaatatcatgaagatgctgcgctccctcattcaggatggctacatggctcttttagagcagagatgcaggtctgcagctcaggccttcaccgagcttcttaatggattggaccctcaaaagatcaaacagcttaatcttgcaatgatcaattatgtgttggtcgtgtatggactcgctatcagcttacttggcattggacaacccgaggagcttagcgaggctgagaaccagtttaagcggatcatcgagcattatccctctgagggcctcgactgcttggcatattgtggtatagggaaagtgtacctgaagaaaaaccggttcctggaggcgcttaatcacttcgaaaaggcacggacactgatctatcgtcttcccggtgtgttaacatggccgaccagcaatgtcattatcgaggagagccagccccaaaagatcaaaatgctgctggagaaatttgtagaagagtgcaagttcccacccgtccctgatgccatctgctgttaccagaaatgccacggctattccaagatccagatctatataaccgatcctgattttaagggcttcatccgtatatcctgctgccagtattgtaaaatcgagtttcacatgaactgctggaagaaattgaagacaacaaccttcaacgacaagattgataaagactttttacaaggtatctgtctgaccccagactgcgaaggagtaatttctaaaatcattatattcagtagtggtggggaagttaaatgcgaattcgagcacaaagtgattaaggaaaaagtccctcctcgtcccatcctcaagcaaaaatgttcaagcctcgaaaaattgagacttaaagaggacaagaagttgaagcggaaaattcagaagaaagaggctaaaaagttagcccaagagcgcatggaggaagacttaagggagtcaaacccacccaagaatgaagagcagaaagagaccgtcgacaatgtgcagcgctgccagttcctcgacgataggatcctacaatgcattaaacagtacgcagataagataaagtctgggattcaaaacacagccatgctactgaaggagctgctctcttggaaggtactatccactgaggattatactacttgtttctcttctcgtaacttcttaaatgaggcggttgattacgtgattagacatctaattcaggaaaataatcgtgtgaagaccagaatcttcttgcatgtgctgtctgaactgaaggaagtcgagcctaaactcgctgcctggattcagaaacttaacagctttggtctggacgccacgggtaccttctttagccgttacggcgcctcactgaaattactggatttttcaatcatgacttttctgtggaacgagaaatacggccacaagctggactctatcgaaggtaagcagttggactatttctcagagcccgccagtcttaaagaggccaggtgcctgatatggctccttgaagaacacagggacaaatttcccgctctccacagcgccctggatgaatttttcgatatcatggactcgaggtgtactgtgttgaggaagcaggactcaggcgaagcccccttcagcagcactaaagtgaagaacaaaagcaaaaagaaaaagccaaaggattcaaaacccatgttggttggaagtggtactaccagcgtgacgtctaacaacgagattatcacatcttctgaggatcattccaataggaacagcgacagcgcagggccatttgccgtgcctgaccatctgcgccaggacgtggaggagtttgaagccctatacgaccagcattctaatgaatatgtcgtgcgcaataagaaactctgggatatgaatccaaagcaaaagtgtagcaccctctacgattatttctctcagtttctggaagagcatggacccttggatatgtctaataagatgttttccgccgaatatgagtttttcccggaagaaacccgtcaaatcctggagaaggctggtggcctgaagccttttctgctgggctgcccgcggtttgtggtcatcgacaactgcatagccctaaagaaggtcgcctccaggctgaaaaagaaacgtaaaaagaagaatatcaaaactaaagtggaagaaataagcaaggccggagagtacgttcgcgtcaaactccaactgaatcccgccgctcgggagttcaagcccgacgtaaaaagcaagcccgtcagtgatagtagtagcgctcctgcctttgaaaacgtcaagccaaaacccgtaagcgctaactcaccaaagcccgcctgtgaggacgtgaaggcaaagccagttagtgataactccagtcgacaagtctcagaagatgggcagcccaagggtgtgtcatcaaacagcccgaagccaggatcagaggacgccaactataagcgagtttcatgtaactcccccaagcctgttcttgaagacgtcaagcctacttactgggcccagagccacctcgtgacgggctactgtacctacttgccgttccagcgttttgacataacgcagactccgcctgcatacattaacgtcctgcctggcctgcctcagtatacttccatttacactcctcttgcgagtctgagccctgaatatcaactgccgagatctgtccccgttgtgccatcttttgtggccaacgacagagctgataagaatgccgctgcctactttgaggggcatcatctcaacgcggagaatgtagctggacaccagattgcaagcgagacccagattcttgagggatcattaggcatatctgttaaaagccactgttctaccggcgacgcccacactgtgctgtcagagtctaatcgcaacgatgagcattgtggaaactcgaacaacaagtgtgaggttatccctgagagcacaagtgccgtgaccaacatcccacatgtgcagatggtagccatacaggtctcctggaatattatccaccaggaagtgaacactgagccttataacccgttcgaggagaggcagggagagattagtagaattgaaaaagaacaccaagtgctccaggatcagctgcaggaggtctacgagaattatgagcagattaaactgaaaggcctggaagagacccgcgatctggaggaaaagttaaagcggcacctggaggaaaataaaatttcgaaaaccgagcttgattggtttcttcaggacctcgaaagggaaattaaaaagtggcagcaggagaaaaaggagatacaggagagattaaaaagtctgaagaagaagatcaagaaggtgagtaatgcaagcgaaatgtacacacagaagaatgatgggaaggaaaaggagcacgaactacatctggaccagagtctagaaatcagcaacacgctgaccaatgagaaaatgaagattgaagaatatatcaaaaaaggaaaggaggattatgaggagtcccaccagagggctgttgccgcagaggtctccgtgctcgaaaattggaaagaaagcgaggtatacaaacttcagatcatggaatcccaggccgaggccttcctaaagaagcttggcctcatctcgagggatcctgcagcttatccagatatggaaagcgacataagaagctgggaattgtttctttctaacgtcactaaggagattgagaaggccaagagtcagttcgaggaacaaatcaaggctatcaagaatggaagcaggctgtctgaattgagcaaagttcagatctcagagctgtccttcccagcttgtaatacagtgcatccggaactactgccggaatcctctggggacgatggacagggcctggtaacgtcagccagcgatgtgaccggtaatcacgccgctctgcatcgcgaccccagcgtattctctgccggcgactcccctggcgaagccccgtccgctcttttgcccggtccaccacccgggcagccagaggctacccaactcacggggcccaagagagcgggccaagccgctctttcggagagatcacccgtggccgatagaaagcagcctgtaccgccaggcagggccgccaggagttctcaaagtccaaagaagcctttcaacagcatcattgaacacctgtctgtggtgtttccgtgctacaattctacagagcttgctggctttatcaagaaagtgcgatccaaaaacaagaattctctgtctggtctgtccattgatgaaatagtgcagagagtcaccgagcacatcctggacgagcagaaaaagaaaaaacctaatcccggtaaagacaagcgtacctatgaaccatcttcggccacccccgtgacccgtagcagccaggggtcgccatcagtggtggttgcacctagtccaaaaaccaaaggccagaaagctgaggacgttcctgtacgcatcgctctgggtgcttcaagttgtgaaatttgtcacgaggtcttcaagagcaagaatgtgagagttctcaagtgcggccacaagtaccataaaggctgtttcaagcaatggctcaaagggcaaagcgcttgtcctgcttgccagggacgggacctactcaccgaggagagtccctcaggaaggggttggcctagccagaatcaggagctgccatcatgctccagccggtag

SEQ ID NO: 137675 - DNA, 3540 bp, synthetic construct
  misc_feature 1..3540: note = Description of Artificial Sequence: Synthetic coding sequence
  source 1..3540: mol_type = other DNA
atggataactttgctgaaggtgattttaccgtcgcggactatgctctgctggaggactgcccccacgtggacgattgcgtcttcgctgcagaatttatgtcaaacgattacgtgcgtgtcacgcaactttattgtgatggggtgggtgtccagtacaaggattatatccaatccgagcggaatctggaatttgatatttgctcgatctggtgtagcaagcccatttcagtgcttcaagactactgtgacgccattaagataaacattttctggcccctccttttccagcaccaaaactcatcagtcatcagcagactccacccctgcgtggacgctaataactcccgcgcatccgaaatcaatttgaaaaagctgcagcatctggagttaatggaagatatcgttgacctggccaagaaagtggccaacgactcattcctcattgggggcttgcttaggatcggttgcaaaattgaaaataagatattggcgatggaagaagcccttaattggattaaatatgcgggagatgttaccatcctgacaaaactgggaagtatcgacaattgttggcctatgctgagtatcttcttcaccgagtacaaatatcacatcacaaagatagtaatggaggactgcaatctgttggaggaactcaaaacgcaatcctgcatggactgtattgaggaaggtgaacttatgaagatgaaggggaatgaggaatttagtaaggaaaggtttgacatcgccataatatactatacacgtgctatcgagtatcggcctgaaaactacctcctgtatgggaatagggctctttgtttcctccgcactggccagtttcgaaatgcgctcggagatgggaaacgcgcaaccatcctcaagaacacctggccgaagggccactaccggtactgcgatgccctctcgatgctgggagagtacgattgggctttacaggcgaatatcaaagcacagaaactgtgcaagaatgaccccgaggggattaaggacctgatccagcagcacgtgaaacttcagaaacaaatcgaagacctgcaggggaggacagccaataaagacccaatcaaggctttctatgaaaacagggcatatacccccaggtccctttctgctcccattttcaccacaagtcttaacttcgtggagaaagagagggactttcggaagatcaatcatgaaatggctaacgggggaaatcagaacctaaaggtcgccgatgaagccctcaaagtggacgactgcgactgccaccctgagttttccccgccatcgtcgcaacctcccaagcacaaggggaagcaaaaaagccggaataacgaatcggaaaagtttagcagttccagtcccctgacactcccagcagacctgaaaaatatcctagagaagcagtttagcaagagcagtcgcgccgcacatcaagatttcgcgaatattatgaagatgctgcgcagtcttattcaggatgggtacatggctttgctggagcagcgatgcagaagcgcagcccaggcgtttaccgaactgctgaacggtcttgacccacagaagattaaacagctgaacctggctatgataaattacgttctagtcgtgtacggcctcgccattagcctactgggaattggacagcctgaggagctgtccgaagccgaaaatcaattcaagcgcattatagaacattatccctcagaaggcttggattgcttggcttactgcgggatcggcaaggtttaccttaagaaaaatcgtttcctggaagcattgaaccacttcgagaaggcaaggacactgatctaccggctgcctggggtcctcacatggcctacgtccaatgttattattgaagagagccagcctcagaagatcaaaatgctgttagagaaattcgttgaggaatgcaaattcccccccgtaccggatgccatttgctgttaccaaaagtgccatggctacagcaagatccagatctacattacggacccagatttcaaagggtttattaggatatcatgctgtcagtactgtaagattgaattccacatgaattgctggaagaagctgaaaacaaccaccttcaatgacaagattgacaaggattttttgcaaggcatatgcctgacccctgattgcgagggcgttatctctaagatcattatttttagtagcggcggggaggtgaagtgcgaatttgagcacaaggtgataaaagaaaaggtacctccccggcccattctaaaacagaagtgcagtagccttgagaagctcagactcaaagaggacaagaaactgaaacggaaaattcagaaaaaagaagcaaagaagctggcacaagagcggatggaggaggatcttcgggaatcaaatcctcccaaaaacgaggagcagaaggagacagtggacaatgtgcagcggtgccagtttctagacgaccgaattttgcagtgcatcaagcagtacgcagataaaatcaaatcaggaatccaaaatacagccatgctgctcaaagagcttctgtcctggaaggtattgagtaccgaagactacactacttgcttttctagtcgcaattttctcaacgaggctgttgattacgtcattagacacctcattcaagaaaacaacagagtcaagactcggattttcttgcacgtactcagcgagctgaaggaggtcgagcccaagcttgccgcatggatacaaaaattgaactcattcggcctggatgcaactgggactttctttagtagatatggggcaagcctgaagctgctagacttcagtatcatgaccttcctttggaacgagaagtacgggcataagctggacagcatagagggcaaacaacttgactacttttctgaaccagccagcctgaaggaagcacggtgtctcatatggctgctggaggagcaccgggataaattccccgccctacactcagctctggatgagttcttcgacatcatggattctcggtgcacagtgctgaggaaacaggactccggcgaggctccattcagttctaccaaggtgaaaaacaaatccaagaaaaagaagcccaaggattctaagccaatgctagttggcagcggcacaacctccgtcactagtaacaatgagatcatcacgagtagcgaggaccactcaaatcgtaatagcgactcggcaggacctttcgcagtccctgatcacttacggcaggacgtggaagagttcgaggccctgtatgatcagcattccaatgaatatgtggtcagaaacaaaaaactgtgggacatgaatccaaagcagaagtgttccacactgtatgattatttcagtcagttcctcgaagaacatggccccctcgacatgtcaaacaagatgttctccgccgagtacgagttttttccggaagagacacgacagatcttggaaaaggcaggcggccttaagcctttcctgctgggctgtccgcgcttcgtggtgatcgataactgcatagctctcaaaaaagttgcctctcgtttgaagtag

SEQ ID NO: 137676 - DNA, 2343 bp, synthetic construct
  misc_feature 1..2343: note = Description of Artificial Sequence: Synthetic coding sequence
  source 1..2343: mol_type = other DNA
atggataacttcgccgagggtgactttacagtggccgactacgccctgctggaggattgtccacacgtggacgactgcgtttttgcggccgagtttatgtcgaacgattatgtgcgtgttacgcagctgtactgcgatggagtgggagtgcagtacaaggactatatccagagtgaaaggaacctggagttcgacatctgcagcatatggtgtagtaagcctatcagtgttctgcaggactattgtgatgcaattaagatcaacatcttctggcctctattgtttcagcatcagaactcaagcgtgatttctcgtcttcatccctgtgtggacgcaaataactccagggcctctgaaattaatctgaaaaaattgcagcatctagagctaatggaagatatcgtggatttggccaagaaagtagccaacgacagcttccttatcggcggcttgctacgcataggatgcaaaatcgagaataagatacttgctatggaggaagctctgaactggatcaagtatgccggggatgtaacaatcctgaccaagttgggatctatcgacaattgttggcctatgctgtctatattttttaccgagtacaaataccatatcactaagatcgtcatggaagattgtaacctgttagaggagctgaaaacacagtcttgcatggactgcatcgaggaaggcgaactgatgaagatgaaggggaatgaagagttcagcaaggaacggtttgatatagccatcatctactacaccagggctattgagtaccgacccgaaaattacctgctctacggtaatcgggctctctgcttcctgcgaaccggccagttccgtaatgcgctaggtgacgggaagcgggccacgattctgaaaaatacgtggccaaaaggacattatcgttattgcgacgccctctcaatgctgggcgagtatgactgggctctccaggctaatattaaggctcagaagctgtgcaaaaatgatccagaggggataaaagatctgatccagcagcacgtcaagctccaaaaacagatcgaagatcttcaggggaggacagcgaataaagatccgattaaggccttttatgaaaatagggcgtataccccccggagcctgtcggctccgatctttacaacttcactcaactttgtcgaaaaggagagggatttccgtaaaatcaaccacgaaatggccaacgggggcaaccaaaacttgaaagtcgccgacgaagctctcaaggttgatgactgcgactgccaccctgaattctccccgccaagctcccagcccccaaaacacaaaggaaagcaaaagagtaggaataacgaaagcgaaaaattctcatccagctcccctctgactctaccagctgacctgaagaacattctagagaaacagttctcgaaatccagccgagctgctcaccaggatttcgccaatatcatgaagatgctgcgatcactgatccaggatggctatatggcacttctggagcagaggtgtcgctctgctgctcaggccttcacggagctgctgaatggcctggaccctcagaagatcaagcagctgaatttagcgatgatcaactacgtgttagtggtgtatggtcttgcgatcagtcttttaggaatcggccaaccagaggaactgtctgaagccgagaaccagttcaaacgcatcattgagcactacccctccgagggcctagactgcctggcctactgcgggatcgggaaagtgtatctgaaaaagaataggttccttgaagcactcaaccactttgaaaaggcccgcaccctgatctaccggttacccggagtgctgacctggccgacctccaacgtgattatcgaggagagtcagccccaaaaaattaagatgctattggaaaagttcgtcgaggaatgtaagttcccacctgtgccagatgctatctgttgttaccagaaatgccacgggtactccaaaatccagatctatattacagaccctgactttaaagggtttatcaggatctcttgttgtcagtactgtaagattgagtttcacatgaattgttggaaaaagctcaagaccacgacgtttaacgataaaatcgacaaagatttcttgcaaggaatttgcttgacacctgactgcgagggagttatttccaagattattattttttccagtggtggggaggtcaagtgcgaattcgagcataaggtgatcaaagaaaaagtgcccccccgcccgatactaaagcaaaaatgctcaagtctcgaaaagctccgtctgaaggaggacaaaaagctgaaaagaaagatccaaaagaaggaggcctag

SEQ ID NO: 137677 - DNA, 1839 bp, synthetic construct
  misc_feature 1..1839: note = Description of Artificial Sequence: Synthetic coding sequence
  source 1..1839: mol_type = other DNA
atgttgggcgagtacgattgggctttgcaggccaatattaaagcccagaagctttgtaagaacgaccctgagggcatcaaggatctgatccagcagcacgtcaagctgcagaagcagatagaggacctccagggccggactgcgaataaggaccctatcaaggcattttacgaaaatagagcatacactcccagatccctaagcgcaccaatttttacaacatccctgaactttgtggagaaggagcgcgactttaggaaaattaatcatgaaatggccaatggagggaatcagaaccttaaggttgcagatgaggccctaaaggtggacgactgtgactgtcatccagaattttctcctcctagttcacagccccccaaacacaagggaaagcagaaaagccgaaacaatgagtctgagaagttcagttctagcagcccgctgaccctgccagcggatctaaaaaacattctcgaaaaacaattttctaagagctctagagcagcgcatcaggattttgcaaatataatgaaaatgcttagatcgctcatccaggatgggtatatggctctgcttgagcaacggtgccgcagcgcggcccaggcctttaccgaactgctgaacgggctggatcctcagaaaatcaagcaactgaatctagcgatgataaactacgtgctggtggtgtatgggctggccatctcattgctgggcatcggccagccagaggaattatcagaggctgagaaccagtttaagcgaattatcgagcattatcctagcgagggactggactgcctggcttattgtgggataggcaaagtgtatctgaagaaaaatcggtttctcgaagccctcaatcactttgaaaaagcccggacactcatttaccggttgccaggcgtgctcacttggccgaccagcaatgtaattattgaagagtcacagccccaaaagataaaaatgctgttggaaaagttcgtggaagaatgtaaatttcccccggtgccagacgcaatatgctgttaccaaaaatgccatggttactctaagattcagatctacattacggaccctgactttaagggattcatccgcatttcttgctgtcagtattgtaagatcgaattccacatgaactgttggaagaagcttaaaacaactaccttcaatgataaaatcgacaaggacttcttgcagggtatttgcctcactcctgactgcgagggcgtgatctctaaaatcatcattttcagtagtggcggcgaggtgaaatgcgagttcgagcacaaagttattaaagagaaagtgcccccgcgtcccattctcaaacagaagtgctccagtctggaaaaattgaggctgaaggaggacaaaaagctaaagcgcaagattcagaagaaagaagccaaaaaacttgcccaagagcgaatggaagaagacctcagggaatctaatcctcctaagaatgaggaacaaaaggagaccgttgataacgtgcagcgctgccagttcctggacgacaggatcttacagtgtataaagcagtatgctgacaagatcaaatccgggattcaaaatactgccatgttattgaaagagctgctatcttggaaagttctcagcactgaagactatacaacatgcttttcctcaaggaattttctgaacgaggcagttgactacgttatccgacaccttatacaggagaataacagagtcaagaccagaattttcttacacgtgctgtccgaactcaaagaagtggaacccaagctggccgcctggattcaaaaactcaattccttcggaatgagtctttatattccagagcaatag

SEQ ID NO: 137678 - DNA, 1842 bp, synthetic construct
  misc_feature 1..1842: note = Description of Artificial Sequence: Synthetic coding sequence
  source 1..1842: mol_type = other DNA
atggacgctgtgttggcttgccgactccgcggtcgggggaatcgtgtggccgccctacgtccccggcctcggccaggagggtctgcgggcccaagcccattcgcactgttgtgcgcaggcctgtctcccgagccacgagccggcgttggatcggaatttccagcttggtttctcggaggcagctctcagcgacggaacatggcacttttaggctccagagctgagctcgaagccgacgaggatgtgttcgaggacgccctggaaacaatatccatggccaaagaatcaatgtatcacgctctgggctactccaccatagttgtgctgcaggccgtgctaacctttgagcagcaggatattcagaatgggattagcgccatgaaagatgccttacagacgtgccagaaatataggaagaagtacacagttgtggagtcattttcatccttactgagtagggggtcgctggagcagctgagcgaggaggaaatgcacgcagagatttgttacgcagaatgcctgctgcagaaggctgcattgacgttcgtgcaagacgagaatatgatcaattttattaagggcggcttgaagattagaacatcataccagatatacaaggagtgtctgtctattctacacgaaatccaaaaaaacaagctgcagcaggaattcttctacgaattcgagggaggcgtcaagctggggtcaggggcatttaatctaatgttatctcttctgcctgcccgcatcataaggttacttgagttcatcggatttagtgggaaccgggaactgggcctgctgcagctgcgagagggggcctccgggaggtccatgcgatcggctctctgctgtttaacaattctcgcattccacacatacattagtctcattctgggtaccggtgaagtcaacgttgcggaggctgaaagattactggccccattccttcaacagtttcctaatggttccctggttctgttctaccacgccagaatcgaactcctcaaggggaacctcgaagaagcccaagaggtctttcagaagtgcatcagcgttcaggaagagtggaagcaattccaccacttatgttattgggagctcatgtggatcaacgtgtttcagcagaactggatgcaggcttattactattcggacctgctgtgtaaggaaagtaaatggtctaaagcgacttacgtgtttctgaaagccgcaatcttaagcatgctgccagaagaggatgttgtggctacaaacgagaacgtggtaactctcttccgacaggtcgactcactgaaacaaagaatcgcaggaaaatctatccctacagaaaaattcgctgttcggaaggcccggcgctactcagcctccctgcctgctcccgtcaagctgatcctcccagctttagagatgatgtacgtatggaacggcttcagcatagtgagcaaacgtaaagacttgagtgagaatctgcttgtcacagtggaaaaagctgaagccgccctccagagccaaaattttaatagctttagcgttgacgatgagtgtctagtcaagttgttgaaggggtgctgtctcaagaatttgcaacgacccctacaggccgaactgtgttacaaccacgtcgttgaatccgagaaacttttaaagtatgaccactacctggtgccctttactctttttgaattggcgagtttatacaagtcacagggggaaatcgataaagctattaagtttctcgaaacggcccggaacaactacaaggactactctctcgagtcgcggctgcactttagaatacaggccgccttacacctttggcgcaagccatccagcgactag

SEQ ID NO: 137679 - DNA, 1851 bp, synthetic construct
  misc_feature 1..1851: note = Description of Artificial Sequence: Synthetic coding sequence
  source 1..1851: mol_type = other DNA
atggcgcttctaggaagccgcgctgaactggaagcagacgaggatgtcttcgaagatgcgctggagaccatttccatatcgtcccactcagatatggctacttcaagcctccactttgcttcatgtgatacccagcaagcacctaggcagagaggcgctagtaccgtctccagcagttccagtacgaaggttgatcttaaaagtgggctcgaggagtgcgcagttgctttaaatctgtttctctccaacaagttcactgatgccctggaactcctgcgaccgtgggcaaaggaaagtatgtaccatgccctgggctacagcaccattgtggtgctccaagccgtactgaccttcgaacagcaggacattcagaatggaatctctgctatgaaggacgctctgcaaacatgccaaaaataccgcaagaagtacacagtcgtcgagtcgttctctagcttgctttctagaggaagcctggagcagttgtctgaagaggaaatgcacgccgaaatatgctacgcggagtgtttgttacagaaggcagcacttacctttgtgcaagacgaaaatatgatcaacttcatcaaagggggactgaaaatccgcactagctaccagatatataaagaatgtctctctatcctgcacgagattcagaagaacaaactgcagcaggaattcttttatgaattcgaaggcggcgtcaaactgggctccggggcatttaatctcatgctttctttgttaccggcacgtataatcaggttgctcgagtttatcgggtttagcgggaaccgcgaacttgggctcctccagctgcgggagggcgcttctggtcgctctatgagatccgccttgtgttgtctcacaatcctggcttttcacacatacatatcacttatattgggtacaggagaagtgaacgttgctgaagcggagcgcttgttagcgccatttctgcaacagttccccaacggctcgttagtgttgttttaccacgcaaggatcgaattgctgaagggaaatctggaggaggcccaggaggtgttccagaagtgtattagcgtacaagaagaatggaagcagttccaccatctttgttattgggagctgatgtggattaacgtgttccagcaaaactggatgcaagcatattactatagtgacctgctgtgtaaagagtctaagtggtcgaaagcgacttatgtatttctgaaagctgctatcctgagtatgctgccagaagaagatgtggtcgctacgaatgaaaacgtagtgacccttttcaggcaggtggatagcctaaagcaaaggatagcagggaaaagcattccgacggagaaatttgcagtgaggaaggcaaggaggtacagtgcctctctgcccgcccctgtaaaactcattctgcctgctcttgagatgatgtacgtgtggaacggcttcagtattgtaagcaagcgcaaggacctgagcgagaacctcctggtgaccgtcgaaaaagcagaggccgcgttacaatctcagaacttcaactcctttagtgtggatgatgaatgcttggtaaaacttcttaagggatgctgccttaaaaacctgcaaaggcctctgcaggccgagctgtgctataatcatgtagttgaaagcgagaagctccttaaatacgaccattacctggtgccattcactctgttcgagctcgccagcttatacaaaagccagggcgaaattgataaagccatcaagttcttggagaccgcacgtaacaactataaggactatagccttgagtcgcggctccattttagaatccaggcggctctgcacctatggcggaagccatccagcgattag

SEQ ID NO: 137680 - DNA, 2010 bp, synthetic construct
  misc_feature 1..2010: note = Description of Artificial Sequence: Synthetic coding sequence
  source 1..2010: mol_type = other DNA
atggatgctgtcctcgcatgccgcttgagggggagaggaaaccgggttgcagctctgagaccacggcccagacccggcggaagcgctggcccttcgccttttgcccttttatgtgcgggactctctcctgaaccacgagccggagtcggatccgagtttcccgcctggtttctaggcgggtcctcccaacgacgtaacatggccctgcttggcagccgggcggagctagaggccgatgaagatgtgtttgaggatgcattagagacgatttcgatcagtagccacagtgacatggcgacaagctccttgcattttgcttcgtgtgacacacagcaggcgccacggcagagaggcgcttctactgtgtcttcctcttcctcaaccaaggtagatttaaaaagcggtttagaggagtgtgcagttgccttaaacctctttctgtcgaacaaatttaccgacgcactggaacttctccggccctgggccaaggaaagcatgtaccacgcactggggtacagcaccatcgtggttctgcaagcagtcctaacattcgagcagcaggacattcagaatggaatctctgcaatgaaagatgcactccagacctgtcaaaaataccgcaaaaaatacacagtggtggagtcctttagttctctcctgtcccgcgggtccctggagcaacttagcgaggaagagatgcatgctgaaatctgctatgcggagtgcttgcttcagaaggcggccctgacctttgtgcaagatgagaacatgatcaattttatcaaagggggtttgaaaattaggaccagttaccagatctacaaggaatgcctgtcaatcctccatgagattcaaaaaaataaactgcagcaggaattcttttacgagttcgaagggggcgtgaagctcggttcgggcgccttcaatcttatgctaagccttttgcccgccaggattattcgcctgctggagtttataggtttctccggaaacagggagctgggcctcctacagctccgggagggtgcttcaggtaggtcaatgagatcggccctgtgttgccttacaatcctcgcctttcacacctatatctctctaattcttggaaccggtgaggtcaacgtggctgaggccgagagactgttggccccgtttctgcagcaattcccaaatgttagatccgtcttccagtcagcccaggaggtttttcagaaatgcatttctgtccaggaggagtggaagcagtttcatcacctctgctattgggaattgatgtggatcaatgtctttcagcagaattggatgcaagcttattactacagtgatctcctctgtaaagagagtaaatggagtaaggctacctacgtcttcttgaaggcagcgatcctctcaatgctgcctgaagaagatgtcgttgccacgaatgagaatgttgtcactctgttcaggcaagtggattctcttaaacagcggatcgccggtaaatctatccccacagagaaattcgccgttagaaaagccagaaggtattcagcaagcctccccgccccagtcaagcttatcctccccgccctcgaaatgatgtatgtctggaacgggttctcgattgtctccaagcggaaggacctctctgaaaacctcctagtaactgtggagaaagccgaggccgcacttcagagccagaacttcaatagtttctcagtggatgacgaatgcctggtaaagctcctgaaaggatgttgtttgaaaaacctgcagagaccactgcaagcggaattgtgctataaccatgtggtggagagcgagaaactcctgaaatacgatcactacctggtgcctttcaccttgtttgaattggcttccctatataagtcccaaggggagatcgataaggcaatcaagttcttggagactgcgcggaataactacaaagactatagcctcgagagcagactgcacttccgtattcaggcagcgctacacctatggcgtaaaccttcctccgattag

SEQ ID NO: 137681 - DNA, 2049 bp, synthetic construct
  misc_feature 1..2049: note = Description of Artificial Sequence: Synthetic coding sequence
  source 1..2049: mol_type = other DNA
atggatgctgtgctggcttgtcgcctgcgcggccgcggcaatagagtggccgcactacggccccgccctcgtccagggggatctgcgggtccttctccattcgcattgctgtgtgcgggattatcacccgagcctcgggccggagtgggatctgagttcccagcatggtttctaggcggttcaagccagcggcgcaacatggcattgctggggagtcgagccgagcttgaggctgacgaggacgtatttgaggatgcactagaaactatttccatctccagccacagcgatatggccacttcatccctgcactttgcctcctgcgacacgcagcaggcccctagacagcggggcgcatccaccgtatcttccagttcttcgacaaaggtggacctcaagtccggacttgaagaatgtgcagtggctctcaacctctttctctccaacaaatttactgacgctctagaactgctgcgcccctgggcaaaggagtctatgtatcacgcgctgggctactctacaatagtcgtattacaggctgtgcttacctttgagcaacaggatatccagaacggaatcagtgctatgaaggacgctctgcagacatgccaaaaatataggaagaagtacacggttgttgaaagtttcagctctctcctgtcccggggctctctggaacaactttctgaagaagaaatgcatgcagagatctgttatgcagaatgtctccttcagaaagctgctctgacctttgtgcaggacgaaaatatgatcaactttattaaaggtggcttgaagatacgtacatcttaccagatttacaaggaatgcctctctatcctgcacgaaatacagaaaaataaactccagcaagaattcttctacgaattcgagggtggcgttaagctggggagcggcgccttcaacctcatgctctctttgctccccgcacgtattattagattgctggagtttatcggattctccggtaaccgcgagctgggacttttacaactccgggaaggggcctcaggcaggagcatgaggagcgctctgtgctgtttgaccattttggcctttcatacttatatctctctcatactaggaacaggcgaggtgaatgtcgcggaagcggagagactcctcgccccattcttacagcaattccctaacggttctttggtcctcttttaccacgcaagaattgaactcctgaaaggtaatctggaagaagctcaggaagtatttcagaagtgtatctcagtacaagaagaatggaagcagttccaccacctgtgttattgggagttgatgtggatcaacgtgtttcagcagaattggatgcaggcttactattactccgatcttctctgcaaggaaagcaaatggagcaaagcaacatatgtttttcttaaggccgcaatcctctccatgctgcctgaagaggatgttgtcgccactaatgaaaacgttgttactttatttcgacaggttgactcccttaaacagcggatcgctgggaagagtatccctactgaaaagttcgccgtgcgcaaggcacgccgttactctgcatcacttccagctcccgttaaactgattctgcctgcactggaaatgatgtacgtgtggaacggcttttcgattgtctcaaagcggaaggatctgtctgaaaacctccttgttacagtggaaaaagccgaagcggcgcttcaatcgcaaaacttcaatagttttagcgtggacgatgagtgtctcgtaaagctgttgaagggatgttgtctgaagaacctgcagagacctctacaggccgagctatgttataatcatgtcgtcgagtctgagaagttgctgaagtacgatcactacctggtgcctttcaccttatttgagctcgcctccctctataaatcccagggagaaatcgacaaagccattaaattccttgaaacagctcgcaacaactataaggactactctctggagtccagactgcactttagaatacaggcagctttgcacctgtggagaaagcctagcagtgactag

SEQ ID NO: 137682 - DNA, 585 bp, synthetic construct
  misc_feature 1..585: note = Description of Artificial Sequence: Synthetic coding sequence
  source 1..585: mol_type = other DNA
atggctttacttggatctcgtgcagagctggaggctgatgaagatgtgtttgaagacgcactcgaaactatttcgatctcttcgcattctgatatggcaaccagctcattacactttgcctcttgtgacacccagcaagctccccgtcagcggggggcttccaccgtttcatcatcatcttccactaaagtcgacctgaagagtggcctggaagagtgcgctgtggctttgaacctgttcctaagtaacaagtttacagatgcgctcgaactgttaagaccatgggccaaagaatctatgtaccatgctcttggatattcaaccattgtggtgttacaggccgtgctgacatttgagcaacaggatatacaaaatggtatctctgcaatgaaggatgcattgcaaacgtgtcaaaaatatcgcaagaagtataccgtggtcgaaagtttcagctcattgctgagcagaggaagcctggaacagttatccgaggaggaaatgcatgccgaaatctgttacgctgaatgcctgctccagaaggctgccttaactttcgttcaacgaatgtctttttaccctgcttag

SEQ ID NO: 137683 - DNA, 1164 bp, synthetic construct
  misc_feature 1..1164: note = Description of Artificial Sequence: Synthetic coding sequence
  source 1..1164: mol_type = other DNA
atggagcaaccaggtcaggatccaaccagcgatgacgtcatggactctttccttgagaagtttcagtctcagccttatcgcggaggttttcacgaggaccagtgggaaaaagaatttgaaaaagtccccttatttatgtcccgcgccccctccgagatcgaccctagagaaaaccctgacctggcatgcttacagtcaattatcttcgatgaagagcggtctccggaagaacaggccaagacctacaaggatgaaggtaacgattactttaaagaaaaagactataagaaggctgtcatctcttacacagagggcctcaaaaagaaatgcgcagacccggacctgaacgccgtcctttacacgaatcgagctgccgctcagtactatttggggaacttcaggagtgccctcaacgatgtcacagctgcccgcaaattaaaaccctgccacctgaaagcgatcattagaggtgctctctgtcatctggagctgaagcacttcgctgaggcagtcaattggtgtgatgaaggactgcagattgacgcaaaagagaaaaaacttttagagatgagggcaaaggccgataagctcaagaggatcgaacagcgggatgtccgtaaggccaacctgaaggaaaagaaagagcgcaatcagaacgaagcacttctgcaggccatcaaggctaggaatatcagattatccgaggctgcttgcgaagacgaagactctgcctcagaggggttaggcgaactcttcctagatgggctctcaacggaaaacccccacggtgctcggctgtccctagacggtcagggcaggctgtcctggcccgttcttttcctgtaccctgagtatgctcaaagcgacttcatttccgcattccatgaggacagcagatttattgatcacctgatggttatgtttggagagactccaagttgggatttggagcagaagtactgtcccgataacctggaggtctatttcgaggatgaggacagggcggaactttatagagtccctgctaaatcaaccctcttgcaggtgttacaacaccaaagatacttcgttaaggctctgacccccgcgtttctagtctgtgtcggaagctctcccttttgcaagaactttttacgcggcagaaaagtgtatcagattcgctag

SEQ ID NO: 137684 - DNA, 1515 bp, synthetic construct
  misc_feature 1..1515: note = Description of Artificial Sequence: Synthetic coding sequence
  source 1..1515: mol_type = other DNA
atggccacacgggacgttgtactgtctcgggtgcctgaacaggaagaggatcggacagtgtcgcttcaaaacgcagctgctatttacgacctgctttcaatcacactagggagaagaggccagtacgtcatgctgagcgaatgtcttgaacgtgctatgaagttcgcctttggcgagttccatctctggtatcaagtcgcattaagcatggtggcttgtggcaaatctgcctatgccgtttcgttgctcagagagtgcgtgaagctgcggccgagcgatcccaccgttccactgatggccgccaaggtgtgcattggcagcttaagatggctcgaggaagccgagcattttgcgatgatggtgataagcctgggagaggaagccggggagttcctccccaaagggtatttggcactgggactgacctattccctccaggccacagacgctacactgaagagtaagcaggacgagctccacaggaaggctctccaaacgttagagcgcgcccagcagcttgcaccatccgacccccaggtcatcctgtatgtgtctctacagctggccctcgtgcgccagataagctccgctatggagcagctccaagaggccttaaaagtgcgcaaggacgatgcccacgcactgcaccttttagccctgctgttctcagcacagaaacatcaccagcacgcccttgatgtagtgaatatggcaataaccgagcatcccgagaacttcaacctcatgttcaccaaggtcaaactggaacaagtcctcaagggccccgaagaagctttggtcacctgccgtcaggttctgcggctttggcaaacactgtatagcttctcccagcttggaggcctggaaaaggacgggagcttcggtgaaggcctcactatgaaaaagcagtctggtatgcatctcaccctccccgacgcccacgatgccgactccgggagcaggcgtgcatcaagcatagctgcctcgcgcctggaggaagccatgtccgagctgactatgccaagtagcgtgctcaagcaggggcccatgcagttgtggaccacactggaacagatctggctccaggcggctgagcttttcatggaacagcagcacctgaaggaggccgggttctgcatacaggaggcagccgggctgttccccacctctcatagcgtactgtacatgagaggtcgtctggccgaggtcaaaggcaacctcgaagaggctaaacagctctataaagaggcattaactgttaaccccgacggcgtacgcatcatgcacagtttgggcttgatgttgtccagattaggccataagtcactggcgcagaaagtgctcagagacgctgttgaaagacagagcacttgccatgaggcctggcagggcctgggggaagtccttcaggcacagggacagaacgaggctgccgtcgattgtttcctcaccgccttggagttagaagccagctcccctgttctgcccttttctataattccccgtgaattgtag

SEQ ID NO: 137685 - DNA, 2577 bp, synthetic construct
  misc_feature 1..2577: note = Description of Artificial Sequence: Synthetic coding sequence
  source 1..2577: mol_type = other DNA
atggctgccaagggagctcacggttcctatctcaaggtggagtccgagttagagcgttgcagggccgagggccactgggaccggatgcccgagctagtaagacaactccagactctctccatgcccggcggtggcgggaacaggcgcggctcaccctcagccgcctttactttccctgataccgatgactttggcaagctgctactcgccgaggctctccttgaacagtgtttaaaggagaatcacgccaagatcaaggattctatgccccttctggaaaaaaacgagcccaaaatgtcagaggccaagaattatctgagttccatcttaaatcacggaaggctgtcacctcaatatatgtgcgaagctatgcttatcttgggcaaacttcactacgttgaaggctcttacagagatgctatctcaatgtacgctcgcgctgggatagacgacatgtctatggagaacaaacctctataccaaatgcggctcctcagcgaggcttttgtcattaagggcctgtctcttgagagactgcccaacagcattgctagtagattcaggctgaccgagcgagaagaagaagtcatcacctgttttgaacgcgccagctggatcgcacaggtctttctgcaggagttagaaaaaaccacaaataattctacatcgcgccacttaaaaggatgtcatccactcgattacgagctgacatatttcctggaggccgcacttcagtccgcttacgtgaagaatctgaagaaggggaatatagtgaagggtatgcgagagctgcgggaggtactcaggacggtggagaccaaggctacacagaactttaaggtgatggccgctaagcatctggccggcgttcttttacacagtctttccgaggagtgctactggagccccttatctcaccccctgcctgaattcatgggaaaagaggagtcatctttcgcgactcaggctctgcggaagcctcacctgtatgaaggagataacttatactgtcccaaagacaacatcgaggaggcattgctgctgctgctcatctctgaaagcatggccaccagagacgttgtcctgtctagagtgcccgaacaggaggaggatcgcacagtcagcctgcagaacgcggcagctatttatgatttgttgtcgattacacttgggcggaggggacagtatgtcatgctgtctgagtgcttggagcgtgcgatgaagtttgcattcggagagttccatttgtggtatcaggtggcattgtccatggtcgcatgtggaaagtctgcctatgcagtgagccttctgcgggaatgcgtgaaacttaggccgagcgaccccactgtgccactgatggctgcaaaggtttgtatcggtagcctgcgctggttggaggaagcggagcactttgctatgatggtcatttctctcggagaagaagcaggcgaattcctgcctaagggctaccttgcgctgggcctcacttacagcctgcaggccacagacgccacacttaagtctaaacaggacgaattgcacagaaaagcacttcagacactggagagggcccaacaactggcccctagtgatccgcaggtgattttgtacgtgtctttgcagctggctcttgttcgccaaatcagttcagctatggagcagctgcaagaggcgttgaaggtcagaaaggacgatgctcacgctctgcacttattagcactgctgttctctgctcagaagcatcaccagcacgcactggacgtggtgaacatggccatcaccgaacaccctgagaatttcaatctgatgttcaccaaggtcaaattggagcaggtcctgaaaggtccagaggaagccctggtgacctgccgccaggtcctgcgcctgtggcagaccctgtactcattctcccagctcggaggcttggaaaaagatgggtccttcggcgaaggcctgaccatgaaaaagcagtccggtatgcaccttaccctgccagacgcccacgatgctgactccggcagtcgcagggcctcttcgatcgctgccagccgtctggaggaggctatgagcgagctgaccatgccctcctccgtgcttaaacaggggcccatgcagctctggaccactttagagcaaatctggctccaggccgccgaactgtttatggagcaacagcacttgaaggaagctggtttctgcatccaagaagcagctggcctgtttccaacgtcacacagcgtcctctacatgcgaggtcggttggccgaggttaaaggaaatctcgaagaggccaagcaactgtacaaagaggccctgaccgtgaaccctgatggcgttagaattatgcatagcctgggactgatgttgtctagacttgggcataaatctctcgcacagaaggtgctgcgggatgccgttgagagacagagcacttgtcatgaggcttggcagggcctcggcgaggtccttcaggctcagggtcagaatgaggctgctgtggactgttttctaactgcgcttgaactggaggcttccagcccagtgctgcctttttcaatcatcccgcgagaactctag

SEQ ID NO: 137686 - DNA, 2058 bp, synthetic construct
  misc_feature 1..2058: note = Description of Artificial Sequence: Synthetic coding sequence
  source 1..2058: mol_type = other DNA
aaaaagaaaattaacttttttaagaaacctcacagcctgagcttaagaaagaaaagggaggaggaggttattacttgtttcgagcgagcttcgtggatcgcccaagtgttcctccaagaactcgaaaagaccactaacaattcaacctctcggcatttgaaggggtgccaccctttggattacgaactgacttattttctagaagctgcactgcagagcgcttacgtgaagaacttaaagaagggaaacatcgtgaaggggatgagagagttgcgcgaagtccttcggacggtggagaccaaggccacacagaactttaaggtgatggccgcaaaacacctggccggtgtcctactgcactccctctctgaagagtgttattggtcaccattgagccatcctttgccagaattcatggggaaggaagagtccagcttcgctacccaggctctgcgcaagcctcatctctatgagggagataatctgtactgtcctaaagacaacattgaagaggccctgctcctcctcctcatcagcgaatctatggctacccgtgacgtggtcttaagtcgcgtgccggaacaggaggaagaccgtactgtgagcctgcagaacgctgctgccatctacgacctccttagcattacgcttgggcggcgaggacaatacgtgatgctcagcgagtgcctggagagggcaatgaagttcgcgttcggcgaattccatctttggtaccaagttgccctcagtatggtagcctgtggtaaatcagcctacgctgtaagcctgttaagggaatgtgtcaagctaagaccctcagatccaaccgtcccccttatggcagccaaggtgtgcatcgggtcactaaggtggctcgaggaggccgagcacttcgccatgatggtgatcagtttaggagaggaggccggagaattccttcccaaaggatatctggcactggggctgacgtattctctacaggctacagatgccacactcaaatctaaacaagacgagttacatcgcaaagcattgcagactttagaacgggcccagcagctggcgcccagcgacccccaggtcatcttgtatgtctctctccaattggcattggttcgccagatttcctccgccatggaacagttacaggaagccctgaaagtgaggaaagacgatgcccacgctctccatctcctcgcactgttgttttctgcccaaaaacatcaccagcatgccctggacgtggtcaacatggccattacggagcatcccgagaattttaacctcatgttcacaaaggtaaaattggagcaagtcctgaagggacctgaggaggcactggttacttgtaggcaggtgctgagactttggcagactctgtattccttttcacagctgggcggattggagaaagatggtagctttggcgaggggctcacaatgaagaagcagagcggtatgcacctcacactgccagacgcacatgatgcagactctggaagcagaagggcctccagtatagcagcatcacgactcgaagaggcaatgtctgagctgactatgccatcctcagttctgaaacaggggccgatgcagctctggacgactttggagcagatttggttacaggcagcagaactattcatggagcaacaacacctcaaggaggcaggtttttgcattcaggaggcagcagggctgttccctacctcacacagtgtactgtacatgagaggccggttggccgaagtgaaggggaatctggaggaggcgaagcagctgtacaaagaagcactgacagtgaatcccgacggagtgagaatcatgcatagcctggggctgatgctgtctagactgggacataagagtctggctcagaaggtcttaagagacgccgttgaacgccagtctacatgccacgaggcatggcagggcctgggggaagtgctgcaagctcagggacaaaacgaagccgctgtggattgctttctcacagcactagaactagaggcatcatcacccgtcctccccttcagcataatcccccgggaactatag

SEQ ID NO: 137687 - DNA, 441 bp, synthetic construct
  misc_feature 1..441: note = Description of Artificial Sequence: Synthetic coding sequence
  source 1..441: mol_type = other DNA
atggcagccaaaggagcccacggaagctacttgaaggtcgaaagcgagctcgaaagatgtcgcgcagagggccactgggataggatgcctgagctggtgagacaactccaaactctgagtatgcccggcggcggcggaaaccggagaggctcccccagtgcagcttttacctttcccgacaccgatgactttggcaagcttttgctggcagaagcgctgctggaacagtgcctgaaggaaaatcacgcgaagataaaagactcaatgccccttctggaaaagaatgagcctaaaatgtccgaagctaaaaattatctgtcttctatactcaaccatggacgtctgagcggcttggctgtactgctgagactagtttccaactcctgggcccaggccatcttgttattgcaaccccctgaagcattagggctccaagagtag

SEQ ID NO: 137688 - DNA, 1596 bp, synthetic construct
  misc_feature 1..1596: note = Description of Artificial Sequence: Synthetic coding sequence
  source 1..1596: mol_type = other DNA
atgagctccgagatggagcccctgctgttggcctggtcttactttcggcgccgcaaatttcagctgtgcgctgatctgtgcacacagatgctagaaaagtctccgtatgaccaggcagcctggattctgaaggctcgcgctttaactgagatggtgtacatcgatgagattgatgtggaccaggagggaatcgctgagatgatgcttgatgaaaacgctatcgctcaggtgcccaggcctggcacctctcttaaactccccgggacgaaccagacaggaggcccctcccaggccgtccggccgattacacaggcaggtagacctattaccggattcttgagaccttccactcaatctggtcggcctgggactatggaacaagccattcgaacgcctagaactgcctatacagctcgccccatcaccagctcctccggaaggttcgtgaggcttggaaccgcttccatgcttacaagtccggatggaccctttataaatctaagtcgcctgaacttgacaaaatactcacagaaacctaagctggccaaagccctcttcgaatatatttttcatcacgaaaacgacgttaagacgattcacctggaggacgtggttctacacctgggaatatacccgttcctgctacgcaacaaaaaccatatcgagaagaacgctctggaccttgcggccctgtctacagaacacagccagtataaagactggtggtggaaagtgcagataggcaagtgctactaccgcctgggcatgtatcgtgaggccgagaagcagttcaagtctgctctgaaacagcaagaaatggtggacacattcctgtacttagctaaagtttacgtttccctcgaccagccagtcactgcattgaatctgttcaagcagggcctggacaaattccccggagaggtcacgctgctctgtggcatcgcaagaatttacgaggagatgaacaacatgagctccgctgcagagtactataaggaagtgttgaaacaggacaatacccacgtcgaagccattgcttgcatcgggagtaaccatttttattcagatcagcccgagatcgccttgcgcttctaccgccgcctcctccagatgggaatctacaacggccagctatttaataatctgggtctatgttgcttttatgcgcagcaatatgacatgaccctaacatcgtttgaacgggccctgagcctagctgaaaacgaggaggaggccgcggatgtctggtataatctggggcatgttgcagtcggaatcggggacaccaatctggcgcatcagtgcttcaggctggcgctcgtgaacaacaataatcacgccgaagcatataacaacctggcagtccttgaaatgcgcaagggacacgtcgagcaggcccgcgccctattgcagaccgccagcagtttggccccccacatgtatgaacctcactttaactttgcgactataagtgacaaaatcggggacctgcaaagaagctatgtcgcagctcagaaatctgaggccgcttttccagatcacgtggacacccagcaccttatcaagcagctgaggcaacattttgccatgctgtag

SEQ ID NO: 137689 - DNA, 636 bp, synthetic construct
  misc_feature 1..636: note = Description of Artificial Sequence: Synthetic coding sequence
  source 1..636: mol_type = other DNA
atgtcgtccgagatggagccattactcctcgcttggtcatattttcggagacggaaattccaactttgcgctgacctgtgtactcagatgctcgagaagagtccatatgatcagaagatttcctgggcctggtggcacgtacccgtcatcccagccacctgggaggccgaagccggcgagctgctggagccccggaagcgacggcttcaacaggccgaaataacccctctttactcatctctcggaaacaaaagtaagactcctagtcagaaggccgcatggattctgaaggcccgagctcttacagagatggtgtacattgacgagattgacgtcgatcaagagggtatcgcagagatgatgctggacgagaatgccatcgcccaggtcccaagaccaggcaccagccttaagttgcctggtaccaaccagaccgggggaccttctcaggcggcaaaccacacttcttggaagacacattaccgatttccgcaggcccagcacgcagaatggaaggccagacactatggaacaggctatcaaaatacgcagaatagactccatagcccaccatatcatcaactacttaggaagatctgtcaagccgggaatggttttcatgcctacaagtcatag

SEQ ID NO: 137690 - DNA, 1518 bp, synthetic construct
  misc_feature 1..1518: note = Description of Artificial Sequence: Synthetic coding sequence
  source 1..1518: mol_type = other DNA
atgtcaagcgaaatggaacccttgctacttgcctggagttatttcagacgccgtaagttccagttatgtgctgacctgtgcacacaaatgcttgagaaatccccatatgatcaagctgcttggattctgaaggctcgggctctcacagagatggtctacatcgatgagattgacgtcgaccaggagggaatcgccgaaatgatgctcgatgagaatgcaatcgcacaggtgcctcgacctggtaccagtctgaaacttccaggaacgaatcagactgggggacccagccaggccgtgcggcccatcacgcaggccggaaggcccatcaccgggttcctccgccctagcacccaatctggcaggccggggacaatggaacaagccattcggacccctcggactgcatatacagccagacccattacctcttcttccggacggtttgtccgtctggggacagccagcatgctgacatccccagacggtcccttcattaacctctccaggctgaatctgaccaagtatagtcagaaacccaagctggcaaaggccctgtttgaatatatcttccatcatgaaaatgatgtcaagaccgccctcgacctggcggcacttagcaccgagcacagccagtacaaggactggtggtggaaagtgcaaattgggaaatgttattatcggttgggcatgtatcgggaagctgagaaacagtttaagagtgccctcaaacaacaagaaatggtagacaccttcctgtaccttgcgaaagtgtatgtgagtctggaccagccagtgactgcacttaacttgttcaagcagggcctggacaagtttccaggcgaggttacactgttgtgtggaatcgccagaatctatgaagaaatgaataacatgtcttcggctgccgaatattataaagaggtgttgaagcaggacaatactcacgtcgaagccatcgcttgtataggctctaaccacttctactccgatcagccggagatcgctctgcggttttatcggcgcctactgcagatggggatctataatgggcagctcttcaataatctggggctctgttgcttttatgcccaacagtacgacatgactcttaccagctttgaacgcgcccttagcttggccgaaaacgaagaggaggctgcagatgtatggtacaaccttggacacgttgctgttggcatcggggacaccaacctggcacatcagtgctttcgcttggcgctagtcaataacaataatcacgcagaggcttacaacaatcttgcagtgctggaaatgaggaaaggtcacgtcgaacaggcacgggccctgttgcagacggcctctagcctggcaccgcacatgtacgagccccattttaactttgctacaatatccgacaagattggcgacctgcagaggagctatgtggccgctcaaaagtctgaggcagctttccctgaccacgtggacacacaacacctaattaaacagctgcgacagcattttgcgatgctgtag

SEQ ID NO: 137691 - DNA, 1428 bp, synthetic construct
  misc_feature 1..1428: note = Description of Artificial Sequence: Synthetic coding sequence
  source 1..1428: mol_type = other DNA
atgagcagtgagatggaaccgcttttattagcctggtcttattttagaaggcgcaagttccagctctgcgccgatctctgcacccagatgctcgaaaagtctccgtacgatcaggcagcctggattctaaaggcccgtgcgctgacagagatggtgtacatcgacgagatcgacgttgaccaggagggtattgctgaaatgatgctcgacgagaatgcgatcgcacaggtcccaagacctggaacttctctcaagctgcctggtacaaatcagacaggaggtccaagtcaagctgtacggcccatcacacaggctggcaggcctatcaccggatttcttaggccctcaactcagtccgggaggcctggaacaatggaacaggccataaggacacccagaaccgcctacaccgctagacccattaccagctcatcagggagattcgtgaggctcggcaccgcgctgttcgagtatattttccaccatgagaatgacgtgaagacggctctcgacctggcagctctatcaaccgagcactcacagtacaaggactggtggtggaaagttcaaatagggaagtgttattatagattgggcatgtatcgggaggcggagaaacagtttaagagcgccctgaagcagcaggagatggtggacacttttctgtatctcgcaaaggtgtatgttagcctggaccagccagtcacggctcttaatctctttaagcagggacttgataaattccccggcgaggtgaccctcctgtgcggtatcgccaggatctatgaagagatgaataacatgtcctcggccgccgagtattataaagaggtgctgaagcaggacaatacgcatgtggaagccattgcatgtatcggctccaaccacttctactcagaccaaccggaaatcgctctaaggttctatcggaggcttctccagatgggcatctacaatggacagctatttaacaacctgggactctgttgcttctatgcacagcagtatgacatgactctgacttctttcgaacgggcattgagtttagccgagaacgaagaggaggctgcagatgtgtggtataacttaggacatgtcgccgtcggcatcggagataccaatctggcccaccagtgtttccggctggccctggtcaacaataacaaccacgctgaggcttacaataacctcgccgtcctggagatgcgcaagggacacgtcgaacaggccagagcgttgctgcagaccgcgagctctctcgcccctcacatgtacgaaccccactttaacttcgctacaatttccgataagattggtgacctacagagatcctatgtggccgcacagaagtcagaggcagcatttcctgaccacgtagatacacaacatctgatcaagcaattgcgccagcacttcgctatgctttag

SEQ ID NO: 137692 - DNA, 753 bp, synthetic construct
  misc_feature 1..753: note = Description of Artificial Sequence: Synthetic coding sequence
  source 1..753: mol_type = other DNA
atgtccagcgaaatggaacccctgcttctggcttggtcctattttaggagaaggaagttccaactttgtgctgacctatgcactcaaatgcttgaaaaaagtccatacgaccaggaaatgaacaacatgtccagcgctgccgagtattataaagaagtgctcaaacaggataatacgcacgttgaagctatcgcctgcatcggctcaaaccacttttattcagatcaacccgaaatagctcttaggttctaccgccgtctgctgcaaatgggaatctataatggtcagcttttcaataatcttggactctgttgcttctatgctcagcagtatgacatgacgcttactagcttcgaaagagccttgtcccttgctgagaacgaagaggaggcagcagacgtttggtacaacctgggccatgtggccgttgggataggagacacaaatctagcgcatcagtgcttcaggctcgctcttgttaacaataacaatcatgcggaggcgtacaataacttggccgttctggagatgcgaaaggggcatgtcgaacaggcaagggctttgctgcagacagcttcaagcctcgcgcctcatatgtatgagccccattttaattttgccaccatctctgacaaaataggagacttacaacgcagctacgtcgccgcccagaagagtgaggctgccttccctgaccacgtcgatacccaacacctgataaagcagttgcggcaacacttcgcaatgctctag

SEQ ID NO: 137693 - DNA, 954 bp, synthetic construct
  misc_feature 1..954: note = Description of Artificial Sequence: Synthetic coding sequence
  source 1..954: mol_type = other DNA
atgatcttgtcttatgaagtgatactgcacgctttggacctcgcagcgctcagcaccgaacactctcagtacaaggactggtggtggaaagtgcaaattggaaaatgttactatcggcttggtatgtatcgggaagcggagaagcaattcaagtcagccctgaaacaacaggaaatggttgatactttcctttacctggcaaaggtgtatgtgtctctggaccaaccggtgactgctctgaacctttttaagcaaggcctggataaattccctggagaagtcacgctcctctgtggcattgccagaatctatgaagagatgaataatatgagctcggcggccgaatactataaggaggtgctgaagcaggacaacacacacgtcgaggctatagcttgcatcggatcaaaccacttttattcagaccaacctgaaatcgcactgaggttctataggagacttctgcagatgggaatttataatggacaactgttcaacaacttggggctatgttgcttctatgcacagcagtatgatatgaccttaacgagcttcgagcgcgctctaagtctcgccgaaaatgaagaggaagctgctgacgtttggtacaatctgggccatgtcgctgtgggtattggagacacaaacttggcccaccagtgttttcgcctggcactcgttaacaataacaaccatgctgaggcatacaacaatctggccgtgctggagatgcggaaaggacacgtggagcaggctcgggctcttttgcagacagcctcttccctggccccacatatgtacgaaccccacttcaactttgccactatttccgacaagataggggatttgcaacgcagttacgttgccgcccagaaatccgaagcagccttccccgatcacgtagatacacagcacctgatcaaacaactgcggcagcatttcgctatgctctag

SEQ ID NO: 137694 - DNA, 1548 bp, synthetic construct
  misc_feature 1..1548: note = Description of Artificial Sequence: Synthetic coding sequence
  source 1..1548: mol_type = other DNA
atgtctagcgagatggagccacttctactggcatggtcctattttaggcgacgaaaattccaattgtgtgccgatctatgtacgcagatgttagaaaaaagcccttatgatcaagagccggaccccgagctccctgttcatcaagccgcatggatcttaaaagcccgcgccctcaccgaaatggtctacatcgatgagattgacgtcgatcaggaaggaattgctgaaatgatgctggatgagaacgccatcgcccaggtgccccgtccaggaacctccctgaagcttccaggcacgaaccagaccggtgggccttcacaagccgttcggccaatcacccaggcgggccggcccatcacaggatttctccgtcccagcacacaaagcggtaggcccggcaccatggaacaggcaatccgcacccctagaacggcatataccgccagacctattacctcctcctcaggccgatttgtgcgcctgggtacagcctcaatgttaactagcccagacggcccttttatcaatctctccagattgaacctcactaaatactctcagaagcccaaactggctaaggcgttgttcgagtacatatttcaccacgagaacgatgtcaaaacggccctggatctagccgccctgagcactgaacactcccagtacaaagattggtggtggaaagtgcaaataggaaagtgttattatcggctagggatgtacagagaagctgaaaagcagttcaagtcagcactgaaacagcaggaaatggtcgacacgttcctgtatctcgctaaggtgtacgtgtctctggatcagccagtgacggcccttaatctgttcaaacaggggttagataagttccctggagaggttaccctgctatgcggtatcgctaggatctatgaggaaatgaataatatgagcagcgctgccgaatactacaaagaggtgctgaagcaggataacactcacgtcgaagctattgcctgcattggaagtaatcacttctactctgaccagcctgaaatcgcactgcgcttctatagacgcttgctccagatgggcatctacaacggacaattatttaataacctaggactttgctgcttctatgctcagcaatacgacatgaccttgacaagttttgaacgcgccctgtctctggcggagaacgaagaggaagctgcagatgtgtggtacaatctggggcacgtagccgtgggtatcggggacacaaacctcgcacaccagtgcttcaggctggccctggtgaataataataatcacgctgaggcgtataacaacctggcggtgctggagatgcgtaagggacacgtggaacaggctagggcactgcttcagaccgcctcatctctggcgcctcacatgtatgagcctcatttcaacttcgccacgattagcgataaaattggagatctccagcggtcatacgtcgccgcccagaaatccgaggcggcctttcccgatcatgtcgatactcagcatctgatcaagcagctgcggcaacacttcgcaatgctctag

SEQ ID NO: 137695 - DNA, 831 bp, synthetic construct
  misc_feature 1..831: note = Description of Artificial Sequence: Synthetic coding sequence
  source 1..831: mol_type = other DNA
atgtatagagaggcagaaaagcaattcaaaagtgcactgaagcagcaggagatggtcgacacatttctgtaccttgccaaggtttatgtctcacttgaccagcccgttactgcactcaacctcttcaagcagggactggataaattccctggcgaggtgacactactctgcgggatagcgagaatctacgaggagatgaacaatatgtcttcagcagcagagtactacaaagaagtgctgaagcaggataatacccatgtggaggccatcgcctgcattggcagcaatcatttctactccgatcaaccagagattgccctccgattctaccggcgcctgctacagatggggatctacaacggacagctctttaacaaccttggcctctgctgcttttatgctcagcagtatgacatgactctaaccagtttcgaacgggcattgtccttggctgagaacgaggaagaagcagcagatgtgtggtataatttggggcacgttgcagtggggataggagatacaaatctggctcatcagtgtttccggttagctcttgtgaacaacaacaaccacgctgaggcttataacaatttggctgtgctggagatgcgtaagggccatgtcgaacaggcacgggcactactgcagacggcatccagcctggcgccccacatgtacgaaccacattttaattttgcgacgatctccgataagatcggcgatctgcagagaagctatgtggcagctcagaaaagcgaggccgcttttcctgaccacgtggacacacagcatttaatcaaacaactgagacagcattttgctatgctttag

SEQ ID NO: 137696 - DNA, 348 bp, synthetic construct
  misc_feature 1..348: note = Description of Artificial Sequence: Synthetic coding sequence
  source 1..348: mol_type = other DNA
atgtcttcaccttctagccccttcagggagcagtcctttttgtgtgctgccggcgacgctggcgaggaatccagagtacaggtcttgaagaatgaggtgcggcgcgggagccccgtgctgttaggatgggtggagcaagcttacgcagacaagtgtgtgtgcggtccatccgcaccccccgctcccacgccaccgtcactttctcagcgcgtgatgtgtaacgatttattcaaggtgaacccttttcaactccagcagttcagagcggaccccagcaccgctagcctccttttatgcccgggtgggttggatcacaaactgaatcttcggggaaaagcctgggggtag

SEQ ID NO: 137697 - DNA, 348 bp, synthetic construct
  misc_feature 1..348: note = Description of Artificial Sequence: Synthetic coding sequence
  source 1..348: mol_type = other DNA
atgagctctccctccagtccttttcgcgaacaaagtttcctgtgtgcggccggcgatgcaggggaggagagccgggtgcaggtgttgaaaaatgaggtcaggcgtggctctccggtattactaggctgggttgaacaggcttacgccgataaatgcgtctgtgggccaagcgctcccccggccccaacgcccccaagtctgtctcagcgcgtcatgtgcaacgatctctttaaggtgaatcccttccaactgcagcagtttcgggctgaccccagcacagcctcactcctactctgccctggcggcctcgatcacaaactgaatttaagggggaaggcctggggctag

SEQ ID NO: 137698 - DNA, 357 bp, synthetic construct
  misc_feature 1..357: note = Description of Artificial Sequence: Synthetic coding sequence
  source 1..357: mol_type = other DNA
atggaaggcggcgcatacggtgcgggcaaggcaggcggagccttcgacccatatacattggtgcgccagccacatacaatcttgcgggtggtctcctggctgttcagcatagtggtgttcggatcaatcgtgaacgagggatacctgaattcagcctctgagggcgaggaattttgtatatacaaccggaaccctaacgcctgctcctacggggtggccgtgggcgtgctggcttttctcacctgtttactttaccttgccttggatgtctattttccccagattagttctgttaaggatcgtaaaaaagcggtgctcagcgatatcggtgtctctgcatgggaaatgcattcctag

SEQ ID NO: 137699 - DNA, 1389 bp, synthetic construct
  misc_feature 1..1389: note = Description of Artificial Sequence: Synthetic coding sequence
  source 1..1389: mol_type = other DNA
atggccgcacaaaggcggtccctcttgcaaagcgagcaacaaccttcttggacagatgacctccccctgtgccatctatccggcgttggtagtgcctccaatcgctcatacagtgcagatggaaaaggcactgagagccatcctccagaggatagctggttaaagtttcgctctgagaataattgtttcctctacggcgtgttcaacgggtatgacggcaacagagtgactaacttcgtggcgcagcggctgtccgctgagcttcttttgggccaacttaatgcagagcatgccgaagcagacgtgagacgcgtgctactgcaagcattcgacgtcgtagaaagaagctttttggaaagcatagatgatgctctggccgaaaaagcctccttgcagtcccagttacccgaaggcgtccctcagcatcaactacccccccagtatcagaaaatactggaacggctgaagaccttggagagggaaatatcaggaggagctatggcagtggtggccgtgctgcttaataataaactgtatgtcgccaacgtgggtacaaaccgtgccctgctttgcaagtcaaccgttgacggtctccaggtcactcagctgaatgtggatcacacaactgagaatgaggatgagctttttagactctcacagctagggctcgatgccgggaaaattaagcaagtgggtataatttgcggccaggaatctacacgacgcattggcgactataaagtgaagtatggttacaccgatatcgacttgcttagtgccgccaaatctaagcctattatagctgaaccagaaatccacggcgcacaacctctggacggggttacggggttcctggtccttatgtctgaggggctctataaggccctggaagcagcccatggacccggccaagccaatcaggagattgccgccatgatcgataccgaattcgctaaacagactagtctggatgccgtggcacaggcagtcgtcgatagagtgaagagaatccattcagatacattcgctagtggcggtgaaagagcaagattctgcccccggcatgaggatatgacgttattggtgaggaacttcgggtatccactgggcgagatgagccagcccaccccatcgcctgccccagcggccgggggccgagtgtacccagtcagcgtgccatattcttcggctcagagcacaagcaagacatccgtcacactcagccttgttatgccttctcagggccagatggtgaacggagcacactcagcctccacattagacgaagctacacctacacttaccaaggatccatcacgaccagcctccgacttgaccgccatacctcagtgccaactgaacctccttgggtccctcacaccagggtag

SEQ ID NO: 137700 - DNA, 2082 bp, synthetic construct
  misc_feature 1..2082: note = Description of Artificial Sequence: Synthetic coding sequence
  source 1..2082: mol_type = other DNA
atggcccagggatcccatcagatcgatttccaggtgttgcatgacctcagacagaagttccctgaggtgcctgaagtggttgtgagccggtgtatgctccagaataataataatctcgacgcatgttgcgccgtcctgagccaagaatcgaccaggtatctttatggtgaaggcgacctaaacttcagtgacgatagtgggatctccggcctacggaaccacatgacctctcttaacctggatcttcagtctcaaaatatctaccaccacggcagggagggttctagaatgaacggtagcaggactttgacccattctattagcgacggccaacttcaggggggccagtctaacagcgaattgtttcagcaagagccccagacagcgcccgcccaagtccctcagggctttaacgtttttggaatgtcatcttcaagtggagcatctaacagcgccccacacctgggctttcatctgggtagtaaagggacttcatccttaagccagcaaaccccgaggtttaatccaatcatggtcacactagcccccaatattcagaccggacgcaacaccccaacctctttgcacattcacggcgtgcctccacccgtgttgaattctcctcagggcaacagtatttatatccgtccttacattaccactcctgggggaactacgcggcagacgcagcagcattctggctgggtgtcccaatttaatccaatgaacccacagcaggtttaccaaccaagtcagcccggaccctggacgacatgccccgctagcaaccctctttcacacacctcgtcacagcagccaaatcaacaaggtcaccagaccagccatgtgtacatgcctataagcagtccgactacttcccagccccctaccatacactcatccggatcatcccagtcatcagcccatagccagtacaatattcagaacatctctaccggacctaggaagaaccagatagagattaagttggaaccccctcaacgcaacaactccagcaaactgaggtccagcgggcccagaacatcaagcacctctagctccgtcaactcccaaacactaaaccgaaatcagcccaccgtctatatagccgcaagtccacctaacactgatgaattaatgtctaggtctcaaccaaaggtgtacattagcgccaatgccgccactggcgacgaacaggtaatgagaaaccagcctactctctttatctcgacgaatagcggagcatctgcagcatcaaggaatatgagcggtcaggtttctatggggcctgccttcatacaccatcatcccccaaaaagcagggctatcggcaacaacagcgccacctccccccgcgtagtagtgacccagcccaacacaaaatatacctttaagattaccgttagcccaaataaaccaccagctgtgtctcctggggttgtgtccccgactttcgaactcacaaacctactgaaccatccagaccattacgtcgaaaccgagaacatccaacacctcacagaccccacacttgcgcacgtggatcggatctccgagaccagaaaattgtccatgggatcagacgacgccgcatacacacaagcactgctcgttcaccagaaagcccgcatggagaggttgcagcgcgagctggaaatacaaaaaaaaaagctcgataaacttaagtctgaagttaacgaaatggagaacaatctgactcggaggcgattgaagcgaagtaacagtatttcacagatacctagcctggaggagatgcagcagctacgaagctgcaaccgacaacttcagatagacatcgattgcctgaccaaggaaatagacctttttcaggcccgcgggccccactttaacccatcagctatacacaatttttatgataatatcggattcgtgggccccgtgccacccaagcccaaagatcagaggtcaattattaagacccccaagactcaggatacagaggacgacgagggcgcccagtggaattgtactgcctgtacttttcttaatcaccccgctctcattaggtgcgagcagtgcgaaatgccccggcacttttag

SEQ ID NO: 137701 - DNA, 2082 bp, synthetic construct
  misc_feature 1..2082: note = Description of Artificial Sequence: Synthetic coding sequence
  source 1..2082: mol_type = other DNA
atggcccagggctcccaccagattgacttccaagttctccacgatctccgacagaaattcccagaagttcccgaagttgtggtgtcccggtgtatgctgcagaacaacaacaatcttgatgcctgttgtgctgttctgtctcaggagtctacccgttatctgtatggagagggagatctgaatttttcagatgattcagggatttcgggattgaggaatcatatgacttcactgaatctggaccttcagtcacagaatatttaccaccacgggcgggaagggagccgaatgaacggatcaaggactctgactcactcaatctccgacggccagctccagggcggtcaaagtaatagcgagctgttccagcaggaaccacaaactgcacccgcacaggtgccgcaggggtttaacgtgttcggcatgtcctcttcttcaggagcctccaactccgccccccacctgggttttcatctgggaagcaaaggcaccagctctctcagccaacagacccctcgcttcaaccctatcatggtcacactggcgccgaatatccaaactgggcgtaatacccctacctctctgcacatccatggggtgcccccaccagtgctgaactcaccgcagggtaattctatttacatccgcccctacataaccactcccggaggaaccaccagacaaactcaacaacacagtggatgggtttcccagtttaaccctatgaatcctcagcaggtgtatcagccctcgcaaccaggtccatggaccacttgtccagccagcaatcctctgtcacacactagctctcagcagccaaatcagcagggccaccagacatcacatgtttacatgcccatatctagcccaacaacgtcacagccacctacaattcacagcagcggatcttcacagtcaagtgcccacagccagtacaacattcagaacattagtaccgggcctcggaagaaccagatcgaaatcaaactggagccacctcagcggaataacagctcgaagctgcgaagcagcggaccacgcacatccagtacatcctcttctgtgaactcacagacattaaaccggaaccagcccaccgtgtacatcgccgctagcccaccaaacaccgacgagctgatgagtcggtcgcagccaaaagtctatatctctgctaacgcggcgacaggggatgaacaggttatgcgaaaccagcccacactgtttataagcacaaactcaggagcatctgcggctagccggaatatgtcaggacaagtgtcaatgggtccagctttcattcatcatcacccccccaagtctcgagctataggaaacaattcagccacatcccccagggttgtggtcacacagcccaatacaaagtacacattcaagatcactgtgtcccctaacaagccgccagctgtgagtccaggagtggtttcgcccacatttgaactaacaaacttgctgaaccacccagaccactacgtggaaacggaaaacattcagcacctgacagaccctacactggcacatgtggacagaatatccgagacaaggaaactgagcatggggtctgatgacgccgcttatacacaagcgctgctggtgcatcagaaggctcgtatggaacggctccagcgtgagctggaaatccaaaagaaaaagctcgacaaattgaaaagcgaggtcaacgagatggagaacaatcttacccgtagacgtctcaagagatctaattccataagtcagattccaagcctggaggaaatgcaacagctacgatcttgtaaccgccagctacagattgacattgattgcctcaccaaggagattgacctttttcaagcccgcggcccacacttcaacccttcggccatccataacttttatgataacatcggattcgtcggccctgtccctcccaaaccaaaagatcagcggtccatcataaagactccgaagacgcaagacacggaagacgacgagggagcccaatggaattgcaccgcctgcactttcctaaaccatcccgcgttgatcagatgcgagcagtgcgaaatgcctagacacttttag

SEQ ID NO: 137702 - DNA, 1611 bp, synthetic construct
  misc_feature 1..1611: note = Description of Artificial Sequence: Synthetic coding sequence
  source 1..1611: mol_type = other DNA
atggcacaggggtcccaccaaattgacttccaggtgctccatgacttgagacagaagtttcccgaagtccctgaggtagtggtgtcacgatgtatgctgcagaacaacaataaccttgacgcctgctgcgcggttcttagtcaggaatccactcgctatctttacggcgaaggggatcttaatttttcggacgatagcggcatcagtggtctgaggaatcatatgacatccctgaatctggatctacaatcacagaatatctatcatcatggccgggagggttcaagaatgaacggaagccgcactctcacacactctatttccgacggccagctgcagggaggtcagtccaattcagagctttttcagcaggaaccacaaactgcgcctgcccaagtgccgcagggttttaatgtttttggcatgagtagctcaagtggtgccagcaacagtgccccacatttaggctttcacctgggatctaagggaacatcaagcctgagccagcagacgccccgttttaatccaatcatggtgacattggcaccgaacatccaaaccgggaggaacacaccgacatcactgcatatccacggtgtgccaccgccagtgctgaattcccctcaggggaacagcatatacattaggccatatatcacgaccccgggaggaacaactcgtcagacccagcaacactccggatgggtttcccagttcaatccaatgaatccccagcaggtatatcaacccagccaacccggcccctggaccacctgcccggcatccaaccctttatctcacaccagcagccagcagcctaaccaacagggccaccagaccagccacgtttacatgcctatttcctcacccaccacgtcacaaccacccactatccactcctccggctccagtcagagctcggcccatagccagtataatatccagaacatctccactggcccgcgaaaaaaccaaattgaaattaaactggaaccgcctcaacgcaacaattcttctaagctgcgctcttcagggccccgcacttcgagcactagttctagcgttaatagccaaacactgaacagaaatcagcccaccgtgtatattgctgcgagcccccccaacactgatgagctcatgagtcggtcccagcccaaagtatatatctccgccaatgccgccaccggcgatgagcaggtgatgcgtaaccagcctacactgttcatatcaactaattccggggcctctgctgccagtaggaacatgagtgggcaggtgagtatggggcccgcctttattcaccatcatccaccaaagagtcgcgctattggaaacaattctgcaacctcaccccgggtggtggtgacccagccaaacaccaagtataccttcaaaatcacagtttcaccgaataaacctccagccgtgtcgccaggagttgtatctccaaccttcgaactgactaatttactgaaccaccctgaccactatgtggagacagaaaacatccagcacctgacagaccctacgctggctcatgtcgatcgcatatccgaaactaggaagctcagcatgggatccgacgacgctgcctatacgcaggacatttag

SEQ ID NO: 137703 - DNA, 1986 bp, synthetic construct
  misc_feature 1..1986: note = Description of Artificial Sequence: Synthetic coding sequence
  source 1..1986: mol_type = other DNA
atgcagaataataataacctggacgcatgctgcgcagtgctgagccaggaatctacacgttacctatacggcgagggcgacctgaacttctcagacgactcagggatctctgggctgaggaaccatatgacttctctgaacctggatttgcagagtcagaacatatatcatcatgggcgggagggcagcaggatgaatgggtcccgcaccctgacacattccatttcagatggacagctccagggcggtcagagcaacagcgaacttttccaacaggaaccgcaaacagcgcccgcccaggtccctcaggggttcaacgtcttcggaatgtcatcttccagcggcgcgtctaactcggcaccacacctcggttttcatctgggatcaaaaggaacaagtagcttatctcagcaaactccaagatttaatcccataatggttactcttgcccccaatatacagaccggtagaaatacgccgacctcgctgcacatccacggagtgccaccccctgttctaaacagcccacaggggaatagtatttatatccggccttatataactactcctggcgggaccacaagacagacccaacagcacagcggctgggtgtcccagtttaacccaatgaacccacagcaggtgtaccagcctagccaacccggtccttggacaacttgccccgctagtaatccgctaagtcacacttcatcacaacagcccaaccaacaaggacaccagactagccatgtgtacatgccaataagctcacctacaacatcacaaccccctaccatccatagttcagggtctagccagtccagcgcacattctcagtacaacattcagaacatcagcacgggtccacgaaagaatcagattgaaatcaaactcgagccacctcagcggaataacagctccaaactccggagctccggtccccgcacttcctccacaagtagctccgtgaactcgcagacattgaatagaaatcagcccaccgtctacatcgctgccagccctcccaatacagatgagctgatgtcacgaagtcagcctaaagtgtacatcagtgccaatgccgctactggtgatgagcaggtgatgagaaaccaacccactttgttcatctctaccaatagtggggcttcagccgcatcccggaatatgtctgggcaggtgtctatgggacccgcctttatccatcaccacccacctaagtctcgagccatcggcaacaactcagccacgtcaccaagggtggtggttactcaaccaaatacaaagtatacttttaaaatcaccgtgtctccaaataaacctccggctgtttctcctggcgttgtgagtcctaccttcgagctgacaaatcttctgaaccatccagatcactacgtggaaacagagaacattcagcacctcactgaccctaccttggctcacgtggaccgaatatcggaaacacggaagctctcaatgggctctgatgacgccgcctacacacaggccctgcttgtgcatcagaaggcccgaatggaaagactccagcgagaactagagatccagaaaaagaagctggataaacttaaatctgaggtgaacgagatggaaaacaatcttacacgacgtcgtctaaaacggagcaacagtatctctcaaattcctagcttggaggagatgcagcaactgcgctcgtgcaatcggcagctccagatcgacattgactgcctaaccaaggagattgacctgtttcaagcgaggggaccacacttcaacccatccgctatccacaatttctacgacaacataggttttgttggaccagtaccgccaaagcctaaggatcagaggtcaatcatcaagacccccaagactcaggacaccgaggacgacgagggcgcccaatggaattgtaccgcttgtacgttccttaaccatcctgcattgatcagatgcgaacagtgtgagatgccccgccacttctag

SEQ ID NO: 137704 - DNA, 2082 bp, synthetic construct
  misc_feature 1..2082: note = Description of Artificial Sequence: Synthetic coding sequence
  source 1..2082: mol_type = other DNA
atggcccagggctcacatcaaatcgacttccaggtgttgcacgatcttcgccagaagtttcctgaggtgcccgaggtggttgtctctagatgcatgctacaaaataacaacaatctggatgcctgctgtgcagtgctctcccaggaaagtaccaggtacctgtacggcgagggcgatctaaatttctccgacgattctggcatctccgggctgcggaaccacatgactagcctcaacctggacctccaatctcaaaacatatatcaccatggacgggaaggcagcaggatgaatgggtctcgtacactgacgcacagcatatccgatggccagttgcagggtggtcagagtaattccgagctcttccagcaggaaccacaaacagctccagcccaagtgcctcaggggtttaacgtgttcggcatgtcttcttcctccggcgcaagcaactccgctccccatctaggcttccatctcggctctaaaggcacaagtagtctttcccagcagacccctagattcaaccccattatggttacactcgcgccaaatatccagaccgggagaaacactccgacctcacttcatatccacggtgtgcccccccctgttctgaacagtccacaaggaaactctatatacattaggccctacatcactaccccagggggaacaacccgccagacacaacagcatagtggctgggtttcacagtttaacccaatgaacccccagcaggtttatcagccttcccagccagggccctggacgacatgtcccgcatcaaatccacttagtcacactagttctcagcaacccaatcagcagggacaccagacatctcatgtatacatgcctatctctagtcccaccacgtcacaaccaccaacaattcactcctcagggagttctcagagttccgcccactctcagtacaatatccaaaacatctcgacagggccacgtaaaaatcagattgagataaagctggagcctcctcagagaaacaactcctcaaaactcaggtcttccggacccaggacctcatctacctcatccagcgtgaactcacagacactcaaccgcaatcagcctacagtgtatatcgccgcctcgcctcctaacactgatgagctcatgtcaaggtcgcaaccaaaggtgtatatctccgcaaacgcggctacaggggatgaacaagtcatgcgcaaccagccgactctctttatctccaccaactcaggggcctccgccgcctccagaaacatgagcgggcaggtttcaatggggccagccttcattcatcatcacccacccaagagccgtgcaattggaaacaactcagcgaccagccctcgtgtcgttgtgacgcaaccaaatactaaatatacttttaagatcacggtcagtccgaacaaacctcctgcagtctcccctggggtggtgagcccaacctttgagttgaccaatctgttgaatcaccccgaccactatgtggagacagagaatattcagcacttgaccgatccaaccctagctcacgtggatcgaatttccgagaccagaaagctgtcaatgggcagcgacgatgccgcctacactcaggcacttctggtgcatcaaaaggccagaatggagcggctacagagagagttagagattcagaagaagaagttggataaactcaaatccgaggtcaatgaaatggaaaataatttgaccagacgtcgcctgaagaggtcgaattcaatcagccagatcccgagtcttgaagagatgcaacagctgagatcttgtaatagacagttacaaatcgatatcgattgtcttactaaggagatcgacctattccaggccaggggcccccacttcaacccatctgctattcacaatttctatgacaacatcggtttcgtgggcccggttcccccgaagccaaaagatcaaaggtctatcattaagacccctaagacccaggatactgaggatgacgagggagcccagtggaactgcacagcttgcaccttcctgaatcacccagcgctgatcagatgcgagcagtgtgagatgccgcgacacttttag

SEQ ID NO: 137705 - DNA, 714 bp, synthetic construct
  misc_feature 1..714: note = Description of Artificial Sequence: Synthetic coding sequence
  source 1..714: mol_type = other DNA
atgtctgactctgatctgggcgaggacgaaggccttctctccctggccggcaaacgtaaacggagaggaaacctgccaaaagagtccgtaaaaatactccgagactggctctaccttcacagatataacgcataccccagcgaacaggagaaactaagtctaagcgggcagacaaatctttctgttttgcaaatatgtaattggttcatcaatgcacgccggcgacttctgcccgatatgctacgcaaggacggtaaagaccccaatcagttcaccatttctagaagaggtggcaaggcttccgatgtggccctcccccgaggaagctcccccagcgttcttgccgtgtctgtgcctgccccaacaaatgttttgtcgctctccgtgtgtagcatgcctctccatagtgggcaaggggaaaagccagccgcaccttttcccagaggtgaactcgaatcccccaaacctcttgtgactcctgggagcacactgacgctgttgacccgcgccgaagcagggtcccctacaggtggactgttcaatactccccctcctaccccccccgagcaggataaagaggatttttctagcttccaactgcttgtcgaggtggccctgcaacgggccgcagagatggaattgcagaagcagcaggacccctctctgcctttactacatacaccgatcccgctggtgtctgagaacccccagtag

SEQ ID NO: 137706 - DNA, 714 bp, synthetic construct
  misc_feature 1..714: note = Description of Artificial Sequence: Synthetic coding sequence
  source 1..714: mol_type = other DNA
atgagcgactcagacctgggtgaagatgaaggccttctttctcttgcaggaaaaaggaagcggcgggggaacctcccaaaggagagtgtcaagattctgagggattggctgtatttacacagatataacgcatatccctccgaacaggagaaactgagtctgtctgggcagacaaacttgtctgtcctgcagatttgtaactggttcattaatgctaggaggcggttgctgccagatatgctgagaaaagatgggaaggacccaaaccagtttacaatttcacgtcgtggtgggaaagctagtgatgtggcgttaccccggggcagtagccctagcgtgctggccgtgagtgtacctgccccaaccaacgtgctgtctctttctgtgtgtagtatgcccctgcatagcgggcagggcgaaaaacccgctgctcctttccccagaggcgagcttgaaagccctaaaccactcgtcacacccggaagtacactgaccctactgactcgggccgaagctggctccccaacaggcgggctttttaatacgccaccacctaccccacctgaacaggacaaggaggacttcagctcctttcagctactggtggaagtggcactccaacgtgcagcagaaatggagcttcagaaacagcaggatccctccttgccattgttacacaccccaatccctctggtgagtgagaatccgcagtag

SEQ ID NO: 137707 - DNA, 525 bp, synthetic construct
  misc_feature 1..525: note = Description of Artificial Sequence: Synthetic coding sequence
  source 1..525: mol_type = other DNA
atgtctgacagcgatctcggcgaagatgaaggactactctccttggctggcaagcggaagaggcggggaaatctccctaaggagtccgtgaagatcctccgcgactggctgtacctccatcgctacaacgcctatccgtccgaacaagaaaagttatccctatctggtcaaacaaacctgtctgtgctgcagatttgtaactggtttataaacgccaggaggcggctcctgcctgatatgcttcgaaaggacggcaaagatcccaatcaattcaccatctctaggagagggggcaaggcttccgacgtcgctctgccacgcggtagtagcccgtccgttctggcagtttccgtacctgcacctacaaatgtgctgagtctatctgtgtgctccatgcccttgcacagcgggcaaggcgaaaagccggccgctccttttcccagaggagagttggagtcgccaaagcctctggttacacctggcagtacactcactctacttactagagcagaagctgggagttag

SEQ ID NO: 137708 - DNA, 714 bp, synthetic construct
  misc_feature 1..714: note = Description of Artificial Sequence: Synthetic coding sequence
  source 1..714: mol_type = other DNA
atgagcgatagtgatttaggcgaagacgagggattactgtctttagctggcaagaggaaacggagaggtaacctcccgaaagagtctgtgaaaatcctgagagattggctttatctccaccgttataacgcatatccctccgaacaggagaagctgtcactttctgggcagacaaatctgtctgtgcttcagatctgcaactggttcattaatgccagacgtcgactcctgcccgatatgctccggaaagatgggaaggaccctaaccaatttaccatttcccggcggggcgggaaagcttctgatgttgcccttcctcgtggcagctctccctccgttttggcagtcagcgttcctgcccccactaatgtcctgagcctgtccgtttgtagcatgccactccactctggtcaaggcgaaaaaccggccgctccattcccccgcggtgagctcgaaagtcccaaaccgctcgtgacaccaggttctactctgacactgctcaccagggcagaagctggctcacccacaggaggcctgttcaacacccctcccccaacgccccctgaacaggacaaggaagactttagctcatttcaactgttagttgaggtcgccctgcagagagcagccgagatggagttacaaaagcaacaagacccttccctgcctctgctacacacacctatccctttggtaagtgaaaatcctcagtag

SEQ ID NO: 137709 - DNA, 726 bp, synthetic construct
  misc_feature 1..726: note = Description of Artificial Sequence: Synthetic coding sequence
  source 1..726: mol_type = other DNA
atggaggcagccgccgatggcccagcagagacgcagagccccgtggagaaagactcaccggccaagactcaatcccctgctcaagatacttctataatgtcaagaaataacgccgatacaggccgagttctcgctctgccagagcataaaaaaaaacggaagggcaatcttcctgctgagagcgtcaaaatcttgagggattggatgtacaaacaccgtttcaaagcctacccctcagaggaagagaagcaaatgttgagcgaaaagacaaatctgagcctgctccagatctctaattggttcattaatgctcgcagacgaattttacctgacatgctgcagcaaaggcggaatgatcctataataggacacaagaccggaaaggacgctcacgccacccatctgcaatccactgaggcaagcgtgcctgccaagagcgggcccagcggtcctgacaacgttcagtcgctgccgctctggccgttgcccaagggacaaatgtcaagagaaaagcaaccagatcctgaatccgctccatctcaaaaactgaccgggatcgcccagcctaaaaagaaagtcaaggtgtctgttactagtccttcctctcctgagctcgtgagccccgaagagcacgcggatttttcatcgtttcttcttttagtagatgccgccgtacaaagggcggctgaacttgaattggagaagaaacaagaacccaatccatag

SEQ ID NO: 137710 - DNA, 726 bp, synthetic construct
  misc_feature 1..726: note = Description of Artificial Sequence: Synthetic coding sequence
  source 1..726: mol_type = other DNA
atggaggcagccgcagacggacccgccgagacacagagtccagtcgagaaggactctccagctaagacccagtcaccagctcaggatacaagcataatgtcccgaaataatgcagatacaggaagggtgttggcactccctgaacataaaaaaaagagaaaaggcaaccttcccgctgagtctgtaaagatccttcgggactggatgtacaagcataggttcaaggcttacccctcagaggaagaaaaacagatgttgtccgagaagactaacttatcactgctacagatttctaactggttcatcaacgcgcgaaggcgaatcctgcccgacatgttacagcagagacggaatgaccctataattgggcacaagaccggaaaggatgcccatgccacccacttgcagagtacggaagccagtgtcccggctaagtctggcccctccggccctgataacgttcagtccctgcccttgtggcctcttccaaaaggtcagatgtcacgggaaaagcagcctgatcccgagtcagcccctagccagaagctgacgggcatcgcccagcccaaaaagaaagtgaaggtcagcgtgacgtcaccttcgagtcccgagcttgtgagtccggaggagcacgccgacttttcttctttccttctcttagttgatgctgctgtccaacgcgccgcagagctggaactggagaaaaaacaggaacctaacccgtag

SEQ ID NO: 137711 - DNA, 558 bp, synthetic construct
  misc_feature 1..558: note = Description of Artificial Sequence: Synthetic coding sequence
  source 1..558: mol_type = other DNA
atggaagcagccgctgacggccccgctgaaactcagtccccggttgagaaagactctcctgccaagactcagtctcccgcccaggacacttctatcatgagtagaaacaatgccgacacgggcagggtccttgccctccccgaacataagaaaaaacgcaagggaaatctgcccgctgagagtgtcaagatcctgcgggattggatgtacaaacacaggtttaaagcctacccctccgaggaggaaaaacagatgctgtcagagaagaccaatttatcattattgaggatctccaactggtttattaatgccagaaggcgtattctgcccgatatgctacagcagcgtagaaacgatcccatcattggtcacaaaaccggtaaagatgctcatgctacacacctccagagcactgaggcaagcgttcccgccaaatctggacccgtggttcagaccatgtacaaggcctgcccttgcgggccatgccagagagcgagatgccaggaacgaagcaatcagatacgctccaggccactggcacggagcagccctgaatag

SEQ ID NO: 137712 - DNA, 558 bp, synthetic construct
  misc_feature 1..558: note = Description of Artificial Sequence: Synthetic coding sequence
  source 1..558: mol_type = other DNA
atggaagctgccgccgatggcccagcagaaacacaatcccccgttgagaaggatagtcctgccaagacacagtcgccagctcaggacaccagtataatgtctaggaacaatgctgacacgggcagggttctcgcccttcccgagcataaaaagaaacggaagggtaaccttcctgcagaatcagtaaagatacttagagattggatgtataaacaccggttcaaggcttacccgagcgaggaagagaaacagatgttgtcggagaaaactaacctttcgcttctgcgcatttcaaattggttcatcaacgccaggcgacgaattctgccagacatgctgcagcagcggcgaaatgaccccataatcggccacaaaactgggaaggacgctcacgcaacacacctgcagtctacggaggcttccgtacccgccaagagcggccccgttgtgcagacaatgtacaaagcgtgcccttgcgggccctgtcagcgcgctagatgccaagagcgcagtaatcagattagaagtcgacctctggcccgcagctctccagagtag

SEQ ID NO: 137713 - DNA, 1773 bp, synthetic construct
  misc_feature 1..1773: note = Description of Artificial Sequence: Synthetic coding sequence
  source 1..1773: mol_type = other DNA
atggcgggtgctgtgcctggagccattatggacgaggactattacggctccgcagccgagtggggagacgaggcggacggtggccaacaggaagacgatagcggagaaggggaagacgacgctgaggtgcagcaagaatgtctgcacaagttctccactcgagactatatcatggagcctagcatcttcaataccctaaaacgctactttcaagccggcggctcaccggagaatgtgatccagttactgtcggaaaactacactgcagtggcccagacagttaatctgctcgccgaatggttgattcagacaggcgttgaaccagtgcaggttcaggaaaccgtcgaaaaccacctgaagagcctgttgatcaaacactttgatccccgaaaggcggatagcatcttcacagaggagggagagacgcccgcatggctcgagcagatgattgcccatacaacctggcgggatctgttctataaattggcggaggcgcaccctgattgtttgatgctcaacttcactgtgaaactcatttctgacgccgggtaccagggggagatcacttcggtctctacagcctgtcagcaactggaggtattcagtagagtgcttcggactagcctggccacgatactcgacggcggtgaggagaatctcgaaaaaaacctccctgagttcgcaaaaatggtgtgccatggcgaacatacttacttgttcgctcaggcaatgatgagcgtgcttgcacaagaggaacagggaggcagcgcagtgcgccgcatagctcaggaagtgcagcgatttgcccaggagaaggggcacgatgcctcccagattacacttgccctgggtaccgccgccagctatccgcgtgcctgtcaagccctgggagctatgttgagcaagggagcgctcaaccctgcggacattactgtcctctttaaaatgtttacctcaatggatccgcctcccgtggagctgatccgcgtccccgcatttctcgatttgttcatgcaatctctcttcaaaccgggagcccgcatcaatcaggaccataaacataaatacatacacattttggcttacgcggcatctgtggtggagacttggaagaagaataaacgggtttccattaataaagacgaactcaagtcaacttctaaggcagtggagacagtacacaacctgtgctgtaacgaaaacaagggcgccagcgagctcgtggcagaattgagcaccctctaccagtgcatcagatttcccgtagtagctatgggggtcttaaaatgggtcgattggacggttagtgagcctcgctacttccagctgcagacagaccatacacccgttcaccttgctcttctcgacgaaattagcacctgtcaccagctactacatcctcaggtgttgcagttgcttgtgaagctgttcgagactgaacattcccagctcgatgtaatggaacagctcgaactgaaaaagactctactggatcggatggttcatctcctcagcagggggtacgtgctgcccgtagtcagctatattaggaaatgcctggaaaaactcgataccgatatatcattgatccggtacttcgttacagaggtcttggacgtaatcgcccccccctatactagcgacttcgtgcagctttttttacctatattggagaatgactccatcgctggcactattaaaaccgaaggagagcacgaccctgtgacagagtttattgcgcactgcaagagtaatttcatcatggtgaactag

SEQ ID NO: 137714 - DNA, 1773 bp, synthetic construct
  misc_feature 1..1773: note = Description of Artificial Sequence: Synthetic coding sequence
  source 1..1773: mol_type = other DNA
atggccggagccgtccctggtgccatcatggatgaggattattacggctcagctgctgaatggggcgatgaagcggacggcggacaacaggaagatgattctggggagggtgaggatgatgccgaggtacagcaggaatgccttcacaaattttccacccgcgattacatcatggagcccagcatttttaataccctcaaaaggtattttcaagccgggggaagtcctgagaatgtgatccaactcctctctgagaattatacagcagtggcccagactgtgaacctcctggccgagtggctgattcaaaccggcgtggagcccgtacaagttcaggagacggtggagaaccatctgaagtccctgctcataaaacactttgaccctcggaaggctgacagcatctttacagaggagggtgagacaccagcctggctggaacagatgatcgctcatacaacatggagggacctgttttacaagctcgcagaagcccaccctgattgcttgatgctgaattttacagtgaagctaattagtgatgctggataccaaggggaaattacatcagtgagcactgcatgccagcagctggaggtgttctctagagtgctcagaacttccttagctaccattttggatggaggtgaagagaatttggagaagaatctgcctgagtttgcaaagatggtatgccatggggagcatacatatttgttcgctcaagcaatgatgtccgttttggctcaagaggagcaggggggtagcgctgtcagacgtatcgctcaggaggtgcagcggtttgcgcaggaaaaaggacatgacgcctctcagataaccttggccctggggaccgccgcctcttatccccgtgcctgccaggccttgggggctatgttgtcaaagggagccttaaacccagctgacattactgtgctgttcaagatgttcacctcaatggatccaccaccagtcgaactcatccgggtgcccgcgtttttggacttgtttatgcagtccttattcaaacccggagcgagaatcaaccaggatcataagcataagtatatccatatcctggcgtacgcagcctccgttgtggagacgtggaaaaagaacaagagggtctcaatcaacaaggatgagcttaagagcacctctaaggctgtggaaaccgtccacaacctgtgttgtaatgagaacaagggcgcctccgagctggttgccgaactgtccactctgtaccagtgtattcgatttcccgtggttgccatgggagtgctgaaatgggtggactggaccgtgtcagaaccgaggtacttccagcttcagactgatcacacccctgttcacttggctttgcttgacgagatcagtacatgtcaccagctgctgcatccacaggtgctgcaattgttagttaagctgttcgaaacagaacactcccagctggacgtgatggagcaattggaactaaaaaaaacactgctggatcgcatggtccacttattatctcgggggtacgtcttgccagttgtctcctatatccgaaagtgcctggaaaagctggataccgacattagtctcatccggtatttcgtcactgaggtgctggacgtgatcgctccaccctacacatcagacttcgttcaactgtttcttcccatcctcgagaacgacagtatcgccggcaccattaaaacagagggcgaacacgatccagtgacggagtttatcgctcattgtaaaagtaatttcatcatggtcaattag

SEQ ID NO: 137715 - DNA, 774 bp, synthetic construct
  misc_feature 1..774: note = Description of Artificial Sequence: Synthetic coding sequence
  source 1..774: mol_type = other DNA
atgcctgccaggtgcgttgcagcccactgcggtaacaccacgaagtcggggaaatccctcttccgattccctaaagacagagcggtgcgtctcctttgggacaggttcgtgcgtggatgccgcgcagactggtacggagggaacgatcgttccgtcatctgttctgaccattttgctcctgcctgttttgatgtgtcaagcgtaattcagaaaaatctgcggttttctcaacggctaaggctcgtggctggggcagtcccaacactgcatcgcgtgccagcaccagctcccaaaaggggggaggagggtgatcaggccgggcggctcgacacaagaggggagttacaagcggctaggcacagtgaggccgcaccgggccccgtgagttgcacccggccacgggccggaaagcaggctgctgcatcccagatcacgtgtgagaatgaacttgttcaaacccaaccccatgctgacaatccctccaatacagtcaccagtgtcccgacacactgcgaagagggcccggtgcacaaatcaacacagatcagcctcaagcggccccgccacaggtctgtagggattcaggctaaggtcaaagcattcggcaagagactgtgtaatgcgaccacacagacggaggaattgtggagtcggacctccagtcttttcgacatatacagctccgattctgagacggatacagactgggacataaaatcggagcaatcggacctaagctacatggccgtgcaagtaaaggaggagacctgttag

SEQ ID NO: 137716 - DNA, 498 bp, synthetic construct
  misc_feature 1..498: note = Description of Artificial Sequence: Synthetic coding sequence
  source 1..498: mol_type = other DNA
atggagccacctaagatgaatccagtcgttgagccacttagctggatgttggggacgtggctctctgatccccctggagccggaacctaccctacactacagcccttccagtaccttgaggaggttcatatatcccatgtaggacagcccatgctgaatttttcctttaactctttccaccccgatacacggaagcccatgcaccgggagtgtggcttcatccggttgaagccagacacgaacaaagtggcttttgtttcggctcagaataccggcgtggtagaggtcgaggagggggaagtgaacgggcaggagctctgcatcgcatcccattcgatcgccagaatctccttcgccaaggagccgcatgtggagcagatcacacgaaaatttagactcaactctgaagggaaactggaacagaccgtctccatggcaaccaccacacaaccaatgacccagcacctgcatgtcacgtataagaaggttaccccttag

SEQ ID NO: 137717 - DNA, 1734 bp, synthetic construct
  misc_feature 1..1734: note = Description of Artificial Sequence: Synthetic coding sequence
  source 1..1734: mol_type = other DNA
atggttatctgctgtgctgccgtcaattgttcaaatagacaggggaaaggcgagaagcgagcagtgtcttttcacaggttccccctgaaggatagcaagaggctaattcagtggttgaaggccgtccagcgggacaactggacccctaccaagtactcctttctctgttcggagcactttacaaaggactcctttagtaagagactcgaagaccagcatagactccttaaacccaccgcggttccttccattttccatctgaccgagaagaaaaggggggcgggaggccatggacgaaccaggcggaaggatgcttccaaggctacaggtggggtgcgcggtcactcttcagcagccacaagtagaggtgctgccggatggagcccctcttcgtcggggaaccctatggctaagccagagagccgccggctcaaacaggccgctcttcagggtgaggctacaccccgggcggctcaggaggccgctagccaggaacaagctcaacaggcccttgagcgcacccccggggacggactggccaccatggtggccggttctcagggtaaggcagaggcctccgccaccgatgcaggtgatgaaagtgccactagctcaatagagggcggtgttactgataaaagcggtatttctatggacgactttacaccaccgggttcaggtgcttgtaagtttatcggaagtttgcactcttatagcttctccagtaagcatactcgagaaagaccctctgtccctcgcgagcctatcgaccgaaaacgcctgaaaaaagacgttgaaccctcctgcagtgggagcagcctgggtccagataaagggctggcccagtcgccaccgtccagtagcctcaccgccacacctcagaaaccaagtcaaagtccgagtgcccctcctgctgacgtgacccccaagcctgctaccgaagccgtgcagtccgagcatagcgacgcctctccaatgtccattaacgaggttatcctttctgcaagcggggcatgcaagctcatcgattctctccatagttattgcttttcctccaggcagaataagtctcaggtttgttgtctgcgcgaacaggtggaaaaaaagaacggcgaattgaaatctctccgacagagagtgtcgcgctccgatagccaggtgcgaaaactccaggagaaattagacgaactgagacgggtgtcagttccatacccatctagcctgctcagcccctcaagggagccacccaagatgaatcccgttgttgaaccactgtcttggatgttaggtacgtggctaagcgatcctcccggggccggcacctatccaacactgcaaccgtttcagtaccttgaagaggtccacatctctcacgtgggccaaccaatgctcaatttttcgtttaattcattccatcccgatactagaaaacctatgcacagagaatgtgggttcatccgactcaaacccgacactaataaagtcgcgtttgtgtccgcccagaacactggcgttgttgaggttgaagagggtgaagtgaacggacaagaactctgtatcgcctcccactccattgcacggatctccttcgccaaagaaccccatgtggagcagattacgcgtaagtttcgacttaacagcgaaggtaagttggagcagactgtgagcatggctactactacgcagccgatgacccaacacttgcatgtgacttacaagaaggtgaccccatag

SEQ ID NO: 137718 - DNA, 510 bp, synthetic construct
  misc_feature 1..510: note = Description of Artificial Sequence: Synthetic coding sequence
  source 1..510: mol_type = other DNA
atgtcaatcaatgaagttatcctgagcgcatccggagcctgcaagctgattgacagccttcactcttattgtttctcgagcagacagaataaaagccaagtatgttgcctccgcgaacaggttgagaaaaagaatggagaattgaagtcactgaggcaaagagtgtcacggtctgacagccaggtgcgaaagctgcaggagaaactggacgagcttaggagagtgtccgtgccataccctagctctctgctcagcccatctagagaaccacccaagatgaaccccgttgtcgagccgctgagctggatgctcggcacctggttgtccgatcctccaggagccggaacgtaccccaccctgcagccattccagtacctggaagaggtccacatctctcatgttggtcaacccatgctaaactttagtttcaattcatttcatccagacacacgcaaaccaatgcacagggagtgtggcttcattaggctgaagcctgggtcttccggctag

SEQ ID NO: 137719 - DNA, 1062 bp, synthetic construct
  misc_feature 1..1062: note = Description of Artificial Sequence: Synthetic coding sequence
  source 1..1062: mol_type = other DNA
atgaagcgcgatagttgggtgccgtccaaataccagttcttatgttccgaccatttcactccagatagtttggacatcagatgggggattcggtatctgaaacagactgccgttccaaccatcttttccctgccagaagacaatcaggggaaggacccttcaaagaagaaatctcaaaaaaaaaacctcgaggacgagaaagaggtctgcccgaaggccaaatccgaggagtccttcgtgttaaacgagacgaagaaaaatatcgtgaacacagatgtgccccatcagcacccagaactgctccacagcagttctttagtgaagccgcccgcccccaaaaccggctccatccaaaacaacatgctgaccctcaatctcgtgaagcagcacactgggaaacccgagtccacactggagacatctgtgaaccaggatactggtagagggggatttcacacttgcttcgagaatcttaattcgaccaccataactctgacaacatctaacagcgaatcaatccaccagtcgttagaaacccaggaagtcctcgaggttaccacaagtcatctcgcaaatccaaattttacttcaaactccatggagatcaaatcagcccaggaaaacccatttttgttctccacgatcaaccagaccgtggaggagcttaatacaaataaagaaagtgtgattgctatctttgtgcccgccgaaaacagtaagccctctgttaattcctttataagtgctcagaaggagactacagaaatggaggataccgatatcgaggacagcttgtacaaagacgtggattacggaacggaggtgctgcagattgaacattcctactgcaggcaggatatcaacaaagagcatctctggcagaaagtgtcgaagctgcactcaaagattacactgctggagctgaaggaacaacagacactgggcaggttaaagtccctggaagctcttatcaggcagctgaagcaagagaattggctttctgaagaaaacgtaaagataattgagaaccactttaccacatacgaggtgacaatgatctag

SEQ ID NO: 137720 - DNA, 1188 bp, synthetic construct
  misc_feature 1..1188: note = Description of Artificial Sequence: Synthetic coding sequence
  source 1..1188: mol_type = other DNA
atgccaaggtactgcgccgctatctgttgcaagaataggagaggccgaaataacaaggatagaaagttgtccttttatcctttcccattacacgacaaggaacggctggaaaaatggcttaagaacatgaaaagggattcatgggtgcccagcaagtatcagtttttgtgctccgaccacttcactcctgacagcctcgatattagatggggaattcgctacctgaaacagacggcagtgccgacgatcttctccttgcctgaggacaaccagggcaaggatccctcaaaaaaaaaatcccaaaagaaaaacttagaagatgaaaaggaggtttgcccgaaggcaaaatctgaagaaagtttcgtgctgaatgaaactaagaagaacattgtgaacacagacgttccgcatcaacatccagaattgctccactcctcatcattggtgaaacctccggcgccgaaaaccggtagcatacaaaataacatgcttacactgaatctcgtcaagcagcacaccggaaagccggaatccacgctggagaccagtgtcaatcaggataccgggcggggaggatttcatacatgttttgaaaatttaaattctacgactattacattgacgacatcaaattcagagagcatccaccagtcgctggagacgcaggaagtcttagaggtaacaactagtcacctggccaacccaaacttcactagcaattctatggaaattaagtctgctcaggagaatccttttctgttcagcactataaatcagaccgtggaagaactgaataccaacaaggaatctgtcatcgccattttcgtccctgcagaaaattcaaagccgagtgttaatagttttattagcgcccagaaagagactactgaaatggaagatactgacatagaagattctctgtataaagatgtcgactacggcactgaagtccttcagatcgagcacagttactgtaggcaagacataaataaggaacacctatggcagaaggtgagcaagttgcatagcaaaattacattactggaactaaaagagcagcagacactaggcaggcttaagtccctcgaagctctcatcagacagttgaagcaggagaactggctctcagaagaaaacgtgaaaatcatcgaaaaccatttcacaacctacgaagtgactatgatttag

SEQ ID NO: 137721 - DNA, 669 bp, synthetic construct
  misc_feature 1..669: note = Description of Artificial Sequence: Synthetic coding sequence
  source 1..669: mol_type = other DNA
atggttaagtgctgctctgcaattggctgcgccagtcgttgtttacccaactcaaaactgaaagggttgacctttcatgtgtttccaaccgacgaaaacataaagcgaaagtgggtattggccatgaagcggttggacgttaatgcagccgggatttgggaacctaaaaaaggtgacgtgttatgttcccgccattttaagaagacggactttgaccggtcagcccccaacataaagctcaaaccaggagtaataccctccatttttgattcaccttaccacctgcaaggcaagagagagaaactgcattgcaggaaaaacttcaccttaaagacagtcccagccacgaactacaaccaccacctcgtcggtgcttcctcgtgtatagaggagttccaaagtcagtttatctttgagcattcttactcggtcatggattctccaaaaaaactgaaacataagcttgaccatgtgatcggtgagctggaggacaccaaggaatcgttacgaaatgttctggatcgcgagaagagattccagaagtcattgaggaaaacaatcagagagcttaaagacgaatgcctaatcagccaagaaacagctaaccgactggataccttttgttgggattgttgccaggagagcattgaacaggattacatttcatag

SEQ ID NO: 137722 - DNA, 99 bp, synthetic construct
  misc_feature 1..99: note = Description of Artificial Sequence: Synthetic coding sequence
  source 1..99: mol_type = other DNA
atggtaaagtgttgctcagccatcgggtgcgcatcgcgctgtctgccaaactccaagcttaaggggctgaccttccacgtctttcccacggacgagtag

SEQ ID NO: 137723 - DNA, 243 bp, synthetic construct
  misc_feature 1..243: note = Description of Artificial Sequence: Synthetic coding sequence
  source 1..243: mol_type = other DNA
atggtcaagtgctgttcagcaatcggctgcgcatcaaggtgcctgccaaatagtaaacttaaaggcctcaccttccacgtgttccccaccgacgagaacatcaaacgcaagtgggtcctggcgatgaagcgcctggatgtgaacgcggccggcatatgggagcctaaaaagggagatgtactctgtagtcggcatttcaagaagaccgactttgaccgtagtgcccctaacatcaagttgtag

SEQ ID NO: 137724 - DNA, 669 bp, synthetic construct
  misc_feature 1..669: note = Description of Artificial Sequence: Synthetic coding sequence
  source 1..669: mol_type = other DNA
atggtcaaatgctgtagtgccattggctgtgcaagtcggtgcctgccgaattccaaactaaagggtctaacctttcacgtgttccctactgacgagaatatcaagcggaagtgggtccttgctatgaagagacttgacgtgaatgccgccgggatttgggagccaaagaaaggagatgtgctgtgctcgaggcactttaagaaaacggatttcgataggagtgctcctaatatcaagcttaaacccggtgtgatacccagcatctttgacagcccttaccacctacaagggaagcgcgaaaagcttcattgcaggaagaatttcaccttgaagactgtaccggctacgaactataaccaccacttagtcggggctagttcgtgcatcgaggagttccagtcacaatttatatttgagcattcctatagcgtcatggactcaccaaaaaaattgaagcacaagctcgatcatgtgatcggagaacttgaagataccaaggagagcctaagaaatgttctggacagggagaagcgctttcagaagtccctgcgaaagaccattcgcgagctaaaggatgagtgccttatctctcaagaaaccgcaaacagactagacacattttgctgggactgctgccaggagagtattgaacaggactacatttcctag

SEQ ID NO: 137725 - DNA, 825 bp, synthetic construct
  misc_feature 1..825: note = Description of Artificial Sequence: Synthetic coding sequence
  source 1..825: mol_type = other DNA
atgcctaagtactgccgtgctcccaattgttccaatactgccggtcgcctgggagcagacaaccgcccagtctctttctataagtttccactaaaggacggaccacggctccaagcatggctccagcacatgggctgtgagcactgggtgccatcctgtcaccagcacctttgcagcgagcattttacgccaagttgtttccagtggcgatggggagtccgttatttgagacccgatgcagtgccttccatattttctagaggtcctcccgcaaaatcccagcgcagaacacgaagcactcagaagcctgtgagcccgccaccaccactccagaagaacactcccctcccacagagcccagccattccggtgtccgggcctgtccggttggtcgtcttaggtccgactagtggctcccccaagactgtggcaacaatgctccttacacctcttgccccggcgccaactccagaacgctctcagcctgaggtgcctgcccagcaggcgcaaaccggattaggaccagtgctgggtgccctacagcggcgggtgcggcgcctgcaaagatgccaggagagacatcaagcccagctgcaggcactggaaagacttgctcagcagctccacggcgagtctctgctcgctcgggcccgcaggggccttcaaagactcaccactgcgcagactttggggcctgaagagagccagacgttcacgatcatctgcggggggccggatatagcgatggtgctggctcaggaccctgcccctgcaaccgtcgatgccaagccggaacttctcgatacacggatacctagcgcttag

SEQ ID NO: 137726 - DNA, 825 bp, synthetic construct
  misc_feature 1..825: note = Description of Artificial Sequence: Synthetic coding sequence
  source 1..825: mol_type = other DNA
atgcctaagtattgccgcgcaccaaattgttcaaacaccgcaggcagactgggcgcagataaccgccccgtgtctttttataagttcccacttaaggacggtcctcgattacaggcatggctgcagcacatgggctgtgagcactgggtgcctagctgtcaccagcatctatgctcagaacacttcaccccaagctgttttcagtggcgctggggagtgcggtatctcagaccagatgcagtccccagcatcttcagtagaggtccaccagcaaagtcccagaggaggactaggtctactcagaaacctgtctctccgcctcccccgctgcagaagaacaccccgctcccccagagccccgccatccctgtgagcggacctgtgagactggtggtgcttgggcctaccagcggaagccctaaaacagtggcgaccatgctgctcacccctctggctcccgctccaacccccgaacgctcccaacctgaggtgcctgctcagcaggcacagacgggactaggaccggttctaggtgctttacagcgccgggtccggcgcctacagcgttgccaggagagacaccaagcccagcttcaggctttggagcggctggctcagcaactccatggggaatccctcttggcgcgagccagacggggcctacaacggctcacaacagcacagacattagggcccgaggagtctcagactttcaccattatctgcggggggcctgacattgccatggtgctcgcacaggatcctgccccagccaccgtggacgctaaacctgagctgctggatacccgcataccgagtgcctag

SEQ ID NO: 137727 - DNA, 390 bp, synthetic construct
  misc_feature 1..390: note = Description of Artificial Sequence: Synthetic coding sequence
  source 1..390: mol_type = other DNA
atgttgctgactccacttgcacctgctccaactccagaacggtcacagcctgaagtacctgcacagcaggctcagaccggccttggccccgtactgggagcccttcagaggagagttcgacggctgcagagatgccaggaacgtcaccaggcgcagttacaggctcttgagcgccttgcacagcagctgcacggcgagtccttgctcgcacgcgcaaggaggggcctgcaacgacttacgaccgcccagacgttagggccggaggagtcgcagacattcactattatttgcggtggccccgacatcgcaatggttctggcacaggatcctgcccctgcgaccgtggacgcaaagcccgaattgttagataccaggatcccttctgcttag

SEQ ID NO: 137728 - DNA, 2712 bp, synthetic construct
  misc_feature 1..2712: note = Description of Artificial Sequence: Synthetic coding sequence
  source 1..2712: mol_type = other DNA
atgacccgctcgtgctccgccgtgggctgttctaccagggacacggtgctgtcgagggagaggggcctgtctttccatcagttcccaactgacacgatacagcggagtaaatggattcgagccgtcaacagagtcgaccctaggagcaaaaaaatttggattcctggcccaggagcgatattgtgcagcaaacacttccaagaaagtgatttcgagtcatacggaatccgtcgcaaactgaagaaaggagccgtcccatcagtgtctctctacaagattccgcagggcgtgcacctcaaagggaaggctaggcaaaaaattctaaagcagccactacctgacaatagccaggaagtggccacggaagaccataattactccttgaagacaccactgaccattggggctgaaaagctggctgaagtccaacagatgcttcaagtgagcaagaagcgcttgatttctgtcaagaattatagaatgattaagaaacggaaaggtcttcgcttgattgatgcccttgttgaggagaaactgctgtcagaagaaaccgagtgtttgctgcgcgctcagttcagcgactttaagtgggagttatataattggcgtgagactgacgaatattccgcagagatgaaacagtttgcttgtaccctatatctctgttcctctaaggtgtatgactatgtccgaaagatcctcaagctaccccattcttctatcttgaggacgtggctgtcaaagtgtcagccctcacccggcttcaatagcaacattttcagcttcctacaaagaagagtagaaaacggcgatcaactgtaccagtactgttctcttctcatcaagtctatgcctctgaagcaacaattacaatgggatcccagctcccattccctccagggcttcatggatttcgggctgggcaagcttgatgccgacgaaacccctctggcctcggagaccgtgctgttgatggccgtcgggattttcggacattggaggacacctctgggctatttttttgtgaacagggcttctgggtaccttcaggcccagctgttaagattgactatcggcaagctgtctgacattggaatcactgttcttgccgtcacttcggacgccacagctcactcagtgcagatggccaaagcgctgggaatccatatagacggagatgacatgaaatgcacattccaacatccttcaagcagttcccagcagatcgcctacttcttcgactcctgtcatttgctacggttgatccgcaacgccttccaaaactttcagagtattcagttcataaatggcatcgctcattggcaacacttggttgagcttgtggcccttgaagagcaggagttgagcaacatggagaggatcccttccactctagctaatctgaaaaatcatgtgcttaaagtgaacagcgcaacccagctgtttagtgagtccgtcgctagtgccctcgaatatctgttaagtctcgacctacctccatttcagaattgcataggcacaatacatttcctccggttgataaataatctgtttgacattttcaattctaggaattgttacgggaagggattgaagggaccgctgctaccagaaacctattcaaagattaatcatgtactcatcgaagcgaaaaccatttttgtgactctgagcgacacatctaacaatcaaatcataaaaggcaagcagaaactcggatttttaggattcctcctcaacgctgaatcacttaagtggctgtatcagaactacgtgtttcctaaagtgatgcctttcccctatttgctaacctacaagttctcccacgatcacttagagctctttctcaagatgctgcgccaggtgctcgtgacatcctctagccctacttgcatggcgtttcaaaaagcgtattataacctggaaactagatacaagttccaggacgaagtgtttctttctaaggtttctatttttgacatttcaatcgccaggcgcaaggacctcgccttgtggactgtgcagcgccagtatggagtgtctgtcacgaagacagtattccacgaggagggaatttgccaggattggtcccattgttctctcagcgaggccttgttagatctgtcggaccatcgcagaaatttaatttgctatgctggatacgtcgccaacaaattgagcgcccttctgacctgtgaagattgtatcactgctttatatgcgagcgacttgaaagcgtcaaaaattggatctctcctgtttgtcaaaaaaaaaaatggcctgcacttcccctccgaatctctgtgccgcgtgattaacatctgcgagcgcgtcgtgagaactcatagtagaatggctatctttgaattagtgtctaaacagcgcgagctgtacctgcagcagaaaatactctgcgagctgtcaggtcacatcaatctgttcgtagacgtgaataagcaccttttcgatggggaggtctgtgcgattaaccacttcgttaaactgttgaaagacatcatcatctgctttctaaatatccgcgctaagaatgtcgcccagaacccactaaaacaccatagtgagagaaccgacatgaagactctgagccggaaacactggagcagtgtgcaagactacaagtgcagctccttcgccaatacgtcatccaaattccgacacctgctttccaacgatggttatccgtttaaatag

SEQ ID NO: 137729 - DNA, 2712 bp, synthetic construct
  misc_feature 1..2712: note = Description of Artificial Sequence: Synthetic coding sequence
  source 1..2712: mol_type = other DNA
atgacacggagttgctccgccgtcggatgttcgacgagggacaccgtgttatcacgtgagagagggctctctttccaccagttcccgaccgataccatccaacgatcaaaatggatacgcgctgtgaatcgcgtggacccacgctctaagaagatttggattcccggcccgggagccattctgtgctcaaagcactttcaggagagcgatttcgagtcttatgggatccgacgtaagctcaaaaaaggggctgttcctagtgtgagtttgtataaaatcccacagggagttcacctcaaaggaaaagccagacagaaaatcctgaagcagcctctgccggacaattcccaggaagtggcaactgaggaccataattattcacttaaaacacctctcacgattggggccgagaagctggcagaagtgcagcagatgctccaggtatcaaaaaaaaggttaatttccgtcaaaaattatcgcatgattaagaaaaggaagggactgcggctgatcgatgccttagtcgaagaaaagttgctctcagaagaaacagagtgcctgctacgcgcgcagttttccgattttaaatgggaactctacaattggagggagacagacgagtattccgctgagatgaagcagttcgcttgtactctgtatctgtgcagctccaaggtctacgactatgtccgcaagatcctcaagctaccacacagctctatcttacgcacttggctgagcaaatgtcagccctcacccgggtttaattccaatatattcagcttcctccagagacgggtcgaaaatggcgaccagctgtatcaatactgctcgttactgattaaatcaatgccactaaaacagcagcttcaatgggacccgtcatctcacagtctgcagggcttcatggatttcggattgggaaaattggacgccgatgaaacacctttagctagcgaaaccgttctgctgatggctgttggaatttttggccattggcgcactcccctgggctacttttttgtgaaccgggcctcaggctacctccaggcccagcttctcagattgacaatcgggaaactttcagacattggcattaccgtgctggccgtaactagcgacgcgacagcacacagtgtgcagatggcaaaagccttaggtattcacattgacggagacgacatgaaatgtacgtttcagcatccaagttcctctagtcagcaaattgcatacttttttgatagttgccacctgctgagattaattcggaatgcctttcagaatttccaatctatacagttcatcaatggaatcgcacactggcaacatttagtagaactggttgcccttgaggagcaggagctcagcaacatggagcgaataccatccacattggccaacttaaaaaaccacgtgctaaaggtcaatagcgctactcagttgttcagcgaaagcgtggcaagtgccttggaatatcttctctccctggacctccctcctttccaaaactgtatcggtaccatccattttctccggcttatcaacaacctcttcgacatcttcaattctaggaattgttacggtaaaggcttgaagggacctctgctgcccgagacgtattcaaaaataaaccacgttctgatcgaagctaaaactatcttcgtcaccctaagcgacacgagcaataaccagataatcaagggtaagcagaaacttggattcttgggctttcttctaaacgccgaatcactgaaatggctgtatcagaactacgtcttccccaaggtcatgcccttcccgtatctgctcacctacaagttttctcacgaccacttggaattgttccttaagatgctccgacaggttctcgtgacttctagttcccctacatgcatggcatttcaaaaagcctactacaacctagaaacacgttacaaattccaggacgaggtttttctctcgaaggtaagcatcttcgacattagcatcgcacgacggaaggacttggcactatggacagttcagaggcagtacggggtgtcagttaccaagactgtatttcatgaggagggaatatgccaagactggagccattgtagcctttcggaggccctactcgacctgtccgatcaccgcaggaaccttatatgttacgctggctacgttgcaaataagttaagcgctctgctgacctgcgaggactgcatcaccgctttatacgcttccgaccttaaggctagtaagatcgggtctctgttgttcgtcaagaagaagaacggattgcactttccgagcgaatcactgtgtcgtgtcatcaacatatgcgaacgagtcgtgagaactcactcacgcatggccattttcgaattggtctctaaacagcgcgaactctacctccagcagaaaattttgtgcgaactctccggacacatcaacctgttcgtcgatgtgaataagcatctctttgacggggaagtgtgtgccatcaatcactttgtaaaactcttaaaggacattattatctgttttctgaatatccgggccaagaatgtagcgcagaatcccctcaagcatcacagcgagcggaccgacatgaaaaccctttccaggaaacactggtcctccgtgcaggactataaatgcagctcattcgcgaatacctcctcaaaattcaggcacttattaagcaatgacggttatccctttaagtag

SEQ ID NO: 137730 - DNA, 642 bp, synthetic construct
  misc_feature 1..642: note = Description of Artificial Sequence: Synthetic coding sequence
  source 1..642: mol_type = other DNA
atggtgcagagctgttctgcatacggctgtaaaaatcggtacgacaaagataaacctgtttccttccacaaattccccctgacaagaccatctctttgcaaggaatgggaggccgccgttcgaaggaaaaatttcaagcctacaaagtacagctcaatttgttcggagcactttactccggattgcttcaagcgcgagtgcaataacaagctgttaaaggagaacgcagtgcccaccatttttctgtgtacggagccccacgacaaaaaggaggacctcttggagcctcaggagcagttaccaccgccacctttgcctccaccagtttcgcaagtcgacgctgccattggacttctgatgccccctctccagacccccgtcaatctgagtgtgttttgcgaccataactataccgtggaggacaccatgcaccagagaaagaggatacatcagcttgagcaacaggtggagaagcttaggaaaaaactcaagactgctcagcagcggtgtaggcgacaggagcggcagctggaaaaacttaaggaggttgttcactttcagaaggaaaaagatgatgtatcggagcgaggatacgtcattctccccaacgactactttgaaatcgtagaggtacctgcctag

SEQ ID NO: 137731 - DNA, 162 bp, synthetic construct
  misc_feature 1..162: note = Description of Artificial Sequence: Synthetic coding sequence
  source 1..162: mol_type = other DNA
atggtccaaagttgttctgcctatggctgcaaaaaccgctacgacaaggataaacccgtctccttccataagaagaaaattttttggtctcaccgcaactctttcccccacctcctttacagactgctgtttccgaggctgatgctgcttttggactactag

SEQ ID NO: 137732 - DNA, 687 bp, synthetic construct
  misc_feature 1..687: note = Description of Artificial Sequence: Synthetic coding sequence
  source 1..687: mol_type = other DNA
atgccgacgaactgcgctgccgcgggttgtgctactacatataataaacatattaatatcagctttcatcgtttcccactagacccgaagcgtcgcaaagagtgggtgagacttgtgcgccgcaagaattttgtgccggggaagcacacattcctgtgctctaagcattttgaagcttcctgctttgacctgacaggtcaaacaaggagactcaagatggacgcggtgcctacaatattcgacttttgcacccacatcaaaagtatgaaacttaagtccagaaatttactgaaaaagaataacagttgtagccctgctggaccaagtaatctcaaatcgaatatttcatcacagcaggtactgttggagcattcctatgcgttccggaaccctatggaggccaagaaacgcatcattaaactggaaaaagagatagcaagcctgcggaggaaaatgaagacttgtctccaaaaagaacgcagggccacacggagatggattaaggctacatgcctggtgaaaaacctggaggctaattcagtccttcccaagggcacctccgaacacatgctgcctaccgctctgagtagcctgccattggaggatttcaagatcctcgaacaggatcagcaggacaagactctccttagcctcaaccttaaacagacaaaaagcacattcatttag

SEQ ID NO: 137733 - DNA, 720 bp, synthetic construct
  misc_feature 1..720: note = Description of Artificial Sequence: Synthetic coding sequence
  source 1..720: mol_type = other DNA
atgcccaagagttgtgctgcgaggcagtgttgcaacagatatagctctagacgaaagcagttgaccttccaccgatttccattcagccgccctgagctgcttaaagagtgggttctcaatatcggccgcggaaacttcaagccaaaacagcacacggttatctgtagtgaacattttagacctgagtgcttttctgcttttggtaataggaagaaccttaaacataacgcggtacctacggtctttgcctttcaggatccaactcagcaggtacgcgagaatacagatcctgcttctgagcgcggtaatgcatcttcctcacagaaagagaaagtgctgcccgaggcaggcgcgggagaagatagccccggaaggaatatggacacagcgctcgaggaattacagctgcctccaaacgcagagggtcacgtgaagcaggtgtcccctcggcgtcctcaggcaactgaagcagtgggacgtccaaccggacctgccggattacggcggaccccaaataaacagccatccgaccactcatacgctctgctggatctcgactccctgaaaaaaaagctctttctcactttaaaggagaacgagaagctgagaaaaaggctgcaggcccagcggctggtgatgagacggatgagcagcagacttcgtgcttgtaaaggacatcaggggctccaggcacgactcggacctgagcagcagagctag

SEQ ID NO: 137734 - DNA, 717 bp, synthetic construct
  misc_feature 1..717: note = Description of Artificial Sequence: Synthetic coding sequence
  source 1..717: mol_type = other DNA
atgcccaaatcctgcgccgcccgacaatgttgcaatcggtactcttctcgcaggaagcaactgaccttccacaggttcccgttcagtcgccccgagctgctcaaggagtgggtgcttaacattggcagaggaaatttcaaacccaagcagcacacagtgatatgttctgagcacttcagacccgaatgcttctctgcttttgggaatcgaaagaacctcaagcacaatgctgtccccacagtgtttgcgttccaggatccaacacaggtgcgcgaaaacactgacccagcaagcgagagggggaatgccagtagtagccaaaaggaaaaagtgctgcctgaagcaggcgctggagaagattctcctggccggaacatggataccgctctggaggagcttcagctcccacctaatgctgaggggcatgttaaacaggtctcaccgagacgaccccaggctaccgaagcggtgggaagacccaccggccccgcaggcctgcggagaacacctaacaagcagccctctgatcactcctacgccttgttggatctggatagtctcaaaaagaagttgttcctgactctaaaggagaatgaaaagttaaggaagaggttgcaagcccagcgcctggtgatgagacgcatgtctagccgcctgcgcgcgtgcaagggccaccagggtctgcaagcccgactcggccccgagcagcagtcctag

SEQ ID NO: 137735 - DNA, 528 bp, synthetic construct
  misc_feature 1..528: note = Description of Artificial Sequence: Synthetic coding sequence
  source 1..528: mol_type = other DNA
atgccaaagagttgtgcagctcgccaatgttgtaaccggtatagctctaggcgcaagcagttaaccttccaccgttttccattcagcaggcccgagctgctcaaagagtgggtgctaaacattgggcgagggaacttcaagcctaagcagcatacagttatttgcagcgagcactttaggcccgagtgttttagtgccttcgggaatcgaaaaaatctgaaacataacgccgtgccaaccgtcttcgcctttcaggatccaacacagcaagtaagagaaaataccgatccagcaagcgagagaggcaatgcgtccagtagccagaaggagaagacatcgccgtgtcggtctcaagtgctaccagaagctggtgcgggtgaagactcccctggccgaaatatggataccgctctggaggaactccagctgcccccaaacgctgaagggcacgtgaagcaggccatgctgtttaacgttgaaaatggcacccccgcttcaagagaggcgctctggctgtccgaagagtag

SEQ ID NO: 137736 - DNA, 732 bp, synthetic construct
  misc_feature 1..732: note = Description of Artificial Sequence: Synthetic coding sequence
  source 1..732: mol_type = other DNA
atggaacatgcctttactcccctggagcccctgctgtccaccggcaacctcaagtactgcttagtcatccttaaccagccactcgacaactattttcggcacctctggaataaggctctcttgagagcttgcgccgatggtggagctaataggctctatgatatcacagagggtgagcgcgagagctttctccctgagttcatcaatggcgacttcgactccatccggcctgaagtgcgggagtattatgctaccaagggatgcgaactgatctctacacctgatcaggatcacaccgattttacgaaatgcctcaagatgctgcaaaagaaaatcgaagagaaggatctgaaggtggacgtgatcgtaactctcggagggctagctggcaggttcgatcagatcatggccagtgtcaatactctgttccaagctacacacattactccatttccaatcataattatacaggaagagtcactgatatacctgctacagcccggcaagcaccggctacatgtcgacacaggaatggagggggattggtgcggcctaatccccgtgggccaaccttgcatgcaggtgacgacaacaggactgaaatggaatctgacgaacgacgtgctggcattcggcacactggtcagtacaagcaatacatatgatgggagcggtgtggtaaccgtcgaaacagatcatccactgttatggacaatggccattaagtcatag

SEQ ID NO: 137737 - DNA, 585 bp, synthetic construct
  misc_feature 1..585: note = Description of Artificial Sequence: Synthetic coding sequence
  source 1..585: mol_type = other DNA
atggagcacgcgttcacaccgctcgaacccctgctgtcaaccggcaacctcaaatattgtctcgtcattctcaatcagccgctggataattattttagacacctgtggaacaaggccctgttgagggcgtgcgctgatggaggagccaaccggctttacgatatcacggaaggagaacgtgagtcattcctcccagagtttataaacggcgactttgattccatcagacccgaagtccgagaatattacgcgaccaagggatgtgaacttatctctacaccagatcaggatcacactgatttcactaagtgtcttaagatgctgcagaagaaaatcgaagagaaggacctcaaaggaaaacacagattgcatgttgataccgggatggagggtgattggtgcgggctgattcccgtgggacagccctgcatgcaggtgaccacaaccggcctgaagtggaatttgaccaatgatgtgctggcattcggcacgctggtgagtactagtaatacatacgatggttccggggtggtgacagttgagactgaccatccactcctgtggacaatggccatcaaatcttag

SEQ ID NO: 137738 - DNA, 375 bp, synthetic construct
  misc_feature 1..375: note = Description of Artificial Sequence: Synthetic coding sequence
  source 1..375: mol_type = other DNA
atggtggatgtcatcgtgaccctgggaggtctggcgggtcggtttgaccagattatggcgtctgtaaacacactcttccaggccactcacattaccccctttccaatcatcatcattcaagaggagagcttgatctatcttttgcagccaggaaaacataggttgcacgtggatactggaatggagggagactggtgtggactgattcctgtgggacagccatgcatgcaagtgacgactaccggcttgaagtggaaccttcggacctgtgattacacgaggactacctggatagctaaagacaaccctgtccctcggctaatccgtctcatccgactgaaccacatctgtaaggtacccctcgcaatcaaatag

SEQ ID NO: 137739 - DNA, 504 bp, synthetic construct
  misc_feature 1..504: note = Description of Artificial Sequence: Synthetic coding sequence
  source 1..504: mol_type = other DNA
atggaacacgccttcacccccttagagccgttactatctacgggcaaccttaagtattgcttagttattctaaaccaacccctggataattatttccgccatctctggaacaaggcgttactaagagcttgcgccgatggaggcgccaaccggctctatgatatcactgaaggcgagagagaatcatttctgcccgaattcattaatggggacttcgacagcatccgccctgaggtgagggagtactacgcgaccaaaggctgcgaacttatcagtacccccgaccaagatcataccgacttcacgaagtgtctgaagatgctccagaaaaagatcgaagaaaaagatttgaaggtggatgtgatcgtgaccctaggcggactggctggccggtttgatcaaattatggccagcgtgaacaccctgttccaagctactcacattacaccctttcctattattataatacaggaggagtcgcttatataccttctgcagccttag

SEQ ID NO: 137740 - DNA, 693 bp, synthetic construct
  misc_feature 1..693: note = Description of Artificial Sequence: Synthetic coding sequence
  source 1..693: mol_type = other DNA
atggcccaagggctgattgaggtcgagagaaagttcctgcctggacccggaacggaggaacgattgcaggagctcggaggcaccctcgaatatcgcgtgacattcagagacacatattatgacacgccagagctaagcctgatgcaagctgaccattggttgcggaggagagaggacagcggttgggagctgaaatgtcctggagcagcgggcgttcttggacctcacaccgagtataaggaactcacggctgagcctacaattgttgcccaactgtgcaaagtcttacgtgctgacggactgggcgccggtgatgttgctgcggtgctggggcccctgggattgcaggaagtagcctctttcgtgaccaagaggagcgcttggaagcttgtgctcctgggagccgacgaagaggaacctcaactaagggtggacctggatactgcagacttcgggtacgccgtgggggaagtcgaggctttagtgcatgaggaagccgaagtcccgacagccctggaaaaaatccaccgactgtcttctatgttaggtgttccagctcaagaaactgctcccgccaagcttatcgtgtacctccagaggtttcggccacaggactatcagcggctgcttgaggtcaattccagccgtgagcgaccccaggagaccgaggaccccgaccactgtctagggtag

SEQ ID NO: 137741 - DNA, 693 bp, synthetic construct
  misc_feature 1..693: note = Description of Artificial Sequence: Synthetic coding sequence
  source 1..693: mol_type = other DNA
atggcccagggtcttattgaggtggaaagaaagttcctgcccgggcctggaacagaggagcggctccaagagcttggcggcacgctggagtatagagtgacttttagagatacctactacgacactcctgagctgtctctgatgcaagctgatcattggcttcggcggcgtgaggattccggatgggagctgaagtgccctggagccgccggagtcttgggaccccacactgagtacaaggaattgaccgcggagccaactatcgtcgctcaattgtgtaaagtcctccgcgccgatgggcttggagccggcgatgttgctgcagtcctggggcccctgggactacaagaagtggcatcttttgttaccaaacgctctgcttggaaacttgtgctgctgggagccgacgaagaggaaccacagctacgcgtcgacctcgataccgccgactttggttacgctgtcggcgaagtcgaagcgctggtccatgaagaggccgaggttcctactgcgttggagaagatacataggctgtcaagcatgctcggggtccccgctcaagagaccgccccagctaagcttatcgtatatctccagcgttttcgcccacaggattatcagagactgttggaagtgaactctagccgtgaaagacctcaggaaacagaggatccggaccattgtttaggctag

SEQ ID NO: 137742 - DNA, 372 bp, synthetic construct
  misc_feature 1..372: note = Description of Artificial Sequence: Synthetic coding sequence
  source 1..372: mol_type = other DNA
atggcccagggcctcattgaggtggagcggaagtttctcccaggtcctggcactgaggagcgtctgcaggaactagggggcaccctggaatatcgcgtgacattcagggatacttattatgacacaccagagctgtcgctgatgcaggctgatcactggctgcggaggcgcgaggattccggctgggagctgaagtgccccggggccgccggggtacttggcccccacacagagtacaaggaattgaccgccgagcccacaattgtcgcacaattatgcaaggtgctcagggcagatggactgggggcgggagatgtcgccgccgtgctgggccctctcggtcttcaggaggtggcgagctttgtcacttag

SEQ ID NO: 137743 - DNA, 2070 bp, synthetic construct
  misc_feature 1..2070: note = Description of Artificial Sequence: Synthetic coding sequence
  source 1..2070: mol_type = other DNA
atgaagccccccgcggcatgtgccggcgacatggctgatgccgcttcgccctgctccgtggtgaatgacctgcgttgggatctcagcgcccagcagatcgaagagagaacacgggagctgatcgagcagacgaaacgggtgtacgaccaagtaggaactcaagagttcgaagatgtttcatatgagtccactttaaaggcgttagctgatgttgaggtcacttatacagtccaaaggaatatcctcgactttccacagcacgtttctccatctaaggacatacgtaccgcttctaccgaagcagacaaaaaactttcggaattcgacgtggagatgagtatgcgagaggacgtctaccaaaggatcgtgtggctacaggagaaggtgcagaaggattctctgaggcctgaagcagctcggtacctggagcgcctgattaaacttgggagacgcaatggtctgcacctgccgagggagacgcaggaaaatattaaaagaatcaagaagaaattaagtctgttgtgtatcgactttaataagaatctgaatgaagatacaacctttctgcccttcaccctgcaagaactcggcgggctgcccgaagacttcctcaattccttggaaaagatggaagatggcaagctgaaagtaaccctcaagtacccacattactttcctcttctaaagaagtgtcatgtgcctgagacacgcagaaaggttgaggaagccttcaattgtcgatgtaaggaggaaaattgtgccatcctgaaggagttagtgacactgcgggcacagaaatctcgcttgctaggatttcatactcacgccgattatgtgcttgagatgaacatggccaaaacctcccagacagtagccacattcctcgatgaactggcacagaaactgaagcctctgggcgagcaggaacgcgccgtgatcctggagctcaaacgcgcagaatgtgaacgtagagggctgccatttgatggtcggatacgtgcatgggatatgagatactatatgaatcaggtcgaggaaactaggtactgtgtggatcagaacttgctgaaagaatattttccagtgcaagtcgttacacatggtcttcttggcatatatcaggagctgttgggacttgctttccatcatgaagagggcgcatctgcatggcacgaggacgtgaggctctacaccgcaagggacgctgcatctggtgaagtggtgggtaaattttatctcgatctctaccctagggagggcaagtacggccatgcagcgtgtttcggattacagcctgggtgcctgcgacaggacggctctcgccagattgctattgccgctatggtggcaaatttcaccaaacccaccgctgatgccccttcactgctccagcatgatgaggtggaaacttattttcacgaatttggtcatgtgatgcatcagctttgctcacaggccgagttcgccatgttttcaggcacgcacgttgaacgggactttgtggaggcaccctcacaaatgctggaaaattgggtctgggagcaggagccgctgttaaggatgagcagacactacagaaccgggtccgctgtgcctagggaactgctggagaagctcatcgaatctcggcaggctaacacaggactgttcaacctccgccagatcgtgctggcaaaggtggatcaggcgctccatacacagactgacgccgaccccgcagaggagtacgcccggctgtgccaggagatactgggagtacctgcaacccccggcaccaacatgccagcgactttcggccatctggccggcggctatgacgcacaatactatggttacctctggtctgaggtgtactccatggacatgttccacactaggttcaaacaggaaggcgtgttgaactcaaaagtcggtatggactacaggtcctgcatcttgaggcccggaggctccgaggatgcttctgcaatgctgaggcggtttcttgggagggatccgaagcaggatgctttcctgctttcaaagggacttcaagtaggaggttgcgagcccgagccacaagtgtgctag

SEQ ID NO: 137744 - DNA, 777 bp, synthetic construct
  misc_feature 1..777: note = Description of Artificial Sequence: Synthetic coding sequence
  source 1..777: mol_type = other DNA
atgttcagtggaacacacgtcgaacgcgactttgtagaagctccctcccaaatgcttgaaaattgggtctgggagcaagaaccccttctgcgcatgtcgcgacactataggactggaagtgcagtgccacgcgagctgctcgaaaaattgattgagagccggcaggcgaatactggcttgtttaatctaagacaaattgtcctagcaaaggtcgaccaggctctgcatacacagacagacgccgacccagctgaagaatacgctcggctgtgccaagagatcctgggagtgcccgcgacccccgggaccaacatgcccgccacattcggacacctcgccgggggatatgacgcccagtactatggatatctgtggagtgaggtttactctatggatatgtttcacacacgcttcaaacaggaaggcgttctgaactctaagttccctcattatgaagtgaggcccctgaggcacgtgagcctgtgtctacctcttacctggtgcgatcccggaagcggacagcccccagagagcctgacccgaaatcgctggttgcccgctctgagagcaggccccgcactcccgggctgcaacatcgccctcggctctctccaggtggggatggattacaggtcttgtattctgaggccaggcgggtcggaggacgccagcgctatgctaaggagattcctcggccgagaccctaaacaggacgcttttctgctgtcgaaaggcctccaggtgggcgggtgtgaacccgagcctcaggtctgctag

SEQ ID NO: 137745 - DNA, 738 bp, synthetic construct
  misc_feature 1..738: note = Description of Artificial Sequence: Synthetic coding sequence
  source 1..738: mol_type = other DNA
atggacggtactcgcacctcacttgatattgaagagtattctgatacagaggtccagaaaaatcaagttctgacactggaggaatggcaggacaaatgggtcaacggaaaaaccgccttccaccaggaacagggccaccaactgttgaagaaacatctggacaccttcttgaagggtaagagcggactgagagtttttttccccctctgtggaaaagccgtcgaaatgaagtggtttgcagacaggggccatagcgtggtgggggtggaaatctctgaactcggcattcaggaattcttcactgagcagaacttatcctactcagaagagcccattacggagatccctgggacgaaggtttttaagtcaagctcaggaaatatatccctgtattgctgctccatcttcgacctgccgagaactaacatcggtaaattcgacatgatatgggatcggggcgctctggttgcaattaatcctggggaccggaagtgttatgccgataccatgttcagtctcctcgggaaaaaatttcagtatctgttatgcgtactatcttacgatcccaccaaacatccaggccccccattctatgtgccccacgctgagattgagaggctgttcggaaagatctgtaatattcgttgtctggagaaagtggacgcctttgaagagcggcacaagtcatggggcatcgactgcctatttgaaaaactatacttactgaccgaaaaatag

SEQ ID NO: 137746 - DNA, 519 bp, synthetic construct
  misc_feature 1..519: note = Description of Artificial Sequence: Synthetic coding sequence
  source 1..519: mol_type = other DNA
atggaaaccaggccccgcctgggcgctacctgtttactcggattctcattcctattgctggttatctcatccgacggccacaatggccttggaaaaggctttggcgatcacatccattggcgcaccctagaggacggtaagaaagaagccgccgccagcggactccccctgatggtgatcatccataaaagctggtgcggggcgtgcaaggccctgaagccaaagttcgccgagtctaccgagataagtgagttatctcataactttgtcatggtgaatcttgaagatgaagaggagcccaaagatgaagacttcagtccagatggcggctatattcctagaatcttgtttctcgatcccagcggcaaagtacatcccgagattataaacgaaaacggtaatccaagctataaatatttttacgttagtgccgaacaggtggttcagggtatgaaggaagcccaggaacggctgactggcgatgcctttcggaaaaagcacctcgaggacgaactgtag

SEQ ID NO: 137747 - DNA, 1767 bp, synthetic construct
  misc_feature 1..1767: note = Description of Artificial Sequence: Synthetic coding sequence
  source 1..1767: mol_type = other DNA
atggcgagtaagaagcgagaagtgcagctacagacagtgatcaataaccagtctttgtgggatgaaatgctgcagaataaaggcttgaccgtgattgatgtataccaggcttggtgcgggccgtgtagagctatgcagcccttatttcggaaactcaaaaatgaattgaacgaagatgagatactgcacttcgctgtggcagaagctgacaatattgttactttacagcccttccgagacaaatgcgagccagtgttcctgttttccgtgaacggcaaaattatcgaaaagatccagggagctaacgcaccgctggtcaacaagaaggtgatcaacctgatcgacgaggagagaaagatcgctgctggggagatggcccgtccacaatatccagagatcccactggtcgatagcgatagcgaggtaagtgaggaaagcccctgcgagagcgtccaggagctgtatagcatcgctatcattaaacctgacgccgtcatttccaagaaggttctagagatcaagcggaagattaccaaggctgggtttatcatcgaggccgaacacaaaaccgtcctgaccgaggaacaggtggtgaatttttattccaggattgcagatcagtgcgacttcgaagaattcgtgagcttcatgactagcggcctctcatacatcctagtcgtgtcgcaaggctccaagcacaatcctccatccgaggagactgaaccacaaactgatacggagccaaacgagaggtctgaagatcagcccgaggtggaggcccaagtgacgccaggaatgatgaagaacaagcaggattccctgcaggaatacctggagaggcagcatttggctcagctgtgcgacattgaggaggacgcggctaacgtagctaaattcatggatgccttttttcccgacttcaaaaagatgaaatctatgaaactcgagaaaaccttggcactgctcaggcctaatctttttcacgagcggaaggacgatgtgttgagaatcattaaagacgaagacttcaaaatcctggagcagaggcaggtggtcctcagtgagaaggaggctcaggctctgtgtaaagagtacgaaaatgaggactatttcaacaagctgattgaaaacatgaccagcggcccctctttggccctcgtcttactgcgggataacggactccagtattggaaacagttacttggcccacgcacagtagaggaggcgattgagtattttccagaatcgctgtgtgcccaatttgctatggactccctgccggtaaatcagctgtatgggagcgacagccttgagacggcagaaagggagatccagcacttcttcccacttcagagcactcttgggttgattaaaccacatgccacaagtgaacagcgggagcagatcctgaaaattgtcaaggaagccggatttgacttgacccaggtcaaaaagatgtttttgaccccagagcagattgagaagatatacccaaaagtcacaggaaaggatttttataaggatctgctcgagatgctctccgtaggacccagtatggttatgattctgaccaaatggaacgccgtggcggaatggaggcggctgatgggccccaccgatcccgaggaagctaagctgctgtccccagacagcatcagggctcaatttggaatttcaaaattaaagaacatcgtgcacggcgctagcaacgcctacgaagctaaagaggtcgtaaatagactgttcgaagaccccgaggagaactag

SEQ ID NO: 137748 - DNA, 1767 bp, synthetic construct
  misc_feature 1..1767: note = Description of Artificial Sequence: Synthetic coding sequence
  source 1..1767: mol_type = other DNA
atggcatctaagaagcgtgaagtgcagctccaaaccgtgatcaataatcaatcactatgggacgagatgttacagaataagggcctgaccgtgattgatgtgtaccaggcctggtgtggaccgtgccgggcgatgcagcccctgtttagaaagctaaagaacgaactcaatgaggacgaaatcctgcactttgctgtcgctgaagccgataacatcgtgacgctgcagcccttccgcgataagtgtgaacctgtgttccttttcagcgtcaatggcaaaatcatcgaaaagatccagggcgctaacgccccacttgtgaataagaaggtgataaatctgatcgacgaagagcggaaaattgcagctggcgaaatggcccgcccacagtatcccgaaattcctctggtagattccgactctgaagtaagcgaggagtctccctgtgagtccgtgcaagagctgtattccatcgcaataattaaacccgatgcggtgatctccaagaaggtgcttgaaataaaacggaagatcaccaaagccggctttatcatcgaggcagaacacaaaactgtgctgactgaagagcaggtagtgaatttttattcacgtattgccgatcaatgtgattttgaggagttcgtaagttttatgactagcggcctgagctacatactggtggtttctcagggaagcaagcacaatcccccaagcgaagagacagagccccagactgacacagagcctaatgaaaggagcgaggatcagccggaggtggaagcccaggtcacccctggaatgatgaagaacaagcaagatagcctccaggagtatctggagaggcagcatctagcgcagttatgcgacattgaggaagacgccgccaatgtggctaagtttatggatgcttttttccccgattttaagaaaatgaaatcgatgaaacttgagaaaacattggctctgcttcggccgaatttattccatgagcgaaaggatgacgtgctgcggatcataaaggatgaggattttaagatacttgagcaaaggcaggtcgttctcagtgagaaggaggcccaggcgctgtgcaaggaatatgaaaatgaagactactttaataagttgattgaaaacatgacatccggcccgagcctggcgttggtgttgctgcgcgacaacggactgcagtactggaaacagcttctcggacctaggactgtggaggaggctatagagtactttcctgagagtctttgtgctcagtttgcaatggactcccttccagttaatcagctctatggctcagatagtttggagaccgcagaacgcgagattcagcatttctttcccctgcagtccacactgggactgataaaaccgcacgccacatcagaacagcgcgaacagatcctgaaaattgttaaagaagcgggcttcgatctgacacaggttaagaagatgtttttgacccccgaacagatcgagaaaatctatccaaaggtgacaggaaaggacttttacaaggatctgcttgaaatgctgtccgtgggcccctccatggtaatgattttaacaaaatggaacgccgtagctgagtggcggcggctgatgggtcccactgacccagaggaagccaagctcttatcccctgacagcattagagcacagttcgggatcagtaagttgaagaatattgttcatggcgcaagtaacgcatacgaggctaaggaagtggtcaaccgtctgtttgaagatcccgaagaaaattag

SEQ ID NO: 137749 - DNA, 681 bp, synthetic construct
  misc_feature 1..681: note = Description of Artificial Sequence: Synthetic coding sequence
  source 1..681: mol_type = other DNA
atggaagccgatgcctccgtcgacatgttttcaaaggtcctcgagcatcagttattacagaccaccaagttggtggaggagcacttggattccgagatacagaaactggatcaaatggatgaggacgagctcgaaaggcttaaagaaaagagattgcaggccctccggaaagcccaacagcagaaacaggagtggctgtcaaaaggacatggtgaatacagagaaattccctcagagcgcgatttttttcaggaggtgaaagagtccgaaaacgtagtgtgccacttttatcgtgactccactttccggtgcaaaatactggatcgtcatctcgccatcctgtctaagaagcacctggaaaccaaattcttgaaactgaacgttgaaaaggcaccatttctatgtgaacggctccatatcaaggtaattcccactttagcattgctaaaggatggaaagacccaagattatgtggtgggctttaccgacttggggaacaccgacgacttcacaaccgagaccctggagtggaggttgggctcttctgacatcttaaactacagtgggaatctcatggagccaccgttccagaatcagaagaagtttgggaccaactttacaaaactggaaaaaaaaacaatccggggtaagaagtacgacagcgattccgacgacgactag

SEQ ID NO: 137750 - DNA, 408 bp, synthetic construct
  misc_feature 1..408: note = Description of Artificial Sequence: Synthetic coding sequence
  source 1..408: mol_type = other DNA
atggaggccgacgcaagcgtcgatatgttttccaaggttctggaacaccagttactgcaaaccacaaaactcgttgaggaacatcttgattcagaaatccagaagttagaccagatggatgaagatgagttagaacgcctgaaagaaaagaggttgcaagccttgaggaaagcacagcagcagaaacaggagtggcttagcaaaggacacggcgagtaccgagagatcccctccgaaagggacttttttcaagaggtgaaagaatccgagaatgttgtgtgccatttttatagggactctacatttcgctgtaaaattctggatagacacctcgcaattttgagtaagaaacaccttgaaaccaagtttttaaagctgaatgtggaaaaagccccattcttgtgctag

SEQ ID NO: 137751 - DNA, 627 bp, synthetic construct
  misc_feature 1..627: note = Description of Artificial Sequence: Synthetic coding sequence
  source 1..627: mol_type = other DNA
atgagtcagaaatccttggccccaagactcaacagcgtgcctttcggccggatggaggccgacgcaagtgtggacatgttctctaaagtattagagcaccagttactgcagacgaccaagttagtggaggaacacctcgacagcgaaatacagaagttggaccagatggacgaggacgaactggagagactgaaggagaagaggttgcaggcactgagaaaagcacagcagcagaaacaagaatggttgtctaagggccacggcgagtacagagaaatcccttctgagagggactttttccaggaggtgaaggagtctgagaacgtcgtatgccacttctaccgagactcaacctttcgatgcaaaatccttgaccggcacctcgccattctgagtaagaagcacctggagacaaaattcctgaagctcaacgtggaaaaggcaccattcctttgcgagcgactgcacattaaggtcattcctacactggcattgcttaaagatggcaaaactcaggactatgtggtcggattcacggaccttggtaacacagatgatttcaccactgagacgcttgagtggagactggggtctagcgacatcctcaactaccgctggtggccctag

SEQ ID NO: 137752 - DNA, 1017 bp, synthetic construct
  misc_feature 1..1017: note = Description of Artificial Sequence: Synthetic coding sequence
  source 1..1017: mol_type = other DNA
atggctgcaatggccgtcgctctgcggggattgggaggtcgatttcggtggcggacccaggcagttgccgggggggttcggggcgcggctcgcggtgctgctgcgggacagcgcgactacgatctgctggttgttggaggtggctctggcggcctcgcttgcgcaaaggaagcggcgcaacttggcagaaaggtggcagtggtcgattacgtcgagccttcgccacagggcaccagatggggactgggagggacctgcgttaacgtggggtgcatcccaaaaaaactgatgcaccaagctgcgctcctcggcggactgattcaggacgccccgaattacgggtgggaggtggcccagcctgtgcctcacgactggcgcaagatggctgaggccgtgcagaatcatgttaaatctctgaattggggccaccgcgtccagcttcaggaccgcaaggtgaaatacttcaacatcaaagcctcctttgtcgacgagcatacggtgtgtggtgtggccaaggggggaaaagagattttactgtcagcggatcatatcattatcgcaactggaggccgacctcgttaccccacccatatcgagggcgcattagagtacggcatcacttctgatgatatcttctggcttaaggagtcacctgggaagaccctcgttgtaggagcatcctacgtcgctttagaatgtgccggattcctgacagggatcggactagacactacaattatgatgaggtcaattcccttaaggggctttgatcaacagatgtcctctatggtgattgagcatatggcctcgcacggcaccaggtttctgagggggtgcgctccatcaagggtgcgccggctccccgacggccagctccaggttacctgggaagactcgaccaccgggaaggaggacactgggacctttgacactgtgctctgggcaatagctccctgtatttctgcatgtctgcctaccacagtgggtcacgcaggcaaaaaccagcgtagggactag

SEQ ID NO: 137753 - DNA, 1485 bp, synthetic construct
  misc_feature 1..1485: note = Description of Artificial Sequence: Synthetic coding sequence
  source 1..1485: mol_type = other DNA
  misc_feature 1..1476: note = DNA
  misc_feature 1477: note = RNA
  misc_feature 1478..1485: note = DNA
atggaggaccaggcaggccagagagactatgatctgctggttgtaggagggggcagtggcggacttgcctgtgccaaggaagctgctcagctcggcaggaaagtggctgtcgtggactatgtggagccctcaccccagggcacaagatggggactcgggggaacctgcgtgaacgttggctgcattccaaaaaaacttatgcatcaggctgctttgttagggggactgatccaggacgcccccaactacgggtgggaagtggcccagccagtgccacacgattggcgaaagatggccgaagctgtgcaaaatcacgtgaagtcactgaattgggggcacagggtgcagctccaagaccggaaggtgaaatatttcaacattaaggcgtccttcgttgatgagcacactgtgtgcggtgttgccaaggggggaaaggaaatcctgctgagcgcggaccatattatcatcgccaccggaggcagacctcgctaccctacacacatcgagggcgcattggagtatggaataacctccgacgacatcttctggttgaaggaatctccagggaaaacactagtggtcggagcaagctatgtagcattggagtgcgccggctttttaaccggcattgggctggatactaccattatgatgcgcagcattcctctgcgcggttttgatcaacagatgagtagtatggtaattgaacatatggcttctcacggtacacgattcctgcgcgggtgcgcccctagtagggtccggaggctgcctgatggccagttgcaagtcacttgggaggatagcaccacgggcaaagaagatacaggcacatttgacactgtactctgggctatcggacgggtccctgacacccgcagccttaatctggaaaaggccggggttgatactagtcctgatacccaaaaaattctggtggattccagagaggccacatcagtccctcatatctacgcgattggcgacgttgtggaaggaaggccagagctgactccaatcgctataatggctgggagactgctggtccagcgccttttcggtggttcgtccgacctgatggattacgacaacgtcccaacaaccgtgttcacgcctctggaatatgggtgtgtaggtctctccgaggaagaggcagtcgcacgacatgggcaggagcacgtggaggtgtaccatgcccactataagccccttgagtttactgtagcaggacgagacgcatctcagtgctacgtgaaaatggtatgtctccgcgaaccgccacaactggtcctgggcttgcactttctggggcccaacgcaggtgaagtgacacaaggtttcgctctggggataaagtgtggtgcttcctatgcccaggtcatgcggacagtgggcattcacccgacctgctccgaggaggtcgtgaagctgcggatatccaaaagaagtgggcttgaccctacagtgaccgggtgttgagggtag

SEQ ID NO: 137754 - DNA, 1575 bp, synthetic construct
  misc_feature 1..1575: note = Description of Artificial Sequence: Synthetic coding sequence
  source 1..1575: mol_type = other DNA
  misc_feature 1..1566: note = DNA
  misc_feature 1567: note = RNA
  misc_feature 1568..1575: note = DNA
atggccgccatggctgtcgcgctgcggggcctgggaggacggtttagatggagaacacaggccgtagctggaggagtcaggggcgccgctaggggggccgcagccgggcagagagactacgacctgcttgtggttggtgggggatcaggcggcctcgcatgtgctaaggaggccgcacagctcggcaggaaggttgcggtggtagactacgtggagccttctcctcagggcacacgctggggcctcgggggcacatgtgttaatgttggatgcatccccaagaaacttatgcatcaagctgcactactcggcggactgattcaggacgcacccaactatggctgggaagtggcacagcctgtgccacacgactggaggaagatggcggaagcagtacagaaccacgtgaaatctctgaattggggtcaccgggtccagctgcaagaccgcaaggtgaaatatttcaacatcaaagcctcttttgtggatgagcacacagtgtgtggcgttgccaaaggaggcaaggagatactgttgtccgctgatcacatcattatcgccaccggcgggcgtccacgctaccccacacatatagaaggcgccctggagtatggaattaccagtgacgatatcttctggttaaaggaaagcccaggcaaaacattagtcgtcggcgcatcctatgttgcacttgaatgtgccggttttctcactggtatcggcctggatacgacaattatgatgcgatctatcccactcaggggtttcgaccagcaaatgagcagtatggtcatagagcacatggcatctcacggaacacgatttctgagggggtgcgcgcccagccgggtgagaagacttcctgacgggcagctgcaggtaacatgggaggactcaacgactggcaaagaggatactggaacatttgacacagttctatgggctataggacgcgtaccagataccagaagtctgaatctcgaaaaggccggagtcgatacttcccccgatacacagaagatccttgtcgattcacgggaggcaaccagcgttccccatatatatgcaatcggagacgtcgtggagggccggcccgaattgacccccatcgcaatcatggcgggaaggctcttagtacagcgcctgtttggcggctcaagtgacttgatggactatgataacgtgccgaccacggtattcactccgttggagtacggctgcgtgggcctttccgaggaggaggcagttgcacggcacggtcaggagcacgttgaagtgtaccacgcccactacaagcccttggaatttactgtggccggccgcgacgcttctcagtgctacgtgaaaatggtttgtctgcgtgaacccccacagctggtcctgggcctgcatttcctcggccccaacgccggcgaagttacccagggcttcgcactcgggatcaaatgtggagcctcctacgcccaggttatgaggacagtgggaatccaccccacctgtagcgaagaagttgtgaaattgcgcatttccaaaagaagtggcctagaccccacagtgaccggttgctgagggtag

SEQ ID NO: 137755 - DNA, 1566 bp, synthetic construct
  misc_feature 1..1566: note = Description of Artificial Sequence: Synthetic coding sequence
  source 1..1566: mol_type = other DNA
atggcagctatggcagtggcactcaggggtctaggcggcagattccgctggaggacacaagccgtggctggcggcgttagaggtgcagcacgtggagccgctggccagagggactatgatctgcttgtggtgggtggtggttcagggggcctagcctgtgcaaaagaggctgctcagctgggacggaaagttgcagtggtggactacgtggagccatctccacaaggaactcggtggggactgggtgggacctgtgttaacgtagggtgcattcctaaaaagctcatgcaccaagccgccttactcggggggcttatacaggatgctcctaattacggttgggaagttgcacagcccgtgccacacgactggagaaaaatggccgaagccgtgcagaaccatgtcaaatcattgaattggggccaccgcgtgcagctccaggatcgtaaagtgaagtactttaacataaaagcaagctttgtggacgagcatacagtttgtggcgtcgccaaggggggaaaggagatactgttgagcgcagaccatataattattgctactggtgggcgccctcgctaccccacgcatatcgagggagccctggaatatgggatcacctctgatgatatattctggctgaaggagtcgccagggaaaactcttgtcgtgggggcgtcttacgttgccctggaatgcgctggcttccttaccggtattggtctcgataccaccattatgatgaggagcatacctctccgggggttcgatcagcagatgagcagtatggtgatcgagcatatggccagccacgggacaagatttttgcggggctgtgcacctagccgggtaaggagactgcctgacggtcagctgcaggtgacctgggaggactcaactacgggcaaagaggacacagggacgttcgatactgtgctgtgggctatcggccgcgtccccgacacaagatctctaaatttagaaaaagccggcgttgatacgagtccagacacccagaagattctcgtcgacagtcgggaagctacaagtgtccctcacatatatgcaatcggcgacgttgtggagggtagaccggagcttacccccatcgcaattatggctggtaggctgctcgtgcagcgcttgtttggaggtagcagcgatctcatggattatgacaatgtacccacaacagttttcacacccttggagtatggatgcgttggactctccgaggaagaagctgtggctaggcacggtcaggaacacgtcgaggtctaccacgcacattataaaccgctcgaattcacagttgccgggagggatgctagccaatgttatgtgaaaatggtgtgtctcagagagccacctcagctcgtattaggcttacacttcctgggccccaatgcaggagaagtgactcaggggttcgccctgggcatcaagtgtggcgcaagttatgcccaggttatgagaacagtcggaatccaccccacttgcagcgaggaggtggtgaaactgagaatctccaagagatcgggtcttgatccaaccgtgactgggtgttag

SEQ ID NO: 137756 - DNA, 1569 bp, synthetic construct
  misc_feature 1..1569: note = Description of Artificial Sequence: Synthetic coding sequence
  source 1..1569: mol_type = other DNA
atggctgccatggctgtggctctccgaggccttggcgggcggttccgttggcgaacgcaggcagtggccggcggcgtgcgtggtgcagcacgcggagccgccgctgggcaacgagactacgatctcctcgtggtcggcggaggaagtggcggcctggcttgtgcaaaagaagccgctcagctgggcaggaaggttgcagtggttgattatgtagaaccttcaccacagggtacacggtggggactcggtgggacatgtgtcaatgtgggttgcatccccaagaaattgatgcaccaggcagccctgctgggcggtcttattcaggatgcgcccaattacggttgggaagtggcacagccggtgcctcacgattggaggaaaatggctgaggcggtgcagaaccacgtaaaatctctgaactggggtcacagagtgcagttgcaagaccgaaaggttaagtattttaatattaaggcatcatttgtggacgagcatacagtttgcggcgtcgcgaagggaggaaaagaaatcctgctgagcgcggatcatataatcatagccaccggggggaggcccaggtacccaacacacatcgagggcgccttggagtatggcatcacgagcgatgacatcttctggctcaaggagagccccggcaaaaccctgccagtaagcgtctcgtatgtggcactcgagtgcgccggatttctaacggggattggtctagacacaacgattatgatgagatctatcccccttcggggcttcgaccagcaaatgtccagtatggtgatagagcacatggcctctcatggtaccagattcctccgcgggtgcgccccgtccagggtgcgacgcctgcctgacggtcaattgcaggtcacctgggaagattcaacaacaggtaaagaggacaccggtacattcgacaccgtcctgtgggctattgggagggtgccagacacacggagcctgaacctcgagaaagccggcgtagacactagccccgatactcagaagattctggttgactccagggaggcaacttctgtccctcatatatatgccattggggacgtggttgagggcaggccggaactgactccaatcgccattatggcgggacggctgttagtgcagcgtctattcggagggtcctccgacctgatggattacgacaacgtccccactaccgttttcacccccctagaatatggctgtgttggcctaagcgaagaggaagccgtcgccagacacggccaggagcacgtggaagtttaccacgctcattataaacctctcgagttcactgttgccggaagagatgcctcacagtgttacgtgaagatggtctgcctgagggagcctccacaacttgtcctgggcctgcattttcttggccctaacgccggcgaagtgactcaagggttcgcgttaggaataaagtgtggagcgtcatacgctcaggtgatgcggacggtggggatccatcctacttgtagtgaagaagtggtgaaactgcgtatctccaagaggagtggactggacccgaccgtgacgggctgctag

SEQ ID NO: 137757 - DNA, 1281 bp, synthetic construct
  misc_feature 1..1281: note = Description of Artificial Sequence: Synthetic coding sequence
  source 1..1281: mol_type = other DNA
atgcaccaggcagccctcctgggcggattgatacaggacgctcctaactacgggtgggaagtggcacaacccgtgccacatgattggcgaaagatggcagaggcagttcagaatcatgtgaagtcactcaactggggccatcgagtgcagctacaagaccggaaagtaaagtacttcaatattaaggccagttttgtggacgaacacaccgtgtgtggtgtggcaaaaggaggcaaagaaattctattaagcgccgaccatattatcattgctaccggcggccggccacggtatcccacacacattgagggcgccctcgaatacggaatcacttcagacgacattttctggctgaaggaaagccctggcaagacctgcgtagtagcacacgcctatgtcgctctcgaatgcgccggtttcctcactggcattgggctggatacaaccattatgatgcgttccattcccttaagaggttttgatcaacagatgtcttcaatggtcatcgaacacatggctagccacgggacccgattcctgcgtgggtgtgccccaagtcgggtgcggcgcctgcctgatggtcagctgcaagttacgtgggaggactccacaacaggtaaggaggatacaggcaccttcgacaccgtcttgtgggctattggtcgcgtaccggacactaggtctctgaatcttgagaaggccggtgttgacacttctccagatacacagaaaatcctggtggactctcgagaagctactagcgtgcctcatatatacgccatcggagatgtcgtggaaggcagaccagagttaacacccatcgccatcatggccggccgcctcttggtacagcgcttattcggaggctcctccgatctgatggactacgataatgttcccacgactgtgttcactccgttagagtacgggtgtgtgggactctctgaggaggaagctgtcgcccgccatggacaggaacacgtggaggtgtaccacgcccattacaagccgctggagttcaccgtcgcaggcagagatgccagccagtgctacgtgaaaatggtgtgcctgagagagcctcctcagctcgtcttaggactccactttctcgggcccaacgcgggggaggtgacccaaggcttcgcgctgggaattaaatgtggcgcttcatacgcacaggtcatgcgaactgttggcatccaccctacttgcagcgaggaggttgtcaagttgcggatttctaagagatctggcttagaccctacggtgacgggctgttag

SEQ ID NO: 137758 - DNA, 1479 bp, synthetic construct
  misc_feature 1..1479: note = Description of Artificial Sequence: Synthetic coding sequence
  source 1..1479: mol_type = other DNA
atggaagaccaggccgggcaacgggactatgatctcctcgtcgtagggggtgggtcagggggcttagcctgcgctaaggaggccgcacaactagggagaaaggtcgcggtcgtagactacgtcgagccttccccgcagggaacccgatgggggctgggcggcacttgtgtaaacgttgggtgtatacccaagaagctgatgcatcaggctgccctgctgggcggactaattcaggacgctcctaattacgggtgggaagtggcccagcctgtgcctcacgactggcggaaaatggccgaggccgtccaaaaccacgtaaagagcttgaattggggccatcgggttcagcttcaagaccggaaagtgaaatattttaatatcaaggcctcttttgtggatgaacatacagtctgcggcgtggcaaagggcggaaaagaaatactgctgtcagccgatcacattatcatcgcaacaggtggcaggccccgataccctacccatatcgaaggcgctctggagtatgggattacatcagatgacatcttctggttgaaggagagccccggcaagaccctggtggttggcgcctcctatgtcgccctggaatgtgctggcttccttacaggcatcgggctcgacactaccataatgatgcgttccataccactcagaggcttcgatcagcagatgagcagtatggtcattgagcacatggcatcccatggcacgcgctttctgagaggttgtgctcctagccgagttcgacgcttgcctgacggtcagctgcaagtcacctgggaagattccacaaccggcaaggaggacactgggaccttcgacacagtgttgtgggccataggacgcgttccagatacccggtccctcaacctcgagaaggcgggcgtggacacaagcccagacacacagaaaatcctggtagatagcagagaggccacaagtgtacctcacatatacgcgataggagatgttgtcgagggccggccagagctgactccaatcgccattatggctgggcggttgctcgtgcagcgcctatttggcggatcctctgatctgatggattatgataacgttccgaccaccgtgtttaccccactagagtatgggtgcgtcggcctgtctgaggaggaggctgtggcacggcatgggcaggaacatgtcgaagtgtaccatgcccactacaagcctctcgaattcacagtggccggccgcgatgccagccaatgctacgtgaagatggtgtgtctgcgggagccaccccaattggtgcttggactgcactttctcggccctaatgccggagaagtgacacagggtttcgcactgggtatcaagtgcggggcatcatacgcccaggtgatgagaacggtgggaattcacccaacctgttctgaggaggtcgtgaaacttcgcatctccaaaagaagcggactcgatcccaccgtcactgggtgctag

SEQ ID NO: 137759 - DNA, 429 bp, synthetic construct
  misc_feature 1..429: note = Description of Artificial Sequence: Synthetic coding sequence
  source 1..429: mol_type = other DNA
atgtcttatatgctgccacacctgcacaacggttggcaggtcgatcaggcgatattatccgaggaagacagagtggtggtgatacgttttggccacgactgggaccctacttgcatgaagatggacgaagtactctattctattgccgagaaagtaaagaattttgctgtgatctacttagtggatatcaccgaggtgcccgatttcaataaaatgtacgagctgtacgacccctgcactgtgatgttcttttttagaaacaagcacatcatgatcgatctggggacaggcaacaataacaaaatcaattgggctatggaggacaagcaggagatggttgacatcattgagactgtgtaccggggcgctcgcaaagggcgggggctggtcgtcagtcccaaagactatagtacaaaataccggtactag

SEQ ID NO: 137760 - DNA, 276 bp, synthetic construct
  misc_feature 1..276: note = Description of Artificial Sequence: Synthetic coding sequence
  source 1..276: mol_type = other DNA
atgagttatatgttaccccatttacacaatggctggcaagtagaccaggctatcttgtccgaggaggatcgggtggtcgtaattcggtttggccatgattgggatcccacatgcatgaagatggacgaggtcttatacagcattgctgaaaaggttaagaactttgccgtcatctacctggtggacataacagaggtgccagatttcaacaagatgtatgaactgtacgatccctgtactgtgatgttctttttttcatatcaccgcgggtggtag

SEQ ID NO: 137761 - DNA, 894 bp, synthetic construct
  misc_feature 1..894: note = Description of Artificial Sequence: Synthetic coding sequence
  source 1..894: mol_type = other DNA
atggtccatcaagtcctgtatagggcccttgttagtacaaaatggctggcggaatctatccgcacgggaaagctgggtcccgggctgcgggtgctggacgcctcttggtactcgcctggaacaagagaagcacgaaaggaatatttagagcggcacgtcccgggagcttcattcttcgacattgaagagtgcagagataccgcatccccctatgagatgatgctgccctcagaggctggattcgctgagtacgttggaaggctgggcattagtaaccatacacacgtcgtggtttacgacggggagcacttgggttctttctatgccccacgggtgtggtggatgttcagggtctttggtcaccgcaccgtttcagtgttgaatggcgggttccgtaactggctaaaggaagggcacccagtgacttccgagcccagtagacccgagccagctgttttcaaggccacgcttgatcggtcattgctgaaaacctatgaacaagtactcgagaacctggagagcaagcgctttcagctggtagacagtagatctcaagggaggttcctgggcaccgagcccgagccggacgcagtagggctggattccggtcatatcagaggagctgtgaatatgccctttatggactttttgaccgaggacggattcgagaaggggcctgaggagctacgcgctctattccagaccaagaaggttgatctcagtcagccactgattgccacatgcagaaaaggcgttaccgcctgccatgtggctttggcggcctacctttgtggaaagccagatgtggctgtgtacgacgggtcttggtcagaatggtttagacgggcacctccggaatcccgtgtgtcccagggtaaaagtgagaaggcctag

SEQ ID NO: 137762 - DNA, 894 bp, synthetic construct
  misc_feature 1..894: note = Description of Artificial Sequence: Synthetic coding sequence
  source 1..894: mol_type = other DNA
atggtgcatcaggttctttatcgtgctctcgtctccaccaaatggctagcagagagcatccgcacaggcaaattgggccccggtctgagagtgttggatgcaagttggtactcacccgggacccgggaggctagaaaggagtaccttgagcggcacgtccctggtgcttcattctttgacatcgaggagtgcagagacactgctagtccttacgaaatgatgctccccagtgaagccggcttcgccgagtacgttggacgcctggggataagcaaccatactcatgtggtcgtctacgacggtgaacaccttggctccttctatgctcctagggtctggtggatgttcagagtgttcgggcaccgcaccgtttccgtgttaaacggcggtttcagaaactggctaaaagaagggcaccctgtaacgagcgagccatcgagacctgaacctgccgtgttcaaggccaccttagaccgtagtctgctgaagacttacgagcaggtcctcgagaaccttgaatccaagcggttccaattggtcgattctagatctcagggtcgattcctggggactgagcccgaacccgacgccgtaggcctcgactccggacacatacgcggcgctgtgaatatgccctttatggactttctaacagaagacggcttcgagaaggggccagaagagctccgtgctctctttcagaccaagaaagtggatttgagccagcctctgatcgcgacatgtagaaagggggtgacagcctgtcatgtcgccctggccgcgtacttatgtggcaaaccagatgtcgctgtgtatgatggatcctggagcgaatggttcagacgggctccgcctgagagccgggtgagccagggtaagagtgaaaaagcatag

SEQ ID NO: 137763 - DNA, 735 bp, synthetic construct
  misc_feature 1..735: note = Description of Artificial Sequence: Synthetic coding sequence
  source 1..735: mol_type = other DNA
atggtgcaccaggtcctttacagagcactggtgtcgaccaagtggttggcagagtctattagaactgggaagctgggtcccggactgagagtgctggacgcatcttggtacagccccggtacccgtgaagctcggaaggaatatctggaacgacatgttcccggggccagtttctttgacattgaagaatgccgggatacggctagcccgtatgagatgatgttgccaagtgaagccggttttgccgagtacgtcgggcggcttggcatctcaaatcacactcacgtggttgtctatgatggagagcacttgggatccttctatgcccctagggtgtggtggatgtttagggtgttcggtcatcgtactgtgtctgtgctgaatggaggcttccgaaactggctgaaggaggggcacccagtcacgagtgaaccctctaggcccgaaccagcagtattcaaagcaaccctcgaccgctccctcctgaaaacctatgaacaagttctggagaacctagagtcgaaaagatttcagctcgtggatagtcgaagtcagggcaggtttctgggcaccgaaccagagcctgacgccgtgggactggattccgggcatattcgaggtgccgtgaacatgcccttcatggattttcttaccgaggatggctcatggtctgaatggttccgccgagctccccctgaaagcagagtttcacagggaaagagcgaaaaggcctag

SEQ ID NO: 137764 - DNA, 375 bp, synthetic construct
  misc_feature 1..375: note = Description of Artificial Sequence: Synthetic coding sequence
  source 1..375: mol_type = other DNA
atggttcaccaggtgctgtaccgggctcttgtgagcaccaagtggctggccgagagtatacgaaccggcaagctgggccccggtttgcgcgttctcgacgcctcctggtattcccccggtaccagagaggccagaaaagagtacctggagcggcatgtgcccggtgccagcttttttgacatcgaagagtgccgagacactgccagcccctatgagatgatgctcccaagcgaggcaggctttgcggaatatgtgggtagactgggcatctccaaccatactcacgtcgttgtgtacgacggtgagcatctcggaagtttctatgcccctagagtttggtggatgttccgagtgtttggtcaccgtacagtttag

SEQ ID NO: 137765 - DNA, 1974 bp, synthetic construct
  misc_feature 1..1974: note = Description of Artificial Sequence: Synthetic coding sequence
  source 1..1974: mol_type = other DNA
atgtcccccacgcctcccctgttctcgctccccgaggctcgaactagatttactaaaagcacgcgcgaggcactgaataataagaatatcaaaccactgctctccaccttttcccaggtcccaggtagcgaaaacgaaaagaagtgcacactggaccaagcatttcggggcatcctggaggaagagatcatcaatcacagttcttgcgaaaacgttctcgctataatttcactggccatcggtggggtcaccgagggaatctgtaccgcaagtacgccttttgtactgctgggggatgtactagactgtctgcccctggatcagtgtgacaccattttcacctttgttgagaaaaacgttgccacctggaaatctaatacattctacagcgcaggcaagaactacctgctcaggatgtgcaatgacctgctaagacgactgagtaagtcccaaaacacagtgttttgcggaagaattcagctctttctggcaaggctgttcccactaagcgagaagagcggcttgaacttgcagagtcaattcaacctggaaaacgtgaccgtgttcaatacaaacgagcaggaaagtactttgggccagaagcacactgaagatcgcgaggagggcatggatgtggaagaaggtgaaatgggtgacgaggaggctcccactacctgcagtatccccattgattacaatttatatcgcaaattctggtccttgcaggactactttcgcaatcctgtccagtgttacgagaagatttcgtggaagactttcctgaaatatagcgaagaagtgttggccgtgttcaaatcctacaaactggatgacactcaggcaagccgaaagaagatggaggaactgaagactggcggcgagcatgtctacttcgccaaatttttgacaagcgaaaagctgatggacctgcagctgtctgactcaaatttcaggcgccacattttgctgcagtatctcatcctcttccagtacttgaagggccaggtcaaatttaaaagctccaattatgtgttaacagacgagcaaagcctgtggatcgaagatacaactaagagtgtgtaccagctgcttagcgaaaacccaccagacggcgagcggttcagtaagatggtggaacatatcctgaatactgaagaaaactggaattcctggaagaatgaaggatgtccttcctttgtcaaggagaggacaagtgacactaagccgacccggatcattcggaaacgcacagcgccagaagacttccttgggaaggggcctacaaaaaaaatcctgatggggaatgaagagctgacccggctgtggaatctttgcccggataatatggaagcctgcaaatccgaaactcgcgagcacatgccgacccttgaggaattttttgaggaagccattgagcaggccgatcccgagaacatggtggagaacgaatacaaggccgtcaataactccaattacgggtggcgggccctcagactgttagctcgtcgctccccacacttctttcagcctaccaaccaacagttcaaatccttgcctgaatatcttgagaacatggtgatcaagttagcaaaggaacttcctccccccagtgaggaaatcaagacgggcgaggacgaagacgaggaagataacgatgccctgctcaaagaaaacgagtcacctgatgtccgtagagacaagcccgttaccggggaacaaatagaagtgttcgcaaataagttgggggagcagtggaaaatcctggcaccctatcttgaaatgaaggacagtgagattaggcagatcgaatgtgacagtgaagatatgaagatgcgcgccaaacagctgctcgtggcatggcaagatcaggaaggcgtgcacgcaacaccggagaacctgatcaatgctttgaacaagagcggactttccgacttggcagaatctttaactaatgacaatgaaacgaattcatag

SEQ ID NO: 137766 - DNA, 4782 bp, synthetic construct
  misc_feature 1..4782: note = Description of Artificial Sequence: Synthetic coding sequence
  source 1..4782: mol_type = other DNA
atggctgctgccgcagtcgtggtgccggccgagtggatcaaaaactgggaaaaatcaggccgcggagagttcctgcacctctgtcgaatacttagtgaaaacaagtcacatgactcctcaacataccgggactttcagcaggccctgtacgaactatcttatcacgtaatcaaggggaaccttaaacacgagcaagccagtaatgtcctgagtgacatatcggaatttcgcgaagatatgccttcgatcctggcggacgtattttgtatcctggacatcgagactaattgtctagaggaaaagtccaagagagactacttcacccagctggtgcttgcttgtctctacctggtcagcgacaccgtcctcaaagagaggctggatcccgagactctcgaatctctgggcctgatcaaacagtcgcaacagttcaaccagaagagtgtcaaaataaagacgaagctgttctacaagcaacaaaagttcaatttattgcgtgaagagaatgaggggtacgccaaactcatcgctgagcttggtcaagacctgtccggctccatcactagtgacctcatactggagaacatcaaaagtcttataggctgttttaatttggaccctaatcgtgtgctcgatgtgattctggaggtgttcgagtgcagaccggagcacgatgactttttcatctcccttcttgagtcctacatgtccatgtgtgaaccccagaccttatgtcatattctcggcttcaagtttaagttctaccaggagccgaacggcgaaaccccgtcaagcctgtacagggtggctgctgttctcctgcagttcaacttgatcgatctggatgatctgtacgtgcacctgctgccagctgataactgcatcatggacgaacataagagagagatagccgaagccaagcagatagtcagaaagcttactatggtcgtgcttagctccgagaaaatggatgaaagggagaaggagaaggagaaggaagaagagaaggtagaaaaaccccccgacaaccagaagttgggactcctggaagctctgctgaagattggagattggcagcacgctcagaatattatggatcaaatgcctccgtattatgcagcttcacacaagcttatcgccctggctatctgtaaacttatacatattaccatcgagcccctttaccggagagttggagtacccaaaggcgccaagggaagcccggtcaacgccctgcagaataagagggccccgaaacaggcagagtcttttgaagatttacggcgcgacgtgttcaacatgttttgctacctgggaccacatttgtcacacgacccaattctgtttgccaaagtagtgcgcattggtaaatcttttatgaaagaattccagtcagacggaagcaagcaagaagacaaggaaaagaccgaagtgatactgagttgtttactctctatcacggaccaggtgttgctgccatcgttgtctttgatggactgcaatgcatgtatgtcagaagagctgtggggaatgtttaaaaccttcccttatcagcacagataccggctgtatggccagtggaaaaacgaaacgtacaattcacaccccctcctggtaaaagttaaagcgcagaccatcgacagggcaaagtacatcatgaaacgactgaccaaggagaatgtgaagccaagtgggagacaaatcgggaaattgtcacactccaatcccacaattctgttcgactacatccttagtcagatccagaagtacgataacctgatcactcctgtggtcgattccctgaagtatctgacctctctgaactacgacgtgctggcctattgtattattgaagcgttggcgaatccagagaaggagaggatgaaacacgacgatacaaccatttccagttggctgcagagcttggctagtttttgcggagccgtgttccggaagtaccccattgatctcgccgggctgttgcagtatgtcgcgaatcagctcaaggcgggcaagtcttttgatctcttaatcctgaaggaagtagtgcaaaaaatggccgggatcgaaattacagaggagatgacaatggaacaactcgaggctatgaccggaggtgagcagttgaaggcagaaggtgggtatttcggacagatcaggaataccaaaaagtccagccagcggcttaaggacgctctgctggaccacgaccttgcgctgccactgtgcttgctcatggcccagcaacgcaacggtgtcatctttcaggaaggcggggagaagcatctgaaattggtgggaaaactgtacgaccagtgtcacgacacgcttgtgcagttcggcggcttccttgcgtctaacctcagtaccgaggattacatcaaacgcgtgcctagcatcgatgtactctgtaacgaattccacactcctcacgacgctgcattctttctttctcggcccatgtatgcgcatcacataagctcgaagtacgacgagctcaagaagagcgaaaaggggtcaaaacagcaacacaaggttcacaagtatatcacgtcttgcgagatggtgatggctcccgttcatgaggctgtcgtgtccttacatgtgagtaaagtgtgggatgacatctcaccccagttctacgccacattttggtccctaaccatgtacgacctggcagtcccacacacttcatatgagcgcgaagtaaataaactgaaagtacagatgaaagccatagatgacaatcaggaaatgccacccaataagaaaaaaaaagaaaaagaaaggtgcacagctctacaggacaagctactcgaggaggaaaagaaacaaatggagcacgtacaacgcgttttgcaacgcctgaaactggaaaaggacaattggctgctcgccaagtcaacgaagaacgaaacaattacgaaattcctccaactgtgcatattcccccgctgtatcttttctgctattgacgcggtttactgtgcgaggttcgtggagctggtccaccagcagaagactcctaacttcagcaccttactgtgctacgaccgtgtttttagcgacattatctatacggtcgccagctgcaccgagaacgaagctagccgctatgggcgtttcctttgttgcatgttggaaaccgtgacgaggtggcattccgaccgagctacctacgaaaaagaatgcggcaattatcctggttttcttacaattctgcgcgcaactgggtttgacggtgggaacaaagctgaccaacttgattatgaaaatttccgccacgtcgtacacaagtggcactacaagcttaccaaagctagtgttcattgtctcgagactggtgagtatacccacatcagaaatatactgattgtactaactaaaatcctcccatggtacccaaaagttctgaacctcgggcaagctctagaacggagagttcataagatctgccaggaggagaaggagaagagaccggatctatatgccctagctatgggctactcgggccagctgaaaagccgaaagtcgtacatgattcccgaaaatgagtttcaccacaaggatcccccgccacgaaacgcagttgcgtcggtgcagaacggtcccggggggggacccagcagtagctcaattgggtccgcctccaaatctgatgaaagctcaactgaggaaactgataagagccgtgagcggagtcagtgcggcgtgaaggcagtcaataaggcttccagcacaaccccaaaaggaaattcatccaatggaaatagcgggtcgaacagtaacaaggccgtaaaagagaacgacaaagagaaggggaaggaaaaagagaaagagaagaaggagaaaaccccagccaccacgcctgaggccagggtgctgggcaaagatggaaaagaaaaaccaaaagaagagagaccaaacaaagacgaaaaggcgcgggagactaaagagcggacccctaagtcagacaaggaaaaggaaaaatttaagaaagaggaaaaagcgaaggacgagaagttcaaaactacagtacccaacgcagaatcaaagtctacccaggagcgggaaagagagaaagagccctcacgcgaacgggatatcgcgaaggagatgaagtccaaggaaaatgtgaaagggggcgaaaaaactccagtcagtggatctctgaaatcgcccgtgcccagatcagacatacccgaaccagaaagggaacagaaaagaagaaagatcgacacacatccatctccgtcacattctagcaccgttaaagattcgctcatagaactgaaggagtctagcgccaaactttacattaaccatacccctccacccttgtcgaagtcaaaagaacgggaaatggataaaaaggatctggataagtctcgggaacgatcgcgcgaaagagagaagaaagacgagaaagaccgcaaagaaaggaagcgggaccattccaacaacgatcgcgaggtgcctcccgatttgaccaaacggcgcaaggaggaaaatgggaccatgggagtgtctaagcacaagtctgagagtccttgtgaaagcccttaccctaatgagaaggacaaggagaagaacaaaagtaagtcttcagggaaagagaaggggtctgactcctttaagagtgaaaaaatggacaagatcagttcaggtgggaaaaaagagtcccgacacgataaggagaagatcgagaaaaaggagaaacgggattctagcgggggtaaagaagagaagaaacaccacaagtcttccgataaacaccgctag

SEQ ID NO: 137767 - DNA, 4782 bp, synthetic construct
  misc_feature 1..4782: note = Description of Artificial Sequence: Synthetic coding sequence
  source 1..4782: mol_type = other DNA
atggccgcagcggcagttgttgtacccgcggagtggataaaaaactgggagaaatctggaagaggtgagttcctccacctgtgtaggatactctccgagaacaagtctcatgattcctccacctaccgtgactttcaacaggcgctgtacgagctgagctaccacgtgatcaaaggaaacttgaaacacgaacaggcgagcaatgtcctgtccgacatctctgaatttagggaggacatgcctagtatcttggctgatgttttctgcatcttggacattgagacaaattgcctagaggagaaatccaaacgtgattactttacccagctggtattagcgtgtttatatctagtgagcgacacggttcttaaggaacgcctggaccctgagacgctcgaatctctgggtctcattaagcaaagccagcaatttaaccagaaatctgtgaaaattaaaaccaaactgttctacaaacagcagaagtttaatctcttgcgagaagaaaacgaaggctatgccaagctgatagctgagctcggacaggatctgagcggaagtatcacgtcagatttaatcctcgagaacattaagagccttatcggctgtttcaacttggatccaaatagagtcttggacgtcattttggaagtcttcgaatgtcggccagagcacgatgacttctttatttcccttttggagagctatatgtcaatgtgcgaacctcagacgctgtgtcacattcttggatttaaattcaagttctaccaggaacccaacggcgaaacaccgagttcactttaccgggtagcagcagtgttattacagttcaatctcattgacctggacgacctgtacgtacacctgctgcctgcagacaactgcataatggatgagcacaagagggagattgccgaggccaaacagatcgtgcgaaagctaacaatggtggtgctctctagcgaaaaaatggatgaacgggagaaggagaaggaaaaagaagaagagaaagtcgagaagccccctgataatcagaagctggggttgctcgaggccctgctcaaaatcggtgattggcaacacgcacagaacatcatggaccagatgcccccatactacgccgcgtctcacaaattaattgctctcgcaatctgtaagcttatccacattaccatcgaaccgctttataggcgtgtaggcgtgcccaagggcgctaaaggctccccagtgaacgctcttcagaataagagggcaccaaagcaggctgagagttttgaggatctgcggagagatgtgttcaatatgttctgttacttgggacctcatctcagtcatgaccccattttattcgccaaagtcgtgagaattgggaagtcttttatgaaggagttccagtccgacgggagcaaacaggaggataaagagaaaactgaggttatccttagttgcttactgagcatcaccgaccaggttcttctgccttctctctctctgatggactgcaatgcctgtatgtccgaggaactgtggggcatgtttaaaacgtttccataccagcaccgctatcgattatatggacagtggaaaaatgagacctataacagccaccccctcctcgtgaaagtgaaagctcagactattgatcgtgccaaatacatcatgaagagactaacgaaagaaaatgtgaagccaagtggccggcagattggaaaactgtcccactccaaccccaccattctttttgactatatcttatcccagatacagaaatatgataatctcataacccctgtggttgattcactcaagtacttaacatctctcaactacgacgtactggcatactgtatcatcgaggccctcgccaaccccgagaaagaacggatgaagcacgacgacactactatctctagttggttacagtcgcttgcaagtttttgcggagctgttttccgaaaatatcctatcgacctggcaggcctcctgcagtatgtcgccaaccaattaaaggcggggaaaagtttcgatctgctcatcctcaaggaggtcgtgcagaaaatggccggaattgagataacagaggagatgacgatggagcagctggaagccatgactggaggcgaacagctgaaagctgaaggagggtattttggacaaatcagaaacactaagaaaagtagtcagcggctcaaggatgccttactcgaccacgacctggctttaccactgtgcctcctgatggcacagcaacggaacggcgtgattttccaggagggcggtgaaaagcatctgaagctggtgggaaagctgtacgaccagtgtcacgacaccctcgtccaatttgggggatttctggcgagcaacctgtccactgaggactacattaaacgcgttccatcaatcgacgtgctatgcaatgagttccacactccacacgacgctgctttcttcctttcacgcccaatgtatgctcaccacattagtagcaaatacgacgagctaaaaaagtctgaaaaaggatcaaaacagcagcataaggtgcataaatacataacttcttgtgaaatggtcatggcccccgtccacgaggcagtagtttcattacacgtgtctaaagtctgggacgacatttcccctcagttctatgctacattttggagcctgactatgtatgatctcgcagtccctcatacctcttatgaacgcgaggtgaacaagttaaaggtacagatgaaggccattgacgacaatcaggaaatgcctcccaataagaaaaagaaagagaaagaaagatgtacggcgctccaggataagcttcttgaagaggagaagaagcaaatggaacatgtgcagcgggtactacaacgcttgaagcttgagaaggacaactggttgttggcaaagtcaacaaaaaatgagactatcacaaagtttctgcagctgtgtatttttccacgatgcattttttcagccatcgacgcagtatattgcgctcgctttgtggaactagtccatcaacaaaagaccccaaattttagtacacttctgtgttatgatcgggtgtttagcgacattatatacactgtggcatcctgtacagagaacgaagcatcacgctatgggcgctttctgtgttgcatgctggaaactgtgaccaggtggcattcagaccgggctacttatgaaaaggaatgcggcaattaccctggctttcttacaatactgcgcgccaccgggttcgacgggggcaataaagccgatcagcttgactacgagaattttagacatgtggtgcataaatggcactataaacttactaaggcgtccgtgcattgcctcgagactggtgagtacactcacatccgcaatatcctgatcgtcctcacaaagatccttccatggtacccgaaggtgttgaacctgggtcaagccctggagcgaagggtgcataagatctgccaggaggaaaaggagaagcgtcccgacctgtacgcattggccatgggttactcaggccagctcaaaagtcgtaagagctatatgatacctgaaaacgagttccaccacaaagatccacctccccgaaacgcggtagcgtcagtccagaatggcccaggggggggcccgagttcaagttctatcgggtctgcatcaaaatccgacgaatctagcaccgaggagactgacaaatctcgtgaacgctcacagtgtggggtcaaggcagtcaacaaagcatctagcaccactcctaaaggcaatagcagcaatggcaattcaggtagcaattccaacaaagctgtgaaggagaacgataaggagaagggcaaagagaaggaaaaggagaaaaaggaaaaaacacccgctactacaccagaggcgcgtgtgctcgggaaggacggcaaagagaagcccaaggaagaaagaccaaataaagacgaaaaagctcgggagactaaggagcggactcccaagtccgacaaagagaaggaaaagttcaagaaggaggaaaaggcaaaagatgagaaatttaagacaacagtgcctaacgctgaaagcaagtccactcaggagagagagcgggagaaagagccttcccgcgagcgggatattgctaaggaaatgaagtctaaggagaacgtcaaaggaggggagaagaccccggtgtccggctctctcaagagcccagtcccaagatctgacatccccgaaccggagcgtgagcagaaaagaagaaaaattgacacacatccaagtccgtcccacagcagcacagtgaaagacagcctgatcgagctgaaggagtcttcagccaaactgtatataaatcacaccccccctcccctcagtaaatccaaagagagagaaatggataaaaaagatctggacaagtctcgggaacggtctcgagaacgcgaaaagaaggatgagaaggataggaaagaacggaagcgtgatcattccaacaatgatagggaagtgccgccagatctgacaaagcgaagaaaagaagagaatggtacaatgggcgttagcaaacataaaagcgagtccccatgcgaaagcccttatcctaatgagaaggataaggagaagaacaagagcaaatcatcagggaaagagaaaggatccgactcatttaaaagcgaaaaaatggacaaaatttcatccggagggaagaaagaaagccgccatgataaggagaagatcgagaagaaggagaaaagagattcctctggaggcaaggaagagaaaaagcaccataaaagttcagacaaacatagatag

SEQ ID NO: 137768 - DNA, 2547 bp, synthetic construct
  misc_feature 1..2547: note = Description of Artificial Sequence: Synthetic coding sequence
  source 1..2547: mol_type = other DNA
atgccttccatcctggccgacgtgttctgtattctagatattgagaccaactgtcttgaggagaaatcaaagagagattactttacacagctggtgctggcctgcctgtacctagtgagcgatactgtgctcaaggagcgactggatcccgagacactcgagagtctgggtttgattaaacagagccagcaatttaaccaaaagagtgtaaaaataaaaaccaaactgttttataagcaacaaaaattcaacctacttagggaggagaatgaagggtacgcaaaactgatagccgagctgggacaggacttaagcggaagcatcacctccgatctaatcttagaaaatatcaaaagcctgatagggtgttttaaccttgatccgaatcgcgttctggatgtcatccttgaggtctttgagtgtcgacccgaacacgatgatttcttcataagcctgctcgaatcatatatgtcaatgtgtgagccacaaactctatgccacatcttgggtttcaaattcaagttttaccaagagcctaacggagaaacccccagtagtctgtaccgtgtggcggctgtcctgttgcagttcaatctcattgatctagatgacctgtatgtccacctgcttcctgccgataactgtatcatggatgagcacaagagggagattgctgaagctaagcagatagtccgcaaactaaccatggtggttctgtcctctgaaaaaatggatgagcgcgagaaagaaaaggagaaggaggaggaaaaagtagaaaaaccacctgacaaccagaagttgggcttgctggaagctctactaaaaatcggcgactggcagcatgcccagaacatcatggaccagatgccaccctactatgctgcctctcataaactcatcgccttagccatttgcaagctcattcacatcacgatcgaaccgctctatagaagagttggggttcccaaaggggccaaggggtcccctgttaatgccctgcagaataaaagagcaccaaagcaggctgagagttttgaagatttgcggagagacgtgtttaacatgttttgttatctcggtccgcatctctcccatgatccaatcctgtttgcaaaggtcgtgagaatcggtaagtcctttatgaaagaattccaatctgatgggtctaagcaggaagacaaggaaaagaccgaagttatactctcttgtctcctgtccataaccgaccaagtcctactgccttctttgagcctcatggactgtaatgcatgtatgagtgaggagctgtggggcatgtttaaaacttttccctaccagcaccgctatagactttacggccagtggaagaacgagacctacaattcgcacccgctgctcgtcaaggtgaaggcccagacaatcgaccgggctaagtacatcatgaaacggctaacaaaagaaaacgtgaaacccagcggacgccaaattggcaagctcagtcactccaatcctacgatcctctttgactacgtctgctttgagatcctgagtcaaatccagaaatacgataacttgatcacccccgtggtggatagccttaaatacttgaccagcctcaattacgacgtgctcgcttattgcatcattgaggccctggccaatccagagaaagagaggatgaagcacgacgacacgaccatttcaagttggctccaatccctggcttccttttgtggggctgtctttcgtaagtatccgattgacctggccggactgctgcagtacgtcgccaaccagttgaaggccgggaaatcattcgatctgttgatcctgaaggaggtggtgcaaaagatggccggaatcgagataacggaagaaatgacaatggaacaactcgaagccatgaccggtggggagcagctaaaggccgagggtggctatttcggccagatacggaatacaaaaaagagctcccaaaggctgaaggatgctctgctcgaccatgacttagcactcccgctgtgccttctgatggctcagcagaggaacggagtgattttccaggaaggcggagaaaagcacctgaagttagttggtaagctttacgaccagtgccacgacacgctggtacagtttggcgggtttcttgctagcaacctaagcactgaagactacatcaagcgagtgccatccattgacgtactctgcaacgagttccatacccctcacgacgctgccttttttcttagccggcccatgtatgcgcaccatatcagctcgaaatatgacgagctgaagaagtcagagaaaggttccaagcagcagcacaaggtgcataagtatatcacgagctgcgaaatggtcatggcccccgtccacgaggctgtggtgtcactccatgtcagcaaagtttgggacgatatctccccgcaattctacgcaaccttctggagcctcacgatgtacgatcttgccgtgccccacacatcctatgagcgggaagtgaacaagctcaaggtgcagatgaaagctattgacgataatcaggagatgatcccccctcaatag

SEQ ID NO: 137769 - DNA, 570 bp, synthetic construct
  misc_feature 1..570: note = Description of Artificial Sequence: Synthetic coding sequence
  source 1..570: mol_type = other DNA
taagaacagaaacggcgaaagattgacacacatccttccccgtcccactcaagcaccgttaaagactctctgatcgaactcaaggaatcctccgcaaaactttatatcaaccacaccccgccaccactgagtaagtcaaaagaacgcgaaatggacaagaaggacctggacaagagcagggagaggtcaagggaacgggaaaaaaaggacgagaaggacagaaaagagagaaaacgggaccattctaataacgatcgtgaggtaccacccgatctgacaaagcggaggaaggaggaaaacggtaccatgggggtgtcgaaacataagagcgagagcccctgtgagtcgccctaccctaacgagaaggacaaggagaaaaacaaatccaaatcatctggcaaggagaaggggtctgactcctttaaaagtgaaaaaatggacaagatcagcagtggtgggaagaaagaaagcaggcacgataaggaaaaaatcgaaaagaaggagaaacgcgactcgtctggcggtaaagaagaaaagaagcaccataagagttctgataagcacaggtag

SEQ ID NO: 137770 - DNA, 1056 bp, synthetic construct
  misc_feature 1..1056: note = Description of Artificial Sequence: Synthetic coding sequence
  source 1..1056: mol_type = other DNA
atggctgtgcccgcggccgctatggggcccagcgcgttgggccagtccggccccggcagcatggctccctggtgctccgtgtcctctggcccaagtcggtatgtattgggcatgcaggaacttttcagaggacattcaaaaactagggagtttttagctcattccgcaaaggtccattccgtggcatggtcttgtgacggacgacgtttggcttccggctctttcgataagacagcatccgtgtttctgttagagaaggaccggctcgtgaaggaaaacaattatagaggacacggggacagcgtagatcagctgtgctggcacccatccaacccagatttgttcgtgacagcgagtggcgataagacaataaggatctgggatgttcggaccaccaagtgtatcgccaccgtaaacaccaaaggcgagaatatcaacatatgctggagccctgacggccagaccatcgccgtgggtaataaggacgacgtggtgaccttcatagacgctaagacacacagaagcaaggcagaggagcaattcaaattcgaagttaacgaaattagctggaacaatgataacaatatgtttttcttgacaaacggtaacggttgcattaacattttgagttatccagagttgaagcctgtccagtctataaacgcccatcctagcaattgtatttgtattaagtttgatcctatgggcaagtactttgcaacaggatccgcggacgcattggtctcactctgggatgtcgacgagttggtgtgtgtgcgctgtttttcaaggctggactggccagttaggacgctctcattcagccatgatggcaaaatgctggcatccgcctcagaagatcactttatagacatcgccgaggtcgaaaccggagacaaactgtgggaggtgcagtgtgagtcccccaccttcacagtggcctggcaccctaaacggccactgctcgccttcgcttgcgacgacaaagatggcaagtacgactccagccgggaggcagggactgtcaagcttttcggcctgcctaacgattcttag

SEQ ID NO: 137771 - DNA, 2052 bp, synthetic construct
  misc_feature 1..2052: note = Description of Artificial Sequence: Synthetic coding sequence
  source 1..2052: mol_type = other DNA
atgtcttctgaaagttcgaaaaagcggaaaccgaaagtgatccgtagtgacggggcaccggccgagggcaagagaaaccgatccgacacagagcaggaaggcaagtattactcagaagaggcagaggtcgatctccgagatccgggacgggattacgaactgtacaaatacacctgtcaagaactgcaacgccttatggccgaaattcaggatttgaaatcaagggggggaaaagacgtcgcaatcgaaattgaagagagacgtatccagagctgcgttcacttcatgaccttgaagaagttgaacaggctggcccatatcagactgaaaaaagggcgcgaccaaacccatgaagccaagcagaaagttgacgcctatcacttgcaacttcagaatctcctgtacgaagttatgcacctgcagaaagaaattaccaagtgcctggagtttaaatctaaacatgaagagatcgatttagtgagtcttgaggagttctacaaggaagccccaccagatatatccaaagctgaggttaccatgggggatccgcaccaacagactcttgccagactggactgggaacttgagcaacggaagcgcctggcggagaaataccgggagtgtttgagcaacaaggagaaaatcctgaaggagatcgaggttaaaaaggagtatctctccagcctgcaacctagattaaactcaatcatgcaggccagcctgcccgtccaagaatacctcttcatgcccttcgaccaagcacacaagcaatacgaaacagcccgccatctgcctcccccactgtatgttttgtttgtgcaagctaccgcatacggccaggcgtgcgataagacactgtccgtcgcaatcgagggatccgtggatgaggctaaggcactgttcaaaccgccagaggacagtcaggacgacgagtcagatagcgacgctgaggaggagcagacaacgaaacgaagacgcccaaccttaggggtccagttagatgataaaagaaaagagatgctcaaaaggcatccgttgagcgtaatgttggacttgaaatgtaaggacgactctgtcctccatctgaccttctactacttaatgaaccttaacatcatgactgtgaaagccaaggtgaccaccgccatggagctgatcactccaataagtgctggtgatctgctaagtccagatagtgtgttgagctgtctctacccaggcgatcatggcaaaaagactccaaaccctgcaaaccagtaccagtttgacaaggtggggatactcacattgagtgactacgttctggaactcggccacccctacctgtgggtgcaaaaattggggggcctgcatttccccaaggaacagccacagcagacggtgatcgcagatcattctctctccgcttcccacatggagacaacaatgaaactgctgaaaacccgggtgcaatcccgtcttgcactccataaacaattcgcctctttggaacatggcattgtaccggtcaccagtgactgccagtacctgtttccagccaaagtggtgtccagactcgtgaagtgggttaccgtggcccatgaggactatatggagctacactttacgaaggacatcgtggatgccggcctagcaggggatacaaacctctactacatggctctcatagaaaggggtaccgcaaagctgcaagctgctgttgtgttgaacccgggatacagcagtatcccgcccgtgtttcagctgtgcctgaactggaaaggagaaaaaaccaatagcaatgatgataatattcgagctatggagggcgaggtcaatgtgtgttacaaggaactttgcggtccgtggcccagccatcaactcctgacaaaccagctccagaggctgtgcgtcctgctggacgtatacctggagactgagtcccacgacgattccgtcgagggaccgaaggagttcccccaagaaaaaatgtgtttgaggttattcaggggtccttcccgaatgaagcctttcaaatataaccacccccaaggatttttctcacacaggtag

SEQ ID NO: 137772 - DNA, 2052 bp, synthetic construct
  misc_feature 1..2052: note = Description of Artificial Sequence: Synthetic coding sequence
  source 1..2052: mol_type = other DNA
atgagctccgagagctctaaaaagagaaaacctaaggtgatacggtcagatggagctccggctgaaggcaaaagaaatcgttcagacacagaacaggagggaaagtactatagcgaagaggctgaagttgatctcagggatcctggcagggattatgagctgtataagtatacttgtcaggagctgcagcgactgatggccgagatccaggatctgaaaagtcgcggtgggaaggacgtagcaatcgaaattgaagaacgacggatacaaagctgcgttcactttatgactctgaagaaactgaaccggctggctcacattaggctcaagaaggggagggaccaaacgcacgaggcaaagcaaaaggtggatgcctatcaccttcaactgcagaatctgttgtatgaagttatgcatctgcagaaagagatcaccaagtgtttggaattcaaatctaaacatgaggaaatagacctggtaagcctggaggaattctacaaggaagcccctccagacatctccaaggccgaggtcactatgggagacccacatcagcaaactctggcccggcttgattgggagctggaacaacggaagcgactggcagaaaaataccgcgagtgtctgtccaacaaggaaaaaatcctaaaagagatcgaggtgaagaaggagtacctctctagtctccagccaagactgaactccataatgcaggccagtctcccagtgcaggagtacctattcatgcccttcgatcaggcccataaacagtacgagacagctagacatctcccaccacctctgtacgtactattcgtccaggcgactgcatatgggcaggcctgtgacaagaccctctcagtggccatagagggtagcgtcgatgaagcaaaggctctgtttaaaccacctgaagatagccaggacgatgagagcgactccgacgcagaagaggagcagacgactaagaggcggcgaccaactttgggcgtacaacttgacgataaaaggaaggagatgctgaagcgccacccactaagcgtgatgcttgatctgaaatgtaaggatgatagtgtcctgcatctgacgttctactacctgatgaatcttaatattatgacagttaaggcaaaggtgacgactgctatggagctgattaccccaattagtgctggggaccttctttccccagactcagttctgtcttgcctttatcccggagatcacgggaagaaaacccctaatcccgcaaatcagtaccagttcgataaagttgggattctgacactctcagactacgtactagagctgggacatccgtacctctgggtccagaagctgggcggtctccatttcccgaaagagcagcctcagcagactgttatcgccgaccactctctttctgctagccacatggaaacgactatgaagctgcttaaaaccagggttcagtcccggcttgcactccacaagcagtttgcgtctctggagcatggaattgtgcccgtgacttcggactgccagtacctatttccggccaaagttgtaagccgcctggtgaagtgggttacagttgcccatgaagactatatggagctgcactttaccaaggatatcgtggatgccgggttggccggggacaccaacctttattatatggcactcatagagaggggaactgcgaagctccaggctgcagtcgtccttaacccaggatacagctccattcctccagtattccagctgtgtctaaattggaagggcgagaaaacaaacagcaatgacgataacattcgcgccatggagggagaagtaaacgtctgttataaggaactgtgcgggccctggccaagccatcagttattaaccaaccagctgcagagactctgtgttcttctggatgtgtacctggagactgaaagtcacgatgattccgtcgagggccccaaagagttcccacaggaaaagatgtgcctcaggctgttccgcgggccctcaaggatgaagccatttaaatataaccacccccagggattctttagccatcgctag

SEQ ID NO: 137773 - DNA, 2052 bp, synthetic construct
  misc_feature 1..2052: note = Description of Artificial Sequence: Synthetic coding sequence
  source 1..2052: mol_type = other DNA
atgtcaagcgagagctctaaaaaaagaaagcccaaggttatccggagcgacggggcccccgcagaaggcaagagaaatcggagcgacaccgagcaggaaggtaagtattactccgaagaagccgaggtggacctcagagatcccggtagagactacgagttatataaatacacatgtcaagaactgcagagactgatggctgagatccaggaccttaagtctcggggagggaaggatgtagctatcgagatcgaagaacgccggattcagagctgcgtccatttcatgaccctgaagaagctgaaccgcttagctcacattcgactgaaaaaaggtagagaccaaacccacgaagctaagcagaaggtggacgcgtatcacctgcagctccagaacctgttgtatgaggtgatgcacctacagaaggagattactaagtgcttggagtttaagagcaagcacgaagaaattgacctggtgtcactggaggagttctacaaggaggcacccccagacatatctaaggccgaggtgaccatgggcgatccgcatcagcaaaccctcgctcggctagactgggaactggagcagcgtaaacggttggccgaaaaataccgcgagtgccttagtaataaagaaaagattctcaaggaaatcgaggtgaaaaaggaatacctttctagcctgcagccaaggctcaactctatcatgcaggcatcattaccggtgcaggagtacctgtttatgccctttgaccaagcccataaacagtacgagaccgcaagacacttgccacctccgctctacgtgctcttcgtgcaggcgactgcatacggacaagcctgcgataagaccttgagtgtggccatagaggggtctgtggacgaagccaaagccctctttaaacctccagaggactcacaggacgatgagtcagacagcgacgctgaggaagagcaaaccacaaagaggagacggcctactctgggcgtccaacttgatgataagaggaaagaaatgctgaagcgccatcctctgtccgtgatgctcgatctgaagtgcaaggacgattccgtactgcacctgactttctattatctgatgaatctgaacattatgaccgttaaggccaaagtgacaacagcaatggaacttatcacacccattagtgccggcgatctgcttagtccagattctgtgttgagctgcctgtaccccggagaccatgggaaaaaaactcccaatccagccaaccagtaccagtttgataaggtcggaattcttaccttatctgactacgtgctggaactcggccacccttacctgtgggtgcagaaattaggagggcttcattttccaaaagaacagcctcagcagacagttatagcagatcacagtctgagcgcatcacacatggagactaccatgaaattgcttaaaaccagagtgcagtccagactcgcacttcacaaacagttcgcctcgttggagcacggcatcgtgcctgtgacctcagactgtcagtacctgtttcccgctaaggtcgtttctcgccttgtcaagtgggtcaccgtggcacatgaggactatatggaactgcacttcaccaaggacatcgtcgatgcagggctggcgggagacactaatctgtattacatggcactcatcgagcgcgggaccgccaagcttcaggccgctgtggtactcaatcccggctacagctcgattcctcctgtgttccagctgtgcctaaattggaaaggcgaaaaaaccaatagtaacgatgacaacattcgggcgatggaaggggaggtcaacgtctgttacaaggagctgtgtgggccctggccaagccaccaattgttgacaaatcagctacagcggctttgtgtgctgctggatgtgtaccttgaaaccgagtcccatgacgacagcgtggagggaccaaaagagttcccccaggagaaaatgtgtttgagactgtttagagggccctcccgaatgaaaccttttaagtataaccacccacagggcttcttcagccacaggtag

SEQ ID NO: 137774 - DNA, 282 bp, synthetic construct
  misc_feature 1..282: note = Description of Artificial Sequence: Synthetic coding sequence
  source 1..282: mol_type = other DNA
atgagttccgagagttcaaagaaacgcaaaccaaaagtgattaggtccgacggcgcacccgcagaggggaaaagaaaccgctccgataccgaacaggaagggaagtactattctgaggaggcggaggtggaccttagggaccccggccgagactatgaactgtacaaatacacttgccaggaattgcagagactgatggccgagattcaagaccttaagagccggggggggaaagacgtcgcgattgagatcgaagagagacgtatccagtcctgcgtatag

SEQ ID NO: 137775 - DNA, 486 bp, synthetic construct
  misc_feature 1..486: note = Description of Artificial Sequence: Synthetic coding sequence
  source 1..486: mol_type = other DNA
atgtcctccgagagttcgaaaaaaaggaaaccaaaggtgatcaggagtgatggggcaccagccgaggggaagcgaaatagaagcgacacagagcaggaggggaaatactactccgaggaggccgaagttgacctgagagatcccgggcgcgattatgaactgtataaatacacttgtcaggagcttcaacggctgatggcagaaatacaggacctcaaatcacggggtggtaaggatgttgccattgagattgaagagaggcgtattcagtcttgtgtccattttatgactctcaagaagttgaatcgcctggcccacattcgcctgaagaagggacgcgaccagacgcacgaggccaagcagaaggtggatgcttaccaccttcaactgcagaatctgctatatgaggtcatgcacctgcagaaggaaattactaagtgcttggagtttaaaagtaagcatgaggaaattgatctggtgtcctag

SEQ ID NO: 137776 - DNA, 672 bp, synthetic construct
  misc_feature 1..672: note = Description of Artificial Sequence: Synthetic coding sequence
  source 1..672: mol_type = other DNA
atgtcctcagagtcatctaagaaaaggaaacccaaggtcatccggtctgatggtgcccctgctgaaggaaagcgcaataggtcggatacagaacaggagggcaagtactactccgaggaagccgaggtggatctgagagatccaggacgcgactatgaattgtacaaatatacttgtcaggaactgcaacgcttgatggctgagattcaggatttaaagtctagaggaggtaaagatgtagccatcgaaatcgaagagcgccggattcagtcctgcgtccatttcatgactctcaaaaaactgaatcgtctggcccacatacggctaaagaagggccgcgaccagactcatgaggccaaacagaaagtggatgcttaccatctgcagctgcagaacttgttgtatgaggtgatgcacttgcagaaggaaatcacaaagtgccttgagtttaaatcaaaacatgaggaaatcgatctcgttagcctggaggaattctacaaagaagctcctccggatatctcaaaggcagaggttacaatgggcgatccccaccaacaaacactagcacgactggattgggaactcgaacagcgcaaacgactggccgaaaaataccgcgagtgtctctccaacaaagaaaaaatactcaaagagatcgaagtaaaaaagtag

SEQ ID NO: 137777 - DNA, 2052 bp, synthetic construct
  misc_feature 1..2052: note = Description of Artificial Sequence: Synthetic coding sequence
  source 1..2052: mol_type = other DNA
atgagctctgagtccagtaaaaaacgcaaacccaaggtgattaggagcgatggggcacccgcagaaggcaagaggaatcggtctgacacagaacaggaaggcaaatactatagcgaagaagccgaagtggatctgcgggatccaggtcgcgactacgagctctacaagtacacttgtcaggaactccaaagactgatggcagaaatccaggatcttaaatcccgcgggggcaaggacgttgctatcgaaatcgaagagcgtcgtatccagagctgcgtgcactttatgacacttaaaaagctgaatcggctcgcgcatattagattgaaaaagggtcgcgatcagacccatgaagcaaagcagaaagtagatgcctatcatttgcaactacaaaacttgttgtacgaggtgatgcacctgcagaaagaaatcactaaatgcctggaattcaaatctaaacacgaagaaatcgacctggtatctttggaagaattttataaagaagcaccgccggacatcagtaaggccgaggttacaatgggtgatcctcaccaacagaccctcgcccgtctggactgggagctggagcaacgaaaaaggttggctgagaagtatagagagtgcctttctaataaggaaaagatacttaaggagattgaggtcaaaaaggaatatttatcgtccttacagccgagactgaatagtattatgcaggcctccctgcctgtgcaggagtatttattcatgcctttcgaccaggcacacaagcagtacgaaaccgctagacatctgccgccacccctgtacgtcctgttcgtccaggccaccgcatatggtcaggcctgcgacaagaccttgtcggttgccattgaaggaagcgtggatgaggctaaagcactttttaaaccccccgaagattcccaggacgacgagagcgattccgacgcagaagaggaacagactacaaaacgaagacgacctacactgggtgtgcagttggacgataagcggaaggagatgctgaagcgccaccccttgtctgtaatgttggacctgaagtgcaaggatgacagtgtgctgcatctcaccttttactacctgatgaacctgaatattatgaccgtgaaggccaaggtgactactgcaatggagcttatcaccccgatctcagcaggagatctgctgtctcccgacagtgttctgtcctgtctttacccaggtgaccacggaaagaagaccccaaacccagcaaaccaatatcagtttgataaggtcggaattctgaccctgagtgattacgttctagagttgggccatccatacctgtgggtgcaaaaattaggtggtctgcactttcccaaggaacagcctcaacagaccgtcattgccgaccactccctttccgcaagtcatatggagacaaccatgaagctgctgaagactagggttcagtccaggctagctttgcacaagcaatttgcctccctggagcacggtatagtcccagtgacctccgattgtcagtatctgttccccgccaaagttgtctctagactggtaaagtgggtgactgttgctcatgaagattatatggagctgcattttaccaaggatattgtagatgcaggtctagcaggggatacaaacctgtactatatggcacttatcgagcgggggaccgctaagctgcaggccgctgtagtactgaaccccgggtattccagtattccccctgtgttccagctctgtctgaattggaaaggagagaagacaaattcgaacgacgataatatccgagctatggaaggagaggttaatgtgtgctataaagagttgtgtggtccctggccgtcccatcagttattgaccaatcagctgcagcggctgtgtgtccttttagacgtctatttggagacagagtcacacgacgattcagttgaagggcccaaagagtttcctcaagaaaaaatgtgtctgcgtctgttccggggaccatcgcgtatgaagccatttaagtataaccaccctcagggctttttctctcatagatag

SEQ ID NO: 137778 - DNA, 615 bp, synthetic construct
  misc_feature 1..615: note = Description of Artificial Sequence: Synthetic coding sequence
  source 1..615: mol_type = other DNA
atgggagccgtgacggatgatgaggtcatccgaaaaaggctgctgatcgacggcgacggggctggcgacgaccgccgaatcaaccttttagtcaagtcatttatcaagtggtgcaacagtggctcccaagaggagggttatagtcaatatcaaaggatgctgtccacattgtctcaatgcgagtttagcatggggaaaacactccttgtctatgacatgaatctgagggagatggagaattacgaaaaaatttataaagaaatcgaatgctcaattgctggagcgcacgagaaaatcgctgaatgcaagaagcagatactgcaggctaagcgcatccgcaagaaccgccaggaatacgacgctcttgctaaagtgatccagcaccatcccgatcgccatgagacattaaaggagcttgaggctctaggaaaggaactggagcaccttagccatatcaaggagtctgtggaggataagctggaactcagaagaaagcagttccatgtgcttttgtctactatacatgagctccaacagacgctggagaatgacgagaaattatccgaagttgaagaggcgcaggaggcgagcatggaaactgacccaaagccctag

SEQ ID NO: 137779 - DNA, 711 bp, synthetic construct
  misc_feature 1..711: note = Description of Artificial Sequence: Synthetic coding sequence
  source 1..711: mol_type = other DNA
atgtccgaagctcctagggccgaaaccttcgtatttctggacctggaggccacagggctccccagcgtcgagccagaaattgcagagctgtcactgttcgcggttcaccgcagttccctggaaaacccagaacacgacgaatccggtgcgcttgtgttgcctagggtgttggataagttgaccctttgtatgtgccccgaaaggccttttaccgccaaggcaagcgagattaccggcctgtcctcggaagggttagcgaggtgtcggaaggctgggttcgacggcgctgtcgtacgaacattgcaggcctttctctctcggcaggccggtcctatctgtctggttgctcataacggattcgactatgacttccccttgctgtgtgcggagttaagacgcctgggggcacgtctcccacgagacaccgtatgcctcgatactctccccgcactgagaggtctcgatagagcacactcccatggcaccagggctcggggacgccagggttattctctggggtccttgttccacagatacttccgggcagagccatcagcggcccatagtgccgagggagacgtccacacgctccttctgatttttctgcacagagcggctgagttgctggcttgggctgacgaacaggctcgcggctgggctcatatcgagccgatgtaccttccacccgacgacccatcactggaggcatag

SEQ ID NO: 137780 - DNA, 840 bp, synthetic construct
  misc_feature 1..840: note = Description of Artificial Sequence: Synthetic coding sequence
  source 1..840: mol_type = other DNA
atggggagggccggttctccactgccccgttcaagttggccacggatggatgattgtgggagcagaagtcggtgtagccccaccttatgctcctctctgcgaacatgttaccccagaggaaacatcacaatgagtgaggcaccccgcgccgagacttttgtcttcctggatctggaggcaaccggactgccatccgttgaacccgagatcgcagagctgtctctgtttgctgtccaccgatcctcactcgagaatcctgaacacgatgaatctggggctcttgttcttccaagggtgttggataaactgactttgtgtatgtgtccagagagaccattcactgcaaaagcatcggagattacagggttgagctcagagggtctggcccgctgtcgaaaagccgggttcgatggagccgtcgtccgaacgctccaagcttttctatcccgccaggctggtcccatctgcctcgtcgctcacaatggattcgactacgacttcccccttctgtgcgctgaactgagaagacttggtgctcgcctgccacgggacaccgtgtgcctggatacgctgcccgcgttgaggggtttggacagggcccacagtcacgggacccgagccagggggcggcaaggatacagcttagggagtctctttcaccggtactttcgggccgaaccaagcgccgctcactcagctgagggcgacgtgcacaccctgctgctgatcttcttacaccgggccgccgagctcctcgcttgggcagacgaacaggccagaggttgggcccatatagagccaatgtatctgcctcccgatgacccatctctggaggcttag

SEQ ID NO: 137781 - DNA, 711 bp, synthetic construct
  misc_feature 1..711: note = Description of Artificial Sequence: Synthetic coding sequence
  source 1..711: mol_type = other DNA
atgtccgaggctcctagggctgagactttcgtgttcctggatctcgaagccaccggtctgccatcagtcgaacccgagatagccgagttgtctctgttcgcagtccacagatcctccctggagaatcccgagcacgacgagagcggagccctggtactgccgagagtgctggacaagctgactttgtgcatgtgcccggagcgacccttcaccgcgaaggccagcgagataacgggtctgtcttcggaagggctggctcgctgccgcaaggcaggattcgacggcgctgtcgtgaggaccctgcaagctttcctgagccggcaggccgggcctatctgtttagtcgcccacaacgggttcgactatgatttccctctactatgtgcagagctgcgtcggttaggcgctcggctgcctcgagacaccgtgtgcctggatacgcttcccgcgctgaggggcctcgaccgagcgcacagccacgggacacgcgccaggggcagacagggctacagtctgggatcactgtttcatcggtacttccgagctgagccatcagccgctcattcggcagagggcgatgttcacacgctcctcctcattttcctgcaccgcgccgccgaactccttgcatgggcagacgagcaggccagaggctgggctcatatcgaacctatgtatttaccacccgacgatccctccttagaagcttag

SEQ ID NO: 137782 - DNA, 711 bp, synthetic construct
  misc_feature 1..711: note = Description of Artificial Sequence: Synthetic coding sequence
  source 1..711: mol_type = other DNA
atgtctgaggctcctcgcgccgaaaccttcgtcttcctggatcttgaggcaaccgggcttccttctgtggagcctgagatcgccgaattaagtcttttcgccgtgcacaggagttctcttgagaatcccgaacatgacgaatctggagctctggtcctccctagggtgctggataagttgactttgtgtatgtgcccagaaaggccatttaccgcaaaagcaagcgaaattaccgggctgtcttctgagggtttagctagatgcagaaaggccggtttcgacggggctgtggtgcggacgctccaggccttcttgtctcgtcaggccggtcccatctgtctggtggcccacaatggcttcgattacgactttccactattgtgtgcagagctgcggcgtttaggcgcgcgcctaccaagagatacagtgtgcctggacacccttccagcccttcgggggctcgacagagcgcacagtcacggtacccgggctaggggccgtcagggatatagtctgggcagtctgttccataggtactttcgtgctgagcctagcgcagcccactccgcggagggcgacgtccacacactgctcttaatctttctgcaccgggctgcagagttgctggcctgggcagatgagcaggcaaggggatgggcccacattgagcccatgtacttgccaccagatgatccgagcctcgaagcctag

SEQ ID NO: 137783 - DNA, 840 bp, synthetic construct
  misc_feature 1..840: note = Description of Artificial Sequence: Synthetic coding sequence
  source 1..840: mol_type = other DNA
atgggaagggctggcagtccacttccccggtccagctggccacggatggacgactgtggctccaggagccggtgctctcctactctctgttctagcctgcgaacatgttatcctagaggaaacattaccatgagtgaggccccccgcgctgaaaccttcgtgtttctcgatctcgaagcaacggggctgccttcggtggaaccggaaattgctgaattaagccttttcgccgtgcaccgctccagcctcgagaatccagaacacgatgaatccggcgccctagtgctgcctagggtactagacaagctaactctttgcatgtgccccgagagaccttttaccgcaaaggctagcgaaattactggcctctcaagtgagggtttggctaggtgccgcaaggcaggattcgacggggcagtagttcgaaccctccaggcctttctcagtcgacaggccggtccaatctgcctggtcgcacataatgggttcgattacgatttccctctcctatgcgctgaactcagacgacttggggcccgtctgcctagggatacggtgtgcttagacaccctaccggctctgcgagggctggacagggcgcactctcatgggactagggcccggggcagacagggctactctttgggcagcctgtttcataggtactttcgggcagagccgtcagcagcccatagcgctgagggagatgtgcataccctcctgctgatttttctgcatagagcagctgagctgttagcttgggccgacgaacaagcccgtggatgggcccacatagaaccaatgtatctgcccccggatgatcctagcctggaggcatag

SEQ ID NO: 137784 - DNA, 711 bp, synthetic construct
  misc_feature 1..711: note = Description of Artificial Sequence: Synthetic coding sequence
  source 1..711: mol_type = other DNA
atgtccgaagctccacgagccgaaacattcgtatttctggaccttgaggcaaccgggttgcctagcgtggagccagaaatcgccgagctatccctgttcgccgtgcataggtctagcttggagaatcccgagcatgatgaatcgggcgccctggtcctccccagggttctggacaagcttacactgtgcatgtgccccgagcgcccctttacagctaaggcatctgagattactggactgtcttctgaggggctcgcccgatgcagaaaagccggctttgacggggccgtggtgcgcacgttacaggcgttcctgagcagacaagccgggccaatttgcctggtggcgcacaatggatttgactatgacttcccactgctgtgtgcggaactgagacgcctgggagcacgtcttccccgggacacggtgtgcttagacacgctcccagccctgagaggactggaccgggctcactcccacggcacaagggctaggggcagacagggttatagcctcggctctcttttccacaggtacttccgagccgagcccagtgcggcgcattctgccgaaggtgacgttcatacgttacttcttatcttccttcatcgggcggcggagctattggcctgggcagacgagcaggctcgggggtgggcccatattgagcccatgtacctgccgccagacgatccatccctggaggcctag

SEQ ID NO: 137785 - DNA, 840 bp, synthetic construct
  misc_feature 1..840: note = Description of Artificial Sequence: Synthetic coding sequence
  source 1..840: mol_type = other DNA
atgggcagagccggaagcccactcccccgtagctcatggccacgaatggatgactgtggatcccgtagtcggtgtagcccaacactctgttcttcactaagaacatgttatcctcggggcaatattaccatgtccgaagcccccagagcagaaacatttgtgttcctcgacttggaggctacaggattacctagcgtggaaccagaaattgcagaattaagcctgttcgcggtgcatagatcatcactcgaaaatccagaacatgacgaatcaggggcacttgtcctcccgcgggtgctcgacaaattaacactttgcatgtgtcccgaaagacctttcacagccaaagccagcgagataaccgggctgtctagcgaagggctggctcggtgtcggaaggcaggctttgatggggcggtagtgagaaccttacaggcctttctctcccgacaggcaggacccatatgtctggtcgcacacaatgggttcgattacgatttccctctactatgtgccgagctgcgccgtttgggggcgcggctgcccagggacaccgtttgcctggatactttgccggctctcagaggcctggatcgggctcacagccacggtacacgagctcgcggaaggcagggatatagcctggggtccttgttccacaggtatttccgggcggagcctagtgccgcccatagcgcagagggtgacgtgcacacgcttctgctgatttttctgcaccgagctgccgagcttctggcatgggcagacgaacaggccagaggctgggcccacatcgaaccaatgtacttaccacctgacgacccctcactcgaggcctag

SEQ ID NO: 137786 - DNA, 837 bp, synthetic construct
  misc_feature 1..837: note = Description of Artificial Sequence: Synthetic coding sequence
  source 1..837: mol_type = other DNA
atgatagtggctgcggaagccgtggcagcgccgaggtgcgctctcgttggggatcgctccggggcggacgcaccacgtgcaaaaggtcactctcttcggacatgttacccccgggggaacattacaatgagcgaggctcctcgggccgagacattcgtttttctcgatctggaggctacggggctgccctcggtggagcccgagattgcagaacttagcctatttgccgtgcatagatctagccttgaaaaccccgaacatgatgagagtggggctttggtcctccctcgcgtgctagacaagctcaccctatgtatgtgcccagaaagaccgtttaccgcaaaggcctctgagatcacaggcctgtcttcagagggcctggctcgatgtcggaaggccgggttcgacggtgctgttgtgaggaccctccaggcctttctttccagacaggctggaccgatctgcctggtcgctcacaacggcttcgactatgatttcccactcctctgtgcggaactgcggcgattgggagcccggctacccagggacactgtgtgcctagacactctgcctgccttacgaggactggaccgggcacacagccatggtactcgcgctcgaggccggcagggttatagcctgggcagcttgttccaccgctactttagagcagaaccttccgccgcacacagcgctgaaggcgacgttcataccctcctcctgatctttttgcatcgagctgcagagctactggcgtgggccgatgagcaggccaggggatgggcccacatcgaacctatgtatctgcccccagatgatccatcactagaggcttag

SEQ ID NO: 137787 - DNA, 2172 bp, synthetic construct
  misc_feature 1..2172: note = Description of Artificial Sequence: Synthetic coding sequence
  source 1..2172: mol_type = other DNA
atgttcgaggaaaaggcttcgtctccatccggcaaaatgggtggtgaggaaaaaccgatcggagctggcgaggagaagcagaaggagggaggcaagaagaaaaataaggagggcagcggagatggtggccgagccgagcttaacccctggcccgaatatatttacactcggctagaaatgtacaatatcttgaaggccgaacatgatagcattttggcagaaaaagctgagaaagactcgaaacccatcaaagtaacactgcctgatggaaagcaagtcgatgccgagtcatggaaaacaaccccttaccagattgcctgcggcatctcccaaggcctcgctgataatacagtcattgccaaagtgaacaatgtggtctgggaccttgaccggcctttggaggaagactgtactctcgaactgctaaaattcgaagatgaagaagcacaagctgtgtattggcattccagtgctcatataatgggagaagcaatggaacgagtgtatggcggctgcctttgctatggtccgccaatagagaacggcttctattacgacatgtacctagaagagggcggcgtgagtagcaacgatttcagctcgctggaagccctgtgtaagaagatcatcaaggaaaagcaagcctttgagcgcctggaagtgaaaaaagagacgctgctggctatgttcaagtacaacaaatttaagtgtcggatactgaatgagaaggtaaatactccgacaaccacagtttaccggtgcggtcccctgatcgatctgtgtcgtggtcctcacgtacggcacacaggtaaaatcaaagcgctcaagatccacaagaattcatccacttactgggaaggcaaggctgatatggagaccctgcaacgtatttacggcatatccttcccagaccccaagatgctgaaggagtgggagaaatttcaggaggaggccaaaaaccgcgaccacaggaaaattgggcgcgatcaggaactctatttctttcacgaactgagccccggaagctgcttcttcctgcctaagggggcctacatctataacgcgctcattgagttcatcagatctgagtaccgaaagagagggtttcaggaagttgtgaccccgaacatatttaatagtcgactttggatgactagcggtcactggcagcattacagcgagaacatgttcagcttcgaagtggaaaaggaattgttcgctctcaaaccaatgaactgtcctggccattgcctcatgtttgatcacagaccccgttcctggagggaactgcccctgcggctggctgacttcggtgtgctccaccgcaacgagctcagtggagcactgaccggactgacgcgagtgcgtcgattccaacaggacgacgcccacatattctgtgccatggagcagatagaggatgaaatcaaggggtgtcttgactttctgaggactgtgtattctgtctttggattctcattcaaattgaacctgtccactcgcccagagaaattcttaggtgatattgaggtctgggatcaagccgagaagcagcttgaaaattccctgaatgagttcggggagaaatgggagctgaatagtggcgatggagccttttacggtcccaagatcgacatacagattaaagacgccattggccgctaccatcagtgcgctacgatccaactggatttccaacttcccattaggttcaatctgacgtacgtgtctcacgatggagacgataaaaaaagacctgtaattgtgcaccgagccattcttgggtccgtggaaaggatgatcgcgatccttacagagaattatggggggaaatggcccttttggctcagccccaggcaggtgatggttgttcctgtgggtccaacttgcgacgaatacgctcagaaggtgcgacaacagtttcatgacgcaaagtttatggcagatatcgacctcgaccctggttgtactctcaataaaaagatacggaacgcccaactcgcccagtataacttcatcctggtcgtgggtgaaaaagaaaaaatttctggcaccgtaaacattcgtacccgcgacaataaggtacatggtgaacggacaatctcagaaacaatcgagcggctccaacaacttaaagaatttaggagtaagcaggctgaggaggagttctag

SEQ ID NO: 137788 - DNA, 1809 bp, synthetic construct
  misc_feature 1..1809: note = Description of Artificial Sequence: Synthetic coding sequence
  source 1..1809: mol_type = other DNA
atgatacccttttggcaaaagcgtcaaaagaaaattgcttcgcaactcaaaagtctttgcctcatggtcaatagactgatgcgcaacttggggaagttacaccacatcaagctccctgtggagctcgcgatggagagggtgtatggaggatgcctgtgctatgggccacccatagaaaatggcttctattatgatatgtaccttgaggaaggcggagtttcatcaaacgatttcagttccttggaggccctgtgtaagaagattattaaagaaaagcaggccttcgaaaggctggaggtgaaaaaagaaacactccttgcgatgtttaagtataataagttcaaatgtcgaatcctaaatgagaaggtgaacacaccaacaacgacagtgtatagatgcgggcccctcatagatctctgcaggggccctcatgtgagacacacaggcaagataaaagcacttaaaatccacaaaaacagctctacctactgggaaggcaaagccgatatggaaacactccagcgtatttacggcatttccttccccgatcctaagatgctgaaagaatgggagaagttccaggaggaagccaaaaaccgagatcatcgtaaaatcggcagagaccaagagctgtacttttttcatgagctgtcacccggttcttgctttttcttgcctaagggagcatacatttataatgctttaattgagtttatcaggtctgagtatcgcaaaaggggatttcaggaggtcgtaacccctaatatcttcaattcccgactatggatgacaagcggccactggcaacactacagcgagaacatgttcagcttcgaagtagagaaagaattattcgccctgaagcctatgaattgtcctggccattgcctcatgtttgaccacaggccgaggtcatggcgggaactacctctgagattggcagattttggagtgctgcataggaatgaattaagcggggcgctcacaggcttaactagagtccgaaggtttcaacaggatgatgctcacatcttttgcgcaatggagcagatcgaagatgaaatcaaggggtgccttgattttctgcgcactgtgtactccgtgtttggattttcgttcaaattaaacctgtccaccagacccgaaaagttcctgggtgatatcgaggtatgggaccaagccgagaaacagctcgagaactcactcaatgaattcggcgagaagtgggaactgaactccggtgatggagcgttctacggccctaaaattgatatccagattaaagatgctattgggcgctaccatcaatgcgccacgattcaactcgactttcagctgccaatacgttttaacctgacttacgtgtcacatgacggtgatgataaaaagcggcccgtcatcgtccatagagccatcctgggctcagtggagagaatgatcgccattctaaccgagaactacggcgggaaatggcctttttggctgagccctcgacaggtgatggtggtgccagtgggtcccacatgcgatgaatatgcccagaaagtcaggcaacagttccacgatgccaagttcatggccgacattgacctcgaccctggatgtacgttaaataaaaagattcgcaacgctcagctggcccagtacaattttattctggtcgttggagaaaaggagaaaatatccggtacggtgaacatcagaactagggacaataaagtccacggggagcgcaccatttcagaaacgattgaacggcttcagcaattgaaagaattccgcagtaagcaggcagaagaggagttctag

SEQ ID NO: 137789 - DNA, 2271 bp, synthetic construct
  misc_feature 1..2271: note = Description of Artificial Sequence: Synthetic coding sequence
  source 1..2271: mol_type = other DNA
atgtttgaggaaaaggctagctctccaagcgggaagatggggggggaagagaagcctatcggggcgggagaggagaagcagaaggaagggggtaaaaagaagaataaagagggatccggggatgggggccgggctgaactgaatccatggcctgaatatatatataccagattagaaatgtataatatccttaaggccgaacacgactctatcctggcggagaaggcagaaaaggacagcaagcctatcaaagtcactttgccggatggaaagcaggttgacgcagaaagttggaaaaccactccctaccagatcgcgtgcggaatctctcataccgcatcttgcaaaaatctctcatcactcgcttctctgctagcgtcagtggccatcccatcaagcggaatgccctggccccccctgttcttcctgcaggggcttgccgataacaccgtcatcgctaaggtgaacaacgtagtctgggacctcgataggccactggaggaggactgcactctggaacttctgaagtttgaggatgaagaagcccaggccgtttactggcattcaagtgctcatattatgggggaagcaatggagagggtctatggcgggtgcctgtgctacggtccaccaatagagaatgggttctactatgatatgtatctggaagaaggaggcgtctcaagcaatgatttctcgagcctggaggcactctgcaagaagattattaaagagaagcaggcatttgagcgtctggaagttaagaaggagacactgctggcgatgttcaagtataacaaatttaaatgccgcattctgaacgagaaggtcaatactcctactacaactgtctatcgctgtgggccacttatagacctgtgccgtggtccacatgtgaggcacaccggcaaaattaaagctctgaaaatccacaaaaactcctctacatattgggaaggaaaagccgacatggagaccctgcagcggatctacggaataagctttccggacccgaagatgctgaaggagtgggagaagtttcaggaggaggctaaaaatcgtgatcaccgtaagataggaagggatcaggagttatacttcttccatgagctttcccccggtagctgcttctttctccccaaaggtgcttacatctacaatgcccttatcgagtttatccggtccgagtacagaaagcgcgggttccaggaggttgtcacccccaatatattcaactctcggttgtggatgaccagcggtcattggcagcattactccgaaaatatgtttagttttgaggtggagaaagagctgttcgcattgaagcccatgaactgtccggggcactgtttaatgtttgaccacaggccaaggagctggcgcgagttgcccctccgccttgcagatttcggggtgctgcaccggaatgagctcagtggtgcactgaccggactgacaagagtgcgcagattccagcaagacgacgcacacatattctgcgcaatggagcagattgaggatgagattaagggttgcctggactttcttagaaccgtttatagcgtctttggattttcttttaaactcaatttgtcaacccgcccggaaaaatttttaggcgatattgaagtatgggaccaagcagagaagcagcttgaaaattcactgaatgagtttggggaaaagtgggaactcaacagtggcgatggtgctttttacggccctaaaattgatatacagatcaaagacgccatcggacgataccaccagtgtgccactatacagctggacttccagttgcccatcaggttcaacctgacctacgtgtcccatgatggcgacgacaagaaaaggccagtgatagtgcaccgagccatcctcggttcagtcgaacggatgattgcgatcttaacagaaaactatggtggtaagtggcctttttggctctctccgcgacaggtgatggtggttccagtcggcccgacatgtgacgagtatgcgcagaaggtgaggcagcagtttcacgacgccaaatttatggctgacattgatctcgaccctggctgcacattaaataagaaaatccgcaatgcgcaactggctcagtacaacttcatcctggtcgtaggcgaaaaggagaagattagcggtactgtgaatatacgaaccagagataacaaagttcatggcgagagaacaatctctgaaactattgaacgcctgcagcagctgaaggagttccggtccaagcaggctgaggaggaattctag

SEQ ID NO: 137790 - DNA, 2172 bp, synthetic construct
  misc_feature 1..2172: note = Description of Artificial Sequence: Synthetic coding sequence
  source 1..2172: mol_type = other DNA
atgtttgaggagaaagcctcttcaccttccggcaaaatgggtggcgaagaaaaacccattggcgccggagaggagaaacagaaggaaggtggcaaaaagaaaaacaaagagggttccggagatggcggccgagcggaactgaatccgtggccggaatacatatatacaagattggaaatgtataacattctgaaggctgagcacgacagcattctggcagagaaagcagagaaagacagcaagcctattaaggtcactttgcccgatggtaaacaggtggacgccgaatcctggaagactaccccctaccagattgcctgtgggatttctcagggactcgctgataacaccgtcattgctaaggtgaacaatgtggtatgggacttggatcgacctctcgaggaggactgtaccctcgaacttctaaaatttgaagatgaagaggcccaggccgtgtactggcattcttctgcccatatcatgggcgaggccatggagcgcgtgtacggggggtgcttgtgctatggaccaccaattgagaacgggttctactacgacatgtatcttgaggaggggggtgtgtcttccaatgacttcagcagtctggaggcactttgtaaaaaaatcatcaaggaaaagcaggccttcgagcgattggaggtcaagaaagagacacttttagccatgtttaaatacaataagttcaagtgccggattctaaatgagaaagtaaatacccccacgacaactgtttaccgatgcggacctctaatcgacctctgccgcggtcctcatgttcggcatacgggcaagatcaaagccctgaagattcataagaactctagcacgtactgggaggggaaggccgatatggaaactttgcaaagaatctacggaattagctttcctgaccccaagatgctcaaggagtgggaaaagtttcaggaggaggccaagaatagagaccaccgaaagattggaagggaccaggaactctactttttccacgaactctcacctggctcatgtttctttctcccaaagggagcgtacatctataacgccctgatcgaattcattcgaagtgaataccggaaacgaggtttccaggaggttgttacccccaacattttcaactccaggttgtggatgaccagcggccactggcagcactattccgagaacatgttttcattcgaggtggagaaagagctttttgcgctcaaacctatgaattgtcctgggcattgcctcatgtttgatcatcgccccaggtcttggagggaactacccctcaggctagctgacttcggggtgcttcatcgcaatgagctctcaggagccctgacaggtctcacccgtgtccggaggttccagcaggatgatgcgcatattttttgtgccatggaacagatagaagatgaaatcaagggctgcttggacttcttgaggaccgtgtatagcgtcttcgggttctcctttaagttaaacctctccactcgccccgaaaaattcctcggcgatatagaggtgtgggatcaggctgagaagcaactggaaaatagcctcaacgaatttggggagaagtgggaactgaattcaggggatggcgccttttacggccctaagattgatatccagataaaagatgctatcggtagatatcaccagtgtgccacaatacagctcgactttcagctgcccatccgttttaatttaacttatgtgagccacgatggcgatgacaaaaagaggccggtcattgtacacagggccatccttggtagcgttgaacggatgatcgccatcctcaccgagaactacgggggaaagtggcctttttggctcagcccacgccaggtgatggttgtacccgtcggcccaacgtgcgatgaatacgcccagaaagtgcgccaacagtttcatgacgcaaaattcatggctgacattgatctggatccgggttgcaccctgaataaaaagataagaaatgcacagttagcccagtataattttatattggttgtgggtgagaaagaaaaaatcagcgggactgtgaacatcaggacccgagataacaaagtgcacggcgagaggacaatcagcgagaccattgaaagactgcagcagctaaaggagtttcggtctaagcaggccgaggaggagttctag

SEQ ID NO: 137791 - DNA, 390 bp, synthetic construct
  misc_feature 1..390: note = Description of Artificial Sequence: Synthetic coding sequence
  source 1..390: mol_type = other DNA
atgtttgaagaaaaagcaagcagcccgagtgggaagatggggggtgaggagaagcctatcggagcaggcgaggaaaaacagaaggaaggcggaaagaagaaaaataaagagggatccggggacggtgggagagccgaactcaacccctggcccgaatatatatacacgcgtctcgagatgtacaatattcttaaagccgaacacgattcaatactggccgaaaaggctgaaaaagattctaagcctataaaagtgacgctccccgacgggaagcaggtggacgcggaatcttggaagacaactccttaccagatcgcctgcggcatctctcagggcctagctgataacaccgttatcgctaaagttaacaacgtggtttgggacctgtag

SEQ ID NO: 137792 - DNA, 1860 bp, synthetic construct
  misc_feature 1..1860: note = Description of Artificial Sequence: Synthetic coding sequence
  source 1..1860: mol_type = other DNA
atggaagtggaactctctcagggcctcgctgacaataccgttattgccaaggtcaacaacgtggtctgggatctggaccggccccttgaggaggattgcactctggagctgctgaagttcgaagatgaggaggcacaagcagtttattggcactctagtgcacacattatgggtgaggcaatggaacgcgtgtacggcggctgcctgtgttacggcccacctatcgagaacggtttttactacgacatgtacctggaagagggaggcgtctccagtaacgatttctcatctttagaggctctgtgtaagaagatcattaaagagaagcaagcctttgagcggctggaggtgaagaaggagacactgttggcgatgtttaagtacaacaagttcaagtgtcggattctgaatgaaaaggttaacaccccaacgaccacagtctatcgttgcggtcctttaatcgatttgtgtagaggcccgcacgtgcggcataccggaaagatcaaggccctcaagattcataagaacagctccacatattgggaaggaaaagcggacatggagaccctgcagcggatctatggaattagtttccctgatccaaagatgttgaaggagtgggaaaaatttcaggaagaggcaaaaaacagggaccaccgcaagattgggcgggaccaagagttatatttcttccatgagctgagccctgggagctgtttcttcctgccaaagggcgcatacatttacaacgccctgattgaattcatacgctcagaatatagaaaaagggggtttcaggaagtcgttactccaaacatttttaactctagactgtggatgacttccggccattggcagcactatagtgagaatatgttttcattcgaggtcgaaaaagagctgtttgctctcaagcccatgaattgtcctggccattgtctcatgttcgaccataggcccaggtcatggagggagctccccctgaggttagccgattttggggttctgcatagaaacgaattaagcggggcgctgacaggcctcacgagagtccgccggtttcagcaggatgatgcccacatattctgcgctatggagcagatcgaggacgaaataaagggttgcctcgatttcctccgcactgtgtactccgtctttggattcagtttcaaactgaacctaagtaccagacccgaaaagttcctgggcgacatagaagtgtgggatcaggccgaaaaacagcttgaaaattctctcaatgaattcggtgagaagtgggagctgaattccggcgacggggctttctacgggccaaaaatcgatatacagatcaaagacgccatcggacggtatcaccagtgtgccactatccagctggattttcagctgccgattaggtttaatctaacttatgtcagtcatgacggggacgataagaagcgcccagtcatagtacatcgcgcaatccttggctctgtcgagcgcatgatcgccattcttactgaaaactatggtggaaagtggcccttctggttgagcccccggcaggtgatggtggtccccgtggggcctacctgtgatgaatacgctcaaaaggtgcggcagcagtttcacgatgccaagttcatggctgatattgatctggatcccggttgcacattgaataagaagatcaggaacgctcagctggctcaatacaatttcattctggtggtgggcgagaaagaaaaaatatctggaacagttaatatcagaacgagagacaacaaggtgcatggtgaacgcaccatttctgagacaatagaaagactgcaacaactcaaggaatttcgctctaaacaggctgaagaagagttctag

SEQ ID NO: 137793 - DNA, 1332 bp, synthetic construct
  misc_feature 1..1332: note = Description of Artificial Sequence: Synthetic coding sequence
  source 1..1332: mol_type = other DNA
atggaacacaacccactccccacctctcctgctgaccagttcaataccggacgctactgctctggccctagcacagagtatgggttttatcacgactttttcctgggaaaagagcgatgtggtacgctagtggacctttgtcagggaccccacctgagacataccggtcagattggcggtctcaagttgctatcagccgagtatgcccacaggggtttttccgaagtcaagactccaacgcttttctccaccaagctatgggaacagtctgggcactgggaacactatcaggaagatatgtttgcagtccagccaccaggctctgatcggcctccaagttctcagtccgatgacagcacgcggcatattaccgatactctcgctctcaagcctatgaactgtcctgcccattgcctaatgtttgcccatcgccccaggagctggcgcgagctccctctccgccttgccgatttcggggccctgcacagggcggaagcgtccggcggactgggtggcctgactcggctccgctgcttccagcaggacgacgctcatattttctgtaccacggaccagctcgaagcggagatacagagctgtctggatttcctccgtagcgtttacgcagtgctgggtttctcgtttagattggctctttccactaggccatctggattccttggagatccgtgcctgtgggaccaagccgagcaggtcctgaagcaggcgctcaaggaattcggggagccttgggacctgaacagtggtgacggggctttctatgggcctaaaatagatgtccacctccatgacgcccttggcaggccgcatcagtgcggcaccattcaactggattttcaactcccactccgtttcgacctccagtacaaaggccaggccggggccctagagcgaccagtccttatccaccgagccgtgctggggtccgttgagcggctattgggggtgttggctgaatcctgcggaggtaagtggcctctctggctgtccccatttcaggtggtcgtaatccccgtaggatctgagcaagaagagtatgccaaggaggctcagcagtctttgagagcagctggcctggtgtccgatctggacgcagacagcggtctcacactgtctaggcgcatacgccgggctcagctagcccattataacttccagttcgtggtggggcagaaggaacaaagcaagcggactgtgaacataagaacacgcgacaacaggcgcttaggggaatgggatttacccgaggccgtgcagaggcttgttgaattgcagaatacccgggtgcccaatgccgaggagatattttag

SEQ ID NO: 137794 - DNA, 1332 bp, synthetic construct
  misc_feature 1..1332: note = Description of Artificial Sequence: Synthetic coding sequence
  source 1..1332: mol_type = other DNA
atggaacataatccacttcccacatctcctgcggatcagtttaacaccggacgctactgcaggggaccatcaactgaatatgggttttatcatgacttcttcctgggcaaagaacgatgtggaaccctggtggatctgtgccagggaccccacttgcgccatactggtcagatcggcggcctcaaactcttatccgccgaatacgcccatcgaggtttttctgaggtgaagacccccaccttgtttagcactaagttgtgggaacagtccggccactgggaacattatcaggaagacatgttcgctgtgcagccacccggcagcgataggcctccgagcagccagtctgacgactctactagacacattactgataccctggccctcaagcctatgaattgccccgcccattgcctcatgttcgcacatcgccccagatcctggcgagaactgcccctgcggcttgccgactttggagccctacatcgagcggaggctagtggagggcttgggggtcttaccaggctccggtgtttccaacaagacgacgcacacatcttttgcaccacagaccagctggaagctgaaatccaatcctgcctggattttcttagaagtgtgtacgcagtcctcgggttctccttcaggcttgctctatccacccggcccagcgggttccttggggacccgtgcctgtgggatcaagccgaacaggtgttaaagcaagctctcaaggaattcggggaaccctgggatttgaacagtggtgatggcgccttttatggccccaaaatcgatgtacacttgcatgacgccctggggcggcctcaccagtgcggtaccattcaacttgattttcagctgccacttcgttttgacctacagtataaggggcaggccggcgccttagaaagacctgttctcatccatagggctgttcttgggtcagtggaaaggctcctgggggtgttagccgagtcctgcggaggaaagtggccgctctggctgagcccattccaagtcgtggtcattccagtgggttcagaacaagaggaatatgccaaggaggcgcagcagtcccttagggccgcgggcctcgttagcgacctggatgccgattcgggtctgactctctcaaggaggatccgacgggcgcagctggctcactacaactttcagttcgtagtgggccaaaaggaacaaagtaaaagaacagtcaatatacgtactagggacaatcggaggttaggagagtgggatctgccagaggctgtccaacgccttgtggagttgcaaaatactcgagttccaaacgccgaagagatcttttag

SEQ ID NO: 137795 - DNA, 537 bp, synthetic construct
  misc_feature 1..537: note = Description of Artificial Sequence: Synthetic coding sequence
  source 1..537: mol_type = other DNA
atggccttgtatcagagatggcgctgcttgaggctgcaggggctgcaggcttgtagactgcacacagcagtcgtgtctaccccaccacggtggctcgccgaacggttaggactgttcgaggaactgtgggctgctcaagtgaagcggctggctagtatggctcaaaaagaacctcgcacaattaagattagtctcccgggtggtcagaaaattgatgcagtcgcatggaacactaccccataccagctcgctaggcagatcagtagcacccttgccgataccgcagtggccgctcaggttaacggagaaccttacgatctggagcgtccactggagacagattccgacctgcgttttttaacgtttgattcccccgagggtaaagctgttagcttctttctgattagaaataccgttaccaccaaaccgagagatattgaggccggcaatagtaacattctgttcttttgccggagtttcagcatctgctcatgggagggagatctgccacaaaccgtgctgacaatcagtgggtag

SEQ ID NO: 137796 - DNA, 1767 bp, synthetic construct
  misc_feature 1..1767: note = Description of Artificial Sequence: Synthetic coding sequence
  source 1..1767: mol_type = other DNA
atggctctgtaccagcggtggaggtgccttcgtctccagggactgcaggcttgtcgtctgcacaccgcggtcgtgtccacccccccaaggtggcttgcagagaggttaggactgttcgaggaactgtgggccgctcaagtaaaaaggctcgcaagcatggctcaaaaagagcccagaacgatcaaaatctctcttcctggcggccagaaaattgacgccgtggcttggaatacaaccccttatcaattggcccggcaaatatccagtacgttggcagacaccgctgtggccgcccaggttaatggagaaccgtacgacctggaacggccgctggaaacagacagtgatcttcggttcctgaccttcgacagcccagaggggaaggccgtgttttggcattcctcaacccacgttcttggtgctgctgcagaacagtttctgggcgcagtactgtgtcgggggccaagtaccgagtacggattttatcacgacttctttcttggtaaggagcgtaccatccgcgggtctgaactgcctgtgttagaacggatctgtcaagaattgactgcagcggcccggccgtttcgacgcctggaagcgtcacgggaccagctgcggcagcttttcaaagcggaatatgctcatcggggtttctcagaggtgaagacgcctaccttattttcaaccaaactgtgggagcagtcgggacactgggaacactaccaggaagatatgtttgccgtccagccacccggcagcgacaggcctccttcatcacagagcgatgactctaccagacatatcactgacaccctggctctgaagccaatgaactgccccgctcactgcctcatgttcgctcaccgcccccggtcttggcgcgagctcccattgaggttggccgacttcggcgcactgcatagagctgaggcgtctggtgggcttggcggattgacgagactgcggtgcttccagcaagatgatgcacacatcttttgcactactgatcagctggaggcagagatccaatcatgcttggatttcttgcgatctgtgtacgccgtgcttggattcagtttccggctggccctaagcacccgcccgtcgggctttctaggcgacccttgtttatgggaccaagccgagcaagtcttgaagcaggccctcaaggagtttggtgaaccttgggacctcaacagcggggatggtgccttctatgggcccaagatagatgtacatctccatgacgcccttggccggccccaccagtgtggtacaattcagctcgattttcagctccctctgaggtttgatctgcagtataaaggccaggccggggccctggaaaggcctgttctcattcatcgcgccgtactgggatccgtggagcgcctgctgggcgtgctcgctgaaagctgcggaggcaagtggcccctgtggttgagcccatttcaggtggtagtgatacccgtgggaagcgagcaagaagaatacgccaaggaagctcaacagagtctgcgagcggctggacttgtgtccgatctggacgcggacagcggcctcacactctcacgtagaattagaagagcacagttggctcactataactttcaattcgtggttgggcagaaagagcaaagcaaacggaccgtaaatataaggacaagagacaatcggcgccttggtgagtgggacctgcctgaggccgtccagcgcttagttgaactccagaacaccagagttcctaacgccgaggagattttttag

SEQ ID NO: 137797 - DNA, 2157 bp, synthetic construct
  misc_feature 1..2157: note = Description of Artificial Sequence: Synthetic coding sequence
  source 1..2157: mol_type = other DNA
atggctctgtaccaacggtggcggtgtctcaggctgcaggggcttcaggcctgcagactacacacagcggtggtttctacaccccccagatggctcgccgagaggctcgggctcttcgaagaactgtgggctgcacaggtgaagcggctggcatccatggctcagaaggaaccacgcacgatcaagatctctcttccagggggccagaagatcgatgctgtcgcctggaataccactccttaccagctcgcccggcaaatttcttctactttggccgatacagctgttgctgctcaggtcaacggagaaccatacgacctcgagcggcctctggagacggacagcgatctgagattcctgacattcgactctcctgaggggaaggccgtgttttggcacagctctactcacgtcctcggggccgcagccgaacagttcctgggggccgttctgtgtaggggcccatctaccgaatacggcttctaccacgattttttcctcggtaaagagagaacgatcaggggctccgagctccctgtgttagaaagaatctgccaagagttgaccgctgccgcgcgaccatttaggcggctcgaggccagtcgagaccaattgcgacagttgttcaaggataaccctttcaaactgcatctcatagaggagaaggtaactggccccactgccaccgtttatggatgtggaaccctggtggatttgtgtcaggggcctcacctgcggcacaccggacagattggaggactcaaactgctgagcaacagcagttccctgtggcgtagctccggagcccccgagacccttcagcgggtgtcaggcatctcgttccccaccaccgagctgctcagagtctgggaagcatggcgggaggaagctgagcttagggaccaccgcaggatagggaaagagcaggaactctttttctttcatgaactctcacccggaagttgcttcttcctgccccgtggtacaagggtgtataacgctctggtcgcatttatcagggccgaatatgcccaccggggcttctctgaagtgaagactcctactctcttcagcacaaagctgtgggaacagagcggccactgggagcactaccaggaggacatgttcgcggtacagcctcccggcagtgaccggcctccttcgtcccagtccgatgacagcacacgccacataaccgacaccctggcgctcaagccgatgaattgccccgcacattgtctgatgtttgcccataggccgcgctcttggcgggagcttccccttagactcgccgacttcggtgcactgcatcgggcagaagccagtggcggcttgggcgggctgaccagactgagatgctttcagcaagacgatgcacatattttttgcactactgatcaactcgaggccgagatccagagctgtttggatttcctacgtagcgtgtacgctgtgctgggtttctccttccgccttgctcttagtaccaggccttctggcttcttgggcgacccgtgtctgtgggaccaagctgaacaggtgctcaaacaagccctgaaagagtttggcgagccctgggacctcaactctggcgacggggccttttatggccccaagatcgacgtacatcttcatgacgcgctgggcaggcctcatcagtgcgggaccatccagttagactttcaactgcctctcaggtttgacctgcagtacaagggacaggccggtgctctagaacgccccgtgttgatacaccgagccgtgcttggcagcgtcgagcgactactgggagtcctggctgagagctgtggtgggaaatggccgctctggctgtccccatttcaagtcgttgtaatcccggtggggtctgagcaggaggagtacgccaaggaggctcagcagagtcttagggccgccggactggtatccgacctggacgctgactccggcttgactcttagtcgcagaatacgaagagcacagcttgcccattacaacttccaattcgtagtggggcaaaaagagcagtccaagagaaccgttaacatccggaccagagacaaccgccgattgggggagtgggatctacctgaggcagtgcagcgactggttgagcttcagaacacccgggttccgaatgcagaggaaattttctag

SEQ ID NO: 137798 - DNA, 510 bp, synthetic construct
  misc_feature 1..510: note = Description of Artificial Sequence: Synthetic coding sequence
  source 1..510: mol_type = other DNA
atggccctgtaccagcgttggagatgtctgcggcttcaaggccttcaggcatgccggctccacaccgccgtggtgtcaacccctccacggtggctggccgagcgattgggcttgttcgaggaactgtgggcagcacaggtcaaacgcctggctagtatggcacagaaagagccacgcactataaaaatctctttgcctggtggtcagaaaatcgatgccgtcgcgtggaacaccaccccctatcagcttgctcggcaaatcagcagcacactggctgacactgctgtggcagcgcaggttaatggggaaccttacgacctggaaaggcccctagaaacggactcggacctgcgtttcctgaccttcgactcacctgaaggaaaagccgataatcctggcttgcgtgctgcttgtttcggcgcggatttaccaggcacctacagctgttgttccaccttgcccgaggcgaggggatttacaggctctgccagtcccgtcgtccagggctag

SEQ ID NO: 137799 - DNA, 4974 bp, synthetic construct
  misc_feature 1..4974: note = Description of Artificial Sequence: Synthetic coding sequence
  source 1..4974: mol_type = other DNA
atgggactgcaggcaaggaggtgggcaagtggcagtcggggcgctgctggtcctcgccgcggggtgctgcaattgctgccactgccactacctttgcctctgttgctgttacttcttttgagacctggtgcagggcgcgctgccgcacagggtgaggccgaggccccaactctctatttgtggaaaacaggtccgtggggacgatgtatgggtgacgagtgtggaccaggaggcattcagacccgcgccgtgtggtgcgctcacgtcgaaggatggaccactctgcacactaactgtaagcaggcggagaggccgaacaaccagcaaaattgcttcaaagtatgtgactggcacaaagagttgtacgactggcggctcggcccctggaatcagtgtcagcccgtgatttccaagtcgttagaaaaacccctcgagtgtatcaaaggggaggaggggatccaggtcagagaaattgcctgcattcaaaaagacaaggatataccagccgaagacatcatttgtgagtacttcgagccaaaacctctattagaacaggcatgcctgatcccgtgtcagcaggactgcattgtgagcgaattcagtgcctggtctgagtgctcaaaaacgtgcggcagcggcttacaacatcgaaccagacacgttgtcgcccctccccagttcggagggagtgggtgccctaatctgactgagttccaagtctgccaatcatccccatgcgaggctgaggaactgcgatacagtctgcacgttggaccttggtccacctgcagcatgccccactcgcggcaggtaagacaggcgaggcgccggggcaaaaacaaagagagagagaaggacaggtccaaaggggttaaagatcctgaagccagagaactgataaaaaagaaacgcaaccgcaatcgtcaaaaccggcaagaaaacaagtactgggatattcagatcgggtaccagacgcgggaggtgatgtgtatcaataagactgggaaagctgctgatctgtctttctgccaacaggaaaagctgccaatgacattccaaagttgcgtgatcacaaaggaatgccaggtaagcgagtggtccgagtggtctccatgttccaagacatgtcacgacatggtttcccctgccggcacgagggtgagaacacggacaatcaggcaatttccaataggtagtgaaaaagagtgcccagagtttgaggagaaggaaccttgtctctcacagggagatggtgtcgtgccgtgcgcaacatatgggtggagaactaccgaatggacagaatgcagagtcgatcccctcctgtcccagcaggataaaaggcgcgggaaccagactgccctttgcggaggcgggattcagacacgcgaagtatactgtgtgcaggctaacgagaatctccttagccagttgtcaacccataagaacaaggaggcatcaaagcccatggatctaaaactgtgcaccggccctattcccaatacgacccagctgtgtcacattccttgtcccaccgaatgtgaggtgtctccctggtccgcctggggcccatgtacctacgagaactgtaacgaccagcaaggaaagaagggcttcaaactccgcaagagacgaattacaaatgagccgacaggaggctctggcgttaccggaaactgtccacacctgctcgaggccattccttgtgaggagcctgcctgctatgactggaaagccgttaggttgggaaattgtgaaccagataatgggaaggaatgcggtcctggtactcaggtgcaggaggtcgtgtgtataaactcagatggagaggaggtggaccgccagctttgcagggacgcgatcttccccatccccgttgcatgtgacgcaccatgtcctaaggactgtgttttatccacctggtccacgtggagcagctgcagtcatacttgttctggcaagactactgagggcaaacagatacgagcaaggagcattctcgcctatgccggcgaagagggcggcattcggtgtcccaatagctccgctctgcaggaggtgagaagctgtaacgaacacccttgtaccgtgtaccattggcagactggcccctggggtcagtgtatagaggatacaagcgtgagctcttttaatactactaccacgtggaatggggaggccagctgtagtgtgggtatgcaaacccggaaggtgatttgcgtcagggtgaacgtgggccaggtcggcccgaaaaagtgccccgaatcccttagaccggagacagtaagaccgtgcctgctgccctgtaagaaagattgcatcgtgactccttattcggattggaccagctgcccatctagctgcaaagagggggattcatctatccgaaaacagtcacggcaccgtgtgattattcagcttcctgctaacgggggtagagactgcacagatccgttgtatgaagaaaaggcctgcgaggctccacaggcatgccagagctatcgatggaagacacacaaatggcgaaggtgccagctagtgccctggtctgtgcaacaggattcccccggagcgcaggagggatgtggaccaggccgtcaggccagggctattacgtgtagaaagcaagacggcggtcaggcgggcatacatgagtgtctgcagtacgctgggcctgtgccggctctcacgcaggcctgtcagatcccttgccaggatgattgtcagctaacctcatggtccaagttctcctcatgtaatggcgattgcggtgctgtcagaacaaggaagcgaacccttgtgggcaagtccaaaaaaaaagaaaagtgtaagaactcacatctgtatcctctgattgagacccagtactgcccctgtgacaagtacaacgctcagccggtcggcaattggtctgactgtatcctgcccgaaggcaaagtcgaagtgctgcttggcatgaaggtgcaaggtgatatcaaggaatgcggccagggctatcggtatcaggccatggcttgttatgaccagaatggccggttggtagagacttcccggtgtaatagccacggatatatagaggaggcatgtattatcccctgcccgtcagattgcaagcttagcgagtggtcaaattggtcacgctgttccaagtcctgcgggagcggagtgaaggtgcgcagcaaatggctgcgtgagaagccatataacggcggtcgcccctgccccaagctggaccatgtaaaccagtttcaggtgtacgaggtggttccctgtcattccgattgtaaccagtacctctgggtgacagaaccctggagcatctgcaaagtgacctttgttaacatgcgcgagaactgcggcgaaggcgtccagacgcgaaaagtgcgctgtatgcagaacacagctgacggtccttccgagcacgtcgaggattacctgtgcgacccggaggaaatgcccctcgggtcgagggtctgcaaactcccatgtcctgaggactgtgttataagtgagtggggaccgtggacccagtgcgtactgccttgcaatcagtcctcttttcggcagcgttccgcggaccccatccggcagcccgcagatgaaggccggagttgtcccaacgctgttgaaaaagagccatgcaatttgaacaagaactgttatcattacgactacaacgtcacagattggtccacctgccaacttagcgagaaggccgtctgtggcaacggcataaaaacgcggatgctagattgcgtccgttcggacggtaagtctgttgatctgaagtattgcgaggctctgggcctagaaaaaaactggcaaatgaatacctcatgtatggtcgagtgccctgtgaactgtcaactctctgattggtccccgtggagcgaatgttcccagacatgtgggctcaccggtaagatgattcggcgccgtacagtgactcagcctttccagggggacgggcggccatgtcccagtttgatggatcagtctaaaccttgtcccgtgaaaccgtgctatcgatggcaatacggccagtggagtccgtgccaggtacaggaggcccagtgtggggaggggacacgaaccagaaacatcagctgtgtggttagcgatgggtctgcagatgacttttccaaggtcgtggacgaagagttttgcgctgacatagaacttataatcgatggcaacaagaatatggtgttggaggaatcttgctcacaaccctgccccggggactgctacctgaaggattggagctcatggtcactttgtcaattaacatgtgtcaatggcgaggatctgggttttggaggaattcaagtgcggtccagaccagtcataattcaagaattagaaaaccagcatctgtgccccgagcagatgctcgagaccaagtcatgctacgatggacaatgctatgagtacaaatggatggcatcggcgtggaaggggtcctccagaacagtatggtgtcagagatctgatggaatcaatgtgacaggaggctgcctggtaatgtctcagcccgacgccgacagaagttgtaatccaccctgttctcagccgcattcctactgctcagagacgaaaacctgccactgcgaggaaggctacacagaggttatgtcgtccaattctaccctggaacaatgtacacttattccagttgtggttctgccaactatggaggacaagcgcggagatgtgaaaacgtctagggccgtgcaccctacccagcctagctctaaccctgcaggaaggggccgaacatggtttctgcagccctttggacccgacggccgcttgaaaacatgggtctacggtgtagcggctggggcttttgtgctcctcatctttatcgtgtccatgatctacctggcctgcaaaaagcccaaaaaaccgcagagacggcagaacaaccgcttaaagccgctcacactggcctatgatggcgacgccgacatgtag

SEQ ID NO: 137800 - DNA, 4974 bp, synthetic construct
  misc_feature 1..4974: note = Description of Artificial Sequence: Synthetic coding sequence
  source 1..4974: mol_type = other DNA
atgggcctgcaggctcgccgatgggcaagcggcagtaggggagcagcagggcccaggaggggcgtcctccagctgttgccactgccactgccattgccactgctgctgttacttctcctgcgccctggcgcaggcagagctgccgctcagggtgaggcagaagcacctaccttgtacctctggaagacaggcccctgggggcgatgcatgggagacgaatgtggtccaggtggcattcagacgcgagctgtctggtgtgcccacgtggaaggatggactacactgcatactaattgcaagcaagctgagcgtcccaataatcagcaaaattgctttaaagtttgcgattggcacaaggaactgtatgactggcgattgggcccctggaaccaatgccagccagtgatttcaaaaagtctcgagaagcccctggaatgcatcaaaggcgaggaagggattcaagtccgcgagattgcatgcatccagaaagataaggatatacccgcagaggacatcatctgtgagtactttgagcccaagcccctcctcgagcaggcctgccttatcccttgtcagcaggattgtatcgtgagtgaattttctgcctggagcgaatgttccaaaacctgtgggtctggactgcaacaccgaaccaggcatgtcgttgctcctccccagtttggaggctcgggatgcccaaatctaacagaattccaggtgtgtcagtcatcaccatgcgaggctgaggagctgaggtatagtttgcacgtcggcccatggagcacctgttctatgccccacagccggcaggttaggcaagcccggaggcgaggaaaaaacaaagagagggaaaaagacagaagcaaaggcgtcaaagacccagaggcccgcgagctcataaaaaagaaacgaaatagaaataggcagaataggcaggaaaataagtactgggatattcagatcggctaccagacacgggaggtgatgtgcataaataagaccggtaaggccgcagacctgagtttctgtcagcaggagaagctccctatgactttccagtcttgtgtgataaccaaggagtgccaggtgtccgaatggagtgagtggtccccgtgctccaaaacgtgccacgatatggtgtcgcccgccggcactcgggtcagaaccaggactatcagacagttccctattgggagtgaaaaagagtgccccgaatttgaggagaaggaaccctgtctgtcacagggcgatggcgtggtcccctgcgcaacctatggttggcgtactacagagtggaccgagtgccgggtagatcccctcctgtcccagcaggataagcgtagagggaaccagacagccctgtgtgggggcgggattcagacaagggaggtttactgtgtgcaggccaatgagaatttactcagtcaactgtccacgcacaaaaacaaagaagcatccaaacctatggacctgaagttatgtactggaccaatcccgaataccacccagctgtgtcatataccctgccccactgagtgcgaagtgtcgccctggagcgcctgggggccttgcacatatgaaaactgcaatgaccagcagggaaaaaagggctttaaactgcgcaagcgtaggatcactaatgagcccaccggaggatcaggcgtgaccggaaactgccctcatctgttggaagcgataccctgtgaggagccagcttgctatgactggaaggccgtgcggctgggaaactgcgaacctgataacggaaaggagtgtggcccaggtacacaagtgcaggaggttgtgtgcatcaacagcgacggcgaagaagtggatcgtcagctgtgccgagacgcaatattccctattccagtggcctgtgacgcaccatgcccaaaggattgcgtactttcaacgtggagtacctggtcctcctgcagccacacatgcagtggaaaaaccactgaaggaaaacagattcgggccaggtcaatactggcgtatgcgggagaggaggggggaatcaggtgcccgaactctagcgcgttgcaggaggttagatcctgcaacgagcacccatgcaccgtctatcattggcaaaccggtccatggggacaatgcattgaagacaccagcgtgagcagctttaataccactaccacctggaacggcgaggccagctgttcggtgggtatgcagacaaggaaagtgatctgtgttcgcgtcaacgttggacaagtggggcctaaaaaatgcccggagagtctacgacctgagaccgtaaggccttgcctgctcccatgtaagaaagattgtatcgtcaccccatactctgactggacttcttgtccctcaagctgcaaggagggcgacagcagcatcagaaaacagtcccgccaccgcgtcataattcagttgccagccaatgggggtagagactgtactgacccattgtatgaggaaaaagcatgtgaagcccctcaggcctgtcagtcctacagatggaaaacccataaatggagacgctgccaactggtcccatggtcagtgcagcaggactcacccggcgcccaggaaggctgtggccccggccggcaggccagagcgattacctgcaggaagcaggacggtggccaggctggcatacatgagtgcctgcaatacgctgggccagtgccggcactgactcaggcctgccagattccctgtcaggacgattgccaactgacgtcgtggagtaagttcagcagctgcaacggggactgtggggccgtgagaacgaggaagcggaccttagtgggaaagtcaaagaaaaaagagaaatgcaaaaactcccatctgtacccactgattgagacacagtactgcccctgtgacaaatacaacgcccagccggtaggcaattggagcgactgcatcttgcctgaagggaaagtagaagtcttgctcgggatgaaagtgcagggagatatcaaagagtgcggacagggatatagatatcaggccatggcttgttacgatcagaatggccggcttgtcgaaactagccgctgtaactcccacgggtacatcgaggaggcttgtatcatcccctgcccatctgattgcaagttgtctgaatggagtaattggtcccgctgttctaaatcatgcggatctggagtgaaggtcaggtcaaagtggctgagagaaaagccttacaacggaggtcggccatgtccaaaactcgaccacgtaaaccaggcgcaggtgtacgaggtggtcccctgccacagcgattgtaatcagtacttatgggtgaccgagccatggtctatttgcaaagtaacatttgtgaacatgagagagaattgtggggagggagtgcagaccaggaaagtgcgatgtatgcaaaataccgccgacggacccagcgaacatgtcgaggattacttgtgcgatcctgaagaaatgcccctggggtctagggtctgtaaactcccctgcccagaagattgcgtgatctccgagtggggcccttggacacagtgcgtcttgccttgcaaccagtcttctttcaggcaaagatccgcggatcccatccgccagcccgccgatgaaggccgctcatgccctaatgccgtggagaaggaaccttgcaatttgaataaaaactgttatcattacgactataatgtgaccgactggtctacttgccagttgtccgaaaaagcagtctgcgggaacggtattaaaacaaggatgctggactgcgtgcggagcgatggtaaatccgtcgacctgaagtactgtgaggccttggggctcgagaaaaactggcagatgaatacctcctgtatggtcgaatgccccgtcaattgtcaattgagcgattggagcccgtggtccgaatgtagccagacgtgcggattaaccggcaagatgattcgcaggcgaaccgtcacacagcccttccagggtgatggaaggccctgcccttcgttgatggaccagagcaagccatgccctgttaagccttgctatagatggcagtatgggcaatggtccccatgtcaggtgcaggaagcccaatgtggcgaaggaacccggacgagaaacatatcctgcgtagttagtgatggatcggccgacgatttctcaaaagtcgtggacgaggagttctgtgcagacattgagcttatcattgacgggaacaagaatatggtcctggaagagagttgctctcagccctgtccgggggactgctacctaaaggactggtcgtcatggtctctatgccagttgacctgcgtgaacggggaggacctgggcttcggcggcattcaggttcggtcacgcccggttatcattcaggaactcgagaaccagcatttgtgccccgagcagatgcttgagacaaaatcatgttacgatggccaatgttacgaatacaagtggatggcctctgcatggaaaggcagcagcagaaccgtgtggtgtcagcggtctgacggcattaacgtgacaggaggttgcttagtgatgtctcagcccgacgccgaccgctcctgtaaccctccttgctcacagcctcactcctattgctcagagaccaaaacctgtcattgcgaggagggatataccgaggttatgtcttctaacagcactctggagcaatgcacgctaattccagtcgtggtgcttcccacaatggaagacaaacggggggacgtgaagacctctcgagccgttcatcctactcagccatcaagtaacccagccgggcgcggaaggacgtggttcctacagcccttcggccccgacggtagactaaagacttgggtttacggtgttgctgcgggcgcattcgtgctccttattttcatcgtgtcgatgatttatttagcctgtaagaagcccaaaaaaccccaacgacggcagaacaacaggctcaaacctcttaccctggcctatgatggtgatgctgacatgtag

SEQ ID NO: 137801 - DNA, 2010 bp, synthetic construct
  misc_feature 1..2010: note = Description of Artificial Sequence: Synthetic coding sequence
  source 1..2010: mol_type = other DNA
atgagcgctcttttatccctgtgtttcgtattacccctggcagctcctgggcacggcacccagggctgggaaccatgtacagatctgcgccctttagatattctcgccgaggtcgtcccatctgacggcgccacttcgggcatccggattgtccaggtgcacggtgccagggggctccagttaagtgtcgctgcccctcggactatgagcttccccgcctccaggattttttcccagtgtgatctttttcctgaagagttcagtatcgtcgtcaccctgcgcgtgcccaatctgccccccaagaggaatgagtatctcttgaccgtggtcgcggaggaaagcgacctcctccttcttggattacgcctgtctccggcccagcttcactttctgtttctgcgcgaagacacagccggggcctggcaaactcgggtgtccttcagaagccctgcactggtagatggtcggtggcacacactcgtgcttgctgtcagtgctggagtcttttcactcactactgactgcggattgccagtggacatcatggctgacgtgccctttcccgctacattatcagtgaaaggcgctaggtttttcgtgggcagccgccgcagggccaagggtctgtttatgggactcgttcggcagcttgtcctgcttcctggaagtgacgccactcctagactgtgtccctctcgaaatgcccctttagcagtactgtcaattcctagggtacttcaggcgcttacagggaaaccagaagacaacgaagttctgaaatacccttacgaaaccaacattagggttacactgggtccccaacctccttgtactgaggtggaggatgcccagttttggtttgatgcttccaggaaaggcttgtacctctgcgtgggcaacgagtgggtcagcgttttggccgccaaggagagacttgattacgtggaagagcatcagaacttgagtacaaattccgaaacactgggaatagaggtctttcggatcccccaggtagggttgtttgtagctaccgccaataggaaggctacctccgcagtttataagtggacggaggaaaagtttgtaagctaccagaacatccccactcaccaggcccaggcctggcggcatttcaccatcggtaagaagattttcctcgctgtggccaacttcgagccagacgaaaaaggtcaggaattcagtgtcatttataagtggtcccaccgcaaattaaaattcactccttaccagagcatcgcgacacactccgccagggattgggaggccttcgaagtggatggcgagcacttcctcgccgttgcaaatcaccgtgagggcgataaccacaatattgattccgttatttacaaatggaatcctgccacacggttatttgaggctaaccaaacaatcgcaacttctggtgcatacgattgggagtttttctccgtgggtccatattcgttccttgtcgttgctaacactttcaatggcacttctactaaggtgcattcacacctatatattcgcctgttgggcagcttccagttatttcagagcttcccaactttcggggccgctgattgggaggtgttccaaattggtgagcggatctttctcgccgttgccaacagccattcctacgacgtggaaatgcaggtgcagaacgactcttacgtcatcaatagtgtgatctacgaattgaacgtgaccgctcaggccttcgtgaagttccaagacattcttacttgcagcgcactggactgggaatttttctcagttggcgaagactattttctcgtggtcgcaaacagttttgatgggcgcacattcagtgtcaacagcatcatctaccgctggcagggctatgagggctttgtggctgtccattcccttccaaccgtgggatgcagggattgggaagctttttcaacaactgccggggcctaccttatatacagcagtgcaaaagagccactgagcagagtcttgagacttcgtaccagatag

SEQ ID NO: 137802 - DNA, 1800 bp, synthetic construct
  misc_feature 1..1800: note = Description of Artificial Sequence: Synthetic coding sequence
  source 1..1800: mol_type = other DNA
atgagcgcactcctgtcactctgcttcgtccttcccctcgctgcgcccggccacggcactcaagggtgggaaccatgcaccgatttacgacctctcgacatcttggctgaggttgttccaagcgacggagccacctcaggcatccggatagtacaggtgcacggagcacgcgggttgcaactgtcagtggccgctccccggacaatgagtttcccagcttcacgcatctttagtcagtgcgatctctttcccgaagaatttagcattgtggttaccctgcgggttccaaacctgccccccaaacgcaacgagtatctgctcaccgtggtggctgaggagagcgatcttctcctcctcggcctgagactcagcccggcacagcttcacttcctctttctaagggaagacaccgctggggcgtggcagacccgcgtgtcctttaggtctcctgccctggtggatgggcgctggcataccctggtgctcgctgtttctgctggggttttcagtctaaccactgactgtggcctgccggtcgatatcatggctgacgtcccatttcctgcaaccttgtcggttaaaggggcccgcttttttgtcggatcccgccggcgcgcaaaaggactgttcatggggctagtgcgtcagctggtgctcttaccaggcagcgatgcaacacccagactgtgccccagcaggaacgcacctctggccgtcctttcaatccccagagttctccaggccctaactgggaaaccagaggataatgaagtgctcaaatacccctacgagaccaatattagagtcacactgggccctcagccaccctgtactgaagtggaggatgcacagttctggtttgacgcatcccgaaagggcctgtacctgtgtgtggggaatgagtgggtatcagtcctcgctgaggcaaaagaacgtctggattatgtggaggagcatcaaaacctgtctaccaactcagagactctgggaatagaagtctttcgtatacctcaagtgggcctgtttgtagccaccgccaatagaaaagccacatctgccgtttacaagtggactgaagagaaatttgtgtcataccagaacatccccacacatcaggctcaggcctggaggcatttcaccataggtaaaaagatttttttagctgtcgccaatttcgaaccagacgagaagggtcaggagtttagtgtgatatacaagtggtcccatcgcaagctgaagttcaccccctaccagagtatcgcaacacattcagccagagactgggaagcgtttgaggtagatggagaacacttcctggccgttgctaaccaccgggagggcgataatcacaatatcgacagtgtcatatacaaatggaaccccgccacgcgcctgttcgaggccaaccagactatagctacatctggcgcttatgattgggagtttttctcagtgggtccgtacagctttctggtggtggctaataccttcaacggcacgagtaccaaggttcattcacatttatatattcgattgctgggcagcttccaactttttcagtcttttcccacgtttggcgccgcagattgggaggtatttcagatcggggaacgcatatttctggcagtggcaaatagtcacagttacgatgtcgaaatgcaagtccagaacgactcctatgttattaactcagtgatctacgagctcaacgtaactgcacaggctttcgttaaatttcaggacatacttacttgctccggcggacgaagagggctgcacgccaggcgagccgagggttag

SEQ ID NO: 137803 - DNA, 1569 bp, synthetic construct
  misc_feature 1..1569: note = Description of Artificial Sequence: Synthetic coding sequence
  source 1..1569: mol_type = other DNA
atgagtgctcttctgtccttgtgcttcgtgttgccactggccgcgcccggacacgggacccagggatgggagccctgtaccgacctgcgaccactggacatactggcggaagtcgtgccttcagacggcgcaacctccggaattaggatcgtccaagtacacggggctagggggttacagctgtcagtggcggcccctaggactatgagtttcccagccagccggattttctcccagtgtgacctgttccctgaggagttttcaatcgttgtgacactacgggtaccaaatctgccacctaagaggaatgagtatttgttgactgtcgttgctgaggagtctgatctgttactgctaggcctacgcctgagccccgcccagcctccttgtacagaggtggaagatgcccaattttggttcgatgcatcaagaaaaggcttatacctatgtgtgggaaacgaatgggtgagcgttctggccgccaaagagcgactggattacgtggaagaacaccagaatcttagtacaaattccgaaaccctcggaatagaggtctttagaataccgcaagtgggcttgtttgtcgccacggccaatcgcaaggccacctctgctgtttataagtggaccgaagaaaagttcgtgagctaccagaatattcccactcaccaggctcaagcttggcgccacttcactatcggcaagaagatctttttggcggtggctaatttcgaacccgatgagaaaggccaggagttctcggtaatctataaatggagccaccgcaagctgaaattcactccctatcagtctattgcgacccatagcgcacgcgactgggaagcttttgaagtagacggcgagcatttcctcgccgttgctaaccaccgcgagggcgataaccataatatagactcagtgatctacaaatggaacccagcaacccgcctattcgaagcgaaccaaactattgccaccagcggcgcatatgattgggagttcttctcagtaggaccatatagcttcttggtggtggcaaatactttcaacggtacctcaacgaaagtccacagtcacctgtatatccggttgctcggatcgtttcagcttttccaatcattccccacgttcggggccgctgactgggaagtttttcagattggggagaggatctttctggccgtggcgaattcccacagttacgatgtggagatgcaggtgcagaatgactcctacgtgatcaatagcgtcatatacgagctcaatgtcactgcccaggcctttgttaagtttcaagacattctgacttgtagcgcactggattgggagtttttttcagtgggggaggattactttctggtggttgcgaattcatttgatggaagaactttctcagttaatagtataatttatcggtggcagggctatgagggattcgtcgccgtccactctctccctacagtcgggtgtcgtgattgggaggcctttagtacgaccgcaggcgcctatttgatttactcatctgctaaagaacccttatcccgtgttttacgtctcagaacacgttag

SEQ ID NO: 137804 - DNA, 1605 bp, synthetic construct
  misc_feature 1..1605: note = Description of Artificial Sequence: Synthetic coding sequence
  source 1..1605: mol_type = other DNA
atgatggaagccctcggattcctgaagttggaagtcaacggccccatggttaccgttgccctaagtgttgccctgctcgcgttgctgaagtggtacagcacttccgcattctcccggctggagaaactagggcttcggcaccccaagccgagccctttcattgggaatttaacttttttccgtcagggattctgggagtctcagatggagctgagaaaattgtacggcccgctgtgcgggtattatttgggacgtcgaatgtttatcgtgatctctgaaccagacatgatcaagcaggtcctcgtcgaaaacttctcaaatttcaccaaccgcatggcaagcggcctcgaattcaagagcgtggccgatagcgtcctgttcctcagagacaaacgctgggaagaggtgcgaggagcactcatgtcagccttttcacctgagaaactcaacgagatggttccgttgatctcgcaggcctgcgagttacttctggcccatcttaagcgctacgccgagagcggcgatgcctttgacattcagcgctgttattgtaattacactactgacgtagtggcctcagtggcgttcgggaccccagtggacagctggcaggctcccgaggatccgtttgtcaagcactgcaagcgcttctttgagttttgcataccaaggcctatcttggtgcttctgctgtccttcccgtcaattatggttcctctcgcacggatcctacccaataagaatcgcgacgagctgaatggctttttcaataagctgatccgtaatgtgattgctctgagagatcaacaggcggcagaggaaagacgcagagactttcttcagatggtgctcgacgcgaggcactcagcctctcctatgggggtgcaagattttgacatcgtcagggatgtattttccagcaccggctgtaaacctaatccatcaaggcagcaccaaccctctcccatggcccgaccccttaccgtagacgagatcgtcgggcaggcatttatctttttgattgctggctatgagatcatcaccaataccctgagctttgccacttatcttcttgcaaccaatccagactgccaagaaaagctactgcgagaagtggacgtctttaaagagaagcacatggccccggaattttgcagtttggaggagggactaccttacctcgacatggtaattgcggagacactgcggatgtaccccccggcctttaggttcacccgggaggccgcccaggattgcgaagtcctgggacaacggattcccgcaggagccgtcctggaaatggccgtcggagctttacaccatgatcctgaacactggccatcgccggagacttttaaccccgagcgatttaccgcagaagcccggcaacaacataggccatttacctatctgccgtttggagccggacctcggtcctgtctgggagtaaggttaggtctgttggaagtcaaactgacgcttctgcatgtgctccacaaatttaggttccaggcgtgccctgaaacccaggttcccttgcaactggagtccaaatccgccttgggacccaagaatggagtgtacattaagatcgtgagccggtag

SEQ ID NO: 137805 - DNA, 1602 bp, synthetic construct
  misc_feature 1..1602: note = Description of Artificial Sequence: Synthetic coding sequence
  source 1..1602: mol_type = other DNA
atggaagccttgggctttctgaagctggaggtaaacggacccatggtgacagtggccctgtcggtggcactcctagccctcctcaaatggtattcgacgtcagcttttagccgactcgagaaactgggactgcgacatcccaagccttctccatttatagggaatctgactttctttcggcagggcttctgggaatcccagatggaactgaggaagctatatggtcccctgtgtggatattacctggggagaaggatgttcatcgtaatctcggagcctgacatgatcaaacaggtgctggtggaaaacttctcgaactttactaaccgtatggcgtccgggctcgagtttaaaagcgtggctgactcagtcctgttcctacgggacaagcggtgggaggaagttcggggagctttgatgtccgcgttttctcctgaaaagcttaacgagatggtgccactcatcagtcaggcatgcgagctgctcctagctcacttaaaacgatacgcagagtccggggatgctttcgatattcaaaggtgttattgcaattacaccaccgatgtggttgcttctgtagcttttggcaccccagtcgattcctggcaggcacccgaagatccttttgttaagcactgcaaacggttcttcgagttttgcattccacgtcccatcctggtcctgttactttcatttccgagtatcatggtgcccctggccagaatactgccaaataagaatcgagatgaactgaatggctttttcaacaaactaatcaggaatgtcattgctctgcgggaccagcaggcagctgaagaaagacgcagagacttcctgcagatggttctcgacgcaaggcatagcgcttcgcccatgggtgtgcaggatttcgatatcgttcgcgacgtcttcagctctactggatgcaagcctaatccctcaaggcagcatcagccctcccccatggcgcgtcctctgaccgtcgacgagatcgtgggacaggcctttatttttttgatagccggctatgagatcatcacaaacaccttgtccttcgccacctacctgctggcaaccaacccagactgtcaagaaaaactgttgcgagaggtagacgtgttcaaggagaagcacatggcgccagaattttgtagcctggaagagggtctcccgtaccttgacatggtgatcgccgagacgctccgcatgtatcctccggccttcaggtttacacgcgaggccgctcaagactgcgaggtactggggcagcgcatcccggctggagccgttctggagatggctgttggcgccctgcaccacgatcctgaacactggccttcaccggaaacctttaacccggaacggttcactgctgaagcccggcagcagcatagaccttttacctacctgccgtttggcgctggccctcggagctgcctgggggtgagattgggtctgctcgaggtgaaattaactctgctgcacgtgttgcataagttccgcttccaggcttgtccagagacacaggtgccactgcaactggagagcaagtcggctctggggccgaagaatggggtgtacatcaaaattgtctctcggtag

SEQ ID NO: 137806 - DNA, 1380 bp, synthetic construct
  misc_feature 1..1380: note = Description of Artificial Sequence: Synthetic coding sequence
  source 1..1380: mol_type = other DNA
atggaagccctgggcttcctcaagttagaagtcaatggaccgatggtaactgtggcactttcggtagctctgcttgcgctcctgaagtggtattccaccagcgctttctccagactagagaaacttggactccggcatccgaagccatccccttttatcggaaacctcacattttttaggcagggattctgggagtctcagatggaactaaggaagctgtatgggccgctgtgcggttactacctcgggagacggatgttcatcgttatatccgaacctgacatgattaaacaagtgctggttgagaattttagtaattttactaacaggatggcaagtggacttgagttcaaaagcgtcgctgatagtgttttatttctgcgcgataagaggtgggaggaggtgcggggggccttgatgagcgcgttttctcccgaaaagctgaatgagatggtgcccctgatcagccaggcctgcgagctgctgctagcacacttgaaacgctacgccgaatccggagacgcgttcgatatacagcggtgctattgtaactatacaacagacgtagtggcctccgtggcttttggaactcccgtcgattcctggcaggccccagaagatcccttcgtgaaacattgcaagcgcttctttgagttttgtatccctagacctatcttagtgctccttttgtcatttccttctatcatggttccactcgcgcggattctaccgaataagaatagagacgagttaaacggcttcttcaacaaactgatcagaaacgtcattgccctgcgtgaccaacaggccgccgaggagaggaggcgggatttcctccaaatggtgctcgacgctagacacagcgcatctccaatgggcgttcaggacttcgacatcgtcagggatgtgttttcttctactggatgcaaaccgaatccaagcagacagcaccagccctcaccgatggccaggcccctcacagtcgacgaaatcgttggacaggcctttatttttctcattgcagggtacgaaataatcacaaacaccttgtcgtttgctacttatctgctcgctaccaacccggattgccaggagaaactgctgcgagaggtcgacgtattcaaggagaagcacatggctcctgagttctgttccttagaggaaggactaccatacctcgacatggtgatcgccgagactctcaggatgtacccaccagcctttcggttcacaagggaggccgctcaggattgcgaagtcctggggcagaggattcctgccggagcggtgctggagatggccgtgggtgcactccaccacgaccccgagcattggccatcccctgaaacatttaatccagagaggtaccggtgcagctag

SEQ ID NO: 137807 - DNA, 1383 bp, synthetic construct
  misc_feature 1..1383: note = Description of Artificial Sequence: Synthetic coding sequence
  source 1..1383: mol_type = other DNA
atgatggaagccctgggctttctgaagctggaagtaaacggccctatggtgaccgtagcgttgagcgtcgctctgttggcactcctgaagtggtattctacttccgcttttagtaggcttgaaaagctaggcctgaggcatcctaagccctcccctttcatcggcaatctcaccttttttcgccaaggcttctgggaatcacagatggagctgcgtaagttatatggaccactctgtggttattatctcggtcgccggatgtttatcgtgatctccgagcccgacatgattaagcaggtgcttgtcgaaaatttctccaatttcacaaatcgcatggcctcgggcttagagtttaaatccgtggctgattcggtgctattcctacgggataaacgttgggaggaagtcaggggtgctctgatgagcgcgtttagtcctgaaaagctaaacgaaatggttcctctaattagtcaggcttgtgagctgctactggcccaccttaagcggtacgccgagtcaggtgatgcctttgacatccagcggtgttattgcaactataccactgatgtagtggcatcagtggcctttggcacccctgttgacagctggcaggctccagaagatccctttgttaagcactgcaagaggtttttcgaattttgtattcccaggcctattctggtgctactcctctcttttccctctattatggtccccctcgcgagaatactgccaaataagaacagagacgagctcaatggtttttttaataagctgattcgaaacgttattgctttgcgcgaccaacaggcagccgaggagagacgtagggattttctccaaatggtgctggatgccaggcacagtgcatcaccaatgggtgtacaggactttgacatcgttcgcgatgtattcagcagcaccgggtgtaagcccaacccaagcaggcagcaccagccatcccccatggcaaggcctctaacagtggacgagatcgtcggacaagccttcatctttcttatcgccggatatgaaattatcacgaatacactgtccttcgcaacttacctgctggccactaaccccgattgtcaagagaaactactcagagaggtggacgtgtttaaagagaagcatatggctccagagttctgttctttagaggagggcctgccgtatctggacatggtgatcgccgaaactctccgtatgtatccacctgcatttcgttttaccagggaagccgcgcaggactgcgaggtgctcggacagcggattcctgcgggcgccgtgctggaaatggccgtgggcgccctgcatcatgaccctgaacattggccatcgcccgagacattcaatccagaacgataccgatgtagctag

SEQ ID NO: 137808 - DNA, 1743 bp, synthetic construct
  misc_feature 1..1743: note = Description of Artificial Sequence: Synthetic coding sequence
  source 1..1743: mol_type = other DNA
atgatggaagccctcggatttttgaagctcgaagttaacgggccaatggtgacagtggcccttagcgtggccctgctggctctgctgaaatggtactctacaagtgccttttccaggctggagaaactggggttgcggcatccaaaaccatcacccttcatcgggaatctgacgttctttcgccagggtttttgggagtctcagatggagttgaggaaattgtacggcccgctgtgtggatactaccttggccgcagaatgtttatcgtgatttctgaacctgacatgattaaacaggtcctggtcgagaacttctctaactttaccaacaggatggcaagcggactggagttcaagtctgttgctgattctgtcctcttcctaagggacaagaggtgggaggaggtgaggggcgcgcttatgtctgcatttagtccagagaagctgaacgagctcggactgctgataatgcaggagaggattaaagggcatatgggggggcaacaggctccgcagaggataccgccaaccaggctgagcaagcctagtggtatctacgtcaacctccattacgctacgttaccattctgcatggtgccactgatctcacaggcgtgtgaattgctcctggcccatctgaaaagatatgcggaatccggcgacgccttcgatattcagaggtgttattgcaattatacaacagatgttgtggcctctgtagctttcggaacacccgtcgatagttggcaggcccccgaagacccttttgtgaaacattgcaagcgattcttcgagttctgcattccccggcccatactggtgctcctgctgagcttcccctctattatggtgcctctcgctaggattctgcccaacaaaaatcgagacgagctgaatgggttttttaacaagctcatcagaaacgtgattgcactccgagaccagcaggcagctgaggaacgtagacgcgattttttgcagatggtgctggacgcccggcactcagcttcaccaatgggcgtgcaggatttcgatatagtgcgggacgtgttcagttctacggggtgtaaaccgaaccctagccgacaacatcagccctcacccatggcccgaccgctgactgttgacgagattgttgggcaggccttcatattcctgatcgccggctatgaaatcattacgaatacactatcctttgctacatacctactggcgaccaatccggattgtcaagaaaaattacttcgggaagtggacgtgttcaaggaaaaacacatggcccccgaattctgctcgctggaggagggattgccatatcttgatatggtgatcgctgaaaccctgcggatgtaccctcccgcgttcagatttacgcgagaggccgcacaggactgtgaggtgctgggccagcggataccagcgggcgctgtgttggagatggctgtaggggccctgcaccacgatcctgaacactggccgagtccggagacctttaaccctgagcggttcacggccgaggctcggcagcagcaccgcccatttacctacctacctttcggggctggcccgagaagttgtctgggcgtgcggctgggcttgctggaggtcaaactgaccctgctgcatgtcctacacaagttccggttccaggcatgtccggagacgcaggtgcccctgcaactggaatcaaagtccgcattaggaccaaaaaatggagtttatatcaagatcgtctctcgctag

SEQ ID NO: 137809 - DNA, 1605 bp, synthetic construct
  misc_feature 1..1605: note = Description of Artificial Sequence: Synthetic coding sequence
  source 1..1605: mol_type = other DNA
atgatggaggccctggggttccttaaacttgaagtgaacggacccatggtcacagttgcactgtcagtggctttgctcgcactgcttaaatggtactccacatccgcgttcagccggctcgagaagctcggactgcgccaccccaagccttcgcccttcatcggcaaccttacattcttccgccaggggttctgggaatcccagatggagctgaggaagttgtatggtcccttatgtggttattatttgggccgaagaatgttcatcgtcatcagtgaacccgatatgatcaagcaggttctagtcgaaaatttctcgaattttactaataggatggcgtccggcctagaattcaagtctgtggccgatagtgtgttgtttctgagagataagcgctgggaagaagtgcggggagcccttatgtcagctttctctcctgagaaactgaatgagatggtgccgctgatctcacaagcgtgcgagcttctgctggctcacctcaagcgctacgccgaaagcggagatgcatttgacatccagcgttgttattgcaattacacgactgatgtcgtggcctccgttgctttcgggacacctgttgattcatggcaggcacccgaagatcctttcgttaaacattgcaaaaggttcttcgagttctgtattccaagacctatcctcgtgctactcttatcattcccgtcaattatggtgcctctggctagaattctcccaaataaaaatcgggacgagctgaacgggttttttaataaactcattagaaatgtgattgccctgagagatcagcaggcggcagaagagcggcgaagggatttcctgcagatggtgctcgatgctcggcattccgcctcgccaatgggggtacaagacttcgacattgtcagagatgttttcagctccaccgggtgtaaacctaaccctagcagacagcaccagcccagcccaatggctcgcccactgactgtggacgaaatcgtcggccaggcatttatatttctaatcgccgggtacgaaatcatcacaaacacactcagctttgccacttatctcctggcaacaaaccccgattgccaggagaagctcctgcgagaggtggacgtgtttaaggagaaacatatggcgcctgagttctgttccctcgaggaaggattgccgtatctcgacatggtcattgctgaaaccctcagaatgtacccacccgcattcaggtttactagggaagccgcccaggattgtgaagtactgggacagagaatccccgcaggcgccgtgttggaaatggctgtgggagccctccaccatgacccagaacactggcccagcccagagacctttaatcccgaacgcttcaccgctgaggccaggcagcaacatagaccttttacttacctacctttcggtgccggaccacgtagctgtctgggggtgaggctcggtctgctggaggtgaagcttacgttgcttcatgttcttcacaaattcagatttcaggcttgcccggagacccaggtgccactccagctggagtcgaagagcgcgctcggccccaaaaatggcgtctacatcaaaatagtgtcaaggtag

SEQ ID NO: 137810 - DNA, 453 bp, synthetic construct
  misc_feature 1..453: note = Description of Artificial Sequence: Synthetic coding sequence
  source 1..453: mol_type = other DNA
atggaggcactcggcttcctgaaactggaggtcaacggcccgatggttactgtagcgctgtccgtggccctgctggcccttctcaaatggtattccacgtcggcgttttcccgtttggagaagttagggctaaggcaccctaaaccctccccatttatcgggaacctgacttttttccggcagggcttctgggagtctcagatggaactccgaaagctttacgggcccttgtgtggatactaccttggccgcaggatgtttattgtgattagtgaaccagacatgattaaacaggtgctcgtggaaaacttctccaacttcacaaacaggatggcgagtggcctggaatttaaatctgtagctgacagcgtgttattcctgagagataagcgctgggaagaggtccgaggggcattaatgtccgccttcagccccgaaaagctcaatgagtag

SEQ ID NO: 137811 - DNA, 1602 bp, synthetic construct
  misc_feature 1..1602: note = Description of Artificial Sequence: Synthetic coding sequence
  source 1..1602: mol_type = other DNA
atggaggccctgggctttctgaaactggaagtgaacggacctatggtcaccgtggccctcagtgtggcactcctggccctgctgaaatggtattccacaagcgcattttctcggctggaaaaactcggcctacggcatccgaagccttctccctttattggcaaccttaccttcttccggcagggattttgggagtcacagatggaactccggaagctgtacggccctctgtgtgggtactacctggggcgccgtatgtttatagtcatctcggagcctgacatgataaagcaggttctggtcgaaaacttcagcaatttcactaataggatggcgtctgggctggaatttaagtccgttgccgacagcgtcctgtttctaagggataagcggtgggaggaagtgaggggtgcactaatgtctgcctttagtcctgagaagctgaatgagatggtgccactgatttcacaggcatgtgagttactcctggctcacctcaagagatatgcggaaagcggtgatgcctttgacatccagaggtgttattgcaattacaccactgacgtagtggccagtgtggcatttggaaccccggtggatagttggcaggctcccgaggacccctttgtgaagcattgtaaacgcttttttgagttttgtatccctagaccaattctggtgctgctcctgtcctttcctagcatcatggtcccccttgctcggatcctccctaacaagaatcgcgacgagctcaacggatttttcaacaagcttataagaaacgtcattgcactgcgggatcagcaagcggctgaagagagacggcgtgactttctgcagatggtactggacgcccgtcatagtgctagccctatgggagttcaggatttcgatattgtgcgcgatgttttctccagcactggttgcaaacctaatccatcacgccagcaccagccttccccaatggccagaccccttacggtggacgagatcgtggggcaggcatttattttcttgatagcagggtacgaaataataacaaacactctgtcatttgccacgtacctgctcgcaacaaatcctgactgccaagagaagctccttcgtgaggtagatgttttcaaggagaagcacatggctcccgagttctgttccctagaagaaggtctgccttatctggacatggttatagctgaaaccttgagaatgtaccctccagccttccggttcacaagagaggcagcacaggactgtgaggtacttggtcagaggattccggccggggccgtgcttgagatggcggtgggcgccttgcaccatgatccagaacattggccctctccggaaaccttcaacccagagcggttcacagccgaagcgaggcagcagcatcggccctttacgtacctgccttttggggcaggacctagaagctgtctgggtgtgagactgggcctcctggaagtcaagcttacattgcttcacgtgctccacaaattccgatttcaggcttgcccagaaactcaggtgcctcttcaacttgaaagtaagtccgcccttggacctaagaatggagtctatataaaaatcgtgtctcgatag

SEQ ID NO: 137812 - DNA, 459 bp, synthetic construct
  misc_feature 1..459: note = Description of Artificial Sequence: Synthetic coding sequence
  source 1..459: mol_type = other DNA
atgatggaggctttggggttcctcaaactcgaagtgaatggaccaatggtgaccgtggccctgtctgtggcccttctggcattgttgaaatggtattctacttctgctttctctcggctggagaagctcggtctgcggcaccccaaacccagccccttcatcggcaatctgacttttttcaggcagggattctgggagtcacaaatggagttgaggaagctgtacggaccactgtgtgggtactatcttggacggcgcatgtttattgtcatctcagaacctgatatgatcaagcaggtcctggtggaaaatttttccaatttcactaatcgaatgcctcagtcaatcatgcccaactcgcggcatcacgtagcctcacgggggatgtggcctggtggcaggagactagcctgttacttgcatccattcaggatggctgaggggattgccgaggtctag

SEQ ID NO: 137813 - DNA, 1401 bp, synthetic construct
  misc_feature 1..1401: note = Description of Artificial Sequence: Synthetic coding sequence
  source 1..1401: mol_type = other DNA
atggagttgcgaaagttgtacggccccctgtgtggatactacctcggcaggagaatgttcattgtcataagtgagcctgatatgatcaaacaggtcctcgtggagaatttcagtaattttactaacagaatggctagcggactggaatttaagtccgtggcagattcagtccttttcctccgtgacaaaaggtgggaagaggtccggggtgcactgatgtccgccttttcccccgagaaactgaatgaaatggtgccgctgatttcgcaggcttgcgagctactgctggcccacctgaagagatacgctgagagtggcgatgcatttgatattcagcgctgctactgtaattataccacagatgtcgtggcaagtgtggcatttggcacccccgtcgactcttggcaggctccagaagatccttttgtcaagcactgcaaacgcttcttcgagttctgcattcccagacctatcctggtgctactactgtctttccccagcattatggtgcctctcgctcggatactgcctaataaaaatcgcgatgaattgaatgggttctttaacaagctgatccgaaatgttatcgccctgcgggatcaacaggccgccgaagagcgccggagagatttcctgcagatggttttggacgctagacatagcgcatctccaatgggggtccaggattttgacatcgtcagagacgtgttctccagtactgggtgtaaacctaacccatccagacagcaccagcccagcccgatggcccgcccactgacagtggatgagatcgtcgggcaagcctttattttcctcattgcaggttatgagattatcactaacaccttgtcctttgctacctacctcttggctaccaatccggactgtcaggagaagctactgcgcgaagtcgatgtgttcaaggaaaaacacatggctcccgagttttgtagtctggaagagggcctgccctacctggatatggtgatcgccgaaacattgagaatgtatccgcctgcctttaggttcactcgggaagcagcccaggactgcgaagtgctgggacaaaggatccctgctggcgccgtccttgaaatggccgtgggcgcattgcaccacgatccggaacattggccctcccccgagactttcaatccagagcgcttcacagcagaggcgagacagcaacaccgccctttcacctacctccctttcggggccgggccccgtagctgtctgggagtccgtctgggcctactcgaggtcaaactaaccctgcttcatgtccttcacaagttccggtttcaggcctgtccggagactcaggtgccactgcagctggagtccaagtcagccctcggaccaaagaacggtgtgtatattaaaattgtgagccgatag

SEQ ID NO: 137814 - DNA, 1032 bp, synthetic construct
  misc_feature 1..1032: note = Description of Artificial Sequence: Synthetic coding sequence
  source 1..1032: mol_type = other DNA
atgtggcccaatggctcctctctgggtccatgcttccggccaactaatattacactggaggagcggcggttgatcgctagcccctggtttgcagcttccttctgcgtcgtaggcctggctagcaatctgctcgcactcagcgtgctcgctggcgccaggcaggggggctcccatacacgctcttcgtttctcacgttcctgtgtggactagtactgactgatttcctcgggctcctggtgaccggcactatcgtggtctcacagcatgccgccctgttcgaatggcatgcagtggatccggggtgtcggctgtgtagattcatgggcgtcgtgatgatcttcttcgggttatctcctcttctacttggtgccgctatggccagcgaaagatacttagggattactcggcccttctccaggcctgccgtggcgagtcagcggcgcgcctgggctactgtggggttagtgtgggccgcagccctcgcactaggcctgcttccattgctcggggtcggaaggtatacagtccagtaccctggctcttggtgtttcctcaccctgggcgcagaaagcggagacgtcgccttcggcctcctgtttagcatgctgggaggcctgtcggtcggactgtccttcctgctgaataccgtctcagtagccactctttgccacgtgtatcatggccaggaggcagcccaacagcggccgagagactctgaagtcgaaatgatggctcaattattaggcattatggtggttgcttctgtatgctggctgccactactggtatttatagctcagactgtgctccggaatcctcctgccatgtctcccgccggtcagctctcccgaacaactgaaaaggaactgctaatatacttgcgcgtcgccacatggaatcagattctggacccctgggtctacatcctcttccgccgcgctgtcctaaggaggctgcaaccccgcctcagcacccgccctcgttccctgagcctgcagcctcagctgacacaacggtctggtctacaatag

SEQ ID NO: 137815 - DNA, 1224 bp, synthetic construct
  misc_feature 1..1224: note = Description of Artificial Sequence: Synthetic coding sequence
  source 1..1224: mol_type = other DNA
atgtggcctaacgggtcctccctgggcccctgcttccgcccaaccaacatcaccctggaggagaggcgcttaatcgccagtccctggttcgctgccagcttctgtgtggtcggcttagcaagcaaccttctggcactatcggtgctggctggagcacggcagggtgggtcacatacacgttcatccttcctgacatttctctgcgggcttgtcctgactgacttcctgggcctgctggtgacagggacaatcgtagtatcccagcacgccgcattgttcgagtggcacgccgtggatcctggctgtcgcctatgcaggtttatgggcgtagtgatgatattcttcggactttcccccctcttgttgggtgccgcgatggcgagtgaacgctatctggggatcacacgaccgtttagtagacccgctgtggcaagccaacgacgggcatgggcgacggtcgggcttgtatgggccgctgctcttgctttgggtctcctccctctcctgggtgtcggcaggtatactgtgcagtaccccggatcctggtgcttcctcacactcggagcggagtcgggggacgtggcctttgggttgctcttctcaatgctgggagggctaagcgtgggcctcagtttcctgcttaatacagtgtctgtggccactttatgccacgtgtaccatgggcaagaagctgctcaacaacgtcctagagattctgaagttgagatgatggcgcaactgctggggattatggtggtggcctcggtgtgctggctgcccctgctcgtcttcatcgcgcagacagtcctgagaaacccacccgccatgtcgccagccggccagttatcccgcacgactgagaaagaactactcatttatcttcgggtggccacctggaaccagattctcgatccctgggtctatatcctgttcagaagggcggtgttaaggagactgcaacccagactctccaccaggccccgtcggagcctgactctttggccttctctggaatattctggcaccattagcgctcattgcaaccttagattgcctggctcctccgatagccgagcatccgcctcccgcgccgccggtattacaggagtctcgcattgtgcccgtccctgcatgctcttcgatccggaatttgatctgctagctggggtacagctattaccatttgagcctcccactggtaaggcactttcacgcaaggactag

SEQ ID NO: 137816 - DNA, 1422 bp, synthetic construct
  misc_feature 1..1422: note = Description of Artificial Sequence: Synthetic coding sequence
  source 1..1422: mol_type = other DNA
atgagagaggtgcgggctcgcttggcagcgactcaggtggaatacatctccggaaaagtgttcttcacaacatgttctgatttgaacatgcttaagaagctgaaaagtgctgagaggctttttctcctgattaagaagcagttccccctcataatctccagcgttagtaaagggaagattttcaatgaaatgcagagattaatcaacgaggacccaggcagttggcttaacgcaatttcaatttggaagaacctccttgagctagatgccaagaaagaaaaactgagccagagggacgacaaccagcttaaacgcaaagttggtgagaatgaaatcattgcgaagaaattaaagattgagcagatgcaaaaaattgaggagaatagagattgccagctggagaaacagattaaggaggagactctggagcagcgcgactttactacgaaaagtgagaaattccaagaggaggagttccagaatgatatagagaaggcgattgatacacacaaccagaacgaccttactttcagagtctcctgtcgctgtagcggcaccataggaaaagcatttacagcacaggaagtcggaaaagttattggcattgcaattatgaaacatttcggatggaaggctgatttgcgcaacccccagctcgaaatttttattcatcttaatgacatttattcggtggtaggaatcccggtttttcgggtgagcctcgcctcccgggcatatatcaaaactgctgggctgagaagtacaatcgcttgggccatggcatcattggcagacataaaggccggagccttcgtgttggatcctatgtgcgggctgggcactatcctgctggaggcagccaaagagtggccagacgtctactacgtcggggctgatgtgagcgatagccaattgctgggaacctgggataacctgaaggcggccgggctagaagataagattgaactgctaaaaatttccgtgattgagctgccattgccctccgagtctgtcgatataatcatcagcgacattccatttggaaagaaatttaagctgggaaaagatatcaagagcattctgcaggagatggaaagggtgctccacgtgggcggaaccatcgtgctgctcctgagcgaagaccaccacaggagactgacagattgcaaggagtcaaatatcccctttaatagcaaggacagtcacactgacgagccaggcatcaaaaaatgtctaaaccccgaagaaaagactggagctttcaagactgcaagtacgagcttcgaagcatccaatcacaagtttctggatagaatgagcccgtttggttctcttgtcccagtcgaatgttacaaggtatctctcgggaagacagatgctttcatatgcaaatataagaagtcccacagcagcgggttatag

SEQ ID NO: 137817 - DNA, 873 bp, synthetic construct
  misc_feature 1..873: note = Description of Artificial Sequence: Synthetic coding sequence
  source 1..873: mol_type = other DNA
atgagagaggtcagagcaagactggccgccacgcaggttgagtacatctccggaaaagtgttttttactacatgttcagatttgaacatgctcaaaaagctgaaaagcgccgagaggttgtttctgctgattaaaaagcagtttcccctgattatctcttctgtgtctaaagggaagatattcaatgagatgcaacggttgattaacgaggaccccggttcatggctgaacgccatttcaatctggaagaacctcctggagcttgatgctaaaaaggagaagctttcccagagggatgacaaccagttgaaacgcaaggtgggagagaatgaaatcatagccaagaagctcaaaatagaacaaatgcagaagattgaagagaacagagattgtcagctggaaaaacagatcaaggaggagaccctggaacaacgtgactttactacaaaaagcgagaaatttcaggaagaggaattccagaatgacattgagaaggccatcgatacgcacaatcagaacgacctcacctttcgggtgtcctgcaggtgttccgggacaatcggcaaggccttcacagcccaggtcctctatatggggttgagcccaggtcctcggcttcagatgcatatgagatcccagcagtgcagggaggagcgtacccctcagaccgtggcaatcaccagacctcaccagctggcactgacgaagttctcagacgtgaagggacactggagcgaatattttattaacttgaaaatcagtcagaccttgaagggtggtcggaagtctaactggaattgttactacgaaacactgtggatggaatctcgtctggaggagtctactattagggacctctacacctctaagtag

SEQ ID NO: 137818 - DNA, 1512 bp, synthetic construct
  misc_feature 1..1512: note = Description of Artificial Sequence: Synthetic coding sequence
  source 1..1512: mol_type = other DNA
atgtctgaagcccgcggagagccaggaagcggtccggaagcgggggcccggttcttttgcacggcaggccggggtctggagcccttcgtgatgagggaggtgagggctcgcctggccgcaacccaggtggaatatatcagcgggaaagtttttttcactacgtgttcagatctgaatatgttgaaaaagctgaagagtgccgagcgtctctttctgctgataaagaaacagtttcccctcatcattagtagcgtttcaaagggaaaaattttcaatgaaatgcagcgattgataaatgaagaccccggctcttggctgaatgccatctcaatctggaagaaccttctagagcttgacgccaaaaaggaaaaactgagccagcgggatgacaatcagctgaaacgtaaagtgggggaaaacgagattatagcaaagaaattgaaaatcgaacagatgcaaaaaatcgaggagaaccgagactgccagcttgaaaaacaaatcaaggaagaaactctcgaacagcgggatttcaccaccaaatcagagaagtttcaggaagaggaatttcagaacgatattgaaaaagccatcgacacacacaatcagaatgacctgactttccgcgtttcatgcaggtgctctggcaccatcggcaaggcctttaccgctcaagaagtggggaaggtgatcggcattgccatcatgaagcattttggatggaaggcggacttaaggaatccacaactggaaattttcatccacctgaacgacatttatagtgtcgtgggtatcccagtgtttcgcgtgagcctcgccagtcgtgcctacatcaagaccgcaggactgaggtcaactattgcatgggctatggcaagcctggctgacataaaggcaggagctttcgtgctggatccaatgtgtggcctgggcacaatattactggaagccgccaaggaatggcccgatgtgtactacgtgggtgctgatgtgtccgatagtcagctgttgggcacttgggacaatttaaaggcagccgggctcgaggacaagatcgaacttctcaagatatccgtcatcgagctgcctctgccatctgagtccgtggacatcatcatttctgatataccattcggcaagaaattcaagctggggaaagacataaagagtatactgcaggagatggagcgggtgctacatgtcggcggaactattgtgctgctcctgtccgaagaccaccacaggaggctgacagattgcaaagaaagtaatattcctttcaacagcaaggattcccatactgatgagcccgggatcaagaagtgccttaacccagaagagaaaaccggggcgttcaagactgcgagcaccagctttgaagcctctaaccacaagtttcttgatcgaatgtcaccctttggatccctagtgcccgtagagtgttacaaagtgtccttgggaaaaaccgatgcttttatctgcaagtacaagaagagccactcatccggcctgtag

SEQ ID NO: 137819 - DNA, 486 bp, synthetic construct
  misc_feature 1..486: note = Description of Artificial Sequence: Synthetic coding sequence
  source 1..486: mol_type = other DNA
atgaatctagccatttctatcgcacttttgctgaccgtccttcaagtgtcgagagggcagaaagttaccagcttgaccgcttgtctcgttgatcaaagtctgcgcctggactgccgacatgagaatacaagctcaagcccgatccaatacgagttttcactgactcgcgaaacaaaaaagcatgtgctctttgggactgtgggcgtgcccgaacacacgtacaggtctcgaacaaatttcacctctaagtataacatgaaggttctttaccttagtgcatttacatcgaaggatgagggaacatacacctgcgctttgcaccactccggccacagcccacctatcagctcccagaacgtgacagttctgagagacaagctggtcaagtgtgagggcatttctctgctggcccagaatacgagctggctattgcttctgcttttgtctctgtccttgctgcaggctacagacttcatgtctttatag

SEQ ID NO: 137820 - DNA, 486 bp, synthetic construct
  misc_feature 1..486: note = Description of Artificial Sequence: Synthetic coding sequence
  source 1..486: mol_type = other DNA
atgaacctcgccatttcaattgccttgctactgactgttttacaagtgtcgagagggcagaaggtcacctcccttaccgcatgcctcgtggaccagtcactccggttagattgccgccatgagaacacatccagctcaccaattcagtatgaatttagcctcactcgagaaactaagaagcatgtcctgttcgggacagtcggcgtccccgaacacacctacagatcccgcaccaattttacctctaaatacaacatgaaagtgctgtatttgtccgccttcacaagtaaggacgagggcacctacacatgcgccctgcatcactctgggcattctccccccattagcagtcagaacgtcaccgtactcagggacaaactcgtgaagtgcgaaggcatcagcctcctggcccagaacaccagctggctccttctcttacttctgagcctctctctgcttcaggctacggatttcatgtctctttag

SEQ ID NO: 137821 - DNA, 480 bp, synthetic construct
  misc_feature 1..480: note = Description of Artificial Sequence: Synthetic coding sequence
  source 1..480: mol_type = other DNA
atgttcccttttgcgttgctttatgttctttcagtgtcgttccgcaaaatatttattctacagttagtgggactggtgctgacctatgattttactaattgcgattttgagaaaattaaagccgcctacctaagtacgatttccaaagacctgataacttatatgtccggcacaaagtccactgaatttaataacactgtcagttgctccaaccggcctcactgtttaacagaaatccagagtttaacgtttaaccctactgccggatgtgcgtctctggccaaggaaatgttcgcgatgaagaccaaagccgcactcgctatatggtgccctggatactccgagacgcaaatcaatgcaacacaggccatgaaaaagcgacgcaagaggaaagtgactaccaacaaatgcctcgagcaggtgagccagcttcagggcctgtggcgccggtttaatcggcccctactgaagcaacagtag

SEQ ID NO: 137822 - DNA, 192 bp, synthetic construct
  misc_feature 1..192: note = Description of Artificial Sequence: Synthetic coding sequence
  source 1..192: mol_type = other DNA
atgttcgccatgaagactaaagctgctttagcaatatggtgtcctggatacagcgagactcagatcaatgctacccaggccatgaagaaacgcaggaaacgcaaggttacaaccaacaagtgcctggagcaggtgagccagctgcaggggctctggaggcgtttcaacagaccgttgctcaaacagcaatag

SEQ ID NO: 137823 - DNA, 705 bp, synthetic construct
  misc_feature 1..705: note = Description of Artificial Sequence: Synthetic coding sequence
  source 1..705: mol_type = other DNA
atgtcctgtattaacctgcccaccgttttgccggggtcgccaagcaaaactagagggcagatccaggtgattcttggacccatgttttccggaaagtctaccgaattaatgaggcgcgttcgacgattccaaattgctcagtacaagtgcctagtcataaaatacgccaaagatacaagatactctagttccttctgcactcatgatcgtaacacaatggaggcgttaccggcttgtctcctgagagatgttgctcaggaggctctcggcgtggctgttattgggattgatgaggggcaattcttccccgatatcgtagaattctgcgaagctatggccaatgccggcaagactgtgatcgtggctgcgcttgacgggaccttccagcggaagccgttcggcgcaatcttgaacctggtccctctagcagagtcagtggtgaagttaaccgcagtgtgcatggagtgcttccgtgaggcagcctacacgaaacgtctgggaactgagaaggaagtggaggtcatcgggggtgccgacaagtatcattcggtttgcagactgtgctatttcaagaaggcatccggtcaaccagccggccccgacaataaggagaattgccccgtgcccggaaagcccggggaggctgtcgcagcaagaaagctattcgccccccagcaaattcttcagtgttctccagctaactag

SEQ ID NO: 137824 - DNA, 705 bp, synthetic construct
  misc_feature 1..705: note = Description of Artificial Sequence: Synthetic coding sequence
  source 1..705: mol_type = other DNA
atgtcgtgcattaacctgccaactgtgctgcctggctcgccctcaaaaacgagagggcagatacaggtgatcctcggtccgatgttttccggcaagtctacggagctgatgcgcagagtccgtcgcttccaaatcgctcaatacaagtgcctggtcatcaaatatgccaaagacacgagatattccagttccttttgtacccacgacagaaacactatggaagccctgccagcctgcctcttgcgggatgtggcgcaggaagccttaggtgttgccgtgattggaattgatgaggggcagttcttccctgacatagtggagttttgcgaagcaatggccaatgccggcaagaccgtgattgtcgcagctctggatgggacatttcagcgcaagccctttggggccattttaaacctcgtgcctctggcagagtccgttgtgaagctaacagccgtctgcatggagtgttttcgcgaggctgcttatacaaagagactaggcacagagaaggaagtcgaagtgattgggggggccgataagtatcatagcgtgtgtagactgtgttactttaagaaggctagcggacaacccgctggccctgacaataaggagaattgccccgtcccaggcaaaccaggggaggcggtggccgcacgtaaactgtttgccccgcagcagatcctccagtgcagtccagccaactag

SEQ ID NO: 137825 - DNA, 924 bp, synthetic construct
  misc_feature 1..924: note = Description of Artificial Sequence: Synthetic coding sequence
  source 1..924: mol_type = other DNA
atgagacccggactttttaagggccaagctcctggctcccggcgccgcccaactgcaggccttgccgtggttcgggcagatagtcacaagaaggaaccgcgagctagcgggtcagcccggcccgccatgctgttgtggccgctgcgtgggtgggctgcccgggctctgcgatgctttggccccggatctcgcggcagcccagcatctggccccggccctcgccgggtgcagcggcgtgcctggcctcctgacaaagagcaggagaaagaaaaaaaaagcgttatctgcgtggagggaaacatagcctctggtaaaaccacttgtctggagttcttctccaacgctactgacgttgaagtgctgacagagcccgtgagcaaatggcggaatgtgagggggcacaatccattgggtctgatgtatcacgatgcaagtagatggggactgactctccagacatatgtgcagcttaccatgctggacagacatactaggccccaggtgtcttccgtgcggcttatggagaggtccatccatagcgctagatacatctttgttgaaaatttgtaccgatccgggaagatgcctgaggtggactacgtggtactcagtgagtggttcgattggatactccgaaacatggacgtttccgttgatttaatagtttacctgcgcaccaacccagagacctgttatcaaaggctgaaaaagcggtgccgcgaagaagagaaggtgatccccctggaatacctagaggctattcatcatctccatgaagaatggttaatcaagggctccctgtttcccatggccgccccggtgctcgtgattgaagcagaccatcacatggagcgtatgctggagttgttcgagcagaaccgcgatcgtatcctcacacccgaaaaccgcaagcattgtccatag

SEQ ID NO: 137826 - DNA, 744 bp, synthetic construct
  misc_feature 1..744: note = Description of Artificial Sequence: Synthetic coding sequence
  source 1..744: mol_type = other DNA
atgttgctatggcctctccgcggctgggcggctcgagcactgaggtgctttggccctggttcccgaggcagtcctgccagtggacccgggcctcggcgagtgcagagacgggcctggccccctgacaaagaacaggagaaggaaaagaagtccgtcatttgcgtggagggcaatattgcctccggaaaaacgacttgtctcgaattcttctcaaatgccaccgatgttgagggactgatgtatcatgatgctagtagatggggattgaccctacagacctatgtgcagttaacaatgttagacaggcacactcgaccccaggtcagcagtgtgcgcttgatggaacgctcgattcactcggccaggtacatctttgtagagaacctctaccgcagtgggaagatgccagaagttgattacgtggtcctcagcgagtggttcgactggattctgcgcaacatggacgttagtgtggatctcatcgtgtatctaaggacgaaccccgagacctgttaccagcgcctgaagaagcgctgtcgcgaagaggaaaaggttataccgctggagtacctggaagccattcatcatctgcacgaagagtggctcattaaaggatctctgtttccaatggctgcccctgtcctggtcatcgaagccgatcaccacatggagagaatgctcgagctttttgaacagaacagggatcggatactgacgcccgagaacaggaaacactgtccatag

SEQ ID NO: 137827 - DNA, 798 bp, synthetic construct
  misc_feature 1..798: note = Description of Artificial Sequence: Synthetic coding sequence
  source 1..798: mol_type = other DNA
atgttactttggcccttacgtggttgggctgcgcgggctttgagatgcttcggacccggcagtcgcggcagccctgcatcagggccgggccccaggagggtccagagaagggcatggccccctgacaaggagcaggaaaaggaaaaaaaaagcgtgatttgcgtcgagggcaatatcgccagtggcaaaaccacgtgcctggaatttttttccaatgcgacagatgtggaggtgttgacagaacctgtgtctaagtggaggaacgtccgggggcacaatccccttggcctcatgtaccacgacgcatcacggtggggcctcacactgcaaacttacgtgcagctgaccatgctggacaggcacacacgaccacaggtgtctagcgttcggttgatggagcgcagtattcacagcgcccgctatatctttgtggagaatctgtacagaagtggtaaaatgcccgaagtcgattacgttgtcctaagcgagtggttcgactggatattgaggaacatggatgtctctgtcgacttgatcgtctatttgcggaccaatccagagacatgttaccagcgcttaaagaaacgatgcagggaagaggagaaggtgattccactggaatatttagaggctattcatcaccttcacgaggaatggctaattaaaggaagcttgtttcccatggccgcccccgtcttggtcattgaggccgatcaccacatggagagaatgctggagcttttcgaacagaacagggatcgtattctgacgccagagaacagaaagcactgtccctag

SEQ ID NO: 137828 - DNA, 507 bp, synthetic construct
  misc_feature 1..507: note = Description of Artificial Sequence: Synthetic coding sequence
  source 1..507: mol_type = other DNA
atgtatcacgacgcaagtcgttggggccttaccttgcagacctatgtgcagctcacaatgctggacagacacacccgcccacaagtcagcagcgtgcggttaatggagaggtccatccattctgctcgatatatcttcgtcgaaaatctgtatcgcagtggtaagatgccggaagtggactacgttgtattgtctgagtggttcgactggattctgcgaaacatggatgttagcgttgatttgatagtgtacctgcgtacaaaccctgagacctgctaccagcggctgaagaagcggtgccgcgaggaagaaaaagtaatccctttggagtacttagaggcaatccaccatctccatgaggagtggcttattaagggttccctctttcccatggcggccccggttctggttatcgaagccgaccatcatatggaacgtatgctagagctatttgaacaaaatcgagataggatccttactcccgaaaaccggaaacattgtccttag

SEQ ID NO: 137829 - DNA, 705 bp, synthetic construct
  misc_feature 1..705: note = Description of Artificial Sequence: Synthetic coding sequence
  source 1..705: mol_type = other DNA
atgggcgctttttgccagcggccatccagcgataaggagcaggagaaggaaaagaagagcgtgatttgtgttgagggcaacatagcctcgggtaagacgacgtgtctagagttcttcagcaacgctaccgatgttgaggttctcactgaaccagtgagtaaatggcggaacgttcgggggcacaaccccctcgggttaatgtaccacgacgcatcaaggtggggattgacgttacagacttacgtccaattaacaatgttagaccgccatactcggccccaggtgagttccgtcaggctgatggagagatccattcattcggcacgttacatattcgtggagaacctgtataggtccggaaagatgccagaagttgactatgtagttttgtccgaatggtttgactggattctccgaaatatggatgttagtgtcgacctgatagtctacctacggacaaatccggaaacgtgctatcagcgcctgaaaaagcgatgcagagaagaggagaaggtgatcccattagaatacctcgaggcaattcatcacctccatgaggagtggctgattaaagggagcttgtttcccatggctgctccagtgcttgtcatcgaagcggatcatcacatggagaggatgttggagctctttgaacaaaatcgggacaggattctgactcctgaaaaccgtaagcattgtccctag

SEQ ID NO: 137830 - DNA, 507 bp, synthetic construct
  misc_feature 1..507: note = Description of Artificial Sequence: Synthetic coding sequence
  source 1..507: mol_type = other DNA
atgtaccacgacgcttcccggtgggggcttaccctgcagacatatgtccagttaactatgcttgacagacacactcgaccgcaggtctcttccgtgagacttatggagaggtcaattcattccgccaggtacattttcgtggagaacctgtatcgcagcggcaagatgccagaggttgattacgtcgtactttcagagtggttcgattggatcttacgaaacatggatgtgtctgttgacctaatcgtttacctaagaaccaatccggaaacttgctatcaaagactgaagaagagatgtagagaagaagaaaaagtcatccccctcgaatacctcgaagcaattcatcatctccatgaagaatggctcatcaagggaagcttattccccatggctgcccccgttctggtaattgaagctgaccatcacatggaacgcatgctggaactgttcgaacaaaaccgtgacaggattttgacacccgagaaccggaagcactgtccatag

SEQ ID NO: 137831 - DNA, 651 bp, synthetic construct
  misc_feature 1..651: note = Description of Artificial Sequence: Synthetic coding sequence
  source 1..651: mol_type = other DNA
atgacatctatttgtgtagaaggcaatattgcttctggcaagaccacttgcctcgaatttttttcaaatgccactgatgtggaagttttaaccgaacctgtgtccaaatggagaaatgttcgggggcacaacccactgggcctcatgtatcacgacgcctcaagatgggggctgactcttcagacttacgtccagctaaccatgttggatagacatactaggcctcaggtctcctctgttcgtctgatggaaagatccatacactccgctcgatacatctttgtggagaatctttacagatctgggaagatgcctgaggttgattatgtcgtgctgagcgagtggttcgattggattcttcggaatatggacgtctccgtcgacctgattgtctacttacgcaccaaccctgaaacctgctatcagcgcctcaagaaacgctgtcgcgaagaggagaaggtcattcctctggagtacctagaggccatccaccatttacacgaggaatggctgatcaaaggctcattgtttccaatggccgctccggtgcttgtcatcgaagcagatcatcatatggagagaatgctggaactgttcgaacagaaccgagacaggatcctgacaccggaaaatcgaaaacactgcccctag

SEQ ID NO: 137832 - DNA, 723 bp, synthetic construct
  misc_feature 1..723: note = Description of Artificial Sequence: Synthetic coding sequence
  source 1..723: mol_type = other DNA
atgctgctgtggcccctccgaggttgggccgccagagcacttcggtgttttggtcctggatcacgaggctctccggcctccggccccgggcccagaagagtgcagaggcgcgcctggcccccagataaggaacaggagaaggaaaaaaagtccgtggttctcaccgaaccagtctcaaagtggaggaatgtgcgggggcacaatccacttggactgatgtaccacgacgcttcacgctggggtctgacgctccagacttatgttcagttgacaatgctagacagacatacccgccctcaggtaagcagcgtgagacttatggagcgtagtatccatagtgctaggtacatatttgtcgagaacctttaccgcagcggcaaaatgccagaggtggactatgtggtgctctccgaatggttcgattggatactgcggaacatggacgtttctgttgatttaatagtttatttgagaacaaatccagagacatgctatcagcggctgaagaagcggtgtagagaagaggaaaaagttatacccctcgagtacctggaagccatccatcaccttcatgaggaatggctgataaaaggtagcctgttccccatggcagcgcctgtgctcgttatcgaggcagatcatcatatggagaggatgttggaactcttcgagcagaaccgagatcgcatcctaacccctgagaataggaaacattgtccgtag

SEQ ID NO: 137833 - DNA, 840 bp, synthetic construct
  misc_feature 1..840: note = Description of Artificial Sequence: Synthetic coding sequence
  source 1..840: mol_type = other DNA
atgcccgttgcgggatcagaactccctcgacgccccctacctcccgctgctcaggagcgcgacgccgagccgagaccaccccacggcgagctgcagtatctgggacaaatacagcacatccttaggtgcggcgtgcgaaaagacgatcggacagggacgggtaccctgagcgtattcggtatgcaggcccgttattccctccgggacgaatttcctctcttgaccacaaagagagtattttggaaaggggtgctcgaggagctgttatggttcatcaagggttccactaatgcaaaagaactgtcttctaagggcgtgaaaatatgggacgccaacgggtcaagggattttttagacagccttggcttcagcacgagagaagaaggagacctggggcccgtgtatggattccagtggcggcattttggagctgagtacagggatatggaatctgatcttcctctcatggccctgccaccctgccacgccctgtgtcagttttacgttgttaactccgaactgagctgccagctgtatcagagaagcggcgatatggggttaggcgtgccattcaacatcgcaagctacgcccttttgacatatatgatcgcgcacatcacaggcctgaagcccggggactttatccataccttgggcgatgcgcatatctacctgaatcacatagagccactcaagatccagctccagcgcgagccgcggccttttccaaagttgcgaatcctgcgaaaggttgaaaaaattgatgactttaaggcagaagatttccagatagagggctacaacccgcatcccacaatcaaaatggagatggcagtctag

SEQ ID NO: 137834 - DNA, 693 bp, synthetic construct
  misc_feature 1..693: note = Description of Artificial Sequence: Synthetic coding sequence
  source 1..693: mol_type = other DNA
atgccagtggccggctcggaactgccaaggcggccgctgccccctgctgctcaggagcgggatgccgaaccaaggcctccgcacggggagctccaataccttggacagattcagcatattctacgctgtggcgtgcgaaaggatgatcgcaccggcacgggtaccctctctgtgtttggaatgcaggcaagatactccctccgcgattacagtggacaaggcgtagaccagctgcagagggtgatcgataccatcaagacaaaccccgatgatcgcaggattatcatgtgcgcatggaacccaagagacctaccactaatggcacttccaccttgtcacgccctctgccagttttacgtggtgaacagtgaactcagttgccagctttatcagcgctcaggagatatgggtttgggagtgccattcaatatagcaagttatgcacttctcacctatatgatcgcccacataactggcctcaagcctggagacttcatacacacgttgggagatgcccacatatatctgaaccacatagagccactgaagatccagctgcagcgggagccacggccctttcctaagctcaggattctacggaaagtggaaaagatcgacgattttaaagccgaagatttccagattgaagggtacaatccccatccaaccattaagatggagatggccgtgtag

SEQ ID NO: 137835 - DNA, 942 bp, synthetic construct
  misc_feature 1..942: note = Description of Artificial Sequence: Synthetic coding sequence
  source 1..942: mol_type = other DNA
atgcctgtggctggatccgaacttcccagacggccacttccccccgctgctcaggaacgcgacgctgagccgcgcccaccgcatggagaactccagtaccttggtcaaatccagcatattctaagatgcggagtgagaaaggatgaccgcaccggcacaggtacgctgtcagtgttcgggatgcaggctagatattccctgagggatgagtttcctctcctcactaccaaaagagtattctggaagggagtgctggaggagctgctatggtttatcaagggatctaccaatgccaaagaacttagttcaaagggggtgaagatctgggacgccaacgggtccagagacttcttagactccttgggcttctctactcgggaggaaggtgatctcggtcccgtttacggtttccagtggcggcacttcggcgctgaataccgggacatggagtcggactactccggccagggtgtagaccagctgcaacgcgtaatcgacaccatcaagacgaaccccgacgacaggcgcataattatgtgcgcgtggaatcccagggatctgccactgatggctctgcctccctgtcacgctttatgccaattttacgtggtgaattctgagctgagctgccagctttaccaacgttctggtgatatggggctgggagttccatttaacatcgccagttatgcactgctgacatatatgatagcccatatcactggactcaagcccggagacttcatacatacactcggcgatgcgcatatttatttaaaccatattgagcccctgaagatccagctgcaacgggaaccacgcccattcccaaaactgcggatcctgcggaaggtggaaaaaatcgatgatttcaaagctgaagactttcaaatagaaggatacaatcctcatcccacaatcaaaatggagatggccgtgtag

SEQ ID NO: 137836 - DNA, 678 bp, synthetic construct
  misc_feature 1..678: note = Description of Artificial Sequence: Synthetic coding sequence
  source 1..678: mol_type = other DNA
atgagtcgacctagaaagagactcgctggtacttctggaagcgacaagggactgtcagggaagcgcacgaaaaccgagaactccggggaggctctagctaaggtggaagatagtaacccgcagaagacatccgctacaaaaaattgtctgaaaaacctgtcgagtcactggttaatgaagagcgaaccagagtctcggctggagaagggggtagacgtgaagtttagcatcgaggacttaaaggcacaaccaaagcagactacttgctgggacggtgtgcggaactaccaggcacgcaattttctgagggcaatgaagctgggagaggaagctttcttctatcactcaaattgcaaggagcccgggatcgcaggcctgatgaagattgtgaaggaagcgtacccagaccatacacaatttgaaaaaaacaaccctcattacgatccctcatctaaagaggacaatccaaagtggagcatggtcgatgtccagtttgtacgtatgatgaagcggtttataccgctggcagagctcaaatcctatcaccaggcacacaaggcaacgggcggacctctgaagaatatggtcctgttcacaaggcagcgccttagtatccaaccactgactcaggaggagtttgacttcgtcctttcactggaagagaaggagcctagttag

SEQ ID NO: 137837 - DNA, 501 bp, synthetic construct
  misc_feature 1..501: note = Description of Artificial Sequence: Synthetic coding sequence
  source 1..501: mol_type = other DNA
atgtcacggccgcgcaagagactcgccgggacgtccggatctgacaaaggactttccgggaagcgcaccaagacagaaaattctggggaagccctggccaaagtggaggattctaatcctcagaagaccagtgcaacaaagaattgtctgaaaaacttgtctagccattggctcatgaagagcgaacctgagagtcgcctcgaaaagggcgttgacgtaaagtttagtatcgaggatctgaaagctcagcccaaacagactacttgctgggacggggtgagaaactatcaggcgaggaactttttacgagccatgaagttgggcgaggaggcctttttttaccattccaattgcaaagaacccggtattgccgggcttatgaagatagtgaaagaagcatatcctgaccatacacagttcgaaaagaacaatccacattacgacccatcttcgaaggaggataatccgaaatggagcatgaagagcctcatactcttttag

SEQ ID NO: 137838 - DNA, 678 bp, synthetic construct
  misc_feature 1..678: note = Description of Artificial Sequence: Synthetic coding sequence
  source 1..678: mol_type = other DNA
atgagccggcctagaaagagactggcgggcactagcggctccgacaaaggtctgtcagggaaacgcacaaagacggaaaattctggtgaggcattggccaaggtcgaggacagcaatccgcagaagacatccgccacaaaaaactgtctgaagaatttgagttctcattggcttatgaagtctgaacctgagtctagactggagaagggcgttgacgttaaatttagcatcgaagacctgaaggcccagcccaagcagacaacttgttgggacggtgtccgcaactatcaggcacgcaactttctgagggcaatgaaactcggggaagaggctttcttctatcacagcaactgcaaagagcctggaatcgcaggcctcatgaagattgtcaaggaggcttatcctgaccacacccaattcgaaaaaaataatccgcattacgatccttcaagcaaggaggacaatccgaagtggtctatggtcgacgtgcagtttgttagaatgatgaaaaggtttatccccctggccgagcttaaatcttatcatcaagcacacaaggccaccggcggccccctcaaaaacatggttctgttcacacgacagagactgtctattcagcccctgacacaggaggaattcgattttgtgctgtcccttgaagagaaagaaccttcttag

SEQ ID NO: 137839 - DNA, 678 bp, synthetic construct
  misc_feature 1..678: note = Description of Artificial Sequence: Synthetic coding sequence
  source 1..678: mol_type = other DNA
atgagcagaccacgaaaaagactcgcaggtacttctgggtccgacaaaggattgtcaggaaagcggactaagacagagaactctggagaagctttagccaaggtggaggactcaaacccccagaaaacatccgccacgaaaaattgtctgaaaaacctgtcctctcattggctgatgaagagcgaaccagaatcccggctcgagaaaggagttgatgtgaagtttagcatcgaagacctcaaggcgcagccaaaacagaccacgtgttgggatggggtccgcaattatcaggcccggaacttcctgagagcaatgaagctcggagaggaggcatttttttatcactcaaattgtaaggagccagggattgccggtttaatgaagatcgtgaaagaggcatatcctgaccacacccagttcgaaaaaaacaatccacattacgatccatctagtaaggaagataatcccaaatggtctatggtggacgttcaatttgtccgcatgatgaagcgatttattccattagcagagctgaaaagttaccatcaggcccataaggctacgggcgggcctttgaagaacatggttctgtttaccaggcagaggctcagcatccagccactgacccaggaggaatttgatttcgtactatcacttgaggagaaggaaccttcatag

SEQ ID NO: 137840 - DNA, 1926 bp, synthetic construct
  misc_feature 1..1926: note = Description of Artificial Sequence: Synthetic coding sequence
  source 1..1926: mol_type = other DNA
atggccctaagcctggaagagttcgtgcactctcttgatttgcgtactctgccacgcgtgttagagattcaagcaggcatctacctcgaaggatccatttatgaaatgttcgggaacgaatgctgcttttcaaccggggaagtcattaaaatcactggactgaaagttaagaaaattattgccgaaatctgtgaacagatagaaggttgtgaatctttgcagccgtttgaactgccaatgaactttcctggactgtttaaaatcgtggcggataaaaccccttacctgactatggaagaaattacgaggaccattcacattggcccatccaggctcgggcatccgtgcttttaccatcagaaagatatcaagcttgagaaccttatcattaaacagggagagcagatcatgcttaacagcgtggaggaaattgatggggagatcatggtatcttgtgcggtggccaggaaccaccagacacacagttttaacctgccactatcccaggaaggcgaattctacgagtgcgaagatgaaaggatttatacactcaaggagattgtagagtggaaaattcctaagaacagaacaagaaccgtgaaccttacagatttcagtaataagtgggattctactaacccgttcccaaaggacttttacggcacactgatcctaaagcctgtatatgagattcagggcgtcatgaaattcaggaaagacattatcagaatcttaccatccctggatgtcgaggttaaggacattacagacagctacgatgctaactggttcctccagctgctgtccacggaagacctcttcgagatgacctcaaaggaatttcctatcgtgaccgaggtgatcgaggccccagaaggaaaccatctacctcaatctatcctccaacccggtaagaccatcgttattcacaagaagtatcaagcttctagaattctggccagcgaaattagaagcaactttcccaagagacacttcttaattccaacatcctataaaggcaagtttaagcgcaggccccgggaattccctaccgcttatgaccttgaaatcgctaaatccgagaaagagccacttcacgtagtggcaaccaaagcctttcacagccctcacgataaactatcaagtgtttccgtgggagatcagttcctggtccaccagtcagagactactgaggtcctttgcgagggcatcaaaaaagtggtcaacgtactggcttgcgagaaaatactcaaaaagtcatatgaggcagcactcctgcccctgtacatggaaggtgggttcgttgaggtgatccatgacaagaagcagtatcctatttcagaactgtgcaagcaatttcgcctacctttcaacgtgaaagtctcggtacgtgatctgagtatcgaggaggacgtgctggccgctactcctgggctgcagctggaggaagatatcaccgactcctacctgctgatctcagactttgccaacccaactgagtgttgggagattccagtaggcagacttaacatgacggttcagctagtatccaatttcagtagagatgcagaaccatttttagtcaggacactcgtcgaggagatcacagaagagcagtactatatgatgagaaggtatgagagcagcgcctcacacccgccccccagaccaccaaaacatccctccgttgaagaaaccaagctgacgcttctgactttggcagaggagagaacggtcgacctacctaagtcccccaaaagacatcacgtggacatcaccaaaaagctgcatcccaatcaggctggactcgatagcaaagtgcttataggctcccagaacgatctggtcgatgaggaaaaagagcggtccaacagaggagccaccgctatcgctgagacattcaagaatgaaaagcatcagaagtag

SEQ ID NO: 137841 - DNA, 1689 bp, synthetic construct
  misc_feature 1..1689: note = Description of Artificial Sequence: Synthetic coding sequence
  source 1..1689: mol_type = other DNA
atgaacttcccaggtctgttcaaaatcgtggctgataagacaccttacctcacaatggaagaaataactaggacaattcatatcggaccatctcgtctgggccacccctgtttctaccatcagaaagacatcaagctggagaatttgatcatcaaacaaggcgagcagatcatgcttaactctgtcgaggaaatagacggtgaaatcatggtttcctgtgctgtcgcccggaaccatcagacgcattccttcaatctgcccctgagtcaggagggggaattttatgagtgtgaggatgaaaggatatatactctgaaagagatagttgaatggaagatcccaaagaaccggacgagaacagtaaacctgaccgacttcagtaacaagtgggacagcaccaacccatttcctaaagatttttatggaacactgatacttaaacctgtttatgagatacagggggtcatgaagtttaggaaagacatcattcgcattttacctagtttggacgttgaggtcaaagacataactgattcctatgatgcaaactggttcctccagcttctctcaaccgaggatctgttcgagatgacatctaaagaatttcctatagtgaccgaggtgattgaagcgccagaaggaaaccatctgcctcagtccattctccagcccggaaaaacaatcgtgatccataagaaatatcaggctagcagaattctcgcttccgagatccgcagcaactttccgaaacgacactttctaatcccaacttcttacaaaggtaagttcaagcgacggccacgagagtttccaactgcgtacgatcttgaaatcgctaaaagtgaaaaagaacctctgcatgtcgtcgctaccaaagcctttcactctccccatgacaagctctcaagtgtgtccgtcggggaccaatttctggtccatcagtcagaaaccacggaggtgctgtgcgaaggtattaagaaagtcgttaacgtgttagcgtgtgagaagattcttaaaaagtcttatgaagcggctctgctccctttgtacatggaaggtggattcgtcgaggtgattcacgataaaaagcagtaccccatcagtgagctgtgtaaacagtttcgcctcccatttaatgtcaaggtgtccgtgagagacctatcgattgaagaggacgtcctcgccgctacccctggcctacaactcgaggaagacataaccgattcgtatcttcttatttccgattttgccaacccgaccgagtgctgggagatcccggtgggaagactgaacatgaccgtgcagctggtaagcaatttcagtcgagatgcagagccttttctagtgcgcacgttggttgaggagatcacggaggagcagtattacatgatgaggcgatacgaaagctccgccagccaccctccacctagacccccgaagcatccaagcgtcgaggagaccaagcttacattacttactctggccgaagagcggacagtcgacttgccaaagagcccaaagcgacaccacgtggacatcaccaaaaaattgcatcctaaccaggccggcctggactcgaaagtccttataggctctcagaacgacctcgttgatgaggagaaagaaagaagtaaccggggagcaactgccatcgcggaaaccttcaagaatgaaaagcatcagaagtag

SEQ ID NO: 137842 - DNA, 372 bp, synthetic construct
  misc_feature 1..372: note = Description of Artificial Sequence: Synthetic coding sequence
  source 1..372: mol_type = other DNA
atgaactttcctgtgcgaaaagatattatacgcatcctgccctctttagatgtggaagttaaggatatcactgattcgtatgacgctaactggtttctgcagctgttatccacagaagatctcttcgaaatgacaagcaaggagttccctattgtcacagaagtgattgaagccccggagggcaaccacctgcctcagtccattctccagcccggaaaaaccatagttattcacaaaaaatatcaggcctcccgaattctggcttccgaaattcggagtaatttccccaagagacactttctgataccaacctcgtacaaagggaaatttaaacggagacctagagagttcccaactgcttatgatttgtag

SEQ ID NO: 137843 - DNA, 1821 bp, synthetic construct
  misc_feature 1..1821: note = Description of Artificial Sequence: Synthetic coding sequence
  source 1..1821: mol_type = other DNA
atgttcggcaatgagtgctgtttcagtactggcgaggtaatcaaaataactgggctcaaggtgaaaaagattatcgcagagatttgtgaacagatcgaggggtgcgagtcactacagcccttcgagctccctatgaactttcctggcttatttaagattgtcgccgataagaccccctatctgacgatggaagaaattacacggacaatccatattggcccctcacggttggggcacccctgtttttatcatcagaaggacatcaaattggagaacttgattattaagcagggtgaacaaatcatgttgaatagtgtcgaggagatagatggtgagatcatggttagttgcgccgttgcacggaaccatcagacccactcttttaatctccccttatcccaggagggcgaattctatgaatgtgaagacgaacggatctatactctgaaagagatcgtcgagtggaaaatccccaaaaatcgcacacggactgtgaatttgaccgacttttctaataagtgggactccaccaatccatttccaaaggacttttacggaacactgatccttaaaccggtgtacgagatccaaggtgtgatgaagttccggaaagatatcattcggatcttgcccagtctggatgtggaggtgaaggatattaccgactcatacgatgctaattggtttttgcaactcctgtccacggaggacctgttcgagatgacctctaaagagtttcctatagttacagaagtaatagaggctcccgaaggcaaccacctgccccagtcgatcttgcagcctggaaaaactattgtaatccacaagaaatatcaggcctcacggattctggctagtgagatccgatccaatttcccaaaacggcactttctgatccctacatcttataaaggaaaattcaaacgccgccccagagaattccctaccgcctacgaccttgaaatagcaaagtccgagaaagaacctcttcacgtagttgccaccaaggcttttcacagcccacacgacaaattgagttccgtgtctgtgggcgaccagttcttagttcaccaatcagagactacagaagttctctgtgaggggataaaaaaggtcgtgaacgtgttggcctgtgagaaaatcctgaaaaagagctatgaggcagctctgctgcctctctatatggaggggggatttgtcgaagttattcacgacaaaaagcaataccctatatccgaactgtgtaaacagttccggctaccttttaacgttaaagtttcggtccgagacttgagcattgaggaggatgtgctggctgcgacccccggactccagctggaagaagatattacggattcctacctccttatctcagatttcgcgaatccgactgagtgctgggagatccccgtggggcgcctgaatatgactgtgcagctggtatctaacttttcgcgggatgcggagcctttcctggtgaggaccctggttgaagagatcacagaggagcaatattacatgatgagacgatatgagtcttcagcttcccatcctcctcctcgccctccaaaacacccttccgtggaagaaacgaagctcaccctcctcaccctcgccgaggaacgtacagtggacctgcccaagagccctaaacggcatcatgttgacattacaaaaaaacttcatccaaaccaggcgggcctggattccaaagtcttaattgggagccaaaatgacctggtcgatgaggaaaaagagcgaagcaacaggggagccactgcgattgctgaaacatttaagaatgagaagcatcagaagtag

SEQ ID NO: 137844 - DNA, 2043 bp, synthetic construct
  misc_feature 1..2043: note = Description of Artificial Sequence: Synthetic coding sequence
  source 1..2043: mol_type = other DNA
atggccctatctctggaagaatttgttcactcactcgacctccgaaccctcccacgcgtgctggaaattcaggcagggatctacctcgagggatccatctacgaaatgttcggaaacgaatgctgctttagtacgggcgaagttatcaaaatcacggggctcaaggtgaaaaagattattgccgaaatctgcgaacaaatagaggggtgcgaatcactacagccctttgagctgccgatgaacttcccaggcctgttcaaaatcgtggccgacaagaccccttatttgaccatggaagaaattacccgcaccattcacataggtccatctagattgggtcatccctgcttttaccaccagaaggacataaaactggaaaacttaatcattaaacagggtgaacagattatgttgaatagtgttgaggagattgatggcgaaatcatggtgtcctgcgcggtggctaggaaccaccagacccactcctttaatctccctctgtctcaggagggagaattctacgaatgtgaagacgagaggatctacaccctcaaagagattgtcgaatggaaaatccccaagaacaggaccaggacagtcaatttaaccgacttttcaaacaaatgggactccaccaaccccttccccaaggatttctacggcacactgatcttgaagccagtctacgagatccaaggagtgatgaaattccgaaaagacataatacgcatcctaccatccctggacgtcgaagtcaaggatattacagacagttacgatgccaattggtttctgcagctgctctctactgaagacctgtttgaaatgaccagcaaggagtttcccatcgtgacggaggtgattgaagcacctgagggtaatcacctgccacagtctatcttacagcccggaaagacgatcgtaatccataagaagtatcaggcaagccggatcctggcctctgagatccgctctaacttccccaagcgccattttctcattcctacatcatataagggaaaattcaagcgacgcccaagagaatttcccactgcttacgatctcgaaatcgcgaagagcgagaaggaaccgctccatgtagtggctaccaaagctttccatagcccacacgacaaactgagctctgtcagcgtaggcgaccagttccttgtccatcagagtgagactactgaagtcctctgcgaggggattaagaaggtggtgaatgtgctagcctgtgaaaaaatattaaagaagtcgtatgaagccgctctcctccctctgtacatggaggggggcttcgtggaagtgattcacgataagaaacagtatcccatcagcgagctgtgtaaacaatttcgtctacccttcaacgtgaaagtgtcggtgcgcgaccttagcattgaagaggacgtattagccgcgacccctgggttacaactggaagaagacattaccgacagttatctgctgatctccgacttcgcaaatccgaccgaatgttgggaaatcccggtaggcagactgaacatgaccgtacagttggtgtcgaatttcagcagggatgcagagccgttccttgttagaacgctagttgaggaaattaccgaagagcagtattatatgatgcgacggtatgagagcagcgctagtcatccccctccgaggcctcccaagcatccatcagtcgaggaaactaagctgacacttctcactctcgcagaagagcgcactgtggatctgcctaaaagccccaaagctggcgtccagtggagggatttgggctcactccaacccctgccccctgggtttaaacagtttagcgcttctgcttcacacgtggcggggatcaccgggacacctcatcatgtgcagcggcatcatgtggacatcacaaaaaaactgcaccccaaccaagctggtctggactcaaaagttctgatagggagccagaacgacttggtggacgaagagaaggaacgcagcaatagaggcgctaccgcaatcgcggaaaccttcaaaaatgagaagcatcagaagtag

SEQ ID NO: 137845 - DNA, 1581 bp, synthetic construct
  misc_feature 1..1581: note = Description of Artificial Sequence: Synthetic coding sequence
  source 1..1581: mol_type = other DNA
atggacgttcgattttacccgccacctgctcagccagccgctgcacctgacgccccgtgtctcggccccagcccttgtctggacccttactactgcaacaagttcgacggcgaaaacatgtatatgtcgatgactgagccctcccaggactatgtcccagcaagtcagagctaccccggtccttctttggaatcagaggacttcaatatccctcctataacgcctccctctctccccgatcatagtttggtgcacctgaacgaagtggagtctgggtaccatagtctgtgtcatccaatgaaccataacgggctgttgcccttccatcctcagaatatggatctacccgaaataactgtgtcaaacatgctcggtcaggacgggaccctgctctccaacagtatcagcgtgatgcctgatattaggaacccagaagggacacagtatagtagccacccacagatggccgctatgcgcccccggggccagcctgcagatatccgccagcagcccggaatgatgccgcacggccagctgactactatcaatcaatcgcagctgtccgcacagttaggcctgaacatggggggctcaaacgtgcctcacaattcaccatctcctccaggttctaagtccgccacccccagcccttcctctagtgtccatgaagacgaaggtgacgacacgagcaaaattaacgggggggagaagcgaccagccagtgatatgggcaaaaaacctaagacccctaagaaaaaaaaaaaaaaggaccctaacgagcctcagaagccagtgtccgcctatgcactcttctttcgagacactcaagcggctattaagggacagaaccctaatgcaaccttcggagaagtttccaaaatcgtggccagcatgtgggacggactcggtgaagagcaaaaacaggtctataagaagaaaacggaagctgccaagaaggagtacttgaagcaacttgccgcctatcgcgcctccttggtctcaaagagctattcagagccagtggacgtcaagacatcccagccacctcagctcatcaattccaaaccctctgtgtttcacggaccatctcaagcccattcagcactgtacctatccagtcactatcaccaacagcctggcatgaatcctcacctgaccgccatgcacccaagcttacctaggaacatcgcgcccaaacctaataaccagatgccagtcacagtctccatcgccaacatggccgtgtctccccctccaccgcttcaaatcagccccccactacaccagcacctgaatatgcaacagcaccagcccctcaccatgcaacaaccattgggcaatcagttaccgatgcaggtgcaatccgcactgcactccccaacgatgcaacaaggatttacattgcagccagactatcagacaatcatcaatccaactagtactgcagcccaggtcgtgactcaggcaatggaatacgtcaggtccggctgcaggaacccaccgcctcagcctgtggattggaacaacgactattgttccagtgggggcatgcagcgcgacaaagcactgtacttaacttag

SEQ ID NO: 137846 - DNA, 831 bp, synthetic construct
  misc_feature 1..831: note = Description of Artificial Sequence: Synthetic coding sequence
  source 1..831: mol_type = other DNA
atgggaaagaaacctaaaacccctaaaaaaaagaaaaagaaagatccaaacgagccccaaaagccagtgtccgcttacgctctgttctttagagacacccaggcagctatcaaaggccagaatccgaatgctacctttggtgaagtatcaaagattgtggcaagcatgtgggatggtttgggcgaggagcagaaacaggtctacaagaagaagaccgaagccgccaaaaaggagtatctgaagcaactcgccgcttaccgggcgtcactggtatcaaagagctacagcgaacctgtcgatgttaagacctcacagccgccccagctcataaactcaaagccttcggttttccatggtccatcacaggcccactaccaccaacaacccgggatgaacccccatctgacagccatgcacccgtccctccccagaaatatcgccccaaagcccaataaccagatgcccgtgacagtatcaatagccaatatggccgtgtcccctccaccaccactgcaaattagtccaccactgcaccagcatcttaacatgcaacagcatcagccattaacaatgcagcagcccttgggcaatcagcttccaatgcaagtgcagtccgccttgcattcacccacaatgcagcagggtttcactttgcagcccgactaccagacaattattaacccaacgtccacagctgcccaagtggttacccaagcgatggagtatgtgcggtcagggtgtcggaaccccccaccgcagcccgttgactggaataatgattattgctccagcggcggcatgcagcgggataaggccctgtatctgacatag

SEQ ID NO: 137847 - DNA, 747 bp, synthetic construct
  misc_feature 1..747: note = Description of Artificial Sequence: Synthetic coding sequence
  source 1..747: mol_type = other DNA
atgcctgaatttttggaagatccaagtgtgctcacaaaggataaactcaaatccgagctagttgctaataatgtgacactgcccgctggggaacagagaaaggacgtctacgtgcagctctatttgcagcatctcactgccaggaatcgccctccactgccggccggtaccaatagcaagggcccccctgacttctctagtgacgaggaaagggaacctacaccagtccttggcagcggagccgctgccgcgggacgcagcagggccgcagtaggacgcaaagcaacaaaaaaaactgacaagccaaggcaggaggacaaggacgacttggacgtcaccgagctcactaacgaggatttacttgatcagttggtgaaatacggcgtcaatcccggtccaatcgttgggactactaggaagctttatgaaaaaaaattacttaaactccgcgaacaaggtactgagagccgatcaagcacacctttgccaaccatctcttcctccgccgagaacaccaggcaaaacggtagcaacgacagcgataggtattctgacaatgaagaagactccaaaattgaactgaagttagagaaaagagagcctcttaaaggacgggcaaaaacgcctgttaccttaaaacaacgtagggtggagcacaaccaggtctctctggtactgctccctccatgcacaggcataaataacttgctgacgactttgatacatgtattggcctttaacgggtag

SEQ ID NO: 137848 - DNA, 2085 bp, synthetic construct
  misc_feature 1..2085: note = Description of Artificial Sequence: Synthetic coding sequence
  source 1..2085: mol_type = other DNA
atgcctgagttcttagaggatccaagcgtcctgaccaaagacaaacttaaaagcgaactcgtggctaacaacgtcaccctccctgcaggcgaacaaaggaaagatgtgtatgtgcaactatacttgcaacacctaacagccaggaatcgccctcccctgccagctggaactaacagcaagggccctcctgacttcagctccgacgaagagcgtgaacctacaccagtactgggcagcggtgcagcagccgctgggcgctctcgcgccgcagtgggcagaaaggccaccaaaaaaaccgacaaaccccgccaggaggataaggatgacctggacgtcacagaactgaccaatgaagacctgctcgaccagctggtcaaatatggcgtgaatccaggtcctatcgtgggcaccacccggaaactgtacgaaaagaaactccttaagctccgagagcagggcaccgaatccagatcttctactccactcccaaccatctctagcagcgctgaaaacacgagacagaatggatctaatgatagcgaccgctactctgacaatgaagagggcaaaaagaaagagcataaaaaggtgaagtctactcgagacatcgtgcccttctccgagctcgggacaacccccagtggagggggtttttttcaggggatcagcttccccgaaatctccacacggccccctctcggaagcacggagctacaggccgccaagaaggtccacacatccaagggcgacttaccgcgcgaacccctggtggcaactaacttgcccggtagagggcaacttcagaagctggcctcagagcgaaacctctttatttcgtgtaagtcttcacacgataggtgcctggagaagagctcctctagtagctcccagcccgagcactctgccatgctggtttcgacagctgcctcccctagcctcatcaaggaaaccaccacaggatattataaggacatcgtggagaacatctgtggaagagaaaaatccgggatccagccactgtgccccgagcgatctcatatcagcgatcagagccctctctccagtaagaggaaagcgttggaagaaagtgagagcagccagttgatcagtcccccattagcccaggccatccgcgactacgtgaactccctgctcgtccagggcggtgtcgggtcactgcccgggacttccaatagcatgcccccactggatgtggagaacattcagaagcggatcgatcagagtaagtttcaggagaccgaattcctcagcccaccccgaaaggtgccaaggttgtcggagaagtccgttgaagagcgggactcaggctcattcgttgcattccagaacatacctgggtccgaactgatgtcgtcctttgccaagacggtggtctcgcattcacttacgaccctgggattagaggtcgccaaacagtcacagcacgacaagattgatgcttccgagttgagttttccgttccacgaaagcattttgaaagtgatcgaagaggaatggcagcaggtagataggcagctgcccagcctcgcgtgtaagtacccagtgtctagcagggaggctacccagatactctcagtgcctaaagtcgatgatgaaatcctgggatttatttccgaggcaactccactaggcggtatacaggctgcaagcaccgagtcttgtaatcaacagctggacctagctttgtgtagagcttacgaggctgccgcatcggctcttcaaatcgcgacacacacggcctttgtcgctaaggccatgcaagcagatatctcccaggccgcacagatactgtccagtgacccatcccggacccaccaagctcttggcatactgtctaaaacgtacgacgccgcctcttacatctgcgaggccgcctttgatgaagttaagatggctgcccatacaatgggtaatgcaacagtaggacggcggtatctttggctcaaagactgcaagatcaacctcgcatccaaaaataaattagcctctactccatttaagggtggcactttatttgggggggaagtgtgcaaagtgatcaaaaaacgcggtaataagcactag

SEQ ID NO: 137849 - DNA, 1245 bp, synthetic construct
  misc_feature 1..1245: note = Description of Artificial Sequence: Synthetic coding sequence
  source 1..1245: mol_type = other DNA
atgcccgagtttctggaagaccctagtgttctcaccaaggacaagctgaagagcgaactggtcgcaaacaatgtgacgcttcccgctggtgagcagagaaaagatgtgtacgttcagctttatctgcaacatcttacagccagaaacagacccccgctacctgcaggcactaattcaaaaggccctccagacttttccagtgacgaggagcgtgagcccacccctgtgctcggttctggagctgctgccgccggacggtcacgagccgccgttggccgcaaggcaaccaagaagacagataagccacgacaggaagacaaggacgacctggatgttactgaactaaccaatgaggatctccttgatcagctcgttaaatacggggtgaaccccggacccatcgtgggtacgacccgcaagctttatgagaaaaaactgctgaagctgagggagcaaggaacggagagtagaagttcaacgcctctgccaacgatctctagctcggccgagaataccaggcagaatggcagcaatgatagtgatcgctactctgataatgaggaagacagcaaaatcgagcttaagctggaaaagcgagagcccttaaaaggccgcgccaaaactcccgtcaccctaaaacaaagacgggtcgagcacaaccaggtggagacttccgaacactttaggatcgacggtcccgtgatctctgaaagcactcctatcgcagagacgattatggcatcatccaatgaaagcctggtggtcaatcgagtgacaggaaatttcaagcacgccagccctatcttgcccattacagaattctcggatatcccacggcgagctccaaaaaagcctcttaccagggcagaggtcggagagaagacagaggagcgcagggtcgagagggacattttgaaggagatgttcccgtacgaggccagcacccctaccggcatcagtgcaagctgtcgcaggcctatcaagggcgctgccggacgcccactggaattgtcagatttcagaatggaggagagttttagttctaaatatgttcctaaatatgtgccactcgccgatgtgaaatctgagaagactaaaaagggccggtctatccctgtgtggatcaaaattctgctcttcgtggtggtagctgtgtttctgttcctggtgtaccaggccatggaaactaatcaggtgaacccctttagcaactttctgcacgttgatccacggaaaagcaactag

SEQ ID NO: 137850 - DNA, 1038 bp, synthetic construct
  misc_feature 1..1038: note = Description of Artificial Sequence: Synthetic coding sequence
  source 1..1038: mol_type = other DNA
atgcccgaatttctggaggacccctcagtgttgactaaagataagctcaagtccgagctcgtcgccaacaacgtcaccttacccgctggtgaacagcggaaggatgtgtacgtacagctatatctccagcatctgactgcccgaaatagaccccccctgcctgcagggacaaactcaaagggcccacccgacttttctagcgatgaagagcgcgagccgacgcctgtgctgggaagtggcgccgcggccgcgggtagatcccgggctgccgttggcagaaaagcgaccaaaaagacagacaaacctaggcaggaagacaaagatgatctggacgttaccgagctgacaaatgaggatctgctcgatcagctcgtgaagtacggagtgaatccaggcccgattgtgggcaccacgcgcaagttgtacgaaaaaaagctgttgaaacttcgagagcagggaacagagtctagatcttccacccctctcccaaccatctctagcagcgcagaaaacacccggcagaatggctccaatgactccgacaggtactccgataatgaggaagacagcaaaatagaactcaagctcgaaaaaagagaacccttgaaaggaagggccaagactcccgttacactcaagcagaggagggtggaacacaatcaggtgggtgaaaagacggaggagcggagggtggagcgcgatatccttaaagaaatgttcccatacgaagccagcacccccaccgggatcagtgcatcatgtcggaggccaatcaagggggccgccggacggccccttgagctctccgatttccgcatggaggagtccttctccagcaaatacgttccaaagtatgtacccctcgccgatgtcaagtcagaaaagaccaaaaaaggcagatccatcccagtgtggatcaagatcttattatttgtagttgtagcagttttcctttttttggtctatcaggccatggaaacgaaccaggtcaatcccttcagtaatttcttgcatgtggacccaagaaagtctaactag

SEQ ID NO: 137851 - DNA, 1365 bp, synthetic construct
  misc_feature 1..1365: note = Description of Artificial Sequence: Synthetic coding sequence
  source 1..1365: mol_type = other DNA
atgcccgagtttcttgaggatccatccgtgctcaccaaggacaaactgaaatcagagctggtagcaaataacgtcaccctcccggccggagagcagcggaaagacgtctatgttcaactgtacctgcaacacttgaccgcacgcaatcgtcctcccttacccgccggcaccaattctaagggccccccggacttcagtagcgacgaggagagggaaccaaccccggtgctgggctctggcgctgctgctgcgggccgctctagggcagcagttggcaggaaagccaccaagaagacagataaacctagacaagaggacaaggatgatttagacgtgacagagctgacgaacgaagacctcctcgaccaactcgtgaagtacggggttaatcctggaccaatcgtcgggacaacccggaaactgtatgagaaaaagttgctgaagttacgggagcagggtacagaaagtaggagcagtacgcccttgcctactatatcaagctcggcagagaatactcggcagaacggctctaatgactcggatcgctacagcgacaacgaggaggattccaagatagaacttaagctggaaaaaagggagcccctgaaggggagggcaaagactccggtgacccttaagcagagacgtgtggaacataaccaaagttacagccaggcaggcattactgagactgaatggacttctgggtccagtaaggggggcccgcttcaggccctgacgcgggaatcaactaggggcagtcggcggaccccacgcaagagagtcgagacctcggagcacttcaggattgacggtccagttatcagcgagagcactcccattgcggagacgattatggcatcttctaacgagagtttagtagtgaatagggttacaggaaacttcaagcacgccagcccaatccttcccattaccgagttcagcgacatccctagaagggcccccaagaagccactcacgagggcagaagtgggagaaaaaacggaggagcgaagagtagaaagagatatcctgaaagagatgtttccctacgaggcctcaaccccgactggcatcagcgcctcctgtagacgaccaatcaagggagccgcagggaggcctctcgaactcagcgatttccgcatggaggagagcttcagttctaaatatgtgccaaagtatgtgcctctggcagatgtcaaatctgagaagactaagaaaggtcgcagcattcctgtttggatcaagatactgctgtttgttgtcgtagccgtgttcctgttccttgtgtatcaggcgatggaaacaaatcaagtgaacccgttttcgaacttcctccatgttgacccccgcaaatcaaattag

SEQ ID NO: 137852 - DNA, 135 bp, synthetic construct
  misc_feature 1..135: note = Description of Artificial Sequence: Synthetic coding sequence
  source 1..135: mol_type = other DNA
atgtcagataagcctgacatggccgagattgaaaagtttgataagtccaagctaaaaaaaaccgaaacccaggaaaaaaacccgctaccttccaaggaaacaatcgagcaggaaaagcaggctggagagagctag

SEQ ID NO: 137853 - DNA, 135 bp, synthetic construct
  misc_feature 1..135: note = Description of Artificial Sequence: Synthetic coding sequence
  source 1..135: mol_type = other DNA
atgtcagataaacccgatatggccgaaatagaaaaatttgacaaatccaagctaaagaaaaccgaaacgcaggagaagaatcctctccccagcaaggaaacaatcgaacaggagaagcaggcgggggagtcttag

SEQ ID NO: 137854 - DNA, 135 bp, synthetic construct
  misc_feature 1..135: note = Description of Artificial Sequence: Synthetic coding sequence
  source 1..135: mol_type = other DNA
atgtctgacaaaccagatatggctgagattgagaagtttgacaaatctaagctgaagaagactgagacacaagagaagaacccgctcccctctaaggagacgatagagcaggaaaagcaagccggtgagtcatag

SEQ ID NO: 137855 - DNA, 135 bp, synthetic construct
  misc_feature 1..135: note = Description of Artificial Sequence: Synthetic coding sequence
  source 1..135: mol_type = other DNA
atgtctgacaagcctgacatggccgagatcgagaaattcgacaagtctaagctgaaaaagacggaaacccaggagaagaaccctctgcctagcaaagaaacaattgagcaggagaaacaagcgggagaatcatag

SEQ ID NO: 137856 - DNA, 135 bp, synthetic construct
  misc_feature 1..135: note = Description of Artificial Sequence: Synthetic coding sequence
  source 1..135: mol_type = other DNA
atgagtgacaaacctggaatggccgagatcgaaaaattcgacaaaagtaaactgaagaagaccgagacccaagagaaaaaccccctgtctagtaaggagactattgagcaggaacgccaggccggagagagttag

SEQ ID NO: 137857 - DNA, 1299 bp, synthetic construct
  misc_feature 1..1299: note = Description of Artificial Sequence: Synthetic coding sequence
  source 1..1299: mol_type = other DNA
atgggtccagccggcagtcttctcggatctggccagatgcagattactctgtgggggagcctcgcggcagtcgctatcttctttgttatcactttccttatctttctgtgctcatcctgcgaccgtgagaagaaacctcgccaacattctggcgaccatgagaaccttatgaacgttccgtcagacaaagagatgttctctagatccgttacgtctcttgctaccgatgccccagcctcctcagaacagaacggtgccctcacaaatggcgatatactcagcgaggacagcactctcacatgtatgcagcactatgaagaggtgcagacctctgcttccgacctcttggactcgcaagactctaccggtaagccaaagtgtcatcagagccgtgagttacccagaattcctcccgagtctgcggtcgatacaatgctcaccgcacgctcagtcgatggcgaccaaggcctgggcatggaggggccctacgaggtgttaaaagattctagtagccaggagaacatggtggaagattgtctgtacgagaccgtgaaggagatcaaggaggtcgctgctgccgcccatctagaaaagggtcactcagggaaggctaagtccacaagcgcaagcaaggaactgccaggtcctcagacagaaggaaaggccgagtttgcagaatatgcatccgttgacagaaataaaaagtgcagacagtcggtgaatgtggaatcaatcctgggtaacagctgcgaccctgaggaagaagctcctcccccagtacctgtgaaactgctagacgaaaatgagaacctgcaggaaaaagagggcggcgaggctgaagaatctgcaactgacaccaccagtgagaccaataaaaggttctcttcactgagctataagtcccgggaggaagacccaacactgaccgaagaggagattagcgcaatgtacagcagtgtgaacaaacccggccagctcgtgaacaaatccgggcaatcccttaccgtaccagaatccacgtataccagcattcaaggcgatcctcagcgatccccgtcttcctgtaatgacctatacgccaccgtcaaggattttgagaagactccaaacagcacgctgccccccgcaggccggccttcggaagaacctgagccggactacgaagctatccaaacgctgaatcgcgaggaggagaaggccaccttaggaaccaacggccaccacggactcgtgcccaaagagaatgattatgaaagtatttccgacttgcagcagggcagagacattacaaggttgtag

SEQ ID NO: 137858 - DNA, 8136 bp, synthetic construct
  misc_feature 1..8136: note = Description of Artificial Sequence: Synthetic coding sequence
  source 1..8136: mol_type = other DNA
atggcattagtgctggaaatcttcactttactggccagtatttgttgggtctcagcgaacattttcgaatatcaggtggatgctcagccattgaggccctgtgagcttcagagagaaacggcgttcctcaagcaagcagactacgtgccacagtgcgccgaggacggaagctttcagactgtgcagtgccaaaatgacggtaggagctgttggtgcgttggtgccaatggatcggaagtcctgggctctcgacagccaggccgccctgtggcttgtctgtcattctgccaacttcaaaagcagcagatcctgctgtctgggtacattaattctacagacacatcttatctgccccagtgccaggatagcggagattatgcccctgtccagtgtgatgttcagcaggtgcagtgttggtgtgtagacgctgaggggatggaagtttacggaacccgacagttaggccgtcccaagcgctgtcctaggagctgtgagattagaaaccggagactcttgcacggggtgggagataaatcccccccgcagtgtagcgccgagggcgagttcatgccagtgcaatgcaaattcgtcaacacgactgatatgatgatttttgacctggtgcactcctacaatcgattccctgatgcatttgtcacattctccagcttccagaggcgctttcccgaggtcagcgggtactgtcactgtgcagattcgcagggaagagagttagccgaaacgggcttggaactcctactggatgagatatatgacactatctttgcgggtctagaccttccatctacctttactgaaactactctgtatcgtatactgcagcgcagatttctcgccgtgcagagtgttatatctggacggtttaggtgcccgaccaagtgcgaggtggagagattcacggctacctctttcggccacccatatgttccctcgtgcaggcgcaacggggactaccaggcggtccagtgccagactgaggggccctgctggtgcgttgatgcccagggcaaggagatgcacggaacgagacagcagggtgagccgccttcttgtgccgaggggcagtcctgcgcctcagagaggcagcaggccttgtcgcggctttactttggtacgtctggatacttttctcagcacgatctattctccagccctgagaaacggtgggcatcgcctcgggtcgccaggttcgctacgtcctgcccacccacaatcaaggagctgttcgttgatagtggattgctgagacccatggtagagggccagtcacaacaattcagcgtatccgaaaatttgctgaaagaagctattagagcgatttttccttcacgaggactggcccgattggctctgcagttcactactaatcctaaacgcttgcagcaaaatttgtttggtggaaagtttcttgtgaacgtgggtcagttcaacctttctggagctttgggtactagaggcactttcaacttctcccaattctttcagcaactggggctcgcgagttttctcaatggcggcagacaggaggacctcgccaaacccctcagtgtgggactagattccaacagctcaactggcacaccagaggccgctaaaaaagacggtactatgaacaaacctacggtagggtcgttcgggtttgagattaacctgcaggagaatcagaacgccctgaagtttctggcctcacttctggaactgcctgagtttctattatttttacaacacgctattagcgtgccagaggacgttgcccgagatcttggcgacgtgatggaaaccgtgctgtcttcacagacttgcgaacagacaccggagaggctgtttgtgccatcttgtaccactgagggctcttatgaggatgtgcagtgtttttctggcgagtgctggtgcgtgaattcttggggcaaggagctcccaggcagtcgagtgcgtggagggcaaccccgctgcccaaccgattgtgagaagcagcgcgctaggatgcaaagcctgatggggtcacagccagccggtagtaccctgttcgtgcccgcctgtactagtgagggccattttctccccgtacagtgtttcaacagtgaatgctattgcgtcgacgccgaaggccaggctatacctggtaccagaagcgctattggaaagccaaaaaagtgtcctaccccttgtcaactccagtccgagcaggcctttctgagaacagttcaagctctgctgtccaactcttctatgctgcccacgctgagcgatacatacataccccaatgtagcactgatggacagtggagacaggttcaatgcaatggcccaccggagcaagtatttgaactgtaccagagatgggaggctcagaataaagggcaggacttgacaccagccaagctgctcgtaaagatcatgagctaccgcgaagctgctagcggcaacttttctctgtttatccagagcctgtacgaagcgggtcagcaggatgtgttcccagtgctgtcacagtacccctcccttcaggatgtccccctggcagccctggagggaaagcgaccccagccccgggagaacatcctattggagccctatttattttggcagatcctcaacggacagctaagtcaatacccaggctcctacagcgatttctccacacctctggcgcactttgatctgcgaaattgctggtgtgtcgatgaggccggccaggaactcgagggtatgagatctgagccatctaaacttcccacatgccccggcagttgtgaggaggcaaagctgagagtgttgcaatttataagggaaactgaggaaattgtgtctgcttcaaatagcagccggtttcccttgggcgagagcttcctcgtggcgaaaggcattcggctgcggaatgaggacctgggtcttccccctctctttcctcctcgtgaagccttcgctgagcagtttctccggggctccgattatgccattagactggctgctcaaagcacgctgagcttttatcagcggaggcgtttcagccccgacgacagcgctggggctagcgccctgctccggagcggcccttatatgccccagtgcgacgcctttgggtcttgggagccggtgcaatgtcacgctggtaccggccactgctggtgcgtggacgagaagggcgggttcatcccaggcagtttgactgcccgatcgcttcagatccctcagtgccccaccacatgcgaaaagagccgtacatcggggctactgtccagctggaagcaagcacgctcccaagagaacccctcccctaaggacctgtttgtgcctgcctgcctggagactggagaatacgcacgactgcaggcatccggggctggcacgtggtgcgtggaccccgcatctggtgaagagctgcggccagggtcatcctcatcagctcagtgcccatccctctgtaacgtgctaaagagtggtgtcctgagtagaagggtgtccccgggctatgtgcccgcctgccgtgcggaagacggtggcttttccccggtgcagtgtgatcaggctcaaggaagttgttggtgtgtgatggattccggggaagaagttccaggcacaagggtgacaggcgggcagccggcatgcgagtcaccaaggtgccccttacctttcaatgcttccgaggtggtgggcggaacgatactgtgcgagactatctctggacccaccggcagtgccatgcagcagtgtcagctcctgtgccgtcagggaagctggtccgtcttcccccccggtcctcttatttgctccctggagtccggacgatgggagtcccagctgccccaacccagggcctgccaacgcccacaactgtggcagaccattcagactcagggtcattttcaattgcagttgccccctgggaagatgtgtagcgctgattatgccgatctcttgcagacatttcaggtgtttattctggatgaactcactgccaggggattctgtcaaatccaggtcaaaacatttggcacactggtctctatcccagtctgcaacaactcgagtgtgcaagtcgggtgtttaaccagggagaggttgggcgtcaacgtcacatggaaatccaggctggaggacatccccgtggccagcctccccgatcttcacgatatagaacgcgctctggtgggcaaagacttgctggggcgttttactgatcttatacagagtgggtcatttcaattgcacctggatagtaagaccttccccgccgagacgattaggttcctacagggagatcacttcggaacttcaccacgcacctggtttggctgtagcgaaggcttctaccaggtccttaccagcgaggcgagtcaggatgggctgggttgtgtgaaatgtcccgaaggatcctactcacaggacgaagagtgcatcccttgtcctgtaggcttttaccaggagcaggccgggtccttggcctgcgtcccttgccctgtgggccgtacaaccattagcgccggcgccttcagccaaacacaccttatgcagaagtttgaaaaagtgcccgagtctaaagtgattttcgacgcaaacgccccagtagcggtgagatccaaagtccccgactcagaattcccggtcatgcagtgtctcactgattgcaccgaagacgaggcttgttctttctttaccgttagcaccaccgagcccgaaatcagttgtgatttctatgcctggacttcagacaacgttgcctgtatgacgtcagatcaaaagcgggacgcactgggaaacagtaaggcaaccagcttcggaagtctgcgctgccaggtcaaagtacgatctcacggccaggatagtcctgccgtctatctcaagaaggggcaggggagtaccacaactcttcaaaaaaggttcgaaccaaccggatttcagaatatgctaagtggcctgtacaaccccatagtctttagcgccagtggtgccaatttgaccgacgctcatctcttttgtcttctggcatgtgacagagatctctgttgcgatggcttcgtactgacacaggttcaaggtggagccattatctgcggactactgagtagcccatccgtgttattatgcaacgtgaaagattggatggatccttctgaggcttgggcaaatgctacctgccccggagtgacatacgatcaggagtcgcaccaggtgatcctgagacttggtgatcaagagtttatcaagagcttgacacccctggaggggacgcaagatacttttacgaatttccagcaggtgtacctatggaaagactccgacatggggagccggccagagagcatgggttgtcgcaaggacactgtgccccggccggcctcccctacagaggccggcctgactacagagttgttcagccccgtcgacctgaatcaggttatcgtgaatgggaaccagtcactcagtagccaaaagcattggctatttaagcaccttttttcagcgcagcaagcaaacctctggtgcctgagccggtgcgtgcaggagcactctttctgccagctcgccgagattaccgaatccgcctcactctacttcacctgtaccctttatccagaggcccaggtatgcgacgatattatggaatcaaatgcccagggctgcagacttatccttccacaaatgcccaaagctttgtttaggaagaaggtgatcttggaagataaagtaaaaaacttttacactcgactgcccttccagaagctgatgggcatctcaattcggaataaggttcctatgtctgagaagagcattagtaatgggttcttcgaatgcgagcggcgatgcgatgccgatccctgttgcactggcttcggctttctcaatgtctcccaactgaagggtggagaggtcacttgcttgactttgaactcactcggaatccagatgtgctcggaggagaatggtggagcctggagaatcctggactgcggatcacctgacatagaggtgcacacctacccgttcggatggtaccagaagccaatcgctcaaaataatgccccttccttttgtcccttagtcgtcctgccctcattaaccgaaaaggttagcttggattcctggcagtccctcgcattgtcaagcgtagttgtggacccctctatccgccatttcgacgtcgcacatgtcagtaccgccgcaacctcgaatttttccgctgtgagggacctgtgtttaagcgaatgtagccagcacgaagcttgccttataaccaccttgcagacacagcctggagccgtccgctgcatgttttacgccgatacacaatcctgcacacattctctccagggccagaactgtcgcctcctcctgcgggaggaagctacccatatttacagaaaaccaggaatctcgctcctgagctatgaggcatcagtgccttcggtgcccataagcacccatggtcgcctcttaggccggagccaagctattcaagtgggcactagctggaagcaggtggaccagtttctgggcgtcccgtatgctgctcctcccctcgccgaaagacggttccaggctccagagccactgaattggaccggcagttgggacgcatccaagcctcgggctagttgctggcagcccggcacccggacgtctacttcaccaggtgtatcggaggattgtctttacctcaacgtcttcattccacaaaatgtcgcccctaacgcgtccgtgcttgtcttttttcataataccatggatcgcgaagagtctgaggggtggccagctattgatggatccttcctggccgccgtgggaaatctgattgtggtcactgcttcctacagagtgggagtcttcggctttctgagttcgggctctggagaagtctcagggaattggggcctcttagaccaggtagcggctctgacctgggtccagactcacattcgaggtttcggcggggatcccagaagagtgagtcttgctgccgatcgagggggggccgatgtcgcgagcattcacctactcaccgccagagcaactaattcccagttgttccggagagccgtgcttatgggggggagcgcgttaagtccagcggccgtgataagtcacgagagggcccaacagcaagccatagcactagccaaggaggtgtcctgccccatgtcaagtagccaggaagtggtcagctgtctgcgccagaaaccagccaatgtgctcaatgatgcacagacaaaattgcttgcagtgtctggccccttccactattggggcccagtgatcgatggccacttcctgcgtgagcctcccgcccgggccctgaaacgcagcctctgggtggaagtggacttgctcatcggcagcagtcaggacgatggcctgatcaacagagctaaggcagttaagcagtttgaggagtcacgcggccgtacttcatcaaaaaccgcattttaccaggcattacagaattcactaggtggggaggattccgacgctcgggtggaagcggcagctacctggtactacagcctcgaacatagcaccgatgattacgcctccttttccagggctctcgagaacgccacaagagattacttcattatctgtccaatcatcgatatggcaagtgcctgggctaagcgagcccgggggaacgttttcatgtaccatgctcccgaaaattacgggcacggctctctagaactcctagctgacgttcaattcgctcttggtctgcccttctacccggcctacgaggggcaatttagcctggaggagaagtccctgtccctcaagatcatgcagtatttcagccatttcatccgatccggaaatccgaactacccctacgaatttagtcggaaggtgcctactttcgccaccccctggccggactttgtccctagagcgggtggtgagaactacaaggagttttccgaattgctgcctaatcggcaggggctgaaaaaggctgactgctcattttggagcaagtacatcagtagtttgaaaacctctgctgacggcgctaaggggggtcaatcagccgagtctgaggaggaagagcttaccgctggatcaggtctgagggaggacttgctgagcctgcaggagccagggtcaaagacctactcgaagtag

SEQ ID NO: 137859 - DNA, 2664 bp, synthetic construct
  misc_feature 1..2664: note = Description of Artificial Sequence: Synthetic coding sequence
  source 1..2664: mol_type = other DNA
atggcattggtgctggaaatctttactcttttggcatcaatctgctgggttagcgccaatatctttgagtatcaggtcgacgcgcagcctctgcgcccctgcgaactgcagcgagagacggcttttctcaagcaagctgactacgtgccacagtgtgcggaagatggatccttccagaccgtgcagtgccagaacgatggaagatcctgttggtgtgtgggtgctaacggtagtgaggtgctaggatcacggcaacccggaagaccggtcgcctgcctgtctttctgtcagctgcagaaacagcaaatactactgagtgggtacatcaatagcaccgatacatcttacctgccccaatgtcaagacagtggagactacgctcccgtgcagtgcgatgtgcagcaggtgcagtgctggtgcgtagacgcagagggtatggaggtctatgggacaagacagctcggaaggcccaaacgctgcccccggtcttgcgagataaggaaccgtaggctcctgcatggcgttggggacaagtcacctccccaatgtagcgccgaaggtgaatttatgccggtgcagtgcaaattcgtgaataccacagatatgatgatttttgacttagtgcacagttacaaccggtttcctgatgccttcgtcacgtttagctcttttcagcgcagatttcccgaagtgtcagggtattgtcattgtgcggattctcagggcagagagttggctgagaccggcctggaacttctgctcgatgaaatttacgacacgatctttgccggacttgatcttccaagcacctttaccgagactaccctataccgaatcctgcaaagaagatttctagccgtgcagagcgtgatctcaggcagattcaggtgtccgacaaaatgtgaggtcgaacgctttacagccacttctttcggacatccttatgtgccctcctgtcggcgaaacggggactaccaagcagttcagtgccaaaccgagggcccttgttggtgcgtcgacgcccagggaaaggaaatgcatggaacccgtcagcaaggggaaccgcctagttgtgccgagggccagtcttgtgcctctgagcggcagcaagcgctttcccgcctttactttggcaccagcggatactttagccagcacgaccttttcagctctcccgaaaagcggtgggcctcgcccagggtagccaggtttgccacaagttgccctcctacaataaaagagctgtttgtggactcagggctactacgacccatggtcgaaggccagtcccaacaattcagtgtatcagaaaatcttctgaaagaggccattcgggccatctttccttctcgaggactggcacgtctagccctgcagttcacgactaaccccaagcgccttcagcagaacctgtttgggggaaagtttctggtcaacgtcggccaatttaacttatccggtgctctcggcacccgcggaacctttaatttctctcaattctttcagcaactggggctggccagttttctgaatggaggcaggcaggaggacttagccaagccgctgtctgtggggctggattccaattcctcaaccgggactcccgaggccgccaagaaagacggaacaatgaataagcctactgtggggtctttcggttttgaaataaacctccaagagaaccagaatgccttaaaattcctggcttctttactggagctgcctgagtttctgctgttcctccaacacgctataagcgttcccgaagatgttgctcgggacctcggcgatgtgatggagactgtcctttcctcccagacctgcgagcaaacgccagaacggctattcgtgcctagttgtaccaccgaaggctcctatgaggatgtccaatgttttagcggcgaatgctggtgcgtaaacagctggggaaaagaattgcccggctcacgcgtgaggggagggcaacctagatgccctacagactgcgagaagcagagagcgaggatgcaatctctgatgggctctcagccggcagggagcacattgttcgtgccggcttgcacatccgagggccacttcctcccagtacaatgttttaactccgaatgttactgcgtggacgccgaagggcaggcaattcccggcactagatctgcaatcggcaaacctaaaaagtgtcccacaccatgtcagctgcagagcgaacaggctttcctgcggacagtgcaggcacttcttagcaactcttccatgctacccaccctatctgatacatacgaaggtcaattcagcttggaagagaaaagcctttcactcaaaatcatgcaatatttcagccacttcatccggtctggtaacccaaattatccatacgaattctcacggaaagtgccaactttcgccaccccttggcccgacttcgtccctcgcgctggtggggaaaattacaaggagtttagcgagctgctgcctaataggcaaggcttgaagaaggcagattgctcattttggtcaaagtacatctcatccctgaagacaagtgcagatggggctaaggggggacagtcggcagagtccgaggaggaggagctgaccgcagggtctggccttcgtgaagatctactatccctgcaggagccaggatctaagacctactcaaagtag

SEQ ID NO: 137860 - DNA, 3417 bp, synthetic construct
  misc_feature 1..3417: note = Description of Artificial Sequence: Synthetic coding sequence
  source 1..3417: mol_type = other DNA
atgatgcaaaaattcgagaaggtccctgagtctaaggtcatctttgacgcgaatgctcctgttgccgttcgctcaaaggtgccagacagcgaattccccgtgatgcagtgcctgaccgactgcacggaagacgaggcctgctcatttttcacagtgtcaaccacagagccggagatcagctgcgacttctacgcttggacaagcgataacgttgcctgcatgacatccgatcagaaaagggacgccctgggcaattccaaagccacctccttcgggtcactgcgttgccaagttaaagtgaggagtcatggacaggattcccctgccgtctacctcaagaaaggggctatcatctgcgggctgttatccagtccgagtgtgctgctctgcaacgtcaaagactggatggacccttccgaggcctgggctaacgccacctgtcccggagtcacctacgatcaggaatctcaccaagtgattctgcggctcggcgatcaggagttcattaagagcctgacccctctggaaggcacacaagacacatttaccaattttcaacaggtatacttatggaaagactcagatatgggtagtcggcccgaatccatgggctgccgcaaggacactgtcccccgacccgctagcccaactgaggccgggttaacaacagagctcttttcacccgtggacctcaatcaggtgattgtaaatggaaaccagtccttatcatcccagaagcactggttgttcaaacatctgttttccgcccagcaagctaacctgtggtgcctcagtcgctgtgtccaggagcatagtttttgccagctggccgagattaccgagagtgcttctctgtacttcacttgcactctatacccagaggcacaggtctgtgacgatattatggagtctaacgcacaagggtgtaggctgatcctcccacagatgccaaaggccttatttcggaagaaggtgatccttgaggataaggtgaaaaacttttacacaagactgccatttcagaaattgatgggcatctccattaggaacaaggtccccatgtctgagaagagcatctctaacggattctttgagtgcgaacggagatgcgacgcggacccctgttgtacaggtttcggatttttaaacgtgtctcagttgaaggggggagaggttacttgtttaacccttaacagcttagggatccagatgtgtagtgaagaaaatgggggagcttggaggatcctagactgtgggtcacccgacatcgaagtccacacatatccctttgggtggtaccagaaacccatcgctcagaataacgccccctctttttgccccctggtggtacttccttcgttaactgaaaaagtatcccttgacagttggcagagcctcgctctaagcagcgtcgtggtagatccatcaatcaggcacttcgacgtggcacacgtttcaactgctgccacaagtaatttcagcgcggtgcgggacctgtgtctttccgagtgtagccaacacgaagcttgcctgattaccacactgcagacccagccaggggcagtccggtgtatgttctacgccgatacccaatcatgtacccattctctgcaaggtcagaattgccgtcttcttttacgcgaagaagccacccatatctaccggaagccaggcatcagcctcctatcttacgaagcaagtgtgccatctgttcctatcagtactcacggtagactgcttggccgctcacaagctatccaagtcggtaccagttggaaacaggtggaccaattcctgggcgtgccatatgccgcacctcctctagcagagaggcgctttcaagctcccgagcccttgaactggactggttcttgggacgctagcaagcctcgagccagctgttggcaaccgggcacacgaactagtacatcacccggagtgtcggaagactgcctgtacctgaacgtgttcattccacagaacgtggcacccaacgccagcgtcttggtcttttttcacaatactatggaccgcgaagaatctgagggttggccagctattgatggctcctttctggctgctgttggcaatttgatcgttgttacagcctcctacagggtgggcgtgttcggttttctgtcctcaggtagcggcgaagttagcggcaactggggactgttagaccaggtcgcagctctcacatgggttcagactcatataaggggattcggcggcgatcctagaagagttagcctggctgctgatcggggcggtgccgatgtcgcaagcattcacctactgaccgccagggccactaacagccagctgtttaggcgcgccgtcttaatgggaggctctgctttgagcccggctgctgtcataagccatgaaagggcccaacagcaagctatagctctggccaaagaagtatcatgtccaatgagcagctcccaggaagttgttagctgcttgaggcagaagcccgccaatgtgctgaatgacgctcaaaccaaattgctggccgtcagtggccctttccattattggggacctgtaatcgacggacactttctgcgcgagccccctgcccgcgccctgaaaagatctctgtgggtggaagtggacctcctgatcggctcctcacaagacgacggactgatcaatcgtgccaaggcggttaaacagttcgaagaaagcaggggccggactagcagcaagactgcattctatcaggccctccagaactcccttggcggagaagattctgacgcaagggtggaggccgcagccacatggtactactcattggaacactcgacagacgattatgcctctttctcacgagcccttgaaaatgccacccgtgattactttatcatttgccctatcatagacatggcttcagcatgggccaaaagagcgcggggcaatgtgttcatgtaccatgcccccgagaactacggtcacggttcactcgagctgctcgcagacgttcagttcgctctgggacttccattttatcctgcttatgagggccagttctccctggaggagaaatcactgtccctgaaaattatgcagtacttttcacacttcatcaggtctggaaaccccaattatccctatgaattctctcgcaaggtgcctacttttgctacaccatggcccgatttcgtgcctcgagccggtggtgaaaattataaagaattctccgagctcctgcccaatcgacaggggctgaagaaggccgattgcagtttttggtcaaagtatatttcctcacttaagacaagcgctgacggagcaaaagggggtcaaagtgccgaaagcgaagaggaggaactcaccgctggatccggcctgcgcgaggatctactgagcttacaggagcctggttcaaagacctactctaaatag

SEQ ID NO: 137861 - DNA, 4725 bp, synthetic construct
  misc_feature 1..4725: note = Description of Artificial Sequence: Synthetic coding sequence
  source 1..4725: mol_type = other DNA
attccacggaaacctatctccaagcgtccagtacggccttccctccctcgcagcccccggtgcccgctgccatttaacgcttctgaggtagtgggcggaactattctgtgcgagacgatttcaggccctaccggctctgcaatgcaacaatgtcagctattgtgtcgtcagggttcttggtcggtgtttccaccaggaccgctgatctgcagtctcgaatctgggcgatgggaatcacagcttccccaaccccgcgcttgccagaggccacagctgtggcagaccattcagacccagggccattttcagctgcagctgccaccgggcaaaatgtgcagcgcggattatgccgatttattacagaccttccaggttttcatactcgacgaattgactgcccgcgggttttgccaaattcaggtcaaaactttcggaactctcgtcagtattccagtgtgtaataattctagtgtccaggtaggatgcttgacaagagaacggcttggggttaatgtcacatggaaatcaaggctggaggatattcctgttgccagcctacctgaccttcacgacatagaacgggccttggtgggaaaagatctactgggaaggtttaccgacctcatccagagcggatcctttcagttacatttggacagtaaaacctttcccgcagaaaccataagattcctgcagggggatcactttgggacatctcctaggacatggtttggctgcagcgagggtttttatcaggtcctcacctccgaagcctcccaggacggcctcggctgtgtgaagtgcccagagggaagctacagtcaggacgaggagtgtattccttgccctgtgggcttctaccaggaacaggctgggtccttggcttgcgttccatgccctgtggggaggacgactattagtgcgggagccttttcccagactcattgtgtcaccgattgccagcgtaatgaggcggggcttcagtgtgaccagaacgggcaataccgcgcgagccaaaaagataggggtagcggtaaggccttttgcgtggacggtgaaggccgaagactcccttggtgggaaaccgaggcacccctggaggacagccagtgtctcatgatgcaaaagttcgagaaagtgcctgaatccaaagtgattttcgacgcgaatgcgcccgtcgcagttcggtccaaagtccctgacagtgaatttccagtaatgcagtgtttgactgactgtaccgaggacgaggcatgttccttctttaccgtgagtacgactgagccagaaattagttgcgacttctatgcttggaccagcgacaatgtggcctgtatgacgtcagatcagaaacgcgacgcacttggaaattcaaaggccacgtcattcggttcattgcgttgtcaagtgaaagtacgcagccacggacaggatagtcctgctgtttacctcaaaaaaggacagggcagcacaacaactctccagaagaggtttgaacctaccggtttccagaatatgctatccggcctttacaatcccatcgtgttctccgcgagcggggctaacctgacggacgcccacctgttctgtctgctcgcgtgcgatcgcgacctgtgttgcgatggctttgtgctgacgcaggtgcagggcggggcaattatctgtggattgctgagcagccctagcgtccttctttgtaacgttaaagactggatggatccatcggaagcctgggccaatgcaacttgccccggagtgacctatgaccaagagtcgcaccaagttatcttaagattgggtgatcaggagtttataaagagcttgactccactcgagggaacccaggatacttttaccaattttcagcaggtttacttgtggaaagattccgacatgggcagccggccagagagcatgggctgcaggaaagatacagtcccccgcccagctagccctactgaggccgggctgaccactgagttgttctccccagtggacctgaatcaggtaatcgtgaacggaaatcaatccctgtcaagtcagaaacattggctcttcaagcatctattttccgctcagcaagcaaatctatggtgcctaagtaggtgcgttcaggagcactccttttgtcaactggccgaaatcacagaatccgcttccttatactttacgtgtactctttatcccgaggcccaagtttgcgacgatattatggagagcaatgcgcagggatgtaggctaatcttgcctcagatgccaaaggcattgtttcgaaagaaagtgatccttgaggacaaagtaaaaaacttctatacaagactgccctttcagaagctgatgggaatcagcattcgcaacaaagttcccatgtccgagaaaagcatatctaatgggtttttcgagtgcgagcgaaggtgcgacgcggatccttgttgtaccggattcggcttcctcaatgtgagtcagttgaaaggcggggaagtgacctgtctgaccttaaacagtcttggcatccaaatgtgctccgaggagaatggcggagcatggaggattttggactgcgggagtccagacattgaggttcacacctaccctttcgggtggtatcagaagcccatcgcacagaacaatgccccctctttctgtccgcttgtggtcctaccttccctgaccgagaaggtgtctcttgatagttggcaaagcctcgcactgtcaagcgtcgtggtggacccctctattagacactttgatgtcgcacacgtctctactgctgccacgagcaacttttctgccgtgcgggatttgtgtttgtccgagtgtagccagcatgaggcctgtctgattacaactctgcagacacagcctggtgctgtccggtgtatgttttacgcggatactcagtcatgcactcactcccttcagggtcaaaactgccgactgctgcttcgggaagaagcaactcacatttaccggaaaccagggatcagcctactctcctatgaagccagtgtcccgagtgtgcctatatccacccacggcaggctgctcgggcgtagtcaagccatccaagttgggacctcctggaaacaggtcgatcaattcctgggagtcccctatgcagccccacctttagccgaaagacgctttcaggccccagagccattaaattggaccgggtcatgggatgcgtctaaacctagagccagttgctggcaacctggaacaagaaccagcacgtcccccggtgtgagcgaggactgcctctacctcaacgtttttattcctcagaacgtggctccaaacgcttcagtgttggtgtttttccataacaccatggatcgggaggaatccgaggggtggcccgcaatcgatgggagcttcctcgcggcagttggcaatctgatagtagtgaccgcatcttatagagtcggagtattcggtttcctcagctccggctccggcgaagttagtggaaactggggcctcttggatcaagtggcagccttgacgtgggttcagactcacattcgaggctttggcggcgaccctagacgggtgagtctcgcagccgaccgaggcggggccgatgtggcttccatccaccttctcacggcgcgagccactaattcgcagctcttccgacgcgcagtcttaatgggaggtagtgccctctctccggcggcagtcatcagccatgaaagggcccagcagcaggcaatcgcgctcgctaaagaggtgtcctgtcctatgagcagcagccaggaagtggtcagttgcctgcgccagaaaccagcaaatgtgctgaacgacgcacagaccaagttgcttgccgtctcgggaccttttcattactggggtcctgtcatagatgggcattttctcagggagccgccagctcgggcactgaagaggagtttgtgggtggaagtggacctcttgatagggtccagtcaggacgatggtctgatcaaccgtgccaaagcagtgaagcaatttgaggaatcaagaggccgaacctcctcaaagactgcattttaccaggcacttcagaactctcttgggggcgaagattctgacgcccgtgtggaggctgccgccacttggtactattcccttgaacacagcaccgacgattatgccagtttttcacgcgcactggagaacgccaccagagattatttcattatatgtcctattatcgatatggcttctgcctgggcaaagcgggccaggggaaacgtgtttatgtaccatgcaccagagaattacggccacggaagcctcgagttactcgcagatgtgcagtttgcgctgggactaccattttacccagcatacgagggacaattcagcctagaggaaaagtccctcagtctcaaaattatgcagtatttctctcacttcattagatctgggaaccctaattacccctacgaatttagccgcaaagtgcccactttcgcgaccccctggccagacttcgtgcctagggccgggggtgaaaattataaagaattctcagagctgttgcctaacaggcaggggcttaagaaggcagattgctccttctggtctaaatatatttctagtttgaagacatcggctgatggagcaaaaggcggccagtccgcagaatccgaggaggaggagctgactgcaggatctggcctgcgcgaagatcttctatccctgcaggaaccaggatctaaaacatattcgaagtag

SEQ ID NO: 137862 - DNA, 1356 bp, synthetic construct
  misc_feature 1..1356: note = Description of Artificial Sequence: Synthetic coding sequence
  source 1..1356: mol_type = other DNA
atggagcaaaaaccgagtaaagttgagtgcggatctgaccctgaggaaaactcggccaggtctcctgatggcaaaaggaaacgcaagaacggccaatgttcattgaaaacctcaatgagcgggtatataccaagctacctagacaaggacgagcagtgtgtggtctgtggtgataaggctacgggatatcattatcgatgtattacgtgcgaaggctgcaaggggttcttcagacgcacgatccaaaaaaacctacacccgacatacagctgcaaatacgactcgtgttgcgtaatcgataaaatcaccagaaaccagtgccaattatgcagatttaagaaatgtatcgctgtcggaatggccatggatcttgtccttgatgattctaaaagagttgctaaaaggaaactgatcgagcaaaacagggagcggcgtcggaaggaagagatgatccgcagcctgcagcaacggccagaacccacccccgaggaatgggatttaattcatatcgcaacggaggcccatagaagcaccaacgcccagggtagtcattggaagcagaggcgcaaatttctccccgacgacattggccagtctcccattgtgtccatgcccgatggcgacaaggtggacttggaagccttttcggaattcaccaaaatcatcacacctgccataacaagagttgtcgactttgccaagaagctgcctatgttttccgaactcccatgcgaggatcaaataatcttattaaaaggctgttgcatggagattatgtctctgagagcggcagtgcgatacgatcctgagagcgacactctgactctttccggcgagatggccgtaaagcgggaacagctcaaaaatggagggctgggcgttgtttccgacgccatttttgagttagggaaaagcctctctgcattcaacctggatgacacagaagtggctctgctgcaggctgttctgctcatgagcactgaccgatccggactactctgcgtggataagattgaaaaatcccaggaagcttacctcctggcctttgaacattatgtgaaccaccggaagcataatatccctcatttctggcccaaactcctcatgaaaggaccacaggtgcgacagctagaacagcagctgggagaggcaggcagtctccaaggtccggtgcttcaacaccagtccccaaaatccccacaacaaaggctcctggaactgctgcaccggtctggcatcctccacgccagggccgtatgtggtgaagacgattccagcgaagccgactcaccatcatcctccgaagaggaacccgaggtgtgcgaagatttggcgggaaacgctgcaagcccatag

SEQ ID NO: 137863 - DNA, 5940 bp, synthetic construct
  misc_feature 1..5940: note = Description of Artificial Sequence: Synthetic coding sequence
  source 1..5940: mol_type = other DNA
atgtcgagctggctggggggcttaggctctgggctgggacagagcctggggcaagttggggggtcactcgcatctttgaccggccagatttctaattttacaaaggatatgctcatggagggcacagaggaagttgaggctgaattgcccgactcccggactaaggaaatagaagcgattcacgccatcctgaggagcgaaaacgaaaggctgaagaagctctgcactgacctggaggagaaacatgaagcctctgaaatccagattaagcaacagagcacatcatacaggaaccagctgcagcaaaaggaggttgagataagccacctgaaggctcggcaaatagccctacaggaccaattactaaagctgcaatccgccgcccagtcagtccctagcggcgctggggtgcccgccaccacagcatcctcgtcttttgcctacgggataagtcatcacccatcagccttccatgacgatgatatggattttggcgacatcatttccagtcagcaggaaatcaatcggctctctaatgaggtatcccgcctcgaatcggaggtaggtcactggagacatattgcacagacatccaaagctcagggcactgataacagcgaccagtcggagatttgtaaacttcagaacatcatcaaggagttgaaacagaatcgctcgcaggagattgacgatcaccaacatgaaatgagcgttctacaaaacgcgcaccagcagaagctgacagagatttctagaagacaccgggaagaactctctgactatgaggaacgcatcgaagaattagagaacctgctgcagcaaggcgggtcaggggtaatcgagactgatctgtcaaagatctatgagatgcagaaaactatccaggttctgcagatagaaaaggtggaatccactaagaaaatggagcagctcgaggacaaaattaaagacatcaataagaaactcagcagtgccgaaaacgaccgggacatcttgaggcgagaacaagagcagctcaacgtagaaaagaggcagataatggaggagtgcgagaatctaaagctcgaatgtagtaaactgcagccctctgccgtgaagcagtcggatacaatgacagaaaaggagagaatcctcgctcagtccgcgagcgttgaggaagtgttccgtcttcaacaggccctctccgacgccgagaacgaaatcatgaggctttcatccttaaaccaagacaatagtctggccgaagataatctgaaacttaaaatgcgtatcgaagtgctcgagaaagagaaatctcttcttagccaggagaaggaagaactgcagatgtcactgctcaaactgaataacgagtatgaggtgattaagagcacagcaacgagggacattagtctcgatagtgagctgcatgacctccgcttaaacctagaggctaaagaacaggagctgaaccagtctatctctgagaaagagacactgatagctgagattgaggagctggatagacaaaaccaggaggccactaagcacatgattctcataaaggaccagttatccaagcagcaaaatgaaggcgatagtataatttccaagttgaaacaggacctgaacgatgagaagaagagggtgcaccaactggaggatgacaaaatggacatcaccaaagagctcgacgtccaaaaggagaagttgatacagtccgaagtcgccctcaatgacctgcatctgacaaagcagaagctggaggacaaggtggagaatctcgtagatcagctaaacaaatcacaggaatctaacgtgagcatccagaaggagaacctagagctgaaggaacatatacgccaaaacgaagaggaactcagtaggatccgcaatgagctaatgcagtccctgaatcaggactcaaatagtaacttcaaagatacactccttaaggaacgcgaagccgaagtccgaaatttgaagcagaacctgagcgaactcgaacagctgaatgaaaacctgaaaaaggtggcctttgatgtcaagatggaaaacgaaaaactcgtcctggcatgcgaggacgtacgtcaccagctagaagaatgtctggcggggaataaccagctgagtctagagaagaatacaatcgtggaaacgctgaagatggaaaaaggagagatcgaggcggagctctgctgggctaaaaaacgtctcctggaggaagcaaacaaatacgaaaagacgattgaggagctgtctaatgctcggaatttaaacaccagcgccctacagctagaacacgaacacctgatcaaacttaaccagaaaaaagatatggaaatcgctgagctgaagaagaacatcgagcagatggacacggatcacaaagaaaccaaagatgtactgagcagttccctagaggagcagaagcaactaacccagctgatcaacaaaaaagaaatcttcatcgaaaagctgaaagaacggagctctaagttacaagaggagctggataagtactctcaggcgctgcgcaaaaacgagattttgcgccagacaatcgaggaaaaagatcgctccctggggagcatgaaagaagagaacaaccacctgcaggaggagcttgagcgattaagagaagagcaaagtcgtacagcgccagtggccgatccaaaaacactagactcagtcactgagctcgccagcgaagtgagccagctcaatactatcaaggagcacttggaggaggaaatcaagcaccatcagaaaatcattgaggatcagaatcagagcaagatgcagcttctacagtcattgcaggaacaaaagaaggagatggacgaattccgctaccagcacgagcagatgaacgccacccatacgcaactgtttttggagaaggatgaggagatcaaatctctgcaaaagacaatcgagcaaataaaaacgcagcttcacgaagagcgtcaggatattcagactgacaactccgatatctttcaggaaaccaaagtgcagtcattaaacatcgagaacggcagcgagaaacacgacctgtccaaggccgagaccgagcgccttgtgaagggtatcaaagaacgagagctggaaatcaaactcctgaacgagaagaacatctcactcactaagcagatagaccagctgagcaaggatgaggtgggaaaactgacgcagattatccagcagaaagacctggagatccaggccctacacgctcgaattagctcaaccagccacacccaggacgtagtgtatctccaacaacaactccaagcctatgctatggagcgggaaaaggtctttgctgtgctcaatgaaaaaacaagagaaaacagccatcttaaaaccgagtaccacaaaatgatggacatcgttgctgccaaagaggcggcgctaatcaagctgcaggatgagaacaaaaagctatcaacaagatttgaaagttcaggccaagacatgtttagagagaccattcagaatttaagccgaattattcgggaaaaggacattgagattgatgcactcagccaaaagtgccaaactctgctggccgttctgcagacaagttcaaccggcaacgaagctggaggcgtaaactcaaatcagtttgaagagttgttgcaggaacgcgataaactgaagcagcaggtgaagaagatggaggaatggaagcagcaggttatgacgaccgttcaaaacatgcagcatgaatctgcccagttgcaagaggagttgcatcagctgcaggcccaagtgttggtggacagtgacaataatagcaagctgcaggtggattacaccggcctgattcagagttacgaacagaacgagacaaagttgaagaactttgggcaagagctagcgcaagtccagcactctattgggcagctctgtaataccaaagatctgttgctgggtaagctggatattatttccccgcagctctctagcgcatcactgctcactccacagtccgcggaatgccttagagcttctaagtccgaagtgctcagtgagagctccgagctgctgcaacaggagctggaggaactgagaaagtccctccaggagaaagacgccactatccggaccctccaggaaaataatcacaggctttcagacagcatcgccgcaaccagtgaactcgaaaggaaggagcatgaacagaccgacagcgaaatcaaacaactgaaagagaagcaggatgtcctgcagaaactgttgaaggagaaagatctgttaataaaagccaagagcgaccaactgctgtcttctaacgagaattttaccaacaaagtgaatgagaacgaactcctcaggcaggcagtgactaatttgaaggagaggatcctcatactcgaaatggatatcggcaagctcaagggggaaaacgaaaagatagtcgaaacttatcggggaaaagagaccgaataccaagccctgcaggagacgaatatgaaattctccatgatgctccgggaaaaagagttcgaatgccactctatgaaagaaaaagcgttagcatttgagcaactgcttaaggagaaggaacagggaaagacgggggaacttaaccagctacttaatgccgtgaaaagtatgcaggagaaaacggtggtgttccagcaggaacgggatcaggtgatgctggcccttaagcaaaagcaaatggagaatacagctctgcagaatgaggtccagagactacgcgacaaagagttccggtccaaccaagaactggaaagattaaggaaccatttgctagagagcgaggattcctatacccgtgaggccctcgccgccgaggaccgcgaagctaaactccgtaagaaagtgacagtgctggaggagaaactagtatccagtagcaatgctatggagaatgcatcccaccaggccagcgttcaagtggagtcattgcaggagcagctgaacgtggtgtcgaagcagagggatgagacagcactgcagctgtccgtctctcaagaacaggttaaacagtatgcgctgagcctggctaacttgcagatggtgcttgagcatttccagcaggaagagaaggcaatgtactcagcagagttggagaagcagaagcagctgattgccgagtggaagaaaaatgccgaaaacctcgaggggaaggtaatcagcctgcaggaatgtctcgacgaggcaaatgccgctctcgattcagcctcacggttgaccgagcagctggacgttaaggaggaacagatcgaggaattgaaacggcaaaacgagttgaggcaggagatgctggatgatgtgcagaagaagctcatgagtctagctaactcttcagaaggcaaagttgacaaagtgctgatgcggaacctgtttataggtcatttccatacgcctaaaaaccaacgtcatgaggtactgaggctcatgggatccatcctgggagtacggagagaggagatggagcagctctttcacgatgatcaggggggtgttacgcggtggatgacaggctggctgggaggggggagcaagtctgttccaaataccccattgagaccaaatcagcaatcggttgtgaatagttcttttagtgagctgttcgtgaaattcctggaaaccgaatcccacccttcaatcccaccgcccaagctgtcagtccacgatatgaagcctttagatagtcccggtcggcgtaagcgagacactaatgcacccgaatcgttcaaggataccgcagaaagcagatctggcagacgcaccgacgtgaatccattcctggctccccggagcgccgcagtacccctaattaatccagccggactgggccccgggggccccggccatcttctgctgaagccaatttccgacgtgctgcctaccttcacacccctcccagccctccctgataacagtgccggtgtggtgttgaaagacttactgaagcaatag

SEQ ID NO: 137864 - DNA, 5148 bp, synthetic construct
  misc_feature 1..5148: note = Description of Artificial Sequence: Synthetic coding sequence
  source 1..5148: mol_type = other DNA
atgagcgtcctgcagaacgcccaccaacaaaagctgaccgagattagccggaggcatagagaagagctcagtgattatgaagagaggattgaggagttggagaatttgctgcagcagggaggttctggtgttatcgaaacggacctgtccaaaatttatgaaatgcaaaagaccatccaggtccttcagatagaaaaggtagagtccacgaagaagatggagcagttggaagataagattaaagatattaataagaagcttagttccgctgagaatgatcgtgacatcctaaggagggaacaagaacagctaaatgtggaaaaacgccaaatcatggaggaatgcgagaatcttaaactcgagtgcagcaagctacagccatcggctgtgaaacagagcgacacaatgactgagaaagaaaggattcttgcacagtcagctagcgtggaagaagtttttagactgcaacaagctttatctgacgccgagaatgagatcatgaggctgagctctctgaatcaagaagaacttcaaatgtccctcctgaaattgaataatgagtacgaagtgatcaaatcaactgctacccgggacatttcgttagactccgagctgcacgatctgcggctgaatctagaagcaaaggagcaagaattaaaccaatccatttcagagaaagagacactcattgcagaaatcgaggaacttgaccgacagaaccaggaagctacaaagcacatgatactcataaaagatcagctgagtaaacaacaaaacgaaggggactctattatctccaaattaaagcaagacctgaacgacgagaagaagcgggttcaccagttggaagatgacaagatggatatcaccaaagagcttgacgtccaaaaagagaagctcatacagagcgaggtggctctgaacgatctgcacctgacaaagcagaaactggaggacaaggtggagaatctggtcgatcaactcaacaaaagccaggaaagcaatgtaagcattcagaaagagaatcttgaactgaaggaacacatcagacagaatgaagaggaactttctaggatccgcaatgagcttatgcaatctctcaatcaggattcgaattctaatttcaaggatacactcttgaaggagagagaggcggaggtgcgaaaccttaagcaaaacttgtctgagctggagcagctgaacgagaacctgaaaaaggttgccttcgatgtgaagatggagaacgagaagctagtgctggcgtgcgaagacgttaggcaccagctggaggaatgccttgcaggcaataatcagcttagcctggagaagaataccatcgtggagacgttaaaaatggagaaaggagagattgaggccgagctttgttgggctaaaaaacgcctgctggaggaggcaaataaatatgagaaaacaatcgaggagctgtctaacgctcggaaccttaacacttcagccctgcagctggaacatgagcaccttattaaacttaatcaaaagaaggatatggaaatagccgagttgaagaagaacatcgagcagatggacaccgaccacaaagagaccaaagacgtgctctcttctagtctggaggaacagaagcaactgactcaactgatcaacaaaaaagagatcttcatcgaaaagctcaaagaacggtcttccaagctgcaagaggagctcgataaatactcccaggctctccggaagaacgaaattctacgccaaaccatcgaggaaaaagatcgatcactcggatctatgaaagaagagaacaatcatctgcaagaagagttggaaaggctgagggaggagcaaagtcgaacagccccagtcgccgatcccaagaccctggactccgtgaccgaacttgccagcgaggtgtcccagttgaataccatcaaagagcacctggaggaggagattaagcatcatcagaagatcattgaggaccagaaccagtctaaaatgcagctgcttcagtctctacaggagcagaagaaggagatggatgagtttcgataccagcacgaacaaatgaatgccactcacactcaactgtttctggagaaagatgaggagattaaatcactccaaaaaacaatcgagcagattaagactcaactgcacgaggaaaggcaagacatccagactgacaacagtgacattttccaggagacaaaagtccagagccttaatatcgaaaatggctctgaaaaacacgacctttctaaagccgaaactgagcggctggtgaaaggaataaaagaaagagagctggagatcaagctgctcaacgagaaaaacatttcacttacaaaacagatcgatcaactcagcaaggacgaggtgggcaagttgactcaaattattcagcaaaaagacctggagattcaggccctgcacgctagaataagttccacttcacatacacaggatgtggtctatctgcagcagcaactccaggcttacgccatggagcgagaaaaagtgtttgcagtactgaacgagaagacacgggagaacagccatctgaaaacggagtaccacaaaatgatggacattgtcgcggccaaggaagctgccctgatcaagctgcaggatgaaaacaagaaactgagcaccagattcgagtcttccggacaggatatgttcagagagactattcagaatctgtcccggatcattcgggagaaggacatagaaatcgatgctctctcgcagaagtgtcagaccctgctggccgttctccaaacatctagtaccgggaacgaagcggggggtgtgaactctaatcagtttgaagagctgctccaggaacgcgacaaattgaaacaacaggtgaagaaaatggaggaatggaagcagcaggtgatgacaacggtacagaatatgcaacacgagtccgcccaattacaggaagagctccatcaactccaggcgcaagtgctcgtggactcagataacaactcaaagctgcaagttgattataccggcttaattcaaagttacgagcaaaacgaaaccaaacttaaaaattttggccaagaactagcccaagtccagcactcaatagggcagctttgtaacactaaagaccttttgctcgggaagttagacataatctctccccagctgtcttcggcatcactcctcactccacagtcagccgaatgccttcgggcctctaaatccgaagtcttatctgaaagctccgagctgctgcagcaggagctggaggagctgaggaagagccttcaagagaaagatgccacaattcgcaccttgcaagagaataatcacaggctgagtgactccatagctgccacttccgagttggaacgcaaagagcatgaacagacagattcagagataaagcagctcaaggaaaagcaagacgtactgcagaaactgcttaaagaaaaagatctgttaatcaaggctaagagcgaccagcttctgagtagtaatgaaaacttcactaataaagttaatgagaatgagctgctgcgccaggcagtcacaaatcttaaagagcgcatcttgatactcgagatggatatcggaaagcttaagggcgagaacgaaaagatcgtggagacttatcgtggcaaagaaacggaataccaggctctgcaagaaactaacatgaaattctccatgatgctgcgggaaaaagagttcgagtgccacagcatgaaggagaaagccctagcctttgaacagctgctcaaggagaaagagcagggcaaaacaggcgagcttaaccagttactaaacgccgtgaaatctatgcaggagaagaccgtcgttttccagcaggaaagagatcaggtgatgctggctcttaaacagaagcagatggagaacaccgcgctacagaacgaggtccagcgccttagagataaagaatttaggtcaaatcaagaattggaacggctgaggaatcatttactggagtccgaagacagctataccagggaagctcttgctgccgaagaccgggaagctaaattgcgaaagaaggtcactgtgctggaggagaagctggtgtcgagttctaatgcgatggaaaacgcatcacaccaagcttcagtgcaggtcgagagcttgcaggaacaactgaatgtcgtgtctaaacagcgtgatgagactgcgctgcaactctccgtgagccaggagcaggttaagcagtatgcactaagccttgctaacctccagatggtcctagagcactttcagcaagaggagaaggccatgtattctgcagagcttgaaaagcagaagcaactgattgctgagtggaaaaaaaacgcggaaaatctggaaggcaaagtcatatctctgcaggagtgtctggacgaagcaaacgccgcactggactcggctagccgcctgacagaacaactcgacgttaaagaggaacaaattgaggagcttaaacgtcagaacgagttaagacaggagatgctggatgatgtccagaagaaactgatgtctttagcgaattctagcgaggggaaggtcgacaaagtgctgatgaggaacctgtttataggtcacttccacacacctaagaatcagagacacgaggtcttgagactgatgggtagtatactaggagtgcggcgggaggaaatggagcagcttttccacgacgatcaggggggtgtgacccgctggatgactggctggctgggcggcgggtccaagtcggtcccgaacactcccctccgcccaaaccaacagtctgtggtcaactcttctttttctgaattatttgtgaaattcctcgagacagagtctcacccctccatccctcctccaaagctgagcgtccacgacatgaaacctttagattctcctggccgccggaagcgcgatacaaatgcccccgagtctttcaaagacacagcagaatcacggagcggacggcgcaccgacgttaacccctttcttgctccacgatccgccgcggtcccattgatcaatcccgccgggctgggcccgggggggcccggccacctccttttgaaacccatctccgacgtgctgccgacctttactcctctccctgctctgcctgataacagtgctggtgtagtgttaaaggatctacttaagcagtag

SEQ ID NO: 137865 - DNA, 5979 bp, synthetic construct
  misc_feature 1..5979: note = Description of Artificial Sequence: Synthetic coding sequence
  source 1..5979: mol_type = other DNA
atgtccaatagacccaacaataatcccggcggctctttgcgtaggtcgcaaagaaataccgcaggagcccaaccacaggatgattctatcggaggccgcagttgcagctcctcttccgctgtcatagtgccccagcccgaggatcccgatcgggctaacacctctgaacgccagaagactggccaggtgcccaagaaggacaacagccggggggtgaagagatctgcctccccagactataacaggacgaactcacccagttcagctaaaaaacccaaagcccttcaacacaccgagagcccctccgagactaataaaccccattcaaaatccaagaaacgccaccttgaccaagagcaacagctcaaatctgcacagagcccaagtacctcgaaggcccatacacggaagagcggcgcaaccggaggctctagaagccaaaagcgaaagcggacagagagctcctgcgtaaagtcaggtagcggctccgagtctacaggtgccgaggagaggtccgcgaagcctacaaagctggccagtaagtccgcaacgagcgctaaagctggatgtagcaccataactgatagctcatcagccgccagcacctcgtcctcatcaagcgccgtggccagcgcttcctcaacagtgccaccgggtgcgagggtgaagcagggcaaagatcaaaacaaagctagacgcagcaggtctgcctccagcccgtctcctcgacgctctagtcgggaaaaggagcaaagcaaaaccggcgggtcatctaaatttgattgggctgctcgcttctcaccaaaagtgtccctgcctaaaacaaagctgagccttccgggctcttccaagagcgagacgagcaagcccgggccgtcaggcctgcaggcaaagctcgcctctctgaggaaatctacaaaaaagcgctcagaatccccccctgcagaactgccttcgctccggaggtccaccagacaaaaaacaacgggatcatgcgcttctacctctagaagaggctctgggctcggcaagcgtggtgccgccgaagcgagacgacaggaaaagatggctgacccggagtcgaatcaggaggctgtgaactccagcgccgcaaggaccgatgaagccccacagggcgccgctggggctgtgggaatgactactagtggagaatccgagagtgatgattctgaaatggggcggctccaggcccttctggaagctcgtgggttaccgcctcacctgttcggacctctaggccctagaatgagccaactctttcacagaaccatcgggtctggggccagttcaaaggctcagcagttactgcaggggttacaggcttccgacgaatcccaacagctgcaggcggtgatcgaaatgtgtcagctgctcgtgatgggcaacgaggaaacacttggagggttccccgtcaaatccgtggtgccggcactgataactctgctgcagatggaacacaacttcgacattatgaaccacgcctgtcgtgcactgacgtacatgatggaggctctaccaagatcctccgccgtcgtggtcgatgccatacctgtgtttctcgaaaagctccaggtgattcaatgcattgacgtggcagagcaggccctgactgccttggagatgctgagcaggagacattcgaaggcaattctgcaggctggtggactcgctgactgtttgctatatcttgagtttttctccatcaatgcacagcgaaatgccctcgctatcgctgctaattgctgccagtccattacgcccgatgaatttcactttgtggccgactccctgccccttctgacacaacggttgacgcaccaggacaagaagtctgtcgagtctacttgcttatgctttgctcgccttgtggacaatttccagcacgaggaaaacttgctacagcaggtagctagcaaagatttgttaaccaacgtgcaacagctgctagtcgtcacccccccaatactttcttcgggcatgtttatcatggtcgtgcggatgttttcactaatgtgtagcaactgtcctactctagcggtgcagttaatgaagcagaatatcgcggaaactctccacttccttttatgtggggcttccaacggtagctgccaggaacaaatcgacctagtccctcggagtccccaggagctgtatgagctcacgtctcttatctgcgaactgatgccatgcctgcctaaggaaggcatctttgccgtggataccatgctcaaaaaaggcaatgcccagaacactgacggtgcaatctggcagtggcgcgacgacaggggtctttggcacccttataaccgcatcgatagcagaatcattgagcagattaacgaggacacaggaactgccagagccatccaaagaaaacctaatccactggcgaactctaacacctccgggtactcagagtctaaaaaagatgatgcaagggcccagctgatgaaagaggaccctgagctagcaaagagctttattaaaacactctttggggtcttgtacgaggtatattcttctagcgccggcccagccgtccggcacaagtgtttaagagcaatactcaggatcatttatttcgccgatgccgagctgctgaaggatgtactcaaaaaccacgcggtgagctcccatatcgcatctatgctcagtagccaggatctgaaaattgtcgtcggggcactccaaatggccgaaattttaatgcagaagcttcctgacatattctccgtttacttccgccgggagggagtcatgcatcaggtcaaacacttagccgagtccgagtctctgctgaccagcccaccaaaggcttgcacaaacgggtccggatcaatgggatccacgacatccgtcagctcaggaactgcaaccgccgcgacccacgctgccgccgacttaggctccccttccctccaacattcgcgcgatgactccctggacttaagccctcaggggagattgtctgatgtgctgaagagaaagaggctgcctaagaggggaccccgacgtcccaagtacagcccacccagagacgatgataaggtcgataatcaggcgaagtcccctactacaacccaaagcccgaagagcagctttctggccagtctgaatccaaaaacctggggacggctgagcacacagtccaactcaaacaatatcgagcccgcccgaaccgcagggggcagtggactagccagggctgcctccaaagacaccatctctaataacagagagaaaatcaaaggatggatcaaagaacaggcacacaagtttgtggaacgttatttcagttctgaaaacatggacgggtccaaccctgccctgaatgtactgcagagactgtgtgcagccacagaacagcttaatttgcaagtggacggcggggctgaatgcctagtcgaaatccgctcaatcgtgtcagaatctgacgtatctagctttgaaattcagcacagcgggttcgtgaaacagctgctgctttacctcaccagcaagtccgaaaaagatgccgtatccagggaaattcggctgaagcgctttctgcacgtcttcttctcttcccccttgccgggcgaggaaccaattgggagggtggagccggtggggaatgctcctttgctggccctagttcacaaaatgaacaactgtctttcgcagatggagcagttccctgtgaaagtgcacgactttccttctgggaatggaactggcggttccttttcgctgaacaggggctctcaagccctgaaattcttcaacacccatcagttgaagtgccaactgcaacggcacccagactgcgccaacgtgaaacagtggaagggaggcccagtgaaaatagatccactggccttggtgcaagctattgaaaggtatttggtcgttaggggatacgggagggtcagagaagacgacgaggatagtgacgacgacggctctgatgaagagatcgatgagtctcttgctgctcaattcctgaactccggtaacgtccggcaccggctgcagttttacataggagaacacctgttgccatataatatgacagtgtatcaggctgtcagacaattcagtattcaagccgaggacgagcgcgaaagcacggacgacgagtccaatccactgggcagagccggaatttggacaaaaacccacaccatttggtacaagcccgtgagagaggacgaggagtcaaacaaagattgcgtcggcggtaagcgagggagagcacagacagctcccaccaaaacctcaccgagaaatgccaagaaacacgatgagctctggcacgacggcgtgtgtccgtcagtgtccaatcccttggaggtgtacctcatcccaactcctcccgaaaacattaccttcgaggacccttcgctggacgtcattctgctcctaagagttttacatgcaatctctcgctattggtattacctgtacgacaatgcaatgtgcaaagagatcatcccaacctccgaattcatcaactccaaactgacagctaaagccaaccggcagcttcaagaccctctcgtgattatgactgggaacatcccaacctggctcactgaattaggcaaaacatgcccctttttttttcctttcgataccagacagatgttattttatgttactgcgtttgaccgggatcgcgccatgcagcgcctcctggataccaatccggagataaatcagagtgattctcaagacagtcgagtcgccccacgcctagaccgtaagaaacgcaccgtcaatagggaggagctcctgaaacaggccgagagcgtaatgcaggacctaggcagttctcgcgcgatgctcgaaattcagtacgagaacgaagtcggcaccgggttaggccccacgttggagttctacgctctagtttcccaggaactgcagcgggctgacctgggactgtggcgaggggaggaagtcaccctttccaacccaaaaggctcccaggaagggaccaagtacatccaaaatttgcaaggcctcttcgccttgccttttggaagaacagcaaaaccggctcacatcgccaaagtcaaaatgaaatttcgatttctgggcaagctaatggcaaaagcaattatggattttaggctggtggacctgcccctcggattgccattttacaagtggatgcttaggcaggaaacctccctaacctcccacgacctctttgacatcgatccagtggtcgctcgctccgtctatcacctggaagatattgttcgccagaaaaaacgcttagagcaggacaagtcacagacaaaagaaagcctccagtacgcactcgaaacacttaccatgaacggctgcagcgttgaggacctgggcctcgactttaccctgcctggcttccccaatattgaactaaagaaagggggtaaagacatcccagtgactattcacaatctggaagagtacttgaggctcgtgatattttgggccctgaatgagggtgtgtccagacagttcgactcatttcgtgacggcttcgagagcgtgtttcctctgtctcatttgcaatacttttaccctgaggagctggaccagcttctgtgtggaagtaaggccgatacttgggatgctaaaacgctgatggaatgctgcaggcccgatcatgggtacactcacgactcacgggcggtcaaatttctttttgagatcctctccagcttcgacaatgagcagcagagactatttctgcagttcgtgacgggctctccacgtttgcctgttggcggatttcggtccctgaaccctccactgacaatcgtgagaaagacgtttgagtccacagaaaaccccgatgatttcctgcctagcgtgatgacatgcgtcaattaccttaaactgccagattactctagcattgagattatgagagaaaaactgcttatagcggctcgtgaaggtcaacagagtttccacctttcctag

SEQ ID NO: 137866 - DNA, 300 bp, synthetic construct
  misc_feature 1..300: note = Description of Artificial Sequence: Synthetic coding sequence
  source 1..300: mol_type = other DNA
atgagcaatcgccctaataataatcccggcggcagcctgaggaggtcccagagaaacactgccggcgctcagcctcaggacgacagcataggcggcagatcgtgtagctcttcaagcgcagtgattgtgccccagcccgaagacccggatagggcgaatacctctgaacgtcagaagactggccaggtacctaaaaaagacaattcccgaggcgttaagcgaagcgccagccccgattacaacagaaccaattcaccgtcatcagctaagaagcccaaggccttgcaacatacagaatag

SEQ ID NO: 137867 - DNA, 6123 bp, synthetic construct
  misc_feature 1..6123: note = Description of Artificial Sequence: Synthetic coding sequence
  source 1..6123: mol_type = other DNA
atgtccaacagaccgaacaataacccaggaggcagcttgcggcgaagtcagcgaaataccgccggagcccaacctcaagatgatagcataggcgggcggtctcatcttggacaggcgaagcacaaagggtatagcccacccgagagccggaaatccaactcaaaagcccccaaggtccagagcaatacaaccagcgaactctccagagggcatctcagcaaaagaagctgcagctcgtcttctgcggtgattgtgccacagcctgaagacccggatagagccaacacaagcgaaagacagaagacagggcaggtgcccaaaaaggacaattcaagaggagttaagcgatctgcatcccccgattataatcgaaccaacagtccttcaagcgcaaaaaaaccaaaagcacttcaacacaccgagtctcctagcgaaactaacaaaccccatagcaaaagcaagaaacgccacctagatcaggaacagcagttgaagagcgctcagtctcctagcacaagcaaagcccacactaggaaatctggagccacgggaggcagccgtagccaaaaaaggaagaggactgaatccagctgtgtgaagtctggaagcggttcagaatcaacaggcgccgaagagagatccgccaaacctacaaagctcgccagcaagagtgccacatctgccaaggccgggtgctccaccatcacagatagtagcagcgcagcgagcaccagtagcagtagttcagctgttgctagcgcctcctcaactgtccctcccggggcccgggtcaaacagggtaaagaccagaacaaggcgcgccgaagccggtcggcctcgtctccctcacctcgacgcagttctcgagagaaggagcagagcaagaccggtggcagcagcaaattcgactgggcagcgagattctcccccaaagtcagcctccctaaaactaaactcagcctgcccggaagtagcaagagcgagaccagcaaaccaggcccaagtggactccaagcgaaacttgcctccctgaggaaatcaactaaaaagcgtagtgagagtcctcctgccgagttaccctcgctgaggaggagcactagacaaaaaaccaccggtagttgtgcttccaccagccgccggggctccgggcttggaaagcggggcgctgctgaagctcgtagacaggagaagatggcagatcccgagagtaatcaagaagccgtgaatagttcagccgcccggacggatgaagctccgcagggagctgcggcttcttcaagtgtcgccggagctgtaggaatgaccacttccggggagtccgaaagtgatgactccgagatgggccgcctacaggccctgctggaggcccgagggctgccacctcatcttttcggaccgctgggcccccgaatgtcacagttgtttcatagaactattggctcaggcgcttcctctaaagcacagcaactgttgcaggggctccaagcctctgacgagtcccagcagcttcaagcggttatcgaaatgtgtcaattattggtgatgggcaacgaagagactcttggagggttccctgtgaaaagcgtcgttccagcattgatcacccttttacaaatggaacacaattttgacattatgaaccatgcttgcagagctcttacctatatgatggaagcactgccgcgttcctcagccgttgttgttgatgctataccggtgttcctggagaagttgcaggtcatccagtgcatcgatgtcgctgagcaggctctgactgcactcgagatgctgtctcgccggcactctaaggcaattctgcaggccggtggccttgctgactgcttgctttacctcgagttcttttcaattaacgcccagagaaatgcacttgccattgcagctaactgctgtcagagcattaccccagacgagtttcacttcgtcgccgactctcttcccctgctgacccagcggctgacacaccaggataagaaatccgtcgaaagcacgtgcttgtgctttgcgagattagtggataactttcagcacgaagaaaatctacttcagcaggtggcctcaaaagacctcctcaccaacgtccagcagctgctggtggtgacgccaccgattctctccagtggaatgtttatcatggtagtgcgaatgttttcgcttatgtgtagtaattgtcccaccctggccgtacagttaatgaaacaaaatattgctgagacgctccacttcctgctgtgcggcgcttcaaacggatcctgccaggaacagatagaccttgtgccgcgctcaccgcaggagctctacgagctgaccagcctgatttgtgaactcatgccctgcctacccaaggaggggatcttcgcagtggatacaatgctgaagaagggaaacgcccagaataccgacggtgccatctggcaatggcgggacgacagaggcctgtggcacccctacaacaggattgactcacgcatcatcgagcaaatcaatgaggacaccggcacagcacgtgctatacagcgaaaaccgaacccgctcgcaaactccaatacatcggggtatagtgagtccaaaaaggacgacgccagggcacaactgatgaaagaggatcccgaactggctaaatccttcatcaaaacgcttttcggcgtgctgtacgaggtgtactcaagtagtgccgggcccgcggtgcggcacaaatgcctgagggccattcttagaatcatctattttgccgatgcagagctgttgaaagacgttctaaagaaccacgccgtctctagccatattgcttccatgcttagcagccaggacctgaaaatcgtggttggcgccctgcaaatggccgaaattctgatgcagaaactacctgacatcttttcggtgtactttcgaagagaaggtgtgatgcatcaggtcaaacatctggccgagagcgagtccctgctgacctctccccctaaggcctgcacaaacggttccggcagcatgggcagcactacctccgtctcaagcgggactgccactgctgcgacacatgcagccgctgatctgggcagtccttcacttcaacactccagagatgactcactcgacctgtcacctcagggcaggctgagcgacgtactgaagaggaaacgccttccaaagcgtggcccccggcgtccaaagtacagccctcctcgggacgatgacaaggtcgacaaccaggctaaaagtcccactactacacagtcacctaagtctagttttttagcaagcctgaatcccaaaacctggggcaggctcagcacccaatcaaattcaaataatatcgaaccagccaggactgccggcggaagcggcctggcgcgcgctgcctcaaaagacactatcagtaataatcgcgaaaaaatcaaaggctggattaaagagcaggcccacaagttcgtggaaaggtacttctctagcgagaatatggacggaagtaatcccgctcttaacgtgctgcagaggctatgtgcggccaccgaacagttgaaccttcaggttgacgggggggccgaatgcttggtggagatccgctcaattgtgagcgaatctgacgtaagctccttcgaaattcagcactcgggctttgttaagcaattgcttctgtacctcaccagcaaatccgagaaagacgcagttagcagagaaatacgcctcaagaggttccttcacgtgttcttttcttctcctctgcctggagaagagcctatcggaagggtggagcctgttggtaatgcgcctctcctcgccctggtgcacaagatgaataattgcctctcacagatggaacagttcccagtgaaggttcacgattttcccagtgggaacggtactggtgggagcttctctttaaatcgcggctctcaggctctaaaattttttaatactcaccagctcaaatgccagttgcagcgccaccccgattgtgctaatgttaagcaatggaagggcggtcctgtgaagatagacccgcttgcacttgtccaggccatcgagaggtatctggtcgttcggggttacggtcgggttcgagaggacgacgaggactctgacgacgacgggtccgacgaggagatcgatgaaagcctggccgcccagtttctcaatagcggaaacgtgcgccatcgcctacagttctatatcggcgagcatctgctcccctataatatgacagtgtatcaggcagtcaggcagttttctatccaggccgaagacgagcgtgagtcaaccgatgacgaaagtaatcccttaggccgcgcaggaatctggactaaaactcatacgatctggtacaaaccagtcagagaagatgaggaatctaataaagactgtgtcggtggaaagaggggtagagcccaaacagcgccaacgaaaacatccccccgaaacgcaaagaagcatgatgaactgtggcatgatggtgtatgcccttctgtctctaatccactagaagtctacctgatacctactccccccgaaaatattacatttgaggacccctccttggacgttattcttctgctgcgggtcctgcatgcaatttccagatactggtactatctgtacgataacgctatgtgtaaggaaatcattcccacaagcgagtttatcaacagcaaactgacagccaaagccaaccgccagctccaggatcctttagttataatgaccggtaatattcctacctggcttactgagctgggcaagacatgccccttcttctttcctttcgacacacgtcaaatgcttttctacgtcactgccttcgaccgcgacagggctatgcagcgcctgctggataccaacccagagattaaccagagtgactctcaggactctagggtcgctccgagactggatcgcaaaaaaagaactgtgaacagggaagagttgctgaaacaagcagagtccgtcatgcaggacctgggttcatctagggccatgcttgaaattcagtatgaaaacgaggtgggcacaggacttggacccacactggaattctacgccctcgtgtctcaggaactacagagagcagatctcggcctttggcgtggagaggaggtgacactttcgaatcccaaggggagccaagaaggaactaaatacatccagaaccttcaggggctgtttgctctgccattcggacgcaccgccaaaccagctcatatcgctaaagtgaaaatgaagtttcgcttcctcggcaagctcatggccaaagctatcatggattttaggctggtcgacctgcctctgggcctgcctttctataagtggatgctccgccaagagacatcactgacttctcacgatctctttgatatcgaccccgtcgtggcacggagcgtttatcacttagaggatatcgtgcgccaaaaaaagcggctcgagcaggataagagccagacaaaggaaagtcttcagtatgcactggaaaccctgacaatgaacggctgcagcgtcgaggacctggggctagatttcacgctcccaggattcccaaatatagaattgaagaagggcgggaaggatatccctgtgacgatccataatctggaagagtatctgaggctcgtgatattttgggcgttaaatgaaggcgtttcgaggcagttcgactctttccgtgacggctttgaatccgtttttcctctgtcgcacttgcagtacttttaccccgaagagttagaccagctgttatgcggatctaaagctgatacctgggatgcgaagaccctcatggaatgttgccggccagatcacggatatacacacgattcacgagcggtcaaatttttgtttgagatccttagctcatttgataacgaacaacaacgactgttcctccagtttgtgactgggtccccccggttgccagtgggcggctttaggagcctgaatcctcccctgactatcgtcagaaagacgttcgaatcaaccgaaaacccggatgactttttaccctcagtgatgacttgcgtgaattatctgaagctgccagattactcgagcatcgagattatgagggaaaaactgctgatagcagcgcgcgaaggacagcagtctttccacctctcatag

SEQ ID NO: 137868 - DNA, 5169 bp, synthetic construct
  misc_feature 1..5169: note = Description of Artificial Sequence: Synthetic coding sequence
  source 1..5169: mol_type = other DNA
atgagtaatcggccgaacaataatcccggaggctcattgaggcggagccagcgaaatacagcgggtgctcagcctcaagatgacagcatcgggggaagcaggcggggctccggacttggtaagcgcggtgccgccgaggcccggaggcaggagaagatggccgatcccgagtctaatcaggaagcggtcaactcatcagctgctcggacagatgaggcccctcagggcgcagctgctagctcctcagtggcaggcgcggttggcatgacgacctcgggcgaaagtgagtccgacgattccgagatggggcgcctccaggctttgcttgaggcccggggcctgcctcctcacctgtttggacctttgggaccccgcatgtcacagctgtttcatcgcactatcggcagtggggcctcatccaaggcacagcagttgctgcaaggcctgcaggcttccgacgagtcacagcaacttcaggcggtgattgaaatgtgccaattgctcgttatggggaatgaggaaaccttaggaggtttccccgtaaagagcgtggtccccgctctcatcacgctcttgcagatggagcataattttgatattatgaaccatgcttgcagagcgctcacttatatgatggaggccctcccaagatcctccgccgtggtggttgatgcaatacctgttttcctagagaagctgcaggtcattcagtgtattgacgtcgccgaacaagccctgaccgcgctggagatgctaagtcggcgccacagtaaggcaatcctgcaggcgggcggccttgctgactgcctcctgtacttagagtttttctctatcaacgctcagagaaatgcgcttgccatcgccgcaaattgctgccagagtatcacaccagatgaatttcatttcgtggccgatagtctccccctcttgacacagcgcctaacacaccaagacaagaaaagcgtcgagagtacctgtttgtgttttgcgcgactggtcgataacttccagcatgaggaaaacctgctgcaacaggttgcgtctaaagaccttctgaccaatgttcagcagctcctggtggtcaccccccccatcctgagttcaggcatgtttatcatggtcgtgcgaatgttcagcttaatgtgcagtaattgtcctacccttgcagtccagttaatgaaacagaacatcgctgaaacactccacttccttctctgcggcgccagtaacggcagctgccaggaacaaattgacctggtgcctcgctctccccaggagttgtacgagctgaccagtttgatctgcgaactgatgccctgcttacccaaggaaggaatttttgccgtcgacacaatgcttaagaaggggaacgcccaaaatacggatggagcaatttggcaatggagagacgatagaggtctatggcacccttataaccggatcgatagccggatcatcgaagccgctcaccaggtaggagaagacgaaatctccctgtccaccctgggacgcgtgtacactatagattttaactcgatgcagcagattaatgaagacactggtactgcgcgcgcaatccaaaggaagcctaaccctctggccaattctaacacctctgggtattctgaatcaaagaaagacgacgccagagcacagctgatgaaggaagacccagaacttgccaaatccttcataaagaccctgtttggagtactgtatgaggtatactcttcctctgctggccctgctgtcaggcataagtgtctcagggctattctgcgaatcatttactttgccgacgccgaacttctaaaggatgtcctaaagaaccatgctgtgtcgtcacacatcgcaagcatgctctctagccaggatctaaagattgtcgtgggggctttgcagatggctgagatactaatgcaaaagctgccagacatctttagtgtgtattttcgacgagaaggagtgatgcatcaggttaagcacttggctgagtctgagagtcttctgacctcacctcccaaagcctgtacaaacggaagcggatcaatgggcagcacaaccagcgtgtcctctggcacagcaacagcagccactcatgctgcagcagatctggggtctccgagtttacaacactcccgcgatgatagcttggatctaagtccccaaggcagactcagcgatgtgctaaaaagaaaaagactacccaagagaggcccacgccggcccaaatactcccctcctcgggatgatgataaggtggacaaccaagctaaatcaccgacgacgactcagagccccaagagttcctttctcgcgtcattaaatccgaagacctggggacgtctgagtacacagagcaattcaaacaacattgagcccgccaggaccgccggggggtctggactcgcccgagccgccagtaaggataccatttccaacaaccgggagaaaattaagggctggatcaaagagcaagcacataagtttgtggagcggtatttctcgagtgagaatatggacggatccaatccggctttaaatgtgctacagaggctgtgcgccgctactgagcagctgaacctgcaggtcgatggaggtgctgagtgtctagtcgaaatacgaagtatcgtgtccgaatctgatgtctcgagcttcgagatacagcattccggttttgttaagcagctacttctgtaccttacctctaagagtgagaaagacgctgtgagcagggaaatccgattaaaacgattcttgcacgtcttcttttcctcgccgttacccggcgaggaaccgatcggaagagtcgagccagtgggcaacgccccgttgctcgcgctggtgcataagatgaacaattgtttgagccagatggagcagttcccagtgaaggtccacgatttcccgtccggaaatggcaccggggggagcttctctctgaaccgcggttcacaggcgctgaaattttttaacacacaccagctgaaatgccaactgcagaggcaccccgattgtgccaatgtgaagcaatggaaaggcgggcccgtgaagatcgacccattggccctggtacaggcgatagaacgttacctcgtcgtgcgcggctatgggcgcgtgcgagaagacgacgaagacagcgatgacgatggaagcgatgaagaaattgacgaaagtctagctgctcagttcttaaacagcggaaacgtgcggcatagacttcagttctatattggggagcatcttctaccatataacatgactgtctaccaggctgtccgacagttcagtatccaggctgaagacgagagggaaagcactgacgatgaatctaaccccctcggccgagccgggatatggaccaaaactcacaccatctggtacaagcctgtcagggaggatgaggagtctaataaggactgtgttgggggaaagaggggaagagcccagacggcccccaccaaaacatcgccaagaaatgctaaaaagcatgatgaactctggcatgatggggtgtgtccctctgtcagcaaccccctggaagtgtaccttatcccaactccccctgaaaatatcacttttgaggacccctcgctagatgtcattcttctcctccgggtacttcatgccatttcccgctactggtactatctgtacgacaacgcaatgtgcaaggaaatcatccccacatccgaatttatcaattctaagcttaccgccaaagctaatcgccagctacaggatcctctcgtgatcatgacgggtaatatcccaacctggcttacagaattaggcaagacttgcccattcttttttccattcgacacacggcagatgcttttttatgtgacagcgttcgaccgcgatagagcaatgcagagacttctggatacaaaccccgagataaaccagtccgacagccaagacagccgggtggcaccccgcctcgacaggaagaagcgtaccgttaatcgggaggaactcctgaaacaggctgaatctgtcatgcaggacctagggtcctcccgggctatgctcgagattcagtacgagaatgaggttggaactggactgggcccgacactggagttctatgccttagtgagccaggaactgcaacgtgctgatcttgggctatggcggggggaagaagtgacccttagcaaccccaaaggaagccaggagggaactaagtatattcagaatctgcagggcctgtttgcgctgccctttggccgcactgctaaacccgcccacatcgcaaaggttaaaatgaaattcaggtttctgggaaagttgatggctaaggccattatggatttcagactggtggatctgccccttggcctgccgttttacaagtggatgcttcgtcaagaaacgagtctgacaagccacgatctgtttgatattgatccagtcgtagctaggtctgtgtatcatctagaagacatcgtgcgtcaaaaaaaacgtctggagcaggacaagtctcagaccaaggagagccttcagtatgccctagaaacattgaccatgaatggctgctctgttgaggacctgggactggacttcactttaccaggttttccaaatatcgagctcaagaaggggggcaaagatatccctgtgaccatacataacctagaggaatacttgaggctagtgatcttttgggccctgaacgaaggcgttagtcgacagtttgactcttttcgggatgggtttgagtccgtgttcccactctcgcacctccaatacttttacccggaggagttggaccagctgctatgcggcagtaaggctgatacatgggacgcgaagacccttatggagtgttgcaggcccgaccacggttacacacacgactcaagagccgtgaagttcctctttgagatcttatcctccttcgataatgagcagcagagactattcctgcagtttgtgacaggcagtcctaggttgccagtgggcgggttcaggtctctgaatcccccactgacaatcgtgagaaagacattcgagagtaccgagaaccccgatgactttctgcctagtgttatgacttgcgtgaattatctgaagttgccggactacagctctattgaaattatgagggagaagttgcttatcgccgccagagaagggcagcagtcattccaccttagttag

SEQ ID NO: 137869 - DNA, 450 bp, synthetic construct
  misc_feature 1..450: note = Description of Artificial Sequence: Synthetic coding sequence
  source 1..450: mol_type = other DNA
atgtccaacagacccaataataacccgggcggcagcctgcgtaggagccaacgcaacaccgcaggtgctcagccacaggatgactcaatcggcggcaggtcatgttccagtagctccgctgttatcgtgccacaacccgaggaccctgaccgggccaatacatccgagcgacagaaaaccggtcaggtgcccaagaaggacaactcacgaggggtgaaacgctccgcatcccccgactataaccgcacaaacagcccaagctccgcaaaaaaacccaaggcacttcaacacactgaatccccatcagagactaacaagccccatagcaaatccaaaaaaagacatttagaccaggaacagcagctgaaatccgcccagtctccaagcacttccaaagctcatactagaaagtcgggcgctaccgggggctcgcggtcccagaagaggtag

SEQ ID NO: 137870 - DNA, 465 bp, synthetic construct
  misc_feature 1..465: note = Description of Artificial Sequence: Synthetic coding sequence
  source 1..465: mol_type = other DNA
atgtctaaccggcccaacaataatccgggcggtagcctccggcgttcacagcgaaacactgctggggctcagccacaggacgattcaattggcgggcgcagctgcagctcttcatctgcagtcatcgtaccacagccagaggatcctgaccgcgccaatacatcggagcgccagaaaaccgggcaggtgcctaagaaagacaacagcagaggcgtaaaacgatctgcctcgcccgactacaatcgaaccaatagcccttcaagcgccaaaaagcccaaagccctccagcacaccgaaagcccatctgagaccaacaagcctcatagcaagtccaagaaacgccacctcgatcaggaacaacagctgaagtccgcacaatccccaagtacatccaaggctcacacacgcaaatccggtgctacaggcgggagccggtcacaaaagaggaagcgcactgagtcttag

SEQ ID NO: 137871 - DNA, 1041 bp, synthetic construct
  misc_feature 1..1041: note = Description of Artificial Sequence: Synthetic coding sequence
  source 1..1041: mol_type = other DNA
atgtcgaacagacccaacaataacccaggtggaagtttgagacgctcccagaggaacactgcaggggcacagcctcaggatgattccatcggtggacgctcacacctcggacaagcgaagcataagggatactctccccctgagagccgaaaatcaaattccaaggcccctaaagtgcagtcaaacacaacctccgagttgtctagaggccacctatccaagagatcatgctctagtagcagtgctgttattgtcccgcaacccgaggatccggacagagccaatacatcagagcgccagaaaacagggcaggtaccaaagaaagataattccaggggcgtcaaacgtagcgcgagcccggattacaacagaacaaattcgccatccagcgccaagaagccaaaggctttgcaacataccgagtccccttcggaaactaataaaccacacagcaagagcaagaaaagacatttagatcaggaacaacaacttaaatccgcccaatcgccatccactagcaaggcacacacgcgtaagtccggagccaccggtgggtcccgtagccaaaagcggaagagaaccgagtcttcctgcgtgaagtctggctccgggtccgagtccacaggggctgaagaacgctcagcgaagcccaccaagcttgccagtaagagcgctacatctgctaaagccggctgtagcacaataactgactcttcatctgctgcgtcaacgtcctcatcatccagcgcggtcgcctcagcctctagtacagtccctcctggtgcccgtgttaagcaaggtaaggatcagaataaggcacggcgcagccggtctgcctcaagccctagcccacggagaagcagcagggagaaagaacagtccaagaccggcggttcctctaagttcgactgggccgcaagattttctcccaaagtgtctttgccaaagacaaagctgtcccttccgggatctagcaaatcagagacgtccaagccagggccgtccggtctgcaggcgaaggtgctcacctcgaaaaggtag

SEQ ID NO: 137872 - DNA, 1746 bp, synthetic construct
  misc_feature 1..1746: note = Description of Artificial Sequence: Synthetic coding sequence
  source 1..1746: mol_type = other DNA
atggccgtggccggtgccgtttccggcgagcctttggtacattggtgcacacagcagctccgcaagactttcggcctcgacgtaagcgaggagataatccaatatgtgctgtcaatcgagtcggcagaggaaattagggagtacgtcaccgacctgttgcagggcaatgagggaaagaaaggacagtttattgaggagctcattaccaagtggcagaaaaatgatcaggagttgatttctgaccccctgcagcagtgcttcaagaaagatgagattctggatggccagaaaagtggcgaccacctgaaacgcggccgtaagaagggtagaaacaggcaagaggttccagctttcaccgagccagacaccactgccgaggtcaagacaccattcgatctggctaaagcacaagagaactcaaatagtgtcaaaaagaagactaaatttgtgaacctgtacacgagggaagggcaggacagactggccgttctgctgccaggcaggcacccgtgtgactgtctcggacagaagcataaattgatcaataattgtttgatctgcggaagaattgtttgcgagcaggaagggagcggtccgtgtctgttctgcggcactctggtgtgtacccacgaggagcaagatattttgcaaagagatagcaataagtctcaaaagctgctgaagaaacttatgtctggtgtggagaattctggaaaggttgacatttcgacgaaggaccttttgccacatcaggaactgaggattaagtctggattagaaaaagccatcaagcacaaggacaagcttctggagttcgacagaacttccattcgccgtacacaagtcattgacgatgagtctgactacttcgcctcagactccaaccagtggctgtccaagctggaaagagagactctccaaaagagggaagaggaactaagagaactgcgccacgcatcccggctgagcaagaaggtcacgattgactttgcggggaggaagattcttgaggaagaaaatagcctggccgaataccacagccgtttagatgaaacaatccaggctattgctaatggcacccttaatcagccactcacaaagcttgaccgaagctccgaggaaccactaggtgttctcgtgaaccctaacatgtaccagtctcctccccagtgggtggaccacacaggcgctgcatcacagaaaaaggcgttccgaagctccgggttcgggctagagttcaatagctttcagcatcagcttcggattcaggatcaggaattccaggagggatttgatggcggatggtgtctgagcgtgcaccaaccgtgggccagcttactggtgagggggataaaaagggtggaaggtaggtcttggtacacccctcacagaggacggttgtggatagcggcaaccgcgaaaaagcctagcccccaagaggtgtccgaactccaggccacttatcgattattgcgcggaaaagacgtggaattccccaacgattacccaagtggatgtctgcttggttgtgtggatctaattgattgcttgtcccagaagcagtttaaggaacagttccccgatatctctcaggagtctgatagcccttttgtctttatttgtaaaaaccctcaggagatggttgttaagtttccaatcaagggcaatccaaaaatctggaagctggacagcaaaatccaccaaggcgctaagaaagggctgatgaaacagaataaagcagtgtag

SEQ ID NO: 137873 - DNA, 1431 bp, synthetic construct
  misc_feature 1..1431: note = Description of Artificial Sequence: Synthetic coding sequence
  source 1..1431: mol_type = other DNA
atgagtgggccaacctggcttccaccaaagcagcccgagccagcccgggcccctcagggaagggctataccccggggcacaccaggtccgcctcccgcgcacggcgctgctctgcaaccccatccaagagttaacttctgccctctccctagcgaacaatgttaccaggctcctggcggcccagaggatcggggtccagcatgggtcggatcccacggggtcctccagcatacacaaggcctcccagcagaccgagggggacttcgccctggtagcctggacgcagagattgacctgctaagctcaactctggccgaactcaacggaggacggggccacgccagtcgtagacccgatcgccaggcttatgaaccaccacctcctcccgcttataggaccggatctctgaaacccaatcctgccagccccctacctgcttctccctacggcggtcccactcctgcaagctacaccactgcctctactccagccggaccagccttcccagtgcaggtgaaggtggctcagccagtgcgcggatgtggcccaccgagacgcggcgccagccaggcaagtggacccctccctggtcctcacttcccgttgccaggacgcggtgaagtttggggacccggttatcgaagtcaacgcgagcctggacctggcgccaaggaagaggccgccggcgtcagcggccccgcaggacgaggccgtggaggcgaacatggaccccaagtccccctgtcacagccgcccgaggatgagctggataggctgacaaaaaagcttgtgcacgacatgaaccacccccccagcggagagtattttggccaatgtggtggctgcggcgaggacgtggtgggcgacggggctggcgttgtggcgctggatcgggtcttccatgtgggttgcttcgtgtgcagcacttgcagggcacagctccggggacagcatttctacgcagtcgagcgcagggcctactgtgaaggctgctacgttgcaacccttgagaagtgtgccacctgtagccagcccatcctcgaccgcatactgcgcgctatgggtaaggcctatcatcctgggtgtttcacatgcgtggtgtgccacagaggactggatggcataccgttcaccgttgatgccacttctcaaatccactgcattgaggatttccacagaaaattcgctccaagatgttcagtctgtggaggagctatcatgcctgagcctggccaagaagagactgtgagaatcgttgccctcgacaggtcatttcacataggctgctacaaatgcgaggaatgtgggctgctgctttctagcgaaggcgaatgtcaggggtgttacccattggatggacacatcttgtgcaaggcctgttctgcatggcgtatacaagaactaagcgcaacagtgactaccgattgttag

SEQ ID NO: 137874 - DNA, 1473 bp, synthetic construct
  misc_feature 1..1473: note = Description of Artificial Sequence: Synthetic coding sequence
  source 1..1473: mol_type = other DNA
atggagcagaaacctagcaaggttgaatgcgggtccgatccggaagaaaattcagccagaagtccagacgggaagcggaagcgaaaaaacggtcaatgtagccttaagacctcaatgagtggctacatcccctcctatctggacaaggatgaacagtgtgtggtctgcggcgacaaagcaactggatatcactaccggtgtatcacctgcgagggatgtaaggggttctttcgcagaaccatacagaagaatctgcacccaacttattcttgtaagtatgatagctgttgtgttatcgataaaattaccagaaaccagtgtcaactttgtaggttcaagaagtgtatcgccgtggggatggccatggacctagtccttgatgacagcaaacgggttgctaaacgcaaattaatcgaacagaaccgggaaagacggaggaaggaagaaatgatccgcagcttacaacaaaggcctgagccaacacctgaggaatgggatctgattcacatcgctacagaggctcatcggagcacaaatgcccagggatctcactggaagcaaaggcgcaagtttttacccgacgacatcggacagtctcccattgtgagtatgcctgacggcgacaaggtggaccttgaggctttttcagaattcaccaagatcattacacccgcgataacccgggtggttgatttcgctaaaaagctacctatgttcagcgagctcccctgtgaagatcagatcatcctactgaagggctgttgcatggaaataatgagtctcagagccgccgtccggtacgacccagaaagcgacactcttactctcagcggggaaatggctgtgaagagggagcagcttaaaaatggcgggctcggcgtggtgtccgatgcgatctttgaactgggaaagtctttatcagctttcaacctggacgacaccgaagtcgcactgctccaggcagtgctgctgatgtctaccgacagatctgggttgctgtgtgtggataagatcgaaaagtcgcaggaggcatatctgctggcttttgagcactatgttaatcaccggaagcacaacatccctcatttttggccaaagctccttatgaaggaacgcgaggttcagtcttccatcctgtacaagggagccgctgccgaaggacgccccggcgggtcattgggagtgcaccccgaagggcagcagttacttggcatgcacgtagtgcagggtcctcaggtgcggcagctggagcagcagctcggggaggccgggtcccttcaaggacccgtgctccagcatcaatctcccaaatcaccccaacagcgtctgctcgaactgttgcaccggagcgggattcttcacgcgcgcgcagtctgcggagaagacgacagcagtgaggcagattcaccctctagtagcgaagaagagccggaagtttgtgaagatctcgccggcaatgccgcgtccccctag

SEQ ID NO: 137875 - DNA, 1473 bp, synthetic construct
  misc_feature 1..1473: note = Description of Artificial Sequence: Synthetic coding sequence
  source 1..1473: mol_type = other DNA
atggagcaaaagccaagcaaggttgagtgtgggtctgaccccgaagagaattcggctcgatcacctgatggtaagcggaagagaaaaaacggacagtgtagccttaagacatctatgtcggggtatataccgtcttatctggacaaggacgaacaatgtgtggtgtgcggcgacaaagctacaggctaccattatcgatgtataacttgtgaaggatgcaagggttttttccgccggaccatccagaaaaacctgcacccaacttacagttgcaagtatgatagctgttgcgtgatagacaagattactcggaatcaatgtcagctttgccggttcaagaagtgtattgctgttgggatggctatggatttagtcttggacgactcaaaacgcgtggctaaaagaaaacttatagagcaaaatagagagcgaagacggaaagaggaaatgattcgcagcttgcaacaaaggcctgaaccaactccggaagagtgggatctaatccacatagcaactgaagcccacagatcaacaaatgcgcagggatctcattggaagcagcgaagaaagttcctcccggacgacattggccaatcccccattgtctctatgccagacggcgacaaggttgacctggaggcttttagcgaattcaccaaaattatcacaccagctatcacgcgagttgtcgacttcgctaaaaagctacccatgttctcggagctcccctgtgaggatcagatcattctgttgaagggatgttgcatggagattatgtccctgcgtgccgctgtgcgttatgaccctgaaagtgatacccttaccctcagcggagagatggccgttaagagggaacagcttaagaacggaggattgggggtggttagtgacgcaatatttgaactcggtaaatctctgtcagccttcaacctggacgatacggaggtggcactactgcaagctgtgctgctgatgagcactgatcggagcgggctcctgtgcgtggacaagatagagaagtcccaggaggcataccttctggcattcgagcactacgttaatcacaggaaacacaatataccccatttttggcctaagcttctcatgaaagagcgtgaggtccagagcagtatcttatacaagggggctgccgcggaaggtcggccaggggggtctcttggggtacatccagagggtcagcaactgctaggcatgcacgtcgttcaggggccacaggtcagacagttggaacagcagctgggtgaggcaggaagcctgcaagggcctgtgcttcagcaccagtctccaaagagcccgcagcagcgcctgctggagctgctgcatcggagcgggatcctccacgcaagagcggtttgcggcgaggatgactcctccgaggcagacagtccaagcagttctgaggaggaaccagaggtctgtgaagatctagccgggaatgccgcctcaccctag

SEQ ID NO: 137876 - DNA, 1233 bp, synthetic construct
  misc_feature 1..1233: note = Description of Artificial Sequence: Synthetic coding sequence
  source 1..1233: mol_type = other DNA
atggagcagaagccatctaaggtcgagtgtgggtcagatcccgaagaaaactctgcaagaagtcctgacggaaagagaaagagaaaaaacggtcaatgctctctgaagacttccatgtcaggatacatcccttcttacctagataaagacgagcagtgtgtggtttgtggggacaaggctactgggtaccactacaggtgtatcacttgtgaaggctgcaagggattcttccgacgaaccatccagaagaatctccatcctacttactcatgcaagtatgactcatgctgtgtgatagataaaatcactagaaaccagtgtcagctctgtcgcttcaagaagtgtatcgctgtaggtatggctatggatcttgtcttggacgactctaaacgcgtagcaaaacgcaaattgattgaacagaaccgcgagaggcgtaggaaggaagaaatgatcagatccttacaacagagaccagagccaacccccgaggagtgggacctcatccatattgccactgaggcacataggtcaactaacgcccaggggtcccattggaaacaacggagaaagtttctgcccgatgacataggccagagtcctattgtctcaatgcctgacggcgataaggttgacctggaagctttcagcgaattcaccaagattataacccccgccatcacaagagtggtagattttgccaagaagctgcctatgtttagcgagctcccgtgtgaagatcagataatcctcctaaaaggttgctgtatggaaattatgtccctcagagcagcggtcagatacgatcccgagtcagatactctgactttgtctggggaaatggcagtgaagcgggaacagctgaaaaacggcgggcttggagtcgtgagcgacgccatatttgagctgggcaaatccctgagcgcatttaatctagacgacactgaggtggccttgctccaggcagtgctgctcatgtctacagaccgaagcggtctgctatgcgtagacaagatagagaagagccaggaagcctatctgcttgcttttgagcactacgtaaaccatagaaagcacaatatcccacatttttggcctaagctgttgatgaaggtgactgatctgagaatgattggggcatgtcacgctagccggtttttacacatgaaggtagagtgccccaccgagctttttccacccctgtttctggaggtgtttgaggatcaggaggtgtag

SEQ ID NO: 137877 - DNA, 1233 bp, synthetic construct
  misc_feature 1..1233: note = Description of Artificial Sequence: Synthetic coding sequence
  source 1..1233: mol_type = other DNA
atggagcagaaacctagcaaggttgaatgtggtagtgaccccgaggagaactctgcgcgctctcctgatggaaaacgaaagcgtaaaaatgggcagtgctcacttaagacttcaatgtccggctacatcccaagctatctggataaggatgaacaatgcgtggtgtgcggggacaaggccaccgggtaccactaccgctgtatcacctgtgaggggtgtaagggtttttttcgtaggactatacaaaagaaccttcaccccacttattcctgtaagtatgacagctgttgtgtaatagataagattacacgaaaccagtgtcagctgtgcaggttcaaaaagtgtatagctgttggcatggcgatggacttggtcctcgatgatagtaagcgggtcgccaagagaaaactcatcgaacagaacagagagagacggaggaaagaggaaatgatccgttccttgcagcagcggccagaaccaacgcccgaagaatgggatctgattcatattgcaacagaggcacatcgaagcacaaacgctcagggaagtcattggaaacaaaggcggaagtttctccctgacgacattgggcagtccccaattgtatcgatgcccgatggagacaaggttgacctggaagccttttccgagtttaccaaaattatcacaccagctatcactcgggtcgtcgactttgctaaaaagctgccgatgttcagtgagttgccctgcgaagatcagatcatccttcttaaaggctgctgtatggagatcatgtctttgagggctgcagtgaggtacgaccccgagagcgacaccctgacgctctctggcgagatggcagtgaagcgtgaacaactaaaaaatggcgggctgggagttgtctcggacgctattttcgagcttgggaagagtttgagtgctttcaacctcgatgacacagaagtggctctgctccaggcagtgcttttaatgtctactgatagaagcggacttctgtgcgtagacaagattgagaagagtcaagaggcttacctgctcgctttcgagcactacgttaaccacagaaagcacaatatcccacacttttggccaaaactgctcatgaaagtaaccgacctgcgcatgataggtgcatgtcatgcaagtcggttcctgcatatgaaagtggagtgtcccaccgaacttttccctccgctcttcctcgaggtgtttgaagaccaggaagtctag

SEQ ID NO: 137878 - DNA, 1386 bp, synthetic construct
  misc_feature 1..1386: note = Description of Artificial Sequence: Synthetic coding sequence
  source 1..1386: mol_type = other DNA
atgacgccgaactcaatgactgagaatgggttaaccgcctgggataagccgaaacattgtccggatcgagaacacgactggaagctggtgggcatgagtgaggcctgtctgcacagaaaatcgcatagcgaacgtaggtctacactgaaaaatgagcaatcctctcctcatctgattcagactacatggacctcctcaatctttcacttggatcacgatgacgttaatgatcaaagcgtcagtagcgcccagacttttcagaccgaggagaagaagtgcaaggggtacatcccttcatacctcgacaaggacgaactatgcgtggtgtgcggtgacaaagccacaggttatcactacaggtgcataacctgtgagggatgcaagggattcttccggcgaaccatccagaaaaatctgcatccctcatatagttgcaaatatgagggcaagtgtgtgatcgataaggtgactaggaaccaatgccaggagtgccggtttaagaaatgtatctacgtagggatggcaaccgatttggttttggatgactctaaacgattagctaagcgaaaattaattgaggagaatcgcgaaaagcgccggcgggaagagctgcaaaaatctatcgggcacaagccagagcccacagacgaagaatgggagttgattaagacagtcaccgaagcacacgtggccacaaacgcccagggatctcactggaagcaaaaaaggaagttcctgcccgaggatatagggcaggccccaattgtgaacgctcctgagggaggtaaggtcgacctcgaagccttctctcactttactaagatcattaccccagccatcacaagggtcgtcgattttgcaaaaaagctccccatgttttgcgaactgccatgcgaagaccagattatcttactgaagggatgctgtatggaaatcatgtcactgagagccgccgtgcgctacgaccctgagtccgagaccttaacgctaaatggagagatggctgtgacgagggggcaactgaaaaacggcggtctcggggtggtatccgatgccatctttgatcttgggatgagcctgtcatctttcaatttggatgatacggaagtcgcgttactccaagccgttctgcttatgagtagtgatagacccgggctcgcttgcgttgaacggattgagaagtatcaggattcattcctactggcctttgagcactatatcaactacagaaagcatcacgtgactcatttctggccgaagttgctgatgaaggttaccgacctccgcatgatcggagcttgccacgcgagcaggttcttgcacatgaaggtggagtgccctaccgaactgttcccacccttatttctcgaagtattcgaagattag

SEQ ID NO: 137879 - DNA, 1386 bp, synthetic construct
  misc_feature 1..1386: note = Description of Artificial Sequence: Synthetic coding sequence
  source 1..1386: mol_type = other DNA
atgactccaaactctatgactgaaaatggcctgactgcctgggataaacctaagcattgccctgatcgggagcacgactggaagttggttggaatgtctgaagcttgcctacacaggaagagccacagtgaaaggcgcagtactctgaagaacgagcagagcagcccccacctcatccagactacttggaccagcagtatcttccacttggatcatgatgacgtgaatgaccagagtgtttccagcgcccagaccttccagacagaagagaagaaatgcaaaggctatattccgagctatctggataaagacgaactctgtgttgtgtgcggcgacaaagcaaccgggtaccattacaggtgtatcacatgtgagggctgcaagggcttttttcggcggacaatccaaaagaacctgcatccctcgtatagctgcaaatatgaaggaaagtgtgttattgataaggtgacccgtaaccaatgccaggaatgccgcttcaaaaaatgtatttatgttggaatggccacggacttagtgctggacgatagtaagcgtttagcaaaacggaaactcatcgaagaaaatagggagaagcgacgtagggaagaactgcaaaagtcgattggccataagcctgagccaacagatgaggagtgggagttaataaagacggttactgaggcccacgtcgccacgaacgcgcagggctcacactggaagcagaaaagaaagttcttaccagaggacatagggcaggcacctatagtgaatgctcccgagggtggaaaggtagatctcgaagcgttttcacattttacgaaaattatcactcccgctatcacgcgggtggtcgacttcgccaagaaacttcctatgttttgtgaactcccttgcgaggaccagatcatcctgctcaagggctgctgcatggaaataatgtcactgagggctgccgtgcgttacgacccggagtccgagacactgaccctcaacggagagatggcagtcacgagaggacagttgaaaaacggcggcctgggcgtagtttcagacgcaatctttgacttggggatgtccttgagctccttcaacctcgatgatactgaagtggccctccttcaggctgtcctcctgatgtctagcgacaggcccggacttgcttgcgtggaaaggatcgaaaagtaccaggacagctttttattagctttcgagcactacattaattatcgaaaacaccatgtcactcacttttggcccaagctgcttatgaaggtgactgacctcaggatgatcggggcctgtcacgccagccggttcctgcatatgaaggttgagtgccccaccgagttgtttcctccactgtttctggaagtcttcgaagactag

SEQ ID NO: 137880 - DNA, 1386 bp, synthetic construct
  misc_feature 1..1386: note = Description of Artificial Sequence: Synthetic coding sequence
  source 1..1386: mol_type = other DNA
atgaccccaaacagtatgaccgaaaacggcctgacagcttgggacaagcccaaacactgccctgaccgggagcatgactggaaactggtaggaatgtccgaagcctgtcttcacaggaagtcacacagcgaaagacgtagtaccctgaaaaatgaacagtcatcaccacatctaatccagaccacatggacaagctctatattccatttggatcacgacgatgtgaacgaccagagtgttagctcagctcagacctttcagactgaagaaaaaaagtgcaaggggtacattccaagctatctggataaagatgagctgtgtgtggtgtgcggcgataaggctaccgggtatcattaccgttgcataacctgcgagggatgcaagggtttctttcggagaaccatccagaagaacctgcacccatcttatagctgtaaatacgaaggcaagtgcgtgatcgacaaggtgactaggaatcaatgccaggaatgtcgctttaagaaatgcatatacgtgggcatggccacggacctcgtgcttgacgacagcaagaggctcgccaaacggaagcttatcgaggagaaccgggaaaagcggcgacgcgaagagttacaaaagtccatcggtcataaaccagaacccactgatgaggagtgggagctgattaaaacagttacagaggcccacgtcgctacgaatgctcagggctcccattggaagcaaaagagaaagttcctccctgaagatatcggacaggctccaattgtcaacgcaccagagggtggcaaagtggatctggaggcattctcccacttcaccaagatcattactcctgcgataaccagggttgtggattttgctaagaagctgcctatgttctgtgagctcccatgtgaggaccaaataattctgctgaaggggtgttgcatggaaattatgtctctgagggctgccgtccgctatgaccccgagtcagaaacgttaacccttaatggcgaaatggccgtgacgaggggtcagttaaaaaatggaggcctgggcgtagtcagcgacgccatatttgatctgggtatgagcctgtcctcgttcaatctggacgacacagaggtggcactcctgcaggctgttttactaatgtcatctgacaggcccggacttgcatgcgtggagagaatcgaaaagtaccaagatagcttcctgctggcatttgagcactatatcaattatcgcaaacaccacgtaacacacttctggccaaaactgctgatgaaagtcaccgatttgaggatgatcggcgcttgtcatgcctccaggtttctccacatgaaggtggaatgtccaaccgagttgttcccgccactttttcttgaagttttcgaagattag

SEQ ID NO: 137881 - DNA, 87 bp, synthetic construct
  misc_feature 1..87: note = Description of Artificial Sequence: Synthetic coding sequence
  source 1..87: mol_type = other DNA
atgaccccaaactccatgaccgaaatggctttgcaacccggcacaaatagaagcactgtgcagactgaaaataccactgggtcctag

SEQ ID NO: 137882 - DNA, 366 bp, synthetic construct
  misc_feature 1..366: note = Description of Artificial Sequence: Synthetic coding sequence
  source 1..366: mol_type = other DNA
atgacgcccaatagcatgactgaaaatggcttgacagcttgggacaagcccaagcattgtcctgacagggagcacgattggaagcttgtcggcatgagtgaggcttgcctgcacaggaaaagccacagtgagcgcaggtcaaccttgaagaatgagcagtcatcccctcacttgattcaaaccacctggaccagcagtatcttccacttggaccatgatgatgtcaatgatcagtcagtgagctcagcacagacattccaaaccgaggagaagaagtgcaaaggctatatcccctcctaccttgacaaagacgagctttgtgtggtgtgtggcgataaggccaccggataccattacaggtgttag

SEQ ID NO: 137883 - DNA, 441 bp, synthetic construct
  misc_feature 1..441: note = Description of Artificial Sequence: Synthetic coding sequence
  source 1..441: mol_type = other DNA
atgcaagtgctgactaagagatatcctaaaaactgtctgctgactgtgatggatcgatacgccgctgaggttcacaatatggagcaggtagtgatgattccatctctcctccgggatgtacagttgagcgggccaggtggccaggcacaggcagaggcccccgacctctacacatacttcacaatgcttaaagccatttgcgtcgacgtggatcacggccttcttccccgcgaggaatggcaggcaaaggtcgcggggtccgaggagaacgggactgctgagacggaagaggtggaggatgaatctgcctccggagaactcgatctggaagcacagtttcacctgcacttctctagtctgcaccatatcctgatgcatcttactgagaaggcgcaggaagtgacacgaaagtaccaggaaatgacaggccaagtctggtag

SEQ ID NO: 137884 - DNA, 2802 bp, synthetic construct
  misc_feature 1..2802: note = Description of Artificial Sequence: Synthetic coding sequence
  source 1..2802: mol_type = other DNA
atgagggctctcgccgttttgtccgttaccctggtgatggcttgcactgaggcattctttccctttattagcaggggcaaggagctcctttggggcaaacctgaagagagccgcgtttcgagcgttttggaagagagcaagagactggtcgatactgccatgtatgcaaccatgcaacgtaatctcaagaaacgagggatactgagtcccgctcagcttctaagcttcagtaaacttcccgaacctaccagcggagtgatcgccagggccgcggaaattatggaaactagcattcaggccatgaagcggaaagtgaacctcaagacccagcaatctcagcacccaaccgatgcactctctgaagaccttctgtctataatagctaatatgagcggttgcctgccctacatgcttcctcccaaatgcccgaacacctgtttagccaacaaatacagacccattactggggcctgcaacaaccgtgaccacccccgctggggagcttccaatactgcgttagctagatggttgccaccggtgtatgaggatgggttctcccagcctcgcggctggaatccaggtttcctgtataacgggttcccactcccccctgttcgggaagtaacaaggcacgtgatccaggtctcaaacgaagttgtcaccgatgacgatcgatacagcgacctgcttatggcttggggccagtacatcgaccacgatattgcttttacaccgcagtcgaccagtaaggccgccttcggtggcggtgctgattgccagatgacttgtgagaaccagaatccatgtttcccaatccagctgcccgaggaggctaggccggccgccggcacagcctgcttgcccttttaccgttcttcagcggcctgtggaacaggcgaccagggtgctctattcgggaatttgtccaccgctaatccccggcagcaaatgaacggacttaccagtttcctagatgcatctaccgtatatggaagtagcccagccctcgagcggcagctcagaaattggacttcagccgagggtttgctcagagtccatgccaggctccgagattccggccgagcttatctcccattcgtgccaccacgtgcgcccgctgcctgtgctccagaaccaggtattccaggagagacgaggggcccctgttttctagccggtgacggtagagcatctgaagtgccctccctaactgccctgcacactctatggctgcgggagcacaaccgtctagccgctgcacttaaagcccttaatgcacactggtcagccgacgccgtttaccaggaggccaggaaagttgtcggagccctgcaccaaatcatcaccctgcgggactatattccccggattctagggcctgaggcctttcagcagtatgtggggccctatgaagggtatgattccacagccaaccccaccgtttccaacgttttttccacggccgcgttccgttttggtcatgccacgatacatcctctagtgcggcgtcttgatgcatcctttcaggagcaccctgatctgccaggcctttggctgcatcaagcgtttttctcgccttggaccctactgcgtggaggggggctggacccactgatcagaggtttgctcgccaggccggcaaagctgcaggtgcaggatcagctcatgaatgaagaattgacagagagactgttcgtcctgtcaaatagctccaccctcgatttggcttccataaacctacagaggggcagagaccacggactgcccggttataacgagtggcgagaattctgcgggctgccaaggctagaaacccccgcagacctaagcacggcaattgccagccgaagcgttgctgataagatcctggacctctataaacatccagacaacatcgatgtgtggttgggcggtctggctgagaactttctgccccgagcccgcactggcccgctttttgcatgcctgatcgggaaacagatgaaagccctgcgtgacggagattggttttggtgggagaacagccacgtattcactgacgcacagcgccgggagctcgaaaagcactccctgtccagagtaatctgcgacaacacaggtctaacaagagttccgatggacgcgtttcaggtcggcaagttccctgaagactttgagtcctgtgactcaattactggcatgaatctagaggcttggagggagacctttccccaagacgacaaatgcgggttccctgaaagtgtggagaatggcgacttcgtccactgcgaggagtctggcaggagagtgctggtgtatagctgccgccacggctacgaacttcagggccgagagcagcttacttgtactcaggagggctgggacttccagccgcctttatgcaaagacgtgaatgaatgcgccgatggtgcgcaccccccgtgccatgcctctgccaggtgtagaaataccaagggtggcttccagtgtctatgtgcggatccctacgaattgggcgacgacgggcgcacatgcgtggattccggccgtctgccgcgggtgacatggattagcatgtctctggcagccctgttgatcggcggatttgctgggcttacatccactgttatctgtcggtggacccggaccggaacaaaaagcactctgcctataagtgaaacgggtgggggcacccctgaactgaggtgtggaaaacaccaggccgttggtacgtccccccagcgggccgctgcacaggattccgagcaggagtcagctggaatggagggccgagacactcaccggctgccacgggctttatag

SEQ ID NO: 137885 - DNA, 2790 bp, synthetic construct
  misc_feature 1..2790: note = Description of Artificial Sequence: Synthetic coding sequence
  source 1..2790: mol_type = other DNA
atgagggctctcgcagttctgagcgtcaccctcgtgatggcctgtacggaggccttttttccatttatcagccggggcaaggagctcctttgggggaaaccggaggagtcacgcgtgagcagtgtgctcgaggagtctaaaaggctagttgatacagccatgtacgccaccatgcagcggaaccttaaaaagcgcggtatcctgagccccgcccagcttctgagtttttcaaagctgcccgagccaaccagtggcgtgatagcccgcgccgccgaaattatggaaacctcaatccaggccatgaaacggaaagtgaacctcaagacacagcagagtcagcacccaaccgatgccttgagtgaggacctgttaagcatcattgccaatatgtcagggtgtttaccttacatgcttccacctaaatgccctaatacatgtctagcaaataaataccggcctatcactggcgcctgcaacaaccgtgaccacccccgatggggggcaagtaatactgcactggccaggtggctccccccagtctacgaggacgggttttcccagcctagaggttggaaccccggtttcctgtataatggatttcctctgcctccagtacgggaagttacccgacacgttatccaggtatctaacgaggtagtcactgacgacgacagatactctgacctgctgatggcgtggggccagtacatcgatcatgacatagccttcactcctcaatctacatccaaagctgctttcgggggcggggcagattgtcaaatgacctgcgagaaccagaatccgtgcttccccattcagctgcccgaagaagccaggcccgccgctggaactgcatgtctgccgttttatcggtcatcagccgcgtgtggcacgggtgatcagggggcactgtttgggaatctgagtaccgccaacccccgacagcagatgaacgggctgacatcatttctggacgcttcaacagtgtacggaagctctccagcactggaaaggcagctgaggaattggacatccgccgaggggctcctacgagtgcacgcaagattacgggattcgggacgagcctacctaccttttgtgccccctagagcccctgcggcgtgcgcccctgaacctggcatccccggcgagactcgtggtccttgtttccttgcaggggatggtcgggcctcagaggtgccctctcttactgcgctgcacacgctgtggctcagggagcacaatcggcttgctgccgccctaaaagctctgaatgcccactggtcagccgacgcggtctaccaggaagcgcggaaagttgtaggagctcttcaccaaatcatcacccttcgcgactacatcccaagaatcctcgggcccgaagcgtttcagcagtacgttggcccatacgaggggtacgattccacagccaatccgacagtgtcaaacgtcttttctactgccgcgtttcggttcggacatgccactatccatcccctcgtccgcagattagacgcctcttttcaggagcaccccgacctgccaggtctgtggctgcaccaggcatttttttcaccctggacactgctccgcggcggaggcttagaccctctgattcgaggcctactcgcacgacctgcaaaactgcaggtgcaagaccaactgatgaatgaggagctaactgagagactatttgtgctgtctaatagctcaacactcgacctggcgtctataaaccttcagagggggcgcgatcatggcctccccggctacaacgagtggagagagttttgtggacttccaaggttggagactcctgccgatcttagcaccgcaatcgcctcccggtcagtcgcagataagatcctggacctttacaagcatccagataacatcgacgtgtggctgggtggactggcggaaaattttcttcccagagcccgcaccgggccgctgttcgcgtgtcttatcggaaaacagatgaaagccctgcgtgatggggactggttttggtgggaaaattcacatgtcttcactgacgcccagcgacgagagttagaaaagcattcacttagccgggtgatatgtgataacaccggcctcacccgcgtgcccatggacgccttccaggtgggcaaattcccggaggattttgagagttgtgatagtattaccggtatgaatcttgaggcgtggagagaaacgtttccacaggatgacaaatgtggcttccctgaatcagtggaaaatggagatttcgtgcattgtgaggagtccgggcgtcgggtgctagtttatagctgccgacacggttacgagttgcagggcagggagcagcttacctgcactcaggaagggtgggattttcaaccaccactgtgcaaggacgttaacgaatgtgctgacggcgcacacccgccttgccacgcgtctgcccggtgccggaacacaaaaggcggctttcaatgtctttgtgcagatccgtatgagcttggtgacgacggccggacctgcgtcgactcaggaaggctcccccgtgtgacctggattagcatgtcactggctgcattattgatcggaggattcgccggactgacaagcaccgtgatttgccgctggcgggttctggggtggaaagctggcattctgacaggttgccgcgaaccctctgagggtaaggtcgcgggccattgtcggactgcctcctgcagccagaaccatcggaccacactgttccagactcaagcaaaccccaagagtgctgggcgcctgttcagccagcacggctag

SEQ ID NO: 137886 - DNA, 2802 bp, synthetic construct
  misc_feature 1..2802: note = Description of Artificial Sequence: Synthetic coding sequence
  source 1..2802: mol_type = other DNA
atgagggccttggctgttctgtcggtcacattggtgatggcatgtactgaggcattttttccttttatcagccgcggtaaggagttattgtgggggaagcctgaggaaagtagagtgtctagcgtgttggaggagagcaagagactcgtggacacagctatgtacgccacaatgcagcgcaatctaaagaaacgggggattctcagccccgcccagctgctatctttctcgaaactgcccgagccaacctctggggtcattgcccgggccgcagagattatggagacaagtatccaggccatgaagaggaaggtgaatttgaagacccaacagtcccagcatccaaccgacgccctttcagaggatctgctcagcatcatagctaacatgagcggatgtctgccttatatgcttccaccaaagtgccccaacacttgtctcgctaacaaatacagacccataacaggagcctgcaacaacagggatcacccacggtggggtgccagcaacaccgcgctcgccagatggctgcctcctgtgtacgaagatggctttagtcagcctcgtggttggaaccctggatttctgtacaacggcttccctctcccacctgttagggaggtgactcgacatgtgatccaggtctctaatgaggtggtcaccgatgacgatagatattcagacctgctgatggcgtggggccaatatattgaccatgacatcgcttttaccccccagagcaccagcaaagccgccttcggagggggagcagactgccagatgacatgtgagaaccagaatccctgcttccctattcagctccccgaagaagcacggcccgcagcagggacagcctgcctcccattttataggtcttccgctgcctgtgggactggcgaccagggagcactcttcggtaacctgtctacagccaatccacggcaacagatgaacggcctgaccagttttttggacgccagtaccgtgtacggctcctcccccgccctggagcgacaacttcggaactggacctcagcagagggcctgctcagggttcacgcgagactgagagactcagggcgggcttatctgccattcgtaccgccaagggccccagcagcatgcgcgcccgaaccaggaatacccggtgagacaagaggtccgtgcttcctggcaggtgatggaagggcatcagaagttccaagtctcacagccttgcataccctttggctcagagagcacaaccggctggccgctgccctgaaagcactgaatgcccactggagcgccgacgctgtgtatcaggaagccaggaaagtcgtaggagccctacaccagatcattactctcagagactatatcccccgtatcctcggccccgaggccttccagcagtatgtgggcccttatgaggggtacgactcgactgcgaatcctactgtttctaatgttttctctactgccgcttttaggtttggccatgccactatacatcccctggtgcgacgattggatgcgagtttccaggagcacccggacctgcccggtctgtggctgcatcaggcatttttctctccttggacattactgcggggtggtggcctcgatcctttaataaggggcctcttagcgcgccctgcgaaactacaggtgcaggatcagctaatgaacgaagaactgacagaaaggcttttcgtactgagcaatagttccacattggacctagcctccatcaacctacagagggggcgagaccacggtctgcccggctataacgagtggagagaattttgtgggctccctcggttagagacaccagccgacctgtccaccgctatcgcatcaaggtccgtggctgacaaaatcctggacttatataagcaccctgataatattgacgtttggctcgggggactagcggaaaattttctccctcgcgcccgaaccgggcccttgtttgcgtgccttataggtaaacagatgaaggctctcagagacggggactggttttggtgggaaaattctcatgtgttcacagacgctcaacgccgggaactcgagaaacactccctgtcaagagtgatatgtgacaatacgggactgactcgcgtgccgatggatgcatttcaagtggggaagtttcctgaagattttgagtcctgtgattctattacgggaatgaacttggaggcgtggagggaaactttcccccaggacgacaaatgtggattccccgagtctgtggagaacggcgacttcgtgcattgtgaagaatccggacggagggtcctggtgtattcctgccgccatggctacgaactgcagggcagggaacaattaacttgtacccaggaggggtgggacttccagccccccctgtgcaaagacgttaacgagtgcgccgatggagcccaccctccttgccacgctagcgccaggtgcaggaatacaaaggggggcttccagtgtttatgcgcagacccgtacgaactgggagatgatgggaggacttgtgtagattctggccgtctgccccgggtgacgtggatcagtatgagcctggctgccctcctgataggaggcttcgccggcctgacctctacagttatttgccgatggaccagaacagggactaagtccactctgcctatctctgaaaccggtggcggcaccccagagctgagatgtggcaaacatcaggcagtaggcaccagccctcagagggccgcggcgcaagattcggaacaggagagtgccggcatggagggccgggacacccaccgcctccctagagccctctag

SEQ ID NO: 137887 - DNA, 2670 bp, synthetic construct
  misc_feature 1..2670: note = Description of Artificial Sequence: Synthetic coding sequence
  source 1..2670: mol_type = other DNA
atgcgggcacttgccgttttgagcgttacgttggtcatggcctgtactgaagcttttttccctttcatctccaggggaaaagagcttctgtggggaaaacctgaggagagcagagtctcgtccgttttggaggagagcaaaagacttgtagataccgccatgtacgccaccatgcagcgcaacctcaagaagcggggtatcctcagtccagcccagttactcagctttagcaagctccccgagccgacgagcggcgtaattgcaagagccgccgagataatggaaacctccatccaggctatgaagagaaaagtgaacctaaaaacccaacagtctcaacatccaaccgacgccctgtccgaggacctcttgtccataattgccaatatgagcggttgtcttccttatatgttaccccctaagtgccctaatacatgcctggccaataaatatcggcccatcacaggcgcgtgcaacaatcgcgatcatccacggtggggggccagcaacactgcattagcccgatggctgccaccagtgtatgaggacggtttttcacagccacgggggtggaacccagggttcctgtacaatggattcccactgccccccgtgagggaagtgaccaggcatgtgatccaagtttcaaacgaagtcgtgaccgatgacgacagatactccgacttgttgatggcttggggacagtatatagaccacgacattgcttttacgccacaaagcacgagcaaggccgccttcgggggaggcgcggattgccagatgacatgcgaaaaccagaatccatgcttcccgattcagttaccagaggaggcacgccccgctgcaggtaccgcttgcttgcctttttatcgcagctccgccgcttgtgggactggagaccagggagcattgttcggcaacctcagtaccgctaatccacggcagcagatgaatggactaaccagcttcctcgatgcctcaaccgtttatgggagcagtcccgctctggaaaggcaactccggaactggacttcggccgaaggcctgctacgcgtacacgccagactccgggactcaggccgcgcttacctaccattcgtgccccctcgagcccctgcagcttgtgcccctgaacccggcatccccggagagacaagaggtccttgtttcctggccggggatggcagggcttcagaggtgccatccctgaccgccctccatactctctggctgagggagcataatagactggccgcagccctcaaggcacttaacgctcattggagcgcggacgccgtgtatcaggaagccaggaaagtggtaggtgccctccatcagattatcaccctccgggattatataccacggatccttggtcccgaagcgtttcagcagtatgtgggcccgtacgagggctacgactccacagccaatcccacagtcagcaacgtctttagtactgctgcctttaggtttggacatgcaactatccatccacttgtgaggagactggatgcctcatttcaggaacatcccgacttgccggggctgtggctgcatcaagccttcttctcaccatggaccctgctgcgcggcggaggccttgacccactgataaggggccttttagccagacccgcgaaattacaggtgcaagatcaactaatgaacgaagagctgaccgagcgactgtttgtcctttcaaacagctcaacccttgacctggccagcatcaacctgcagcgggggagggatcatggcctgccgggctacaatgagtggagagaattttgtggcctgccccgcctggaaacaccggctgacctttcaaccgccatcgcatcccgcagcgtagctgacaagatcctggatctttacaagcacccagacaacatcgatgtctggctcggagggctagctgagaattttctgccccgggcaaggaccggacctctgtttgcatgcctgatcggcaagcaaatgaaggccctgagagatggggattggttttggtgggagaattcacatgtttttactgacgcccagaggcgggagctcgagaaacattcactgagtcgagttatttgcgataacactggtctgacacgcgtgcccatggacgccttccaggtcgggaaatttcctgaggacttcgagtcctgtgacagtattacaggaatgaacttggaggcttggagggagacattccctcaggacgataagtgcgggttcccagagtccgtggagaatggggacttcgtgcactgcgaggaaagtgggcgtcgtgtactggtgtattcatgcaggcatgggtacgaactccagggacgggagcagctgacatgcacacaggaggggtgggatttccagcctcctctgtgcaaagattctggaagactgcctagggtgacatggatttcaatgtcactcgctgcattgctgataggggggtttgcaggtctaacatctacggtgatatgcagatggacaaggactgggaccaaaagcacattgcccatcagcgagaccggaggtggcacgccagagcttcggtgtgggaagcatcaggcggtcggcacttcccctcagagagcggctgcacaggattcagaacaggaatcagctggcatggaggggcgggacacgcacaggctgccacgcgccttgtag

SEQ ID NO: 137888 - DNA, 2283 bp, synthetic construct
  misc_feature 1..2283: note = Description of Artificial Sequence: Synthetic coding sequence
  source 1..2283: mol_type = other DNA
atgcgcgcattagccgtactcagcgtaacactggtgatggcatgtactgaagctttcttccctttcatcagtcgcggcaaagagctgttgtgggggaaaccagaagaatcacgcgtttcatcggttttggaagaatccaaacgtttggttgacaccgctatgtacgctactatgcagagaaatctgaagaaaagaggcatactgtcccctgcccagctgttgtcgttttccaagctgccagagcccaccagcggtgtgatcgcgcgggctgctgagataatggaaacatcaatccaggcaatgaaaaggaaggtgaacctcaaaactcagcaatctcagcatccaacagacgcattaagcgaagacctgttgagcattatcgcaaatatgtctggctgcctcccgtacatgctgccacctaagtgccccaatacttgcctggctaataagtacagaccaataacgggagcttgcaataatcgcgaccaccctcgctggggggcttcgaataccgctctcgctaggtggcttcctccagtgtatgaggatggattcagtcaaccacgcggctggaaccccggattcctgtataatgggttcccactccctcccgttcgggaggtcaccagacacgtgatccaggtcagcaacgaagttgttactgacgacgatcggtattctgacctgttaatggcgtggggacagtacattgaccatgatatcgcattcacccctcagagcacttctaaggctgctttcggtggcggcgccgactgtcaaatgacatgtgagaaccaaaacccctgttttcccattcagattattactctgagagattacattcccaggatcctagggcccgaagccttccagcagtatgttgggccgtatgaaggctacgattccactgctaatccaacagtgtccaatgtattttcaacagccgcattcagatttggacacgccacgatccatcctttggtgcggaggctcgatgcctcctttcaggaacacccagacctgcctggactgtggcttcaccaagcatttttctctccctggacattgcttcgcggcggcggactcgacccattgattagagggctgttagcccgccccgctaaattgcaggtccaggatcagctgatgaatgaagagctgacggaaaggttgttcgtcctgtccaattcaagtaccctggacctcgcctccatcaacttacaacgtggccgtgatcatggtctgccaggctataatgaatggcgcgagttttgcgggttacctcggctggaaacccccgcagatctcagcacagcgattgcgtctagatctgtggctgacaagattctggacctgtataagcaccccgacaatatcgacgtgtggcttggtggtttggccgaaaattttcttcccagggccagaaccggacccctttttgcctgcctaatcggtaaacagatgaaagccttgagggacggggactggttctggtgggagaattcccacgtattcacagatgcccaaaggcgagagctcgagaaacactcgctctctagagtgatttgcgataacactggcctcacaagggttcctatggacgcatttcaagtgggaaaattccccgaggactttgaatcctgtgacagtatcactggaatgaacctcgaggcctggagggaaactttccctcaggacgataaatgtggcttccccgaatcagtggaaaacggcgacttcgtgcattgtgaggaaagcggtaggcgagttctggtgtactcctgcaggcacggttatgagctccagggtagagaacagttgacatgcactcaggagggatgggacttccagccccccctgtgcaaggatgttaatgagtgcgccgatggtgctcaccccccctgtcatgctagcgccagatgccgaaatacgaagggcgggtttcagtgcctctgcgccgatccctacgaactgggcgatgatggccgaacttgcgtggatagtggacgtctgccgcgggtgacttggattagtatgtccctggccgctttactgataggggggtttgccggactgacctctactgtaatttgtaggtggacacgtaccgggacaaagagcactctgcctatctcggagacggggggcggtactcccgagttgcgttgtggaaagcatcaggccgtcggtacgtccccccagcgcgccgcagcccaggactccgaacaggagtcagcgggaatggaaggcagggatactcaccgcctgccgagggctttgtag

SEQ ID NO: 137889 - DNA, 2283 bp, synthetic construct
  misc_feature 1..2283: note = Description of Artificial Sequence: Synthetic coding sequence
  source 1..2283: mol_type = other DNA
atgcgggcgttagccgtgctgtccgtcactcttgttatggcttgtactgaggctttctttcccttcatttcaagagggaaagagctactttggggtaagcctgaggagtcccgagtctcatcggtgctcgaggagagcaaaaggcttgtggatactgctatgtacgcaacaatgcaaagaaaccttaaaaaaaggggaattctgtctccagcacagctattaagcttctcaaagcttccggaacccacgtctggtgtcattgcacgcgccgccgaaattatggagacctccatccaagcaatgaaacgcaaagtgaatctcaagactcagcaatcccagcacccaactgatgctctgagcgaggacctgttatcaatcatcgctaatatgtcgggctgcctgccttatatgctgcctcctaagtgcccgaatacgtgcctagccaataagtaccggcccataacaggagcgtgcaacaatagagatcatcccagatggggcgccagtaacaccgcactagccagatggctccctcctgtctatgaggatgggttttcccaaccacgaggctggaatcccggatttctgtacaacggcttcccattaccgccggtgcgggaggtcacaagacatgtgatccaggtgtcaaatgaggttgtgacagacgatgatagatactctgatctgctgatggcatggggccagtacatcgaccacgatatcgctttcacaccgcaaagcacttccaaagcggccttcggcggcggtgctgattgccaaatgacctgcgagaatcagaacccatgctttcccattcagataatcactttgagggattatatacccaggatcctgggtccggaggcatttcagcagtacgtcgggccttacgaaggctatgattctactgctaacccaactgtctcaaacgtgttttccacagccgcgttccgcttcggccacgccacgatccatccactcgtccggagacttgacgctagtttccaggagcatccggaccttcccgggctgtggctgcaccaagcgttcttcagtccgtggaccttgctgaggggtgggggtctcgaccccctgatcagggggctgctcgcccgtcccgcaaaattacaagtgcaggaccaactgatgaatgaagagttaacagagaggctgtttgtgctctcaaactcttcaacactggatctcgcctccataaacctgcaacgtgggcgcgatcacggcctgcctggttataacgagtggagggaattttgcggcctcccaagattggagacacctgccgacttatctacagcaattgcctcaaggtcggtggctgacaaaattctcgatctctacaagcaccccgataacatagacgtgtggctaggtggcctggctgagaatttcctccccagggccaggaccggccctctgtttgcctgcctgatcggcaaacagatgaaggctctgcgggatggcgactggttctggtgggagaacagtcatgtgttcacagatgcacagagacgcgagttggaaaagcactcactgtctagagtcatctgcgacaacactggtctcaccagggtacccatggacgccttccaggttggcaagttccctgaagacttcgagtcgtgcgatagtataactggtatgaacttggaggcatggcgcgagacatttccacaggatgataaatgtggatttcctgagagtgtcgagaacggggatttcgtccattgtgaggagtcaggccgtagggtgctcgtctatagctgcaggcacgggtacgaactgcagggtcgagagcagctgacatgcactcaggagggctgggactttcaacccccattgtgcaaggatgtgaatgaatgtgccgatggagcacaccctccttgtcacgcctccgccagatgtcgcaatacaaagggtggatttcagtgtctgtgtgccgacccgtatgaactgggagatgatggcaggacatgcgtagattccggtcgccttccacgggtgacctggatcagcatgagccttgccgcgcttcttatcggagggttcgccggtctcacgtccacagtgatttgtcgctggacaaggacagggaccaaatccactctgcctatcagcgaaacaggaggggggacccccgagttacgatgtggaaagcaccaggcagtgggcacttcacctcagcgcgccgctgctcaggactctgagcaggaatccgccggaatggagggacgtgacacccatcgattaccgagggcactttag

SEQ ID NO: 137890 - DNA, 2631 bp, synthetic construct
  misc_feature 1..2631: note = Description of Artificial Sequence: Synthetic coding sequence
  source 1..2631: mol_type = other DNA
atgagagctcttgctgtgctcagcgtgaccctggtcatggcctgtaccgaggctttctttccttttatttctagaggtaaagagctattgtgggggaagcctgaggagagtagagtgtccagtgtgttggaagagagtaagcgcctggttgacacagcaatgtatgccacaatgcagcgtaatctcaagaagcgcggaatcctctctcctgcgcagcttctcagcttctcgaagcttcccgaacctacatccggtgtcattgccagagccgccgagattatggagacatctatacaggccatgaaaaggaaagtgaatcttaagacacagcagagccagcatcccaccgacgcactgtccgaggacctactgtccatcatcgcaaatatgtccggttgtctcccatatatgctgccacctaagtgtcctaacacctgtctggcaaataagtatcgacctatcactggagcttgtaataacagagatcatcctcgttggggcgcctctaacaccgcactagctcggtggctgcccccagtgtatgaggacggcttttcccaacctcgaggatggaatcctggcttcctctacaacggtttcccactgccgcccgtgcgagaagttacaaggcatgtgattcaggtctccaacgaggtggtcactgatgacgaccgctattccgatttgctaatggcctgggggcagtatattgaccatgacatcgcttttaccccacagtccactagtaaggccgcattcgggggcggcgccgattgtcaaatgacctgcgaaaaccaaaacccctgcttccctatccagcttccagaggaggctcgtcctgccgccggcacggcgtgtctgcctttttatcgttccagcgccgcatgtggaaccggggaccagggtgcgcttttcggcaacctgtcgacggccaaccccagacagcagatgaatggcctcaccagcttcctagatgcttccaccgtttatggctcgagcccagccctggagcgccaactgcggaactggactagtgcagaggggctccttagagtccatgccagactcagggattcgggaagagcctatctgccatttgtccctccccgcgccccagcggcctgtgctcccgagcccgggatcccaggggaaacacggggcccatgctttctcgctggggatgggcgggcaagcgaggtccctagtctgacagccctgcacacgctttggctgagagaacacaaccgccttgctgccgccttgaaggcactgaacgctcactggagcgccgacgccgtttaccaggaggcacggaaggtggtcggcgcactccaccagatcatcacacttagggactatatcccccgcatcctagggcctgaggctttccagcagtacgtggggccatatgaggggtacgatagcacagctaatccaacagtttcaaacgtttttagcacagccgcttttcgctttggccacgccactattcacccccttgtgaggaggctggacgcttcctttcaagagcaccccgacttgccagggttgtggctgcatcaagcattcttttccccctggactctcttacgcggcggctacaatgagtggcgcgaattttgtggcctgcctaggctcgagaccccggccgatctgagcactgccatagcgtcgagatctgtggccgacaagattttggatctttacaaacacccggacaatattgatgtgtggttaggggggctggccgagaacttcctgcccagagccagaactggacccctgtttgcttgtctaataggaaaacagatgaaagcccttagggatggtgattggttctggtgggagaattcacatgtgttcaccgatgcccagcggagagaactggagaagcatagtctttcccgagtcatctgtgacaacaccgggctcacacgggtgccaatggatgcatttcaagtgggaaagtttccagaggactttgaatcctgcgatagcataacaggcatgaacctagaagcttggcgcgagacttttcctcaggacgacaagtgcgggttccctgagtctgtggaaaatggcgattttgtccattgtgaggaaagcggccgcagggtgttggtgtattcttgtaggcacgggtacgaattgcaggggagggagcagcttacttgcacacaggagggttgggatttccaacctcctttgtgtaaagacgttaacgaatgcgcggatggtgctcatcccccctgccacgcttccgcacggtgccgcaacaccaaggggggttttcaatgtttatgtgctgatccctacgaattgggcgacgacggcagaacctgcgtggacagtggccgactaccgagggtgacatggatcagcatgtcattggccgctctgctgatcggaggctttgccggcctcacctcaacagtgatttgcagatggaccaggaccggcacaaagagtactctacccatcagtgagactggaggggggacgccagaactccgctgtggaaaacaccaagccgtcggcacttctccccagagagcagctgcccaggatagtgagcaggagagcgcaggtatggaaggccgcgatacacaccgcctccctagagccctctag

SEQ ID NO: 137891 - DNA, 519 bp, synthetic construct
  misc_feature 1..519: note = Description of Artificial Sequence: Synthetic coding sequence
  source 1..519: mol_type = other DNA
atgcgagccttagctgtcctgagcgtcaccctggtgatggcctgtacagaagccttctttcctttcatttccagaggcaaagagctgctctggggtaagccggaggaaagccgcgtttcctctgttctcgaggagagcaagagactggtggacacagccatgtacgcaacgatgcaacgaaacctgaaaaaacgcggcatcctctcccccgcccagctgctgtctttttctaagttacctgaacctaccagcggcgtgatcgcgagggctgcggaaattatggagacatcaatccaggcgatgaaacggaaggttaatttgaaaacacagcagtcacagcacccgaccgacgccctctccgaggatttgctgtctatcatcgctaacatgtccggctgcttgccttacatgctgcctcccaaatgcccaaacacgtgcttagccaacaagtacagaccaatcaccggcgcctgcaataaccgggaccatccaagatggggcgcatctaatacagcttag

SEQ ID NO: 137892 - DNA, 462 bp, synthetic construct
  misc_feature 1..462: note = Description of Artificial Sequence: Synthetic coding sequence
  source 1..462: mol_type = other DNA
atgaatggcctgacttctttcctggacgcaagtaccgtgtatggtagcagccccgctctagaacgccagctgcggaattggacaagcgcagaagggttgctgagggtgcatgcccgcctccgggactccgggcgcgcatatctcccctttgtaccccctcgcgcccctgcagcttgcgcacccgaacccggcattccaggcgaaacccgagggccatgttttctcgccggagatcctagacagaggggccccctgccagatgggacagcccatgccgtggctgctagagcccagcctcctgggcgaggtgcacaaggaccccagtgtgctcttgagcgaggacgcagagtacccggcggtgcccagggccgtggacgaagcgccccggaccatcatccggagggacttcatcctcaggaccctgggacccgtggcctgccggcagttagggggagtctatag

SEQ ID NO: 137893 - DNA, 525 bp, synthetic construct
  misc_feature 1..525: note = Description of Artificial Sequence: Synthetic coding sequence
  source 1..525: mol_type = other DNA
atgcgggctcttgccgtgctctccgtcaccctagtcatggcctgtaccgaggccttcttccccttcatctctagaggtaaagagttattgtggggaaagcctgaggaatcacgtgtgtcttctgtgctcgaagagtccaagcgactggtggatactgccatgtatgcaaccatgcagcggaatctgaagaagaggggcattctaagcccagcccagctgctgagcttctctaaactccctgaaccaacaagtggtgtgatcgctagagccgctgaaatcatggaaacctctatacaagcgatgaagcgaaaggtcaatctgaaaacacagcagtcccagcatccaactgacgccctgtctgaggatctactgagtataatcgctaacatgtcgggatgcctcccttacatgcttcctcctaagtgtcctaacacctgtctggccaacaagtatcggccaatcacgggagcctgtaataatcgcaaaatgaaatataaaccggaccacagcgagactgcgaactag

SEQ ID NO: 137894 - DNA, 2295 bp, synthetic construct
  misc_feature 1..2295: note = Description of Artificial Sequence: Synthetic coding sequence
  source 1..2295: mol_type = other DNA
atgcgcccagcggatttgctgcagctagttctcctgctcgatttgccccgggatctgggtggaatgggatgctcttccccaccatgcgaatgccatcaggaggaggattttagagtaacctgtaaagacatacagcgcatcccatccctgccgccctctactcagactctgaagttaatcgagacccatctccggacaattccaagccatgcgttttctaatctgcctaacattagtagaatatatgtgtcaattgatgtgacactgcagcagttagagagtcatagcttctacaatttgagcaaggtcacccacattgagattcggaacacccgtaacctgacatatatcgaccccgacgccctgaaagagctccctctactaaaatttttgggtattttcaatactggtctgaagatgttccccgaccttaccaaagtgtactccactgatatattttttatactcgagatcactgacaatccatatatgacctctatcccagtgaatgcatttcaaggcctgtgtaatgaaactctgaccctcaagttgtacaataatgggtttactagcgtgcagggctatgctttcaatggcactaagcttgatgccgtgtacctgaataagaataagtatcttacagtaattgataaagacgccttcgggggcgtgtactcaggtcctagcctgctcgatgtaagtcaaacttctgtcacggccctgccatccaagggtcttgagcacctgaaggagttgattgcccgcaatacttggacactgaaaaagctgcccctcagcctttcctttctgcacctgactagagccgaccttagctacccatcccactgctgcgcctttaagaaccaaaaaaaaatccgcggtatactggaatcgttaatgtgcaatgagagttctatgcaaagcctgagacagaggaaatctgtcaacgcgctcaattcacccctccatcaggagtatgaggaaaatctgggagacagcatagtgggttacaaggaaaaaagcaagttccaagatactcacaataatgcccactactatgttttctttgaagaacaggaggatgaaatcatcggcttcggccaggaactcaaaaacccccaggaagagacacttcaggccttcgattctcattacgactacacgatatgcggcgatagcgaagatatggtttgtactcctaagtcagatgaattcaacccgtgtgaggacatcatggggtataaattcttgcggattgtggtgtggttcgtaagtcttctcgccctcttgggcaatgtcttcgttcttctgatcttgttaaccagccactataagctcaatgtgccaaggttcttgatgtgtaatctggcctttgcggacttttgcatgggaatgtacctgctcttgatagcttccgtcgacctgtatacacatagtgaatattacaaccatgcaattgattggcagaccgggcccgggtgcaacaccgccggatttttcactgtatttgcctccgaactgtcagtttatacacttactgtgatcactctcgagaggtggtatgcgatcacttttgcaatgcgactcgacaggaaaatacgactccggcatgcatgtgcgattatggtcggcggctgggtgtgttgtttcctactcgccctcctgccccttgtaggaattagcagctacgccaaggtatccatctgcttgccaatggatacagaaactccactcgcattggcttatatcgtctttgtgcttaccctgaatatcgtcgctttcgtgatagtctgttgttgttatgtgaaaatctatattactgttagaaaccctcagtataatcccggagataaggacacaaaaattgcaaaacggatggctgtgctgatctttacagactttatctgcatggctcccatatctttttatgcactgagcgccatattgaacaagccgttaatcactgtttctaattcgaaaatcctgctagtcctgttctatccgttaaactcctgcgctaatcccttcctctacgccatatttacaaaggctttccagagggacgtatttattttgctctcaaagttcggtatttgcaaacggcaggcacaggcatatcgcggacagcgggttccgcccaagaattcaacagacatccaggttcagaaagtgacccacgagatgcgacagggactccataatatggaggacgtctacgaactgatcgagaactctcatctcacccccaagaaacaggggcagatttccgaagaatatatgcagacggtgctgtag

SEQ ID NO: 137895 - DNA, 762 bp, synthetic construct
  misc_feature 1..762: note = Description of Artificial Sequence: Synthetic coding sequence
  source 1..762: mol_type = other DNA
atgcggcctgcagatctgctccagctggtgcttctgctggacctgccacgagaccttgggggcatggggtgttccagtccgccctgcgaatgccatcaggaggaagacttcagagttacctgcaaggacatccagcggatcccatctttgcctcccagcacacaaaccctgaagcttattgaaacacacctcaggacgatcccctcgcacgcattcagcaatctgcccaacatctcgcgaatttatgtaagcattgatgttacactgcagcaactcgaatctcatagcttttataatctgagcaaggttacacacattgagatacggaatacacgtaatctaacctacatcgacccagatgcattgaaagagcttccactcctgaaatttctagggatcttcaacactggtcttaaaatgtttcccgatctgacaaaagtgtattccactgacatcttttttattctagagatcacggataatccttacatgacctccattccagtaaatgctttccagggcctgtgcaacgagactcttacgttgaagctttacaacaatggcttcacctcagttcagggctacgcattcaacggcacaaagctcgacgccgtgtatttgaacaaaaacaagtatttgaccgtgattgacaaggacgcttttgggggtgtctattcggggccctcactgctgctgcccctcgggcggaaaagccttagctttgagacccagaaagctcccaggtcatccatgccctcctag

SEQ ID NO: 137896 - DNA, 1236 bp, synthetic construct
  misc_feature 1..1236: note = Description of Artificial Sequence: Synthetic coding sequence
  source 1..1236: mol_type = other DNA
atgaggccagctgacctgcttcaactagtgttgctccttgaccttccgcgagacttggggggcatgggttgctcttcccctccatgcgagtgtcatcaagaagaagattttcgcgtaacttgcaaagatattcaaagaatccctagtctaccgccctccacacaaacgctgaagctaattgaaactcaccttaggattgtggtctggttcgtatcactcctggctctcctaggcaatgtgtttgtgcttttgattctcttgaccagccattacaagcttaacgtacctcgcttcctgatgtgcaatctggcttttgcagatttctgtatgggtatgtacttgctgctgattgcctctgttgatctctatactcacagcgaatattataaccatgcgatagattggcagaccggcccgggatgcaacaccgctggcttcttcacggtgttcgctagcgaattaagcgtttacaccctgactgtaatcactcttgaacggtggtacgcaataactttcgccatgagactcgatcgcaagattaggctgcgacatgcctgcgccataatggtgggaggttgggtttgttgtttcctccttgcattgttgcctctagtggggataagttcctacgcaaaggtcagcatttgcctccccatggatacggaaaccccccttgccctggcttatatcgtgtttgtcctgactctgaacatcgtcgcctttgttatagtctgttgctgttacgttaagatctatattacggtccggaacccccaatacaaccccggtgacaaggacacaaagatagccaaaaggatggcagtcttaatctttactgacttcatctgcatggcccccatctcgttttacgccctctctgccatccttaataaacccttgatcacggttagtaacagcaagatccttcttgtcctgttttatccactgaactcgtgtgccaatcctttcttgtatgctattttcacaaaggcatttcagcgcgacgtattcatcctgctttccaagtttggaatatgtaagaggcaggcgcaagcatatcgtggtcagcgagtcccccccaaaaactccactgacattcaggtccaaaaggtgacacacgagatgcgacagggcctgcacaatatggaggacgtgtatgagttaatcgaaaattctcacctgacccctaaaaagcaaggacagatatctgaagagtatatgcaaacagtgctgtag

SEQ ID NO: 137897 - DNA, 2295 bp, synthetic construct
  misc_feature 1..2295: note = Description of Artificial Sequence: Synthetic coding sequence
  source 1..2295: mol_type = other DNA
atgcgcccggccgacctgctacaactcgtgctgttactcgacctgccccgggatctcggggggatgggttgctcctcacccccctgtgagtgtcatcaagaggaagactttcgagtgacttgcaaagacattcaaaggattccttctctaccaccctccactcagaccctgaaattaattgaaactcacctgagaactattccctcccatgccttcagcaacctcccgaacattagtcgtatttacgtatccatcgatgtgactctccagcagctggagagccattccttctataatctgtccaaggttactcatatcgaaattagaaacactcgcaatcttacctatattgaccctgacgctttgaaggagctccccctgctaaagtttctcggcatattcaacacgggactgaaaatgttccctgatttaacaaaagtttatagtactgatattttcttcatcttggaaattaccgataacccttatatgacttctatccctgtcaatgcttttcagggtttgtgcaatgaaaccctgacacttaagctctacaataatggtttcacaagcgttcaagggtacgccttcaacggcactaaattggacgcagtgtacctcaataaaaataagtacctcacagttattgataaggacgcttttggtggcgtgtattccgggccatctctgctagacgtgagtcaaacatcagtgaccgcgcttccttcaaagggtcttgagcatctgaaggagctgattgctaggaacacttggacgctgaagaaactgcccctatctttgagctttctgcacctgacgagagccgacctgtcatatccttctcactgctgcgccttcaagaaccagaaaaagatacggggtatcctggaatctctgatgtgtaatgagagctccatgcagtcattgagacagaggaagagcgtgaatgccttaaattctccgctgcatcaggagtatgaggaaaacctgggagactctatcgttggttacaaagaaaaatcgaaatttcaggatacacataacaacgcccactactatgttttttttgaggagcaagaagatgagattattggattcggtcaggagttgaagaacccacaggaagagactctccaggcgtttgattcccactacgactacaccatttgtggtgattcagaggacatggtgtgtaccccaaagagcgacgagtttaacccctgtgaggatatcatgggttacaagtttctcaggattgtcgtgtggttcgtgagcttgctggctctgctgggtaatgtgttcgttcttctgattttgctcaccagccactataagctaaatgtccccaggtttctgatgtgcaacctggcttttgctgacttttgcatgggcatgtacctgctcttaatcgctagcgttgacctgtatacacattctgagtactacaaccatgcgatcgattggcaaacaggacccggatgcaataccgccggtttttttacggtctttgcctcggagctctcagtttacacattgaccgtcatcactctggagcggtggtatgccatcactttcgccatgcgactggaccgaaaaattagactgcggcacgcctgcgccatcatggtgggtggctgggtctgctgcttcttactggcgctcctgcctctcgttggaatctcatcttatgcgaaagtctctatctgcttaccaatggatacagagacccccctggccctcgcctacattgtgtttgtgctaactcttaatatagtggctttcgtgattgtgtgttgctgctatgtgaagatctatatcactgttagaaaccctcagtacaaccccggggacaaagacacaaagatagccaagagaatggccgtcctgatcttcacagacttcatctgcatggccccaatctccttctatgccttgagcgctatcctgaataagccactgattacagtgagcaacagtaagattctgctagtattgttctacccactgaatagctgtgccaatccattcctatacgccatttttacaaaggcttttcaaagggatgtatttatcctgctatctaagttcgggatctgcaagagacaagcacaagcataccgtggccagagagttccccccaaaaactccactgacatccaggttcagaaggtcacacacgaaatgcgacaaggtctgcataacatggaggatgtctatgaactgatcgagaatagccatcttacaccaaagaagcagggtcagatttccgaggagtatatgcagacagtgctgtag

SEQ ID NO: 137898 - DNA, 825 bp, synthetic construct
  misc_feature 1..825: note = Description of Artificial Sequence: Synthetic coding sequence
  source 1..825: mol_type = other DNA
atgagacctgctgacctgctgcagctcgtgctgttattggatctaccacgtgatctgggtgggatgggctgttctagccccccatgcgaatgccaccaagaggaagatttcagagtcacctgcaaggacatccaacgcatcccctctctaccccctagcacccagacactgaaactgattgagacccatctccggacgatcccgtcacacgccttcagcaatctgccaaatatttctaggatctacgtatcaatcgacgtgacactccaacagctggagagtcacagtttttataatctgagtaaggtgacccatattgagatcagaaacaccagaaatttaacctacatcgatccagatgctcttaaagagctgccactgcttaaattccttggcatttttaataccggcctgaaaatgtttccagatctaaccaaggtttattctacagacatattctttatcctcgagattaccgacaatccatacatgacaagcataccggttaacgcatttcagggcctttgcaatgagacactcacattgaaactctacaataatgggtttacgagcgtccagggttatgcgttcaatggcaccaagcttgacgccgtttatctgaacaagaataagtacctgacggtgattgacaaggacgccttcggcggggtatacagcgggccgtccttactggtggagaatgtggccgtaagtggcaaaggcttttgtaaatcattgttctcttggttgtatagactgcctttggggaggaaatctttgagctttgaaacccagaaagcgccgcgatcctctatgccgtcttag

SEQ ID NO: 137899 - DNA, 912 bp, synthetic construct
  misc_feature 1..912: note = Description of Artificial Sequence: Synthetic coding sequence
  source 1..912: mol_type = other DNA
atgagtgacgccgggggtggtaaaaagccacctgttgacccacaggcgggacccgggccgggaccaggacgggcagccggagagagagggttatccgggtcatttcctctggtcctaaagaagctaatggagaaccctcccagagaggccaggctggataaagaaaaagggaaggagaaattggaggaggatgaggccgcggctgcatctaccatggccgtgagtgcgtcactgatgccccctatttgggataaaacaattccgtatgatggggaatcttttcacttagaatatatggacctcgacgagttcctgctggagaatgggatccctgcttcccctacgcacttggcccacaacctcttgcttcccgtcgcggagctcgaaggtaaagaatcggcgtcatcttctactgcgtctcctccatcttccagcactgcaatcttccagcctagtgagacggtcagcagtaccgagtccagcttggaaaaggaacgggagaccccatctccaattgatccaaattgtgtagaagtggatgtgaactttaacccagatcccgcagatctagtattgtcaagcgtgccaggtggagagctgttcaaccctcgaaagcataagttcgcagaggaggacctgaagcctcaaccaatgatcaagaaagccaagaaggtattcgttcctgacgagcagaaagacgagaaatactggacacggagaaagaaaaataatgtggccgctaagcgcagccgagacgctaggcgcttaaaagagaaccagatcacaatcagggccgcatttctggaaaaggagaacaccgcgcttcggacagaagtggccgagttgaggaaagaggtcggcaagtgtaaaacgatcgtgagtaaatatgaaaccaagtatggaccattatag

SEQ ID NO: 137900 - DNA, 555 bp, synthetic construct
  misc_feature 1..555: note = Description of Artificial Sequence: Synthetic coding sequence
  source 1..555: mol_type = other DNA
tgatttatctttctgccaagacccggcacgtctctgggcaggatccgtaaagcagataaggagaaaggtaaagagaagctcgaagaggacgaggctgccgccgccagcacgatggcagtctctgcctcattgatgccaccgatttgggataaaaccatcccttacgacggcgagagcttccaccttgaatatatggacctcgacgagtttctgctagagaacgggatcccagcctcccctacacacttggcccataacctgcttctccccgttgctgagcttgagggtaaggaaagcgcatcaagtagtacagcctctccccccagctcctccactgccatcttccagccatccgagaccgtaagcagtacagagtcaagcctcgaaaaagaacgagagaccccatcaccaatcgaccccaactgtgtggaggttgatgtcaatttcaaccccgacccagccgacctggtgctgtcttccgtgccaggaggtgaactattcaatcctaggaagcataaatttgccgaagaagacctgaagccgcagcccatgtag

SEQ ID NO: 137901 - DNA, 822 bp, synthetic construct
  misc_feature 1..822: note = Description of Artificial Sequence: Synthetic coding sequence
  source 1..822: mol_type = other DNA
atggacatgcctgaagtgttgaaatccttactggaacactccttgccatggcctgaaaaacgtactgataaagagaaaggcaaagaaaaacttgaagaagatgaagccgccgcggcttcaaccatggcggtgagcgctagtctgatgccgcctatttgggataaaaccatcccttatgacggcgaatcatttcacctcgagtacatggatctcgacgagttcttgttagaaaacggaattccagcctctcccactcacctggcccataacctgctgctccccgtcgctgaactcgaaggaaaagaatccgccagttcttcgactgcctccccgccctcaagttctaccgcgatttttcagccttccgagactgtgagctctactgagtcctctttggaaaaagagagagaaacaccgtctccaattgaccccaactgcgtcgaggtggatgtgaactttaatccagatcccgccgatctggttctgtcctcagttcctggtggagaactgtttaaccctcggaaacacaaattcgcagaggaagacttgaaaccacaacctatgattaagaaagcgaaaaaggtcttcgtgcctgacgagcagaaagatgagaaatattggactaggagaaagaagaataatgttgcagccaaacgcagtagagatgcccggcggctgaaggaaaaccagattaccatcagagctgcctttttagagaaggagaacacagcattgcgcacagaggtagccgagctgagaaaggaggttggcaaatgcaagactatcgtgtctaagtacgagactaaatatggccccctgtag

SEQ ID NO: 137902 - DNA, 822 bp, synthetic construct
  misc_feature 1..822: note = Description of Artificial Sequence: Synthetic coding sequence
  source 1..822: mol_type = other DNA
atggacatgcccgaggtgctgaagtccctgctagagcacagcctgccctggcccgaaaagaggactgacaaagaaaagggtaaggaaaaactagaggaagatgaggctgctgccgcctctacaatggctgtttccgccagtttgatgccacctatctgggataaaacaattccttatgacggcgagtcatttcacctcgagtatatggacctggatgaatttttgctcgagaacggcattcccgccagtcctacacacctggcccacaatttgttactccctgtggcagagctggagggcaaggaatctgccagtagcagtacagcctctcccccctcctccagcactgctattttccaaccctctgaaaccgtttcctccacagagtcatctctggagaaggagagggaaactccgagtcccattgatccgaactgcgttgaggtcgatgtgaactttaaccccgaccccgcagacttggtgctctcttccgtccccggcggcgagttattcaaccccaggaaacataagtttgctgaagaagacctcaaaccccagccaatgataaaaaaagcgaaaaaggtgtttgtccctgatgagcagaaggatgaaaagtattggacgagaagaaaaaagaacaatgtggctgcaaagaggtcgagagatgccaggcggttaaaagaaaaccaaattacaatccgggccgctttcctcgaaaaggagaacacagctctaaggacggaagtcgccgaactgcgcaaagaggtcgggaagtgtaaaacgatagtaagcaaatatgaaaccaagtacggtcctctgtag

SEQ ID NO: 137903 - DNA, 729 bp, synthetic construct
  misc_feature 1..729: note = Description of Artificial Sequence: Synthetic coding sequence
  source 1..729: mol_type = other DNA
atgcccggtccttggttgttactcgccctggcccttaccttaaatctgaccggagtaccgggggggagagctcagccagaggcagcacaacaagaggcggttactgccgctgagcaccctgggctggacgattttttacgccaggtagaaagactgttgttcctgagagagaacatccagagactacaaggcgatcagggcgaacacagtgcctcacagatcttccagtccgattggctgtccaagcgtcagcatcccggtaaaagggaagaagaggaagaagaaggcgtggaagaagaggaagaagaggaaggcggggctgtggggccccacaagcgacagcaccctggtaggagggaagatgaggcaagttggagcgtcgacgtcacccagcacaagagacagcaccctggtcggagatccccatggctggcctatgccgtaccaaaaagacagcacccgggaagaaggttagccgatccaaaggcccagagatcctgggaggaggaagaggaagaggaagagcgagaagaggacttgatgcccgagaaacgccagcacccgggcaaaagagccttaggtgggccttgtggacctcagggcgcttatggccaggccggcctgctccttggcctcctggacgatctgtctcgcagccagggtgcagaagaaaagcgccagcatcccggtcggagagctgcttgggtgcgtgagccacttgaagagtag

SEQ ID NO: 137904 - DNA, 3075 bp, synthetic construct
  misc_feature 1..3075: note = Description of Artificial Sequence: Synthetic coding sequence
  source 1..3075: mol_type = other DNA
atgggcgaggacgatgcagcgttgcgtgcagggtctcgcggtttgtctgatccatgggctgactcagtgggggtgaggccgaggaccactgagcgccacatcgccgttcataagcgtctggtgcttgccttcgcggtgagtctcgtggctctcctggctgtcactatgctggccgtactgcttagcctgaggttcgatgaatgtggggcttcagccacccctggagctgatggagggcctagtggttttcctgaaaggggtggtaatgggagcctgcccgggtcggcaaggaggaatcatcatgccggtggcgactcctggcagcccgaggctggcggcgtggcaagcccgggcactacatccgcgcaaccccccagcgaggaggagagggaaccgtgggagccatggacacagctcaggttgagtggccacctcaagcctttgcattataatctgatgctcacggcatttatggagaactttacattcagtggagaggtgaacgtggagatcgcttgccgcaacgcaacaaggtatgtggttctccacgcttccagagtggcggtggagaaagtgcagcttgccgaagatcgagcattcggggcagtcccggtggcaggcttctttctgtaccctcagactcaggtgctggttgtcgtcctgaatcgaacactggacgctcagcgtaattataacctcaagatcatctacaacgccctcatcgaaaatgaacttctgggttttttcagatcttcttatgtgcttcacggcgaacgacgtttcctgggtgttacgcagttctccccaactcatgcaagaaaggccttcccctgctttgacgaacccatttacaaagcgacttttaagatctccattaagcatcaggctacttacctttccctgtcgaacatgccagtggaaacttctgtttttgaggaggatgggtgggtcacagaccatttttctcagaccccccttatgtcaacatactacctggcttgggccatttgcaattttacgtatagagaaaccacaaccaaatctggcgtggttgtgagattgtacgccaggccggatgcaatccggagagggagcggggactatgccttacacatcactaagcggttaatcgaattctatgaagattattttaaggtgccatattccttgccgaaattggatctgctcgccgtgcctaaacacccgtacgccgcaatggaaaattgggggctaagcattttcgtagagcaaaggatcttgttggacccctcagtcagcagcatttcttacttgttggatgtgacaatggtcatagtgcacgagatttgccatcaatggttcggtgatctcgttaccccagtctggtgggaggacgtctggctcaaggagggatttgcccattattttgagtttgtgggcacggattatttgtatccagggtggaacatggaaaaacagcgctttttgactgatgtgttgcatgaagtgatgctgcttgacggcctcgctagttcccaccctgtgagccaagaagtgttacaggccaccgatattgaccgtgtgttcgattggattgcctacaaaaagggcgccgcccttatccgcatgctggcaaacttcatgggccacagtgtgttccagcggggcctgcaggattatctcacgatacataagtacggaaatgcagctcgcaacgatctttggaatactctcagcgaggcactgaaacgcaacggaaagtatgttaacatccaggaggttatggaccagtggacccttcagatgggctatcccgttattacgatcttggggaacactaccgcagaaaacagaatcatcataacccagcagcatttcatctatgatataagcgcaaaaaccaaagctcttaagttgcagaataacagctacctatggcagataccactgacaatcgtcgttggcaatcggagccatgtctctagtgaggctataatctgggtgtctaataagtctgaacaccaccgtataacctatctggataaaggcagttggttgctcgggaatatcaatcagaccggatatttcagggtgaattatgaccttcggaattggcggttgctgatcgaccagctcattcggaatcatgaggttctgagcgtcagcaacagagctggcctgatcgatgatgcattcagtttagctcgtgcgggctacctccctcagaacatacccttggagattatccgttatttgtccgaagagaaagattttctgccctggcatgctgcctcccgtgccctttaccctctggacaagctgctcgaccggatggaaaattacaacatattcaatgagtacattttgaaacaggtcgcgaccacttacatcaagcttggatggccaaagaataattttaacggatctctggtgcaagccagttatcagcacgaagagctccggcgcgaggtgattatgctggcctgcagcttcgggaacaagcactgtcatcagcaagcttccaccctcatctcagattggatttcaagcaaccgaaatcgaatacccctgaacgtacgggatattgtttattgtactggggtctcactgctggacgaagatgtgtgggagtttatctggatgaagttccactcaaccacggccgtgtccgaaaagaagatcctcctggaagccctaacttgctctgacgaccgcaatctcctgaatcgcctgctgaatttgtccctcaattccgaggtagtcctggatcaagacgccattgacgttatcatacacgtggcaaggaacccccacgggagggatctcgcttggaaattttttcgcgataagtggaagatcctaaatacacgctatggcgaggccctgttcatgaattccaagctcatctccggagtgaccgaattccttaatactgagggagagcttaaggaactgaaaaattttatgaagaactatgacggcgtggccgccgcctccttttctagggccgtggagacagtggaggccaatgtgcgttggaaaatgctgtaccaggacgaattattccagtggctgggtaaagcgctccggcactag

SEQ ID NO: 137905 - DNA, 1197 bp, synthetic construct
  misc_feature 1..1197: note = Description of Artificial Sequence: Synthetic coding sequence
  source 1..1197: mol_type = other DNA
atggaaaacgagaccgtaagcgaactcaaccaaacccaactccagccccgggcggtggtcgccctcgagtaccaggtggtgaccatcctcctcgtgctgatcatttgtggcctgggaattgttggtaacatcatggtcgtgctggtggttatgcgtacaaagcacatgcggacacctaccaactgctacctggttagcctggcggtagccgatctgatggtcctcgtggctgccgggctcccaaatattaccgactcgatctatggatcatgggtgtatgggtacgtgggctgtttatgcattacatacctccagtaccttgggatcaacgcttcttcatgctctattacagcatttacaatcgaacgttacattgccatttgtcaccccattaaggcccaatttttgtgtacttttagcagggctaaaaaaataataattttcgtttgggcctttacttctttgtactgtatgctgtggttttttcttctcgacttgaacataagtacatacaaggatgccatcgtgattagctgtggctataagatctcaagaaattattatagtccgatttacctgatggactttggtgtattttatgtagtgcccatgatcctggcaactgttctgtacggctttatagcaagaattttgttcctgaaccctataccgagcgatccaaaagagaacagcaagacatggaagaacgactccacccaccagaataccaacctgaatgtaaatacaagcaacaggtgctttaattctacagtcagctcaagaaaacaggtaaccaagatgctggccgtagttgtaattctgtttgcattgctctggatgccctatcggactctggtggtagttaactcctttctctcttctccctttcaggaaaactggtttctcctcttttgccggatttgcatttatctgaactccgctatcaatccagtgatctacaacctaatgtcacagaagttcagggctgcctttcgcaagttgtgtaattgcaagcagaagcctacagagaaaccggcgaactacagcgttgcccttaattacagcgtaataaaagagagtgaccacttctccaccgagcttgacgacatcactgtgacggatacctatctttccgctactaaagtgagctttgacgacacgtgcctggcatctgaagtgagcttcagccagagctag

SEQ ID NO: 137906 - DNA, 1197 bp, synthetic construct
  misc_feature 1..1197: note = Description of Artificial Sequence: Synthetic coding sequence
  source 1..1197: mol_type = other DNA
atggaaaacgaaacagtgtcagaacttaatcagacgcagctgcagcctcgtgccgtggttgctctcgaatatcaagttgtgaccatccttctagtgctgattatctgcgggctcggaatcgtggggaatattatggttgtgctagtggtgatgcggactaaacatatgagaacccctaccaactgttaccttgtctctctggctgtggctgacctgatggttctggttgctgcaggtctacctaacattaccgattccatttatggctcgtgggtgtacggatacgttggttgcctttgtattacctatctccaatacttaggcattaacgccagttcgtgctctatcaccgccttcaccatcgagaggtatatcgccatttgtcatcccatcaaggcccagtttctctgcaccttttcacgagccaagaagatcattatttttgtgtgggcgtttacgtctctgtattgcatgctgtggtttttcctgctcgacttgaacatcagcacatataaggacgccattgtaatcagctgcgggtacaaaatctctcgtaattactacagccctatataccttatggattttggggtgttttacgtggtgcctatgatactcgccaccgttctatacggctttatcgcccggattcttttcctgaaccctatcccgtccgatcccaaggaaaacagtaagacttggaaaaatgactccacccaccaaaatacaaacctgaacgttaatacctcaaacaggtgtttcaattcaactgtctcatccaggaaacaggtcaccaagatgttggcagtagttgtgatattatttgctctgctgtggatgccataccgtacactagtggtggtgaattccttcctatcatctccctttcaggaaaactggttcctcttattctgccgaatttgcatatatctgaattccgcaatcaaccccgtgatatataatctcatgtctcaaaagtttcgagcggcttttaggaaattgtgcaactgtaaacagaaaccgaccgagaagcccgccaactactctgtggccctcaactacagcgtgattaaggagagcgaccacttctcaacagagctcgacgacatcacggtgacagatacttatttatcagccaccaaagtgtcgtttgacgacacctgtctcgcctccgaggtgtcctttagccagtcatag

SEQ ID NO: 137907 - DNA, 1128 bp, synthetic construct
  misc_feature 1..1128: note = Description of Artificial Sequence: Synthetic coding sequence
  source 1..1128: mol_type = other DNA
atggaggacgaaatgccaaagaccctctacgtgggtaacctatcccgcgatgtgactgaggcattaattcttcagcttttcagccaaatcgggccttgtaagaactgcaagatgattatggacacggccggtaacgatccgtattgcttcgtggagtttcacgagcacagacacgcagctgcggcactcgccgctatgaacgggagaaaaattatgggaaaggaagtcaaggtcaactgggccacaacaccttcatcccaaaagaaggacacttcaaatcattttcacgtttttgttggcgacctgtcccctgagattactacagaggatattaaggcagcattcgccccgttcggtagaattagcgacgccagggtggtgaaagatatggccacaggcaaaagcaagggatatggctttgtgagctttttcaacaagtgggacgcagaaaatgccatacagcagatgggcggccaatggcttgggggtaggcaaatccgcaccaattgggctacccggaagcctcccgccccaaagagtacctatgaaagcaataccaaacagctgtcttacgacgaggtggttaatcagtcatcaccgtcaaactgtaccgtctattgtgggggggtcacatcagggcttaccgagcagctcatgcgccaaaccttcagtccttttggtcagattatggagattagagtcttcccagataaaggatactcttttgttcggtttaatagtcacgaatccgcagctcacgcgatagtatctgtgaatggaactacaatagaggggcatgtggtcaaatgttactgggggaaggaaactttggacatgataaatccagtacagcagcagaaccaaatcgggtatccccagccctacgggcagtggggacaatggtacggtaatgctcagcaaatcggtcagtatatgcccaatgggtggcaagtgcccgcctacggcatgtacggtcaagcttggaatcagcaagggttcaatcaaacgcaaagctcggcaccttggatgggacccaactacggggtgcagcccccccagggccagaatgggagtatgctgcccaaccaacccagcggttacagggtagcagggtatgagactcagtag

SEQ ID NO: 137908 - DNA, 1161 bp, synthetic construct
  misc_feature 1..1161: note = Description of Artificial Sequence: Synthetic coding sequence
  source 1..1161: mol_type = other DNA
atggaggacgagatgccaaaaaccctgtatgttggcaacctatctcgggacgtgaccgaagctcttatcttacaactgttttctcagatcggtccatgtaaaaactgcaagatgattatggacactgcaggaaatgatccctactgtttcgtggaattccatgaacatcggcacgcagccgccgccctggctgcaatgaatggaagaaaaatcatggggaaggaggtgaaggttaactgggctaccacccctagctcacagaaaaaggatactagtagctcaacggtcgtatcaactcaacgttcccaggaccactttcacgtgtttgtgggggacctttctcctgagattacaacagaggacatcaaggcagcctttgccccctttggaaggatttccgacgcccgcgtagtgaaagacatggccacaggcaagagcaaaggatacggttttgtgtctttttttaacaagtgggacgccgagaacgccattcagcaaatggggggccaatggctcggcggaaggcagattagaactaattgggccacaaggaagccaccagccccaaaatccacttacgagtctaacaccaagcagttgtcgtacgatgaggtcgtaaaccagagctcgcccagcaactgcaccgtgtactgtgggggcgtgaccagcggcctcaccgaacaactgatgagacagacattcagcccatttggtcaaatcatggaaattcgggtgtttcctgataaaggttatagcttcgtacggttcaattcccacgaatccgccgcccacgcgattgtgtccgttaacggaacaacaattgaaggacacgtcgtgaaatgctactggggaaaggaaactttagacatgattaaccctgtgcagcagcagaatcagatcggctatccacaaccttacggccagtggggacagtggtacggcaatgcacagcagattggccagtacatgcccaacgggtggcaggtcccggcatacggaatgtatggacaggcttggaatcagcaagggttcaatcaaacccagagttctgccccttggatgggcccgaactatggagtgcagccccctcagggtcagaatgggagcatgctacctaatcagccatccgggtacagagtcgctggatacgaaactcagtag

SEQ ID NO: 137909 - DNA, 1392 bp, synthetic construct
  misc_feature 1..1392: note = Description of Artificial Sequence: Synthetic coding sequence
  source 1..1392: mol_type = other DNA
ccgctggtctctagagagactccactctcatgtagtcacaataggctgaatgaccttggaggttccgaagggcagggagccgggcccggcggtgccgctgcaactgctgctgcaatggaggatgagatgccaaaaactttgtacgtggggaatctttctagagacgttaccgaggcactgatccttcaactcttcagccagataggcccttgcaagaactgcaagatgattatggacactgccgggaacgacccgtactgttttgtggagttccatgaacatcggcacgctgcggctgccttagccgctatgaatggaagaaagataatgggtaaagaggtaaaggtcaactgggctaccactcccagtagtcagaagaaggatacatcaagctccacagtggtcagtacacagcggagccaagatcactttcacgtgtttgtgggagacctctcccccgagattaccaccgaagatattaaagccgcgtttgcccccttcggtcgaatctccgacgcccgagtggtcaaagatatggctaccggaaagtccaaaggctatggctttgtgtctttttttaacaaatgggacgccgagaacgctatccagcagatgggcggccagtggctggggggacgtcaaatcaggaccaactgggcgacacgaaagcctcctgccccaaaatccacctatgagtgtagatgcatcggtgaagaaaaggagatgtggaattttggagagaagtacgcccgcttctgctcgaggagactcatagccgaaattgatgagaaacagatcaagacaaccatccaaaagagcaacaccaagcagctctcttatgacgaagtcgtgaatcagagctctccatctaactgcacagtgtactgtggcggagttacttcaggcctgaccgagcagctcatgagacagacattctcgccatttggtcagatcatggagatccgcgtgttcccggacaaaggatattccttcgttcgatttaattcacacgagagcgccgcccacgctatcgtttccgttaatgggactacaattgagggtcacgtggtcaaatgttactgggggaaagagactcttgatatgatcaaccctgttcagcagaaccagattggctacccccagccatacgggcagtgggggcagtggtatgggaacgcacaacaaatcggacaatatatgccgaacggatggcaggtaccagcgtacgggatgtacgggcaggcatggaatcagcagggctttaatcagacacagagcagcgcaccttggatggggcccaattatggggttcaaccacctcagggacagaatggcagcatgctacccaaccaaccttccgggtatagagtggccgggtatgagacccagtag

SEQ ID NO: 137910 - DNA, 258 bp, synthetic construct
  misc_feature 1..258: note = Description of Artificial Sequence: Synthetic coding sequence
  source 1..258: mol_type = other DNA
atgatcaccgaacacacctcaaatgacccttactgctttgttgagttttatgaacatcgggacgcagctgcagcactagcagccatgaacggccgaaaaattctgggaaaggaggtaaaagttaattgggccaccacgccttcatcacagaagaaagatacgagcaaccatttccacgtgtttgtgggagacctgtcccctgagattactacagaggatataaagtctgccttcgcccccttcggtaagattagctag

SEQ ID NO: 137911 - DNA, 759 bp, synthetic construct
  misc_feature 1..759: note = Description of Artificial Sequence: Synthetic coding sequence
  source 1..759: mol_type = other DNA
atggatgctcgcgtcgtgaaggacatggccaccggcaagagtaagggctacggcttcgtgtctttctataataagctcgacgccgaaaacgccattgtccacatgggagggcagtggctgggggggcgacagattagaacgaactgggccacgcgcaaacctcccgcccccaagagtacacaggagaataacacgaagcagctgcggtttgaagacgtggttaaccaaagtagcccaaagaactgtactgtgtactgtggaggtatcgcgagcggactgacggatcaactcatgcgccagacattttctccattcggacagatcatggagattcgcgttttccctgagaaaggatatagttttgtaaggttcagtacacacgagtccgccgcccatgctatcgtgtccgtgaatggcaccaccatcgaaggccatgtcgtcaagtgttactggggcaaagagagtcccgacatgacgaagaactttcaacaagtggattactcccagtggggacagtggtctcaagtgtatggcaatcctcaacagtatggacagtacatggccaatggctggcaggttcctccttatggagtctatggacaaccctggaaccagcaaggctttggtgttgatcagagccccagcgcagcctggatgggtggctttggcgcccagcccccccagggacaggcgcctcctcccgttattcctcctccaaatcaagctggttatggcatggccagctaccagacgcaatag

SEQ ID NO: 137912 - DNA, 1179 bp, synthetic construct
  misc_feature 1..1179: note = Description of Artificial Sequence: Synthetic coding sequence
  source 1..1179: mol_type = other DNA
atgatggaagatgatggtcagcccagaacactgtacgtgggtaatctgagccgcgatgtgaccgaggtgttaatcctccagctgttcagccagataggtccatgtaagagttgcaagatgatcacagagcaaccagacagtcgaagggttaacagctcagtgggctttagcgtcctacagcatacaagcaatgacccctattgcttcgtggaattttatgagcatagagacgcagctgctgcactggcggccatgaatgggagaaagatcctggggaaggaagtgaaggtcaactgggccacgactccgagcagtcagaaaaaagatacatctaatcattttcacgtttttgtgggtgacctgtcaccggaaattactaccgaggatatcaagagcgccttcgcgccattcggcaaaatttcggacgcacgggttgttaaagatatggctaccggcaagtctaaagggtatggattcgtgtctttctacaacaaactggatgccgaaaacgcgatagtacatatgggagggcagtggttaggaggacgccagattcgcaccaactgggcgacacgcaaaccccctgcacccaagtctactcaggagaacaataccaaacaattgcggtttgaagatgttgtgaatcagagctctcctaaaaattgtacagtttattgcggtggcatagcttctggccttactgaccagcttatgcggcagaccttctctccttttggtcagatcatggagattagggttttccctgaaaagggttattctttcgtgaggtttagcacccacgagtccgcagcccatgctatcgtgagtgtgaacggcactaccatagaaggccatgtcgtcaaatgctattggggcaaggaatcccctgatatgaccaagaatttccagcaagtggattacagccagtggggacaatggagccaggtctacggaaatcctcagcagtatggccagtacatggcgaacggatggcaggttccaccgtatggtgtctatggccagccatggaaccaacagggtttcggtgtggaccagtcgccttcagcagcttggatgggcggcttcggcgctcagcccccccaggggcaggctccacccccagtgataccgccgcctaaccaagccggctacggaatggcatcttatcaaactcagtag

SEQ ID NO: 137913 - DNA, 399 bp, synthetic construct
  misc_feature 1..399: note = Description of Artificial Sequence: Synthetic coding sequence
  source 1..399: mol_type = other DNA
atgattactgaacataccagcaacgacccatattgtttcgtggagttttatgaacatcgagacgcagcggcggctctcgctgcgatgaatggtaggaaaatcctggggaaggaggttaaggtgaattgggccacaacaccctcatctcaaaaaaaggacacttccaaccacttccacgttttcgtgggcgatttgtcccctgagattaccacagaagacatcaagtccgcctttgctcctttcggcaaaatctcagatgcccgagtggtgaaggatatggccactggtaaatcaaaaggatacggatttgtgagtttctacaacaaactggacgctgagaatgcaattgtgcatatgggaggccagtggctgggtggaaggcagatcaggacgaactag

SEQ ID NO: 137914 - DNA, 1128 bp, synthetic construct
  misc_feature 1..1128: note = Description of Artificial Sequence: Synthetic coding sequence
  source 1..1128: mol_type = other DNA
atgatggaggatgatgggcagccgaggactctctatgtgggaaacctgagccgggatgtcactgaagtcctgatcctgcaactgttttctcagattggaccgtgcaagtcttgcaagatgataaccgaacacacttccaatgatccctactgtttcgtcgagttctatgagcacagagacgccgctgcggccctcgcggcgatgaacgggcggaagattcttggaaaagaagtgaaggtgaactgggccacaaccccgtccagccagaaaaaagacactagtaatcacttccatgtgttcgtgggagatctgagccctgagataaccacggaggacatcaaaagcgccttcgcaccattcgggaaaatcagtgacgcccgagtggtaaaggacatggcaacaggaaaatcaaaaggatatggcttcgtctcgttttataacaaactcgatgccgagaatgccattgttcacatgggaggccagtggttgggagggcggcagattagaactaattgggcgacaagaaagcctcccgccccgaaatctacccaggaaaacaataccaagcaactgaggtttgaggacgtggtgaaccaaagctctccaaagaactgcaccgtgtactgcgggggtatagcttcaggcttgaccgatcagctcatgagacaaacgttctccccattcggacagattatggaaatccgggttttccctgagaaaggctactcgttcgtgagatttagcacacatgaaagcgctgcccacgccatagtgtcagtaaatggcactacaatcgaaggtcatgtggtgaagtgttattggggaaaagagagtcctgatatgactaagaacttccagcaggtagactattcccagtgggggcagtggagccaagtgtacggaaacccacagcaatatggacagtatatggccaatgggtggcaggttcccccatacggcgtttatggccagccgtggaaccagcagggattcggcgtagaccagtccccctctgcagcttggatgggcggatttggagctcagcctccccagggtcaggcaccaccgccagtgattcctccacccaatcaggcaggatacggaatggcatcataccagacccagtag

SEQ ID NO: 137915 - DNA, 1776 bp, synthetic construct
  misc_feature 1..1776: note = Description of Artificial Sequence: Synthetic coding sequence
  source 1..1776: mol_type = other DNA
atggccagcaaatgttcaagcgagcgaaagtcacgaacctctctgacgctcaatcagaagctggagatgataaaactgagcgaggagggcatgtccaaggctgagatagggagacgactgggtctgctgcgtcaaactgtcagccaggtcgttaacgccaaggagaaattccttaaggaggtgaagtcagcaacccctatgaacaccaggatgattaggaagcggaatagcctcatcgccgacatggaaaaggtgctggtggtttggatcgaggatcagacttcgagaaatattcctttgagtcagagtctaatacagaacaaggcccttacacttttcaactcaatgaaggcagagaggggtgttgaggcggccgaggagaaattcgaagctagtcgcggctggtttatgaggtttaaggagcgttcacacttccataacatcaaggctcagggcgaagctgcctcagctgacgtcgaagctgccgctagctatcctgaggcgcttgcaaaaatcatcgatgagggtgggtacactaagcagcagatctttaatgtggacgagaccgccttctactggaaaaaaatgccgagcaggacttttatcgcaagggaggagaaaagcgtacccggttttaaggcctccaaggatcgcctgacactgttgctaggagctaatgccgctggcgatttcaagctcaagccaatgctcatttaccatagcgaaaatccacgggcgctgaagaactataccaagtctacactgcccgtgctgtacaaatggaacagtaaagctcgtatgacagcccacctgttcactgcgtggttcaccgagtatttcaaacccaccgtcgagacctattgctccgaaaagaagatccccttcaagatattactcctgatcgacaacgcaccctcccaccctagagccctcatggagatctacgaggagattaacgtgatctttatgcccgcaaacacaacatcaattcttcagcctatggaccagggtgtgatatccacattcaagtcctactacctcaggaatacttttcacaaggcactggccgcgatggactctgatgtgagcgatggatcaggacaaagcaaactcaaaacgttctggaaagggttcacaattttagacgcaatcaagaacattcgggactcttgggaggaggtaaaactcagcactctcactggcgtatggaagaagctgatacctaccttgatcgatgactatgagggcttcaaaacttccgtggaagaagtgtccgccgacgtggtagagattgctaaggaacttgagttggaggtggaaccagaggatgtgacggaactgctgcagagtcatgacaagactctgacggacgaagaattatttttgatggacgcccagaggaagtggttcctggaaatggagtccaccccaggagaggatgccgtgaacattgtggagatgactaccaaagacctcgaatattatattaatctggtggacaaggcagctgctggttttgagcggattgacagtaatttcgaacgatctagcacggttggcaaaatgctgagcaactcaatagcctgctatagagagatcttccacgagaggaaaagccaactgatgcgcaaggcgtcacctatgtcttactttagaaagctgccgcaaccaccccagccttcagcagccactacactgactagccagcagcctagtacatccagacaggacccacccccagctaagcgcgtgagattgacagaaggttcagattag

SEQ ID NO: 137916 - DNA, 1578 bp, synthetic construct
  misc_feature 1..1578: note = Description of Artificial Sequence: Synthetic coding sequence
  source 1..1578: mol_type = other DNA
atgcttggcaagcgcaaacgagtagtcctgactatcaaggataaactggatatcatcaagaagcttgaagaaggtatcagttttaaaaagctatcagtggtctatggcatcggcgagtctacagtgcgcgacatcaagaaaaacaaggaaaggatcatcaattacgctaatagctctgacccgacatccggtgttagtaagcggaaaagtatgaaatctagcacttatgaggagttagatagagtgatgatcgagtggtttaatcagcagaagaccgatgggattcctgtcagcggcaccatctgcgccaagcaggctaagtttttcttcgatgccttgggaatggagggagattttaatgcatcatctgggtggttgactaggttcaaacagagacatggcatcccgaaggccgctggcaagggaactaagcttaagggggatgagacggccgcacgcgaattttgtggcagctttcaggaatttgttgagaaggaaaatttacagccagagcagatttatggagctgatcagaccggattgttttggaaatgcctcccatccaggactctaacactggagacagaccagtccacgagcggttgtagatcaagtcgggagaggatcatcataatgtgctgcgcgaatgccaccggactgcacaaacttaatttgtgcgttgttggaaaggccaagaaaccaagggcctttaaggggacagatttgtctaacctccctgtcacctactactcacagaagggggcgtggatcgagcagtcagtatttagacagtggttcgaaaagtatttcgttcctcaggtgcagaagcacctgaaatctaagggcctgttggaaaaagccgtcctcctccttgactttccccctgccagaccaaatgaggaaatgctgtctagcgacgatggccggataattgtaaagtatctgcctccaaatgtgacatccctaatccagccaatgtcccagggagtgctggccacagtaaaaagatattacagagccgggctgctccagaaatacatggatgagggaaacgatccaaagatcttttggaaaaacctaactgttctggatgctatctatgaggtctcgcgcgcctggaatatggttaaatcgagcacaattactaaggcctggaagaaactcttcccgggcaatgaggaaaatagcggcatgaatatcgacgaaggagccatcctggctgcaaatctcgccaccgtgcttcagaataccgaggaatgcgagcatgtggatattgaaaatatcgatcagtggttcgattcacgctcctctgatagctcctgccaagtgttaacagactccgagagtgctgaggatcagaccaaagccgctgaacagaagcccagctccaaaagcaggaagactgaacttaatccagagaaacacatttcccacaaggcggccctcgaatggacggaaaatttgctcgactatctggaacaacaagatgacatgcttctttctgacaagctggtactgagaagattgcgcaccatcattagaaagaagcagaagatccaaaataacaaaaaccattag

SEQ ID NO: 137917 - DNA, 1650 bp, synthetic construct
  misc_feature 1..1650: note = Description of Artificial Sequence: Synthetic coding sequence
  source 1..1650: mol_type = other DNA
atgaataagcggggaaaatacacaaccctgaatctagaagagaagatgaaggtattgtccaggattgaggctggcagatccctaaagtctgtgatggacgaattcggtatttccaagtctaccttttatgacatcaagaagaataagaaattgatactggattttgtactgaagcaggacatgcctcttgtgggtgctgaaaaacgaaaacgcacaaccggcgccaaatacggagacgtggacgatgccgtgtatatgtggtaccagcaaaaaagaagcgcaggcgttccagtgaggggggtggaactgcaggctgcagctgaacgcttcgcccgctgttttggtcgaactgatttcaaggcctcaacaggttggttgtttcgtttcagaaaccggcatgctatcggcaacaggaaggggtgcggggagcaagttctgagctccgtttctgagaacgtggaacccttcagacaaaagctgtcaatgattattaaggaggagaaactttgtctggctcagctctatagtggggatgagactgatctgttctggaaatccatgccagagaatagccaggcttcccgcaaagatatatgtttacccggcaagaagattaataaagagcggctgagcgccttcctctgcgccaatgccgacggaacgcataaactcaaatctataataatcggaaaatccaaactgcctaagtccgtcaaagaggacacaagtaccttgcccgtgatttataagcccagcaaagatgtgtggttcacacgagaactgtttagcgagtggttcttccaaaacttcgtcccagaggtgcgacatttccagttaaacgtgttgcggtttcatgatgaagatgtacgggctcttcttctgctggattcttgtcctgctcatccatcgtcggaatctttaacttcggaagatggccggataaagtgcatgtttttcccccacaacacttccacactcattcagcctatgaatcagggcgtcattctttcttgcaagaggctgtatcgttggaaacaactcgaagagagcctcgtgatcttcgaagaaagcgacgacgagcaggagaaaggggataagggtgtgtctaaaatcaaaatttacaacatcaagtctgccatctttaactgggcaaagtcatgggaggaagtcaaacagattacgattgccaacgcttgggagaacctcctgtataagaaggagcctgagtacgacttccagggactggagcatggcgattatcgagagatcctggaaaagtgcggtgaactcgagactaagctggatgacgaccgggtgtggctgaatggcgatgaggaaaaggggtgtctgctgaagaccaaggggggcatcaccaaggaggttgtccagaaggggggcgaagccgagaagcagacagcggaattcaagctctctgctgtccgcgagagtctggactacttgctcgattttgtcgatgccacacccgagtttcagcgattccattttacgctcaaagagatgcaacaggaaattgtgaaaaaacagtttcaaagtaaaattcattcaaggataggcagcttcctgaagccgagaccccataacatcaaagactctttttcaggaccctccacctcaggatccaatcattag

SEQ ID NO: 137918 - DNA, 1650 bp, synthetic construct
  misc_feature 1..1650: note = Description of Artificial Sequence: Synthetic coding sequence
  source 1..1650: mol_type = other DNA
atgaataaacggggcaagtacaccactctgaacttggaggagaagatgaaagtcctcagcagaatcgaggcgggtcgcagtctgaaaagtgtgatggacgagttcggcatttctaagagcacattttacgatattaagaaaaacaagaagttaattctggactttgtgctgaaacaggacatgccgctggtgggcgcggaaaagcgcaaaagaactactggagcaaagtatggggacgtagacgatgctgtttacatgtggtatcagcaaaaaagatcagcaggggtgcccgtcaggggagttgaactccaggccgcagctgaacgcttcgcccggtgttttggcagaacagatttcaaggcctccaccggctggctgtttagattcaggaaccggcacgccatcggcaatcgcaagggatgtggggaacaggtgctctccagcgttagcgagaatgtggagccctttcggcagaagctgtcaatgatcatcaaggaggaaaaactgtgcctcgcccaactttattccggtgacgagactgacctattctggaagtccatgcccgagaactctcaggctagtcgcaaggatatttgtctgcccggcaagaaaatcaacaaagagcggctgtccgcattcctgtgtgccaacgctgatggcacccataagctcaagtctattatcatcggcaagtctaagcttccaaaatccgtgaaggaagatacaagtacactgcctgtgatctataaacctagcaaagatgtctggttcaccagagagcttttctctgagtggtttttccagaatttcgtacccgaggtgagacattttcagttaaacgtacttcggttccatgatgaggacgtgcgcgcacttctattgctcgacagctgccccgcccaccccagctctgaaagcctaacttcggaggatggaagaatcaagtgcatgttttttccccataacacttccaccctgatccagcctatgaatcagggggtgattctgtcctgtaagaggctataccggtggaagcaactcgaagagagtctcgtcatatttgaggaaagcgacgatgagcaagagaagggcgataagggagtcagcaagattaagatctataacatcaagagtgccatttttaactgggccaaaagttgggaggaggtcaagcagattactatcgcaaatgcctgggaaaatctgctctataaaaaggaaccagaatacgacttccagggtctggaacatggggattacagggagatcctcgagaagtgtggtgaactggaaaccaaattggatgacgaccgggtgtggttgaacggggacgaggagaagggttgcttgttgaagacaaagggggggattaccaaggaggtagttcagaaaggaggcgaggccgaaaaacagactgccgaattcaaactgtctgcggtgcgtgaatcgttggactaccttctggactttgttgatgccacgcctgagtttcagagattccacttcacgctgaaagaaatgcagcaagaaatcgtgaaaaaacaattccaatcgaagattcactctaggattggatccttcctgaagccacgccctcacaacatcaaagattcctttagcggaccaagcacctcgggttcaaaccattag

SEQ ID NO: 137919 - DNA, 1536 bp, synthetic construct
  misc_feature 1..1536: note = Description of Artificial Sequence: Synthetic coding sequence
  source 1..1536: mol_type = other DNA
atgaacaagcgcgggaaatacaccacgctgaacctggaggagaagatgaaggtcctgtcacgtattgaagctggcaggagtctaaagtctgtgatggacgagttcggtatatctaagtcaactttttatgatataaaaaaaaacaagaaactcattctcgattttgtcctgaaacaggacatgcccctcgtgggcgctgaaaaacgaaaaagaactacaggtgccaaatacggcgacgtggatgatgcagtgtatatgtggtatcaacaaaaaagatcggcaggagtgccggtgagaggagtggaactgcaggcggcagcagaaaggtttgcacgatgcttcgggcgcacagacttcaaggcctccacaggatggctgttccggtttaggaaccggcatgccattgggaacaggaaggggtgcggtgagcaggtgcttagctctgtgtcagagaacgtggagcctttccggcagaagttgagcatgatcatcaaggaggaaaaactgtgcctagctcaactgtattctggcgacgaaactgatcttttctggaagagcatgcctgaaaactctcaggcgagcaggaaggacatttgtcttcccggtaaaaagatcaacaaagaacgcttatctgcattcctgtgtgcaaatgcggatggaactcacaagctcaaatccatcatcatcggcaagagtaagctgccgaagtcagttaaagaggatactagcacactcccggtgatatataagccctccaaggacgtatggttcacaagggagcttttcagtgagtggtttttccagaatttcgtccccgaagttaggcactttcagcttaacgtacttaggtttcacgacgaagatgtgagagcactgctgctcttggatagctgcccggcacatcccagttccgagtcattaacaagtgaagatggccgaattaaatgtatgttctttccccacaacacaagcaccctcattcagccgatgaaccagggcgtgatcttatcttgcaaacggctgtataggtggaagcagctcgaagagtcactcgtaatattcgaggagtctgacgacgaacaggagaaaggcgacaagggggtgtctaagatcaaaatatataacatcaaatccgctattttcaactgggctaagagctgggaagaggtgaaacaaattacgattgctaacgcttgggaaaatttgctctacaagaaggagcctgaatacgactttcagggcctggagcatggcgactaccgagaaatactggagaagtgtggcgagctggaaactaagctggacgatgaccgagtttggcttaacggagatgaagaaaagggttgtctcttgaaaaccaaagggggcatcacaaaggaagtggtgcaaaaaggcggagaagctgagaaacagactgcagaattcaagctgagtgcagtgagagagagcctggactaccttctggactttgttgatgccacccctgaattccagcgcttccatttcaccctctgtgagttctccgatgattcttag

SEQ ID NO: 137920 - DNA, 1644 bp, synthetic construct
  misc_feature 1..1644: note = Description of Artificial Sequence: Synthetic coding sequence
  source 1..1644: mol_type = other DNA
atgacgtctgctgctccagcgaagaaaccctacagaaaggcacccccggagcatcgcgagctgagactggagattcccggaagtcggttggaacaggaagaacccctcacagatgcagagcgaatgaagctgctgcaagaggagaatgaggaattgagacgaaggcttgccagcgccacccggcgtactgaggctttggagagggagctggagatcggacaggattgtctggaactggagctgggccagtcaagggaggagctcgacaaattcaaggataagtttcgacggctgcagaactcgtatacagctagccaacggaccaaccaggaactggaggataaacttcatactctgatcaagaaggctgaaatggatcgcaagactctggattgggaaattgttgaactgaccaacaagctgctcgacgctaagaacactatcaataagctcgaagagttaaatgaacggtatcgcctggactgtaacctggcggtacagttactgaagtgcaacaagtcacactttaggaaccacaagtttgccgacttaccttgcgaacttcaagatatggtaagaaaacatctgcactctggtcaggaggcagcttcccccgggcctgcgcccagcctcgcccccggtgctgttgtcccgacttctgtgatcgctcgcgtcctggaaaagccagaatccttactgctgaactcggcacagtcgggctcagccggtcgcccgcttgcggaggatgtatttgttcacgttgacatgtctgaaggggtacctggtgaccctgcctcaccccccgccccaggatctcccacccctcagccaaatggtgaatgccacagtcttggaactgccaggggttctcccgaggaggaactgccactgcccgcattcgagaaactcaacccgtatcccaccccgtccccgcctcaccctctatatcccgggaggcgtgtaatcgaattctctgaagataaggtacgtatacctaggaattcccccctgcctaactgcacctacgccaccaggcaggccatatccctgtctcttgtagaagaaggatccgagagagctcgcccatcccctgtcccttccacacctgcaagcgcccaagcatccccacaccaccagccctcgccagcccctctgaccctctcagcacccgcatccagcgctagttcagaggaagatttattagtgtcttggcagagggcatttgttgacagaaccccaccacccgccgctgttgctcagcgtacggctttcggacgtgacgccctgcccgagctccagcgtcatttcgcgcactctcccgccgaccgtgatgaggtggttcaggcccccagcgcaaggcctgaagagagtgagctgctgttacctactgagcccgatagtgggtttccccgggaggaagaagagctcaacctgcctatctccccggaagaggagagacagtccctgctccctatcaacaggggaaccgaggagggtccgggcaccagtcataccgaagggcgtgcctggccactgcctagttctagtaggcctcagcgaagccctaagcgaatgggggtgcatcaccttcatagaaaggattcgctgacacaagcacaggagcaaggcaatcttctgaactag

SEQ ID NO: 137921 - DNA, 1644 bp, synthetic construct
  misc_feature 1..1644: note = Description of Artificial Sequence: Synthetic coding sequence
  source 1..1644: mol_type = other DNA
atgactagcgcggcccccgcaaagaagccctaccgcaaggctcctccagagcatcgagagctgcggcttgaaataccggggtccaggctcgagcaggaagagcccttgacagacgcagaacggatgaagcttctgcaggaggaaaacgaggagttgagacgcagactggcctctgctactagaaggacggaggccctggagcgggagctggaaatcggacaggactgtctggagttggaactgggacaatctagggaggagctggataagtttaaggacaagtttagacgactgcagaattcctacaccgcatcccagcgcacaaatcaggaactggaggacaaattacacaccctcattaaaaaagccgagatggacagaaaaaccctggactgggagattgtggaacttacgaacaagctgctggacgcaaagaacaccattaacaagctagaggaactgaatgaacgttatagactggactgtaacctggcagtccagctcctgaagtgtaacaagtctcacttccgcaaccataagtttgccgatctgccttgtgaactccaggacatggtgcgaaagcatcttcacagcggtcaggaagccgcatccccagggccagcaccttccctggcacctggagccgtggttccgacttccgtgattgcaagagtccttgaaaagcctgagtctctactcttgaacagcgcccagtccggaagtgccggtcgacccctggcagaagatgtatttgttcacgtagatatgtccgaaggggtcccgggagaccccgccagcccccccgctcctggctcacccaccccacagcctaacggcgaatgtcatagtctgggtaccgcgagaggttcccccgaggaggaactgcctctccctgcttttgaaaagcttaacccttatcccactccatccccaccccaccccttgtatcccgggcgtagggttatcgagttctcagaggataaggttcgcataccgcggaactcccccctgcctaattgcacctacgccaccagacaggccatatcactcagtctggtggaggagggaagcgagagagctaggccttctcctgttcctagcactcctgcatctgcgcaggcaagcccacaccaccagccaagtcccgccccgctgaccctgtctgctccagctagttcagcctcatccgaagaagatcttttggtcagctggcaaagagccttcgtggaccgcacccctccaccagcagccgtcgctcagcggaccgcgtttggccgtgatgcgctgcccgagctgcagcgccactttgcccacagcccagcagatcgtgatgaagtcgtgcaagcaccctcagcccgaccggaagagagtgaattgctgctgcctactgaacccgatagcgggtttccccgagaagaagaagaactgaatcttccgatctcccccgaggaggagaggcagtctctgctgcctatcaacaggggcactgaagagggcccaggcacatctcatacggaaggacgcgcctggccccttccaagctccagtcgcccccagcgctcccccaagcggatgggggtacaccacttgcacaggaaagatagcttaacacaagctcaggaacaaggcaatctcctcaactag

SEQ ID NO: 137922 - DNA, 1674 bp, synthetic construct
  misc_feature 1..1674: note = Description of Artificial Sequence: Synthetic coding sequence
  source 1..1674: mol_type = other DNA
atgacatccgctgcgccagctaagaaaccgtatagaaaagcgccaccggaacacagagaactgcggttggagatccccgggtcgaggttggaacaagaagagcctctcacagatgcggagaggatgaagctccttcaggaggaaaatgaggaactgaggcggagactggcttccgccacgcgcaggactgaggccctggagcgtgaactggagattggacaagactgcttagaactggagctcgggcaaagcagggaggagctggacaaattcaaggataagtttcgaaggcttcagaattcatacaccgccagccagcgcacgaaccaggagttagaagacaaactgcacacattggcaagcctgtcacattcttggatttttgcaattaagaaggctgaaatggatcgcaaaaccttagactgggaaattgtcgagctaacgaacaaactgcttgatgcaaaaaacaccattaacaagctggaagaacttaatgaaaggtaccgactcgactgcaatcttgcggttcagttgctaaaatgcaataagagccacttccgtaaccataaatttgccgaccttccttgtgagttacaggatatggttcgaaagcatctgcacagtggacaggaggctgcaagccctggccctgcccccagcttagcccctggtgccgtggttccaacgagcgtgatcgccagagtgctggagaaaccagaatccctgcttctaaatagtgcccagagtggctcggccgggcgccctctggcggaggatgtattcgtgcatgtagatatgtctgaaggagtaccgggtgacccggcatcaccacccgcgccaggatcaccaacaccccagcctaacggagagtgccattccctcggcaccgctcgaggctctcccgaagaggagctgcccctgcccgcttttgaaaagctgaatccgtaccccactcctagtcccccccatcccctctatccaggccgtcgggtgattgagttttccgaggacaaagtgcggatccctcggaatagtcctctgcccaattgcacatacgctaccagacaggctatctcccttagtctggtcgaggaaggatcagaaagagcccgccctagccccgtgccatccacacccgctagtgcccaggcctctccgcaccatcagccctctcctgccccactgactctgtccgctccagccagcagcgcaagttctgaagaggatctcctggtcagctggcagagagccttcgtcgatagaacgccaccgcctgcagccgtcgctcaaagaaccgcctttggtcgcgacgcactccccgagctgcagaggcacttcgctcacagcccagctgatagggacgaagtggtgcaggctccctccgcccgacccgaggagtctgagttactgctgccaaccgagcctgatagcggcttcccaagagaggaggaagaactgaatctgcccattagcccggaagaggagaggcagtccctcctgccaatcaatcggggcaccgaggaaggacctggtacctcacataccgaaggacgggcttggccattgcccagtagcagcaggccacagcggtcccccaagaggatgggggtgcatcacctgcacagaaaggattcactcacccaggcgcaggaacagggcaatctcctgaactag

SEQ ID NO: 137923 - DNA, 1674 bp, synthetic construct
  misc_feature 1..1674: note = Description of Artificial Sequence: Synthetic coding sequence
  source 1..1674: mol_type = other DNA
atgacctctgcggctcccgcaaagaaaccatatcggaaggccccaccagaacaccgggaactcaggttggaaatacctggatccaggctcgagcaggaggagccgctgacagacgctgaacggatgaagctgttacaggaggaaaacgaagagttgcgccgccgcctagccagcgcaacccgccgaaccgaggctctggaacgggagctggaaattggtcaggactgtttagagcttgaactgggacagtcccgcgaggagttagacaagttcaaagacaagttccgtagactccagaattcgtatacggcctcccagcggactaatcaggagctggaagacaaactacataccttggcgtccctgtcacactcctggatttttgctatcaagaaggccgagatggatagaaaaaccctggattgggagatcgttgagctcactaacaagctgctggacgcgaaaaataccatcaataagctggaagagctcaatgagagatatcgtctggattgcaacctggccgttcaactgctgaaatgcaacaagtcacacttcaggaatcataaattcgccgatctcccctgtgagctgcaggatatggtgcgaaagcatctgcactctggccaggaggccgcatcccctggacctgctcccagtctggctcccggcgctgtggtcccaacctctgtgattgctcgcgtgctggagaaaccagaaagcctgctgctgaatagcgctcaatctggcagtgccggtcgcccgctcgccgaagatgtatttgttcacgtcgacatgagcgaaggggttcctggggaccctgcgtctccccccgccccaggctcccctacgcctcaaccaaacggggaatgtcactccttggggaccgctcggggttctccggaggaagagctgccattgcccgcttttgagaagttgaatccctaccctacgccctctcccccacacccactgtaccctgggagacgggtcatagaatttagtgaagataaggtgagaataccacgcaactcgcctcttccaaactgcacatatgctacgaggcaagctatctcgctctccctcgtggaggagggaagtgagagagctcgtccgtcaccagtcccttcaacaccagcctcagcccaggcttctccccaccaccaaccaagcccagcccccctgacacttagcgcgcccgcgagttccgcgtcatctgaggaagaccttcttgtgtcgtggcagcgggccttcgtagacagaacaccccctccagcggctgtggcccaacggacagcgttcggtcgggatgccttgcccgaactacaacgccactttgcccacagccctgctgatcgcgatgaggttgtccaggcaccatctgcacgtccggaggagtccgagctcttattgcctactgagcccgattctggcttcccacgagaagaagaggaactgaatcttccaattagtcccgaggaggagagacaatctctcctgcctattaatagaggcaccgaagagggtccgggcacaagtcataccgagggtagagcatggccactccctagctccagccggccccagaggtctcctaaacgcatgggggtgcatcatcttcaccgtaaggactctctcacacaggctcaggaacagggtaacctgcttaattag

SEQ ID NO: 137924 - DNA, 1644 bp, synthetic construct
  misc_feature 1..1644: note = Description of Artificial Sequence: Synthetic coding sequence
  source 1..1644: mol_type = other DNA
atgaccagtgctgctcccgctaaaaaaccatacagaaaagcgccacctgagcaccgggagctgaggctcgagatccctggctcccgattggagcaagaagaacccctgacagatgcagagaggatgaaacttctgcaggaagagaatgaagaattgcggaggcggcttgcatctgccacgcgacggaccgaggcattagagagagagctggagatcggccaggattgtctggaactggagctcgggcagtccagggaggaactggacaaatttaaggacaagtttaggcgcttgcagaactcctatacggcaagtcagagaacaaaccaggaactcgaggacaaactgcacactttaataaaaaaggccgaaatggataggaagaccctggactgggaaatcgtagagctcactaacaagctccttgatgctaaaaatacaatcaataagctggaggagctgaacgaacgatatcgactggattgtaatttggctgtccagctcctcaaatgtaacaagtcccatttccggaatcacaaatttgccgatctgccatgcgagctgcaggatatggtgcggaaacatctccacagcgggcaggaggccgctagtcccggacctgctccctctttggcacctggcgccgttgtcccaacgtctgttattgctcgcgtcctggaaaagcctgagagcctgctgctcaatagcgcccagagcgggtccgccggaaggccgctggccgaggatgtgtttgtgcacgtcgatatgtccgagggcgtgcctggcgacccggcaagcccacctgccccgggctcccccaccccacaacccaacggtgaatgccactcactgggtaccgcccggggctccccggaagaagagctcccgctacctgcctttgaaaaactgaacccctatcccacgccctcacccccccacccactatatcccggacgcagagttatcgaattcagcgaggacaaagtcaggatccctcgaaacagtccactccccaactgcacgtacgccacacgacaggctattagcttgagtctggtggaagaggggagcgaacgcgcgcgaccatcacctgtaccttcgacgcccgcatccgctcaagcctccccacaccaccagccatcccccgcccctctcactctgtctgctcccgccagctctgcctcctccgaggaagaccttctcgtttcctggcagagggcattcgtagacagaacaccgccacctgctgccgtggcacagagaactgcattcgggagagacgctctgccggaactgcagaggcactttgcgcactctcctgctgatagagacgaagtcgttcaggcgccttccgcgcgaccagaagagagcgagctgcttctgcctaccgaacctgatagtggtttcccacgtgaggaggaagaacttaacctgcctatctcgcccgaggaggaaaggcaatcactactccccattaaccggggtacagaggaaggcccagggacaagtcacactgagggtcgggcctggcctctgccttccagttcaaggcctcaaagatcacccaagaggatgggcgtgcaccacctgcatagaaaggactcactgacccaggcccaagaacaagggaacttactgaactag

SEQ ID NO: 137925 - DNA, 1644 bp, synthetic construct
  misc_feature 1..1644: note = Description of Artificial Sequence: Synthetic coding sequence
  source 1..1644: mol_type = other DNA
atgacctcggcggctccagctaagaaaccctatcggaaagccccgccagagcaccgcgaacttcggctggagatcccgggatcccgattggagcaggaggagccactgacagacgcagagaggatgaagcttctccaagaggagaacgaagaactgcggaggagactggcgagcgcaactcgtaggacggaggcgctggaaagggaattagaaattggccaagattgcctcgagctggaattaggacagagccgagaagaacttgacaaatttaaggataaatttcgccggttacagaacagctacactgcttcccagcgaactaaccaggagcttgaagacaagctgcacacactaattaaaaaggctgagatggaccgtaaaaccctggactgggaaattgtggaactaacaaacaagctgctggatgcgaagaataccatcaataaactggaggagctcaacgaacgttatcggcttgactgtaacttagccgttcagctactcaaatgcaataagtctcactttcgtaaccacaagtttgccgatctgccctgcgagctgcaggacatggtgcgcaagcacctgcatagcggacaagaagcagccagtcccggcccagcgccatcccttgctccaggtgccgtggtgccgaccagcgttatcgcccgcgtactggagaagcctgagagtctcctgctaaattccgcacagagcgggtctgccggccgccctctggcagaggacgtgttcgtgcatgtggacatgagtgagggcgttcccggtgatcccgccagcccgccagcaccgggctcgcctaccccgcaaccaaatggagagtgccacagcctggggactgccagaggatctccagaggaggagttaccactccctgcttttgagaaactgaatccctatcccactccgagtcctcctcatcccctgtacccagggcgccgcgtgatcgagttttccgaggataaggtcagaatccctcggaatagccctctgccaaactgtacctatgcgactcggcaagccatcagtctctcgcttgtcgaagagggctccgagcgcgctcgacctagcccagtgccatccacacccgcttccgcccaggcgagtccacatcatcagccctcccccgcaccactaacactctctgcccctgctagcagtgctagcagcgaggaggacctgcttgtgtcctggcagagggcttttgtggacagaacaccacccccagccgccgtggcccagcgaacagctttcggcagagatgcactcccagagctccagaggcatttcgctcactccccagccgatcgcgacgaggtggtacaagcacctagcgcccgcccagaggagtctgagctgctgctcccgactgagccagacagcggctttcctcgcgaggaggaggaactgaatttgccgatcagccccgaagaagagcgacaatctctgcttcctatcaatcggggcacagaagaggggccaggcacttcccacacagagggcagagcttggccactcccttccagttcccgcccccagcgcagccctaaacggatgggagttcaccacttgcacagaaaagacagtctgactcaggcccaggagcagggcaatctgctgaattag

SEQ ID NO: 137926 - DNA, 1644 bp, synthetic construct
  misc_feature 1..1644: note = Description of Artificial Sequence: Synthetic coding sequence
  source 1..1644: mol_type = other DNA
atgacatccgcggctcccgccaagaaaccgtaccgtaaagcacctccagaacacagagaactccggttggagataccaggttctagactggagcaagaggagcctctcaccgatgcagagcgaatgaagttgctccaggaagaaaatgaggagctccggaggcgccttgccagcgccacgagaagaactgaagccttagaacgggagctggaaatcggccaggattgtcttgaactagaactggggcaaagcagagaggaactggataagtttaaagataagtttagaagactgcaaaactcatacactgcatctcagcggaccaatcaggagctagaagataagctgcacaccctgatcaaaaaagccgaaatggaccgtaaaactcttgactgggagattgtggagttgaccaacaaactcctcgatgctaagaatacaatcaataagttggaggagctcaatgaacggtaccggctggactgtaatctggcagtccaactcctgaaatgcaataagtcacattttagaaatcataagttcgctgatcttccctgcgagttgcaagatatggtccgcaagcaccttcatagcggccaagaggccgcaagtccaggtccagcccccagccttgcccccggagcggtggtacctacgagtgtaattgccagagtcctggagaaacccgaatccctactgctaaactcagctcagagcggaagcgccgggagaccattagcagaagacgttttcgtgcatgtcgacatgagtgagggtgtaccaggggatccggcatcaccacccgcacccggctctccgaccccacagcccaatggggaatgccacagcctgggaacggcccggggcagccccgaagaggagttaccactaccagctttcgagaagcttaatccttaccccacaccatcccctcctcaccccctgtaccctggaagacgggtgattgaattctcagaagacaaggtgagaattcctcgtaatagccccctcccaaattgtacttatgctactcggcaggccatctccctatccctggttgaagaaggaagcgaacgcgcccgaccgtccccagttccatccactcctgcgagtgctcaggcttcaccacatcatcaaccatctccagccccactgactcttagtgccccagcctcttcagcttcttcagaggaagacttgcttgtgtcctggcagcgggcgttcgtggacagaacaccaccacccgctgctgtggcacagaggaccgcgtttgggagagatgccctgccagagctgcaacgacactttgcacattcacccgccgatcgggacgaggtggtgcaggctccctctgccaggcccgaggagagcgagctgctcctccccacggagccagacagcggcttcccacgcgaggaagaggagttaaatttacccattagccccgaagaggaaaggcagtcattattgcctattaatcgtggcacggaagagggaccaggtacaagccatactgagggacgggcctggccattaccttcgtccagtcgcccccagaggtcacctaaaaggatgggagtgcaccacctgcaccgcaaggatagtctaacgcaggctcaggaacaaggaaatttacttaactag

SEQ ID NO: 137927 - DNA, 1674 bp, synthetic construct
  misc_feature 1..1674: note = Description of Artificial Sequence: Synthetic coding sequence
  source 1..1674: mol_type = other DNA
atgacaagcgccgcgcctgccaagaagccataccgcaaagccccacctgagcatagagaactgcgattggagatccccggaagtcgattggaacaggaagaacctctgacagacgctgaaaggatgaagcttctgcaggaggaaaacgaagagctgaggcggagactggcaagtgctaccaggcgcacagaagccctcgagcgtgagttggagatcgggcaggactgtcttgagctggaactgggacaaagtagagaagagctcgataaatttaaggacaagttcagacgcttgcagaacagctatactgcatctcagcgcacaaaccaggaactcgaagacaagctgcataccctggcgagtttgtcccatagttggatattcgcaataaaaaaggctgaaatggatcgaaagaccctcgactgggagattgttgagctgacaaacaaactgttggacgccaagaataccatcaacaaactggaagagctcaacgagagataccgtctggactgtaatttggccgtacagctcttaaagtgtaataagtcccacttcagaaatcacaaattcgctgacctgccttgtgagttacaggatatggtccgcaagcatcttcattctggacaggaagctgcctcaccaggtcctgcaccatcattagcacccggtgccgttgtacccacctctgtgatcgctcgcgtcctggaaaagcctgaaagtcttctcctaaactctgcccaatccggctccgccggccgaccactcgctgaggatgttttcgtccacgtggacatgtccgaaggcgtcccaggagacccggcttcacctccagcacctgggtcacctactccccagcctaacggtgagtgccattctctaggcaccgccaggggctcccccgaagaggaactgcccctcccagctttcgagaaactgaacccctacccgactccctccccaccccaccctctctacccaggcagacgtgtgatcgaattctctgaggataaggtgcgtattccacgcaacagccccctgccaaactgcacatatgccactcggcaggcaatctcgctgagcctggtagaagagggcagtgagcgtgccaggccatctcccgtccccagtaccccagctagtgcgcaggcctcgcctcaccaccagccctcccccgcacctctgacactgagcgctcccgcctcctctgcttcctcagaagaggatctgctagtctcctggcagagagcctttgttgaccgcactcctccccctgccgccgtggcgcaaaggaccgcatttggcagggacgccctgcctgaactccagaggcatttcgcacactccccggccgatagggatgaggtcgtccaggcgccttccgcgcgccccgaggaatcggaactcctcctgcccactgagcctgacagtggctttcccagggaggaggaggagttaaacctgccaatatctccagaggaggaacggcagagtcttttaccaatcaatagaggcaccgaggaggggccagggacatcacatacagaaggaagggcatggcctctacccagcagctccagaccccagcggagtcctaagcggatgggggtgcatcacctgcaccggaaggattcccttactcaagctcaggaacagggtaatctgctcaactag

SEQ ID NO: 137928 - DNA, 582 bp, synthetic construct
  misc_feature 1..582: note = Description of Artificial Sequence: Synthetic coding sequence
  source 1..582: mol_type = other DNA
atgacatccgccgctcctgccaaaaagccatacagaaaggctccacccgagcacagggaactccgacttgaaatccccggatcacgcctggagcaggaggagcctctcactgatgctgagcggatgaaattgctgcaggaagagaatgaggaactccgccgccgcttggcctctgcaacccggcgcaccgaagcccttgaacgggaactggaaatcgggcaggactgtctggaactcgagttgggacagagccgggaggagctggacaagttcaaagataagtttaggaggctgcagaattcctataccgcatcccagaggaccaatcaagaactcgaagataaactacataccttagcctcattaagtcattcgtggatcttcgccattaaaaaggcggaaatggatcgcaagacgctagactgggagattgtagaactgacaaataagttgctggacgccaagaatactattaataagctggaggaactgaacgaacgctatcgtctggactgtaatctggcggtccagcttctgaagtgcaacaaatctcactttcgaaaccataagtttgcagattag

SEQ ID NO: 137929 - DNA, 720 bp, synthetic construct
  misc_feature 1..720: note = Description of Artificial Sequence: Synthetic coding sequence
  source 1..720: mol_type = other DNA
tgactgctgcaggaagaaaacgaggaactgcggcgccgactggcatccgctacccgaaggacagaagccctcgaacgagagcttgagatcggacaagactgccttgaacttgagctcggccagtcaagagaagagcttgacaagttcaaagataagttcagaaggcttcagaacagctataccgcttcgcagagaacaaatcaagaacttgaggataaattacacaccctcattaagaaagccgagatggatcggaagactttggattgggaaatcgtcgagctgacgaataagttgctcgacgctaagaacacgatcaacaaactcgaggaattgaatgaacgataccgtctggattgcaatctggccgtccagctgctgaaatgtaacaagtcccacttccgcaaccataagtttgcagatgtttctagaactcaccccctgcctgcccacatcgaccattctggccattgcaggacaccactaacccctgtctcggcacctctctccgttctgttattcccactctgtcctccacttgcatccatgagtccccttaaaccagtgaattctgcgacggggtggtgcccggtgtactgccctgggcccatcaccagcagtgggggcccagccctcctggtctccgtgaccgaaacggagcgcgaggatccgggacaggagggcgagggaagccagtcttatctgccgaaggagtactag

SEQ ID NO: 137930 - DNA, 5247 bp, synthetic construct
  misc_feature 1..5247: note = Description of Artificial Sequence: Synthetic coding sequence
  source 1..5247: mol_type = other DNA
atgtcagcacgcgcagccgctgctaagtccaccgcgatggaagagacagccatctgggaacagcacaccgtcaccctgcatcgggctccaggctttggcttcggcatcgccatatctggtgggagagacaatcctcattttcagtcgggcgagacttcaattgtgatctcggacgtgttgaagggcgggcctgcagaaggtcagctgcaggagaatgaccgggttgccatggttaacggggtcagcatggacaatgtcgagcacgccttcgcagtgcaacaactgaggaagagcggcaagaacgcgaagattaccattcggcggaaaaaaaaagtgcaaatccctgtttcccgtccagaccctgaaccagtgtcagacaatgaagaggattcttacgatgaagaaatacatgacccccgctcgggtagaagcggggttgtgaatcggcgtagcgaaaagatttggccccgggatcgttcagcaagccgggaacggagtcttagccctaggtccgaccgcaggagtgtcgcatcctcacagcctgccaaacccactaaagttaccctcgtcaagtcccggaagaatgaagaatacggccttcggctggcctctcatatattcgtgaaggagattagtcaggattcactggctgcccgcgacgggaacatccaggaaggcgacgtggttctgaagatcaacgggaccgtgaccgagaacatgagtctcactgatgcaaaaacgttaatcgagaggagcaaggggaagctgaaaatggtggtccagcgggacgagagagccaccctgcttaacgtacccgacctgagtgactccatccacagtgctaacgcatccgagcgggatgacatttctgagattcagtcactggcctcggatcattccggcagatcacatgatcggcctcctcgacgaagtcgatcccggtcaccagatcagcgtagtgagccatcagaccactctcggcacagtcctcagcagcctagtaatggaagtctaaggagtcgggatgaggaacgtatctccaaaccaggagcggtaagtactcccgtaaagcacgcggacgaccacactccaaagacagttgaagaagtaaccgtcgagcgaaatgagaaacagacaccttctctccccgagccaaaacccgtgtatgcgcaggtgggccagcctgacgtcgacttgccggtcagccctagtgacggtgtgcttcctaattccacccacgaagacggtattttacgcccttctatgaagcttgtaaaatttagaaagggggacagcgtggggcttaggctcgccggcggaaacgatgtgggtatatttgtggcaggcgttctcgaagactctcccgcggccaaggaaggtcttgaagagggcgatcagattctgagagtgaacaacgtggatttcacaaatatcattagagaggaagctgtcctgttcctgctcgacttacctaagggcgaggaggtaactattctggctcagaagaaaaaggacgtatatagacgtatcgtcgaatccgacgtgggtgattctttctatatccgaactcatttcgagtacgaaaaagaaagtccttatggactctcttttaataaaggcgaagtgttccgcgttgtcgacactctgtataatgggaaactcggatcgtggctcgcaatccgtataggtaagaaccataaagaggtcgaaagaggcatcattcccaacaaaaatcgcgccgagcaactcgccagcgtccaatacactcttcccaagaccgccggtggtgatcgggcagacttttggcgctttcgggggctgaggagtagcaagcggaaccttaggaagagtcgtgaggacctgtctgcccagccggtgcaaactaagttccccgcctacgagagagttgttctaagagaagctggcttcctaagacccgtgaccatattcggcccgatcgcagatgtggcgcgggagaagctggccagagaagagcccgacatctaccagatcgccaagtcagagccccgggatgctggaacggaccagaggagcagtggaataattaggctgcacacaattaaacagattatcgatcaggataagcacgcactgctggatgtaacccctaacgcagttgatcgccttaactacgcccagtggtatccaattgtggttttcttgaatcctgattcgaagcagggagtgaagactatgaggatgaggttatgccctgaatcacgtaaaagcgcaagaaagctttacgaacggtcccataaattgagaaaaaacaatcatcacttgttcaccacgacgattaatctcaactccatgaatgacggctggtacggcgctctgaaagaagccatacagcagcagcagaatcagctcgtttgggtgtccgaaggcaaagccgatggggccacaagcgacgatctcgatctccacgatgataggttgtcctatcttagcgccccaggatcagagtacagcatgtacagcaccgatagtcgacatacctcagattacgaggatacggatactgagggaggggcgtacaccgatcaggagctagacgagactctcaatgacgaggtggggaccccacccgaatctgctattacccggagctccgaaccagtgcgggaggacagctcaggcatgcaccatgagaatcaaacctacccaccatactccccccaggctcagccacaaccaatccaccggatagactctccgggattcaagcccgcctcacagcagaaagcagaggcatcctcccctgtgccatacctcagtcccgagacgaacccagcaagcagtacgagcgccgtcaatcacaacgtcaacctgacgaacgttcgcctggaagagcccacacccgctcctagcaccagttattcacctcaggccgattcgctgcggacaccgagtaccgaagcagcacatatcatgctccgtgaccaagagccgtccctcagtagccacgtggatcccactaaggtgtatcgcaaggatccttatcccgaggagatgatgaggcaaaatcacgtactgaaacagcctgctgtatcacaccccggtcacagacccgataaggagccaaatttgacttacgaaccccagctgccctacgtggaaaaacaggcctcaagggacctggaacagcccacctatcgctatgaatcctcttcttacacagatcagttcagcagaaattacgaacacagactccgatacgaggatagggtgccgatgtacgaggagcaatggtcttactatgatgacaagcagccatacccctccagaccacctttcgacaatcagcactctcaggatctggacagcaggcaacacccagaagagtcatctgaaagaggatattttccacggttcgaggagccagccccactgagctacgatagcagaccgaggtatgagcaggctccccgcgcaagtgcccttcgacacgaagaacagccagctcccggctacgatacccacggaaggcttcgtccggaggcacagcctcatcccagtgccggccctaaaccagcagagagcaagcaatatttcgagcaatactcccgctcctatgagcaggtcccaccccagggcttcacttcccgggccgggcattttgaacctttgcacggagccgctgccgtccctccactgattccatcaagccagcacaagcccgaggccctgccctcgaataccaagccactccccccacctccaactcagacagaggaggaggaggatccggctatgaaacctcagagcgtccttacgagagtgaaaatgtttgagaacaaaagatctgcatcgctagaaactaagaaagatgtgaatgataccggaagcttcaagcctcccgaggtcgcctccaagccatccggggctccaatcattggcccaaaaccaacctcacaaaatcagtttagcgagcatgataagactctgtaccgtattccggaacctcagaaaccacagctcaagccccctgaggatattgtaagatccaatcattacgatcctgaggaggacgaagagtattacagaaagcagcttagctacttcgaccgtcgcagctttgagaataagccgcccgctcatattgccgccagtcacctcagtgaaccagcaaaacctgcgcactctcagaaccagagcaatttttcaagttacagcagcaaaggaaaaccacccgaagcagacggcgtggatcgctcctttggagaaaagcgctatgagcccatccaagctacaccccccccaccccccctccccagtcagtacgcgcagccatcacagccagtaacctcagccagcctccacatccacagtaaaggcgcccacggcgaaggcaacagtgtgtcgctcgacttccagaattccttggtcagcaaacccgaccctcccccatcacagaacaagcctgcaacattcaggcccccaaaccgggaggataccgcccaggcagccttctacccacagaaatcctttcccgataaggctcccgtgaacggaactgagcaaacccagaaaacagtaactcctgcatacaaccggtttactcccaagccttacaccagcagcgcgaggcctttcgagcgcaaattcgagtccccaaaattcaaccacaacctacttcccagcgagacggctcataaacccgacctgtcctccaagacaccgacaagccctaagactttggtgaaaagtcactcgctggcacaacccccagagtttgactcaggagtggaaaccttttctatccacgccgagaagcccaagtaccagatcaataatatctcaacagttcctaaggccatccccgtctccccttctgccgtcgaggaggacgaagatgaggacggtcatactgtggtagcaaccgccaggggtatcttcaatagcaacgggggggtgctcagctcaattgagactggcgttagcatcataatcccacagggtgccatcccagaaggcgttgagcaggagatctacttcaaggtgtgtagagacaacagcatcctgcctcccctagacaaagaaaaaggggagacactgttgagccctttagtcatgtgtggaccacacggcctcaaatttctgaagcctgtagagttaagactgcctcattgcgacccaaagacatggcagaataagtgcttgcctggcgacccaaactacctcgtcggtgccaattgcgtgtcggttctgatcgaccatttctag

SEQ ID NO: 137931 - DNA, 5007 bp, synthetic construct
  misc_feature 1..5007: note = Description of Artificial Sequence: Synthetic coding sequence
  source 1..5007: mol_type = other DNA
atgtcagccagagcagccgcagctaagtccaccgctatggaggagaccgctatttgggaacagcacactgtgaccttgcaccgggcccctggtttcggattcggaattgccatttcaggagggcgagacaacccccattttcagagcggagagacctccatcgttatttctgacgtgttgaagggtggaccagccgagggacagctgcaagagaacgatagagtggccatggtaaacggagtgtcaatggataacgtcgagcatgcttttgctgttcagcagctgcggaagtctgggaaaaacgctaagatcactatcagaagaaaaaaaaaggtccagattccggtttccagaccggacccagaaccagtcagcgacaacgaagaggacagctacgatgaagaaatccatgacccccgctccgggagaagtggtgtagtgaataggaggtccgaaaagatctggcctagggataggtccgcgtcgcgcgaacggtccctgagcccacgatccgaccgaaggagcgttgctagttctcagcctgccaaaccaaccaaggtgacactcgtcaagtcccgtaagaacgaagaatacggcttgagattggcatcccatattttcgtgaaggagatttcccaggatagtctcgccgcaagggacggcaatatacaagaaggcgatgtagttttaaaaattaacggcaccgtgactgagaacatgagcttgacagacgccaaaacactgattgaacggagcaaggggaagctcaaaatggtggtccagagggacgaacgggcaacactcttaaacgtgccagatctgtctgacagcattcatagcgcgaatgcatccgagagagatgatatctccgaaatccagtcgctggcatctgaccattccggccgttctcacgaccgtccaccccgcagaagcaggtctaggagcccagaccagcggagcgagccaagcgatcactcccgccattcgccacagcagccttcaaatgggtctcttaggtcgcgtgacgaagaacgcatctctaaaccaggcgcagtgtcaacccccgtgaagcacgccgacgatcatacaccaaagactgtagaagaggtcaccgtggagaggaacgagaagcagaccccctcactgccagagcctaagcctgtttatgcccaggtggggcagccagacgtagacctgccagtgtcaccaagcgacggggtgctcccaaatagcacacatgaagacggaatcctgagacctagtatgaaactcgttaagttcaggaaaggtgattctgtagggctacgactggccgggggtaatgatgtggggatttttgtcgccggggtgcttgaggattcccccgcggccaaagaaggactcgaagaaggggatcagatccttcgggtcaacaacgtggacttcaccaacattattagagaggaggctgtactcttcctgttagacttgcctaagggcgaggaggtaacaatcttggctcagaagaaaaaagacgtataccgacgcatcgtggagtcagacgtgggcgacagtttttacatccggactcactttgaatacgagaaagagagtccctacggactgtctttcaacaaaggggaggtattccgagtggtggatactttgtataacggcaagctgggatcctggttagctatccgaattggaaagaatcacaaagaagtcgagcgcggaattatccccaacaaaaaccgggcggaacagctggcatccgtgcaatatacgctcccaaagaccgccggaggagatcgggccgatttttggcgcttcaggggcctacgctcttccaagagaaatctgcgcaagtcccgcgaggatctcagtgctcagcccgtacagacaaaattcccggcctatgaacgggtagttctccgtgaagccggatttctgcgcccagtgacgatctttgggcccatcgctgacgtcgcccgagagaaactggcacgtgaagaacctgatatttatcaaatcgccaaaagcgaacctcgcgacgccgggaccgaccagagaagttccggcattatcaggctgcataccattaaacagattatcgaccaggataagcatgcccttctggacgttactcctaacgccgttgaccgactgaattacgcacagtggtatccaatcgtggtgttcctgaatccagacagcaagcagggggtgaagacaatgcgaatgcggctgtgtcccgagagtcggaaaagtgcacgcaagttgtatgagcgcagccataagctgcgaaagaacaaccatcacctgttcaccacaaccattaatctaaacagtatgaacgatggttggtacggagcactgaaggaggcaatccagcaacagcaaaatcagctggtttgggtttccgaaggaaaggcggatggagcaacatcagacgacctggatctccacgacgatcgcctgagttacctgagcgcaccggggtccgaatactccatgtactccactgatagccggcatacctcggattatgaggacaccgatacggagggtggggcatatactgatcaggaactggacgagactctgaacgacgaggtgggaacgcctcccgagagtgctattaccagatcttctgagcccgtgagagaagactcgtccgggatgcaccacgagaaccagacatatccaccttatagccctcaggcccaacctcaacccattcaccggattgattctcctggatttaagcctgccagccaacaggtctatcggaaggatccctatccggaagaaatgatgcgccagaatcacgtgctgaagcagcctgccgtgagccacccaggccatcgacctgataaggaacccaatttgacctatgagccacagctcccctatgtagagaagcaggcatccagggacctggaacagccaacctatagatacgaaagtagctcctacactgatcaattcagccgcaattatgaacatcgcctcaggtacgaagaccgcgtgccaatgtacgaagagcagtggtcctactatgacgacaaacagccctatcccagtcgaccaccttttgataatcagcacagtcaggatctggactctcgtcagcaccccgaggagtcaagcgagaggggttatttcccaaggttcgaagagccggcaccactcagctatgacagtcggcctaggtacgagcaggcgcctagggcatctgccttgcgccatgaagaacagcccgccccgggctatgacacacacggcaggctgagacccgaagcacagccccatcccagcgccgggccgaagcccgccgaatcaaaacaatactttgagcagtactcacgcagctatgagcaagtgcctccacagggcttcacctctcgggcaggccactttgagccgctgcacggagctgcagctgtgcccccgctgattccttcctcccagcataaaccagaagccttacctagcaacactaaacctctccctcccccacctacccagaccgaagaagaagaggacccagccatgaaaccacagtccgtgctgacccgagttaaaatgtttgaaaataagcgctctgccagcctggaaacaaaaaaagacgtcaatgatactggaagctttaaaccaccggaggtggctagcaagccaagtggcgcgccgattatcggcccaaagccaacttcccagaaccagttctctgaacatgataaaacactctacaggatcccagagcctcagaaaccccagctcaagcccccagaagatatcgtgcgttctaaccactacgatcctgaggaggacgaagaatactaccgaaagcagctcagttacttcgatagacgctcctttgagaataaaccgccggcccacatcgccgcttcacatttgtcggagcccgccaaacccgcccactctcagaatcagtcgaacttctctagctacagcagtaaggggaaaccccccgaggccgacggggtcgataggagcttcggcgaaaaaagatacgagcccattcaggccacaccccctccccccccactgccgtcccaatatgctcaacccagtcagcccgtgacatctgcaagcctgcacattcactccaagggggcccacggggaggggaatagtgtgtctctggacttccaaaactccctggtctcgaagcctgatccccctccatcacaaaataaacctgccacattcaggcctccgaacagagaggatactgctcaggccgccttttatcctcaaaagtccttcccggacaaagcaccagtgaatggtaccgagcagacccaaaagacagttacccccgcctacaatcgatttaccccaaaaccttacacctccagtgcccggccttttgagcggaagttcgagtctccgaagttcaatcacaatctgttgccatccgagacggcgcacaaaccagaccttagtagtaaaacccccacatcacccaaaactctggtgaagagtcactctttggcccagcccccagagttcgacagcggggtggaaacattctccatccacgctgaaaagccaaaatatcagatcaacaatattagcactgtgccaaaagctatcccggtgtctcctagtgccgtggaggaggacgaagacgaggacgggcatacagtcgtagcgacagccaggggaatctttaactctaacgggggagtgttgagtagtatagagacaggggtgtccattattattcctcagggggccattccagagggcgttgaacaggagatttactttaaggtgtgtcgagacaactccatcctaccaccgctggacaaggagaagggagagactttactgagccctttggttatgtgtggccctcacggactaaaatttcttaaaccagtggagctgagactcccccactgtgatcccaagacttggcaaaacaagtgtttgccaggcgaccccaattacctcgtgggagccaattgtgtgagtgtgctaattgaccatttttag

SEQ ID NO: 137932 - DNA, 2982 bp, synthetic construct
  misc_feature 1..2982: note = Description of Artificial Sequence: Synthetic coding sequence
  source 1..2982: mol_type = other DNA
atgcccgtgaggggcgatcgtggctttcccccccgcagagaactttctggatggttaagggctcctggcatggaggaactaatttgggaacaatatacagttacactgcagaaagatagtaagaggggctttggcatcgccgtgagcggcggacgggacaaccctcactttgaaaatggtgaaacctccattgtaataagcgacgtcctgccaggggggccggcagacggactgctgcaggagaacgatcgtgtagtcatggtaaatggtacccctatggaggacgtcctgcatagctttgccgtccaacagctgcgtaaatctgggaaagtagccgctattgtcgtgaagcgcccgagaaaggtgcaagttgcggccctgcaggcctcacctccactggaccaggacgacagggccttcgaggtaatggatgaattcgatggccgcagcttccgatcggggtactccgagagatcacgtctcaactctcacggtggcagatcacgcagttgggaagactctcctgagagggggaggccgcatgaacgggccaggtcccgagagagggacctgagtcgcgatcgatccaggggccgctctctggagcgcggacttgatcaggaccacgcacgcaccagagataggagtaggggaaggtccctggaaaggggattggaccatgacttcggacctagccgcgatagagacagggatcgctcccggggacgttctatcgatcaggactatgaacgagcttatcatcgtgcttatgatcctgattatgagcgggcgtactctcccgagtacaggaggggggccagacacgacgcccgcagtaggggaccccgaagccgcagcagggaacacccgcactccagaagcccctcgcccgagcctagaggaaggccagggccaattggggtgctgttgatgaagtctagggcaaatgaggaatatgggctccgcctaggttcccagatattcgtgaaggaaatgactcggactggcctggctactaaggatggaaacctccacgaaggcgacatcattctcaaaataaacggcacggtaaccgagaatatgagcctaacagacgcccgcaagctgatcgagaagagtagaggcaagcttcaactcgtggttctgagagatagtcagcagactttgattaacatccccagcctcaatgactctgattcggagatcgaggacatcagcgagattgagagcaacagaagcttcagtccggaggagaggcgacatcagtactcagattacgactaccacagctctagcgaaaaactcaaagagcgcccgtcatctcgcgaggacacacctagccggctgagcagaatgggtgctacacccacaccattcaagagcaccggagatatagctggaacggtagtccccgagactaacaaagaaccccggtatcaagaagatcctcctgctcctcagccaaaggccgcccctaggacttttctgaggcccagccccgaagatgaagcgatctatggtcctaatacaaagatggttcggttcaagaagggggattctgttggactgcgattagctggggggaatgacgtaggcattttcgtagccggcatccaagaggggacctctgctgaacaggaggggctccaagagggagatcagatcctgaaggtgaatacccaggacttcagggggctggtgcgggaagacgccgtgttatacctgctcgaaatacccaagggcgagatggtgactatcttggcccagagccgcgcagacgtctatcgagatattttggcttgtgggcggggcgactcttttttcatcagatcccattttgaatgcgaaaaagaaaccccccagagtttggcttttactaggggagaagtcttccgcgttgtcgatactctgtacgacggcaaactggggaactggctcgccgtcaggattggtaatgagcttgaaaaaggccttatccccaataaaagccgcgcagagcagatggcatcggtgcagaacgctcagagagacaatgccggtgaccgagcagatttctggaggatgcggggccagcgatctggcgtcaagaaaaacttacgcaagtccagggaggatcttacagcagtcgtgagcgtctcaaccaagttccctgcttacgaaagggtgctgctgagggaggccggatttaagcgcccagtggtgctctttggccctatcgccgatattgcgatggagaaactggctaacgagctccccgattggttccagaccgctaaaactgaacctaaagatgccggaagtgaaaaatcaacaggtgttgtgagactaaacactgtgcgtcagataatcgagcaggacaagcatgcactgttggacgtaaccccaaaggccgtggacctcctgaattatacccagtggtttcctatagttatctttttcaatccggactctaggcaaggcgtgaagaccatgcgacaaaggcttaacccgaccagcaacaaaagtagccggaagctcttcgatcaagccaacaagctgaagaagacatgtgctcatctgtttacagctaccatcaacctgaatagcgctaatgactcttggttcgggagtttaaaagataccattcaacatcaacaaggcgaagccgtatgggtttctgagggaaagatggaagggatggatgatgatccggaggatcgtatgagctacctgactgcaatgggggcggattatttaagctgtgattctaggctaatttcggacttcgaggatactgacggggaggggggggcctacacagacaacgaactcgacgaaccggccgaagagccactggtgagctccattactcgttcgagcgaacctgtgcagcatgaagaggtgcgcagaggcaggccacgcgccggcaccggcgagcccggtgtgtttctggccctgtcttggactgccgtatgctctggctgctgcggcagacatagctag

SEQ ID NO: 137933 - DNA, 3132 bp, synthetic construct
  misc_feature 1..3132: note = Description of Artificial Sequence: Synthetic coding sequence
  source 1..3132: mol_type = other DNA
atgcccgttcgaggcgaccggggatttcccccaagaagggaactgtcagggtggttaagagcccccgggatggaggagttaatctgggagcagtacacggtcactctgcaaaaagactctaaacgaggattcggtatcgccgtctctggcggcagagacaacccacacttcgagaatggagaaacatccattgtgatttctgatgtgctgcctggcggtcccgctgatgggctgctgcaagagaacgaccgagtagtgatggttaatgggacgcccatggaggacgtcctgcactcatttgcagtgcagcagttgagaaagtcgggcaaagtggcagcgattgttgttaagaggcctaggaaggtgcaggttgcggccctgcaagcttcgccccccctggaccaggacgaccgagcctttgaagtcatggatgagttcgatgggaggagttttaggagcgggtacagcgagagatctcggctgaattctcacggggggagaagcaggtcgtgggaagatagcccggagcggggcaggcctcatgagcgcgctcggtcacgggagcgagatctgagccgcgacaggagcaggggaaggagtcttgaacgtggcctggatcaggatcacgctcggacacgagatcggtccaggggaagaagcttagagagagggctggatcatgacttcggaccgtcgcgcgatagagatagagaccgctctaggggcaggtctattgatcaggactatgaacgagcttatcacagagcatatgacccagattacgaaagagcatatagcccagaatatcgtcggggggcccgccacgatgcacggagtcgagggccacggagcaggtcacgggagcatccccatagccgtagcccatcccccgagccacgtggtcgccctggaccaattggggtccttctgatgaagtctcgcgctaacgaagaatacggtctccgattggggagtcagatctttgtgaaggagatgacgcgaaccgggctcgcgactaaggatggcaatttacatgagggcgatataatcctgaagattaatggaacagttaccgagaatatgtctctaaccgacgctagaaaattaatcgagaagtcccgtggaaaattgcaactggtggtcctcagggactcccagcagaccctgataaacatcccaagcctgaacgactctgatagcgagatcgaagacataagcgaaattgaaagcaaccggagtttctcacccgaggaaaggcgtcaccagtattcagactatgactaccattccagctcggagaaattgaaggagaggccttccagccgggaagacactccgtctcgtctttccagaatgggcgccacacccactcctttcaaatccacgggggacattgcaggcactgtggtaccggagactaataaggaaccacgatatcaggaagacccccctgctccccagcctaaggccgctccccgaacttttctgagaccaagcccagaagacgaggcaatctacggtcctaacacaaaaatggtaagatttaaaaaaggtgatagcgtcggcctgagactagcagggggcaacgacgttggcattttcgtggctgggatccaagaaggtacatctgcagagcaagaagggttacaagagggggatcaaattctgaaagtcaatacccaagatttccgagggctcgtgcgtgaggacgccgtgctgtatttgttggaaattcctaagggagagatggtaaccatcctggcacaaagccgcgcagatgtctatagggatatattagcttgcggacgtggtgactcattttttattaggtcccatttcgagtgcgaaaaggagactccccaatcgctggccttcaccaggggggaggtgtttagagtggtggatacgctgtatgatggtaaactgggcaactggcttgctgttcgcattggaaacgagctggagaaggggttgatccccaacaagtcgcgagctgagcagatggcaagcgtgcaaaatgctcagagagacaatgctggcgacagggcagatttttggagaatgcgcgggcagcgaagcggagtcaaaaagaatctgcgcaaaagccgggaagatctcactgcagtggtcagtgttagtaccaaatttccagcgtatgaaagagtgctcctccgtgaggccggatttaagaggccagtagttctgttcggtcccatcgctgacatagctatggagaaattagctaacgagctgccagactggttccagactgcgaagaccgaacccaaagatgccggcagcgaaaagtcaactggagttgtccgcctaaatactgtgcgacaaattatcgagcaggataaacacgctctcctggatgtgacacccaaggcagtagacctgctgaattacacgcagtggttcccgatcgttattttttttaatccagattccaggcagggcgtcaagactatgaggcagagacttaacccaacaagtaataagtcctctcgcaaattgtttgaccaagctaacaagctgaaaaagacctgtgcccacttattcaccgccacaattaatctcaacagcgctaacgatagctggtttggcagcctgaaagacaccatccagcaccagcagggcgaggccgtgtgggtgagtgagggaaagatggaagggatggatgacgatccagaggaccgcatgtcctacctgacggcaatgggcgctgattatctttcttgcgactctagactcatcagcgatttcgaggacaccgatggagaagggggcgcttacacagataacgaattggatgagccagccgaagaaccccttgtgagcagtatcactcgctcttcagaaccggtccagcacgaggaaatcgagatcgcccagaaacaccctgatatctatgcagtgcctataaagacacacaagcctgatccagggacgcctcagcacacttcttctagaccacctgaacctcagaaagctccatcgcggccttaccaggacacaaggggctcatatgggtctgacgcggaggaagaagagtatagacagcagttaagcgagcatagcaagaggggctattacggtcagtctgcccgctaccgggacaccgaactttag

SEQ ID NO: 137934 - DNA, 3573 bp, synthetic construct
  misc_feature 1..3573: note = Description of Artificial Sequence: Synthetic coding sequence
  source 1..3573: mol_type = other DNA
atgccagtgcgtggtgatagaggatttccccctagacgagagctgtcaggttggctgagggcccccgggatggaggaacttatatgggaacagtacactgtgactctccaaaaagactctaagaggggattcggaattgccgtcagcggagggagagacaaccctcacttcgagaacggtgaaaccagcatcgttatttcagatgtactgcctggtggacccgctgacggcctcctgcaggaaaatgacagagtggtcatggttaacgggacacccatggaagacgtacttcactctttcgccgtgcagcagttgaggaaaagcggaaaagtggccgcaattgtggtgaagcgacctcgcaaggtgcaagtcgccgcccttcaggcctctcctcccttggaccaggatgaccgcgccttcgaagtgatggatgaatttgatggccggtcgtttaggagcggctacagtgaaaggtcccggttgaattcgcatggaggaagaagcaggtcttgggaggacagcccagaacgaggcaggccgcacgagcgtgctagatcaagggaacgggacctctcccgggaccggtcccggggccgctctctcgaaaggggactggatcaggaccacgcccgaacaagagacaggtctcgaggacgtagcctcgagcgtggactcgatcatgattttggcccaagcagagacagggacagagaccgcagccggggcaggtccatcgaccaggattacgaacgggcgtaccacagagcatatgaccctgactacgaaagggcctactctccggagtatcggagaggtgctaggcatgacgcccgcagtcgtggcccacgctccaggagccgagaacacccacactcaagatcaccttcacctgagcccagggggcgacccgggcctattggggtgttgctaatgaagtctcgggccaacgaagaatacggactgcgcctggggtctcagattttcgtcaaggaaatgactcggactggtctggcaacgaaggacggcaaccttcacgaaggcgatatcattttgaaaataaatggtaccgtcacagaaaacatgagcttgaccgatgctcgcaaattgatagaaaaaagccgaggcaagttgcaactggtggtgctgagggatagtcaacagacactgatcaacattccatccttaaacgactctgactccgagatcgaggacattagcgagatcgaaagtaatcggtctttctcaccagaagagagacggcaccagtactcagattacgactatcattcgtcatctgagaagctgaaagaaagaccatcatcccgtgaggacacaccatcccgcctgtcaaggatgggtgccaccccaaccccttttaagtctaccggagacatagcaggcaccgttgtaccagagaccaataaagaacccagataccaggaagaccccccggctcctcagcctaaggcagctccccgcaccttcctgcggccatcacctgaggacgaagcgatctacgggcccaataccaaaatggtgagatttaagaagggtgattctgttgggctgaggctcgccggcggaaacgatgtaggcatattcgttgcgggaattcaggaggggactagcgcagagcaggaggggctgcaggagggagatcagatcttgaaagtcaacacgcaagacttcaggggcctcgtccgggaagacgctgtcctctacttattggagattcctaagggtgagatggtgacaatcctggcacaaagcagagctgatgtatatagagacattctggcgtgcgggagaggagattctttcttcattcgttcccacttcgagtgtgagaaggaaacaccacagagtcttgcctttacaagaggcgaggttttcagagtcgtggatacactctatgatggcaaactgggaaattggctcgcggttcggatcggaaacgagctagagaaagggctcatccccaacaagtcccgcgcagagcagatggcaagtgttcagaacgcccaacgtgataatgccggtgatcgcgcagatttctggcgcatgcgtggacaaagatctggtgtgaagaagaacctgcggaaaagccgagaggatctgaccgctgtggtcagtgtttcaactaaattccctgcttacgagcgggtactgctacgggaagccggcttcaagcggcccgtcgtgttgtttggccctattgcggacatcgcaatggagaagctcgccaacgagttgccggattggtttcagactgctaaaactgagcccaaggatgctggtagcgagaaatctactggggtggttagactgaacactgtgcgccagatcatcgaacaggataagcacgccctgcttgacgtcacacccaaagccgtggacctcttgaactatacgcagtggttcccgatagtcatttttttcaacccggatagtcgccagggcgtaaaaaccatgagacagcggctcaatccaacctccaacaagagttctagaaagctgtttgatcaagccaacaaacttaagaagacctgcgcccacctgttcaccgccaccattaacttgaatagcgccaacgactcttggtttggatccttaaaagacacaatacagcaccagcagggagaagctgtgtgggtctcagagggcaaaatggaggggatggacgatgaccctgaagatagaatgtcctacctaactgccatgggggctgattacctgtcctgtgattccagactgatttctgattttgaggacaccgacggtgaaggcggggcttacaccgacaacgaactggacgaaccggcggaggagccactggttagctccattacaagatcttctgagccagtccagcatgaggaaagtatcaggaagccttctccagagccacgggcccagatgagacgcgccgcgtcaagcgaccagctgagggacaattcgccaccacctgcgttcaagcctgagcccccaaaggccaagacccaaaacaaggaggagtcatacgacttctctaagtcatatgagtataaatccaaccccagtgccgtggcaggcaacgaaactcctggcgcctccaccaaaggttatcccccacctgtagctgccaagcctacatttggaagatccatcctaaaaccgtcgacccccattccacctcaggaaggagaggaagtaggggagagctctgaggagcaagacaatgcccctaaatcagtgttgggaaaggtcaagatctttgaaaagatggaccacaaagctaggctgcagagaatgcaggagctgcaggaagcacagaatgcgcgcattgagatcgctcaaaagcaccctgacatctatgccgttccaattaaaactcacaagcccgacccaggcacaccgcagcacacctcctcccgacccccagaacctcagaaagcaccaagccgcccatatcaagacacacgcggcagctacggatccgatgctgaggaagaagagtaccggcaacaactgtccgagcatagcaaacgaggctactacggtcaatccgcgcgttaccgagataccgaactatag

SEQ ID NO: 137935 - DNA, 306 bp, synthetic construct
  misc_feature 1..306: note = Description of Artificial Sequence: Synthetic coding sequence
  source 1..306: mol_type = other DNA
atggaggaattaatctgggaacaatatactgtgacactgcagaaagactctaagcgaggtttcggcatagctgtgtctggcggccgcgacaacccccacttcgaaaacggagagacatccatcgttatttccgacgtgctccccggcggcccagctgatggcctgttgcaggaaaatgacagagtcgtgatggtgaatgggactcccatggaggacgtgctgcacagctttgcagttcagcagttacgcaagtctggtaaggttgcggctattgtgagcacaggattcgcatttagcctaccatag

SEQ ID NO: 137936 - DNA, 486 bp, synthetic construct
  misc_feature 1..486: note = Description of Artificial Sequence: Synthetic coding sequence
  source 1..486: mol_type = other DNA
atggaggaactgatctgggagcagtacaccgtcaccctgcagaaagacagtaagcgaggattcgggatcgctgtgtctgggggacgagataatccacacttcgagaacggagaaacctccattgtgatttccgatgtcctccccggtgggcctgccgacggattgctgcaggaaaacgaccgggtggtcatggtgaacggaaccccgatggaggacgttctccacagttttgccgtacagcaactgcgaaagagcggcaaagtagcggccattgtcgtgaagcgtccaagaaaagtacaggtggccgcactgcaggcgtcacctccattggaccaagatgaccgcgcctttgaggtgatggatgaattcgacggccggagctttcgttctgggtactccgaacgctcacggctcaatagtcatgggggcagatcacgctcttgggaggactccccagaaaggggacgcccacacgaacgcgcgtag

SEQ ID NO: 137937 - DNA, 3063 bp, synthetic construct
  misc_feature 1..3063: note = Description of Artificial Sequence: Synthetic coding sequence
  source 1..3063: mol_type = other DNA
atggaagagcttatctgggagcagtacacggtaacactacagaaagacagtaagcgcggttttggcattgctgtgtcaggggggagagataatccccatttcgaaaatggcgagacctccatagtaatctctgatgtgttgcctggaggccccgccgatggactgctgcaggaaaatgacagggtggtaatggtaaatggcacacctatggaagacgtcctacacagtttcgccgtgcagcagctccggaagtctggaaaagtggctgcgattgtcgtgaaaaggccccggaaagttcaagtagccgcactccaagcctctcctccacttgatcaggatgatagagcctttgaggtgatggacgagttcgacggcagaagctttcgaagcggttatagcgagcgatctagacttaactcccacggcggccgtagccgcagctgggaggattcacctgagaggggcaggccacatgagagagctcgtagcagagaacgggatctgtctagggatcgctccagaggtcggtcactcgaacggggactcgaccaagaccatgctcgaacccgcgataggtctcgtggcaggtcactggaaaggggactcgaccacgacttcggtcccagcagagatcgagacagagacagaagcaggggaagaagtattgatcaggattatgaacgggcctaccacagggcatacgaccctgattatgagagagcatacagtccagaataccgtcgaggagccaggcacgatgctagatctcgcgggcccagatcccgtagtagggaacatccccactctagaagcccttccccagaaccaagagggcggcctggacctattggagtactgctgatgaagtctagggcaaacgaggagtacgggctgcgactgggatcacagatctttgtgaaagagatgaccagaacaggccttgcaacaaaggacgggaatctccatgagggtgacatcattctcaaaataaacgggaccgtgactgaaaatatgtcacttacagacgctcgaaagctcatagaaaagagtcggggcaagctgcagctggtcgtgctgcgtgattctcagcaaaccttgatcaacattccatccctgaatgattccgattcggaaatcgaggatatatctgagattgaatccaacaggtctttctcacccgaggagcgccggcaccagtacagcgattacgactaccactcatcttccgagaagctgaaagagcggccttcttctcgagaggatactccttcccggctctccagaatgggggctacccccacacctttcaaatcaacgggggacatcgctggcaccgtggtccctgagaccaataaggagcccagataccaggaggaccctccagccccccagcctaaagcagcaccacgcaccttccttcggccttcgcctgaggacgaagcaatatacggacccaataccaaaatggtgcgctttaaaaaaggcgattccgtggggctgaggctcgccggcggaaacgacgtcggcatctttgtggccgggatccaggagggaacatctgccgagcaggagggcctgcaggaaggggaccagatcctaaaggtcaacacgcaagatttcaggggactcgtgagagaggacgcagtactgtacttactggaaatcccaaagggagagatggtcaccattctggcgcagtccagggcggacgtgtaccgcgatatactggcctgtgggagaggagatagcttctttattcgaagccactttgagtgcgaaaaggaaacaccccagagtttagcctttacacgcggagaggtgtttcgggtagtggacacattatacgacggcaagttgggaaactggctggccgtaaggatcggcaatgagctggagaaaggcctcatacccaacaaatctagagccgaacaaatggcctctgtacagaatgcccaacgtgacaatgcgggcgatcgagctgatttttggaggatgagaggccagcgctcaggagtgaagaagaacctccgaaagagtcgggaagatctcaccgctgtggtgtccgtgtccactaagtttcctgcctatgaacgtgttctgctgagggaggccgggtttaagcgacctgtggttttattcggccctattgcggatatcgctatggaaaagctggccaacgaactgccagactggtttcagactgctaagacagagcccaaagacgccggatcagagaaatccaccggcgtggtgcgactgaataccgtgagacaaatcatcgagcaggacaagcatgcactgttggacgtgaccccaaaggctgtcgatctgctgaattatacccaatggtttcccatagttatcttctttaatcccgacagcaggcaaggagtaaagaccatgcgtcagaggcttaacccgaccagtaataaatcctctcggaaacttttcgaccaggcaaacaagctcaagaagacttgtgcccatttattcacagcaacgatcaatctgaatagcgccaatgattcttggttcggttctcttaaggacacaattcagcatcaacaaggcgaagcagtgtgggtttctgaaggcaaaatggagggcatggacgacgatccagaagatcggatgtcctacctgacagccatgggcgctgactacctgtcctgtgattcccgcttgatttccgactttgaggacactgatggcgagggcggggcctatactgacaacgagttagatgagcccgcagaggagcccctcgtctctagtatcacaagatctagtgagcccgtacagcatgaggagatcgaaattgcgcaaaagcacccagatatttacgccgtaccgattaaaacccacaaacccgatccaggaaccccccagcacacaagttcccggcctccagagcctcagaaggccccaagtcgcccgtaccaggacacccgaggatcctacggatcagacgcagaggaggaggagtatcggcagcagttgtccgagcatagcaagagaggctactacggtcaatctgcaaggtaccgagatactgagctctag

SEQ ID NO: 137938 - DNA, 3474 bp, synthetic construct
  misc_feature 1..3474: note = Description of Artificial Sequence: Synthetic coding sequence
  source 1..3474: mol_type = other DNA
atgaaaaccgcccaggcccttcatcggatgtggatacaagccgtaaaaaaactccgacgctggaagggcagagcccccggtatggaggaactgatttgggaacaatatacggtcacattgcagaaggatagtaagagaggttttggaattgccgttagtgggggaagggacaacccccattttgagaatggagagacatcgatagtgatcagcgatgttttaccaggagggcctgctgacggcctgctgcaagagaacgaccgcgttgtgatggttaacggaactcctatggaagacgttttgcacagttttgcagtgcaacagctccggaagtccggcaaggtagccgccatcgtggtgaagaggccacgcaaggtccaggtcgccgccctgcaggctagccccccactggatcaggatgatcgggcttttgaggttatggatgaatttgacgggaggtctttccgctctggatacagtgagcgaagtcggctgaacagtcacggcggaaggagtcgatcctgggaggatagcccggagcgtggcagacctcatgaacgcgctagatcacgtgagagggacctctctagggacagatcccgcgggcggtcccttgagcgggggctggaccaggatcacgctcgtacccgcgacaggtcacgaggtcgatctctggaaagaggcctagaccatgattttggtccatctagagacagagaccgtgatcggtcccgaggaaggtcaatcgatcaggattatgaaagagcataccaccgggcatatgatcctgactacgaacgggcttatagtccagagtatcgccggggcgctaggcacgatgcgaggtctagggggcctagatcccggagcagagagcaccctcacagcagatccccctctcccgagcctcgggggcgacctgggccaatcggcgtgctgctcatgaagtctagggccaatgaagaatacggccttaggctggggtcccagatcttcgtgaaggagatgacccgtacggggttggccacgaaggatggcaacctgcacgagggagatattattctgaaaatcaatggcacagtgaccgaaaacatgagtctgacagatgctcgcaaactcattgagaagagcagagggaaactgcaattggtggtgttgcgggacagtcaacagactctaatcaacatcccttccctgaacgattcagatagtgaaatcgaggacattagcgagattgagagtaatcgaagcttctccccagaagagcggcggcaccagtactccgactatgactaccactcaagctccgagaagctcaaggaacgcccctcctcacgcgaggacactcctagccgcctctcccggatgggcgccacacccaccccctttaagtcgacgggggacatcgcggggacagtggtgccagaaaccaacaaagaacctaggtaccaagaggaccctccagccccacaaccaaaggctgccccaaggacgtttttgcgaccctcacccgaggatgaagcgatttacggacctaataccaagatggtgcgctttaaaaagggagatagcgtagggctcagactggctggcggaaatgatgtggggatcttcgtggctggaatccaggagggtacgagcgccgaacaggagggcttgcaggaaggtgatcagatcctcaaggtgaatactcaggacttccggggtcttgtgcgggaagatgcagtcctataccttctagaaattcctaagggagaaatggtgaccattctcgcacagtcacgggctgatgtttatagggacatcctggcctgcggaaggggcgacagctttttcatccgctcccattttgagtgcgaaaaagaaacaccgcagtctctcgcttttacacgcggtgaagtgtttcgagtggtcgataccctctacgacgggaagttgggtaattggctggccgttcgcattggaaatgaactggagaaaggactgatcccaaacaaaagccgggccgagcagatggcatccgtgcagaatgctcaacgagataacgctggggatcgcgcggatttttggcgcatgcgggggcaacgtagcggagtgaaaaagaatctgcggaaatcccgggaggacctgacggccgtcgtgagcgtttccaccaagtttcccgcttacgagcgtgttcttctacgcgaagccgggtttaaacggccagtggtgttgttcggaccgattgcagacatcgctatggagaagctggccaacgaattgcccgactggtttcagaccgcaaagacggaaccaaaagacgccggaagtgaaaaaagtactggagtggtgcggctaaataccgtacgacaaatcatcgagcaggataagcacgccttactcgacgttacacccaaggctgtggacctcctgaattatactcaatggtttcccatagtcatttttttcaatcccgattctagacaaggagtgaagaccatgaggcagcggcttaaccccactagtaataagtccagcaggaagttatttgatcaggcaaataaacttaaaaaaacgtgtgcacatctttttaccgcaaccataaacttgaattctgctaatgattcctggtttggctcgctgaaggataccatacagcatcagcagggcgaagctgtatgggtttctgaaggtaagatggagggaatggacgacgacccggaggaccgaatgagctacctaaccgctatgggtgccgactacctgagttgtgacagcagattgatctcggacttcgaggataccgacggggagggaggagcttatactgacaacgagcttgacgaaccagccgaagagcctctcgtgagctcgattactcggagttctgagcccgtccagcatgaggaggctaagacacaaaacaaagaagaatcttacgatttcagcaaatcttacgaatacaagagcaaccccagcgcagtcgccgggaatgagacaccgggcgccagcactaaagggtacccacctccggtggccgctaagccaacattcggcagaagcatattaaaaccatcgaccccaatcccgcctcaagagggcgaggaagtaggggagagctctgaggagcaggataacgcccctaagtctgtcctggggaaggtcaagattttcgaaaaaatggatcacaaggcgcggctccagcgtatgcaagagctccaagaagcccagaatgcccggatcgaaatcgctcagaagcaccccgacatctacgccgtgcccattaaaacccacaaaccagaccccggtacccctcaacacacgagctcccggccacccgagcctcaaaaagccccctccagaccatatcaggacactcgcggcagttatggttcagacgccgaggaggaagagtatagacagcagctctcagagcatagcaagagaggctattatggacaatccgccagatatcgggatacagagctgtag

SEQ ID NO: 137939 - DNA, 3666 bp, synthetic construct
  misc_feature 1..3666: note = Description of Artificial Sequence: Synthetic coding sequence
  source 1..3666: mol_type = other DNA
atgaaaacagcccaggcattgcatcgaatgtggatccaagccgtaaaaaagttgcggcgctggaagggcagggttagcccaagcgccagctctcccctggtcttccctaacctcagctcttgggaaggagaaggaagtaagacaattctgactgctccggggatggaggaattgatatgggagcagtacaccgttactttgcagaaagactcaaaacggggctttggtatcgcagtgagcggagggagagacaaccctcatttcgaaaacggggagacgtctattgtcatttccgacgtcctgccaggtggacctgccgatggcctcctgcaagaaaacgacagggtggtcatggtgaacggcacccctatggaggatgtgctccatagctttgcagtgcaacaactgagaaaatccggcaaagtggctgcaatcgtggttaagcgcccccgtaaggttcaggtagcggcgcttcaggccagcccccctctggaccaggatgatcgcgccttcgaggtgatggatgaatttgatggacgctcctttcggtcgggatattccgagcggtctaggctaaatagccacggcgggcgaagccgcagttgggaagatagtccagagagagggagaccacacgagagagcccggagtcgcgagcgcgatttaagcagggatcgcagccgcggccgtagtcttgagagaggtctggaccaagatcatgcacgtacgcgtgatagatctcggggtcggagcctagagcgagggctggatcacgattttgggcctagccgggatcgagacagagacaggtctaggggacggtctattgatcaggattacgagcgggcttaccatagagcttatgatccggattatgaaagggcttactctcccgaatataggagaggggcaagacatgacgcaagatctaggggccctcgctctagatctagggagcaccctcattctagatccccgtctcccgagccacggggccgaccaggacccatcggggtgttacttatgaaatcccgggctaacgaggaatatgggctgcgactggggagtcagattttcgtgaaggagatgaccagaacaggcctcgcgactaaggatgggaatttgcacgagggcgatattatcctgaaaattaacggcactgtcaccgaaaatatgtccctcaccgatgctcggaaattgatagaaaaaagcagggggaagcttcagcttgtggtgctccgggacagtcagcagaccctcatcaacatcccctcattgaatgactcagattcagagatcgaagacatttctgaaatcgagtctaatcgctcattctccccggaagaacgcaggcaccagtacagcgattatgactatcatagtagctctgagaaacttaaggagaggcccagtagtcgcgaagataccccatctagactttctaggatgggcgccacaccaacaccgtttaagtcaaccggagacattgctgggacagtggttcccgaaaccaacaaggaacctaggtatcaggaggatcctcccgctccacaaccaaaggccgctcccagaacattccttcggcccagcccggaggatgaagcgatctacgggcccaacactaaaatggtgcggtttaagaaaggagactctgtggggctgaggctcgccggcgggaacgacgttggcatttttgtggccggaatccaggagggcacgtctgcagaacaggagggacttcaggaaggagatcaaattctgaaggtgaatactcaagacttcagagggttggtgagggaggatgctgtcctgtatctcctggagatcccgaagggagaaatggtgacaatccttgcacaatctcgggcggacgtttatcgggacattcttgcgtgcggcagaggggattcattctttatccgttcgcattttgagtgcgagaaagaaactcctcagtctcttgcgttcacacgaggcgaggtgtttcgcgtggtggacaccctgtacgacgggaagctgggcaattggcttgcggtaaggattggcaacgagctcgaaaaaggcctaattccgaacaagtcccgggccgagcagatggcttccgtgcagaacgcacagagggacaacgctggagatagggcagatttctggaggatgagaggtcaaagaagtggagtcaaaaagaatctgcgcaaatcccgggaagacctgacagcggtggtgagcgtctctacaaaattcccagcttacgagagggtcttactgcgagaggccggcttcaaacgccctgtcgtcctattcggccctattgcggacatcgccatggaaaaacttgccaacgagcttccagattggtttcagaccgccaaaaccgaaccaaaggacgcaggcagtgaaaaaagcacaggggtagtgaggctgaacacagtgcgacagatcatcgagcaagacaagcacgccctcttggacgtgacacctaaagcggtcgacctgttgaattacacccagtggtttcctatcgtaattttcttcaatccggactccagacagggtgtgaaaacgatgagacaacgtctgaaccccacaagcaataaaagtagtcggaagctcttcgatcaggcgaacaagttgaagaagacttgtgctcacttgttcaccgcaaccattaatctaaactctgccaatgattcatggttcgggtccctgaaggatacaatccagcatcagcagggcgaggcagtgtgggtctccgaaggtaaaatggaaggcatggatgatgacccagaagatagaatgtcctacctcacagcaatgggagcagactatttgtcttgtgatagtcgcctgatttctgactttgaggatactgacggagagggcggcgcctacactgacaacgagcttgatgagccagcagaggagccattagtgagttcgatcacgagatcatctgaacctgtccaacacgaagaaagcatccggaagccaagcccggagcccagggcacaaatgcggcgagccgcgtcgtcagaccagctgcgcgataactcccctccaccagcttttaaacccgagcctccaaaagcaaagacccagaacaaggaagaatcctatgatttctccaagagctatgaatataaaagcaacccgtcagccgttgcagggaacgagactccaggcgcctccactaaagggtaccccccgcccgttgctgctaaacctactttcggtcggagcatactgaagccgtctacgccaattcctccacaggaaggcgaagaagtcggtgagtcttccgaggagcaagacaacgcccctaagtccgttttgggaaaagtgaagatatttgagaaaatggaccataaggcacgcttacaacgcatgcaggagctccaggaagcgcagaacgccagaattgagatagcccagaaacaccctgacatctacgccgtgcccatcaagacccataagccggacccagggacaccccagcatacaagttcaagacctccggagccccagaaggcgccgtcccgtccctatcaggatacacgaggttcctacgggtcagacgcagaagaggaggagtaccgccagcagctgagcgagcacagcaagagaggttattacggccagtctgctcggtatcgggacacagagctctag

SEQ ID NO: 137940 - DNA, 2787 bp, synthetic construct
  misc_feature 1..2787: note = Description of Artificial Sequence: Synthetic coding sequence
  source 1..2787: mol_type = other DNA
atggctgtaagatttcaggtagctgatatggaggaacttaccatctgggaacagcacactgccacattgtccaaagatcccagacgtggatttggaatcgctatttccggcggacgtgatagacccgggggatccatggtggtctctgacgtggtgccgggtgggccggctgaaggcaggctgcagacaggcgaccacatcgtcatggtaaacggagtctcaatggagaacgcaacaagcgcctttgccattcagatactcaagacatgtactaaaatggccaacatcaccgttaaacgccccaggagaatccacctgcccgctaccaaagcaagcccatcctcaccgggacgccaggacagcgacgaggacgacggcccacagagagtcgaagaggtggatcagggcagaggttacgacggagattcgtctagtggcagtgggcggtcctgggatgagcgcagtcggaggcctagaccggggaggagaggaagagccgggtcacatggccgccggtcccccggcggcggcagcgaagcaaacggtctggcactggtaagcggattcaaacgccttccccgtcaggacgtccagatgaagcccgtcaagagcgttcttgtgaaaaggcgtgattctgaggaattcggggtcaagcttgggagccaaatctttatcaaacacattacggactccggcctggctgcaagacataggggtctgcaggaaggtgatttaattctgcagatcaatggcgtttcaagtcagaatctttcattgaatgacacccgacgtctgattgaaaagtccgaggggaaactgtcccttctggtattacgggataggggacaattccttgtgaacatcccacccgcagtgtctgacagtgattctagccctctggaggacatctctgacttagcctccgaactgtctcaggctcctccctcgcatatcccaccacccccgcgacatgcccagcgaagcccggaggctagtcaaacagattcacccgttgagagcccccgcctacgcagggagagctccgtggatagcaggaccatttcagagccggatgaacaaagaagcgagctgccacgggaatcgagctatgatatctatcgcgtaccttcgagccagtccatggaggaccgcggttactcccccgatacacgcgtggtcagatttctgaaagggaagagcatcggactgaggttggctggcggcaacgacgtgggcatcttcgtctctggcgttcaggctggatccccagctgatggccaggggatccaagagggagatcagatcctccaggttaatgacgtgcctttccaaaacctgactagagaggaggccgtacagttcctcctcggactcccccctggcgaggagatggagctcgtcactcagcgcaaacaggacatcttctggaagatggttcagtctcgcgtaggtgatagcttctatatccgcacccacttcgaactagagccaagcccgcccagcgggctcggattcacgcgtggagatgtctttcacgtgttagatacattgcaccctggcccaggccaatcacatgcgagaggaggtcattggctggctgtgcgcatgggaagggacctgcgcgagcaggagagggggatcattcccaatcaatcccgggctgagcagctggcgtctctggaggctgcacaacgggcggttggcgtgggccctggctcctctgccggatctaacgcacgagccgagttttggcgacttagaggcctgagacgaggcgccaagaaaaccacgcagcggagcagggaggacctgtccgcactgactcgccagggccggtaccccccatacgaaagggtggtgctcagggaggcctccttcaagcgacctgttgtgattttgggtcctgttgctgacatcgccatgcagaaactcacagctgagatgcccgaccagttcgagatagctgaaacagtgtctcggacagattcccccagcaaaataatcaagctggacactgttcgcgtcatcgccgagaaagataaacatgctctgttggacgttacacctagcgctatcgagaggctgaattacgtacagtactatcctatagtggtgttttttatacctgagagcagacctgctttgaaagctctgcgccagtggctggcccccgccagtcgccgatccactaggcgcctgtatgctcaggcacagaaactgcggaaacattcatcacacttattcactgctaccatcccattgaacggcacttctgatacatggtaccaggagctgaaggcaattatacgtgagcagcaaactaggccaatctggactgccgaggaccagcttgatggaagcctcgaagacaatctggatttgccccaccatgggctggctgatagctccgccgacctctcctgcgattcccgtgtaaattcagactacgagactgatggagaggggggcgcatatacggatggtgaaggttacactgacggcgagggagggccttatactgatgtggatgatgagcctcccgctccagcccttgcaagatcatctgagcccgtgcaggcagatgaaagtcagtctcctcgggatagaggccgcatcagtgcccaccaaggcgcccaagtggactccaggcacccacagggccagtggcggcaggattctatgcgcacctatgaaagagaggcattaaagaagaagtttatgcgagtgcatgacgctgaatctagtgacgaggatggttacgattggggcccggctaccgatctgtag

SEQ ID NO: 137941 - DNA, 2859 bp, synthetic construct
  misc_feature 1..2859: note = Description of Artificial Sequence: Synthetic coding sequence
  source 1..2859: mol_type = other DNA
atgaatctttgtggtctgatgccaatatttcccgcaccactggatcaagtggctgacatggaggaactgactatttgggagcagcacaccgcaacccttagcaaagatccaagaaggggttttggcatagccattagtgggggccgcgaccgtcccggggggagtatggtcgtcagcgacgtcgtgccgggcggaccagccgagggccggcttcagacaggggaccatatagtgatggtgaatggcgtcagtatggagaacgccaccagtgccttcgccatccagatcctgaaaacctgtacaaagatggcgaacatcaccgtgaagcgtccacgacgtatccacctccccgccaccaaggcctctccttcttcacccgggcgccaggactccgacgaggatgatggcccccaacgggtggaggaggtcgatcaggggcggggttacgacggggatagttccagcggttccggccgttcttgggatgagcgctctcggcgtcctcgccccgggcggaggggccgggcaggttcgcatggccgtcgcagtcccggcggcgggagcgaggccaacggcctggctttggtctcaggcttcaaaagattgcctagacaagatgttcagatgaaacccgtgaagtcagtgctggtcaaaagaagagacagtgaagagtttggcgtaaagctgggcagccaaatctttatcaagcacataaccgatagcggactggcagcccgtcaccgcggcctgcaggagggagacctcatcttgcaaattaatggtgtctctagtcagaacctgtctctgaatgatacccgacgtcttattgagaaatcagaggggaagctgagcctccttgtgctccgcgatagaggtcagttcctggtgaatattccacccgctgtgtccgattcggactcctcaccactcgaagagggcgtcaccatggcggacgagatgtccagcccgcccgctgacatcagcgacctggcttcggaactgtctcaggcgccaccttctcatatcccacctccacctcggcacgcccagcgcagccctgaggccagccaaactgattcccccgtggagtccccccggctgaggcgagagagctccgttgacagcaggaccatatctgaacccgacgagcagaggagcgagctgccaagggaatcgtcatacgacatttacagggtgccctcaagtcagagtatggaggacagaggctatagtcctgacacacgagtggtgaggttcctgaagggcaaaagtatcggccttcgcctggccggaggcaatgacgtgggcatttttgtgagcggggttcaagcaggtagtccagccgacggtcaaggtatccaagaaggggaccagatcctccaggtgaacgacgtgccatttcagaaccttacacgtgaagaggccgtgcagttcctgctcggacttccacctggcgaggaaatggaactggtcacgcaacggaagcaggacatcttttggaagatggttcaatcaagagttggcgactccttctacattcgtacacacttcgagctcgaaccctcaccacctagtggattgggctttacgagaggggacgtcttccatgtgctggataccctgcatccaggtccggggcaaagccacgcccggggcggccactggctcgccgtccggatgggccgggacttacgagaacaggagagaggtatcatccccaaccagagccgcgcagaacaactggcctccctggaggcagcccagcgggccgtgggggtgggcccaggcagctccgcagggagcaatgcccgcgctgaattctggaggctacggggtcttcgccggggggcgaaaaagactactcaacgttctcgagaggacctgtccgcactaactaggcagggcagatacccaccttatgaacgtgtggttcttcgagaggcgtcctttaagcggcctgtggtcatattggggcccgtcgccgatatcgccatgcagaagcttaccgccgagatgcccgatcaattcgagattgcagaaactgtgtctaggacagactccccctcaaaaattatcaaattggatactgtccgggtaatcgcagaaaaggacaaacacgcgctgctcgatgtaacaccctccgcaatcgagcggctgaactacgtccagtactatcctattgtggtgttttttattcctgagtcacggcccgcactgaaagctttaagacaatggctggcaccagcctctaggcgcagtacccgcaggttgtacgctcaggcccagaagttgcgcaagcacagcagccaccttttcacagcaactatcccactcaatggcacgagcgatacgtggtaccaggaactaaaggctatcatccgcgagcagcagacccgtccaatttggaccgctgaagatcagttggatggcagcctcgaggataatctcgacctgccccaccacggattggccgattctagcgctgacctatcatgtgacagtcgggtcaattcagattatgagacagacggagagggcggtgcatacacagatggcgagggatacactgacggtgagggaggtccatacacagatgttgacgatgaaccaccagcacccgcattggctcggagctcggaacctgttcaagcagatgagagccaaagtccacgtgatcgtgggcggatctctgctcaccagggcgcacaggtagactcaaggcatccacaggggcagtggcggcaagactctatgagaacctacgaaagggaggccctgaaaaagaagttcatgcgtgtacacgacgctgaatcctcagatgaggacggttatgactgggggcccgcaactgatttatag

SEQ ID NO: 137942 - DNA, 2802 bp, synthetic construct
  misc_feature 1..2802: note = Description of Artificial Sequence: Synthetic coding sequence
  source 1..2802: mol_type = other DNA
atggaagaactgaccatttgggaacagcataccgcaactctgagcaaggacccacgacggggtttcggtattgccatctccggtggccgtgaccgtcctggcggctccatggtggtctcggatgtcgttcctggcgggcccgccgagggccgcctgcaaacgggtgaccacatcgtgatggtcaacggagtttccatggaaaatgctacctcggcctttgctatccagatactgaaaacatgtacaaagatggcaaacattaccgtgaaacggcctagacgcatccacttgcccgctactaaagcctctccttcctcacctggccggcaggactccgacgaggacgatgggccccagcgagtcgaggaagtcgatcaagggagagggtacgatggcgattcttcaagcggctccggaagatcatgggacgaaaggtcccgccgacccagacccggccggcgaggtagggccggatcgcatggtcgcagatctcccggcggaggtagtgaggccaacggcttagcccttgtgtctggtttcaagagactgccgagacaggacgtgcagatgaagccagtgaaaagcgtgctcgtgaagagacgcgattccgaggaattcggagtgaagctcgggtcccagattttcattaaacacatcacagattctggcctggctgctagacacaggggtctacaagaaggcgatctgatcctccagatcaacggcgtgtcttcgcaaaatctgagtctcaatgatactcggagactgatcgaaaagagcgagggcaaactctctctgcttgttctcagagaccgaggtcaattccttgtaaatattcctccggcggtttccgattctgacagcagtcctttggaggagggcgtcaccatggcagacgagatgtctagccccccagccgacattagtgacttagcttccgaattgagtcaagcaccgccaagccatatcccaccccccccccgccatgcacagagatctcctgaggcgtcccagacagatagtcccgtggagagtccaaggttgcgcagggaaagctctgttgattcccgtactatcagcgaacccgatgagcaaaggtccgagctgccaagagaaagtagctatgacatctaccgtgtgccctcatctcagtctatggaggacagaggatattctccggacactcgcgtggtgcgctttttaaaaggtaagagtatcgggctgcggctggctggcgggaacgatgtgggaatctttgtgtccggagtgcaggccggctcccccgctgatggccagggcatccaggagggcgatcagattctgcaggttaacgacgtgcctttccagaatctgactagagaggaggctgtccagtttttgctggggctccctcccggggaggagatggaactggtaactcaaagaaagcaggatattttttggaaaatggtccagagccgcgtgggggatagtttctatataaggactcactttgagcttgaacctagtcccccctcaggcctgggcttcactcggggcgatgtattccatgtgttggataccctgcaccccgggcctgggcagagccatgcaagaggggggcattggctcgccgtccggatggggagagatctgagagagcaggagagaggcattataccaaatcagtctcgcgccgaacagttggcatcactcgaggcagctcaaagggcggtcggggttggcccaggcagcagcgcgggcagcaatgcccgcgccgaattttggcggctgagagggctgcggcggggggctaagaagacgacccaacggtctcgagaggatctaagtgccctgacacgccaggggagatatccgccatacgagagggtggtcctcagagaagcatccttcaagcgcccagtggtgattctggggccagtggccgatatcgcgatgcagaagctaacagcagaaatgccggaccagttcgagatcgccgaaaccgtcagccgaactgatagcccatcgaaaatcattaaactggatactgtgagagtaattgcggaaaaggacaaacatgcgttgttagatgtgactcccagtgctattgagcgccttaattatgtgcagtattatcctattgtagtgttcttcatacccgaaagtcgacccgccctgaaggccctccgacagtggttagcccctgcgagtcgtagatccacaaggcggttgtacgcgcaagctcagaagttgagaaagcactcttctcacctgttcaccgccacaatcccactgaatggtacttccgatacctggtatcaggaattaaaggccattattagagaacagcaaacacggcctatctggaccgctgaggaccagttggatggtagcctggaagacaaccttgacttgccacaccatgggttggccgattcaagcgcagacctaagctgtgattcccgggttaactccgactatgagactgacggagagggcggcgcctacaccgacggtgagggttataccgatggagaagggggaccctacacagacgtggacgatgaaccacctgcccctgcgttggcacgaagcagtgagcccgttcaagccgacgagtcacagtcccccagagacaggggccggatttccgcccaccagggggctcaggttgattccaggcacccacaggggcagtggaggcaagattctatgcgaacctatgagcgagaggctttgaaaaaaaagttcatgcgcgtgcatgatgccgagagttcagatgaagacggttatgactggggaccggctacagacctgtag

SEQ ID NO: 137943 - DNA, 2652 bp, synthetic construct
  misc_feature 1..2652: note = Description of Artificial Sequence: Synthetic coding sequence
  source 1..2652: mol_type = other DNA
atggtcgtcagcgacgtggtgcctggaggtcccgcagaaggccggctacagacgggcgaccacatcgtgatggtcaacggggtttctatggaaaacgctacatcagccttcgctattcagatactcaagacctgtacaaagatggctaacattacagtgaagcgcccacggagaatacatctgccagctacaaaggccagccccagcagccctggccgacaggacagcgatgaggatgacgggccacagagggtcgaagaggtggatcagggacgcggctatgatggagactcttcctcagggagcggccgatcttgggatgagcgctcgcgtaggcctaggcccggtcggcgcggacgcgctggcagccatggcaggcgcagccctggcggaggtagcgaggccaacggtctggcactggtgtccggattcaaacgcctgcctcgccaggatgtgcaaatgaaaccggtgaagtccgtgctggttaagcggcgtgatagtgaagagtttggcgtcaagctggggtctcagatctttatcaagcacataaccgattctggcctcgccgctcgccaccgtggcctccaggagggcgacctcattctgcagataaacggcgtgtcatctcaaaatctgtccctcaacgatacacggaggctgattgaaaagtctgaaggaaaactgagcctgctggtacttagagaccggggtcagttcctcgtgaatatacccccagccgtttccgactcagattcctctccccttgaagacatcagcgacctggcctccgaactaagccaggctccaccttctcacatacccccgccccccagacatgcccaacgctctcctgaagctagccagaccgatagtcctgtggagtccccgcgcttgcgccgggagtccagcgtcgatagtaggacaatttctgaacccgacgaacagcgcagcgagctgccgcgagagtcatcctacgacatctatagagtcccttctagtcaatcaatggaagatcggggatacagccccgacactagggtggtcaggtttctcaagggcaagagcatcggcttgaggcttgctggaggcaatgacgtgggcatcttcgtgtcgggcgtccaggccggctcacctgctgacgggcagggtatacaggagggcgatcagatcctgcaggtcaacgatgtaccctttcagaacttgacgcgcgaggaagctgtgcagttcctgctgggcttaccccccggggaggagatggaactggtgacccagaggaaacaagacattttctggaagatggtgcaatccagagtgggcgattcattttacatccgtacccactttgagcttgagccttcaccacccagtggcttaggttttacccgaggggacgtatttcacgtgctggatactctacaccctggcccaggacagagccacgcccgcggcggccactggcttgccgtcaggatgggtcgggatcttagagaacaggaacgcggcatcattcctaaccagtctcgggccgagcaactggcttccctcgaggccgcgcagagagctgtgggggtcggtcccggttcttccgcaggctccaatgcccgcgctgagttctggagactgcggggcctgagacgcggtgccaagaagacgactcaacggtcccgagaggacctcagcgccctgactcgtcaaggtagataccccccttatgagagggtcgtgctgcgggaggcctcctttaaacgacctgtcgtgattctggggccagtcgctgatatcgcaatgcagaaactcactgccgagatgccggaccagtttgagatagccgaaaccgtgagcagaacagacagcccctcgaagatcataaagctcgatactgtgagggtgatcgctgaaaaggacaaacacgctctgttggacgtcactccttccgccatcgaaaggttaaactatgtccagtactacccaatcgtcgtcttctttatcccagaaagccgccccgccctcaaagctctccgccagtggctagcacccgctagccgaagaagcacaagaaggttgtacgctcaggctcagaagctgagaaagcactcctctcacttattcaccgctaccatccccttaaatggtacctcggacacctggtatcaggagctgaaggctattattcgggagcaacaaacaaggcccatctggaccgccgaagatcagttggacggttctcttgaagataatctcgacttgcctcatcatgggctggccgattccagcgccgaccttagttgcgattcacgcgtcaatagtgactacgagaccgatggggagggaggggcatatactgacggggagggctacaccgatggggagggcggaccttatactgacgtggatgatgaaccaccggcacccgccttggcacgatcttccgagcctgttcaggccgacgaatcccaatctccgagagatcgggggcgaatctctgcacaccagggtgctcaggttgactcacgccacccccaggggcagtggaggcaggatagcatgcgtacatacgagagggaagccttgaaaaaaaagttcatgcgagtgcacgacgcagagagcagtgatgaggacggctatgattgggggccagccacagacctctag

SEQ ID NO: 137944 - DNA, 2760 bp, synthetic construct
  misc_feature 1..2760: note = Description of Artificial Sequence: Synthetic coding sequence
  source 1..2760: mol_type = other DNA
atggaggagctgaccatctgggaacagcataccgccacgctctcaaaagacccacgtcgaggcttcggaatcgctatctcaggtggccgtgatcgccccggggggagtatggtcgtaagtgacgtagtgcccggcgggcctgccgagggtcggctgcagacaggggatcacatagtaatggtaaatggtgtctctatggaaaacgcaacatccgccttcgcaattcagatcctcaaaacatgcactaagatggccaatatcacagtgaagagacctcgacgcatccatctgcctgctaccaaggcgtccccttcttctccaggtagacaggactcggacgaggacgacggtccccagcgcgtggaggaagtggatcaggggcgaggatacgatggtgacagcagcagtggctcaggccgctcttgggatgaacgcagtcgtcgccctaggccgggaaggcgcgggagggcaggcagtcatggtcggaggtcacccggcggcggaagcgaggcaaacggactcgcccttgtgagcggattcaaaagattaccaagacaggatgtgcaaatgaagcccgtgaagtctgtcctggttaaaagacgggatagcgaagaattcggagtgaagctaggctctcagatttttatcaagcacattaccgactcagggctcgcggcgcgacacagaggcctccaagaaggtgatctgatcttacaaatcaacggcgtcagctctcaaaacctctctctcaatgacaccagaagacttatcgaaaagtctgagggaaagcttagcctgctcgtgctcagggataggggccagttcttagtgaacattccaccagcagtgtccgacagcgactcctcacctctcgaggacataagtgacttggcatccgaactgtcccaggcccccccaagccatattcctccacccccccgacatgcgcagcggtccccggaagctagccagacggattctccggtagagagcccccgattacgccgcgagtcttcagtggattccagaactatctctgaacctgacgagcagcgcagcgagctgccccgggaatcaagctatgacatctatcgcgtgcctagtagccagtctatggaggaccgtgggtactctcccgacacccgcgtcgtccgattcctgaagggaaagagtatcgggctgcgcctggcagggggaaatgacgtggggatatttgttagtggtgtgcaggctggctctccggccgatggacaaggaattcaggaaggggaccagattctgcaggtgaatgacgtcccttttcagaacctcactagagaggaggctgttcagtttctgctcgggctgcctcctggcgaagaaatggagctagtgacccaaagaaaacaagacatcttttggaaaatggtccagagccgggtcggggattctttttacatcagaacccactttgagctcgaaccttcgccaccttctggcctcggttttactcgaggagacgtgttccacgtcctggatacactccatccaggacctgggcagtctcatgccaggggtggccattggttggctgtccgcatgggaagggatctgagggaacaagagcgcggcattattcccaatcagtccagagccgagcagctagcttctctagaagcggctcagcgcgctgttggagtagggccagggagcagtgccggaagtaatgcacgcgcagaattttggcgcttgcggggactgaggcgtggcgcaaagaagaccactcagcggagccgcgaagacctcagcgcactcaccagacagggccgctatccgccctacgagcgagtggtcctgagagaagcttctttcaaacgtcccgttgtgatcctcggtcccgttgccgacatcgctatgcagaaattgacagcggagatgccagaccagttcgaaatcgccgaaactgtgagccggacagatagtcccagcaaaataatcaagttagatactgtacgagtgatcgcagaaaaggacaagcacgccctgctggacgtgactccaagcgcaatcgagcggctgaattacgtacagtactaccccatcgtggtttttttcatccctgaaagtcgcccggccctgaaagccctcaggcagtggctcgccccggcaagcagacgctccacgagaagattatacgctcaggcccaaaagctgagaaagcactcatctcatctcttcacagccactattccactaaacgggacctctgatacctggtatcaggagctcaaggccatcattcgagaacagcagacacggcctatctggactgcagaagatcagcttgatgggtcacttgaggacaacttagacttgccccaccacggccttgctgattcttccgctgatctatcatgtgattcaagggtcaactccgactacgagaccgacggggagggcggcgcttataccgatggggaaggatacacagatggcgagggcgggccatatacagacgttgatgatgaacctcccgcacccgccctggcccgctcatccgaacccgtccaggcagatgagagccagagccctagggatcggggtcgaatctcagcacatcagggcgcccaggtggacagccgccacccacaaggccagtggaggcaagatagcatgcgcacttacgagcgggaggccctgaagaagaaattcatgcgggtgcacgacgcagaatcgagcgacgaggatggttacgattggggccctgcgacggatctttag

SEQ ID NO: 137945 - DNA, 1623 bp, synthetic construct
  misc_feature 1..1623: note = Description of Artificial Sequence: Synthetic coding sequence
  source 1..1623: mol_type = other DNA
atggtgcgaacagacgggcacaccctgtctgaaaaacgaaattatcaggtcacaaacagcatgttcggcgctagcaggaagaaatttgtagagggagtggattcggactatcacgacgaaaatatgtactacagccagagcagcatgttcccacataggtccgaaaaggacatgctggcatcaccctcaacctccggacagcttagtcagttcggcgcctcattgtacggacagcagtcagccctgggactgcccatgaggggtatgagtaataatacacctcagctgaacaggagcctgagtcagggcacccagctgccctcgcacgtaacacctactacaggagtgcccactatgtccctccacacacccccaagcccctcaaggggaatccttccaatgaatcctcggaacatgatgaatcactctcaagttgggcagggcatcgggattcccagcaggaccaactctatgagtagttccggccttgggagcccgaatagatccagcccctcaattatctgcatgcccaagcagcagccttcgcggcagccctttaccgtgaattctatgtcagggtttggtatgaatagaaatcaagcttttgggatgaataactccctgagcagcaatatattcaacgggacagatggatccgagaacgtcacaggccttgacctgagtgatttcccagctttagccgaccggaacagaagggaaggatccggcaatcccacacccctgattaaccctctggctgggagggccccctatgtgggaatggtgacaaagcctgccaatgagcagtcgcaggacttctccatccacaacgaagacttcccagccttgcctggcagtagctataaagacccaaccagcagtaacgatgactctaaatcaaacctgaatacatccggaaaaacaaccagctctacagatgggccaaaatttcctggggacaagtcttctaccacgcagaacaataatcagcagaaaaaggggatccaggtgctccccgacggacgggtgaccaacatacctcagggtatggtcaccgatcagttcggaatgatcggtctgctgaccttcattagagcagccgaaaccgaccccggtatggtgcaccttgctctgggaagtgacctaaccacattggggctgaacctgaattcacccgaaaatttgtaccccaagttcgccagtccatgggccagtagcccttgccgtccccaggatatagatttccacgttccctccgagtatctcaccaatattcatataagggataaacttgctgctatcaaattaggaagatacggggaagatctgttgttctacctctactacatgaacggaggggacgtcctgcagctgttggccgccgtggaattatttaacagagattggagatatcataaggaagagcgcgtgtggatcactagagcccccggcatggagccaaccatgaagaccaacacctacgagaggggcacatactacttttttgattgcctgaactggaggaaggttgctaaagaatttcaccttgaatacgataagcttgaagagagacctcacctgccctccacttttaactataacccagctcagcaggcattctag

SEQ ID NO: 137946 - DNA, 3627 bp, synthetic construct
  misc_feature 1..3627: note = Description of Artificial Sequence: Synthetic coding sequence
  source 1..3627: mol_type = other DNA
atggatctgcacatgatgaactgcgaactgctggccacatgttcagcgcttggttatctggagggggacacatatcacaaagaacccgactgtctggaatctgtcaaggacttgattagatacctgcggcacgaggacgagacaagggatgtgaggcagcagttgggtgctgcgcagattctccaaagtgacctgcttccaatcctgactcaacaccaccaggacaaaccgctgttcgacgctgttatacgtctgatggtcaacctgacacaacctgccctcttgtgctttgggaacctgcctaaagagccatcattccgccatcacttccttcaagttttgacatacctgcaagcttataaagaagcttttgcatccgagaaagctttcggtgtgctcagcgagaccttgtacgagctgctgcagctcgggtgggaggagaggcaagaggaagataatctgctcattgagcggatattactactcgtacggaacattttacacgtgcccgcggacctcgatcaggaaaagaagattgacgacgatgcttctgctcacgaccagctcctctgggccatccacctgtctggattagatgacctcctgctatttctcgcctcttcctccgcagaggagcaatggagtctccacgtgcttgaaatcgtgagtctgatgtttagggatcagaaccccgagcagctggctggcgtgggccaggggagacttgcgcaggagagatccgcggattttgcagagctcgaagtgttgagacagcgggaaatggcagagaagaaaacccgggcactgcagcgtgggaaccgacactcgcgattcggcggctcctacatcgttcagggtctcaaatccattggcgagagggacctgatttttcataaaggcctgcacaatttgaggaattacagttccgacctaggaaaacagccaaagaaggttccaaagagacgtcaggctgcaagagagctgtctattcagagacgaagcgccctaaatgtccgtctgtttttacgggatttctgctccgaatttcttgagaactgttataacaggctcatgggctccgtgaaagaccatctgctgagagaaaaagcccaacagcacgatgagacttattatatgtgggctcttgcttttttcatggcctttaatcgcgctgcctccttcagacccggcctggtgtcagaaacgctctcagttagaacctttcactttatagaacagaacctgacaaactattacgagatgatgcttacagatcggaaagaagccgcctcctgggcaaggcggatgcacctggcactgaaagcataccaggagttgctggcgacagtaaacgagatggatatttctcccgatgaagcggtgagagagagttcacgcatcattaaaaataacatcttttatgtaatggagtacagggaactcttcttggccctcttcagaaaatttgatgaaaggtgtcaaccccggagctttttgcgagatctcgtggaaaccacgcacctattcctcaaaatgctggagagattttgccgcagcagagggaacctagtggtgcagaataagcagaagaagcggcgcaagaaaaagaaaaaggtactggaccaggcaatagtgagcggcaacgttcctagttccccagaggaggtggaggccgtctggcctgccttagctgagcagttgcaatgttgcgcacaaaactctgagctaagcatggactcagtagtgccgttcgatgccgcctccgaagtgcccgtggaagagcaaagagcggaggccatggtgaggattcaagactgtctcctggccggccaggctccacaagccctgacactgctcaggtccgccagagaggtgtggcccgagggggatgtgtttggctcacaggacatcagtcccgaagaagaaatacagcttctgaagcagatcttgtctgccccactgcctcggcagcaaggaccagaagagcggggggccgaggaagaagaggaagaagaagaggaagaagaagaagagctccaggttgtacaagtgtccgagaaggagttcaattttctggactacctgaagcggttcgcgtgtagtaccgtggtgagagcatacgtactcttgctgagaagctaccagcagaatagcgcgcataccaaccactgcatagtaaagatgctgcatagattagctcacgacctaaaaatggaggctcttctctttcagctttcggtgttttgtctctttaaccgcctgctgtcagatccagccgctggcgcctacaaggaactggtgactttcgctaagtacattctcggcaaatttttcgcactcgcagcagtcaatcagaaggctttcgttgaactcttattttggaagaatacggcagttgtgagggaaatgaccgagggatacgggagtctggacgatagaagctccagccgacgggcacctacgtggtcccctgaagaagaagcgcacctcagggagctttacctcgccaacaaagatgtagaagggcaagacgtggtcgaggctattctggcccatttgaacactgtacctcggacaagaaaacagatcatccaccacctggtacagatgggtcttgctgactcagtcaaggacttccaacgcaaaggcacccatatcgtgctttggactggggatcaggagctggaacttcagcgattatttgaagagttccgcgactccgacgacgtgctgggccatattatgaaaaatattaccgccaagcgatcaagagcccggattgtggacaaactgctcgcgctggggctggtggccgagcggcgggaattgtacaagaagcggcagaagaaacttgcaagttcaatccttcccaatggggctgagtcgctgaaggacttctgccaggaagacctcgaggaggaagagaaccttccagaagaagacagtgaggaggaggaggaaggcggtagcgaggccgaacaggttcaggggtctctggtcctgagcaacgaaaacctcggacaatctcttcatcaggagggattcagcattcctttactgtggttgcagaactgtctcatcagggccgctgatgacagagaagaagatggatgcagccaggccgtcccccttgtacccctcaccgaagaaaacgaagaagccatggaaaacgagcagttccagcagctgctgaggaaactgggcgtgcggcctccagcctcaggccaagaaacattttggcggatcccagccaaactgtctcctactcaactgagaagagccgcagcaagcctgtctcaacctgaggaggagcagaagctacagcccgagttgcagccaaaggtccctggcgaacaggggagcgatgaggaacactgcaaggagcacagagcacaagcactgagggccctgctgttggctcataaaaagaaggccggcctggcttctcccgaagaggaagatgccgtaggcaaggaacctctaaaagctgcccctaaaaagcgacagctgctagacagcgatgaagagcaggaagaagacgagggtagaaaccgcgctcctgaactcggggcacccgggatccagaagaagaaaagataccaaatagaggacgatgaggacgattag

SEQ ID NO: 137947 - DNA, 906 bp, synthetic construct
  misc_feature 1..906: note = Description of Artificial Sequence: Synthetic coding sequence
  source 1..906: mol_type = other DNA
atgctggagccacaggagaacggtgtgatcgatttgcctgattatgaacacgttgaagatgagactttccccccctttccaccaccagcctcgcccgaaaggcaggacggagaagggaccgagcctgatgaagagtcaggaaatggggctcctgtgcgggtacctcctaagcgaactgtgaagagaaacatacccaagctggacgctcagagacttatcagcgagagagggctcccggcgctgaggcacgttttcgataaagcaaagttcaaaggaaagggtcacgaggccgaggatctgaaaatgttgatacggcacatggagcactgggcccaccgcctgtttcctaaactacaatttgaagactttatcgatcgcgtggagtatcttggctctaagaaagaggtccagacttgtctgaagcgcatacgtttggatctacccatcctccatgaggattttgtttccaataacgatgaagtggctgagaataacgagcatgacgttacgtctactgaactggatcccttcctgaccaatttgtctgagagcgagatgttcgcctcagaacttagtagatccctcaccgaagagcaacagcagaggattgaacgaaacaagcagctcgccctcgagcggcgccaggctaagctcctgtccaacagtcagaccctgggcaacgacatgctcatgaatacccctcgtgcccacactgtggaggaggtaaacacagatgaagatcagaaagaggagagcaacggcttaaatgaggacattctagataacccttgcaacgacgccatcgctaacactctgaatgaggaagaaactctgctggatcagtccttcaagaatgttcagcagcagctggatgctactagtcggaacataaccgaagctagatag

SEQ ID NO: 137948 - DNA, 603 bp, synthetic construct
  misc_feature 1..603: note = Description of Artificial Sequence: Synthetic coding sequence
  source 1..603: mol_type = other DNA
atgttgatccgccatatggagcactgggcccatcggctttttccaaagctgcagtttgaagacttcatagaccgtgttgagtacctcgggtcaaagaaagaagtgcagacttgcctcaagcgcattcgcctggacttgccgattctgcacgaggatttcgtgagcaacaacgatgaagtagccgaaaacaacgagcacgacgttacgtcaaccgaactcgatccatttctgaccaacctgagtgagtccgaaatgtttgcatccgagttgtctaggtctttaactgaagagcagcaacagcgcatcgagcgcaataagcagcttgcccttgagaggagacaggccaagttattgagtaactcacagacattaggtaatgacatgctcatgaacacaccaagggcccatacggtggaggaagtcaacacagatgaggaccagaaagaagaatctaatgggttgaatgaggatatcttggataatccatgtaatgatgctattgctaatacgctaaacgaggaggaaaccctactggaccagagcttcaaaaatgtccagcagcagctggacgccacatctagaaatatcactgaggcacggtag

SEQ ID NO: 137949 - DNA, 537 bp, synthetic construct
  misc_feature 1..537: note = Description of Artificial Sequence: Synthetic coding sequence
  source 1..537: mol_type = other DNA
atgatgatccacggcttccagtcctcacatcgcgacttctgttttggtccctggaaacttaccgcgtcaaagacccatattatgaagtctgcagacgtagaaaaactggcagacgagctgcacatgccgtccctacctgagatgatgttcggggataacgttctgcgtattcagcatggctctgggttcgggattgagttcaacgctactgacgctttacggtgcgtcaacaattaccagggaatgttaaaagttgcctgcgccgaagagtggcaggagtctaggacagaaggagagcattcaaaggaggttattaagccttatgattggacatatacgaccgattacaaaggcaccctgctgggggaatctctgaagttaaaagtggtcccaacaacagaccatatcgacactgaaaagcttaaagctcgcgagcaaattaaattttttgaggaggttctgttattcgaagatgaactgcacgatcacggcgtgagctccttgagtgtcaaaatccccggggggggtcacttgtag

SEQ ID NO: 137950 - DNA, 819 bp, synthetic construct
  misc_feature 1..819: note = Description of Artificial Sequence: Synthetic coding sequence
  source 1..819: mol_type = other DNA
atgatgattcacgggtttcaaagctctcacagggatttttgctttggcccttggaaactgaccgccagtaagacccatatcatgaagtccgccgacgtggagaagctggctgacgagcttcacatgccaagcctaccagagatgatgtttggggataacgtgcttaggatccaacacggtagtggcttcggaattgaattcaacgccactgacgctctgagatgtgtgaataactaccaaggaatgctgaaagtggcctgtgcagaagagtggcaggagagtcgcactgaaggagaacacagcaaggaggtaataaagccgtacgattggacatatactacagattataaagggaccctcctgggggaatccctgaagctgaaagtcgttccaacaaccgaccacatcgacaccgagaagctgaaggccagggagcaaattaaattcttcgaagaggttctgctttttgaggatgaattgcacgatcatggagtgtcatctctgagcgtgaagattagagtcatgccatcctcattttttctgctgctgcgcttctttctcagaatcgatggggtgctcataaggatgaacgacactcgcctgtaccacgaggccgataagacttacatgttacgcgaatacaccagcagagaaagcaagatttctagcctgatgcacgtcccaccatccctgttcacggaacccaacgaaatcagtcaatacctgcccattaaagaggctgtctgcgagaagcttatctttcccgaaagaatcgatcccaaccctgcggactctcaaaagtcaacccaggttgaatag

SEQ ID NO: 137951 - DNA, 1143 bp, synthetic construct
  misc_feature 1..1143: note = Description of Artificial Sequence: Synthetic coding sequence
  source 1..1143: mol_type = other DNA
atgacagaggaggtgattgttatcgcaaagtgggactacactgcccagcaggatcaagaactggatataaaaaaaaatgagcgtctgtggcttctggatgacagcaagacctggtggagagtgagaaacgctgcgaaccgaacaggatatgtcccttctaattacgttgagaggaaaaactcgcttaagaagggcagcttggtcaaaaacctcaaggataccctaggtttaggaaagaccagaagaaaaacttcagctcgggacgcgtcgcccactccgagcaccgatgccgagtatcccgccaacggttctggagcagaccggatctacgacttgaatatcccagccttcgtgaagttcgcatacgtggccgaacgagaggatgagctaagtctagtgaaggggagccgggtcactgtcatggagaagtgttccgacgggtggtggaggggatcttacaacgggcaaattgggtggttcccctccaattatgttctcgaagaggtagatgaggccgccgctgagagccccagtttcctgagcctgcggaaaggtgcctctctgtctaatgggcagggctctcgggtcctgcatgtggtccagacactctaccccttcagttctgtcacagaggaggagctgaatttcgaaaagggagaaacaatggaagtcatcgaaaaacctgaaaatgatcctgagtggtggaaatgcaagaacgctagagggcaggttgggctggttcctaagaattacgttgtagtactaagcgatggcccggcattacaccccgcccatgctccccagatctcttacacaggtcctagcagctccggcaggttcgctggaagggaatggtattacggcaacgtgactcgccaccaggcagaatgtgctttgaacgagaggggtgtggaaggcgatttcttaatccgcgactcagagtcaagcccgtctgatttcagcgttagtcttaaggcgtcaggcaaaaataaacatttcaaagtccagttggtggataacgtctattgtattggccaaagaaggtttcacacaatggatgagctcgtggagcactataagaaagccccaatttttacctcggagcatggggagaaactttacctggttagagcgcttcaatag

SEQ ID NO: 137952 - DNA, 756 bp, synthetic construct
  misc_feature 1..756: note = Description of Artificial Sequence: Synthetic coding sequence
  source 1..756: mol_type = other DNA
atgatatacaccatgaagaaggtgcacgcactgtgggctagtgtctgtctactcctgaaccttgcacccgccccactcaatgcggactctgaggaagacgaggagcacaccataataacagacacggaattgccccctctgaagctgatgcactccttctgtgctttcaaagcggacgatgggccctgcaaggcaatcatgaagaggttcttcttcaatatctttaccaggcagtgtgaggagttcatctacggcggctgtgagggcaaccaaaaccgcttcgagtcactggaggaatgtaagaagatgtgcacccgcgacaatgcaaaccggatcattaagactactctgcagcaggagaagccagacttttgctttctggaggaggatccaggaatatgtagaggctacatcacaagatacttttataataaccaaacaaagcagtgcgaacgctttaagtatgggggctgtttgggcaacatgaacaactttgagactctcgaagagtgcaaaaacatttgtgaggatggaccaaatggctttcaggtggataactacggtacacagctaaacgccgtgaacaatagcctcaccccacagtccactaaagtacccagcttgtttgtgaccaaggaggggacaaacgatgggtggaagaatgccgcacatatctatcaggtgtttttaaacgccttttgtattcatgcaagtatgtttttcctcggcttggactccattagttgcctatgttag

SEQ ID NO: 137953 - DNA, 915 bp, synthetic construct
  misc_feature 1..915: note = Description of Artificial Sequence: Synthetic coding sequence
  source 1..915: mol_type = other DNA
atgatttatactatgaagaaagttcatgccctgtgggcttccgtgtgtttgctcctgaacctggcccctgcccctctgaacgctgattctgaagaggatgaagagcatacaattatcaccgacacagagcttccccctctcaagctcatgcactccttctgcgcatttaaagctgacgacggcccatgtaaagctatcatgaaaaggttcttttttaacatctttaccaggcagtgtgaggagttcatttacggagggtgcgaggggaatcagaatcggtttgaatctctggaggagtgcaaaaaaatgtgtacacgcgacaacgctaacaggattattaaaacgacccttcagcaagagaagcccgacttttgtttcctcgaggaggatccggggatctgtcgagggtacattacccggtatttttacaacaaccaaacaaaacagtgtgagcgctttaagtatggtggttgcctcggaaacatgaataacttcgagaccctggaagaatgtaagaacatttgtgaggacggtccaaatggctttcaggtcgataattacggaacacagttaaatgccgttaacaacagtctcacaccacaaagcaccaaggtgccatccttatttgagttccacgggccttcttggtgcctgactccagctgacagagggctttgtagagctaatgaaaacaggttctactacaatagcgtcatcggcaagtgccggcctttcaaatattccgggtgtggagggaatgaaaataatttcaccagtaaacaagagtgcctgagggcctgtaagaaaggctttatccagaggatctcaaagggggggctcattaagacaaagagaaaaagaaaaaagcagagagtaaaaatcgcttacgaagaaatcttcgtgaaaaacatgtag

SEQ ID NO: 137954 - DNA, 756 bp, synthetic construct
  misc_feature 1..756: note = Description of Artificial Sequence: Synthetic coding sequence
  source 1..756: mol_type = other DNA
atgatatacaccatgaagaaagtacacgctttgtgggccagcgtgtgtctgcttctcaatctcgctcccgctccattaaacgctgactccgaggaagacgaggaacacacaattattaccgacacggaactcccaccactgaagctgatgcacagcttctgcgccttcaaggccgatgatggaccctgcaaggctattatgaagagatttttctttaacatatttacccggcagtgcgaagagtttatctacgggggctgcgaagggaaccaaaacaggtttgaatccctcgaggaatgtaagaagatgtgcacaagggacaatgcaaacagaatcatcaaaacaactctacaacaggagaaaccagacttctgttttcttgaagaggaccccggcatttgcagggggtacatcacccgatatttttacaacaatcagacaaagcaatgcgagagattcaaatatggcgggtgcttaggcaacatgaacaattttgagactttggaagaatgcaaaaatatatgtgaggacggcccgaacgggtttcaggttgataactacgggacccagctgaatgcagtcaataattctctgacaccacagagcactaaggttcctagcctcttcgtgactaaggagggtaccaatgacggatggaagaatgctgcgcacatttaccaggtctttctcaacgcattttgcattcacgcaagtatgttttttctgggactggacagtatcagttgcctctgttag

SEQ ID NO: 137955 - DNA, 231 bp, synthetic construct
  misc_feature 1..231: note = Description of Artificial Sequence: Synthetic coding sequence
  source 1..231: mol_type = other DNA
atgatttacactatgaagaaagtccatgcactctgggcctccgtgtgtttattgctgaatttagcccccgcaccacttaatgccgactcagaagaagatgaggagcacaccatcatcaccgatactgagcttcccccccttaagctcatgcattctttttgtgcattcaaggcagatgatggaccttgtaaggccattatgaagcggttttttttcaacatattcacctag

SEQ ID NO: 137956 - DNA, 186 bp, synthetic construct
  misc_feature 1..186: note = Description of Artificial Sequence: Synthetic coding sequence
  source 1..186: mol_type = other DNA
atgatttacacaatgaaaaaggtgcacgccctctgggcctcggtgtgtttgctcctgaatctcgctccagcacctctgaatgccgattctgaggaagatgaggagcatactattattaccgacacagaactccctccgctcaaacttatgcacagtttttgtgccttcaaagcagatgacggatag

SEQ ID NO: 137957 - DNA, 321 bp, synthetic construct
  misc_feature 1..321: note = Description of Artificial Sequence: Synthetic coding sequence
  source 1..321: mol_type = other DNA
atgatatacactatgaagaaggtgcatgctctatgggccagtgtatgcttgctgctcaatctagccccagcaccgctgaatgccgactcagaggaagatgaggaacatacaatcattactgatactgaattgcccccactaaagctaatgcactcattctgtgccttcaaagctgacgacggaccttgtaaggctataatgaagcggtttttcttcaacatttttactagacagtgtgaggaattcatttacggcggttgcgaaggtaatcagaaccgcttcgagtccctcgaggaatgcaagaagatgtgcactcggtag

SEQ ID NO: 137958 - DNA, 867 bp, synthetic construct
  misc_feature 1..867: note = Description of Artificial Sequence: Synthetic coding sequence
  source 1..867: mol_type = other DNA
atgatctacacgatgaagaaggttcatgccctgtgggcatccgtgtgtctgttgttgaacctcgctcctgccccattgaatgctgattcggaggaggacgaggaacacactattatcacagataccgaactgccaccattgaaactcatgcatagtttttgtgcattcaaagccgatgacggtccctgcaaagctatcatgaaaagattcttctttaatatcttcacccggcagtgtgaggagttcatctatggcgggtgtgaaggcaatcagaaccgattcgaatccttagaagaatgtaaaaaaatgtgcacccgcgataacgctaataggattatcaagaccaccttacaacaggagaaaccggatttctgtttcttagaggaagacccaggcatatgccgtggatacatcacccggtacttttataataatcagaccaagcagtgtgagaggtttaagtatggcggctgtctgggtaacatgaataattttgaaactctggaagagtgcaagaacatctgtgaggatggacctaatggctttcaggtggacaactacgggacccaacttaatgcggtgaacaattccctgactcctcaatcaacgaaagtaccgtctctgttcgaatttcacggcccctcttggtgtctcacaccagccgaccgcggattgtgtagggccaatgaaaacagattctattataactccgtgatcggcaaatgtcgcccctttaaatattcagggtgtggaggtaatgagaacaactttacttcaaagcaagaatgcttgcgggcatgcaaaaaaggcttcatccaacgcatctctaaaggagggcttatcaaaactaagcgaaagcgtaaatag

SEQ ID NO: 137959 - DNA, 321 bp, synthetic construct
  misc_feature 1..321: note = Description of Artificial Sequence: Synthetic coding sequence
  source 1..321: mol_type = other DNA
atgatatacaccatgaaaaaggtccacgcactgtgggcttctgtctgtttgctgctaaacctggccccggccccgcttaacgcagacagcgaagaggatgaggagcacaccatcatcacagacactgaacttccccctctgaaattaatgcattcgttctgcgccttcaaggccgatgacggcccctgcaaagccatcatgaaacggttcttctttaatatattcactagacagtgtgaggaatttatctacggcggctgcgaaggaaatcagaaccgcttcgagagcctcgaagagtgcaagaagatgtgtacccgttag

SEQ ID NO: 137960 - DNA, 318 bp, synthetic construct
  misc_feature 1..318: note = Description of Artificial Sequence: Synthetic coding sequence
  source 1..318: mol_type = other DNA
atgatctatacgatgaaaaaagtccacgccctgtgggcatctgtgtgtttactgcttaatttagcccctgcccccctgaacgctgactccgaggaagatgaggaacatacgatcataaccgatacagagctgcctccactcaaactcatgcattctttttgcgctttcaaggcagatgacggtccatgcaaggcaatcatgaagcggttttttttcaatattttcactagacagtgtgaagagttcatttatggaggttgtgaggggaatcaaaacagattcgaaagcctggaagaatgcaagaagatgtgtacgtag

SEQ ID NO: 137961 - DNA, 966 bp, synthetic construct
  misc_feature 1..966: note = Description of Artificial Sequence: Synthetic coding sequence
  source 1..966: mol_type = other DNA
atgggtgaaccccagggatccatgcgaatcctcgttaccggtgggtcaggactggtggggaaggcgatacagaaagtcgtagccgacggtgccggactgcctggcgaggactgggtgtttgtatcttcgaaggacgcagacctcaccgacaccgcccaaacaagagcactattcgagaaggtccagcctactcatgtaattcacctggctgcaatggttggtggcctcttccgtaacattaagtataacctcgatttctggaggaaaaatgttcacatgaatgacaacgtgctccattctgcattcgaagtaggagcacggaaagtagtctcctgtttgtcgacgtgtatctttcccgacaagaccacctatcctatcgatgaaaccatgatacacaatggccctccacacaacagcaacttcggctattcgtacgctaagaggatgatcgatgtgcagaaccgggcttacttccagcagtatggctgcacattcacagctgttatacccacaaacgtttttggccctcacgacaattttaacattgaggatgggcacgtgctgcccggcctgattcacaaagtccacctggccaagtcttcagggtccgcacttacggtgtggggaaccggcaacccacggaggcagtttatttactcccttgacctggcacagttgtttatttgggttctgcgggaatacaatgaagtagagcctattatactgagtgttggggaagaagacgaggtatctattaaggaggcggccgaggccgtcgtcgaggcgatggattttcatggagaagtgactttcgacactaccaagagtgacggacaattcaaaaaaacagccagtaactcgaagctgagaacctacctgcctgattttcggtttacaccatttaagcaagccgttaaggaaacatgcgcctggtttacagacaactatgagcaggcccggaaatag

SEQ ID NO: 137962 - DNA, 360 bp, synthetic construct
  misc_feature 1..360: note = Description of Artificial Sequence: Synthetic coding sequence
  source 1..360: mol_type = other DNA
atgggcgagccacagggatctatgaggattctggtgactgggggaagcggtttggtggggaaggccatccagaaagtcgttgcagacggcgctggtttgccaggtgaagattgggtattcgtgagctcgaaagacgctgacctgactgacacagctcagactagggcactcttcgagaaggtgcaacccacccatgtcatccaccttgccgccatggtggggggtctgtttcgtaacattaagtacaatctagacttttggagaaagaatgtacatatgaacgataacgtcctccatagtgccttcgaggtgggtgcgaggaaggtcgtgagttgtttatcgacttgcatattcccatag

SEQ ID NO: 137963 - DNA, 807 bp, synthetic construct
  misc_feature 1..807: note = Description of Artificial Sequence: Synthetic coding sequence
  source 1..807: mol_type = other DNA
atgggagagccccagggatccatgcggatcttagtgacaggcggcagcggcctcgtcgggaaggccatccagaaggtggtagccgacggtgcaggccttcccggggaggattgggtgtttgtttcctccaaagatgcggatctgactgatacagcccagacgcgcgccctgtttgaaaaggttcagcctactcatgtcatccatttggccgcgatggtaggcgggctcttcaggaacatcaagtataacctcgatttttggcggaagaatgtccatatgaatgataatgtgttgcattccgcattcgaagtgggcgccagaaaggtcgtcagctgtctgtctacgtgcatcttccccgacaaaaccacttacccaatcgacgaaactatgatacacaacggccccccccacaatagcaactttgggtattcgtacgccaaacggatgattgacgtgcagaatagagcatactttcagcaatatggatgtacattcactgccgtcatccctactaacgtgttcggaccccacgacaattttaacattgaggatggtcacgttctccctggcctgattcataaggtgcacctggccaaaagttccggttccgccttaaccgtctggggcaccggtaatccccggaggcagtttatctactctctggatctcgctcaactattcatctgggttctgcgggagtacaacgaggtagaacctatcatcctgtctgtgggtgaggaggatgaggtgagtattaaggaggccgctgaggcagtggtcgaggcaatggacttccacggcgaatag

SEQ ID NO: 137964 - DNA, 966 bp, synthetic construct
  misc_feature 1..966: note = Description of Artificial Sequence: Synthetic coding sequence
  source 1..966: mol_type = other DNA
atgggagagcctcagggaagtatgcgcatattggttactggcggctccggactggtaggcaaggcgatccagaaggtggtcgcagacggcgccggccttccaggtgaagattgggtgttcgtctcgtccaaagatgctgacctcacagataccgcccagacacgcgctctcttcgagaaggttcagccaactcacgtaatacatctcgcggcaatggtgggcgggctcttcaggaatattaagtataacctcgatttttggaggaagaatgtgcatatgaacgataatgtattacactcagcgttcgaagtgggagcccggaaagtggtgtcctgcttgtctacctgtatttttccggacaagactacctaccccatagacgagacaatgattcacaatggcccgcctcacaactctaacttcggatactcctatgccaaacgcatgattgacgtgcagaatcgcgcgtatttccagcagtatgggtgtacgttcactgcagtgatcccaaccaatgtctttggtccacatgacaactttaacattgaggatgggcatgtgctgccggggctgattcacaaggtgcacctcgcgaaaagcagtggaagcgcactgaccgtgtggggaaccggcaaccccaggcgacagtttatttactccctggatctcgcccagctgttcatctgggtgctcagagagtataatgaagtggagcctattattcttagtgtaggagaagaggatgaggtgagtatcaaggaggccgcggaagccgtggtggaagccatggatttccacggcgaggtgacttttgataccactaagtctgatggccaatttaaaaagacagcatcaaacagcaaactgcgtacatatctgcccgacttcaggtttactcccttcaaacaggccgtaaaggaaacttgtgcatggttcaccgataactatgaacaagcacgcaaatag

SEQ ID NO: 137965 - DNA, 597 bp, synthetic construct
  misc_feature 1..597: note = Description of Artificial Sequence: Synthetic coding sequence
  source 1..597: mol_type = other DNA
atgggcgaaccacagggttctatgcgaatccttgtcaccgggggatccggcttggtaggaaaggctatccagaaagtcgttgccgatggagctggtctgcccggagaggattgggtcttcgtgagtagtaaggacgccgacctgactgacaccgcacagaccagggcactgttcgagaaggtgcagcctactcatgtcatccacctggccgcaatggtgggaggtctgttccggaacatcaagtacaacctcgacttttggagaaaaaatgtgcacatgaacgacaacgttcttcacagtgcgtttgaagtcggtgccagaaaagtcgtgtcgtgtctctctacttgtatttttcccgacaagaccacctatcccatcgacgaaacgatgatacacaacgggccccctcataattcaaacttcggctacagctatgcaaagaggatgattgacgttcagaatagggcctatttccagcagtatggatgcacgtttactgctgtaatccccaccaacgttttcgggcctcatgacaattttaacatagaggacggacacgtgctccctggcttgatacataaggtccatctcgcctag

SEQ ID NO: 137966 - DNA, 2658 bp, synthetic construct
  misc_feature 1..2658: note = Description of Artificial Sequence: Synthetic coding sequence
  source 1..2658: mol_type = other DNA
atggtggaaaagtcttctattgacgagaattcaatttctctggaaaaggaggtgcggcacgtccaagaacaaaacttggacatcctgaagaccgatctatctctcaaaagctttagcgaggagatttactctgagtcttgcgcgctgcttcctacttcaagcgccgatattgaagaaactgatctgtccgagaaatcctgtcctttggagaacggcggacgaagtagcatcagtcacctgaagaaagctgccagcgaggagaagccgctgggagtgggcgagatggaggaggagtgtacactggaaccggaattagctgcttttccgaagcaggatggcgggactcaggaatatacggatgccacactggaagaccaccgcggcgacgtgcaggaagccgatacactgcatagacaacttagcctctctcagtgttttcccctgttgatgaccgaagagcagcagaatccgggagaacaaatctcgactaatattcacgctagcggcgaagagaagtgttatgaggaagttcaagtgcagaatgaggcatcatttagcaccctggaaggggaaatgatcgaaacttcattctcccagaacattcccaagttggatgaggctcacaccacagaggccgccgagtctgaaacaagcttaacacagtatctgctcgctgctggcaaaagggaagtgcctgagactaaggataccagggatcaggcgaagttggtgcaaagcgagtcaattacttcaatggaggttgaagaggttacctttaatactgtgtacgaatactataaccagaagcaggaatcactcggcagaccactaagtcccgaatccgatataagcattggcgtgggctcaaccacctccgaggaaattagtgaactagaccagttttacacaccaccgtccagcgtggaatatttcgaaagtcccaagtcccccgacctgtatttcaacccatcagacattactaagcagagcagcatacattcagggggcgaaacagtcgaaaggtactcgaccccccttggcgaggtcgcagagcggtactccaccccctcagagggggaggtgggagagagatacagcaccccgcctggggaaaccttggagaggtattctacacccccaggggagacactcgagcggtacagtactcccccaggagaggctcttgaacgctacagcatccccactggggggcctaaccccacggggactttcaaaacctacccttccaagatcgaacgagaggacggtacacctaatgagcatttttacacccccaccgaggaacgcggcagtgcatacgaaatctggcgaagcgactcttttggcacccctaacgaagctattgaaccaaaggacaatgagatgcctccgtcgtttatcgagcccttaactaagcgcaaagtttatgagaacactaccctgggcttcatcgttgaggtggagggattaccggtcccaggggtcaaatggtataggaataaatccctattggagcccgacgaaagaatcaaaatggagagggtggggaatgtttgctcgctggagatatctaacattcagaaaggggaagggggagagtacatgtgccacgctgtgaacattataggcgaggcgaagtcttttgccaacgtggacataatgccacaggaggaacgcgtcgtagccctgccaccacccgtcacccaccagcatgtaatggagttcgacctggagcatactacttctagtaggaccccaagcccacaagaaatcgtcctggaggtggaactgtcagagaaggatgtaaaagaatttgaaaaacaggttaagattgtgaccgtgcccgagtttactccagatcacaagtctatgattgtcagtttagatgtgcttcccttcaattttgtcgacccaaacatggactccagggaaggagaggataaggagcttaagatcgatctggaggtttttgagatgcctccacgcttcatcatgcccatttgtgatttcaagattcccgagaattccgacgcggtcttcaaatgttctgtcatcggaattcccacgcccgaggtgaagtggtataaggaatacatgtgcatcgagcctgacaacataaaatacgtaatttcagaagagaaggggtcccatacgctcaaaatccggaatgtgtgtctgagcgacagcgccacgtacaggtgtagggccgtgaactgcgtgggggaagcgatttgtagaggctttttgacaatgggagatagcgagattttcgccgtcatcgccaagaaatccaaggttactctgtctagcctgatggaagagctggtactgaaatcaaactacactgatagtttcttcgaattccaagtcgtggagggccctcctcggtttataaaagggatttccgactgctatgcacctatagggacagccgcatacttccaatgtctggtgcggggatccccacgcccaacagtgtactggtacaaggacggtaaacttgtacagggacgtcgatttacggtggaagaatcagggactgggttccacaatttgtttatcacaagcctggtaaagtcagatgagggcgaataccggtgcgtggccaccaacaagagtggcatggccgagtcgttcgccgctttgactttgacctag

SEQ ID NO: 137967 - DNA, 16815 bp, synthetic construct
  misc_feature 1..16815: note = Description of Artificial Sequence: Synthetic coding sequence
  source 1..16815: mol_type = other DNA
atgactacacaggctcccacatttacacagcccctacagtctgtggtcgtcttggaaggcagcacagccactttcgaagctcacatttctggcttcccagtaccggaggtgtcctggtttcgagatggacaggtcatatccacctcgactctgccaggcgtccaaatatctttttccgatggacgggcaaaactgaccatcccggccgtgaccaaagctaactcaggccggtattcgctgaaggcgacaaacggatcaggacaggccacttcgaccgcggagctcctggtcaaagccgaaacagctccacctaacttcgttcagcgcttgcagtcaatgaccgtaaggcagggctcacaagtccgtcttcaggtcagagtcactggaattccaacaccagtggtcaagttctaccgggatggcgccgagatccagagttctctagactttcagatctcccaggagggagacttgtacagcctgctcatcgcagaagcctatccggaggactctgggacctactccgtgaatgcaaccaattcggtcggtcgggccacttctactgctgagttgctagtgcagggagaggaagaagtacctgccaagaagacgaaaacgatagttagcacagcacagatctcagagagccgacagactaggattgagaaaaagattgaggcacactttgatgcaagaagtattgcaaccgttgagatggtaatcgacggagctgccggtcagcaactccctcacaaaacaccccctcgcatccctcccaagccgaaaagccgctcacccacccctccctccatcgcagctaaggcccaactggcccgtcagcagtccccatcccccatcagacacagccctagtccagtacgtcacgtgagagctcctaccccgagccctgtgcgaagcgtgtcccctgccgcacgcatctccacttctcccattcgcagcgtcaggtcacccctcctgatgaggaagacgcaagctagcacagtggccactggaccagaggtgcctcccccatggaaacaggaagggtatgtggccagcagtagcgaagctgagatgagggagaccacactgacgacctccactcagatccgcacggaagagaggtgggaaggtcgctatggggtccaagagcaagtgacaatcagtggagctgcaggggccgctgcaagtgtctcggcttccgcctcttatgcagcagaagcagtggcaaccggcgccaaagaagtgaagcaggacgccgacaagagtgccgctgtggccaccgtcgttgcagcagtggacatggcacgggtaagagagcctgtcatcagcgcagtggagcagactgcccagcgtaccacgaccactgctgtgcacatccagcctgcccaggaacaggtgagaaaggaggcagagaaaaccgccgtgaccaaggtggtcgttgccgccgataaggctaaagagcaagagctgaaatcacgaaccaaagaagtcataacgacaaaacaggaacagatgcatgtcacacacgaacaaatccggaaagagacggagaagacgtttgtccccaaggtcgtaatatcagccgccaaggctaaagagcaggagacaagaatttctgaggaaattactaagaaacagaaacaggtcacgcaggaagcaatacggcaggaaaccgagattacggccgcatcgatggtcgttgttgcgacggccaagtccactaaacttgaaacggtgcccggcgcacaagaggagactacaactcagcaagatcagatgcacctcagttacgagaagattatgaaagagaccaggaagactgtggtgcccaaagtgattgtggccaccccgaaagtgaaggaacaggacctggtatcaaggggcagagaaggaatcaccacaaagcgcgagcaggtacagattacccaggagaaaatgcgcaaggaagcggagaagacggccctctcaactatcgctgttgccaccgcaaaggccaaggagcaggagaccattttgagaacgagagagaccatggcaacacgacaggagcagatccaggttacacacggaaaggtggacgtcggcaagaaagcagaggcggtggctaccgtggttgcggccgttgaccaggctcgtgtaagggaacctagggaacctggccatctggaggagtcctatgcccagcagaccacactggagtatggatacaaagagcgcatcagtgctgctaaggtggctgaaccaccgcagcgacccgcatcagaaccacacgtggttccaaaggcagttaaacccagagtgattcaggccccatctgagacccacatcaaaacaactgaccagaaagggatgcacatttcgtcccagatcaagaaaaccaccgatctgaccacagagcgattagtccacgttgataaacggccacgcaccgcctccccacatttcacagtttccaaaatctctgtgccaaaaaccgagcatgggtacgaagcatccattgctggctctgcaatcgcaaccctccagaaggaactgtccgctacctcaagcgcgcagaagatcaccaaaagtgtgaaagcacctacggtgaaaccctccgagacgcgcgttagagccgaacctactcccctgccacagttcccctttgccgatacaccggacacatataagagtgaggccggggttgaagtgaagaaagaggtgggcgttagtattaccggcacaaccgtcagggaagagagattcgaagtgcttcatgggcgcgaagccaaggtgactgaaaccgcaagagtccccgcccctgtggaaatcccagtcactccacccactttggtctccggcttgaagaatgtgacagttatcgagggggaatctgtgactctggagtgccatatctcaggctatccatccccaacagtgacctggtatcgggaagattaccagattgagtctagtatcgacttccagataactttccagtcaggaatcgcgagattgatgataagagaagcattcgctgaggattctggtagattcacttgttctgccgtcaacgaggccggaaccgtatctacatcctgttacctggccgtgcaggtgtcagaggaatttgagaaggaaactacggcagtgacagagaagtttacaacggaggagaaaagatttgtggaatccagagacgtggtcatgacagatacctctctcactgaggagcaggcaggcccaggcgaaccagccgccccttattttataacgaagcccgtggtgcagaagctggtggaggggggaagcgtagtctttggatgccaggtgggagggaaccccaagccccacgtttactggaaaaagtccggggttcctcttaccactggatataggtacaaagtcagctacaacaaacagacaggtgagtgtaaattagtgatttcaatgacattcgctgacgatgccggggagtacaccattgtcgtgcgcaataaacacggagaaacctcggcgtccgcatccctgctggaagaggcagattatgaactcctgatgaagagccagcaggagatgttgtaccagacccaggttaccgcctttgtgcaggagccaaaggttggggagacggcaccaggcttcgtgtactctgaatacgagaaggaatatgagaaggaacaggcactgatcagaaagaaaatggccaaagacactgtcgtggtgaggacatatgtagaggatcaggagtttcacatctcgtcatttgaagagaggcttattaaagagatagagtaccggatcatcaagactacactggaagagttgctggaggaggacggcgaggaaaaaatggcggtggatatttccgaatctgaagccgtcgaatctgggttcgatagccgcatcaagaactacagaattctggaaggcatgggtgtaacattccattgtaaaatgtccgggtacccactgcctaaaatcgcctggtataaagatgggaaaagaatcaagcacggcgaacggtaccagatggactttcttcaggacggacgtgccagtctgcggattcctgttgtgttaccggaagatgagggtatctacacagcttttgccagcaatatcaaaggaaatgccatctgcagcggcaagctgtacgtggagccagctgccccgcttggcgctcctacctacattccgacattggagcctgtaagccgtattcgatcactgtctcccaggagtgtttcacgtagcccaatccgaatgagccccgcccgaatgtctccggccaggatgagtcccgccaggatgagtccggcacgtatgagccctggcaggaggctcgaagaaaccgacgagtcccaactggagcgcctgtataaacccgtgtttgtgctgaagcctgtgagctttaaatgtctcgagggccaaaccgctagattcgatttaaaagtggtgggacggcctatgcccgaaacattttggttccacgacgggcagcagattgttaacgattacacccataaagtagtcataaaagaggacggaacacaaagcttgatcatagtgcctgctactccctccgattctggtgaatggaccgttgtggcccagaaccgggccggtcgcagttcaatctcggtcatactcaccgttgaagctgtagaacatcaagtgaaacccatgttcgtagaaaagctaaagaatgtgaatattaaggagggtagtcgcttagagatgaaggtgagagcaaccggaaaccccaaccccgatatcgtgtggctgaagaacagcgacattattgtgcctcataaatacccaaagatcagaattgaaggtacaaaaggcgaagctgcattgaagatcgattctaccgtgagccaggatagcgcatggtacaccgccacggccattaacaaggctgggagagacactactagatgtaaggttaacgtggaggtagagttcgctgaaccggaaccggaacggaagttgattatcccgcgggggacctacagggccaaggagattgctgctccagaattagagcccctccacctgagatacggacaggaacagtgggaagagggagacctgtacgacaaggagaaacagcagaagcctttcttcaagaagaagctcacaagtcttcggttgaagagatttggtcctgcccacttcgagtgcaggttgacacccatcggcgaccccacaatggtggttgaatggctccacgatggcaaacccctggaagcggcaaatagattgaggatgataaatgaatttggctactgcagcctggactatggcgtcgcgtattctagagactccgggattataacttgcagggccactaataaatatgggacggaccatacttctgccacactaatcgtgaaagatgaaaagtccctggttgaggagagtcagctgcctgaaggcagaaaaggactgcagagaatcgaggagctggaacgtatggcccatgagggagccttaacaggggttacgacagatcagaaagagaagcagaagcccgatattgtgctttatcctgagcctgttagggtgctggagggcgaaactgctaggttcaggtgtcgggttacaggatacccccaacctaaggtgaattggtacctgaacggccaattgataagaaagtcgaagcgatttcgggtgagatacgacggtatccattatctcgacattgttgactgtaagagctacgatacaggtgaagtcaaagttaccgctgaaaacccggaaggcgtcattgagcacaaagtcaaattggagatccaacaacgcgaagatttccgatcggtgctgagacgggctcctgagcccagaccggaattccatgttcatgagcccggcaagttacagttcgaagtgcaaaaagtggacagaccggtcgataccactgaaaccaaggaggtcgtcaagctaaaacgcgccgagcgcatcactcatgagaaagtgcctgaggagagtgaagaactgcgctccaagtttaaacgccgaacagaagaggggtactacgaggcaattaccgccgtggagctcaaatcccgcaagaaggacgaatcttacgaggaactactgcgcaaaaccaaggacgaactgttgcactggacaaaagaattaactgaggaggagaagaaagcactggccgaggagggcaaaattaccatccctacgtttaagcctgacaagattgaactcagccccagcatggaggcccctaaaatttttgaaagaatacaatctcagacagtggggcaaggctccgatgcgcacttccgggttagagtggtgggaaagccggatcctgaatgtgagtggtacaagaatggtgtcaagatagaaaggtctgaccggatttattggtactggcctgaggataatgtctgcgaactcgtaatacgggatgttacggccgaggattctgcaagtattatggtcaaggcaataaatattgctggtgagaccagctctcacgcatttctgctggtacaggctaagcagctgatcacattcacccaagagctgcaggacgtagtcgcaaaagagaaggacaccatggccacctttgaatgcgagacctcagagccgtttgtaaaggtgaaatggtacaaggatggcatggaagtacacgagggcgacaagtaccgaatgcactcagatcgtaaggtacacttccttagcattcttactatcgacacctctgacgcggaagattatagctgcgtactggtggaggatgagaacgtaaagaccacagctaagctgatcgttgagggcgccgttgtcgagttcgtgaaggagctgcaagacattgaggtgcctgagtcctattctggagagctggaatgcatcgtctctcccgaaaacatcgaaggaaagtggtaccacaatgacgtcgagttgaagtccaatggaaagtacaccatcacatcaagacggggaaggcagaacctcactgtgaaagacgttactaaggaagatcagggagagtattcctttgtcattgacggcaagaagaccacctgcaagctgaagatgaagcctagacctattgctatactgcagggtctgagtgaccagaaggtgtgtgagggcgatatcgtgcaattggaggtaaaagtgtcactcgaatccgtagagggagtttggatgaaagacggtcaggaggtccagccaagtgaccgcgtccatattgtgatagacaagcagagtcacatgttactaatcgaagacatgactaaagaagatgctgggaattactcattcactataccggctctcggtctgagcacctctgggcgcgtttcagtttacagcgtggatgtgatcactcccctgaaagatgttaacgtcatcgaagggacgaaggccgtactggagtgcaaggtctccgtacccgacgtgaccagcgtgaaatggtacctgaatgatgagcaaattaaacccgatgacagagtgcaggctattgtgaagggaaccaaacagcgcctggtcatcaatcgaactcacgcttctgacgaaggtccgtataagctgattgtgggtcgcgtggaaacaaactgcaatttgtccgtagaaaagattaaaattatacggggcctgagggatctcacttgtactgaaacccagaatgtggtatttgaggtcgaactgagccattctggcatcgacgtcctgtggaacttcaaagacaaagagatcaagccatcttcaaaatacaaaattgaagctcatggaaaaatctataagctgactgtactcaacatgatgaaggatgatgaaggtaagtacactttttacgccggcgagaacatgacctcgggcaaactgaccgtagcaggaggcgccatcagtaagcctcttaccgatcagactgtggcagagagtcaggaagcagtgttcgagtgcgaggtggcaaaccccgatagtaagggtgaatggctgcgagacgggaaacacctccctctgaccaataatataaggtctgagtccgatgggcacaagagacgactgataattgctgccaccaagcttgatgatataggcgagtacacctacaaggttgcaacatccaaaaccagcgcaaagttgaaagttgaagccgtcaagatcaagaagacattaaaaaacctgaccgtgaccgaaacccaagacgcagtatttacagtcgaactcactcaccccaatgtgaagggtgtgcagtggattaagaacggtgttgtcctcgaatccaatgaaaaatacgctattagcgttaaggggacaatttatagtctaaggattaaaaactgtgcgatcgtggatgaatctgtttatggattcagactcgggcggttgggagccagcgctcgcctgcatgttgaaacagtgaaaatcattaagaagcctaaagatgtgaccgcgctggagaacgccacagtagctttcgaagtgtccgtctcccatgacacggttcctgttaaatggttccataagagcgtggaaatcaaaccctccgataagcatagactcgtgagcgaaagaaaggtgcataaactcatgctgcagaatatctctccgagcgatgcaggagagtacaccgccgttgttggacagcttgagtgcaaggctaaactgtttgtcgagaccctccacattaccaagactatgaaaaacatcgaggttcccgagaccaagaccgcctctttcgagtgcgaagtgagtcattttaatgtccctagtatgtggcttaagaacggcgtggaaattgagatgtccgagaagttcaaaatcgtcgttcagggaaaacttcaccagctcattatcatgaatacgagcacagaagactcagccgagtatactttcgtgtgcggcaacgaccaggtctcggcaacactgaccgttacaccgattatgatcacatcgatgctgaaggatatcaacgcagaggaaaaagacacaattactttcgaagtgaccgtcaactatgaaggcatttcatacaaatggttgaagaacggtgtggaaattaagagtacagataagtgtcagatgaggactaagaaattgacgcattcactgaacattcggaacgtgcacttcggggatgccgccgattacactttcgtggcgggaaaggcaactagcactgctactctttacgttgaagctaggcacatcgagtttcgaaagcatatcaaggacatcaaggtgctcgagaagaaacgcgcaatgttcgagtgcgaggtgtccgaacccgacatcacagtgcaatggatgaaagatgaccaagagctacagatcactgatcgaatcaaaatacagaaggagaagtacgtccatcgactgctgattccctccacaaggatgtctgacgccggcaaatacactgtcgttgccggtgggaatgtgagcacagccaagttatttgtggagggccgtgatgttcgcataagatccattaagaaggaagtacaggtgattgaaaagcagcgagccgttgtcgaatttgaagtcaatgaagacgacgttgatgcacattggtacaaggacggcattgagatcaattttcaggtgcaagagcggcataagtacgtggtggagcggcgcatacaccgcatgttcatttccgagacgagacaatctgacgcaggcgaatatactttcgtggctgggcgcaaccgcagctctgtcacactgtacgtgaacgcgcccgagcctcctcaagtcctgcaggagctgcagcccgtaactgtgcagagcggtaaaccagcgagattctgtgctgtcataagcggccgaccccaaccgaagatctcctggtacaaggaagagcaactcctgagcacaggattcaaatgtaagttcttacacgacgggcaggaatacacactgcttctcatcgaagccttcccagaagatgcggccgtctacacgtgcgaggctaagaacgattatggggtcgccactacgtcagcttctctgtctgttgaagtacctgaggttgtgtccccagaccaggagatgccagtatatccccctgcaatcatcacaccgttacaagacacagtgacctctgagggacagcctgctcgatttcagtgtagagtgagtggtacagatttgaaggtctcctggtacagtaaggataagaagatcaagccttctcgcttttttcgcatgacacaatttgaagatacatatcagctcgaaattgccgaagcttatcccgaggacgaaggcacctacacatttgtggcttcaaacgcagtcggccaggtttccagtaccgcaaatctttccctagaagcccctgagtccatactgcacgagcggatagaacaggagatcgagatggagatgaaagagctgttttctgaaggggaatctgagcactcggagagggacacaagagacgcgtttagtgacagtgaagacattgatcacaaatccatggccgctaaacggtatgcatcccgcatcagttccacctccagttggcctgaatacttcaagccgtcattcacgcagaaactgacctttaagtatgtgttagagggagagccagtggtcttcacttgtcggttaatcgcttgtcctacaccagagatgacgtggtttcacaataatcgcccaatacccaccggccttcgccgaataattaaggctgagtcagatctgcaccaccattcctccagcttggaaatcaagcgtgtccaggatcgggactctggatcttatcgcctccttgctattaacagtgagggttcagccgaaagtactgctagtctgctggtaatccagaagggccaggatgagaagtacctagagttccttaaaagagcagaaaggacccacgagaatgtagaggccttagtcgaacgaggcgaagatagaattaaagtggatctgagatttacaggtagcccatttaacaagaagcaagacgtggaacaaaagggaatgatgagaacaatccattttaaaactatgtcgtcagccaaaaagacagactacatgtacgacgaggaatatctggaatcaaagagcgatattcgcgggtggctgaacgtcggcgagtccttcctcgataaagagacgaaagtgaagcttcaaagattgcgggaggcgcggaagactctgatggagaaaaagaaactgtcactgctggacacgtcctctgagatttcatctcgaacgctgaggtccgaggcaagcgacaaagatatcctttttagcagggaggacatgaagatcagaagcatgtctgacctcgctgaaagctacaaagtagaccattctgccgagagcattgtacaaaaccctcacgccctgtctaatcaaatggatcagaacatcgagtctgaggagcttccgacgtcttttcagaccattgtagacgaagagatctttcagacagaaataaggatgagtcaggaagcacttgttaaagagtcacttcccaaggaccacctctatggggagattcttgtcaacgagaatacacaagcccgcggccagctcgaggaaatcatggccaataccactattggcgaaagtagtacatatatcaccaacgtgtgtgagaaagaagaggtctacgagacgcctgagaatgtgagtcaggcaataacgccacatgcaagcgagagctttggcactctggtgaatgtcgaggaaagcgaggaaattgcatccgagaggatcaaaaaggacgatctacgtgagttacaattgtctgcatcaacccgcatcgatgagtttaagacagaacagaaggaagaaaatatgagattctttgaaaatagcttccggaagagaccccaacggtgccctccaagtttcctccaggagatcgaaagccaagaggtgtacgaaggtgacagttgcaactttgtgtgccacttccagggatatcctcagccaatcgtaacatggtacaacaacgatatgccgatccctcggaaccagaatttcattatccacagtctggagaactattccattttgacgctgtccagcgtacaccatcagaacgaagggagcatcacctgcgtgttgtttaatcaatacgggactgtgaaaaccacgagcatgctgaaggtgaaggctaaacagaaacacgacgtaaaggctcacaaggtgcccgtgtttcacgactacctggacgaggaggaggagctggctctagtctttgatcaagctaaaggggcccacccgagcatgtcgcaggagggccagacaaacctgcaccttttaaaaaccaacccgcccgtgccaccctctggggacacagagctgctttcctttcccgtcgagattcaagttaccgcagcgacacccatcccagagcaagacaaggagtctaaagaagtgtttcagaccgaagaacttgagccaaaggctatgcctcaagaccaggtaactcagtcacctaaacaccgattcgtgtttctctccgatatcactaacgagccccctaagatgttgcaggagatgcctaagcacgcacgatgcagagaaggagacagtatcattctggagtgtttaattagcggagagccccagccagtggttacctggttccagaatggcgtgctgcttaaacagaatcagaagttccagtttgaagaggtgaactgctctcaccagctgtatatcaaagacgtcaatagccaggatagtggcaagtacaaatgtgtggcggagaacaatagcggggccgtagagtctgtaagtgacctgactgttgagccagtaacttacagagaaaattcacaattcgaaaatatcggcgagatttatggaaaatactctcgggaccagcagctgcaggaccagggggagtcagtgcgcgcccacttttacgactatcccgccggtcctttcactccctggactaatgtgaaagagtactcagtcagggattatttccagtccctcgagaccatcgagcaaatagatcaaaaagagcaggtgcgctgcattccctcaagggaaaagatcccacgctttgtgcacggcgctagtagaaccataaaaatttcgaaaccaatacgtgctgagttcattcaatgtcaggctgagggcaaagagaggcatgtctccgaaaaatccaagcttcaccaagcagaaggcacagtctaccctttcgtagacgacttctccgatgtgacaatcaagaaagagattcgaaacaacttcgggaaattgggcagatctgagaaggaaaacgttcaagagtgcgcccagagtgactacttaccaaatatccatagtgaacgcatctccgatagctacaatactaaggatagttctgcaattgtgtacgaagaatctctcggcgaggaaatccattatccaggcaaaaaagttaagcaccggattattgaattcgaaaagctgcacgtcgaaaagggtgtgctggagaagaggcctacccgtacctccattgtgaatccgccccagaaaaagatcgacgacaaggctttcagcctcaagcagcgtgagagcaggtccagtaatctaaatgcaaacatgtatcaggctgagaaaatgagtccaaatactgaatccgacagctccaacatagctatcaacctcaaactgctgagtagccagacacacaaagaatttgacgcccaagagagagaacaacaagaaaagatttctcttatcgataagcctgctatcagcaaaagagcagagcatgagtctcccattaccttcgatctgaagcagtttcacactcagattaagcacactgacgtgaagttccaggagctggattccgggcagccagaagaggcgtattttaaaattcagcaccccgcagatactgagaatattgttttcgacctaaagcagatgtactctcatatcggcgatcccgcgctcgagttccaggggcaagagactagggagcagcaagaaatccattacaaggagaagatccccagccccgagacactgcagcctgatactcataatatcagcaagtcagttcagaacaacgtgtttgcctctcaggaaatttcatccagccaggagctaagcaaccgaactatggtggagaagagctctatagatgagaatagcatctcgttagaaaaagaagtcagacacgtgcaagaacagaacttggatatcctaaaaaccgacctgtccctcaaatcgtttagtgaggaaatttattccgagtcttgcgctctgctgcctactagcagcgccgacattgaggaaacggacctgtctgagaagagctgtcccctggagaacggaggtcgcagtagcatctctcacctcaaaaaagcagcatccgaggaaaaacctctgggagtgggcgagatggaggaggaatgcactctggaaccggaacttgctgctttcccaaaacaggacggaggcacccaggaatatacagacgccaccctggaagaccacagaggcgatgttcaggaagctgatacactccacaggcaattaagcctgtcgcaatgcttcccccttctcatgacggaggaacagcagaatcctggggagcagatctcgactaacatacatgcgtccggcgaagagaaatgttatgaggaggtgcaggtccagaacgaggcctcattctctacgctagagggtgaaatgattgagacgtctttcagccagaatatccctaagctcgacgaggcccacaccactgaagcagcagagtctgaaacctcacttactcagtatctcctcgcagctggcaaacgggaggtgcccgagactaaggacaccagggatcaagctaaattagtgcagagtgagtcaatcacctctatggaagtggaagaggtcaccttcaacactgtgtacgagtactacaaccaaaaacaagagtcccttggccgacccctgtcacctgagagcgatatctccatcggagtgggctcaaccacttccgaagagatttcggaactagaccagttctatacccctccttcctcggtggagtattttgaatcaccaaagtcacctgacctgtattttaatccttcagatataactaaacagagttctatccatagcgggggggagaccgtcgagcggtacagtaccccactgggcgaggttgctgaacgatatagcactccctcagagggggaggtcggagagcgatacagcacacctcctggagagactcttgagagatacagcacgccacccggggaaacgctggagcgttatagcacaccacccggcgagaccctggagcgctattccaccccccccggcgagactctggagcgctattcgacccccccaggggagactctggagcggtacagcacacctcctggcgaagccttagaacggtactctatccctaccggtggacctaaccccacaggtacgttcaagacttatccaagcaagattgagagggaggatggcacaccaaatgagcacttctacactccaacagaggagaggggctccgcatacgagatctggagaagcgactcatttggcactcccaatgaggccatcgagcctaaggataacgagatgcctcccagctttatcgagcccttgacaaaacgtaaagtttacgaaaataccactttgggattcattgtcgaggtggaaggtctgcccgtgccaggtgtgaaatggtatcgaaacaagagcttgcttgagcccgatgagcggattaaaatggaaagagtcggtaatgtttgctcattggagatttcaaacattcagaagggtgagggcggcgagtacatgtgtcacgcggttaatattattggcgaagccaagtcattcgccaacgtggacataatgccccaagaagagcgggttgtggcactccccccacctgttacccaccagcacgtgatggagttcgaccttgaacatactaccagttctcgaactccttcccctcaggagattgtgctagaggtggagctctccgagaaagatgtaaaggaattcgaaaagcaggtgaagatcgtaaccgtgcccgaattcacccccgaccacaaatccatgattgtgtcactcgacgtgctcccgtttaactttgtagatcctaatatggactctcgagagggcgaagataaggagctcaagattgatctggaggtgttcgagatgccccccagatttattatgcctatttgcgatttcaagattcccgagaacagtgacgcggtcttcaaatgcagtgtaatcggcatcccaaccccggaggtgaaatggtataaagaatatatgtgcattgagccagacaacattaagtacgtgatttctgaggagaagggaagtcataccttgaaaatacggaacgtgtgcctttccgatagtgctacttatcgatgccgcgccgtgaactgcgtgggcgaggcaatatgtagaggtttcctgaccatgggcgatagcgaaatcttcgctgtgatcgctaagaagagcaaagtgacactgagtagtttgatggaagagctggtgctgaagtcaaactatacagacagcttcttcgagtttcaggtggtggagggccccccccggtttataaaaggtatctccgactgttatgctcccatcgggaccgccgcctacttccagtgtctggttagagggtctccacggccaactgtttattggtacaaagatggaaagcttgtgcaaggcaggcgcttcactgttgaagaaagtgggacaggcttccacaatttgtttatcaccagcctggttaagagtgatgaaggtgagtacagatgtgttgctaccaacaaatctgggatggctgagagttttgccgccctgacattgacatag

SEQ ID NO: 137968 - DNA, 1419 bp, synthetic construct
  misc_feature 1..1419: note = Description of Artificial Sequence: Synthetic coding sequence
  source 1..1419: mol_type = other DNA
atgtacatctacgaggcttccgaggaagcggttctggaggagaaggttcttgtgacccagccccaaaaaaccaaacctaaactggctaaagttcctgagcctccaaaaaaggtggtccccgaggacaagatttatgtcaccattcccaagaagcgagagacccccgccacaaaagaaccggatactaccaggggaattttcccagaggtcgaacctcctgaggccattccggagattccagagcatccacccacggaggaattcgaagtgttcaaagaagtgattccagaaggtgaaactccaattgtaaagcgaagaaagactccttcccctactgcaccggaagcaatgaaggaagtggtgcctgagatgaagatttttgaagatgtcccagaagagcctgagacgcccaggatgaaaacacctgaggccccacaagaaatcattcctgccaagaccgtcccatccaagaagagagaacctccttcagtgaaagtgcctgaagcactgcaggagatagtgcccgagaaaaagacactcgtggtgccccttagaaagcctgaagtgctgcccgacgaagtgccagaggccctgcgcgaagtggtgcctgagaagaaggtacaccccccacagcgagccgaggtcgtgcctgtaaaggtccacgaggccccaaaggaaattatccctgaaaagaaggtatcagtcgttcccccgaaaaaaccagaggtgcccccagtaaaggtgcctgaggcttctaaggaggtcatacgagaggagaaagtacctctcgccccccctaaggagcccgaggtacctcctgttaaagttcctgagcccccgaaagaggttgtccctgagaagaaagccccagtggcccctcctaaagagcccgaagtgccgcccgtcaaggttccagaagccccaaaagaagttgtgccagaaaaaaaagttcccgtgccccctcccaaaaagccagaagtaccacccactaaagtccctgaggtgcccaaagccgcagtgccagaaaagaagctacccgaggccataccacccaagccagagtcacctcctcctgaggtgccagaggttctgcctcctaaggaggtggtgcccgaaaagaaagtgccggtgccacccgctaagaaacctgaggcacccccccccaaggtccccgaagccccaaaagaagtggtgctggagaaaaaggccagcgttgccgttccgaagaagccggaagctcccagagccaaggtccccgaggccgctcaagaggtcgttccagaaaagaagatccctaaagccccaattaagaagcctgaggcgccagctgttaccgtccccgaggtaccacaggaaatcgttcccgagaagaaaaccctcgtgttgcctaagaagcctgaggttccacctgttacctag

SEQ ID NO: 137969 - DNA, 1122 bp, synthetic construct
  misc_feature 1..1122: note = Description of Artificial Sequence: Synthetic coding sequence
  source 1..1122: mol_type = other DNA
gtggttccagaaaagaaagtgccactggtggttcccaaaaagcccgaggcgccacctgccaaggttccggaggtgcccaaagaagtggtgcccgagaaaaaggtggcagtcccaaagaagcccgaggtgccaccagccaaagtgccagaagtgcctaagaaacccgtcctggaagagaaaccagcagtccccgttccagaacgggccgagagtccgcctccagaagtgtacgaggagccagaggaaatcgcacctgaggaagaaatcgcgcccgaggaagaaaagccagtgccggtcgctgaagaggaggagccagaagtcccccctcccgctgtgcccgaagaacctaagaagattattccggagaaaaaagtaccggttatcaagaagccagaggctcctcctccaaaggagccagaaatgccaaaaaaggtggttccggttaagaaagttccaaccgtgaagaagccggaaacccccgcagcgaaggtgcctgaggttccaaaaaaactggtgccagtcaagaaggaacccgtgcccgtcacaaaaaaaccagaggtcctccctgagaaggtgcccaaagtccccgagaagatcatcccggagaaagaggtgagcgtgcctatccccgctgaacctgaggtaccacctgccgaggttgaagaaactcccgaagaaatcatttatgaggagaaggcctccattactatcggccgtaaggagacccctccagttgaagaacgcgaaattgagaagtatatcaagcccgaggagccggagccagaaccccagcccgaggagatccctgtgaaggagccagagcctgagaaagtgattgagaagcctaagcttaagccccgtcctccacctccgccacccgctccccccaaagaagacgtcaaagagaagattttccagctgaaggctattcccaaaaaaaaagtgcccgaaaaaccccaagtgcccgagaaggttgagctgacacccctgaaggtgcctgaacccccaccacctaaacccgtcgaagaggtagaggtccccaccgtgaccaagcgggagaggaaaattcctgagcccactaaagtgcctgagataaagccagctatccctctgcccgcttag

SEQ ID NO: 137970 - DNA, 543 bp, synthetic construct
  misc_feature 1..543: note = Description of Artificial Sequence: Synthetic coding sequence
  source 1..543: mol_type = other DNA
aaagtcccagaagtgcctaaaaaacccgtgctggaagagaagcccgcggtgccagtgcccgagcgcgccgagtcacctccacccgaggtgtacgaagagccagaggagattgcaccagaagaagagattgcaccagaagaggagaagcctgtgccagtggccgaggaggaggaaccagaagtgcccccgcctgccgtgcctgaggaacccaaaaaaatcattcctgagaagaaggtgcccgttatcaagaaaccagaggcccctccccccaaggagccagagcccgagaaggttatcgagaagcctaagttaaagccccggccccccccacctcctccagcccccccaaaagaggatgtcaaagagaagatttttcagctgaaggccatacccaagaaaaaagtgccagaaaagcctcaggtcccagagaaggtggagctcacaccacttaaagtccccggtggggaaaagaaggtccggaagctcctgccagaacggaagcccgaacctaaggaagaggttgtgctcaagtcgggcatctag

SEQ ID NO: 137971 - DNA, 438 bp, synthetic construct
  misc_feature 1..438: note = Description of Artificial Sequence: Synthetic coding sequence
  source 1..438: mol_type = other DNA
gaggatacttaccagctagagattgcagaggcctatcccgaggacgagggcacctatacatttgttgcatcaaacgccgtgggccaggtgtctagtacagccaatctgtcgctggaggccccagagagcatattacacgaacggatcgagcaggagattgagatggagatgaaagaactgtttagtgagggcgagtcagagcactctgagcgggatacgcgggatgctttcagcgatagcgaagatattgaccacaaaagcatggccgcaaagaggtatgccagccgcatcagctcgacaagctcttggcccgagtacttcaagccctctttcacccagaagctgacattcaagtatgtactagaaggcgaaccagtggtcttcacctgtaggcttattgcatgtccaacccctgaaatgacttggtttcacaactag

SEQ ID NO: 137972 - DNA, 546 bp, synthetic construct
  misc_feature 1..546: note = Description of Artificial Sequence: Synthetic coding sequence
  source 1..546: mol_type = other DNA
atgttcttcgcctcacataccgaggaggaggtaagtgtgacagtacctgaggtacagaaggagattgtgactgaggagaaaatccacgtggccatctcaaaacgggtggagcccccacctaaagtcccggaactgcccgagaaacccgcccccgaggaggttgcaccggtgccaatccccaaaaaggtagagcccccggctcctaaggtccctgaggtgcccaaaaaaccagtgcctgaggaaaaaaagcccgtacccgtccctaagaaggagccagcagcaccacctaaggtacccgaagtgcctaaaaagccagtgcctgaagagaaaatacccgtacctgtggcaaagaagaaagaggcaccccctgcaaaagtcccggagatacccaaaaaaaaggtgcctgaagagagaaaaccggtgcctcggaaggaggaagaggttcccccaccccccaaagtcccagcactgcctaagaaacccgttccggaagaaaaggtggccgtgccagttcccgtggcgaagaaagcccccccccctcgctag

SEQ ID NO: 137973 - DNA, 2490 bp, synthetic construct
  misc_feature 1..2490: note = Description of Artificial Sequence: Synthetic coding sequence
  source 1..2490: mol_type = other DNA
gttgaggagttcatcaaacttgagcaacatagagttgaggaggagcatagggttgaaaaagttcaccgggtaattgaagtgtttgaggccgaggaggttgaggttttcgaaaagcccaaagcccctccgaagggaccagagatctctgagaaaatcatcccccctaaaaagcctccaaccaaggtagtgccacgaaaggaaccacccgcgaaggtgcctgaggtgccaaagaaaatagttgtggaagagaaagtacgggtgcccgaggaacctagggtcccacccaccaaagcaccggaagtccctaagaaaatcgttccagaggaaaaggttcgggaggccgtcttgaaaaagccagaagtcccccctgctaaagtgcctggaatgcccaagaaatccgtacaagaggaaaaaagccccattgttatttctgaggacacagaaatgtatatttatgaggcgtccgaggaggccgtcctggaagagaaagtattggtcactcaaccacagaagaccaaacctaaactcgccaaagtgcctgaacctcctaaaaaagtggtaccggaggataagatctatgtaactatccctaaaaaacgggagactccagccaccaaagaacccgacacaaccagaggcatattccctgaggttgaaccccctgaggctatccccgagatcccagagcatccccccactgaagagtttgaggtcttcaaagaagtgattccagagggcgagacccctattgttaaacgtagaaaaactcccagtcccactgcgcccgaggcgatgaaggaagtcgtgcctgagatgaaaattttcgaggacgtgccagaggagccagagactcctagaatgaagacccccgaggcccctcaggaaataatccccgccaagacagtgcctagcaaaaagagggagcctccatcagttaaggtgccagaagccctgcaggagattgtgccagaaaagaagacactagtggtgcctctaaggaaacctgaagtgctgcctgatgaggttccggaagccctaagggaggtggtccctgagaagaaggtccaccctcctcagcgggccgaagtggtccctgttaaagtgcacgaagctcctaaggaaatcattcccgaaaaaaaggttagtgtggtccctccaaagaagccagaagtgcctccagtaaaggtgccggaggcaagcaaagaggttataagggaggagaaggtgccgctcgcccccccgaaggagcccgaggtgccgcccgtaaaagtcccagagccacccaaagaggtggtacccgaaaagaaggccccagtggcccctccgaaggaacctgaggtcccaccagtgaaagtgccagaagcaccaaaggaggtcgtgcccgagaaaaaagtccccgtgcctccccccaagaaaccagaagttccccccacaaaagtgccagaggtaccaaaggctgccgtgcctgagaagaagcttcccgaggcaatccctccaaaaccggagagcccccccccagaggttcccgaggtcctcccccccaaggaggtagttcctgaaaagaaggttcctgtcccccctgcgaaaaagcctgaagccccaccacctaaagtgcctgaagctcctaaggaggtcgttttggaaaaaaaagcatcagtggccgtacctaagaagcccgaggctcctagggctaaggtccccgaagccgcccaggaagtagtacccgaaaaaaagatacccaaagcacccataaagaaacctgaagccccagccgtcaccgtcccagaggttccacaagagattgtgcccgagaagaagactcttgtgctaccaaagaagccggaggtcccccccgtgaccgttcccgaagctccaaaagaggtggttctcgaaaagaaggtgcccagtgcaccgcccaagaagcccgaagtccctcccgtgaaagtccccgaggcacctaaagaagtcgtgcctgaaaagaaggtgcccgtgcccccaccgaagaaaccggaggtcccccctactaaagttccggaagttcctaaggccgctgtgccggagaagaaagttccggaggctatccccccaaaaccagaatctccaccgccagaggtaccagaggtcttgccaccgaaggaagtcgtgccggaaaaaaaggtaccagtcccccccgccaaaaagcctgaagcacccccccctaaggtacctgaggcacccaaagaggtcgtcttggaaaaaaaggccagcgtcgccgtgcctaagaagccagaagctccacgggccaaagtgcccgaagcggctcaagaagtcgttcccgagaagaagatccctaaagcacctattaaaaagcctgaagccccagcagtcacagtccccgaagtgccacaggaagcggcagagaaagagatcccagtggctccccctaaaaagccggaggcacccatcgttcccgtgccagaagcccaggaggtcgtgcccgagaaaaagtag

SEQ ID NO: 137974 - DNA, 504 bp, synthetic construct
  misc_feature 1..504: note = Description of Artificial Sequence: Synthetic coding sequence
  source 1..504: mol_type = other DNA
atggctacctccgaactaagctgcgaagtaagtgaagaaaattgcgagcgcagagaagccttctgggctgaatggaaagatcttaccctgtcgacccgcccggaagagggatgctccctgcacgaggaagatactcaacggcacgaaacttaccaccagcaggggcaatgccaggtgttggtacagaggtcaccttggctgatgatgcggatgggcatcctaggtcggggactccaagaatatcagcttccctatcagagagtcctgcctcttccaatattcacacctgctaagatgggtgccaccaaagaagagcgggaggacacccctattcagttacaagaactgttggccttggagaccgcactcggaggtcaatgtgtagaccgccaggaggtggcggaaattaccaagcagttgccacctgtcgtcccggtgtctaagcccggtgcacttcgcaggagcttgagtagatcaatgagccaggaggcacaacgggggtag

SEQ ID NO: 137975 - DNA, 744 bp, synthetic construct
  misc_feature 1..744: note = Description of Artificial Sequence: Synthetic coding sequence
  source 1..744: mol_type = other DNA
atggcaggaggagtgctcccactgcgtggactgagggccctttgcagggtgctgctctttctgagtcagttctgtatcctgtcaggaggggagcagagccaggctctggctcagagtatcaaagatcccggccctactaggacttttacagtggttcccagggccgcggaaagcaccgaaatacctccctatgtcatgaagtgtccgtctaacggcctctgcagcaggcttcctgcagattgcatcgattgtactactaacttttcttgcacatacggaaaaccggttacatttgattgcgctgtaaagccctccgtgacatgtgtggaccaagactttaaaagccaaaaaaatttcattatcaatatgacttgccggttctgctggcagttgcctgaaacagattacgagtgcacaaatagtacatcttgtatgaccgtttcttgtcctagacagcggtaccccgcaaactgtacagtcagggatcacgtccactgtctcggtaataggactttcccaaagatgctttactgtaactggacaggggggtacaagtggtccaccgcattagcactgtcaataactcttgggggcttcggcgccgataggttctatctgggccaatggcgggagggcctagggaaattgtttagctttgggggtctggggatctggacacttatcgacgtcctgttaattggagttgggtatgttggtcccgctgacggttccctttatatttag

SEQ ID NO: 137976 - DNA, 666 bp, synthetic construct
  misc_feature 1..666: note = Description of Artificial Sequence: Synthetic coding sequence
  source 1..666: mol_type = other DNA
atggccggcggcgtcctccctctgaggggacttcgggctctttgccgggtgcttttatttctgtcgcagttctgtatcctctctgggggtgaatcaactgagattccaccctatgtgatgaagtgccccagtaatggcctctgctccagactgccagccgactgtattgactgtaccactaatttttcctgcacctacgggaagccagtgacttttgattgcgcagttaaaccatctgtaacctgcgtggatcaggacttcaaatctcagaagaattttattatcaacatgacatgtcgcttctgctggcagctgcctgagacagattacgagtgtaccaatagcacttcatgcatgaccgtgtcctgcccaagacagagataccccgccaactgcaccgtgagggatcatgtgcattgccttggtaatcgcaccttccccaagatgctgtactgcaactggacagggggttacaagtggtctactgcgctcgcactgtccatcactttgggaggcttcggagcagaccgtttctatctgggccagtggcgggagggattgggcaaattattcagctttggcggcttggggatctggacgctcattgacgttctgttaattggggtgggatacgtaggaccagccgacggatcactatatatttag

SEQ ID NO: 137977 - DNA, 1251 bp, synthetic construct
  misc_feature 1..1251: note = Description of Artificial Sequence: Synthetic coding sequence
  source 1..1251: mol_type = other DNA
atggcttcttcgtcgggctcaagcccacggcccgcgcctgatgagaacgagttccctttcgggtgccctcctactgtgtgccaggaccccaaggaaccgcgcgctttatgttgtgccggatgtctgtccgagaatcccaggaatggcgaagatcagatctgccccaagtgccgaggggaagacttgcagagcatcagcccgggttctagacttcggacccaggagaaggcccaccccgaggttgcagaggcaggcatcgggtgcccgtttgccggggttggctgttcatttaaagggagccctcaaagcgtccaggagcacgaagtaacctcacagactagccatttgaacttgctgctgggcttcatgaagcaatggaaagccagactgggctgtggtctagagtccggtccaatggcccttgagcagaatctgagtgatttacagctgcaagcagcggtagaagtggctggtgatctggaggtggactgctaccgggccccttgttcagaatctcaggaagagctcgccctccagcacttcatgaaggaaaaactgcttgctgagctggagggaaagctgagagtcttcgaaaatatcgtcgcagttttgaacaaagaggtggaagccagccacttggctctggccactagcatccaccagtcccaactggacagagaaagaatacttagcttggagcagcgagttgttgagttacagcagaccctagcacagaaggaccaggctctgggcaaactagagcaaagcttgagacttatggaggaggcatcgttcgatggaacattcctctggaaaataacaaatgtgaccagacgttgtcatgagtctgcctgcggcaggacagtaagcctgttcagcccagccttttacacagccaagtacggctataagctgtgcttacgcctttacttgaacggggatggaaccggcaagaggacacacctatcactgttcatagtcattatgcgaggcgagtacgatgccctgctaccatggccctttagaaataaggtgaccttcatgctccttgaccagaataatcgagaacacgctatcgatgcgttccggccagatctgagctcggcgagcttccaacgacctcaatcggagacgaacgtggcgagcggctgtccactctttttccctctctccaagctgcagtctcctaaacatgcttacgttaaagatgacacgatgtttctgaaatgtattgtggagacctccacctag

SEQ ID NO: 137978 - DNA, 1251 bp, synthetic construct
  misc_feature 1..1251: note = Description of Artificial Sequence: Synthetic coding sequence
  source 1..1251: mol_type = other DNA
atggcaagctcaagtgggtccagcccgcgacctgcccccgatgagaacgagttccctttcggatgtccccctacggtgtgccaggatccgaaagagcctcgcgccctgtgctgcgccggctgtctgtcagagaatcctcgcaatggggaggaccaaatctgtccaaaatgtcgaggcgaggacctgcagagtatctcccccggtagccggctccgcacccaggaaaaggctcacccagaagttgccgaggcgggaattggctgcccgtttgctggcgtcggttgtagctttaaaggctccccacagtctgtccaggaacatgaagtcacctctcaaacaagtcacctgaatttgttgctcggcttcatgaagcagtggaaggctcgcttgggatgtggactggaatctggccccatggccttggagcaaaaccttagcgatcttcagctgcaggcagcggtggaagtggccggagacctcgaggtggactgctaccgtgctccttgcagcgaatctcaagaggaacttgccctgcaacattttatgaaagaaaagttgctggcggaactggagggcaagctgagagtttttgaaaatattgtcgcggtacttaataaggaggtggaggcaagccacctcgccctagcaaccagcatccatcagtctcagctggacagggaaagaatcctgagcttagaacaaagggtcgtggagttgcagcagaccctggctcaaaaagatcaggccttaggcaaactggaacagagtctgcgacttatggaggaggcatctttcgacgggacttttttgtggaaaataacaaacgttacccgtagatgtcatgaatccgcgtgcggccgcactgtctctttgttcagccctgccttttataccgctaagtatggctataaattgtgcctgcggctgtatttgaacggcgatggcacaggaaaacggacacacctgagcctctttattgtgatcatgcgtggggagtacgatgctctgcttccatggccgttcaggaataaagtgacctttatgctgcttgaccagaataacagagaacacgccattgatgcctttcggcctgacctgagtagtgcttcctttcagagaccacaatccgaaactaacgttgcttctggatgtccactgttttttccattatctaaacttcagtctcctaaacacgcatatgtgaaagacgatactatgtttctcaaatgcattgtcgaaacctctacatag

SEQ ID NO: 137979 - DNA, 885 bp, synthetic construct
  misc_feature 1..885: note = Description of Artificial Sequence: Synthetic coding sequence
  source 1..885: mol_type = other DNA
atgaaacagtggaaggccagactcgggtgtggattggagtccggcccaatggctctggaacagaacctttccgaccttcaactacaggccgctgtggaagttgcaggggacctcgaagtggactgctaccgggccccgtgctcagaaagtcaagaggagttagcgctgcagcactttatgaaggaaaagctcctggcagagttagaagggaagctgagggtgtttgagaacattgttgccgtgctaaataaggaggtcgaggcctcacatctggcactcgcaacctcaattcaccagtcgcagctagacagggagagaattctgtctctggaacagcgggttgtggaactccaacagaccctcgcccagaaagatcaagctctgggcaaactcgagcaatccttacgccttatggaggaggcctcgtttgacgggacatttctatggaagatcacgaacgtgacccgacgctgccacgagagtgcgtgcggaaggaccgtgtcactcttttcccccgccttttacaccgctaagtacggctataaactgtgcctgcgcttataccttaacggcgatggcacagggaaacggacgcacctatccctgtttatcgttataatgaggggggagtacgatgctctgctaccctggccatttcgcaataaagtgacatttatgctgctggatcagaacaatagagagcatgctatcgatgccttcaggccggacctcagtagtgcctccttccagcgtccccagtctgagacaaatgtggcgtctggctgcccgttgttctttccactctccaaattgcaatcccccaaacacgcatatgttaaggacgataccatgttccttaagtgcatagtggagacctcaacatag

SEQ ID NO: 137980 - DNA, 2076 bp, synthetic construct
  misc_feature 1..2076: note = Description of Artificial Sequence: Synthetic coding sequence
  source 1..2076: mol_type = other DNA
atgaacgccgcagtcgtgaggcgcactcaggaggcgctggggaaggtgatacggcgcccccccttaaccgagaaactgctgtctaaacctcccttccggtatcttcacgatatcatcacagaagttataaggatgacaggcttcatgaaaggcctctacactgatgccgaaatgaaaagtgataacgttaaagacaaagatgctaagatctccttcttgcagaaggcgatcgacgtggtcgtgatggtgtccggggagcccctgttagccaaaccagcgcgaatagtggccgggcatgagccagaaaggacgaacgaactgctgcagatcatcgggaagtgctgcctgaataagctgtccagcgacgacgctgtgcgcagagtgcttgcaggcgaaaagggcgaggtgaaaggccgcgcatcacttactagcagaagccaggagttagataacaagaatgttcgtgaagaggagtccagggtgcataagaacacggaagaccgcggcgatgccgagatcaaggaaaggagcacttcacgggatagaaagcagaaggaggagctaaaggaagaccgcaagcctcgggaaaaagataaagataaagaaaaagccaaagaaaacggtggcaataggcaccgggagggcgaaagggagcgggctaaggcccgagccagacctgacaatgaaagacagaaggacagaggaaacagggaacgagaccgagattctgagcgcaaaaaagaaacggaacggaagagcgagggcggcaaagagaaggagcgactgagggaccgggacagggagcgcgaccgggataaaggcaaggacagggatcgacgacgcgtgaaaaacggtgaacactcttgggacctagacagagagaaaaaccgggaacacgacaagcccgaaaagaaatccgccagctccggcgagatgtccaaaaaattgagcgatggaaccttcaaggatagtaaggccgaaacggaaactgagatatctacaagagcatcaaaatcactgaccacaaaaaccagcaagcggaggagtaaaaacagtgtcgaaggccggaaagaggacaatatctccgcaaagtcccttgatagcattgtctccggcatcaacaatgaaccgaatcaggaaacaacaacttcagagattgggactaaggaagctaacatcaactccacgagcatctctgacgataactccgccagcctgaggtgtgagaacatccagccaaatccaactgagaagcaaaaaggtgatagtacgagtgacgccgagggcgatgccggccctgcaggacaggataagagcgaagtgccagagactcccgaaatccccaacgagttgtcttcaaacattagacgcattccacgacctggttctgcacgccccgcgccaccccgtgtgaagcggcaggactcaatggaggcactccagatggatcggtcaggtagtggaaagaccgtatccaatgtcattactgaaagtcataattctgataatgaagaggatgatcagtttgtcgtggaagccgcgcctcagctctctgaaatgagcgagatagagatggtgaccgcagtcgagctggaagaggaggagaaacacggaggcctagtgaaaaaaattcttgagacaaaaaaggattacgagaaactgcagcagagtccaaagcctggagagaaagagcgtagcctgtttgaaagcgcctggaaaaaggaaaaggacattgtgagcaaggaaatcgagaagctacgaacgagcatccagaccctatgcaagagcgccctccctctgggaaagatcatggattacatccaggaagatgttgacgctatgcagaatgagctgcagatgtggcattctgagaacaggcagcatgctgaagcactgcagcaggagcaacgcatcaccgactgtgctgtcgaacctcttaaggccgaattggcggagttagagcagctgataaaggaccagcaagacaagatctgtgcagttaaggccaacattttaaaaaatgaagagaagattcagaagatggtttacagtattaacctgacaagccgacggtag

SEQ ID NO: 137981 - DNA, 1878 bp, synthetic construct
  misc_feature 1..1878: note = Description of Artificial Sequence: Synthetic coding sequence
  source 1..1878: mol_type = other DNA
atgaatgccgccgtggtgcgtcgtacacaagaggccttaggcaaagtaatcaggcgacctcccctgactgaaaagttactgtccaagcctccattccggtacctccacgacataattaccgaagtaattcggatgactggattcatgaaggggctgtataccgatgctgagatgaagtccgataatgtaaaggacaaggatgcaaaaatctctttcttgcagaaagctatcgacgttgtggtgatggtgtccggggagcctctccttgcaaaacccgcaagaatcgtggctggacacgagcccgagagaaccaacgaattgttgcagatcattggcaagtgctgcctgaataagctctctagcgacgatgcagttcgccgtgtgctggctggggaaaagggagaggtgaagggaagggcctcacttaccagccggtctcaagagctggataacaaaaacgttagggaagaagagagccgggtgcacaagaacacagaggatcgcggggacgccgagattaaggagagatctactagtagagatcgcaaacagaaagaggagctcaaggaggacagaaaaccgcgggaaaaggacaaagacaaggagaaggcgaaggagaatggtggtaaccgacatagagagggcgaacgagaacgcgcaaaggcacgggcacgcccagacaatgagagacagaaagataggggcaatcgtgaacgggatcgcgattctgaacgcaagaaggaaaccgaacgcaaatctgaggggggtaaggagaaggaacggctccgcgatcgagaccgagagagagacagggataagggaaaggaccgcgacagaagaagggtgaagaatggagaacatagttgggatctggatcgcgagaaaaatagagagcacgacaagcccgaaaagaagagcgcttccagtggagagatgtccaagaagctcagcgatgggaccttcaaggatagcaaggcggagactgagacggaaataagcactagagcctccaagagcctaaccaccaagactagcaagcgtcggtccaagaattctgtggagggagacagcacctccgacgctgagggggacgccggacccgccgggcaagacaagtccgaggtcccagagacccccgaaattcctaacgagctcagctctaacatccgccgcataccccgacctggctcagcccggccagctcctcctagagtaaaaagacaggattcaatggaagcattacaaatggatcggagcggtagtggcaagactgttagcaacgtcattaccgagtcacacaattccgataacgaggaagatgatcagttcgttgtggaagcggccccccagctctctgagatgtccgagatcgaaatggtcactgccgttgagctggaggaggaggaaaagcacggcgggctcgtgaagaaaattctggaaaccaagaaggactacgaaaaacttcagcagtcgccaaagcctggggaaaaggaacgcagtctgttcgagtctgcctggaaaaaggagaaagatatcgtttccaaagaaattgaaaagttacggacctccatccagacattatgtaagagtgccttgccactgggaaagatcatggactatattcaggaggacgtggatgcaatgcaaaatgagctgcagatgtggcattctgaaaataggcagcatgcagaggctctccagcaggaacaacggattaccgattgcgccgtggaacccctcaaggcagagctggctgagcttgagcagctgattaaagaccaacaggataaaatctgtgctgtgaaagcaaatattctgaaaaatgaggagaaaattcagaagatggtgtattcaatcaatctcacctcacgcagatag

SEQ ID NO: 137982 - DNA, 2076 bp, synthetic construct
  misc_feature 1..2076: note = Description of Artificial Sequence: Synthetic coding sequence
  source 1..2076: mol_type = other DNA
atgaacgccgccgtggtgagacgaacacaggaggccctgggcaaggttattcgcaggcctcccctgacggaaaaattgctgagcaaaccccccttccggtatttacacgatatcattacagaagtaataaggatgactggcttcatgaagggcctgtacactgatgctgagatgaagagcgacaatgttaaagataaagacgctaagatttcatttcttcagaaagccattgacgtagtggtgatggtgtctggtgagcccttgctagctaaacccgcccgtattgtagcgggacatgaaccagagagaaccaacgagctgctgcagatcataggcaaatgctgcctaaataaactttcttccgatgacgcggttcgaagggtcctggccggcgaaaaaggcgaagtgaagggccgggcttctctgacctctaggtcacaggagctggacaacaaaaatgtgcgggaggaagagtccagagtgcataaaaataccgaagataggggagatgccgagattaaagaacgctcgacctcccgggaccggaagcagaaggaggaattaaaggaagatcgtaagcccagggaaaaagataaggataaggagaaagcaaaagaaaatgggggaaaccgtcatagggaaggcgagcgagaacgagccaaggcccgcgctcgaccagacaacgagcgacaaaaggatcgcgggaatagggagagggaccgcgactcggaacgcaagaaggagaccgagagaaaatctgaaggggggaaggagaaagagaggctgcgcgatagagatcgagagagggacagagataaaggcaaggatagggatcgccgcagggtgaagaatggagagcactcctgggacttggaccgagagaagaatagagaacatgataagccggagaaaaaatccgcgtcctccggggagatgtccaagaagctcagtgacgggaccttcaaggattccaaggccgagacggaaacagaaatttccacacgggctagcaagagcttgaccaccaaaacatccaaaaggcgctctaagaattctgtggagggccgtaaagaggacaatatctccgctaaaagtttggatagtattgtgagcgggatcaataatgaacccaaccaggaaaccacaactagcgagatcggcaccaaggaagcaaatatcaactcaacctcaatttctgacgacaactccgcttcccttcggtgtgagaacatccaacccaatccaaccgagaagcaaaagggaaaaaacgggtcagagcgagaaggcgatgctgggccagcagggcaagacaagtcagaggtgccagagacaccagagatacccaatgagctgtccagcaacattcgacggatacctcgccctggatccgctcgcccggccccgccacgcgttaaacgccaggacagcatggaggcactgcagatggataggtccggatccgggaagaccgtctccaacgtcatcaccgagagccacaactccgacaatgaggaagatgaccagttcgtagtagaggcagccccccaactgtcagaaatgtctgaaattgagatggtgaccgcagtggaactggaagaggaggaaaagcacggtggcttggtcaagaaaatcctcgaaacgaagaaagattacgagaaattacagcagagccccaagccaggagaaaaggagaggagcctcttcgagagtgcctggaagaaggaaaaggacatcgtgtcgaaggaaattgagaagcttaggaccagtatccagaccctctgcaagtcggcacttcctcttggaaagattatggattacatccaggaagatgtcgatgccatgcagaatgagctgcaaatgtggcactctgaaaaccgtcagcacgcagaggccttacagcaggaacaacggatcactgattgcgccgtggaaccactgaaagccgagctcgctgagctcgaacagcttataaaagatcagcaggataaaatctgtgccgtgaaggccaacattttgaagaacgaggaaaagatccagaagatggtctattctattaatctgacctccaggcggtag

SEQ ID NO: 137983 - DNA, 1878 bp, synthetic construct
  misc_feature 1..1878: note = Description of Artificial Sequence: Synthetic coding sequence
  source 1..1878: mol_type = other DNA
atgaatgctgctgtggttcgacggactcaggaagcactgggaaaagtgattcgtcgccccccgttgaccgagaagctgctctccaaacccccgttccggtacttgcacgacatcattactgaagtgatcaggatgactggattcatgaaaggactgtacaccgacgcggagatgaaatctgataacgtcaaggacaaggacgccaagataagttttctgcagaaggcaattgatgtcgtggttatggtgtcaggcgagcctctgttggctaagcctgccagaatagtcgccggccatgagcccgagcggacaaatgaactgctgcagattatcggcaaatgttgtctgaataaattgtcatcagacgacgcagtgagaagagtgctcgcaggagaaaagggagaagtgaaggggagagccagcttgacctccaggtcccaagagctggataataagaacgtaagggaagaagagtcgagagtacacaagaacactgaggaccgcggagatgcagagataaaggagcgatctacttctcgcgatcgcaaacaaaaggaagagctcaaagaggaccggaaaccccgggagaaggacaaggataaagaaaaagctaaagagaatgggggcaaccgacaccgtgaaggagagagggagcgagccaaagctagggccaggccagacaacgagagacagaaagatagaggtaatcgcgaacgggatagggattccgaacggaagaaagagactgagagaaaatccgagggcggaaaagagaaagaacgcttgcgggatagagaccgggaaagggacagagacaaagggaaggaccgtgatagaaggcgagtgaaaaatggggagcacagctgggacctggaccgagaaaagaatagagagcacgataagcccgaaaagaaatctgctagttctggtgagatgtcaaagaaattgagcgacggaaccttcaaggattcaaaagccgaaaccgaaacagaaatatccacacgggcctcaaaaagcttgactaccaagacgagcaagcgtcgttcaaaaaactccgttgaagggaccgcaaagctgatcctagagggtgacgctggacctgccggacaggacaagagcgaggtgccagaaactcccgaaatcccaaacgaactcagtagcaatatcaggaggataccccggccaggatccgctcgaccagccccaccccgagtaaaacggcaagattccatggaggcgttacagatggatcggtccggtagtgggaagacagtttcgaatgtcatcactgaaagtcataattccgataacgaagaagacgaccagttcgttgtggaggccgcgccccaactcagcgagatgtcggaaattgagatggtgaccgccgtcgagctcgaggaagaagagaagcacggggggctggtgaaaaagattctggagacaaagaaagactatgaaaaacttcagcagagcccgaaaccgggggaaaaagaacgctcgctgttcgaatctgcctggaagaaagaaaaggatatcgtcagcaaagagatcgagaagcttcgaacaagcatacagacgctgtgtaaatccgctctgcccctgggaaagattatggattacattcaggaagacgtagatgctatgcagaatgagctacagatgtggcactccgagaacagacagcacgcggaggctctgcagcaagagcagaggatcactgactgtgcagtagaaccattgaaggcggaactggccgagctggaacagctgattaaggatcagcaagataagatttgtgcggttaaggcgaatattctgaaaaacgaggagaagatccagaagatggtgtattcaataaatctgacgtcccggaggtag

SEQ ID NO: 137984 - DNA, 1674 bp, synthetic construct
  misc_feature 1..1674: note = Description of Artificial Sequence: Synthetic coding sequence
  source 1..1674: mol_type = other DNA
atggcctattcagaggaacataaggggatgccttgtggatttatcagacagaacagcgggaacagtatctcgctcgatttcgaaccctcaattgaataccagtttgtagagcgcctggaggagcggtataagtgtgcgttctgccacagtgtacttcataatcctcaccagactgggtgcggacacagattttgtcagcattgcatcttatcactcagggaattgaacacggttccaatttgccctgtagacaaggaggttattaagtctcaagaggtctttaaagataactgctgtaagagagaggttttaaatttgtacgtgtattgttccaatgcccccggttgtaacgccaaggttattttggggcggtaccaggaccatcttcagcagtgtctattccagccggtgcagtgttccaacgaaaagtgccgggagcctgttctacgtaaggatctgaaggaacacctctctgctagctgccagtttaggaaagagaaatgcttatactgcaagaaagacgtcgtcgtgatcaacctccagaaccatgaggaaaacttgtgtcccgagtatcctgttttttgccctaacaactgtgctaaaattatactcaaaaccgaagtggacgaacatctggctgtgtgccccgaagctgaacaggactgcccctttaagcattacggatgcgccgtgaccgataaaaggaggaaccttcagcagcacgagcacagtgcactcagagagcatatgcggctggtcttagagaaaaacgtccagttggaggaacagattagcgacctccacaagagccttgagcagaaggagagcaagattcagcagctggccgagaccatcaaaaaactggaaaaagaatttaagcagttcgcacagttgttcggcaaaaacggatcgtttctgccaaatattcaggtcttcgcctcgcatatcgataaatccgcctggctcgaagcccaggtgcaccagctgttgcagatggtaaatcagcagcaaaacaagttcgacctgcggccactcatggaagccgtagacactgtcaagcagaagataaccctcctggaaaataatgatcagcgcctagccgtcctggaggaggaaacaaataagcatgatacccatatcaatatccacaaggcgcagctgtctaagaatgaggagcgctttaaactgctggaggggacttgttataatggcaaactgatctggaaggttaccgattacaagatgaaaaagagagaggccgtggacggccacaccgtatcaatctttagccagagtttttatacctctcgatgtgggtaccgcttatgtgccagggcctacctcaacggggacgggagtgggcggggatcacatttatctttgtattttgtagtgatgaggggagagttcgactcccttcttcagtggccttttcggcagcgtgtgaccctcatgctgctggatcaaagtggcaagaagaatattatggaaacctttaagcctgatcccaacagcagctcattcaagaggcctgatggagagatgaacattgcgtccgggtgccctagatttgtcgcacactccgtgcttgagaatgcaaaaaatgcctatatcaaggatgacactctgttcctcaaagttgcagtagacttgacagatctggaggatctatag

SEQ ID NO: 137985 - DNA, 1674 bp, synthetic construct
  misc_feature 1..1674: note = Description of Artificial Sequence: Synthetic coding sequence
  source 1..1674: mol_type = other DNA
atggcttatagtgaagagcacaaagggatgccttgtggcttcattcgccaaaattctggtaattctatcagtctggatttcgaaccatccattgagtatcagttcgtagagagactcgaggagagatacaagtgtgcattttgccactctgtgctgcacaatccacaccagactggatgcggacaccgtttttgtcagcattgtattctgtcgttgcgggagctcaatacggtgcccatctgccctgttgacaaagaggtcattaaaagtcaggaggtcttcaaggataactgctgtaagcgtgaggtgctgaacctgtacgtgtactgcagcaacgctccaggctgcaacgcaaaggttattcttggcaggtatcaggatcaccttcagcagtgcctgttccagcctgttcagtgctccaacgagaagtgccgcgagcctgtgcttaggaaggacctaaaagagcacctgagcgctagttgccagttcagaaaggagaagtgtctttactgcaagaaagacgtcgtggtcatcaacctccagaaccacgaagaaaacctttgtcctgagtacccagttttctgtccaaataattgcgccaaaatcatacttaaaaccgaagttgatgaacatctggctgtctgtcccgaagctgagcaagactgtccattcaagcactacggatgcgccgttaccgacaaacgacggaatctgcagcagcacgagcactcagctttgcgggaacacatgagactggtgttggaaaagaatgtccagttggaagaacagatctctgatctgcataaatcattggagcaaaaagagtccaagatccagcaactggcagaaaccatcaaaaagctggaaaaggaattcaaacaattcgcccaactcttcggaaagaacggctcgttcctgcctaacatacaagtgttcgcaagtcacatagataagtcggcttggcttgaagcacaggtgcaccagctgttgcaaatggtcaatcagcaacagaataagtttgatctgagacccctcatggaggctgtcgacacggtgaagcagaagattacgctcctagagaacaatgaccagcgcctagcagttctggaagaagaaaccaacaaacacgatacacacatcaacattcacaaagcacagctctccaagaatgaggagcgattcaaactcctcgagggcacctgttataacggaaaactgatatggaaggtgaccgactacaagatgaagaagcgtgaggctgtggatggacacacagtgagcatcttctcccagagcttttacacatcccgatgtgggtaccgactttgcgcccgcgcctatctgaatggtgatggttcaggccggggtagtcacctctccctctacttcgtggtgatgcgcggcgagttcgattccctgttacagtggccctttcggcagcgtgtcactctcatgttgctggaccagtcaggtaagaagaatatcatggagacatttaagccagacccgaattcctctagcttcaaaagaccagacggcgagatgaacatcgctagtggttgtccgcgttttgtggcacatagtgtgttggaaaacgctaagaacgcctacattaaagacgacaccctgttcttaaaagttgccgtcgatttgactgatctggaagacctctag

SEQ ID NO: 137986 - DNA, 1674 bp, synthetic construct
  misc_feature 1..1674: note = Description of Artificial Sequence: Synthetic coding sequence
  source 1..1674: mol_type = other DNA
atggcttatagcgaagaacataagggcatgccatgcgggttcatccgacagaactctggtaactcaatcagcttggatttcgaaccaagtattgagtatcagtttgtggagcggctcgaggagcgctacaagtgtgccttttgccattcagtccttcacaacccgcaccagaccggctgcggccacagattctgccagcactgtattcttagcctccgcgagctcaacaccgtgcccatctgtcctgtggacaaagaagtgataaaaagccaggaggtgttcaaagataattgctgtaaaagagaggtgctaaatctgtacgtctattgctcaaacgcccccggctgcaatgccaaggtcatcctagggaggtaccaggaccatttgcagcagtgtctttttcagcctgtgcagtgcagcaacgaaaaatgccgggaaccggtgctgcgaaaggacctcaaagaacatttgtctgcgagttgtcagttccgcaaagaaaagtgcctgtattgcaaaaaggacgtcgttgtgattaatctgcagaatcacgaggaaaatctgtgtccagaataccctgtgttttgtcccaataactgcgctaagatcatattaaaaactgaggttgatgaacacttggctgtgtgtccagaggccgagcaagactgtcctttcaagcattacgggtgtgcagtgaccgataaacgcaggaacctgcagcagcacgagcactccgccctgagggagcacatgagactagtgctggagaagaatgtgcagctagaggaacagatctcggatttgcacaaatctctcgagcagaaggaatcgaagattcagcagctcgccgaaactattaaaaagctcgagaaggaattcaagcagtttgcccagctgtttgggaagaacggatcattcctgcccaatatccaagtcttcgcatcacacatcgacaaatccgcctggctggaagcacaggttcatcagctgctgcagatggtgaatcaacagcagaataaattcgacctgcgcccactgatggaagccgtcgacaccgtcaagcaaaagatcaccctccttgaaaacaatgaccagaggttagcagtacttgaagaagagactaacaaacatgacacccatatcaacattcataaggcgcagctaagtaaaaacgaggaacggtttaagctgctcgaaggaacctgctataatggtaagctgatttggaaagtcacggattataagatgaagaaacgtgaggctgtggatggtcatacagtgtcaattttttcccagagcttctacacttcacggtgcggttacaggctgtgcgctcgagcttatttgaacggcgacggatcaggacggggatcccatttgtccctgtactttgtcgtgatgaggggggagttcgattcactgcttcagtggcccttccggcagagagtcactctcatgttattggatcagagtggtaaaaagaacatcatggagacctttaagccggaccctaactcctcgagcttcaaacgtcccgatggtgagatgaatatcgcctccggctgtccacgtttcgtggcccacagcgttctagagaatgcgaaaaacgcctatatcaaagacgacactctctttctcaaggtcgccgttgatttgaccgatcttgaagacttatag

SEQ ID NO: 137987 - DNA, 1356 bp, synthetic construct
  misc_feature 1..1356: note = Description of Artificial Sequence: Synthetic coding sequence
  source 1..1356: mol_type = other DNA
atggcctatagcgaagagcacaagggcatgccctgcgggtttatccggcagaattcaggcaactcaatcagtctggatttcgaaccttccattgagtatcaatttgtggagcgcctggaggagcgatacaagtgtgccttttgccacagcgtgctgcacaatcctcatcagacagggtgtggtcacagattttgccagcattgtatactctcactacgggagctgaacactgtccctatttgtcccgtggacaaggaggtgatcaagtcacaggaggtcttcaaagataattgctgcaaacgagaggtgctcaacctttatgtctactgttcaaacgctcctgggtgtaacgcaaaggtcatacttggaagataccaagataaaagacgaaacctgcagcagcacgagcacagtgctttgagggaacacatgaggctcgtcctcgagaaaaatgttcaactggaggaacagatctccgacctgcacaagtcacttgaacagaaggaatccaaaatccagcagttagcagagacgatcaagaagctggaaaaagagttcaagcagttcgctcagttgtttggcaagaacggtagctttttaccaaacattcaggtgttcgctagtcatatagacaagtccgcgtggctcgaggcacaggtccaccagctgctgcagatggtgaaccagcagcagaacaagtttgacttaagaccattgatggaggccgtggatactgtgaagcagaagataaccctgctggaaaataacgatcaaaggcttgctgtgctcgaggaagagacaaacaaacacgatacacacattaatattcataaggctcaactctccaagaatgaagaacggttcaaactcctggaaggtacatgctataacggaaaattgatatggaaagtgactgactacaagatgaagaaaagggaggccgttgatgggcacacagtctcaattttttctcaaagtttctatacttctagatgtgggtatcgcttgtgcgctcgcgcttacctgaatggggatggctcagggaggggttcccatctatccttgtacttcgtggtgatgagaggcgaattcgactccttgctgcaatggcccttccgccagagggtgacgctgatgctgctggaccagtccggcaaaaagaatattatggaaaccttcaaaccagatccaaattccagttcatttaaacgtccggacggcgaaatgaatattgcctctggttgtcctcgcttcgtggctcattctgtgctggagaacgcgaagaacgcctatataaaggatgatacactctttttgaaggtcgctgtcgacctgaccgacctcgaggacctatag

SEQ ID NO: 137988 - DNA, 1569 bp, synthetic construct
  misc_feature 1..1569: note = Description of Artificial Sequence: Synthetic coding sequence
  source 1..1569: mol_type = other DNA
atgtccttgctgaactgtgaaaatagctgtggctccagccagtccgaatctgactgctgcgtcgcgatggcgagttcttgcagcgcagtgaccaaggatgactccgtcggagggactgcctccacaggtaacctgtcttcttcatttatggaagagatccagggctacgatgtcgaattcgatccccctctggagagcaaatacgagtgccctatctgcctgatggccctccgcgaagctgtgcagacaccttgcggacaccggttttgcaaggcatgtattatcaaatctatcagggacgctgggcacaaatgtcctgtggataacgagatactgctggaaaaccagctatttccagacaacttcgccaaaagggagatcttatctttgatggtcaagtgtcccaacgagggctgtctgcacaagatggagctgagacatctggaagatcatcaggcacactgtgaattcgcccttatggactgcccccagtgtcagaggccattccaaaagttccacattaatatccacattcttaaagactgccccaggagacaggtttcctgtgacaattgcgccgcaagcatggccttcgaggacaaagaaattcatgaccagaattgccctctggcaaacgtcatatgcgaatattgtaacaccattctgatccgtgagcagatgccaaatcattatgacctggattgtccaacggcccccattccttgtaccttcagtactttcggctgtcatgagaaaatgcagagaaaccacctagcacggcacttacaagaaaatacacaatcccacatgagaatgttagcccaggcggtgcactcccttagcgtgatacctgattcgggatatataagcgaggtgcggaatttccaggagaccattcatcaacttgaagggaggcttgtccggcaggatcaccagatccgtgagcttaccgccaagatggaaactcagtctatgtacgtctccgagctcaagagaaccatccgcactctggaggataaagtggctgaaattgaggcccagcagtgcaacggaatctacatctggaaaatcggcaactttggcatgcatctcaagtgtcaggaagaggaaaagcctgtagtgattcatagtccggggttctatacaggcaaacctggatataaactctgcatgcggctgcatctgcagctgcctaccgcacagcgctgcgcaaactatatttctctgtttgtgcataccatgcaaggagaatacgatagtcatctcccttggcctttccaggggaccattagactgacgattctggaccaatcagaggcccccgtgcgacagaatcacgaggaaatcatggacgcgaaaccggaactgctcgcgtttcagcgtcctacaattcccaggaaccccaaaggctttgggtatgtcactttcatgcacttggaggcactcaggcagcgcacattcattaaggacgatacactgctggtgcgatgcgaagttagtacgcgtttcgacatgggtagcctgagaagggagggcttccagccacgttctacagatgccggcgtgtag

SEQ ID NO: 137989 - DNA, 1569 bp, synthetic construct
  misc_feature 1..1569: note = Description of Artificial Sequence: Synthetic coding sequence
  source 1..1569: mol_type = other DNA
atgagcttgttaaattgcgagaatagctgcgggagcagccaatctgagagtgattgctgcgtggctatggcctcaagctgttccgctgttacaaaagacgacagtgtcggcgggaccgctagcacagggaatctcagctccagtttcatggaggaaatccagggatatgatgtggagtttgaccccccacttgagtctaaatacgaatgtcccatttgtctcatggctctgcgggaagcagtgcagactccatgcggacacaggttctgtaaagcttgtattatcaaatcaataagggatgcgggtcataagtgtccagtggataatgagatcctgctagaaaatcaattattcccagacaactttgctaagagggagattctgtccctcatggtgaagtgcccaaacgagggctgtctccataaaatggagctccggcatctggaagaccatcaggcgcactgtgaattcgctctcatggactgcccacaatgtcagagaccattccagaagttccacatcaatatacacatcctgaaggattgcccacgcagacaggtgtcctgtgataactgtgccgcctcaatggctttcgaagacaaggagatccacgatcaaaactgtcctctggccaatgtgatctgcgagtattgtaacactattttaatccgagagcagatgccaaatcactatgacttggactgtccaacagccccgatcccatgtactttttcgacattcggttgccacgagaagatgcaacggaatcacctcgcccggcatctgcaggagaacacacagagccatatgcgcatgctggcgcaggccgtgcacagcctttccgtcatcccagattccggctacatctccgaggttaggaactttcaggagaccatccaccagctggagggtcgtctagtccgacaggatcaccaaatacgggagcttaccgccaaaatggaaacccaaagcatgtatgtctcagagttaaaacgaacaatacgtactttagaggataaggtggccgagatagaggcacaacagtgtaatggcatatacatttggaagattggcaactttgggatgcacctcaagtgtcaggaagaagaaaaacccgtggtcattcatagcccaggtttctacactgggaagccaggatataagctctgtatgcgactgcacctgcagcttcctacagcccagcggtgcgccaattacatctctctgtttgtacataccatgcagggagagtatgatagccatctaccctggccctttcagggaacgattagacttaccatcctggaccagagcgaggctcccgtgagacaaaatcatgaggagattatggacgctaaaccagagcttctggcatttcagcgaccaacaatcccaaggaatccgaaagggttcgggtacgtgacttttatgcacctcgaggccctgcgacagcggacattcatcaaggatgataccctgttagtgagatgtgaagtgagtactcggttcgatatggggtcacttcgaagagaggggttccagccacggtctaccgatgcgggtgtgtag

SEQ ID NO: 137990 - DNA, 2013 bp, synthetic construct
  misc_feature 1..2013: note = Description of Artificial Sequence: Synthetic coding sequence
  source 1..2013: mol_type = other DNA
atgtccagcggtaaatccgccaggtacaataggttctctggagggccttcaaacctgccaaccccggatgtgacaactggtacaagaatggagacaaccttcggccccgccttttcagcagtcacaacgattacaaaggctgacggcactagcacatacaagcagcattgtcgcaccccctcctcatccagcacgctggcttattccccacgagatgaggaagactctatgcctccaattagcacaccacggcgctccgactctgccatctcggttcgatctttgcacagcgagtcttcaatgtcactcagaagtaccttttcactgcccgaagaggaggaggaaccagagcccctggtgttcgcagaacagccgagcgtgaagttatgctgccagctttgttgtagtgtatttaaggaccctgtcattactacatgtgggcacacattctgccgacgttgcgcactcaagtcagaaaagtgtcctgtagacaatgtgaagcttactgttgtggtcaacaacatagcagtagctgagcaaattggggagctctttattcactgtaggcacgggtgtcgcgtggccggttctggcaaacccccgattttcgaagtcgaccccagagggtgtcctttcacaataaaattgagtgcgagaaaggaccacgagggttcttgtgactacaggcccgtgagatgcccgaacaacccgtcttgccccccattactgcgtatgaacctggaagcccatctaaaggaatgcgaacatattaagtgcccgcacagcaagtacggatgcacatttattgggaaccaggacacttacgagacccacctggagacgtgccgctttgagggcctgaaagagtttctgcagcagaccgatgatcgctttcatgagatgcacgtcgcactggcccagaaggatcaggagatcgcattcttacgctcaatgctcggcaagctctccgagaagatcgaccagctcgaaaagagccttgaactgaagtttgacgtgctagatgagaatcagagcaaactgagtgaggaccttatggagtttcggagagacgcgagcatgctaaatgacgagctgagtcacatcaacgccaggttaaacatggggatcttaggctcatacgacccacaacagatatttaagtgcaaggggacctttgttggccatcagggacccgtctggtgcctgtgtgtttattcaatgggcgatttgctcttcagcgggtcatccgacaagaccattaaagtgtgggacacctgcacaacctataaatgtcagaagacgctcgaaggccatgacggcatagtacttgcgctctgcatccagggctgtaagctttatagcggctcggcagactgcacaataatagtctgggacattcagaatcttcagaaagtgaacaccattcgcgctcacgataaccctgtctgtacccttgtttcatcccacaatgttctgtttagcgggtccttaaaggcaatcaaggtctgggacatcgttggcacggaattaaaactcaaaaaagagctcactgggctcaatcactgggtccgggccctggtggctgcacagagttatttatactccgggtcctaccaaacaatcaaaatctgggacattcggactcttgattgcatccacgtgttgcagacgtccggagggagcgtctattccatagcggtgaccaaccatcacatcgtctgcggcacttacgagaacctcattcacgtgtgggatatcgagtccaaggaacaggtgcggaccctcacaggccacgtggggacggtgtatgccttagccgttattagcacccctgaccagaccaaagtgttttctgcctcttatgatcgcagcctgcgggtgtggagcatggataatatgatctgcacccaaactctgctcagacaccaaggttctgtcacggcattggcagtgagcagggggcgcctcttttcaggagctgtggactccacagtcaaagtgtggacatgttag

SEQ ID NO: 137991 - DNA, 2115 bp, synthetic construct
  misc_feature 1..2115: note = Description of Artificial Sequence: Synthetic coding sequence
  source 1..2115: mol_type = other DNA
atggctagggaactccgggccctcctgttgtgggggcgccgattgcggcctttgcttcgtgccccggcactggccgcagttcccggtggcaagcccatcctctgcccacgtagaacaaccgctcagctcggtccccgccgcaatccagcttggagcctccaggccggacgcttattctcaacgcagactgcagaagataaggaggagccgcttcatagtatcatttctagcacagaaagcgtgcagggtagcacctcaaaacacgagtttcaagctgaaactaagaagctactggacatagtcgcccgcagcctgtactccgaaaaggaggtcttcatccgggaactgattagcaatgcctcggacgctttggagaagttgcgccataaactggtcagtgacgggcaggctctgcccgaaatggaaatccacttgcagacgaacgctgaaaaagggaccatcacaatccaggatacaggaattggcatgacccaagaggaattagtgagcaacctgggaactatcgcccgtagcggttctaaggccttcctcgacgctctgcaaaatcaggccgaggcatctagcaaaattatcggccagttcggcgttggtttttactctgcattcatggtggccgaccgggttgaggtgtactccaggagcgctgcgccaggctcgctggggtatcaatggctgtcagacggatccggggtttttgagatcgctgaagcatcaggggtgaggacaggaaccaagataattatccatttgaaatcagactgcaaggaattcagttctgaagctagagtgagagacgtcgtcacaaaatatagcaatttcgtgagcttccctctttatctgaacgggcgcagaatgaatactttgcaagctatctggatgatggaccctaaggatgttcgcgagtggcagcacgaggagttttatcggtatgtcgcccaagctcacgataagcccagatacaccctgcactataaaactgatgcaccactgaacattagaagtattttttacgtgcctgacatgaaaccatcaatgttcgatgtctcaagggagctcggctcatctgtcgcactgtacagtagaaaggttctcattcaaacaaaagctacagacattcttcctaaatggctcaggttcattagaggagtggtcgactctgaagacatccctcttaacctgtcccgggaactgctgcaggaatctgccttgatcagaaagcttagggatgtacttcaacagcggttgatcaagtttttcattgaccagagtaaaaaagacgcggagaagtatgctaagttttttgaagactacggcctgttcatgagggagggaatagtcactgccaccgaacaagaggtgaaggaggatatcgccaaattgttaagatacgagagctctgccctccccagcggacagctgactagtctctcagagtacgcctccaggatgcgggcgggtacacggaatatctactacttgtgtgctcctaacaggcatctggcagaacactcgccatattacgaagcgatgaagaaaaaagacaccgaggtgctgttctgctttgagcagttcgatgagctgactttattgcatctgagagagtttgataaaaaaaaattgattagcgtagagaccgacatcgttgttgatcactacaaggaggaaaagttcgaggaccgttcccccgcagctgagtgcctgagcgaaaaagagacggaggaacttatggcgtggatgagaaatgtacttggcagtcgcgttaccaatgtcaaagtcaccctgcgcctggatacgcaccccgccatggttactgtgctggagatgggagcggcacgccacttcctacgcatgcagcagctcgcaaagacacaggaggagagagcccagttgctgcaacccactctggaaatcaaccctcgccacgcactgattaagaaactcaaccaacttagggcttctgaaccaggacttgcgcagttacttgttgatcagatttacgagaacgcgatgatcgcggcaggcctggtggatgaccctcgagcgatggtgggccgtctgaacgaactcctcgtgaaggcactggaaagacactag

SEQ ID NO: 137992 - DNA, 1956 bp, synthetic construct
  misc_feature 1..1956: note = Description of Artificial Sequence: Synthetic coding sequence
  source 1..1956: mol_type = other DNA
atggccagggagctccgcgccctacttctgtggggacgacgcctgcgccctttgctgagagcgccagcccttgccgcagtgccaggcggctctacaagtaagcacgagtttcaggcggaaacaaagaagctgctcgacatcgttgcgcggtccttgtactcagaaaaggaagtgttcataagagagctcatctctaacgcaagcgacgccctggaaaaactgcgacataagttggtgagcgacggtcaggccttaccagaaatggaaattcacttacagacaaatgcagagaaaggcactatcaccatccaggatactggtatcggcatgacccaggaggagctggtaagtaacctgggaaccattgcacggtctggctctaaggctttcttggacgctttacagaatcaggctgaggcaagttcaaagattattggccaatttggagtagggttttacagcgctttcatggtcgccgaccgagtcgaggtttacagccggtctgcggcccccgggtctctgggataccagtggcttagtgacggatctggtgtttttgaaatagcagaggcatctggggtgagaaccggaaccaagatcattatacaccttaaaagtgactgtaaggaattcagcagcgaggctagagtgcgcgacgttgtgaccaagtactccaattttgtctcctttccgctgtatctgaatggtcgccgcatgaacacactgcaggcaatctggatgatggacccaaaggacgtgcgggagtggcaacacgaggaattttaccggtatgttgcacaggcccacgacaaacctcggtacacactacactacaaaacagatgctccactgaatatccggagtatcttctacgtccccgacatgaaaccctcaatgttcgacgttagccgggaacttggatcaagcgtcgccctgtattctaggaaagtgcttatacagaccaaggctacagacatcctgcccaaatggctcaggtttatccggggcgttgtggatagcgaggacataccactcaacctctctagggaactgctccaggagtccgccttgattagaaaacttagggacgtgctgcaacagaggctcattaaattctttatcgatcagtcgaagaaggacgccgagaagtatgccaaattcttcgaggactatggactgttcatgagggagggcatcgttactgctacagagcaggaggtcaaagaggacatcgccaagctcttgagatacgagtcctctgctctgccgtccggccagctcacaagtttatcagagtacgcatctcgcatgagggcaggcaccaggaacatctattatctttgtgcccctaacaggcatctcgcagagcactccccttactacgaagcaatgaagaaaaaagacacggaggttctgttctgcttcgaacagtttgacgagttaactctgttgcatttgagagagtttgacaaaaaaaaactaatatctgtggaaacagatatagtcgtggaccactacaaagaagagaaattcgaggatcggtcaccagcagcagaatgtttgagcgaaaaggagacagaggaactgatggcctggatgcgcaacgttctggggagccgcgtcaccaatgtaaaggtcaccctgagactggacacacatcctgctatggtcaccgtgctcgagatgggggccgcccgacacttccttcgaatgcagcagctggcaaagacccaggaagaacgcgcgcagttattacaaccaactctggaaattaacccacgccatgcccttatcaagaagctaaaccaactgagggcaagcgagccgggcctggctcagttactggttgaccagatatacgagaacgccatgattgccgcgggtttggttgatgatcctcgcgccatggtgggacgtctgaatgaactcctggtgaaagctctcgagcggcattag

SEQ ID NO: 137993 - DNA, 1911 bp, synthetic construct
  misc_feature 1..1911: note = Description of Artificial Sequence: Synthetic coding sequence
  source 1..1911: mol_type = other DNA
atggagggacgaggcccctaccgaatctacgacccaggaggaagtgttccctctggagaggcgtcagccgcattcgagcgattggtgaaagaaaacagtaggctgaaagagaagatgcagggaatcaaaatgcttggggagttgctggaggagtctcagatggaggccacacggctcagacagaaggccgaagagctggtcaaagataacgaattgctcccgcccccctctccatccctggggagctttgatcccctcgccgagcttactgggaaggactctaatgtgactgcctcacccaccgcccccgcttgccccagtgataagcccgccccagtccagaagccaccctcctccggcactagctccgagtttgaggtggtgactcctgaggaacagaactccccagaatcctcttcccacgcaaacgctatggcactcggaccactgcctagagaagacggcaaccttatgctgcacctccagagactggaaaccaccttgagcgtgtgcgccgaagagccagaccacggccagctgttcacccacctgggtcgtatggcactggaatttaatagattggcttctaaagtacacaaaaatgaacaaaggacttccatactgcagacactctgtgagcaactgaggaaggagaatgaagctttaaaggccaagctggataaggggttagaacagagggatcaggccgcggagcggctccgagaagagaacctggagttaaaaaagctattaatgtctaatgggaataaggagggtgccagtggccgccctggatccccaaagatggaaggaacaggtaagaaggccgttgcaggacaacagcaagccagcgtgacagcaggcaaagtgcccgaagtcgtggcacttggtgccgcggagaaaaaagtcaaaatgttagagcagcagcgttcagaactccttgaggttaacaaacaatgggatcagcacttccgcagcatgaagcagcagtatgaacagaagatcaccgagctccggcagaaactggcagatcttcagaagcaggtgacagacttagaggccgaacgagagcagaagcagagagatttcgatcggaagttattgctggcgaagtctaaaatcgagatggaagagactgataaagagcagctgactgcagaagccaaggaactgcgtcagaaggttaaatatctgcaagatcagctgtcccctttgaccaggcagcgagagtaccaagaaaaggagattcaaaggctgaataaagctttggaggaagcactgtccatccagacaccgccttcatcaccccccactgcatttgggtctcctgaaggggccggcgctttgcttcgcaagcaagaacttgtgacccaaaacgagctcttaaagcaacaggttaagatcttcgaagaggatttccaaagggaacgcagcgatcgggagaggatgaacgaagaaaaggaagaactaaagaagcaggtcgaaaagctgcaagcccaggtcacattatctaacgcacagctgaaagcttttaaggacgaagagaaggcaagagaagccctccgccaacagaaacgcaaagcaaaagcgtccggcgagcgctaccatgtcgaaccccacccagaacatctctgcggcgcctatccttatgcctacccacccatgcccgcgatggtgccccaccacgggtttgaggactggtcccaaatacggtacccccccccgcccatggccatggaacatcctcctcctcttcccaatagtcgtctgttccacctcccggagtacacatggagactgccgtgcggcggagtgagaaatccaaatcagagcagtcaagtcatggatccacctaccgctagaccaacagagcccgaatctcccaagaacgatagggagggacctcaatag

SEQ ID NO: 137994 - DNA, 1911 bp, synthetic construct
  misc_feature 1..1911: note = Description of Artificial Sequence: Synthetic coding sequence
  source 1..1911: mol_type = other DNA
atggaggggcggggtccgtatcggatttatgatccaggaggttcagtgccttctggggaagcaagtgccgcattcgagagactggtgaaggagaacagccgattgaaggagaaaatgcagggcattaagatgctgggggaactcctggaggaatcccagatggaagccaccagactgagacaaaaggccgaggaattagtgaaagataatgaacttctgcccccaccctcgccaagtttgggcagtttcgaccctctggcggagctgaccggaaaggattccaatgtgactgcaagccccaccgccccagcatgcccatcagataagcccgcccccgttcagaagccccccagctctggtacaagctctgaatttgaagtggtgaccccggaggagcagaattctccagagtcctcctctcacgccaatgctatggcactgggacccctgccgcgcgaggacggcaatctgatgctgcacctacaacgtctggagaccacgctctccgtctgtgcggaggagccagaccatggtcaactgtttacccacttagggcgcatggcccttgagtttaatcgcctcgctagcaaggtgcacaagaacgagcagcgtacaagcatcttacagacactttgcgaacagcttaggaaggagaatgaggcgctgaaagccaaactggacaaaggtctagaacagagagaccaagcagccgagagactgagggaggaaaatctggaactgaaaaaactcttaatgagtaacggcaacaaagagggagctagtggcaggccgggcagccctaaaatggagggaaccggaaaaaaggccgtcgctggacaacagcaagcatccgtgaccgcagggaaagtacccgaggtagtggctctgggagctgcagaaaagaaggtcaagatgcttgaacagcagcggagcgaactactggaagttaacaagcagtgggaccagcactttcgatccatgaaacaacagtacgagcagaagataactgaactcaggcagaaactggctgacctccagaaacaggttacagatctggaggcagagcgagagcagaaacaacgggatttcgaccggaaattactgctggccaagagcaaaattgagatggaggagaccgacaaggagcaacttacggcagaggccaaggaactgcgtcagaaagtcaagtatctccaggatcagctgtcacctctcactagacagcgagaatatcaggaaaaggaaattcagcgcttgaataaggcactagaggaagccctatcaatccagacccctccatcctctcctcccactgccttcggaagcccagagggtgccggagcactgttgcgtaagcaggagctcgtcacgcagaatgagcttctgaagcagcaggtgaagattttcgaagaggatttccagagagaaaggagcgatagagagaggatgaatgaggagaaagaagagctaaagaagcaagttgaaaagttacaggcccaagtgaccctttctaacgcccagctgaaagcttttaaagatgaggagaaggcccgggaagcgttgcggcagcagaaacgcaaagcgaaggctagcggcgaaaggtaccatgtggagcctcaccctgagcatttgtgtggcgcatatccatacgcatatcctccaatgccagcgatggtacctcatcacggcttcgaagactggtcccaaatccggtacccacctccgcccatggccatggagcacccgccccctctgcccaacagccggctgtttcacttgccggaatacacatggcggctaccctgcggaggcgtgcggaacccaaaccaaagctcccaagttatggacccccccaccgcgagacctacggagcccgagagccccaagaacgatagggagggaccccagtag

SEQ ID NO: 137995 - DNA, 1590 bp, synthetic construct
  misc_feature 1..1590: note = Description of Artificial Sequence: Synthetic coding sequence
  source 1..1590: mol_type = other DNA
atgctgggtgagcttctggaggagagtcagatggaagcaacccgcttgagacaaaaagctgaagaattggtgaaagacaatgagctgttacccccgccaagtccttcactcggcagctttgacccgcttgccgagttgaccggcaaggatagtaacgtcacagcatcacctacagctccagcctgcccctcagacaaacctgccccagtgcagaagcccccctctagcggtactagctccgaattcgaggtcgtcactcccgaagagcagaactcacctgagtcgtcaagtcacgctaacgccatggccctggggcccttgcccagagaggacggaaatctcatgttacatctacagcggctggagacaacgctgtctgtgtgtgctgaagagcccgatcatggccaactgtttacccacctcgggaggatggcacttgaattcaaccggctcgcttcaaaagttcacaaaaatgagcagcgcacttctatactgcagacattatgtgagcaactgcggaaggaaaatgaggcactcaaagctaaactggataaggggctcgaacagagggatcaagctgcggagaggcttagggaggagaaccttgagttaaagaagttgctcatgagtaacggtaataaggagggggcttccgggaggccagggtcgcccaagatggaggggactggcaaaaaagcagtagccggtcagcagcaggcatcagtgaccgcgggaaaggtccccgaagtggtggctcttggggccgctgagaagaaggtgaagatgttggagcaacagaggagcgagctgctggaagttaacaagcaatgggaccagcacttccgcagcatgaagcaacagtatgaacagaagatcaccgagctcagacagaagctggccgacctacaaaaacaagtgactgatctggaggcggaaagggagcagaaacagcgtgatttcgatcgcaagctccttctagccaaaagtaagattgagatggaggagacagacaaagaacagctcacagcagaagcgaaagagctgcgacagaaggtgaaatacctccaggaccagttgtctccgctgacacgtcaaagagaatatcaggagaaggaaatacaacgcctcaataaagcgttagaggaagcactctccatacagacacccccaagctcccctcccaccgcctttggatctcccgaaggtgcaggggccctcctgaggaaacaagaactggtaacacagaatgaacttctcaagcaacaagtgaagattttcgaagaagactttcaaagggagagatctgaccgggaacgtatgaacgaagagaaagaagagctgaagaaacaagttgagaaactccaggctcaggtaacactgagcaatgcccagcttaaggctttcaaagatgaagagaaggcccgggaagcacttagacagcagaaaaggaaagcaaagcccgaatatacttggcgcctgccttgcgggggcgttcgcaacccaaaccagtcctcccaggtgatggaccctccgaccgcgaggcctaccgaaccggaatctcccaagaatgatcgggaaggaccacagtag

SEQ ID NO: 137996 - DNA, 1908 bp, synthetic construct
  misc_feature 1..1908: note = Description of Artificial Sequence: Synthetic coding sequence
  source 1..1908: mol_type = other DNA
atggaggggcggggaccatacaggatctatgacccaggtggttcagtaccatcgggtgaggctagcgcagcatttgagcgccttgttaaggaaaacagcagattgaaagaaaaaatgcaggggatcaagatgctcggggagttgttagaagagtcacagatggaggccaccaggctcagacaaaaggcagaggagttggtgaaggataacgaattgctgccgcccccaagcccctccctcggcagcttcgatccgctggcagagctgaccggcaaagactctaacgttacagcatctcccactgccccagcctgccccagcgataagcctgcccctgtccagaagcctcccagcagcggtacatcttccgagttcgaggtggtaacccctgaggagcagaactcgccagagagtagcagccacgcgaatgctatggctttaggtcctctgccaagagaggatggcaacctcatgctgcacttgcagaggctggaaactacattgagtgtgtgcgcggaggagcccgatcacggtcagctgtttactcatctcggtaggatggccttggaatttaaccgcctggcgtccaaggtgcacaagaacgagcagaggacctccatactgcaaactctgtgtgaacagctccggaaggagaatgaagccttgaaggccaaacttgacaagggcctggagcagcgtgatcaagctgccgagcgcttacgcgaagagaatctggagttgaaaaagctgttaatgagtaacggtaacaaggaaggtgcctccggccgaccggggtcacccaagatggagggaaccggtaagaaagccgtggcagggcagcaacaggcatcagtgaccgcaggaaaagtccccgaagttgttgccctcggtgcggccgagaagaaagtgaaaatgctcgagcagcaaagaagcgagctcttagaagtgaacaagcagtgggaccagcattttagaagtatgaagcagcagtatgagcagaaaattacagagctcaggcaaaaacttgctgacctgcaaaaacaagtgacagacttggaagccgagcgggagcaaaagcagcgcgatttcgacagaaaattacttctggccaaatctaaaattgaaatggaagagacagataaggaacagttaaccgcggaagcaaaagagctgcggcaaaaggtgaaatatttgcaggaccagttatcacctttgactcgccaacgtgagtaccaggagaaggagatccagcggctcaacaaggctctggaggaggccctgtctattcagacccctccgtcctccccccccacagcttttggcagccctgaaggagcgggagctttgctgcggaaacaggagttggtcacccagaatgagctgctaaagcagcaggtcaagatttttgaagaggacttccagcgcgagagaagcgatcgggagcgaatgaacgaggaaaaagaagaactgaagaagcaagtcgagaagttacaagctcaggtaactctgtctaatgcgcaattaaaagccttcaaggatgaggagaaggcccgcgaggcattgcgacagcagaaacggaaagccaaggcgtccggcgaacgctaccacgtggagccacaccccgagcacttgtgtggcgcctatccctacgcctatccccctatgcctgccatggtgccccatcacggatttgaggattggtcacaaattcggtatcccccacctcctatggctatggaacacccacctccgctgccaaacagcaggctgtttcacctccccgaatatacgtggcggttaccttgcggtggcgttcggaatccaaatcagtcttctcaagtgatggacccacctactgcaagaccaaccgagcccgagcctgcagacctgcgcctccccaggaattag

SEQ ID NO: 137997 - DNA, 1479 bp, synthetic construct
  misc_feature 1..1479: note = Description of Artificial Sequence: Synthetic coding sequence
  source 1..1479: mol_type = other DNA
atggaagccacacgtttgcgccaaaaagccgaagagctagtgaaggacaacgaattgctcccccccccttccccgagcctgggatcctttgatcccctggctgaacttacaggcaaagactccaacgtgaccgcctcccctactgcaccagcttgccccagcgataagcctgctccagtgcagaaacccccaagcagtggtacgagcagcgaatttgaagtcgtcacgcctgaagaacagaactcccctgaatctagcagtcacgctaacgcaatggccttggggcctctgcctcgagaagacggtaacctgatgctgcatctgcaacgattagaaaccactctgtccgtgtgcgcggaggaacctgaccacggccagctgttcacccaccttggccggatggccttagagtttaataggttggctagcaaggtgcacaagaacgaacaacggacctcaattcttcagacattgtgtgaacagctcagaaaagagaacgaggcactcaaggctaagctggacaagggccttgagcaaagagatcaggcagcagagaggctacgcgaggaaaatctggagctgaagaaactcctcatgtcaaacggcaataaggagggggcttccggacgccctggaagtcccaaaatggagggtacagggaagaaagcggtggcaggacaacaacaggcctcagtcactgcagggaaggttccagaagtagtggctctgggagccgcagagaaaaaagtgaagatgcttgagcagcaaaggtctgagctcctggaggtcaacaagcagtgggatcagcactttcgctcaatgaaacagcagtacgaacagaagatcaccgagctgcggcagaagttagccgacctgcaaaagcaggtcaccgatcttgaggcagagcgggagcaaaaacaacgagacttcgatcgcaaattgctgcttgccaagagcaagattgaaatggaggaaaccgataaggagcagctcactgccgaggccaaagagcttagacagaaagtcaaatacctgcaggatcagctgtctccactgacccggcagcgggagtatcaggagaaagagattcagcgcttaaataaggcactggaagaagccctcagtatccagactccaccatcctcacctccaaccgcgtttgggagccccgagggcgctggggctctcttgcgcaagcaggaactcgttacccaaaacgagctgctgaagcagcaggttaagatctttgaagaagacttccaaagggaaagaagcgaccgtgagcgcatgaatgaggagaaagaggagctgaaaaagcaggtggaaaaactccaagcccaggtgaccttatccaatgctcagttaaaagctttcaaggatgaggagaaagctcgggaggccctgagacagcagaagcggaaggctaaaggcacccaccgtggctgtccccgacacctgcctgagcgaaaggtcaagtag

SEQ ID NO: 137998 - DNA, 435 bp, synthetic construct
  misc_feature 1..435: note = Description of Artificial Sequence: Synthetic coding sequence
  source 1..435: mol_type = other DNA
atggaaggccggggtccctatcggatttatgatcccggaggaagcgtccctagcggtgaggctagcgctgccttcgagaggctcgtaaaggagaacagtaggctcaaggagaagatgcaaggaattaaaatgctgggggagttgctggaggagtcccaaatggaagccaccaggctgagacaaaaagcagaggaattggtcaaagacaacgagttgctccccccaccatccccttccctcggctcttttgatcctctcgccgagctgacggggaaggattccaatgtcacagcatcccctactgctccagcctgtccctcggacaaacccgcccccgtccaaaagccaccttcgtcaggcacaagctctgagttcgaggtagttactcctgaggaacagaactctcctgagtctagcagtcacgccaacgcatag

SEQ ID NO: 137999 - DNA, 1752 bp, synthetic construct
  misc_feature 1..1752: note = Description of Artificial Sequence: Synthetic coding sequence
  source 1..1752: mol_type = other DNA
atggaggccaccagactgcgtcagaaggccgaagaactggttaaagataacgaacttctgccgccgccgagcccgagtctgggttcttttgacccattagctgagctgactggcaaagactcaaatgtaaccgctagcccaaccgctcccgcttgcccttccgacaaaccagcccccgtgcagaagccccccagttcaggaacgtcaagcgaattcgaggtggtcaccccagaggagcagaattctccagaatctagcagtcacgcaaatgccatggcgctgggacccctgcccagagaagatggcaatctaatgctccatctgcagaggctcgagaccacattgtctgtgtgtgctgaggaaccggaccatggccaactattcactcatctggggcgtatggcattagagtttaatagactcgcatccaaagtgcataaaaacgagcaaaggacctcaatcctgcagaccctctgtgagcagctgcgcaaggagaacgaggcactaaaggctaagctcgataaaggactggagcagcgagatcaggccgcagaaagactgcgggaagaaaatttagagctcaagaaactcctcatgagtaatgggaacaaggagggagcttctggccgacccgggtcccctaagatggaggggaccggcaaaaaggctgttgccgggcaacaacaggcttccgtcaccgctgggaaggttccggaagttgtagcgctgggggcagcggaaaagaaagtgaagatgttggagcagcagagatccgaactactggaagttaataagcagtgggatcaacactttagatcaatgaagcagcaatatgagcagaagattaccgagctgcgccagaaattagccgatcttcagaagcaggttactgatctcgaagctgagcgggaacagaagcagagagattttgaccgaaaacttctcctggccaagtctaaaattgaaatggaagagaccgataaggagcagttaacagcagaggccaaggagctcaggcagaaagtgaaatacctccaagaccagctgtcccccctgacgagacagagggagtaccaggagaaagaaattcagcgcctgaataaagccttagaggaagctctgagcattcagaccccaccatcatcaccgcctacagcctttggcagccctgaaggagctggcgcactcctgcgcaagcaggagcttgtgactcagaatgaactgctgaagcagcaggtgaagatattcgaagaagacttccagcgggagaggagtgaccgggagagaatgaacgaggaaaaagaggagcttaaaaagcaggtggagaagctgcaggcccaggtgacactgtccaacgcgcaactgaaagctttcaaagatgaggagaaagcacgggaagccctgaggcagcagaagaggaaggctaaggcatccggtgagaggtatcacgtcgaacctcaccctgaacacttgtgcggtgcatatccttacgcttacccccctatgcccgctatggtgccgcaccacgggttcgaggattggtctcagattaggtaccctcccccccctatggctatggaacatccgccaccacttccgaattctagactcttccacctccctgagtacacttggcgcctcccgtgtggaggagtgagaaacccaaaccagtctagccaggtgatggatcctccaaccgcccggcccacagagccagaatcacccaagaatgatcgagagggtcctcagtag

SEQ ID NO: 138000 - DNA, 402 bp, synthetic construct
  misc_feature 1..402: note = Description of Artificial Sequence: Synthetic coding sequence
  source 1..402: mol_type = other DNA
atggagggccggggcccttataggatttatgaccctgggggctcagtgccaagtggggaggcaagtgccgcctttgaacgactggtgaaagaaaattccagactgaaggagaagatgcaaggcatcaaaatgctgggagaattattggaggagtctcagatggaggctacaaggttgcggcagaaagcagaagaacttgtgaaagacaacgaactgctgccacccccctctccatccctgggctcatttgatcctctggccgagttaaccggaaaggattcaaatgtgacagcaagcccaaccgcccccgcgtgcccttctgataaaccagctccagtgcagaagccccctagctccggtacctcaagcgagttcgaagttgtcacccccgaggaacaatag

SEQ ID NO: 138001 - DNA, 1911 bp, synthetic construct
  misc_feature 1..1911: note = Description of Artificial Sequence: Synthetic coding sequence
  source 1..1911: mol_type = other DNA
atggaaggccgcggtccatatcgcatctatgatccaggaggctctgtgccctcgggcgaggccagcgctgcctttgagcgtttggtgaaggaaaatagtcgcctgaaggaaaaaatgcagggaataaaaatgttgggcgagctgctggaagagtctcagatggaggcgacaaggctccggcaaaaagcagaggagctggttaaggacaacgaattgctgcctccgccctcaccttccctgggcagttttgaccctttggccgagttgacaggcaaagactcaaatgtcacagcatcacctacggcacctgcctgtcccagcgataagccagccccagtgcagaagcctcctagtagcgggacttcttcagagttcgaggtagtcacccccgaggagcagaactcccccgagagctcatcacacgccaacgccatggcactggggcctctgcctcgcgaagatggcaatctgatgcttcaccttcaacgtttggagactacactgtccgtttgtgcagaggaacccgatcatggacagctgtttactcaccttggacggatggcccttgagttcaatagactggcctccaaggtacataagaacgagcagcgaacctccattctgcagactctctgcgagcagctgaggaaggaaaacgaagccttgaaggctaaactggataaaggtctggagcaacgggaccaggccgcggaacggctaagagaagagaaccttgagctcaaaaaactgctcatgagtaacggaaacaaagagggagcctccggacgaccagggtcccccaagatggagggcaccggtaaaaaggccgttgcgggccagcagcaggcatcagtaacagcaggtaaggtgcctgaagtagttgcactgggagccgcagaaaagaaggtcaaaatgctcgaacagcagagatcagagctgcttgaggtcaacaagcagtgggaccagcactttcggtcgatgaaacagcagtacgagcagaagatcacagaactgagacagaaattggcagatctacagaagcaggtgaccgatttggaagctgaacgagaacagaagcagcgggacttcgaccggaagctgttgctcgccaaaagtaaaattgagatggaagaaactgataaagagcaactgaccgcagaagcaaaagaactgcgccagaaggtgaaatacttgcaagatcagttgtccccgttgacccgccagcgagagtaccaagagaaagagatccagaggctgaataaagcactggaagaggctctgtcaattcagactccacctagcagtccccctacagcattcgggagccccgaaggcgccggggctttactccgcaaacaagaactggtgacacagaatgagcttctgaaacagcaggttaaaatctttgaggaggacttccagagagaaaggagcgatcgggaacggatgaacgaagaaaaggaggagttgaagaagcaggttgagaagttacaggctcaggttaccctttcaaacgctcagctgaaagcatttaaagacgaggagaaggcgcgggaagcactgcgacaacagaagagaaaggctaaggctagcggcgaaaggtatcacgtggagccacaccctgagcatttatgcggagcctacccctacgcctacccccctatgccggccatggtccctcaccatggcttcgaagattggtcgcaaattaggtatccacctccaccaatggccatggagcaccctcctcccctgcctaacagtcgtctgtttcacctacctgaatatacatggagactgccctgtggtggggtaagaaacccaaatcagagttcccaggtcatggatcctccaacagcccggccaacagaacccgagtcacccaagaacgatcgggaggggccgcaatag

SEQ ID NO: 138002 - DNA, 774 bp, synthetic construct
  misc_feature 1..774: note = Description of Artificial Sequence: Synthetic coding sequence
  source 1..774: mol_type = other DNA
atggaagccacaaggctgcgccaaaaggcggaggagcttgtcaaggataatgaactgttaccccccccctccccctcgctgggcagcttcgacccacttgcggagctaacaggtaaagactcaaatgtgaccgcatcacctacagcgcctgcatgtccgagcgacaaaccagcacctgtgcaaaaacctccgtcatcaggcacatcatctgagtttgaggtggtgacccctgaggaacaaaactcacccgaatcaagttcgcatgcaaatgctatggcgctcggcccactaccgcgagaggatggcaacctgatgttacatctccagcggcttgagactacactgtccgtctgcgctgaagaaccggatcacggtcagttgtttacacacctaggaagaatggcgctggagttcaataggctggcctccaaggtccataagaacgaacagcgaacatccattctgcagacactctgtgaacaactccggaaggagaatgaggcattgaaggctaagctggataaaggattagagcagcgggaccaagcagctgagcggcttcgcgaggaaaacctggaattaaagaagttgctgatgagcaatggcaacaaggagggcgcctccggccggccaggttcacccaaaatggagggcactggtaagaaggctgtggcaggtcagcaacaggcctcggtcacagcgggtaaagtccccgaggtggtggcattaggcgccgcagagaagaaggtgaagatgctcgaacagcagcggtag

SEQ ID NO: 138003 - DNA, 1911 bp, synthetic construct
  misc_feature 1..1911: note = Description of Artificial Sequence: Synthetic coding sequence
  source 1..1911: mol_type = other DNA
atggaaggccgcggaccgtaccggatatatgatcccggaggtagcgttccaagcggagaagctagtgccgcatttgagaggcttgttaaggaaaactccaggttgaaagagaagatgcagggcattaagatgttaggagagcttctcgaggagtcgcagatggaggctactagacttcgccagaaggccgaagagttggtgaaagacaatgagctgctcccgcctccatccccatcactggggtcctttgaccctctggctgagctgactgggaaggatagcaatgttaccgctagtccaactgccccggcctgcccatcagataaaccggcccccgtgcagaagcctcccagctcaggcacctcttcggagttcgaggtcgtgaccccagaggagcaaaacagtccagagtctagttcccacgccaacgctatggccctcgggcccctgccccgggaggatggaaatctcatgcttcacctccaacgcttggaaacaaccctcagtgtgtgtgctgaagagccagaccacggacagctgtttacgcacctcggccgcatggctttagaatttaataggctggccagcaaagtgcacaaaaatgaacaacggacatccatcctgcaaacgctctgtgaacaactccgtaaagagaatgaggccctgaaggctaagctagacaaaggacttgagcaacgggaccaggctgcagagagactcagagaagagaacctggagctcaagaaactgctgatgtcaaacggcaacaaagagggcgcctctgggcggccgggctcccctaagatggagggaacaggaaaaaaagccgtggccgggcaacagcaggcatctgttacagctggcaaggttcccgaagttgtggcactgggagcggccgagaaaaaggtgaaaatgctggaacagcagcgaagcgagttgttagaagtcaacaagcaatgggaccagcacttcagaagcatgaaacaacagtatgagcagaagatcacagagctccgccagaagcttgcggatctgcagaaacaggtgaccgatctcgaagccgaacgagagcagaaacagcgtgattttgatcgcaaactgctcctggccaagtccaagatcgagatggaggagactgacaaagagcagctaacagctgaggccaaagagttacggcaaaaagtcaagtacttgcaagatcagttatctccactcacaaggcagagagaataccaggaaaaagaaatccagaggctgaataaagcgttggaggaggccctgtccattcagacacccccctcttcgccgccaactgcgttcggaagtcctgagggagcaggagcgctgctgaggaagcaagagctcgtaacccagaacgagctcctgaaacagcaggtgaagatattcgaggaagactttcagcgtgagaggtcggatagagaacgtatgaacgaggagaaggaagagctgaaaaagcaagtggaaaagctgcaggcccaagtgaccttgagtaacgcacaactcaaagcatttaaggatgaggagaaggctcgcgaggccctgaggcagcaaaagagaaaagccaaagctagtggggaacggtatcacgtggaacctcatccagaacacctctgtggagcatatccatacgcctatcctccaatgcctgcgatggtgcctcaccacggattcgaagactggtcccagatccgctatcccccccctcctatggctatggagcaccccccgccactgcctaatagccggctttttcaccttccagagtacacctggaggttaccatgtggcggagtcagaaatcccaaccagtcctcacaggtgatggacccccccacagcccgccccacggaaccagagagccctaagaacgaccgcgagggaccacagtag

SEQ ID NO: 138004 - DNA, 1719 bp, synthetic construct
  misc_feature 1..1719: note = Description of Artificial Sequence: Synthetic coding sequence
  source 1..1719: mol_type = other DNA
atggagggccgcggaccgtaccgcatttacgatccagggggatcagtcccatcaggtgaggcgtccgcagctttcgaacgactggtgaaggagaacagccgtttaaaagagaagatgcaggggatcaaaatgctgggcgagttactggaagaatcccagatggaggctactcgtctacgccagaaggccgaagaactcgtgaaagacaacgagttgttgccgcctccgtctccatcccttggctcttttgatcccctggcagaattgaccgggaaggacagcaacgtgaccgcatctcctactgccccagcgtgccctagtgacaagcccgctccggtgcagaaaccgccatcttctggaactagttctgaattcgaggtggtaactcctgaagaacaaaactcaccagagtcatctagccacgcaaatgcgatggcccttgggccactacctagggaggatgggaacctcatgctgcatttgcagcgcttggagactactctctccgtgtgtgccgaagagccagaccatggacaactattcacccatcttggccggatggccctggagtttaatcgcctggcttccaaagtgcacaagaatgaacagcgaacaagcatccttcagacattgtgcgagcagcttagaaaggagaatgaggcccttaaagccaagcttgataaagggttggagcagcgggaccaagcggcagagcggctgagggaggagaaccttgaactgaagaagttgctgatgtccaacgggaataaagaaggcgcatctggacgtccgggatccccaaagatggagggaacaggcaaaaaggcagttgccgggcagcagcaagcatccgttaccgccgggaaggttcctgaggtcgtcgccttaggggccgcggagaagaaagtcaagatgttggagcagcagcgtagtgagttgcttgaagtcaacaaacaatgggaccagcatttcagatccatgaaacagcaatatgaacagaagatcaccgagctgcgccagaagctagcagatctccagaagcaggttaccgacctggaagccgagagggaacagaagcagagagacttcgacagaaagcttctgctggctaagagcaagatagaaatggaggaaacagataaggagcagctcacggcagaagcgaaagaactccgccagaaggtgaaatacttgcaggaccagctgtccccactgactaggcagagggaataccaggagaaggagatccagaggttgaataaagctctggaagaggccctgagtatccagacacccccctccagcccgcctaccgccttcgggagtcccgagggcgccggcgctctgctgagaaaacaagagctggtcacccagaacgaattactcaaacagcaggtgaaaatcttcgaagaagacttccaaagagaaaggtcggatagggagcggatgaacgaggaaaaggaggagctaaaaaagcaggtcgagaagctccaggcgcaggtaaccctttccaacgctcagttgaaagcatttaaagacgaagaaaaggcgcgggaagcactcagacagcagaaaagaaaagcaaagccagagtacacctggaggctcccgtgtggtggcgtaagaaatccaaaccaatcaagccaggttatggatcctccaacagctcggccgaccgagccggaaagccccaagaatgatcgggaagggccgcagtag

SEQ ID NO: 138005 - DNA, 1908 bp, synthetic construct
  misc_feature 1..1908: note = Description of Artificial Sequence: Synthetic coding sequence
  source 1..1908: mol_type = other DNA
atggagggaaggggcccctatcgcatatatgaccctgggggatccgtaccgagtggcgaagcaagcgcagcctttgagaggctggtgaaagaaaactcccgcctcaaggaaaaaatgcagggcatcaaaatgctgggagagctcctcgaagaatcacagatggaggccacccgactacgccagaaagccgaagaactggtcaaagataacgaactgcttccacctcccagcccaagcctaggtagtttcgaccctctcgctgagctgactggcaaggactctaatgtgaccgcttcacccactgctcccgcatgcccatccgataaacccgcccctgtacagaagccgccaagctctggtacctcctccgaattcgaagtggtgacccctgaggaacagaacagtccagaaagttcgagtcacgccaatgctatggccctgggcccgctgcccagagaggatggcaacctgatgctgcacctgcagcgacttgagacaactctgtctgtctgtgctgaggaacccgaccacggccagctgtttacccatctcggccggatggctctagaatttaatagactggcttccaaggttcataagaatgagcagcgcacttcaatactgcagacactctgcgagcagctccggaaggagaacgaggctctgaaggccaaacttgacaaagggctggaacagagagaccaggcagcagagcggctccgggaggagaatctggagctgaagaagctgctgatgagcaacggaaataaagagggcgcgtctgggcggcctgggagcccaaaaatggaaggtacagggaagaaggccgtggcgggtcaacagcaggctagtgttacagctggaaaagtccctgaagtcgtggcccttggggccgccgagaagaaagtgaaaatgctggagcagcagcgcagtgaactgctcgaagtcaacaagcagtgggaccagcatttccgaagcatgaaacagcaatatgagcagaaaatcactgaacttcgccagaagctcgccgaccttcagaagcaggtaaccgatctagaggcagagagagaacagaaacaacgggactttgaccgcaaattactgctggctaaaagcaaaatcgagatggaagaaacagataaggaacagctgacagcagaagccaaggaactccgacagaaggtaaagtaccttcaggaccagctaagccccctgactaggcagagagaataccaggaaaaggaaattcagagattaaataaggctcttgaagaggccctgagcatccagacaccccctagcagcccacccaccgcgttcgggagtccagaaggagctggagcattgctgagaaaacaggaattggtcacacagaacgagctcctcaagcagcaggtgaagattttcgaggaggacttccagagggagcgctcagacagagagcgaatgaatgaagagaaggaggaactgaagaagcaggttgagaaactgcaggctcaagtaaccttatccaacgcccagttaaaggcatttaaggatgaggaaaaagcccgggaagccctccgccagcaaaagcgaaaggcgaaagcctcaggcgaaaggtatcacgtggagcctcatcctgaacacctgtgtggcgcctatccatatgcatacccccccatgcctgctatggtgccccaccacggtttcgaagactggtctcagatccggtatcctccaccaccaatggcgatggaacatccacctccactgccaaattcccgcctgttccacctgcccgagtacacctggcggctcccctgcggaggtgttcgtaacccaaatcagagttctcaggtcatggatccacccaccgctaggccgactgagcctgagcccgcagatcttaggctgccacggaattag

SEQ ID NO: 138006 - DNA, 1671 bp, synthetic construct
  misc_feature 1..1671: note = Description of Artificial Sequence: Synthetic coding sequence
  source 1..1671: mol_type = other DNA
atggagggccgcgggccttaccgcatctacgacccaggagggtccgttccctctggcgaagcctcagctgccttcgagcgcctggtgaaagaaaactctcggctcaaagagaagatgcagggcattaagatgctgggggaactgttagaggagagccagatggaagcgactcgcttgaggcagaaggccgaagaactggtcaaggacaatgagctcctgcctccaccttctcctagcctcgggtcatttgaccccctggctgaactcacgggaaaggatagtaacgtgaccgcttctccgactgccccagcctgtccctcagacaaacccgcgcccgttcagaagcccccttcttcaggaacctccagcgagtttgaagtggttacccccgaggagcagaatagccccgaaagtagtagccatgcgaatgccatggccttagggcctctgccccgtgaagatgggaatttgatgctacatcttcaaagacttgaaacaacattgtctgtgtgtgcggaagagccagaccatgggcaactgttcacacatctgggcagaatggcgcttgagttcaatcgactcgcatctaaggttcacaaaaacgagcagaggacgagcattttgcagactctgtgcgagcagctgaggaaagagaacgaggccctgaaggccaagcttgataaggggctcgagcagagggaccaggccgccgaaagactccgggaagagaatcttgagctgaaaaagctgctgatgagcaatggaaacaaggaaggggctagtgggcgccccggctcacccaagatggaagggacagggaagaaagctgtcgcaggccagcagcaggccagcgttacagcaggcaaggtccctgaggtcgtggccctgggagctgccgagaagaaagttaagatgctcgaacagcagcgaagtgagttgctggaggtgaacaaacagtgggaccagcacttcagatccatgaagcagcagtatgagcagaaaattaccgagctgcggcagaagctggccgatctccaaaagcaggtaaccgacctggaggctgagagagagcagaagcagagggattttgataggaagctacttctcgcgaaatcgaaaatcgagatggaggagacggataaggagcagctcacagccgaggccaaagaactgcggcagaaagtgaagtatcttcaggaccagttgtctcccttgacacggcagagagagtaccaggaaaaagagatacagagactgaataaggcgctcgaggaggccctgtcaatccagaccccaccctcatcgcctcccacagctttcggaagtcccgagggcgctggtgccctccttagaaagcaggaactggttacccagaacgagctgctgaaacaacaggtgaaaatctttgaggaagacttccagagagaaaggtccgacagggaaaggatgaatgaagagaaggaggagttgaagaaacaggtggaaaagctgcaggctcaggtgactttgtctaatgctcagttaaaagcctttaaagatgaagagaaggccagggaggccttaagacagcagaagagaaaggccaagagcttgcagaagatgactgtgaggggtctgagcgaaaccagactgtgccaccttgcaccccccagcagctgccgggcatcttag

SEQ ID NO: 138007 - DNA, 1797 bp, synthetic construct
  misc_feature 1..1797: note = Description of Artificial Sequence: Synthetic coding sequence
  source 1..1797: mol_type = other DNA
atgcaagggattaagatgttgggcgaactgttggaggagtctcaaatggaggctaccaggctccgccagaaagccgaagagctggtgaaagacaatgaactgctgcccccaccctccccaagcctgggttcttttgatcccctggctgagttgaccgggaaggactctaatgtgaccgcgagtcctacagcgccggcctgcccgtccgacaaacctgcacccgtgcaaaagcctcccagtagcgggacaagtagcgaattcgaggtggttaccccagaagaacagaattcacctgagtcctcaagccacgccaacgcaatggctcttggtccgttgcctagggaggacggaaatcttatgctgcacctacagcggctggaaaccactcttagtgtgtgcgcggaggagcctgatcatgggcaattgtttacccatctgggcaggatggcgctagagtttaatcgcctggcgagcaaagtccataaaaacgagcagagaacttcgatactccagaccctgtgtgagcaactcagaaaagagaatgaagctttaaaagcaaagctggacaaagggctagagcagagagatcaagccgcagaacgcctaagggaggagaatttggagttgaaaaaactgctcatgagcaacggcaataaagaaggggcaagtggcagacccggatcccccaaaatggaaggcactggcaaaaaggcggttgctggtcagcagcaagcatccgtgaccgccggcaaggtcccagaggttgtggcattaggcgccgccgaaaagaaggttaagatgctcgagcagcagagaagcgagctgctcgaggtcaacaagcaatgggaccaacatttccggtccatgaaacagcagtacgagcagaagattaccgagttgagacaaaagctcgctgacctgcagaagcaggtcacggatctggaggccgagagagagcaaaaacaaagggatttcgaccggaagctgctgctggccaagagcaagatcgaaatggaggaaaccgataaggagcaactgacagctgaggcgaaagagttacggcagaaggtcaagtacctccaggatcagttgtcccccctgacacgtcaaagggaatatcaagagaaagagatacagcggctcaacaaagctctagaggaagcgttatccatccagacacctcctagctcccctccgacagcttttggatctcctgaaggagcaggagctctacttaggaaacaggaactcgtcacccaaaatgagcttctgaagcagcaggtgaaaatctttgaggaggacttccagcgtgagcgctctgacagagagaggatgaatgaagaaaaggaagagcttaagaagcaagtcgagaagctccaggctcaggttaccctgtctaatgcccaacttaaggccttcaaggacgaggagaaggcccgcgaggcgctgcggcagcaaaagagaaaggccaaagccagcggcgagaggtatcatgttgagccacacccagaacatctgtgtggcgcctatccctacgcgtatccacctatgcccgccatggtgccccaccatggattcgaggattggagccaaataaggtatccacccccaccaatggccatggagcaccctcctcctctccccaacagtcgactgttccacttacccgagtacacctggagactcccatgtgggggggtccgcaaccctaatcaatccagtcaagtcatggacccccctacggctcgtccaacagaaccggagagccctaagaacgatcgcgagggcccccaatag

SEQ ID NO: 138008 - DNA, 1542 bp, synthetic construct
  misc_feature 1..1542: note = Description of Artificial Sequence: Synthetic coding sequence
  source 1..1542: mol_type = other DNA
atgcttggtgagctgctggaggagtcccaaatggaagccacaaggttgcgccagaaagcggaggaactggttaaggataacgaactgctgcctcccccttctccttcactggggtcattcgaccccctggccgaactgactggtaaagactcaaatgtgactgcaagccctaccgcacccgcttgcccaagcgataaaccagcaccagtgcagaagccaccctcttccggcacctcatccgaattcgaggtggtgaccccagaagagcagaacagcccagagtcctcctcacatgccaatgccatggcactgggtccactgccccgtgaggacggaaacctcatgctgcacctccaaagacttgaaacgaccctttccgtctgtgccgaagagccagaccatggtcagctcttcacacatctgggccggatggcgctggagtttaatcgactcgcgagcaaagtccacaaaaacgaacagaggacaagcatccttcagacactgtgtgagcagttacgtaaggaaaatgaagctttaaaggccaaactcgataaaggtttggagcagagagaccaagctgctgagagactgcgagaagagaatcttgaacttaaaaaattgctgatgtctaacggaaacaaggagggcgcctcgggtagacctggtagtccgaaaatggaaggaaccggtaagaaagccgtggctggccagcaacaggcaagcgtgacagctggaaaggtgcccgaggtggtggccttgggcgctgccgagaagaaggtcaaaatgctagagcagcagcgctccgagctgctcgaggtgaataaacagtgggaccagcacttccgcagcatgaaacaacagtatgagcagaaaatcactgaactgcgacagaaattagctgacctgcagaaacaggtgacagatttggaagcggagagagaacagaaacaacgcgactttgatcggaagttgctcctcgctaagtctaagattgagatggaggagacggacaaggagcagctgactgctgaagccaaggaattaagacaaaaagtcaaatatctgcaggaccagctgagtcccctaaccagacagcgcgagtaccaggagaaagagatccagcgcttaaacaaagcccttgaggaggcgctatccatccagaccccaccatcatctccgccaacagcatttggctcacccgaaggcgctggtgcactcctcagaaagcaggaactggtgacacagaacgagcttctcaaacagcaggtgaaaatcttcgaggaggacttccagcgagaaaggagcgatcgggagcggatgaatgaggagaaggaggagctaaaaaagcaggtcgagaagctgcaggcgcaagtgaccttgtccaacgcccagctcaaggcattcaaggatgaggaaaaggcgagagaggcactgaggcaacaaaaacgaaaggccaaaagcctccagaagatgactgtgagagggctttccgaaaccagactatgtcacctagcaccgcctagctcttgtcgcgctagttag

SEQ ID NO: 138009 - DNA, 1509 bp, synthetic construct
  misc_feature 1..1509: note = Description of Artificial Sequence: Synthetic coding sequence
  source 1..1509: mol_type = other DNA
atgcttggggaactcctggaggaaagccaaatggaggccaccaggctacgccaaaaggcagaggagctagtgaaggataacgagctcctgcccccgccttctcccagcttaggttccttcgaccccctggctgagctgaccgggaaagacagtaacgtaactgcaagcccaaccgctccagcctgtccaagtgacaagccggcaccagtgcaaaagccaccatctagtggcactagctcagaattcgaagtggtcacacccgaggagcagaattcaccagaatctagctcacacgccaatgcaatggccttgggtccgctgccccgcgaagacggtaatttaatgctccatctgcaaaggctcgaaacgaccttgagcgtctgcgccgaagaaccagatcacggccaactgttcactcacttgggaagaatggcgctcgagtttaatcggctagctagcaaggtacacaaaaacgaacagagaacgtcaatactccagacgctgtgcgaacagctacgcaaggaaaacgaggccctgaaggccaaactggataagggtctagagcagagagatcaagctgctgaacgtctgcgcgaagaaaacctcgagttaaaaaagctgctcatgagcaatggaaacaaggaaggcgccagcgggagacccgggtctccaaagatggaaggcacaggtaagaaggccgtggcaggtcagcagcaggcctctgtcaccgccgggaaggttcctgaagtggtggctcttggcgccgcggaaaagaaagttaaaatgctcgagcagcagcggtctgaactcctggaagtgaataagcagtgggatcagcacttccgctccatgaagcagcagtatgagcaaaagataaccgagctgaggcagaagctggccgacctacagaaacaggtgacggacctggaggcggagcgggagcagaagcagagagactttgatcgcaaactgctgttggctaaaagtaagattgaaatggaagagaccgataaagagcagcttaccgcagaggccaaggagcttcggcagaaggtgaagtacctgcaggatcagttgtcaccccttacccgacagagagagtatcaggagaaagagatacagcgtctgaacaaggctctcgaggaggcgcttagcattcaaactccaccatcttcccctcctaccgcatttgggtcacccgaaggggccggcgcgctgctgaggaagcaggagcttgtgacgcaaaatgaactcttaaagcaacaggtgaaaattttcgaggaggactttcagcgggaaaggtccgaccgggagagaatgaatgaagaaaaggaggaactcaagaagcaagtcgagaaattgcaggcccaggtaaccttatccaacgcccagttaaaagccttcaaagacgaggagaaagcccgtgaggctctgagacagcagaagcggaaggctaaaggcacgcatcggggatgcccccgccatctaccggagcgtaaagtgaagtag

SEQ ID NO: 138010 - DNA, 1290 bp, synthetic construct
  misc_feature 1..1290: note = Description of Artificial Sequence: Synthetic coding sequence
  source 1..1290: mol_type = other DNA
atgagcagggaccctgggtcaggcggttgggaggaggcaccccgggccgccgcggctttatgcaccctgtatcatgaagcagggcagcgcctgagacgacttcaggaccaactggccgctagagacgcgcttattgctaggctgcgtgcgaggctagccgctctcgaaggagacgccgccccatccctcgtggacgcgctgctagagcaagtagcaaggtttagggagcagttgcggcgccaggaaggcggcgctgccgaggctcagatgcggcaagagatcgaaagactgacagagcgcttagaggagaaggaacgggagatgcagcagctgttgtcccaacctcagcatgaaagagaaaaggaggtggtgctcctccgcagatccatggctgagggggaacgagcaagagccgcaagtgacgtgctgtgtaggtctttagctaacgaaactcaccagctgagacgcacactcaccgctacagcccacatgtgtcagcacctcgccaaatgtctggacgaacgacagcatgcacaaagaaatgtcggagagcgcagcccggaccagtcagagcacactgatggacacacttccgtgcagagcgtgattgagaaactgcaggaggagaataggttgctgaaacagaaagtaacacacgtggaggacctgaatgccaaatggcaaagatataatgcaagtcgggatgaatatgtccgtgggctgcacgcgcagctgcgcgggctccagatcccgcatgagcctgaactgatgagaaaggagatcagtagactcaatagacagcttgaagagaagatcaacgactgcgccgaagtgaagcaggaactggcggcttccagaacagccagggatgccgctctagaaagagtgcagatgttggagcagcagattctggcttacaaggatgacttcatgtccgagcgggccgaccgggaacgtgcccagtcacgcatacaggaacttgaggaaaaggttgcatctctcctccaccaagtaagttggaggcaggacagccgcgagcccgatgccggcaggatacatgcagggagtaagaccgctaagtatttggcagccgatgcgttggaacttatggtgcctggcgggtggcgccccgggactggatcacagcaaccagaacctccggccgaaggagggcatccaggcgcagcccagaggggccaaggtgacttgcaatgcccccactgcttgcagtgtttttcagatgagcagggcgaggagcttctgcgccatgttgccgagtgctgccagtag

SEQ ID NO: 138011 - DNA, 969 bp, synthetic construct
  misc_feature 1..969: note = Description of Artificial Sequence: Synthetic coding sequence
  source 1..969: mol_type = other DNA
atgcagcaactgctgagtcagccccaacacgagcgggagaaagaggtcgtcctgctgaggaggagcatggctgagggcgagcgagctagggccgcctccgatgttctgtgccggtccctcgcaaatgagacgcatcagctgaggcgcaccctcactgccactgcccatatgtgtcagcaccttgccaagtgtctggatgagcgccagcacgcccagaggaacgtgggcgagagaagtccggatcagagtgaacacacggatggccacaccagtgtacaatctgtcatcgaaaagcttcaggaagaaaacaggcttctcaagcagaaagtgacgcacgttgaagatttgaacgctaagtggcagcgctacaacgcctcaagggatgaatatgtgcggggtctgcacgcccagctgaggggtctgcagattccccatgaaccggaattgatgcgaaaggagatttctcgactgaacaggcaactcgaagaaaagattaatgactgcgccgaagtcaaacaagagctggcagcatcccgtacagccagagacgccgcccttgagcgcgttcagatgttggagcaacagatcttagcttacaaggatgacttcatgtccgagagagcagaccgcgagagggctcagtcgagaatccaagaactggaggagaaagtggcatctttgctccatcaggttagctggagacaggattcccgggagccagatgccggacgaattcacgccggctctaaaacagctaaatatctggccgctgacgcgctggaactgatggttcccggtgggtggcgtccaggaaccggcagtcagcagcccgagccaccagccgaaggcggtcacccgggcgctgcccaacgcggccagggagatctgcagtgtccgcactgtttacagtgttttagcgacgagcagggggaagaattgctccggcatgtggcggagtgttgtcaatag

SEQ ID NO: 138012 - DNA, 837 bp, synthetic construct
  misc_feature 1..837: note = Description of Artificial Sequence: Synthetic coding sequence
  source 1..837: mol_type = other DNA
atggcagaagctaggagtcagccatcggccggcccacagctgaatgcactgcctgatcacagcccactgcttcagcccggcctggccgccctccgccgccgtgctcgtgaagccggagtgccacttgccccgctgccactcacagacagttttcttctgcggttcctgcgagcgagggattttgatttagatctggcctggagattactgaagaactattacaagtggcgggcagagtgtccagaaatctccgcagacttgcatccaagaagcataattgggctactaaaggcagggtaccacggggtgcttcggtcccgggatccaactgggtccaaggtcctgatttaccggatcgcacattgggaccctaaggtatttactgcatatgatgtgttccgggtttcgctcattactagcgagctgatcgttcaggaggtcgaaacccagcgtaatgggattaaagctatctttgatctggaaggatggcagtttagccatgctttccaaatcactccctcagtcgctaagaagattgcagcggtgctaactgacagtttccctctcaaagtacgcggcattcatctgattaatgaaccagtgatcttccacgcagtttttagcatgatcaagccctttctgactgagaagatcaaggagagaatccacatgcacggcaataattacaagcagtccttgttgcagcacttcccagacatcctcccactcgagtacgggggtgaggaattttcgatggaggacatatgccaggaatggactaatttcattatgaagagtgaagactatctgtcgagcataagtgagtcaatccagtag

SEQ ID NO: 138013 - DNA, 2361 bp, synthetic construct
  misc_feature 1..2361: note = Description of Artificial Sequence: Synthetic coding sequence
  source 1..2361: mol_type = other DNA
atgacaagcatattccacttcgccataatttttatgcttatcttacagataagaattcagctctcagaggaatccgaatttctggttgacagaagcaagaatgggctcatccacgtccctaaagacttgtcccagaaaactacaattctaaatatatcccaaaactatatcagcgaactgtggacctcagacatcctttcactaagtaagttaaggatcttgatcatctcgcataaccgcatccaatatcttgatataagcgtgtttaagtttaaccaagaactggagtacctggatctatcacataacaaactggttaagataagttgtcaccccacagtgaacttaaaacatctggacctgagcttcaatgccttcgacgccctgccaatctgcaaagaattcggtaatatgagtcagctgaagttcctgggcctgagtactacccacttagagaaatcatccgtcctccctattgcacacttaaacattagcaaagtgcttctggttctcggggaaacctacggagaaaaagaagatccggagggcttacaagactttaacactgaaagcctccatattgtctttccaacgaataaagaattccactttatcctggatgtgtcagtcaagaccgtcgccaatctggagctgagcaacatcaaatgtgtgctcgaggacaacaaatgtagctacttcctctcaattctggccaaactccagaccaatccaaaactctccaatctgacccttaacaatatagagacaacatggaactcattcatacgcatcctgcaactagtttggcacaccacagtgtggtacttctcgatcagtaatgtaaagctacaaggtcaattagacttcagggactttgactactctggaacttctctaaaagccctctctatccatcaggtggtgtccgacgtgttcgggtttccgcagagctacatctacgagatcttctcgaatatgaacatcaaaaatttcaccgtgtcagggacgcggatggtgcacatgctgtgcccaagtaaaatcagcccattcctacatttagacttttccaataatctcctgacagacacagtgtttgagaactgtgggcatctcaccgagctggagacccttatcctacagatgaaccagctcaaggagttgtccaagatcgccgagatgacgacacagatgaagtccctgcagcagctggatataagccagaactcagtctcctatgatgagaagaagggcgattgtagttggactaaatcgctcctgtcccttaacatgagctctaatattctcaccgacaccatcttccgttgtcttccccccaggattaaggtattagacctccactccaacaagattaaaagcatccccaaacaagtcgttaagctggaggccttacaagagctcaatgtggccttcaacagccttacagatctccccggctgcggttccttctcaagcctctcagtcttgatcatcgatcacaattcagtctcacacccaagcgctgacttttttcagagctgccagaagatgcgatcaattaaggccggagacaatccgttccagtgcacatgtgaattgggcgaattcgtcaagaacatcgatcaggtgtccagcgaagtgcttgagggctggccggactcctacaagtgtgattacccagagtcataccgtggaacactgcttaaggatttccatatgagcgaactgtcttgtaatatcaccctgctgattgtcacaattgtggccaccatgctcgtgctggccgtgaccgtcactagtttgtgctcatacctggatctcccatggtatttacgcatggtgtgccagtggacgcagacccgacgaagggcgaggaacatcccactggaggagctgcaacgaaacctgcagtttcacgcgttcattagctacagtggccacgatagtttctgggttaagaatgagctgctgccaaacctagagaaagaagggatgcagatttgcctgcacgaacgcaacttcgttcccggcaaaagtatcgtagaaaacatcattacctgcatcgagaagtcttacaaatccatcttcgtgctgagcccaaacttcgtgcagagcgaatggtgtcattacgaactctactttgctcaccacaacctatttcatgaaggcagcaactctttgatcctgatcctgctggaaccaatcccccagtattcgatcccctccagctatcacaaactgaagtctctcatggcaaggagaacatatctcgagtggccaaaagagaaatctaaacggggattgttctgggctaatcttagagccgctattaatataaagctgacagaacaggcaaaaaaatag

SEQ ID NO: 138014 - DNA, 2361 bp, synthetic construct
  misc_feature 1..2361: note = Description of Artificial Sequence: Synthetic coding sequence
  source 1..2361: mol_type = other DNA
atgacatctatattccattttgctattatattcatgctgatactgcagattaggatccagctgtcagaggagtccgagtttctggtcgacagatcgaagaatgggctaattcacgtcccaaaggatctcagccaaaagactacgattctgaacatttcacagaactatattagtgaattatggactagcgatatccttagcctgtccaagctgcgaatactgatcattagccacaaccgaatccagtacctcgacattagcgtcttcaagttcaaccaggaacttgagtacctggatctctcgcataacaaactagtgaaaatcagctgtcacccaacagttaacctgaaacacctcgatctgtcattcaacgctttcgacgcactgccaatctgcaaagaattcggcaatatgtcacagctcaagtttctcggtctgagcactacacacctggaaaaatccagtgtcttacctatagctcacctcaatatatcgaaggtcctgttggtgttgggcgagacttacggcgagaaggaggacccagagggattgcaggatttcaataccgaatctctgcacatcgtattcccaactaataaagaatttcatttcatcctggatgtgtctgtgaagacagttgccaatctcgagctctcaaatatcaagtgcgtgctcgaggataataaatgtagttactttttaagtattctggctaaactgcagacaaatcccaagctttccaatctcacgctcaacaatatcgagaccacctggaattctttcatccgcatacttcagctcgtgtggcataccacggtctggtacttctcgatatctaacgtgaagctccagggacagttggatttccgcgattttgactatagcggcacctccctgaaagctttgtctatccaccaggtggtctccgatgtgttcggctttccgcagtcatatatatatgaaatattctcaaacatgaacataaagaactttactgtcagcggcacccggatggtacatatgctatgtccatctaagatttcaccatttctgcatcttgacttcagcaataaccttcttaccgacactgtgtttgaaaattgtggacacctgactgagctcgagaccctgatcctccaaatgaaccagctgaaagaattgtccaaaatcgctgagatgacaacccagatgaagtctctgcagcagctggatatatctcaaaactcagtgtcgtacgatgagaaaaagggcgattgctcgtggacgaagtcactgttgagcctcaatatgagctctaatattttgacggataccatttttaggtgtctgccaccccgcattaaggtgcttgacctgcattcaaataagataaagtccattcctaaacaagtggtcaagctggaagcactgcaggagctcaatgtagccttcaactccttgacagacctgcccggatgcggatcattctcttccctcagtgtcctgatcatcgaccacaactcagtgtctcatcctagtgccgacttttttcagagctgccaaaagatgcggtctatcaaagccggtgataacccctttcagtgcacctgcgagctgggtgaatttgtaaagaacattgaccaagtctcatccgaggtactcgagggatggcctgatagttacaaatgcgactatcctgagtcctatagaggtacacttctgaaggacttccatatgagcgagctctcctgtaacatcacattgcttatcgtaaccatcgtggcaaccatgttagtgctggccgtgacagtgacaagcctttgctcttatctggaccttccatggtacctgaggatggtctgtcagtggacacagactaggcggagagcccgaaacattcctctggaagaactgcagagaaaccttcagtttcacgcattcatatcttatagtggacacgattcattctgggttaaaaacgaacttcttcccaatttggagaaggagggaatgcagatctgtctccatgaacgtaatttcgttcccggtaagtccattgtggaaaacataataacctgcattgagaagtcttacaaatccatattcgtcctttctccaaactttgtgcagtcagagtggtgccactatgagctgtattttgcccatcacaacctgtttcacgaaggtagtaactcccttatactgatccttttggaacctataccccagtactctattccgtccagctaccacaagcttaagagccttatggcccgtcgcacttacctggagtggcccaaggagaagagcaagcgtggtttgttctgggcaaacctgcgtgccgcgatcaatataaagctgacagaacaagccaaaaaatag

SEQ ID NO: 138015 - DNA, 486 bp, synthetic construct
  misc_feature 1..486: note = Description of Artificial Sequence: Synthetic coding sequence
  source 1..486: mol_type = other DNA
atgactagcattttccactttgccatcattttcatgctcattcttcagatccgcatacagctttcagaagaatccgagtttcttgtagacaggagtaagaacggcctcattcatgtcccaaaagacttgtcccagaaaacaacaattctcaacatctcccagaattacatttccgagctctggactagcgacattctgtctctttctaagctgcgtattctgatcatatctcacaataggatccagtaccttgatatctctgtgtttaagttcaaccaggagctggaatatttggacctgagccataataaattggtgaagattagttgccacccaacagtgaacctgaaacacctcgatctgagtttcaacgcattcgacgccctgccaatctgcaaggagtttggtaatatgagccaactaaagttcttaggtctaagcactacacacctggaaaaatcatcagtactcccgatcgcacactag

SEQ ID NO: 138016 - DNA, 147 bp, synthetic construct
  misc_feature 1..147: note = Description of Artificial Sequence: Synthetic coding sequence
  source 1..147: mol_type = other DNA
atgacttctatttttcacttcgccatcattttcatgctgatccttcagatcaggattcagctctcggaggagtctgagttcctggttgacaggtctaaaaacggactgattcatgtaccaaaggatcttagtcagaaaactacgtag

SEQ ID NO: 138017 - DNA, 72 bp, synthetic construct
  misc_feature 1..72: note = Description of Artificial Sequence: Synthetic coding sequence
  source 1..72: mol_type = other DNA
atgactagtatttttcacttcgctataatctttatgctcatcctgcagataaggatccagctgtcagagtag

SEQ ID NO: 138018 - DNA, 273 bp, synthetic construct
  misc_feature 1..273: note = Description of Artificial Sequence: Synthetic coding sequence
  source 1..273: mol_type = other DNA
atgacgagcatttttcactttgcaatcatctttatgttgattctgcagattcgtatacagttatcagaggagagtgagtttctggttgataggtctaagaacggactgatccacgtaccaaaggatctgtcacagaaaacaacaatccttaatatcagccagaactacatcagcgagctgtggacgagcgacatcttgtcactttctaaactgcgaatcctgataataagtcacaacagaatccagtacttggatatatccgtgttcaaatag

SEQ ID NO: 138019 - DNA, 2355 bp, synthetic construct
  misc_feature 1..2355: note = Description of Artificial Sequence: Synthetic coding sequence
  source 1..2355: mol_type = other DNA
atgccacatacattgtggatggtgtgggtgctgggtgtgatcatctcactgtcgaaagaagagtcaagcaatcaggcatctctgagctgtgataggaatgggatctgtaaaggcagctctggatctctgaacagtattccatccggcctcaccgaggccgtgaagtcacttgatctgagcaataaccgcatcacttatatctccaactcggatcttcagcggtgcgtgaaccttcaagcgctggtgctgacatcaaatggcattaatacgatcgaggaagatagctttagttcccttggttcattggaacacctggatttatcgtataactacctctccaaccttagttctagctggtttaaaccactctcttcattgacctttctgaacttactagggaatccatacaagacattgggcgaaacgagcctgttttcccatttaacaaagttacagatactgagagtaggtaatatggatacattcaccaagatccaaagaaaagacttcgctgggctgacatttctcgaagaattggagatagacgcctctgacctgcaatcttacgagcctaagtctctcaaatcaatccagaacgtttctcaccttattcttcatatgaagcagcatatcctgctgcttgagattttcgtggacgttacatcttcggtggaatgcctggaactgagagacacggatttagatacatttcactttagcgagttaagcactggcgagaccaatagtttgatcaaaaagtttacatttcggaatgtcaagatcactgacgagagcctctttcaggtgatgaagctgctcaatcaaatctctggattgctggagttagagttcgacgactgtaccttaaatggtgtaggaaactttcgtgcttctgacaacgatagagtaattgatcctgggaaggtcgagactttgaccattcggcgcctgcatattccacggttctatctgttttatgatctttcaaccctttacagcctgactgagagagtcaagagaatcacagtcgagaactctaaagtctttctggtgccttgtctgctttcacaacacctaaaatctctggagtatcttgacctgtccgagaatctgatggtggaggagtatcttaagaattcagcttgcgaagatgcctggccaagccttcagacactgattctgcgccagaaccatcttgcttcactagagaagaccggtgagacactgctaactctgaagaacctcactaatatcgatatttccaagaatagctttcacagcatgcctgagacatgccaatggcccgagaagatgaagtacctcaatctcagctctacccggatccattccgttaccggctgcataccaaaaacactcgaaattctggacgtaagcaacaacaacctgaaccttttttccctgaacttgcctcagcttaaggagctgtacatctctcgcaataaactgatgaccctccctgatgcgtcgttgttgccgatgttgctggtcctgaaaatctcccgcaacgccattaccaccttcagtaaagagcagctcgattctttccataccctgaagacactggaggcaggagggaacaacttcatctgtagctgtgaattcctgagcttcacccaagagcaacaggctctggccaaggttttgatcgattggccagccaattacctctgtgacagtcctagccacgtgagggggcagcaggtgcaagacgttcgtctgtccgtatcagagtgccatcgaactgccctggtgtcaggcatgtgttgtgcactgttcctcctgatcctgttaactggagtgctatgccacaggtttcatggcctgtggtatatgaaaatgatgtgggcatggctgcaggctaagaggaagccaaggaaagccccaagccggaatatttgctacgatgcattcgtgtcctactctgagagagacgcgtactgggtcgagaatcttatggttcaggagttggagaactttaacccacccttcaagctgtgtctccacaaaagagactttatccccgggaaatggatcatagacaacatcatcgactcaatagaaaagagccataaaacagtgtttgtccttagtgagaacttcgtcaaatccgagtggtgcaagtatgaactggacttctcccatttcaggcttttcgacgagaacaacgatgcagccatcctcatactcctcgagcccatcgaaaaaaaggcgataccgcagagattctgtaaactaaggaagataatgaacaccaaaacctaccttgagtggcccatggacgaagcccagcgggagggattctgggtaaacttgagagcagccattaaaagctag

SEQ ID NO: 138020 - DNA, 2715 bp, synthetic construct
  misc_feature 1..2715: note = Description of Artificial Sequence: Synthetic coding sequence
  source 1..2715: mol_type = other DNA
atgcgccagactcttccctgtatttacttctggggcggcctcctaccatttgggatgctttgtgccagctctacaacaaagtgtacagtgtcccacgaagtggcagactgctctcaccttaaactcacacaggtgccagacgacctgccaactaatatcactgtcctgaatctgacccataatcagctacgcagactacccgctgccaatttcacacggtatagccagctaacttcacttgatgtgggattcaacaccatttcaaaactggaacctgagctctgccagaagctgccgatgctgaaggttctgaatcttcagcacaacgagcttagccagctgtccgacaagacctttgccttttgtacaaatttaacagagctccacctgatgtctaattcaattcagaagataaaaaataatcctttcgtgaaacaaaaaaatcttatcacccttgacctctcacacaatggcctgagttccaccaagctgggcacccaagtccagctggagaacttacaggagcttctgctgagcaacaacaagatccaggcgttaaaaagcgaggaactagacatatttgctaactcgtccctaaagaagttggaactgtcctcgaaccaaattaaagagttttcccctggctgttttcacgcaatcggacgtctgttcgggctctttttgaacaatgtccagctgggtccatccttgactgaaaagttgtgcctagagcttgccaacacttcgatacggaacttatccctgagtaactcacagctcagtacgacctcaaataccacctttctggggctgaagtggactaaccttacgatgttagacctatcctacaataaccttaatgtggtcggtaacgatagctttgcctggcttcctcagctcgagtatttcttcctggagtacaacaatattcaacacctcttcagtcacagtctacatggccttttcaacgttcgctatctgaacttaaagagaagcttcactaaacagagtatctcccttgcatctcttcctaaaattgacgatttttccttccagtggcttaagtgtctcgaacacctcaatatggaagacaacgacatccctggcataaagtccaacatgttcactggcctcattaacctcaagtatctctcattgtctaactcattcacctctctgcggacactcacaaatgagacctttgtgagtcttgcccactctcccctgcacatcttaaacctcacaaaaaacaagatttccaagatcgaaagtgatgcgttttcctggctggggcatttggaagtcctggacctcggacttaacgaaatcgggcaggagcttaccgggcaggagtggcggggtctggaaaacatcttcgagatctacctctcttacaacaaataccttcaattgacacgcaattcattcgccctggtacccagcttacagaggctcatgttgaggcgcgttgctctcaaaaatgtggacagcagcccatcccctttccagcctttgcgaaacttgacgatactagatctgtcaaacaacaacatagccaatattaatgatgacatgcttgaggggctggaaaagctggaaatcctcgatctgcagcataacaatctggcccgcctttggaaacatgcaaatcctggtggaccgatctatttcctgaagggcttatctcatctccacatcctgaacctagaaagcaacggcttcgatgagataccagtggaggtattcaaagacctgtttgagctcaagatcattgaccttggtttgaacaatctcaacaccctgcctgcctccgtgtttaataatcaggtgagcttgaagtcactgaacttacagaaaaaccttatcacaagcgtggaaaaaaaggtgttcgggcccgcttttaggaacctcacagagctcgacatgcgctttaaccccttcgactgtacatgcgagtctattgcctggttcgtcaactggatcaatgagactcacaccaatattcctgagctatccagccactatctctgcaacaccccaccacactatcatggattccccgtgagattgtttgatacatccagttgcaaggatagcgctccattcgagctgttctttatgatcaatacaagcatactgcttatctttatctttatcgtcctactcattcacttcgagggatggcgcatatctttttactggaatgtcagcgttcacagggttctagggtttaaggagatcgaccggcagaccgagcagttcgagtacgctgcctacataatccacgcctacaaggataaggactgggtgtgggagcatttctcgtccatggaaaaggaagatcagtctcttaaattttgtctggaggaacgtgacttcgaagctggcgtctttgagcttgaggcaatcgttaatagtataaagcgctctcggaagatcatatttgtaataacgcaccatctccttaaggaccccctctgtaagcggtttaaggtgcaccatgccgtgcagcaggccatcgagcagaaccttgacagtatcatcctagtcttcctcgaggaaatccctgactacaagctcaatcatgccttatgtcttaggcgaggtatgttcaagagccactgcattttgaattggccggtgcagaaggagcggatcggtgctttccgacacaaactgcaggttgcactggggtctaaaaattcggtccattag

SEQ ID NO: 138021 - DNA, 1884 bp, synthetic construct
  misc_feature 1..1884: note = Description of Artificial Sequence: Synthetic coding sequence
  source 1..1884: mol_type = other DNA
atgctggacctttcttacaataatttaaacgtcgttggtaacgatagttttgcttggttgccgcagctggagtacttcttcttggaatacaacaatatacagcacttgttctctcacagtctgcacgggctgtttaatgtgaggtatctaaatttgaagagatcttttaccaagcagtctatcagtctcgcatctctgccgaagatagatgattttagctttcagtggctcaagtgtctggaacacctgaatatggaggacaacgacatacccgggataaagagcaacatgtttactggcctgattaacttgaagtatctctctctatccaatagtttcacatccctgcggacattgacaaacgagacatttgtttcactcgcccactcacccctacacatactcaatctgacaaagaacaaaatttcgaagattgagagtgacgcttttagctggctaggccacctcgaggtccttgatctcgggcttaacgagatcggccaggaacttaccgggcaagaatggcggggtttggagaatattttcgaaatttacctatcttacaacaagtatctacagttgactcggaattcattcgcactggtaccctctttgcagcgcctgatgcttcgccgagtggccctcaaaaacgtggacagctccccaagccccttccagccattacgtaacctcaccatcttggatctttccaacaacaatattgccaatattaatgacgacatgctggagggcctggagaagttagagattctggatctgcagcacaacaacctggcccgcttatggaagcatgctaatcccgggggaccgatctatttcctcaaaggtctcagtcaccttcacatcttaaacctcgaaagcaacggattcgacgaaataccagtcgaagtgtttaaggacctgttcgaactgaagatcatcgatctgggcttaaacaatctgaataccctgcccgctagtgtgttcaacaatcaggtgagtcttaaaagcctgaacctccagaagaatctgataacctccgtagagaagaaagtctttggtcccgcctttcggaatcttaccgaactggacatgaggtttaatcctttcgattgtacctgcgaatcaatcgcctggttcgtgaactggatcaatgaaacccacactaacatccccgagctatcatctcactacctgtgcaatactccaccccattaccacggtttccccgtcagactgttcgacacatcttcatgcaaggacagtgctccgttcgaactgtttttcatgatcaatacatctatcctgctgatcttcatctttatcgtcctgctgatccacttcgaagggtggcggatttcattctactggaatgtctccgtgcatagagtgctcgggtttaaagagatcgaccgccagactgagcaatttgagtatgcggcatacatcatccacgcatataaagataaggactgggtgtgggagcatttcagctcaatggagaaggaagatcagtccctaaaattctgtttagaggaaagagatttcgaagctggagtttttgaactggaggccatagtaaatagtatcaagcgttcaaggaaaataatttttgttattactcaccacttgttaaaggatccgctttgtaagcggttcaaggtgcaccatgctgtgcagcaggccatcgaacaaaatctcgattccattatcctagtgttcttagaggagatccccgactacaaactgaaccacgccctgtgccttcggagaggtatgtttaagtcacattgcatcctgaattggccggttcagaaagagaggattggggctttccgccataaactgcaagtcgctcttggctcaaagaacagtgtgcattag

SEQ ID NO: 138022 - DNA, 2613 bp, synthetic construct
  misc_feature 1..2613: note = Description of Artificial Sequence: Synthetic coding sequence
  source 1..2613: mol_type = other DNA
atgcggcagacactgccatgtatctacttctggggagggttactgcctttcggcatgctctgtgcctcctctacgaccaaatgtacagtcagccacgaagtggccgattgtagccatcttaaactgactcaagtcccagacgatctgccaacaaatatcactgtcctcaatctgacacacaaccaactgagacgactgcctgcagccaacttcacaaggtatagtcagcttacttctttggatgtgggatttaacacaatcagcaaactggaacccgagctttgccaaaaactgcctatgcttaaggtgctcaatcttcagcacaatgaactctcccaattgagcgacaagaccttcgcattctgcacaaatttgaccgagctgcatctcatgagcaatagtatccagaagattaaaaataatccatttgtgaagcagaagaatcttattactttggatttgagccacaacggactcagctctacgaagctgggtacccaggttcaactcgaaaacctacaggagctccttctgagcaacaacaaaattcaggctctgaaatcagaagagctagatattttcgcaaactcatctttaaagaagcttgaactgtcctctaaccagatcaaggagttttctccgggatgttttcatgcgattgggaggttgttcggcctcttcctcaataacgtacagctcggcccttctttgaccgaaaagctgtgtcttgaacttgccaacacatctattcgcaacctgtccctgagtaatagccaactctcaaccacttccaacacgacttttctcgggcttaaatggaccaacctgaccatgctcgacctttcttataataacctgaacgtagtcgggaatgacagctttgcatggctgccccagctggaatactttttcctggaatacaataacattcagcacctgttctcccattctctgcacgggctatttaacgttagatatctgaatctgaaaaggtcatttaccaagcagagcataagtctcgcttctctacctaaaatcgatgacttctcttttcagtggctcaaatgcctagagcacctcaatatggaggataatgacataccaggcattaagtcgaacatgttcaccgggcttattaatttaaaatatctaagtctctctaactcatttacatccctccggacactcacgaacgagacatttgtgtccttggctcacagtcctctccacatcctgaatttgactaaaaataagatctccaaaatcgagtccgatgccttttcttggttggggcacttggaggtgctggacctgggactgaacgagatcggccaggaactgaccggccaggaatggagaggactggagaatatctttgagatctatctgagttacaacaagtacctgcagctcacccgcaacagctttgctctagtccccagtctacagcgtctgatgctcaggcgggtcgcccttaagaatgtcgattctagtccatccccctttcagcctcttcgcaacttaactatcttggacttgtccaataacaatattgccaacatcaatgacgatatgcttgaaggactggagaaattggaaatcttagacttacagcacaacaacctggctaggctgtggaagcacgcaaaccccggcggtcccatctatttccttaaagggctaagccacctccacatcctgaatctcgagagtaacgggtttgatgagatacctgtcgaagtgtttaaagatctttttgaactgaagattattgaccttggactcaataatcttaacactctgcctgcatctgtcttcaacaaccaggtgtctctgaaatccctcaatcttcagaagaatctgatcacatccgtggaaaagaaagtctttggacccgcctttagaaacttaacggaactcgatatgagattcaatccttttgattgcacatgtgagtccatcgcttggttcgtgaactggattaatgaaacccacactaacattccagagctcagctcacattatctctgcaatacccccccacactatcatggatttccggtacggctcttcgatacatcatcttgtaaggacagtgccccttttgaactgtttttcatgataaacacaagcatacttctgatcttcatatttattgtcctcctcatccattttgagggctggcgcatcagtttctactggaatgttagcgtgcatcgcgtgctcggctttaaagaaatcgaccgacagacggagcagttcgagtacgcagcttacataattcacgcctataaggataaggattgggtctgggagcacttctcgagcatggaaaaagaggatcagtcactgaagttttgccttgaagagagagattttgaggccggagtcttcgaacttgaggcgatagtgaacagtatcaagcgatctagaaagattatctttgtaatcactcatcatctgttgaaggaccctctttgtaagcgatttaaagtgcaccatgcggtccagcaggccatcgagcagaacctcgacagtatcatcttggtgtttctggaagagatccctgactacaaactgaaccacgccttatgcctgcgccgggccaagtag

SEQ ID NO: 138023 - DNA, 2391 bp, synthetic construct
  misc_feature 1..2391: note = Description of Artificial Sequence: Synthetic coding sequence
  source 1..2391: mol_type = other DNA
atgacaaaagataaggagccaatcgtcaaatcttttcacttcgtctgcttaatgattatcattgttgggaccagaatccagttctccgacggcaatgagtttgcagttgacaagtcgaagcgcggcctgatccacgtgccgaaggatctccccctcaaaacaaaggtgctggacatgagccaaaattacattgcggaactgcaggtgagtgatatgagctttctctcagagctaaccgtcctcagattgtcacataaccgtattcaattattagacctgtcggtgttcaagttcaaccaggaccttgagtacctggacttatcccacaaccaactgcaaaaaatctcctgtcaccccatcgtgtccttcagacacctggatctaagcttcaatgatttcaaggctttacccatctgcaaggagtttggtaatctgtctcaactgaatttccttggtctttccgcaatgaaattacagaagttggaccttctgcctatagctcacctccatttgagttatattttactcgacctgcggaattactacatcaaagagaacgaaaccgagtcactgcaaatcctgaatgccaagaccctgcatctcgtttttcaccctacaagtctgtttgccatccaggttaatatttctgtgaatacgcttggctgtctccagctgaccaatatcaaactcaatgacgacaactgccaggtcttcatcaaattcttaagtgagctgactcgggggtcaacactgctgaatttcaccctgaaccatatcgaaacaacctggaagtgcctggtgcgggtgttccagttcctctggcctaaacctgttgaatatctaaatatttataacctcactatcattgaatccatccgcgaagaagattttacttacagcaagacgaccttaaaggcccttacaatcgaacatatcaccaatcaggtattccttttttcacagaccgcgttatacaccgttttttctgagatgaatattatgatgctgactatatccgacacccctttcatccacatgttgtgccctcacgctcccagtaccttcaaattccttaacttcacacagaacgtttttacagacagcatcttcgaaaagtgtagtacgctcgtaaaactggagacgctcattcttcagaagaacggactgaaggacctcttcaaagtgggtctgatgacaaaggacatgccatcccttgagatcctggacgtctcttggaacagcctcgagagtggcaggcataaagagaattgcacttgggtcgagagcattgtggtgttgaacttgagctctaatatgctcacagatagcgtgttcaggtgcctgccgccccgcatcaaggtgttggacctccactctaataaaatcaagtctgtgccaaagcaggtcgtaaagctggaggcactccaggagctaaacgtcgcctttaattcactcactgacctccccggatgtggatctttttcctctctaagcgtgctgattatcgaccacaactcagtctcacatccctccgctgatttctttcaatcctgccaaaaaatgaggtccatcaaagcaggagacaaccctttccagtgtacatgtgagttgagagagtttgttaagaatattgatcaagtttctagtgaggtgctggaaggatggccggactcctacaaatgtgactatcccgaatcctaccggggatcacccctaaaggactttcacatgtcagaactgagctgtaatataactctactgattgttaccattggggccacgatgctcgtcttggctgtgacagtcaccagtctgtgcatctacttggacctgccatggtacctccggatggtgtgtcaatggacccaaaccagaagacgcgcacgaaatatcccattagaagagctccagcggaatctacagttccacgctttcatctcttactcagaacatgactcagcttgggtcaaatcggaactggtaccctatttagagaaggaggacatacagatttgcctccacgaaaggaacttcgtgccaggcaagagcatcgtagagaatattatcaactgcatcgaaaagtcttacaagagcatttttgtactgtccccaaactttgtccagtcagaatggtgccactacgagctgtacttcgctcaccacaacctgtttcacgagggctccaataacttgattctgatcctactggagcctattccccagaattcaatccccaacaaatatcacaagctcaaggccctcatgacccaaagaacctacctgcaatggcctaaagaaaaaagtaagcgggggctgttttgggccaacattagggcagcgtttaacatgaagctcacactcgttacagagaataacgacgtcaagtcctag

SEQ ID NO: 138024 - DNA, 2391 bp, synthetic construct
  misc_feature 1..2391: note = Description of Artificial Sequence: Synthetic coding sequence
  source 1..2391: mol_type = other DNA
atgaccaaagataaagagccgattgtgaagtcattccatttcgtgtgcctcatgattattattgtcgggactcggattcagttttctgatgggaacgagtttgcggtggataaatcaaaaagaggcctaatacacgtgcctaaggatctgccactgaaaaccaaagtgctcgatatgagccagaactacattgcagaattgcaggtctccgatatgagctttctgtccgaattgaccgtactgcggctttctcacaaccgaattcaacttttagatctgagcgtgttcaagttcaatcaagacctggagtacctagatctgtcccacaaccaattacagaaaatcagctgccacccaattgtctctttccgccacttggatctcagtttcaatgacttcaaagcactgcccatttgtaaggaattcggcaatttaagtcagctgaattttctcggcctatccgccatgaagctccagaagctcgaccttcttcctatcgctcacctgcatctttcttatatcttgctcgacctgaggaactattacatcaaagagaatgagactgagtccctccagattctgaatgccaaaacactccacctggtgttccatcccaccagcctctttgcgatccaggtgaatatttccgtcaacactctggggtgtcttcaactcacgaatattaagctcaatgatgataactgccaggtctttatcaaattcctgagtgaactgacgagagggtcgaccctcttaaattttaccctcaatcatatagagaccacatggaaatgcctggtccgcgtcttccagtttttgtggccgaaacctgtggagtatctcaacatctataatcttactatcattgagagcatccgggaagaagatttcacctactctaagactaccctaaaggcactgacaattgagcatatcaccaaccaggtctttctatttagccagaccgctctctacactgtcttcagtgagatgaacattatgatgctgaccataagcgatactccattcatccatatgttgtgtccacacgccccatcaacctttaagttcctcaatttcactcagaacgtgttcacagactccatattcgagaagtgtagcaccctggtcaagctggagacactgatcttgcaaaagaacggtctgaaggacttatttaaggtgggcctgatgaccaaggacatgcctagccttgaaatactagatgtctcttggaattcattggagagtggaagacacaaggagaattgcacgtgggtagagagcatcgtggtcctgaatctctcctctaacatgctgactgattcggtttttaggtgcctcccaccacgcattaaagttttggaccttcacagcaataagataaaatccgtcccaaagcaagtagtgaagctcgaggcccttcaggagctgaacgttgcgtttaactccttaaccgatttgcctggttgtggctcattcagctcactgtctgtgctgattatcgatcataacagcgtctctcacccttcagccgacttctttcaaagctgccagaagatgcgctcaattaaggccggtgacaatcctttccagtgcacttgcgagcttagagagttcgtcaagaacattgatcaagtgtcctccgaggtcctggagggctggcccgattcatacaagtgcgactaccccgagtcctatcgtgggtcaccattaaaggattttcacatgtctgagctgagttgtaacatcaccctcttaatcgttacaataggcgctacgatgctggtgcttgccgtgaccgtgacctcattgtgtatttatctcgacctgccttggtatcttcgaatggtgtgccagtggacacaaacaagacggagagcgcgtaatatccctctggaagaattgcagcggaatctacaattccacgcctttatttcctactcagaacacgatagcgcctgggttaaaagcgagctggtcccctacttggaaaaggaggatattcagatttgcttgcacgagcggaacttcgtgccaggcaagtccatcgtggagaatattatcaactgcattgaaaagtcctataaatctatatttgtgctgagccccaatttcgtacagtcggagtggtgccattatgaactgtactttgcacatcataacttgtttcatgagggcagcaacaatctgatactcatccttctcgaaccaattccccagaattccatccccaacaaataccataagctaaaagccctgatgacccaaaggacatacctacagtggccaaaggaaaaatccaaaagagggctattctgggcaaacattcgggccgcctttaatatgaagcttacactagtaactgaaaataacgatgtcaagtcctag

SEQ ID NO: 138025 - DNA, 453 bp, synthetic construct
  misc_feature 1..453: note = Description of Artificial Sequence: Synthetic coding sequence
  source 1..453: mol_type = other DNA
atgaccaaggataaagagcccatcgtgaaatcttttcactttgtgtgccttatgatcattatcgtggggacacgcatccagttcagtgacggcaatgaattcgctgttgacaagagtaagcgtggactgatccatgttcctaaggatttaccccttaaaacaaaagtactcgatatgagtcagaactatatagccgagcttcaggtgtcagacatgagcttcctgtccgaactgacagtactcaggttgtcccataatagaattcagctactggacctctctgtatttaagtttaaccaggatctcgaataccttgatctgtctcacaatcaacttcagaagatctcttgccatcccatcgtctcctttagacacctggacctgtccttcaatgattttaaggccctgcctatctgcaaggagttcgggaatttgtcacaactgaatttttag

SEQ ID NO: 138026 - DNA, 1443 bp, synthetic construct
  misc_feature 1..1443: note = Description of Artificial Sequence: Synthetic coding sequence
  source 1..1443: mol_type = other DNA
atgaccaaggacaaggagccaattgtgaagtctttccacttcgtgtgcctcatgattattatcgttgggacccgaatacagttctccgacggcaatgagttcgcagtagacaaatcaaaacgcgggcttattcatgtgcccaaagacctcccactgaaaactaaagtcttggatatgtcgcagaactacattgccgaactccaggtctctgacatgtcgttcctctctgaacttacagtcctaagactgtctcacaataggatccagttgctagatctcagcgtttttaagttcaaccaagacctggagtacctcgacctctcccataaccagctgcagaaaatttcatgccaccccatcgttagctttcggcatctcgacctgagctttaacgacttcaaggcgctgcccatttgcaaggagtttggcaatctgtcccaactgaatttcctcgggctgtcagcaatgaagctgcagaagttggacctccttcctatcgcccatctgcacctcagctacattttattggacctgaggaactattacattaaggagaacgagacggagtcgctacagatcctgaatgctaagacgctgcacctggtgtttcacccaacatccctttttgccatccaggtgaacataagcgtcaataccctcggatgtcttcagttaacaaacataaaactgaatgatgataactgccaggtgtttattaagttccttagtgaactgactagaggatcaacacttctgaactttacgcttaatcatatcgagacaacctggaaatgtttggtgcgcgtcttccaatttctctggcccaaacctgtggagtacctgaacatctataacttgactataatcgagtccatccgcgaggaggatttcacttactcgaaaacaactcttaaggctctgactatcgaacatatcactaaccaagtgtttttgttttcccagaccgccttgtataccgttttttcagagatgaatatcatgatgctgaccatctcagatacccccttcattcacatgctgtgtccacacgctccatctaccttcaaattcctcaacttcacccaaaatgtcttcacagacagcattttcgagaagtgtagcaccctagtgaaacttgaaaccctgatctttgttctgtctccaaactttgtgcagtctgagtggtgccactatgaattgtattttgcacaccataacctattccacgaagggagcaataacctgatcctcattctgctggaacctattccccaaaatagcatcccaaacaagtatcacaagttaaaagcgctaatgacccaaaggacttaccttcagtggccgaaggaaaagtctaagcgcggactgttctgggcaaatatcagggctgccttcaacatgaagctgaccctggttacggagaataatgatgtaaagtcttag

SEQ ID NO: 138027 - DNA, 276 bp, synthetic construct
  misc_feature 1..276: note = Description of Artificial Sequence: Synthetic coding sequence
  source 1..276: mol_type = other DNA
atgactaaggataaggaacctattgtgaaatcttttcatttcgtttgtcttatgataattattgtaggcactcgtatacagttcagcgatggcaacgaattcgctgtggacaagtcaaagcggggactgatacatgtgcctaaagatctcccgctgaaaactaaggttcttgatatgtcccagaactacatcgccgagttgcaggtttcggacatgtcctttttgtcagaactgacagttttacggctttcccacaatcgcattcaactgctgtag

SEQ ID NO: 138028 - DNA, 3150 bp, synthetic construct
  misc_feature 1..3150: note = Description of Artificial Sequence: Synthetic coding sequence
  source 1..3150: mol_type = other DNA
atggttttcccaatgtggacgctgaaacgccagatcctcatactgttcaatatcattctcatctccaagctgctcggagcacgctggtttcctaaaactctcccatgtgatgtgactcttgacgtgcccaaaaatcacgtcatcgtggactgtacggacaaacacctaactgagataccgggcggcatacctactaacactaccaacctcactctcactatcaatcacatcccagacatctcacccgccagttttcataggctggaccatctagtcgaaatcgatttccgatgcaactgcgtgcctatcccactgggcagcaagaataacatgtgtattaaaaggttacagatcaaacctagaagcttttcaggtttgacatacctgaaatccctatatctggacggcaaccaattactggagattccccaggggcttcccccttcactgcagttgctgtcacttgaggccaacaacatttttagcatcaggaaggaaaacctgaccgagctggctaacattgaaattctgtaccttggacagaattgctactacagaaacccatgctatgttagttatagcattgagaaagatgccttcctgaacctgaccaaattaaaagtgttatccctgaaggacaataacgtgactgcagtccctaccgtactgcctagtacgctcaccgagctgtacctttataacaatatgattgccaagatccaggaggatgattttaacaacctgaaccagctgcagatcctggatcttagcggcaactgtcctcggtgctacaacgcacccttcccttgtgccccttgtaagaacaattctcccctccagatccccgtgaacgccttcgacgcattgacggaattaaaagtgcttcggttacatagtaatagtctacagcacgtgccccctaggtggtttaagaatataaataaactgcaggagctcgatctgtcacaaaacttcctggcaaaggagattggcgatgccaagtttctgcactttttgcctagtcttatacagcttgacctgtcattcaacttcgagctccaagtgtaccgagcaagtatgaatttgtcacaggctttctccagccttaagtctctcaaaattttgcggatccgcggatatgttttcaaagagctgaaatccttcaatctgtccccactgcacaatttgcaaaacctcgaagtgcttgacctcggcaccaactttatcaaaattgctaatctgtccatgtttaagcagttcaagcgcctcaaggtgatcgacctaagcgtgaataaaatttcccctagtggcgattcgtctgaggtgggtttctgttctaatgctagaacatccgtggaatcctatgaaccacaggtgctggagcaactgcattacttccgctacgacaagtatgcccggagttgccgatttaagaacaaggaggcaagcttcatgtctgtgaacgaatcctgctataagtacggacagacattggacctgagtaagaattccattttctttgtgaagtcctcagacttccagcacttgtcctttcttaagtgcctgaatttgagtggcaacctaatctctcagacgttgaacgggtccgaatttcagccactggcagaactcaggtatttggacttttcaaataaccgcctcgatctgctgcactccactgctttcgaggaactgcataagctggaagtcttggacatctcctctaattcccactacttccaatctgaagggataacccacatgcttaattttactaagaatctgaaagtgctacagaaacttatgatgaacgataacgacatcagttcttccaccagccggacaatggagtccgaaagcctgcgtacactggaatttcgaggcaaccaccttgacgtgctgtggagagagggcgacaaccgctatctacagcttttcaagaacttgctgaaactcgaagaactcgatattagcaagaactccctgagcttcctgccttccggagtgttcgacgggatgccacctaacctgaagaacctcagcctggcaaagaatggcctgaagtccttctcctggaaaaagctgcaatgtctgaagaatctagagaccttagacctttcacacaatcagctgacaacagtgcccgagaggctatcaaactgctccagaagcttaaaaaacctgatcctgaaaaacaaccagatccggtccctcaccaagtacttcttacaggatgcatttcagctgaggtacctcgatctcagcagcaacaagatacagatgatccagaaaacctccttccccgagaacgtgctcaataatctgaaaatgttgctcctccaccataaccgctttctttgtacctgtgatgcagtgtggtttgtgtggtgggtgaatcacacagaggtcaccatcccctatttggccacagacgtgacatgtgtgggccctggagctcacaaaggccagagtgtgatttccctggatctctacacttgtgaacttgacctgacgaatcttatactgttttcccttagcataagtgtaagtctgttccttatggtcatgatgaccgccagccatctctacttctgggatgtgtggtatatttaccatttctgtaaagccaaaataaagggctatcaacgtctgattagccccgattgttgctatgacgccttcatcgtttacgacaccaaggaccctgccgtcaccgaatgggtgctggcggagctcgtggcaaagttagaggacccacgcgagaaacactttaatctgtgcctggaagagagagactggcttcctggacagcctgtgctggaaaatctcagtcagagcattcagctgtctaaaaaaaccgtgttcgtgatgacagataagtacgcgaaaactgagaattttaagatcgcattctatttgagccaccagcgccttatggacgaaaaagttgatgtcatcatcctgatcttcctggaaaagcccttccagaagtctaaatttctccagctgcgcaaacggctgtgcggatcgtccgtactggaatggccaacaaatccccaggcgcacccctatttctggcagtgtctaaagaacgccttagctaccgacaaccatgttgcctattcccaggtattcaaggaaactgtgtag

SEQ ID NO: 138029 - DNA, 1074 bp, synthetic construct
  misc_feature 1..1074: note = Description of Artificial Sequence: Synthetic coding sequence
  source 1..1074: mol_type = other DNA
atgcgcagacagctgaggagcagacgggccccctcatttccttactcatatcggtaccgcctggatgacccagacgaggcaaatcaaaactacctcgcagacgaagaagaagaggctgaagaggaagccagagtcaccgtcgtgccgaaatctgaggaagaggaggaggaagaggaaaaagaggaggaggaggaagaagagaaggaggaggaagaaggccaagggcagcctaccggcaatgcctggtggcagaaactgcaaattatgagcgagtacctgtgggacccggagcggcgtatgtttttagcgagaactggtcagtcctggtccctgatcctacttatttacttctttttttacgcgtctcttgctgccgttattactttgtgcatgtacacgctgttcctgaccatctccccgtacataccgacgttcacggaacgggtaaaaccgcccggtgtgatgattcggccttttgcccatagcctgaacttcaattttaatgtaagcgagccagacacttggcagcactacgtgatttcactgaatggctttttgcaggggtacaacgatagcctccaggaagaaatgaacgtagactgtccccctggtcagtatttcattcaagacggtaacgaggacgaagataaaaaagcttgccagtttaaacgatcttttcttaagaattgttctggtttggaagatccgacttttggctacagtactggccagccatgcatattgctcaagatgaaccggattgtcgggtttcggcccgagttgggcgaccccgtgaaagtttcttgcaaagtccagaggggagatgaaaatgacataaggtcaataagctactatccggagagtgcaagttttgatctacggtattatccctattacggtaagctcacacatgttaactataccagtcccctggtggcaatgcacttcaccgatgttgtgaaaaaccaggccgtgcctgtacagtgccagctgaaaggcaagggtgtcatcaacgatgtcatcaacgacagattcgtgggccgggtgatattcaccttaaacatcgaaacatag

SEQ ID NO: 138030 - DNA, 3180 bp, synthetic construct
  misc_feature 1..3180: note = Description of Artificial Sequence: Synthetic coding sequence
  source 1..3180: mol_type = other DNA
atgaaagagtcatccttgcagaactctagttgtagtctgggcaaggagaccaagaaggagaatatgttcctccagagctctatgctgacttgcatttttcttctcatcagtggaagctgtgagctatgcgccgaagaaaacttttctaggtcttacccttgtgatgaaaaaaagcagaacgacagcgtgatagccgagtgctctaatcgccggttgcaggaggtcccccaaaccgttggcaagtatgtaactgagctggatctgtccgacaatttcattacacacatcacaaatgaaagcttccaaggccttcagaatttgactaaaattaatctgaatcataacccaaacgtgcagcaccagaacggcaatccagggatccagagtaatggactgaacattaccgatggcgcttttctgaacctgaagaatttacgagaactgcttctggaggataatcagttgcctcagattccctccggcttacccgagagtctcactgagctgagcctgatccaaaacaatatttataacattacaaaagagggaatctctcgactgatcaatcttaagaatctgtacctggcctggaactgttacttcaataaggtttgtgaaaagacgaatatcgaggatggagtgttcgagacattgacaaatttagagctcctgtccctgtccttcaacagcctctctcacgtcccccccaagctgccatccagtctgagaaaacttttcctctccaacacccagattaaatacatcagcgaggaagactttaaaggactaataaacttgacactccttgatctgagcgggaattgtccgcggtgtttcaatgctccattcccgtgcgttccatgcgatgggggcgcttccatcaacatagacaggtttgcgtttcagaatctcacccaattgaggtatttaaacctcagcagtacctccctgcggaagatcaatgcagcctggtttaagaatatgcctcacttgaaggtattggatctggagtttaattaccttgtgggagagatcgcaagcggcgcctttctaaccatgctcccgaggctggaaatcctggacctgtctttcaattatatcaagggtagttacccacagcacataaacatatctcgaaatttttcaaaactgcttagcctgcgtgccctccacctacgaggctatgtcttccaggagctcagggaagatgactttcagcccctaatgcaactgccaaatctgtctacaattaacctgggtataaatttcatcaaacagatcgatttcaagctcttccaaaatttctcgaatctggagatcatctacctcagcgagaaccgaatttcccccctggttaaggatactcgccagagttatgctaatagcagctctttccaacgccatattcgaaagagacggagtactgactttgagtttgatccccattccaatttctaccactttacccggccccttatcaagccccagtgcgctgcatatgggaaagcacttgacctatccctcaatagcatcttctttattgggcctaaccagttcgaaaatctgcctgatatcgcctgcttgaacctgtcggcaaattcaaacgcccaggtgctgagtggcaccgaattttcagccattcctcacgtcaaatacctagatctcaccaataaccggctcgacttcgacaacgcctctgccttgacagagctgtccgacctggaagtgctggacctgagctataatagtcactattttcgtattgcaggggttacgcaccacctggagttcatccagaatttcactaacctaaaggttctgaacctcagtcataataacatttacaccctaaccgacaaatacaatctcgaatctaaatccctcgtagaactagtgttcagcggaaatcgattggacattctgtggaacgatgacgataatcgatacatttcaatttttaaagggttaaaaaacctgaccagattggatctgtccctcaaccggctgaagcatatccccaatgaagcttttctcaatctgccggcatcgctgacagaactccatataaatgataatatgctaaaattttttaactggacccttttacagcaattccctcgcctagagctcctggacttacgcggcaacaaattactgttcctgacagacagtttgtctgatttcacttcttctctgcgcactctactcctctctcacaaccgaattagtcatctcccatccggttttctatcagaagtgtcctcgctgaagcatctcgatctttcctccaatctgttgaagacaattaataagagcgctctcgagaccaagaccactaccaaactgagcatgctggagcttcatggtaacccctttgagtgcacttgcgatatcggtgacttcaggagatggatggatgagcacctcaatgtgaagattcccagactggtcgacgtgatctgtgctagtcctggcgaccagaggggaaagtctatcgttagcttagaactcaccacatgcgtgagcgacgttactgctgtcatactgttctttttcacctttttcattaccactatggtaatgcttgcagccctggcacatcacctcttctattgggacgtgtggtttatttataacgtgtgcctcgctaaagttaagggctatagaagtctgtctacatcccaaactttctacgatgcctacatatcttacgatacaaaggatgcaagtgtcacagattgggtgataaatgagctgaggtaccacctggaggagagtagagataaaaacgtcttgctctgtttagaggagcgcgattgggacccaggcctggccatcatagacaacctgatgcagtccattaatcaaagcaaaaagactgtcttcgtcctgactaaaaagtatgcaaagagttggaacttcaaaacggccttctacctagcccttcagcgcctgatggatgaaaatatggacgtcatcatcttcatcctcctggagcctgtgctgcagcatagtcagtatctcagactgcgacagaggatctgtaaatccagtatcctgcaatggcccgataatccaaaggctgagggactattctggcagactctcagaaatgtggttctcacagagaatgattcccgttataataatatgtacgtggatagtattaagcagtactag

SEQ ID NO: 138031 - DNA, 3099 bp, synthetic construct
  misc_feature 1..3099: note = Description of Artificial Sequence: Synthetic coding sequence
  source 1..3099: mol_type = other DNA
atgggcttttgtagatcggcactgcacccactatctctcctcgtgcaggccatcatgttagcaatgaccttagccttgggaacactacctgcattcttgccctgtgaactgcaacctcatggtctcgtcaactgcaactggcttttccttaagagtgtcccacatttcagcatggcagctccaagggggaatgtgacttctttatccctgtcctctaatcggattcaccatttacatgatagcgactttgcgcacctgcccagcttgcgccatttaaatctcaagtggaactgccctcccgtgggcctctctcctatgcacttcccatgccatatgactatcgagccctcgacatttttggccgtgcccactctcgaagagcttaatctgtcatacaataacattatgacggttccggcccttcctaaatctctgatctccctgtcactcagccatacaaacatcctgatgttggactctgcaagcctcgcaggccttcacgcccttcgctttttatttatggacggtaattgttattataagaacccatgtcggcaagctttagaggtcgctccaggggcactgctcggactagggaatcttacgcatctgagcctgaagtacaataacctaaccgtcgtgcctcgaaacctgccttcttcccttgagtacctcctcctgtcatataacaggattgtcaagctggcaccagaggacctggcaaatctcacagccctcagagtcctggatgtggggggcaactgccggcggtgtgaccacgcccccaatccctgcatggaatgtccgagacacttccctcagctgcaccctgacactttctcacacttgagtcggctcgaaggcctggtcctgaaggattctagtctgtcttggctcaacgcttcttggttccgcggtttgggtaatttgagagtcctggatctgagcgaaaatttcctgtataagtgcattaccaagacaaaagcctttcaggggctaacccagctgcggaagctgaatctgagcttcaattatcaaaaacgtgtgagcttcgcacacctgagtctggcccctagctttggctcactcgtggcactcaaagagttagacatgcatggtatattcttccggtccctggacgaaaccactcttcgcccgctcgcccgtctgccaatgctgcagacgctgcgcttacagatgaacttcatcaaccaggcccaattaggaatttttcgggcctttcccggtctgcggtacgtggatctctccgataatcggatatctggggcaagcgaactgacggcaacaatgggcgaggccgatggaggagagaaggtgtggctccagcccggggatctggccccagccccagtcgacacaccaagctccgaagactttcgacccaattgcagtaccttgaattttaccctggatttgtctcggaataaccttgtaactgtgcagcctgaaatgttcgcccagctgtctcatctccaatgtctccgactctcccacaattgcatttcccaggccgtcaatggttctcagtttctcccccttactggcctgcaagttctggacctctcccataacaagctggatctctaccatgagcattccttcaccgagctgccccgactggaggcattggatttgagctacaactctcagccttttggaatgcagggcgttggccataatttcagctttgtggcgcatctccgtacactccggcatcttagtttggctcataacaatattcacagccaagtaagtcaacagctttgttcaacgtctcttcgagcattagacttttctgggaatgccctcggccacatgtgggccgagggggacctgtacctgcatttctttcaaggcctttccggattgatttggttagatctctcacaaaatcgtcttcacaccttactgcctcaaactctccggaatttgcctaagagtcttcaggtcctcagactgcgggataattatctggccttctttaaatggtggagccttcactttctcccaaaacttgaggtactggacttggctggcaatcagctgaaggccctcacaaacggaagccttcccgcaggtaccaggcttaggcgcctcgacgtctcctgtaatagtattagcttcgtcgcccccggtttcttcagcaaagccaaagagctcagggagcttaacctgtccgctaatgctctgaagacagtggatcactcttggtttggtcccttagctagtgccctgcagattctcgatgtgtcagccaatccactgcactgtgcatgcggtgccgcctttatggattttttgctggaggtgcaagctgccgtccccggcctgccttccagagtcaaatgtggtagtccaggacaactgcaaggcctgtcaatctttgcgcaagacctcaggttgtgcctcgacgaagcactatcgtgggattgcttcgctttgtccttactcgcagtcgcattggggctcggagtgcctatgctgcatcacctgtgtggctgggatctgtggtactgcttccatctgtgtttggcatggctcccttggagagggaggcagagtggacgagatgaagacgcgctaccctacgatgcttttgtggtcttcgacaaaacgcagtcagctgttgctgactgggtgtacaacgaactgaggggacagcttgaagagtgccggggaaggtgggccttgaggttatgcctcgaggagagggactggctgcctggcaaaaccctgttcgagaacctctgggctagcgtatatgggagtaggaagacactgttcgtgcttgcgcacaccgatcgagtatcaggactgcttcgtgcaagtttcctactggcacagcagagactgttagaggataggaaagatgtcgtagtgttggtgatcctgagccctgacggtcgacgaagtaggtatgtccgactgcgtcagcggctgtgtcggcagagcgtgttactctggccccatcagccttccggacagagaagcttctgggcccaacttggcatggcccttaccagagataaccaccacttctataacagaaatttttgtcaaggaccgacagcggagtag

SEQ ID NO: 138032 - DNA, 2139 bp, synthetic construct
  misc_feature 1..2139: note = Description of Artificial Sequence: Synthetic coding sequence
  source 1..2139: mol_type = other DNA
atggcctgtactgggccgagtctgccttcagccttcgatattttgggtgccgcagggcaagacaagttgctttatcttaaacacaaactaaagactccaagacctggctgtcaaggccaggacctgttgcatgccatggttttgctgaagctgggtcaagagaccgaagccagaatctccctcgaggccctcaaggccgatgcagtcgcccgacttgtggcccgacagtgggctggagtggatagcaccgaagatccagaagagccgccagacgttagctgggcagtcgcgagactgtaccacctactggccgaggagaagctttgccccgcttctctccgtgacgtggcttatcaagaggcagtgaggaccttgagttcgcgcgacgatcacaggctgggagaactgcaggacgaggctcggaatcggtgcggttgggatattgcaggggatccaggatccatacgcactctccagagcaatctgggctgtctgccacccagttctgctttgccaagtggcaccagatcactgcctaggcccatagatggagtgtctgactggagtcaggggtgctccctgcgcagtacaggttctcccgcttccctcgcctccaatttggaaatttctcaatcaccaaccatgccctttctcagcctccaccgaagcccacatggcccgagcaaactctgcgatgaccctcaagccagcctggtgccggagcccgtcccgggagggtgtcaagagccggaagagatgagttggcctccctctggcgaaatcgctagtcctcccgaactccccagctcccccccccctggactccctgaggtggcccccgacgccacttcaacaggcttgcctgatacaccagccgcgcccgaaacaagcaccaactaccctgtggagtgcaccgaaggctctgccgggccgcagtctctgcctttgcctatactggaacctgtgaagaatccgtgcagtgtaaaagatcagacccctttacagctgtcagtcgaagacacaacaagccccaacacaaagccctgtccacctacccccactactcccgaaacctcaccaccccccccaccacctccaccttcatctactccctgctctgcccatctgacacctagctctctgttccctagtagcttggagtcttcttcagaacagaagttctataactttgtcatcctgcacgcgcgagctgatgaacatatcgcactgcgagtccgggagaagctcgaagcactgggggtgcccgacggcgccacattctgcgaggactttcaggtccctggccgaggggagctgagttgcctccaagacgcgattgaccacagtgctttcatcatcctgctgctcacgtccaactttgattgccgcctgagccttcaccaggtaaaccaagccatgatgtcgaacttgacgcgccaaggttcaccggattgcgtgattccattcttgccgttggaatcctcgcccgcccagctgtcaagcgatactgcatcactcttatccggtctggttagattagatgagcacagtcagattttcgcccgtaaggtcgctaatacgttcaagccgcatcgccttcaagcacggaaggcgatgtggaggaaggaacaggacacaagggccctcagagaacaaagccagcaccttgacggggaacggatgcaggccgctgcactcaatgcggcctattctgcgtacctacagagttaccttagctaccaggcgcagatggagcagttgcaggtggcatttggatcacacatgtcgttcgggactggagccccttacggcgctcggatgcccttcggcggtcaagtcccactgggagcacctcccccattccccacctggccagggtgtccacagccccctccactccacgcctggcaggccgggaccccaccacccccatctccacaacctgcggcctttccccagagcctacccttccctcagtccccagcattccctaccgcttcccccgcccctcctcaatccccagggctgcagccgcttataatccaccacgcccagatggtgcagctgggacttaataaccacatgtggaatcaaagagggtcacaggctcctgaggacaaaacccaagaggccgagtag

SEQ ID NO: 138033 - DNA, 3042 bp, synthetic construct
  misc_feature 1..3042: note = Description of Artificial Sequence: Synthetic coding sequence
  source 1..3042: mol_type = other DNA
atgggtctgggaactctgtctcctaggatgctcgtgtggctcgtcgcttctgggattgttttttacggagagttatgggtctgtgccggacttgactacgactatactttcgacggcaatgaagaagataaaaccgagaccatcgactacaaagatccatgcaaggccgccgttttttggggtgacattgccttggacgatgaggatctgaatatcttccagattgaccgtaccattgacctgacacagaatccattcgggaacctgggacatacaacaggcggtttgggcgaccacgccatgtccaaaaagaggggcgcgctctaccagttgattgatcgcatcaggagaatcggttttggtctggaacagaataacaccgtgaagggcaaggtgcccctgcagtttagcgggcaaaatgaaaaaaaccgagttcctcgggcggccacgtcccgcactgagcggatttggcctggcggagtcatcccctatgtaatcggcgggaactttactggatcacagagagcgatgtttaagcaggcgatgcggcactgggagaaacacacctgtgtcacattcattgagcggagtgacgaagaatcatatattgtcttcacctaccgcccatgcgggtgttgctcatacgttggcaggcggggaaatggaccacaagccatcagtatcggcaagaactgcgataagtttggcatagtagtccacgagctgggacacgttatcggattctggcacgaacacactaggcccgacagggataaccacgtcacaattatccgcgagaatatccaaccgggacaggagtataatttcttgaaaatggagccaggcgaagtaaattccctcggtgagcggtatgacttcgatagcattatgcactacgccagaaataccttctcacggggaatgtttctggacaccatcctaccatcccgggatgacaatggtattaggccggcaattggacaacgaacaagattgtccaagggtgatatcgcacaagctcgcaagctctaccggtgccccgcctgtggagagaccttgcaagagtcaaacggcaacctaagcagtcccgggttcccaaatggctatcctagttacacccattgtatctggcgggtatctgtgacaccaggggagaagatagtattaaattttactacgatggatctgtataaatccagcctctgctggtacgattacatcgaagtgagggacggctactggagaaaaagcccccttctgggacgtttttgtggggacaaactccctgaagtcctgacatctaccgattcacggatgtggatcgagttcagaagctctagcaactgggttggaaaaggattcgcagctgtttacgaggccatttgtgggggcgagataaggaaaaacgaagggcaaattcagtcaccaaattatccagacgactatcgccccatgaaggagtgcgtgtggaagatcaccgtgagcgagagctatcatgtggggctcacgtttcaatccttcgagatcgaacgccatgacaactgtgcatacgattatctcgaggtgcgagacggtacatctgagaactccccactcatcgggaggttttgcgggtacgataaaccagaagacattaggtctacatccaatacactgtggatgaaattcgtgagtgacggcaccgtcaacaaggccgggttcgccgctaacttttttaaggaagaggatgaatgtgcaaaacccgatcggggcggatgtgaacagaggtgcctgaatactttaggcagctaccaatgtgcttgtgaacctggttatgaactcgggcccgaccgacgatcttgcgaggctgcctgcggagggctgctcacaaagttaaatggcacaattactacccctggatggccaaaggaataccctcctaacaagaactgtgtttggcaggtcgttgcgcccactcagtatcgtatatccgtaaaattcgagttttttgaactggaaggcaatgaggtttgtaaatacgactacgtagagatctggagcggcttatcgagcgagtccaagctgcatggtaaattttgtggcgctgaggtgccagaggtgatcacttcacagtttaataatatgcggattgagttcaagtcagacaatacagtgtccaagaaggggttcaaggcacatttctttagtgataaagacgagtgcagcaaggacaacggagggtgtcagcatgagtgcgttaacacaatgggttcgtatatgtgtcagtgtaggaatggattcgtgttgcatgacaacaagcacgactgtaaagaagcagaatgtgagcagaagatccactcgcctagcggactgattacatctcctaactggcctgacaaatacccaagccgtaaagaatgcacttgggaaatctccgcaaccccgggtcacaggataaaactggcattcagcgaattcgaaatagagcagcatcaggagtgtgcttacgatcatcttgaggtcttcgacggcgagacagaaaagagcccgatcttggggaggctgtgcggaaacaaaatccctgatcccctcgtggcaaccggcaacaaaatgttcgtaagatttgtcagcgacgcctccgttcaacgcaagggattccaagctactcacagcactgagtgcggcggccggctgaaggctgagtccaaaccacgcgatctgtacagccacgcacagttcggagataataactatccgggacaggtcgactgtgaatggcttctcgtgagcgagaggggcagtaggcttgagctcagcttccagacttttgaggtggaggaggaagccgattgtggatacgattatgtggagttgttcgatggactggattctaccgctgtgggactgggacgcttttgcgggtctggacctccagaggaaatatacagcattggggactccgtcctcattcactttcacaccgatgatactatcaacaagaaaggctttcatattaggtataagagtatccgctatccagataccactcatacaaaaaaatag

SEQ ID NO: 138034 - DNA, 1179 bp, synthetic construct
  misc_feature 1..1179: note = Description of Artificial Sequence: Synthetic coding sequence
  source 1..1179: mol_type = other DNA
atgggtttgggcacactttccccgaggatgctggtgtggctcgtggcgtcaggtatagttttttacggcgaactatgggtctgcgctgggttggactacgactatacctttgacggaaacgaggaggataaaacagaaacaatagactacaaagatccatgtaaagccgccgtgttttggggcgatatcgcgctggacgacgaggatcttaacatctttcagatcgaccgcacaatagatcttactcagaatccttttgggaacctgggtcacaccacagggggcctgggcgaccatgctatgtcaaaaaagcgcggcgccctgtaccagctgatagatcggattaggaggattgggtttggcctggagcagaacaatactgtcaaaggcaaagtgcccctgcagtttagcggccaaaacgagaagaaccgggtgccccgcgccgcaacatcaaggacggaaaggatttggcccgggggcgtgattccctacgttattgggggtaactttacgggttcccagcgggctatgtttaagcaagccatgcggcactgggaaaagcatacctgtgtgaccttcattgaaagatccgatgaagagtcctatattgtgttcacttatcggccctgcggctgctgttcatacgtgggccggagagggaatgggcctcaggccatcagtattgggaaaaactgcgataagttcgggattgtggtccatgaattaggtcacgtcatcggcttctggcacgaacacaccaggcccgaccgggacaatcatgtcacaattattcgtgagaatatccagcccgggcaggaatacaacttcctgaagatggagcccggtgaggtaaattcccttggggagaggtacgacttcgacagtatcatgcactacgctcgcaataccttttctaggggaatgtttctcgatacaatcttgcctagcagagacgataatgggattcgccccgcgattggccagagaacccggctgagcaaaggcgacattgcccaagcccgcaaactctacagatgccctgcttgtggagagaccctccaggagagcaacggaaacctgtcgtctccaggctttccaaatgggtacccatcgtacacacactgtatctggagagtctccgtgacaccaggagaaaaggtagtgtttagcctctgctag

SEQ ID NO: 138035 - DNA, 3048 bp, synthetic construct
  misc_feature 1..3048: note = Description of Artificial Sequence: Synthetic coding sequence
  source 1..3048: mol_type = other DNA
atgccccgagcgacagctcttggggcactggtctccctacttctgttgctccccctgccgcgaggggcagggggactaggagagaggcccgacgcaactgcggactactccgagctggatggcgaggaaggcactgagcagcagctggagcattatcacgatccatgcaaggccgcagtgttctggggcgacatcgccctggacgaggatgacttaaaactcttccacatcgacaaggctagagattggaccaagcagaccgtcggtgccacaggacacagcaccggggggctcgaagagcaggcctctgagtctagtccagacaccacagctatggacacgggaaccaaagaggccggcaaagatggcagagaaaatacaaccctgctgcacagcccaggtacactccatgctgcagcgaagacattctccccccgggtgcggagagcaaccaccagtagaacagagcgtatatggcctgggggggtgatcccatacgtaatcggtgggaacttcactggatctcaaagggctatatttaaacaggccatgaggcactgggagaagcacacctgcgtgactttcatcgaacggacagacgaggaatccttcattgttttctcctacaggacgtgtggctgttgcagttatgtgggccgccggggaggtggtccacaagcaatcagcataggcaaaaattgtgataagtttgggatcgtcgctcacgagcttggtcacgtcgtgggattctggcatgagcacaccaggcccgacagggatcagcatgtaaccataataagggagaacatacagcccggacaggaatacaacttccttaaaatggaagcaggagaggtgagcagccttggggagacctatgactttgactcaattatgcactacgcccgaaacaccttctcccggggagtgttcctcgataccatacttcctaggcaggatgacaacggcgtccgtcccacaatcggacaaagggtgcgactctcacaaggggatattgctcaagctcgaaagctttacaagtgccccgcctgtggcgagacactgcaggataccacagggaattttagcgcaccagggttcccgaatgggtacccctcatattcccactgcgtgtggcgcatatctgttacccctggagaaaaaattgtgctcaatttcacctcaatggatctgttcaaatcccgcttgtgttggtacgattatgtcgaagtgcgggatgggtactggagaaaggccccactgctcggacgcttttgtggcgataaaatccccgagccactggtgagtaccgacagcaggctttgggtggagttccggtcgtcttctaatatcctaggaaagggattttttgccgcctacgaggccacatgcgggggcgatatgaataaagacgctggacaaatccaatcccccaattatcccgatgactaccggcccagcaaggagtgtgtttggcggattactgtgtccgaggggtttcacgtggggctgacgttccaagcttttgagatagagcgccacgattcttgtgcatatgattatctggaagtccgcgacggaccaaccgaggagtctgctctaatcggacatttttgcggatacgagaaacccgaggatgtgaagtcatctagtaatcggctgtggatgaagtttgtgtcggatggatcgatcaataaagccggcttcgctgctaacttcttcaaggaagtcgatgaatgtagttggcctgatcacggaggctgcgagcaccggtgcgtgaatacactgggatcgtacaaatgtgcttgcgaccccgggtatgagcttgctgccgacaagaagatgtgtgaggtggcctgtggaggattcatcacgaagctgaatggaacgattacctcccccgggtggcccaaagaatatccgacaaataaaaattgtgtgtggcaggtagtcgcccctgctcagtatcgtattagcctacagtttgaagtgttcgagttagagggcaatgacgtctgcaagtatgacttcgttgaagtgcgatccgggctttcccctgatgcaaaactgcatgggagattttgtgggtccgaaactcctgaggtcattacttctcagtctaataacatgcgagtcgaattcaaaagcgataatacggtctcgaagcgcggatttagagcccacttcttttctgacaaggatgagtgtgccaaggataatggcggatgccaacacgagtgcgtcaacacatttggctcatacctctgtagatgccggaatggctattggcttcacgagaatggccatgattgcaaagaggcaggctgcgctcacaaaattagctcagtagagggaacactcgcaagtccaaattggccggataagtacccctcacgcagagagtgtacatggaacatctcctccaccgcaggacacagggtgaagcttactttcaacgagttcgagattgaacaacatcaggaatgcgcctacgaccatttggaaatgtatgatggccctgactctctggctccaatcttgggacgcttctgtggaagcaaaaagcctgacccaactgtcgctagcggaagtagcatgtttttacgattctactccgacgcctcagtgcagcgcaaggggttccaggccgtacacagtaccgagtgcggaggtcggctcaaggccgaggtccagacaaaggagctgtattcacacgcgcaattcggggataataattatccttccgaagccagatgcgattgggttattgtggctgaggacggttatggtgtggagctgacctttagaacattcgaggtagaagaagaggctgattgtggctacgattatatggaggcctacgacggctacgatagtagcgctccaagacttggcaggttttgtggatccggccccctggaggaaatctacagcgctggagattccttgatgataaggttccgaaccgacgatacaataaataagaaaggattccacgctcgatacacaagtaccaaattccaggacgctttacacatgaagaagtag

SEQ ID NO: 138036 - DNA, 2298 bp, synthetic construct
  misc_feature 1..2298: note = Description of Artificial Sequence: Synthetic coding sequence
  source 1..2298: mol_type = other DNA
atgtccggcgatcacttgcacaacgattcacagattgaagcagatttccggctgaatgatagccacaaacataaagataagcacaaagatagggagcatcgtcataaggagcacaaaaaagaaaaagatagggagaaaagcaagcattcaaactccgaacataaagactcagaaaagaagcacaaagagaaagaaaaaacaaaacacaaggacggcagctctgaaaagcacaaagataagcataaggatagggataaggagaagagaaaggaagaaaaggtacgagccagtggggacgcaaagattaagaaggaaaaggagaacggcttttcctctcccccgcagatcaaggatgagcccgaggacgatggttacttcgtgcctcccaaagaagacattaagccattgaaacggccccgcgatgaggacgacgccgattataagccgaagaagatcaagaccgaagacactaagaaggagaaaaagcgcaagctggaggaggaagaggacggtaagttaaaaaagccaaaaaataaggacaaggacaaaaaggtgccagagcctgacaacaaaaaaaaaaaaccaaagaaagaggaggagcagaagtggaagtggtgggaggaagaaagatatcctgaggggataaagtggaaatttttggagcataaaggtccggtctttgctccaccttacgaacccctccccgagaacgttaaattctactatgacggcaaagtcatgaagctgagccccaaagcagaggaagtggctaccttttttgcaaaaatgctggaccacgaatacaccactaaggagatctttcgaaagaatttcttcaaagactggcgaaaggaaatgaccaatgaggagaagaacatcattactaatcttagcaagtgcgacttcactcagatgtcccagtactttaaggctcagacagaggcgcgcaaacagatgagcaaggaagagaagctgaagattaaggaggagaatgagaaactcctcaaggagtatgggttctgcatcatggataaccataaggagaggattgccaattttaagatcgagccacctgggctgttcaggggacggggaaatcaccctaagatgggaatgctgaagcgccgaataatgcccgaagacatcataatcaattgtagtaaagacgcaaaggttccaagtcctccccctggtcacaaatggaaggaggttagacacgacaacaaggtcacttggctcgtttcctggacagaaaacatccagggaagcattaagtacataatgctgaatccttccagtagaattaagggcgagaaagactggcagaagtacgagacagcacgtcgactgaagaaatgtgtagataagattcgaaatcaatacagagaagactggaagtctaaagagatgaaagtgcgacagagggctgtcgctctgtactttattgataaactagcactgagagcaggcaacgagaaggaagagggcgagaccgccgacacggtgggttgctgctccctgcgtgtggagcacatcaatctgcacccagagcttgacgggcaggagtacgtggtggaatttgacttccttgggaaagacagcattcgttactataataaagtgcccgtcgaaaagagggtgttcaaaaacctgcagttgtttatggaaaacaaacagccagaagatgacctgttcgatcgactcaatactggcattctcaacaagcatctccaggatttgatggaaggacttacagcaaaagtgttccgcacgtacaatgcaagcatcacactgcaacagcaacttaaggagctgaccgctcccgacgagaatataccggccaagattttaagctacaaccgggctaatcgagccgtggctatcctatgtaatcatcaacgcgccccacctaagacattcgagaaatccatgatgaacctgcaaacgaaaattgatgcaaagaaagagcagctagctgacgctcgccgagatctgaagagcgccaaggccgacgccaaggttatgaaagatgccaaaacaaaaaaagtggtagagagtaagaagaaggcagtacagcgcctggaggaacagctgatgaaacttgaggttcaggcaactgatcgcgaagagaacaagcagattgcacttggaacttctaaactgaactacctggaccctcggattactgtggcctggtgtaagaaatggggagtcccgatcgaaaaaatttataataagacacagcgagaaaagttcgcctgggcgattgacatggctgacgaggattatgagttttag

SEQ ID NO: 138037 - DNA, 1806 bp, synthetic construct
  misc_feature 1..1806: note = Description of Artificial Sequence: Synthetic coding sequence
  source 1..1806: mol_type = other DNA
atgagagttgtgagattgctaaggctgagggcagccctcacacttcttggggaagtaccccgacggccggctagccgcggcgtccctggcagtaggcgaactcaaaaaggatctggcgctaggtgggagaaggaaaagcacgaggacggggtgaaatggcgccagctggaacataaagggccatacttcgcccccccgtacgagcctctgcctgacggagtgcggtttttctatgagggacgccccgtccgactttctgtggcagcggaggaggtggccaccttctacggaaggatgctggaccacgagtacactaccaaagaggtgtttagaaaaaatttcttcaatgactggcgcaaagagatggctgttgaagagcgagaggtgattaaatctttggataagtgcgacttcacagagattcacaggtacttcgtggacaaagctgctgcacgcaaggttctctcacgggaggagaagcagaaactgaaagaggaagcagaaaagctccagcaagaatttggctattgcattctggatggacatcaagagaaaatcggaaacttcaagattgaacctccgggactttttcgaggtcgaggggaccatcccaagatgggtatgttaaaaagacggatcaccccagaagatgtcgtgatcaactgtagcagagactcgaaaatcccagaacctcctgccggacatcagtggaaagaggtacggagcgacaacacagtgacttggttggccgcctggaccgaaagtgttcagaattcaattaagtacattatgctgaacccgtgttcaaagctcaaaggagaaactgcttggcagaagtttgagactgcacgtcgtctgaggggatttgtggacgagattcgaagccagtacagggccgattggaagtcaagggagatgaagacgagacagagagccgtggccctgtatttcatcgataagctcgcacttcgtgccggcaacgaaaaagaagacggggaggccgcagatacagtgggttgctgtagcctgagagtggagcacgtccagttgcaccctgaagccgacgggtgtcagcacgtcgtcgaattcgatttcctgggtaaggactgtatccgctattacaacagagtcccagtcgaaaagccagtttataaaaatctccagctttttatggaaaacaaggacccccgcgatgatctgtttgataggttaacaaccacatcattgaacaagcatttacaagaactgatggatgggttgaccgccaaagttttcaggacatataacgcctccatcaccctccaagagcagctgagggccctgacacgggctgaggactcaattgcggccaaaatactgagctataaccgggcaaatcgggtggtggctatactatgtaaccaccagagggctactccgtctactttcgaaaagagcatgcaaaacctccagaccaagatccaggccaagaaagaacaagttgcggaagcaagggcggagcttcggagagcccgggcagagcataaggctcagggtgatggcaagagcagaagtgtgctcgagaagaagcgcagattattggagaagctgcaagaacagctggcgcagttgtccgtgcaggctaccgataaggaagagaacaaacaggtcgcattgggcacctcgaaactcaactatctggatccgcgcatctcgatcgcctggtgcaagcgatttcgggtccccgttgagaagatctactctaagacccagagagaacggttcgcctgggctttggctatggcaggtgaggacttcgagttttag

SEQ ID NO: 138038 - DNA, 1512 bp, synthetic construct
  misc_feature 1..1512: note = Description of Artificial Sequence: Synthetic coding sequence
  source 1..1512: mol_type = other DNA
atgctggaccatgagtacactacaaaggaagtcttcagaaaaaatttctttaatgactggaggaaggagatggccgttgaggaacgcgaagtcattaaatctcttgataagtgcgattttactgaaatacaccgctatttcgttgataaagcagccgcccggaaggtgctgagtcgagaggagaagcagaagctcaaggaagaggcagagaaactgcagcaggaattcggctactgcattctcgacggacaccaggagaagattgggaattttaaaattgagcctcccgggttgtttagagggaggggggaccacccaaagatgggtatgctcaagagaaggattacaccggaggatgtagtgattaattgctcacgcgatagcaagatccctgaacctcctgcgggccatcaatggaaagaggtgaggtctgacaataccgtgacttggcttgcggcatggactgaatccgtgcagaattcgattaaatatattatgctgaacccttgttctaagctcaaaggcgagaccgcgtggcagaagtttgagactgcaaggcgcctgagaggctttgttgacgaaattcgctctcaatatagggccgactggaagagtcgggaaatgaagactcggcagagggctgtggccctgtatttcatcgataagctcgccctgagagccggcaatgagaaagaggatggtgaggccgccgatacagtgggctgctgttcgctccgcgtggaacacgtccaacttcaccccgaggccgatggctgtcagcatgtggtggaattcgacttcttaggaaaggattgcatacgctattacaatagagtgcccgtggagaaaccagtttacaagaatttgcagctctttatggaaaataaggacccacgcgatgacctattcgaccgacttacaacaacctctctaaacaaacatctgcaggaactgatggatggcctcaccgcaaaggtgtttagaacgtataatgcttcaatcacactgcaggaacagcttcgggctcttacccgcgccgaagattctattgccgccaagatcctgagttacaaccgcgcaaatcgagtggtggcaattctgtgcaaccaccagagggcaacccctagcaccttcgagaagtctatgcaaaatttacagacaaaaatacaggcaaagaaggagcaagttgcggaggcacgcgctgagttgcggcgggccagagccgaacacaaagcccagggggatggaaagagtcggtccgttctggagaaaaagcggagacttctggagaagctccaggaacagttagcccaactgagcgtccaggctactgataaggaggaaaacaaacaggtggctcttggcactagcaagctcaactacctggatccacgaatcagcattgcatggtgcaaacggtttcgggtccccgtcgagaaaatttactccaagactcaaagagagcggttcgcatgggctctcgccatggctggcgaggattttgagttttag

SEQ ID NO: 138039 - DNA, 1512 bp, synthetic construct
  misc_feature 1..1512: note = Description of Artificial Sequence: Synthetic coding sequence
  source 1..1512: mol_type = other DNA
atgttggaccacgagtacaccacaaaggaagtgttcaggaagaatttctttaacgattggcgcaaagagatggcagtggaggaacgagaagtgataaagtctctcgacaagtgcgatttcacggaaatccaccgatactttgtcgataaggcggccgcccgcaaggtgctctcccgcgaggaaaagcaaaagctcaaggaagaagctgagaagctgcagcaggaattcggatactgcattctcgacggccatcaagaaaaaatcggcaatttcaaaattgagcctcccggactgttccgtggacgtggcgaccatcctaagatgggtatgttgaagaggcggattactcccgaagatgttgtgataaactgtagccgcgactctaagattcccgagccaccggctggccatcagtggaaggaggtaagatcagataatacagtgacatggcttgccgcctggaccgagagcgttcagaactccattaagtatatcatgctgaacccctgcagcaagttaaagggggaaacagcctggcaaaaatttgaaaccgcgcgccgcctccggggttttgtggatgagatccggagccaataccgggcagattggaagagcagagaaatgaagactagacaacgggctgtggcattgtatttcatagacaagctggcactgcgggccggcaatgaaaaagaagatggagaggccgctgacacagtaggatgctgctccctgagggtggagcacgtccagttacatcccgaagcagatggatgccagcatgttgtggagttcgatttcctgggcaaggattgcatccgttattataatagagtcccggtggagaaacctgtctataagaatctgcagctcttcatggagaacaaggatcctcgagatgatctgttcgaccgtcttacgaccacctctttaaataagcacctgcaggaattaatggatggcttgactgccaaggtgtttcggacttacaatgcgagtataacactccaggagcagcttcgcgccctaacccgggcggaagattccatcgccgcgaaaatcctctcttataacagagccaacagagtggtcgccatcctgtgtaaccaccagcgcgcaactccgagcacgtttgaaaagtctatgcaaaacctacagaccaaaattcaggccaagaaagaacaagtggctgaagctcgcgccgagcttcgccgggcgagggcagagcataaggctcagggcgacggaaaatctcggtctgttctggagaagaagcggcggctgctggagaagttgcaggagcagctggcacagctgagcgtccaagccaccgataaggaggagaataagcaagttgccctgggaacaagtaagttaaactatctggacccaagaatctctatagcatggtgtaagcggtttcgcgtgccggtggaaaagatttactctaaaacacaacgggagcgcttcgcatgggccctggcaatggccggagaggactttgaattctag

SEQ ID NO: 138040 - DNA, 1512 bp, synthetic construct
  misc_feature 1..1512: note = Description of Artificial Sequence: Synthetic coding sequence
  source 1..1512: mol_type = other DNA
atgctggatcatgaatacacgactaaggaggtgtttcggaaaaatttcttcaatgattggaggaaagagatggctgtcgaggaacgcgaggtcataaagagtctggataagtgcgacttcactgagatccatcggtacttcgtggacaaggcagccgcgcgaaaagtcctgagtcgcgaggagaagcagaagctgaaggaagaagccgagaaactccaacaggaatttggttactgcatacttgatggacaccaggagaagatcggaaatttcaagatcgaacctcccggcctgttccgcggcagaggagaccaccctaagatgggtatgctcaagaggcgtataaccccagaggacgttgtcattaactgcagtcgggattctaagatcccagaacctcccgccggacatcagtggaaggaggttcggtcagataacacggtgacatggctggccgcttggaccgaatcagtgcaaaattccatcaagtatatcatgttgaacccctgctccaagctcaaaggtgagactgcttggcagaagttcgaaacggccaggagactccgcggattcgtggatgaaattagatcccagtaccgggcggattggaaatctcgggagatgaaaacacgtcagcgagctgtcgccttatactttattgacaaactcgctttacgggcgggaaacgagaaggaggatggtgaagccgccgatactgtgggctgctgtagtttacgggtcgaacacgtccagctccacccagaggctgacggctgccaacatgtcgttgagttcgacttcctgggaaaggactgcatccggtattataatcgcgtcccggtggaaaaacccgtttacaaaaacctccagctctttatggaaaacaaagacccccgggacgatcttttcgaccgcctgacgaccacatctctgaacaaacatttgcaggaactgatggatggactcaccgcaaaggtcttccgcacctacaacgcaagcatcacactgcaggaacaactacgggccctcactagggccgaggacagtatcgcagctaagatcctttcctataatcgcgctaacagagtcgtcgctatcctctgtaatcatcagcgcgccactccctcaacctttgaaaaatctatgcagaatctccagacaaagatccaggcgaagaaagaacaggttgctgaagcacgtgccgaactcaggagagcccgcgccgagcacaaggcccagggggacggtaagtctaggagcgttctagagaagaagcgtaggctgcttgagaagctgcaggagcagctggcacagctgtcggttcaagcaaccgataaggaagaaaataagcaggttgcgctgggaactagtaagctgaattacttggacccccggatatccatcgcatggtgtaagcggttccgcgtcccagtcgaaaaaatttattctaagacccagcgagaacggttcgcctgggcactggcaatggccggagaggatttcgaattttag

SEQ ID NO: 138041 - DNA, 4569 bp, synthetic construct
  misc_feature 1..4569: note = Description of Artificial Sequence: Synthetic coding sequence
  source 1..4569: mol_type = other DNA
atgtctcgtaacgataaggaaccattcttcgtgaagttcctcaagagctcggataactccaagtgttttttcaaggcgctggagagcataaaagaatttcagagcgaggaatatcttcagattataaccgaggaagaagcgctcaaaattaaagaaaacgacaggagtctgtacatttgcgacccattcagcggggtcgtttttgaccacctgaaaaaactgggttgtcgaatcgtcggccctcaggtagtcatcttttgtatgcaccaccagaggtgcgtgccaagagctgagcacccggtctataatatggttatgtctgacgtgacgatcagttgcacatcccttgagaaagaaaaacgggaggaagttcataaatatgtccagatgatgggtggccgggtgtacagggatctaaacgtttcagtcacacacctgatcgccggtgaggtcggaagtaaaaaatatctggtcgcggcaaacctgaaaaaaccgattctcctacccagttggatcaaaactctttgggagaagtcacaggagaagaagatcacgagatacactgacataaatatggaagattttaagtgccctatcttcctcggctgtatcatctgtgtgactggcctatgtggcttagataggaaagaggtccagcagttaaccgtcaaacacggcgggcagtacatgggtcaactcaagatgaacgagtgcacccatttgattgtccaagaaccaaagggccagaaatatgaatgtgccaaaaggtggaatgttcactgcgtcaccacccagtggttctttgactctatcgaaaaaggattttgccaggatgagagtatctacaagacggagccccgaccagaagctaagacaatgcccaactcgagtacccccacttcccaaattaataccatcgacagcaggactctgtccgacgtgagcaacatttccaatatcaatgcttcctgtgtttccgagtcgatctgcaactctttgaattcaaagctagaaccgacactggaaaatctggaaaacctggacgtgagcgcctttcaagcccctgaagaccttcttgacgggtgccggatctacttgtgtggattcagcggacgcaagttagacaagttgcggcgcctgatcaattctggtggcggcgtgagatttaaccagctgaacgaagatgttacccatgtaattgtaggggactacgatgatgaactcaaacagttttggaacaagtctgcacaccgaccacatgtggtcggcgctaagtggctcctcgagtgctttagcaaaggctacatgcttagtgaagagccatatattcacgccaattatcagcctgtagaaataccagtgtcacataagcctgaaagcaaagcagcccttcttaagaagaagaatagtagctttagcaaaaaggatttcgccccctccgaaaaacacgaacaggctgatgaggacctcttaagtcagtacgaaaatgggtcttcaacagtcgttgaggcgaagacttctgaagctcggcccttcaatgactctactcacgcagagccattaaatgacagtactcatatctctttacaagaggagaaccaaagttcggtgagccactgcgtgccagacgtctctactattaccgaagagggccttttcagtcaaaagagcttccttgttctgggtttttcgaacgaaaatgagagtaatatcgccaacattatcaaggagaatgccggtaaaattatgagtctgctctccagaacagtcgcggattacgcagtggttccactacttgggtgcgaggtggaggccacggtgggtgaggtagtaacaaatacctggctcgtaacctgtatcgactatcagactctctttgacccaaagtcgaatccgctgtttactcctgtacccgtgatgacggggatgactcctctagaggactgtgtgatctctttttcccagtgcgccggtgctgagaaagagtcgctcacctttctggcaaatttactgggcgcatccgtgcaggagtatttcgttaggaaatccaacgctaagaaaggaatgttcgcatcgacccacctgatcctgaaggaacgcggcggctccaaatacgaggccgccaaaaaatggaacctgccagcagtgaccatagcctggctcctggagaccgcccggactggtaaaagggctgacgagagccatttcctgatagagaactccactaaagaggagagatccctggaaaccgagattacaaatgggatcaatctgaactctgatactgcagagcatcctggcaccagactccagacacaccggaagacagttgtgactcctctggacatgaataggtttcaatctaaggcgtttcgggcggtcgtgtcccaacacgcacggcaagtggccgctagcccggccgtaggacagccactacaaaaggaaccctcactgcacttagatactccaagtaaatttctgagcaaggataagttattcaagcccagctttgacgtgaaggatgctcttgctgccctggaaacccccgggaggccatcacagcagaagagaaaaccatccacacccctgtcagaagtgattgtgaagaatttgcagttggccctggcaaatagtagtcggaatgccgtagctctgtcagcatcaccccagctgaaagaggcccagtccgaaaaggaagaggcaccaaaaccactgcacaaagtggtggtgtgcgtatcaaagaagctgtcaaagaaacagtccgagctaaatggcatcgccgccagtctgggcgctgattatcgctggtcgtttgacgagactgtcactcacttcatttatcagggacgtcctaacgacaccaaccgggagtataagtctgtgaaagagcgcggcgtgcatatcgtgtcagagcattggcttttggattgcgcccaggagtgtaagcatctgcccgagtcactgtacccccatacctacaatcccaagatgagcttggacatcagtgccgtgcaagacggtagattgtgtaatagccgtctgctgagtgcagtttcatcgactaaagacgacgaaccggatcctctgattcttgaggagaatgacgtggacaatatggctaccaacaataaagaatcggccccttctaacggctctggtaaaaacgactctaagggcgtccttactcagaccttggagatgagagagaactttcaaaagcagctgcaggaaatcatgtccgcaacttccattgtgaaaccccaggggcaaagaactagcctgtccagatccggatgtaatagtgccagttccacacccgatagcactaggtctgcacggtcgggacgcagtcgggttttagaggctctgcgccagtcacgacagacggttcccgacgtgaatactgaaccgtcccagaacgaacagatcatatgggacgatccaaccgcaagggaggagagggctagactcgccagcaatctgcagtggccctcttgtcctactcaatactcagagctccaggtggatatccaaaatttggaggatagtccatttcagaagcctctccacgacagcgaaattgctaagcaagcagtttgcgatcccggtaacatcagggtgactgaggctcctaaacatccaatttctgaggagttagaaacaccaatcaaggattcccacctgatccccacgccgcaggcgcccagcatcgcattccctcttgctaacccccccgtggcaccccacccgcgggaaaagattattactattgaagaaacacacgaagagttgaagaagcaatacatattccaattgtctagcctgaaccctcaggagagaatcgattactgccacttaatcgagaagttaggaggcctagtgatcgagaaacagtgttttgatccgacctgtacacatattgtggttggtcatccattgcgcaatgaaaagtatctggctagcgtggctgccggtaaatgggtgctacaccgttcgtatctggaggcctgccgaaccgcaggtcatttcgtgcaagaagaagattatgagtgggggtcttcctcaatactagatgtcttaaccggaattaatgttcaacagcggaggctggctcttgctgcaatgcgctggcgcaaaaaaattcagcaaaggcaagagtccggcatcgtggagggcgcattttccggttggaaagttatacttcatgtcgatcagtcacgcgaagccggatttaagagattgcttcagtccggaggcgctaaggttttgcccggacactccgtgccgctgtttaaagaggcaacacatcttttctcggatcttaacaaactgaagcccgatgatagtggcgtgaatattgcggaagccgccgcccagaatgtatattgtctgaggactgaatacattgccgattacctcatgcaggaatcccctccacacgtggaaaattactgcctacccgaggccatatccttcatccagaataataaggaactcggcaccggactaagccagaagcggaaagcgcctaccgaaaagaacaaaatcaaacggccacgggtgcactag

SEQ ID NO: 138042 - DNA, 3138 bp, synthetic construct
  misc_feature 1..3138: note = Description of Artificial Sequence: Synthetic coding sequence
  source 1..3138: mol_type = other DNA
atggggagccagcctcccctgggcagcccgctttcccgcgaggagggggaagcccccccccctgctcctgcatcagaggggcgcaggcgcagcaggcgggtgaggctacgggggagctgcagacatcgtccttcctttctgggttgccgcgaactggctgccagtgcccctgcaaggcctgccccagcctcatccgaaattatggcatccgccgcgaaggaattcaaaatggataattttagtcccaaagcaggcaccagcaagctccaacaaactgtgcctgccgacgcatcgccagattctaaatgccccatttgtctcgatcggttcgataacgtgtcataccttgacaggtgtttgcacaaattctgcttccgttgtgttcaagaatggtccaagaacaaagctgaatgccctctttgcaagcaaccttttgactcaatattccacagtgtgcgggcagaggatgatttcaaggaatacgtactacgaccatcctacaacggcagcttcgtgacccccgaccgtcggtttagatacaggactacactgactagagagcgcaacgcgtctgtatacagcccttccgggcctgttaacaggagaactacaacacccccggactcaggagtgctctttgagggattgggtatctcgacaaggcctagggacgtcgaaattcctcaatttatgaggcagatcgctgtccggaggccgacgacagctgatgagcgcagcctccggaagattcaggagcaggatatcatcaacttccgcaggactctctatagggcgggtgccagggtgaggaatatcgaggatggcggtcggtaccgtgatatctccgcagagttctttcgacggaatcctgcttgtctgcaccgtttggtgccgtggttaaaacgggagctgacagtgctgtttggtgcacatggcagcctcgtcaatatagtgcagcatatcattatgtccaatgtgaccagatatgatttagaatctcaggcctttgtaagtgatctgcgcccatttctgctaaacagaacagagcatttcatccacgagtttatcagtttcgccaggtccccctttaatatggcggctttcgatcagcatgccaattatgattgccctgctccctcatacgaagagggatctcatagcgatagcagtgttatcacaatcagccctgatgaggcagagacgcaagaactggacatcaatgtagcaacagtgagccaggccccctgggacgacgaaactcccgggccttcctacagcagttccgaacaggtgcatgtaaccatgtcttcgttactgaatactagtgattcatccgatgaagaactggtcactggcggagcaacttcccagatccagggggtgcagaccaacgacgatttaaacaatgactcagacgactcttcagacaattgtgtgatcgtggggtttgtgaaacctctagctgagaggaccccggagcttgtggaactcagctccgactctgaagatcttgggagttacgaaaaaatggaaaccgtgaagacccaggagcaggagcagagttatagtagtggagattccgatgtaagtagatgctcctccccccactcagtgctggggaaagatgagcagattaataaaggccattgcgactcttccaccagaattaaaagcaaaaaagaggaaaagaggtctacctcactctcatcccctcgaaatcttaactccagtgttcgaggagatagagtttactccccctacaatcatagacaccggaaacgcgggagatcccgttcctctgattcccgcagtcagagcagatccggacacgaccagaagaatcaccgtaaacaccacgggaaaaagcgaatgaagagcaagcgatcacggtcgagggagagcagtagaccaagaggccgtagagataagaagcgcagcaggactagagattccagctggtcccgtcggtcacagactttgtccctctcttctgaatccacgtcgaggagtaggagcagatcctccgatcacggaaagaggcgatccaggtcaagaaatcgggacagatattacctcaggaacaactacgggtctcggtacaagtgggagtacacttattactctcgaaacaaagaccgggacggttacgaatcatcatacaggcggcgcaccctctcacgggcacactatagccggcagagcagctctccagagttcagggtacagtcatttagcgaaagaactaacgcacgtaagaagaacaaccacagcgaaagaaagtattactattacgagcgccaccggagccgctcattgagcagcaaccggtctaggactgcttctaccggcactgatagagttaggaacgagaaacccggcggaaagagaaagtacaagactagacatctggaggggaccaatgaagtggctcaacccagtagagaattcgcatctaaagctaaagatagtcattatcagaaatcgagttccaaactagacgggaactataagaacgagagtgacaccttctctgattcccgatcttctgacagggaaactaagcacaagcgaaggaaacgcaagactcgctccctgagcgtggagattgtgtacgaaggcaaggccacagacacgacaaagcaccacaagaaaaagaagaagaaacacaaaaaaaagcacaaaaagcaccatggagataatgcatccaggagcccggtcgtgattactatagacagcgatagtgacaaggattctgaagtgaaggaggacacagaatgcgataattccggtcctcaggaccctctgcagaatgagttccttgccccatcactcgaaccctttgaaaccaaggacgtagtaaccattgaggccgagttcggcgtcctagacaaagagtgcgacattgccaccttgagtaacaacctcaataatgctaataaaactgtggacaatattcctcccctggcagcaagcgtggagcaaacattggatgtgcgagaagagtcaactttcgtttcagatcttgaaaaccagccgtcaaatattgtctctttacagactgagccttcaaggcagctgccttcaccccggacgtccctgatgagcgtctgcctcggccgggattgcgacatgtcctag

SEQ ID NO: 138043 - DNA, 2943 bp, synthetic construct
  misc_feature 1..2943: note = Description of Artificial Sequence: Synthetic coding sequence
  source 1..2943: mol_type = other DNA
atgatcatggcatcagctgcaaaagaattcaagatggacaacttttccccaaaggccgggacaagtaaactgcagcagacggtgccagcagacgcttccccagactcaaagtgcccaatatgcctggacagattcgataatgtctcttacttagaccgctgtctgcacaagttctgctttagatgcgttcaggagtggagcaagaataaagcagaatgtccactgtgcaaacagccctttgactccatattccactcagtgagggcagaggatgattttaaagaatatgtcctcagaccttcatacaacggttcttttgttaccccagatagaagattccgctacaggaccaccctgacgcgggaacggaacgcctcggtgtacagcccgagtggccctgtcaacaggcggacaaccaccccccctgattcaggagtgcttttcgagggattgggcatctcaactcgacccagagacgtggaaatcccccagtttatgagacaaattgccgtgcggaggccaaccaccgctgatgaacgctccctgaggaagattcaggagcaggacatcatcaatttcagacgaacactgtacagagcaggggctagagtgcgcaatatagaagatggcggccgctatagagacatctccgcagagttttttagaagaaaccctgcctgcctgcatcggctcgtcccctggctgaaacgcgaactgactgtgctgtttggcgcacacggatccctagtaaacatcgtgcagcacatcataatgagcaacgtgactagatatgatcttgaatcacaggcctttgtcagcgacctgaggccatttttactcaatcggacggaacattttatacacgaatttatttcttttgctaggtctccctttaatatggctgcgttcgatcagcacgctaactacgactgccctgctccaagttacgaggaagggtctcatagtgactcttcagtcataaccatctcacccgacgaggcagagacccaagaactcgacattaacgtggcaactgtgtcgcaggccccgtgggatgatgagaccccagggccctcttactcatcctcagagcaggtccacgtgactatgtccagcttgctgaacacttctgattcaagtgatgaggagctagtgacaggcggagccacatctcaaatccagggagtgcagacaaatgacgatttaaacaatgactccgatgatagctccgataattgtgttattgtgggcttcgttaaaccgctagcagagaggactcctgagctggttgagctcagttcagactccgaggatctgggaagttatgagaaaatggaaaccgtgaagacacaggagcaagaacagagctatagttccggagatagcgacgtgagtcgttgcagcagtccccactccgtcctgggaaaagacgagcagatcaacaagggccattgcgacagctctacacgcattaagtcaaagaaagaagaaaaacggagtacctccctcagctcaccccgaaatttaaattcctcagtgcgcggggatcgtgtatatagtccatacaaccacagacatagaaaacgcgggcggagccgttcttccgacagccgttctcagtccaggtcgggccatgatcaaaaaaaccatcggaaacatcatggtaagaagcgcatgaagtcaaaaagaagcagatcccgtgagtcatcccgcccacggggtaggagagataagaagcgctcgcgtacgcgcgacagcagttggtcacgacggtctcagaccctgagcctgtcatccgagtcgacctcgcgcagcaggtctaggtcctcagatcacgggaagcggcgcagcaggtcgagaaaccgagaccggtactacctgcgtaacaattatgggtctcggtataagtgggagtacacctactacagccggaacaaagacagggatgggtacgagtcaagctatcgcaggaggactcttagccgtgcccactacagcaggcagtcaagctcaccagagttccgcgtccaaagcttttcagagaggactaacgccagaaagaagaacaaccactctgagcggaagtattattactatgaacgtcacaggagtagaagcttatccagcaatcgctcacgaacggcaagtacaggtaccgatcgcgtgagaaacgagaagcctgggggcaagaggaagtataaaacacgtcatctggagggcaccaatgaggtggcccaacctagtcgcgagtttgcttcgaaagccaaggattcccactatcagaagagctccagtaaactagatggaaactacaaaaacgaaagtgatacattctcggacagtcgttcttctgacagagagacgaaacataaacgccggaagcggaagacacggtcactgtccgtggagatagtctatgagggcaaggctaccgatacaacaaagcaccataagaaaaagaagaagaagcacaagaagaaacataaaaaacaccatggtgataacgctagcagatctcctgttgtcatcactatagatagcgattctgacaaagatagtgaagtcaaagaagacacagaatgcgacaacagcggcccacaggatcccctgcagaatgagtttctggccccaagcctcgagccttttgagactaaagatgtggtgactattgaggccgaattcggcgttttagacaaggagtgcgatatagccaccctgtctaacaatctgaataatgcaaacaaaacggtcgataacattcccccactagccgcgtctgtggaacaaaccctggacgtgcgggaagaatcaacgttcgtatcggatctggaaaatcaaccttcaaatatcgtgagcttgcagacagagcctagcaggcaactgccgagtccacggacgagtcttatgtccgtctgtctaggccgcgactgtgacatgtcgtag

SEQ ID NO: 138044 - DNA, 999 bp, synthetic construct
  misc_feature 1..999: note = Description of Artificial Sequence: Synthetic coding sequence
  source 1..999: mol_type = other DNA
atgaagctaggtcgggctgtgctgggactgctacttctcgcgcctagtgtggttcaggctgtggaaccaatcagccttgggctggcccttgctggagtgctgaccggatacatttatcccagactgtattgcttgttcgccgagtgctgtgggcagaagcggagccttagccgtgaagctttacagaaagacttggatgacaatctctttggccagcatctcgcaaaaaagatcatactcaatgccgtcttcggattcatcaataaccctaaacccaaaaagccattaaccctgtccttacacggttggaccggcaccggaaaaaacttcgtgtcaaagatcatcgccgaaaatatctatgaaggcggtctgaattcagattatgtgcatctcttcgtggctacgttacactttccccacgcctctaatatcactctgtataaagatcagttacaactgtggatacggggtaatgtctctgcgtgtgccaggagcatatttatcttcgacgagatggataaaatgcatgccggtttaatagacgctataaagccattcctcgattactacgacctcgtcgatggtgttagttaccagaaagctatgttcatcttcttgagcaatgcaggagctgagcggatcactgacgttgccctcgatttctggcgaagcggcaaacagagggaagacattaagctaaaggacattgaacacgcactttccgtgagcgttttcaataacaaaaattctgggttctggcacagttccctcatcgatagaaatctgatcgattatttcgtgcctttccttccattagagtacaaacacctcaaaatgtgcattagagtggaaatgcaatccagaggctatgaaatcgacgaagacatcgtgagccgggtcgccgaggaaatgaccttctttccaaaggaagagagggtgttctcagacaaaggttgtaaaaccgtcttcacgaaactggactactattacgacgactag

SEQ ID NO: 138045 - DNA, 906 bp, synthetic construct
  misc_feature 1..906: note = Description of Artificial Sequence: Synthetic coding sequence
  source 1..906: mol_type = other DNA
atgaaactcggtcgagccgtactaggactcctgttgctggcccccagtgtcgtacaggctgttgaacctatcagcctcggcctggcactggccggggttctcacaggctatatctacccaagactgtactgtctattcgcggaatgctgcggccagaagaggtcccttagcagagaggccctacagaaagatctggacgataatctgtttggtcagcacttggccaagaagattatcctgaacgcggttttcggcttcattaacaacccaaagcctaagaagccgctaacgttaagcttgtttgtggccactctgcactttcctcacgcatccaacattaccctgtacaaggatcagctccagctgtggattcgcggcaatgtgagtgcttgtgcaaggtccatcttcattttcgacgaaatggataagatgcacgctggcctgatcgacgcaatcaagccgtttcttgactactacgatcttgtggacggggtttcctaccaaaaagcaatgtttattttcctgtctaatgcaggcgctgagcggattaccgatgtcgccctggacttttggcggtcaggaaagcaacgagaagacatcaagcttaaggacatcgagcacgctctgtcagttagcgtatttaataacaaaaactcagggttctggcactccagtttgatcgatcggaacctcattgactactttgtgccctttctgcccctggagtataagcatctaaagatgtgtatcagggtagagatgcagtccagaggatatgaaatcgacgaggacatcgtgtctcgggtggctgaagagatgacttttttccccaaggaggaacgcgtgttctcggacaaggggtgtaagactgtgtttacaaagctcgactactactatgatgactag

SEQ ID NO: 138046 - DNA, 1011 bp, synthetic construct
  misc_feature 1..1011: note = Description of Artificial Sequence: Synthetic coding sequence
  source 1..1011: mol_type = other DNA
atgctgcgtgcaggatggctgcgcggagcggccgcactcgccctattactcgctgctagagttgtggccgctttcgaaccaattactgtaggactagccatcggagcggccagtgctattacaggttacttgagctacaatgacatttattgccggttcgcggaatgctgtagagaagagagacctctaaatgcctctgcactcaaactggacctcgaggaaaaactgtttgggcagcatctggcaactgaagtgatcttcaaggccctcacaggttttagaaataacaaaaaccccaaaaagccccttacactgagccttcacggctgggccggcactggcaaaaactttgtaagccagatcgttgctgaaaatctgcatcctaaagggctcaagagcaatttcgtgcacctatttgtgtccacccttcacttcccgcatgaacagaaaatcaagctgtatcaagaccagctgcaaaaatggatccgcggaaatgtgagtgcctgcgctaactccgtttttattttcgatgagatggacaagctacatccaggaatcattgacgctattaaacccttcctggactactacgagcaagtggacggcgtcagttatcgcaaggctatctttatcttcctttcaaatgcagggggcgacttaatcaccaaaactgctttggacttttggcgagccgggaggaagcgtgaggacatacagctgaaagacttggaaccagtgctgagcgtgggtgtgtttaacaacaagcacagcggcctgtggcactctgggctaattgacaaaaatctgatcgactactttatcccattcttgcctttagagtacaggcatgtaaagatgtgtgtgcgagcggaaatgagagcaaggggatccgctatcgacgaagatatcgtgacacgggtagcagaggagatgacattctttccccgcgacgaaaagatctattctgacaaaggatgcaagacagttcagtctcgactcgactttcactag

SEQ ID NO: 138047 - DNA, 426 bp, synthetic construct
  misc_feature 1..426: note = Description of Artificial Sequence: Synthetic coding sequence
  source 1..426: mol_type = other DNA
taacgtgtcgtagccgctttcgaacctattaccgttggtctcgctattggcgcagcatccgctattaccggctaccttagctataacgacatctactgtcggttcgctgagtgttgcagagaggagaggcccctgaacgcgtccgcattaaagcttgacttggaagagaaactcttcgggcagcatctagccacagaagtaatcttcaaggcactgacagggtttcgaaacaacaaaaacccaaagaagccgctgacactctccctccatggctgggcagggacaggcaaaaattttgtttctcagatagtggccgaaaatcttcatcctaagggacttaagagcaacttcgtgcacctttttgtaagcacactgcatttcccacacgaacagaaaatcaagctttaccaaagcagtctgacctag

SEQ ID NO: 138048 - DNA, 918 bp, synthetic construct
  misc_feature 1..918: note = Description of Artificial Sequence: Synthetic coding sequence
  source 1..918: mol_type = other DNA
atgctccgtgcgggatggctgaggggggctgcagctctcgccctgctgctcgccgctcgagtggtcgcagcgtttgaacctataaccgtggggttggcaattggcgccgcgtctgccatcacagggtatctcagctataacgacatttattgccgattcgccgaatgctgtagagaagagcgccccctgaacgctagcgccctgaaattggacctggaggaaaagttgtttggacagcacctagcaacagaagtgatttttaaggcactaactgggtttcgtaataacaaaaaccctaaaaagccacttacccttagcttgttcgtgtcgactcttcactttccccatgagcagaaaattaagctctaccaagatcagttgcagaaatggattagagggaacgtgagcgcttgcgccaattcagtgttcatcttcgacgagatggacaaactgcatcctggtatcatcgatgcaatcaaacctttccttgattattacgagcaggtagacggcgtgtcctataggaaggctattttcatcttcctcagcaatgccggcggtgatctgatcaccaagacggcactggacttttggagagcaggcaggaagcgtgaggacattcaattgaaagacctggaacctgtgctgtcggtgggggtgtttaacaataagcacagcgggctgtggcatagcgggttgatagacaagaatctgattgactatttcattcccttcctgccactcgagtataggcacgtgaagatgtgtgtccgcgccgagatgcgggcccgaggcagcgccattgacgaggatatcgtgacccgcgtcgccgaagagatgacctttttcccccgggacgaaaaaatctactcagacaaggggtgtaaaaccgtgcagtccaggctagatttccactag

SEQ ID NO: 138049 - DNA, 1011 bp, synthetic construct
  misc_feature 1..1011: note = Description of Artificial Sequence: Synthetic coding sequence
  source 1..1011: mol_type = other DNA
atgctccgtgggccctggcgccaattgtggttgttctttctcctgctacttcccggtgcccccgaaccccgtggcgcaagccggccctgggaaggcacagatgaaccggggagcgcttgggcttggcctggttttcagcgcctccaggaacagctgcgggctgccggcgcactgtcaaagagatattggactctcttctcctgccaggtctggcctgacgattgtgatgaagacgaagaggcagccacaggccctttagggtggaggctgcctctcctgggtcagcgctacttggacctactgacgacctggtattgctcatttaaggactgttgtcctcgaggtgactgtagaatcagcaacaattttacaggtctggagtgggacctgaacgttcgcctccacggacagcatctggtccagcaactcgtcttacggaccgtcaggggctatttggagacaccacagccagaaaaagctctcgctctctctttccacgggtggtcaggaaccgggaagaatttcgtagcaagaatgttggtcgagaacttataccgagatggactgatgagcgattgtgtgcgaatgttcatcgccacgtttcacttcccccatccaaagtacgtagatctgtacaaagagcagctgatgtcacaaatccgtgaaactcagcagttatgccaccaaacactatttatattcgacgaagcggagaaactgcacccgggcctgttggaggtgttggggccccacctggagaggcgtgcccctgaggggcatagagccgagagcccctggaccatttttctgttcctttccaatctgaggggcgatatcataaatgaggtggtgctcaagctgctcaaggccggttggagccgggaagagataacgatggagcatctggagccccatctgcaggcagagatcgtagaaaccatcggcttctcgtttcttacaactaggtggcctcacctggatttacccacatccagcgttgcgccaacgtag

SEQ ID NO: 138050 - DNA, 462 bp, synthetic construct
  misc_feature 1..462: note = Description of Artificial Sequence: Synthetic coding sequence
  source 1..462: mol_type = other DNA
atgttgcggggcccttggcgtcagttgtggctgtttttcctgctattgctgcccggtgcgcctgaacctcggggcgcttcaagaccttgggaaggcacagatgaaccaggcagcgcgtgggcttggcccggatttcagagactgcaggagcagctgagagccgctggggccttatctaaacgctattggacactcttctcctgccaggtttggccggacgactgcgacgaggacgaggaagctgcgactggaccattaggatggagactgcctctcctcggtcagcgctatctcgatctattaacaacttggtactgtagcttcaaggattgttgtccaaggggagattgtagaatctccaataacttcaccggaaagaactttgtggccaggatgctggttgagaacctgtatcgcgatggcctgatgtcagactgcgttcggatgttcatcgccacatag

SEQ ID NO: 138051 - DNA, 1194 bp, synthetic construct
  misc_feature 1..1194: note = Description of Artificial Sequence: Synthetic coding sequence
  source 1..1194: mol_type = other DNA
atgttaagaggaccctggagacagctctggcttttttttctgcttctactgcctggggctccagagcccaggggggcctctcgcccgtgggagggcacagatgagcccgggtccgcctgggcttggccgggcttccaaaggttacaggagcagctgcgggccgctggcgcgctgagcaagaggtactggaccctgttttcatgtcaagtttggcccgacgactgtgatgaagatgaagaagccgccaccggcccgctcggctggcgcttgccacttctcggacagagatatctggacctcttgaccacatggtactgtagttttaaagattgctgtcctcgaggagactgccgaatctccaacaattttaccggcctggagtgggatctgaacgtgcgcttgcatggccagcacttggttcagcagctcgttcttcgaacggtcaggggttatctggagactcctcaaccagagaaagccctggcactgtccttccacggctggagcgggacagggaaaaactttgtcgcccggatgctggtggagaacctataccgtgatggccttatgtctgattgcgtacgtatgtttattgccaccttccactttccacaccctaaatatgtcgatctgtacaaggagcagctcatgagccagattcgtgagactcagcagctgtgtcatcagaccttatttatctttgacgaggccgagaagttgcaccccggactcttggaagtcctgggaccccatcttgaacgtagggctcccgaagggcacagggcagaatctccctggaccattttcctttttttgtccaatctccgcggagatattattaatgaagtggtgcttaaacttttgaaggccggctggagccgtgaggagattactatggaacaccttgaaccccaccttcaggcagaaattgttgaaactatcgacaatggtttcggacattcaaggctggtcaaggaaaacctcattgattactttattccatttctccccctggaatataggcatgtgagattatgtgccagagatgcatttctcagtcaggagctgttgtacaaagaggaaactttggacgaaattgctcaaatgatggtgtatgtgccgaaagaagagcaactcttttcctcccagggctgtaaatcaatcagccagagaattaattacttcttatcctag

SEQ ID NO: 138052 - DNA, 525 bp, synthetic construct
  misc_feature 1..525: note = Description of Artificial Sequence: Synthetic coding sequence
  source 1..525: mol_type = other DNA
atgggtctctgcgtgcctttcgccgtgactacctcttttctgtcattaggactggagtgggacctgaatgtgcggttgcacggacagcacctcgttcaacagttggtgcttcggaccgtgcgtggatatctcgaaacacctcaacccgaaaaggccctcgccctatcttttcatggctggtccggtacagggaagaattttgtggctcggatgctggtcgagaatctgtaccgcgatgggctcatgtcagactgtgtaaggatgtttatcgctaccttccactttccacaccctaagtatgttgatttgtacaaagaacagctcatgtcccagattcgtgagactcagcaattgtgccatcagactctctttatctttgatgaggctgagaaactccatcctgggctgttggaagtcctggggccacatctggagcgtagggcaccagagggccatcgtgcagaatcaccctggacaatctttctgtttctttccaacctgcggggggatattattaacgagtag

SEQ ID NO: 138053 - DNA, 1866 bp, synthetic construct
  misc_feature 1..1866: note = Description of Artificial Sequence: Synthetic coding sequence
  source 1..1866: mol_type = other DNA
atggaattccccggaggcaacgataactatctgaccattacgggcccaagccatccttttctcagtggtgctgagacctttcatacaccttctctgggagacgaagaattcgagatccctccaatttccttggattccgatccatccctcgccgtatccgacgttgtcggccacttcgacgatcttgctgacccttcctcttctcaagatggaagtttttccgcccagtacggagtgcaaaccctggacatgcctgtgggcatgactcatggactcatggagcagggcggcggccttctgtctggaggattaacgatggacttggatcattctattggtactcaatattcagccaatccaccagtgactattgacgttcctatgactgatatgacatctggcctgatgggacattcacagctgacaacaatagaccaaagtgaactgtcttcccagctggggcttagcttgggcgggggaaccatcctgccaccagcccagagccctgaagacaggcttagtacaaccccgagccctacatctagcctgcacgaggacggtgtggaagattttagacgtcagctgccatcacagaagactgtggtcgtcgaggccgggaagaaacagaaggctcccaagaagaggaagaagaaagaccccaacgagccacaaaaaccagtctctgcttatgcgctgtttttccgggatacacaggccgccatcaaaggccagaatcctaacgccacctttggggaggtaagcaagatcgtggcctcgatgtgggactccctgggggaggagcagaagcaggtgtacaagcgcaagaccgaagcagccaagaaggagtacttgaaagcacttgcagcgtacaaagacaaccaagaatgtcaggccacggtcgagacagtggaactagaccctgctccccctagccagacgccaagcccaccacctatggctactgtagatcccgcctctccagccccggccagcatcgagccgccggccctgagtccatcaatcgtcgtaaactctacgctgagctcctatgtggctaaccaagctagcagcggcgctggtggccagccaaatattactaagctgattatcactaagcaaatgttgccttcctcaatcacaatgtcccagggcggaatggtgaccgttattcccgctacggtggttacttcaagagggttgcagctgggccagacaagcaccgctacaattcagccgtcacaacaggctcagatagtcacccgcagcgtccttcaggcagccgctgccgccgcggccgccgctagcatgcaacttcctcctccacggttgcaacctccccctctgcagcagatgcctcagccccccacgcaacagcaggtcactatactccaacagcctccccccttacaggctatgcagcaaccgcctcctcaaaaagtgaggatcaatctgcagcagcaacccccgcccctgcagataaagtcggtgcccctgccaacccttaaaatgcagaccacattagtgcctcccaccgtcgagtcctctccagagcggcccatgaataacagtcctgaagcgcataccgttgaagctccatcgccagaaaccatctgtgagatgatcactgatgtagtgccggaggttgagtcacccagccagatggatgtggagctggtgtccgggagtccagtggctttgtccccgcagccccggtgtgtgagatcaggatgtgaaaatccccctatcgtttccaaggactgggacaacgagtattgcagtaacgagtgcgtagtgaaacattgtcgcgatgtctttcttgcctgggtagctagtagaaattccaatacagtagtgttcgttaaatag

SEQ ID NO: 138054 - DNA, 1866 bp, synthetic construct
  misc_feature 1..1866: note = Description of Artificial Sequence: Synthetic coding sequence
  source 1..1866: mol_type = other DNA
atggagttccccggagggaatgataattatctgaccataacgggcccatcccaccccttcctgagcggagcggaaacgttccacaccccatccctgggcgacgaggagtttgagatacctcctatttccttagattcagaccccagcctcgccgtatccgacgtggttggtcattttgatgacctcgctgacccatccagctcccaggacggatccttcagcgctcagtatggtgtccagacactggacatgcccgttggaatgacacacgggctgatggagcagggaggggggctactgtccggcggcttgactatggatcttgatcacagtattggcacacagtactcagctaacccacccgtcactattgatgttccaatgaccgatatgaccagtgggttaatgggtcacagtcagctgaccaccatcgaccaatccgagctgagtagtcagttggggctgtctctggggggtggtaccattttgccgcctgcacaatccccagaggacaggctgagtacaacccccagccccacctccagcctccacgaggacggagttgaggattttcggagacaactccctagtcagaaaacagtcgttgtggaagcgggcaagaaacaaaaggcacccaagaagcgcaaaaaaaaagaccccaacgaaccacagaagcccgttagcgcctacgcgttattcttccgtgacacacaagccgcaatcaagggccagaacccaaacgccaccttcggggaagtatccaaaattgtcgcgtccatgtgggacagcttaggcgaggaacagaaacaagtgtacaagcgcaagacagaggctgcaaagaaggagtacttaaaggctttggcggcttacaaagacaaccaggaatgtcaagcgacggtggagaccgtagagttggaccctgcgcctccttcacagacaccttcacctcctcccatggctacagtggacccagccagcccagcgccagcatcaatagaacctcccgccctttctccttcaatcgtagtcaattcaacactctctagttacgtggctaaccaggccagtagtggagcagggggtcagcctaatattaccaaactgataatcacaaaacagatgttgccaagcagtattaccatgtcacagggtggaatggtgactgtcattcctgcgactgtcgtgacctcgcgggggctgcaattggggcaaaccagtactgccactattcagccctctcaacaagcccaaatagtgaccagatcagttttacaagccgccgcggccgccgctgccgccgcaagtatgcagcttcctccacctagactgcagccaccaccactgcagcagatgccacagccccctacccagcaacaggtgactatattacaacagccccccccactccaggccatgcagcaaccaccacctcagaaggtacgcatcaatctccagcagcagccgcctccactgcaaatcaagtccgtgcctctgccaactctcaagatgcagacgaccctggtcccgccaaccgtggagtcctcccctgagaggcccatgaataattccccggaagcacacacagtggaagcgccgtctcccgaaacaatctgcgaaatgatcactgatgtcgttcccgaagtggagagccctagccagatggacgtggaactggtgagtgggtccccggtagctctctcaccacagcctcgctgtgtgagaagtggctgtgaaaatccccccattgtgtccaaggactgggataatgaatattgctctaatgagtgcgtggtgaaacactgtagagacgtcttcctggcctgggttgcctctaggaattcgaatacagtggtttttgtgaagtag

SEQ ID NO: 138055 - DNA, 1797 bp, synthetic construct
  misc_feature 1..1797: note = Description of Artificial Sequence: Synthetic coding sequence
  source 1..1797: mol_type = other DNA
atggagacctttcatacccccagcctgggtgatgaggaatttgagattcctcccatctcccttgacagcgatccctccctggccgtaagcgatgtagttgggcattttgatgacctggcagacccttcgagctcacaggacggaagcttttccgctcagtacggagttcagacgctggatatgcctgtaggtatgacccacggcctcatggaacaagggggggggctgctgagcggaggtcttacaatggacctggaccattccatcggcacacagtacagcgccaatccccctgtaacgatagatgtacctatgactgatatgactagcggcttgatggggcatagtcagttgaccactatagatcaatcagagctttcttcacagctggggctaagcttaggtggaggaacaattctcccgcctgcccagtccccagaggatcgtttgtcaactacaccgagtccaacaagttctctgcacgaggatggtgtcgaagattttcgcagacagcttccttctcagaaaaccgtggtagttgaggctggtaagaagcagaaggctccgaagaagaggaaaaagaaagacccaaatgagcctcagaagcccgtgagcgcatatgccctattctttagggacacccaggccgccatcaaaggccagaatcctaacgctactttcggcgaggtttccaagatcgtggccagtatgtgggatagccttggcgaagagcagaagcaagtatataagaggaagaccgaggccgcaaaaaaagagtacctgaaggccttggccgcgtataaggacaatcaggagtgtcaggccacggtggagaccgtggagcttgatccggctccgccatctcaaaccccgagtccccccccgatggcaactgtggacccggcttcacccgcgcctgcctccatagagccgcccgcgctgtccccctctattgtggttaatagcacactttctagctatgtcgccaaccaggcttcctctggggccgggggccagccaaacatcactaagttgatcattacaaagcaaatgttgcccagcagcatcaccatgagtcagggaggcatggtgacagtgatccctgctacagtagtcaccagtcggggcttgcagctggggcaaacatcaacagcaacgatccagccctctcagcaggcccaaatcgtgacccgcagcgtgcttcaggcggccgcagcggctgccgccgccgctagcatgcagctaccgccaccccgcctgcagcccccgcctctacagcagatgccccagccccctacacagcagcaggttacaatccttcagcagccccccccgcttcaggcaatgcagcaaccaccaccgcagaaggtgaggatcaacctgcagcagcaaccaccccctctccagatcaaatcagtccccctacccaccctgaaaatgcagacaactctcgtgcctcctacagtggagtcaagcccagaacggccaatgaacaattcccctgaggcacacaccgtggaggctcccagccctgaaacaatatgtgaaatgatcaccgacgtggtccccgaggtggagtcccctagtcagatggatgtggagcttgtctctgggtcaccggttgcccttagcccacagcccaggtgcgtcaggtcaggctgcgaaaatccccccattgtttcaaaagactgggacaatgagtactgctctaacgagtgtgtagtgaagcattgcagggatgtgttcttggcgtgggtcgcttcacgtaatagcaacactgttgtgttcgtaaaatag

SEQ ID NO: 138056 - DNA, 1650 bp, synthetic construct
  misc_feature 1..1650: note = Description of Artificial Sequence: Synthetic coding sequence
  source 1..1650: mol_type = other DNA
atgcgaaacctcaagtctcatctctctccatggatcctgatccctcactggctctcccagatgtggctcgccacactcatgacctggcagttcttttcccctgatttggatcatagtattgggacacagtattcagctaacccacctgtgaccatagacgtacccatgacagatatgaccagcgggttaatgggtcactctcaactcaccaccatcgatcagagtgagctgtcgagccagcttgggttgtcactcgggggcggaacaattttaccacccgcccaaagtccagaagatcgacttagcactactccaagcccgacctccagtttgcatgaagatggcgtcgaagacttccgacgtcagctaccctctcagaagaccgtagtggtggaggcgggaaagaagcagaaggcaccaaaaaagaggaagaaaaaggatccaaacgaaccacagaagcccgtgtctgcatatgccttgttctttcgtgacacccaggccgccatcaagggccagaatccaaatgccacattcggtgaggtaagcaagattgtggcgtccatgtgggatagtctgggagaagaacagaagcaggtgtataagcggaagaccgaagctgcaaagaaggagtacttgaaagccctcgctgcctataaggacaatcaggagtgccaagctaccgtcgagacggttgagctcgatcctgcaccaccatctcaaactccatcaccaccccccatggctacagtggatcctgcaagccccgccccagcctccattgaaccgccggctctctctccatcaattgtggtaaactcgacactctcttcctacgtggcaaatcaggccagcagtggcgccggtgggcaacctaatatcacaaagttaatcattacaaaacaaatgctgccctctagcatcactatgagccagggaggcatggtgaccgtcatccccgccacagttgtcacgagtcgagggctccagcttgggcagacgtctaccgctacaattcaacccagtcagcaagcacaaatagtgacccgtagtgtactgcaagccgctgctgcagcagcagccgccgcgtccatgcaactgccccctcctcgtctccagccgcctccgctgcaacaaatgcctcagcctccgacacagcagcaggtgactattctgcagcaacccccgccgctgcaggctatgcagcaaccacctcctcagaaagtccggatcaaccttcaacagcaaccaccccctttgcagattaagtctgtccctctgccaaccctgaaaatgcagaccaccttagtcccccctacagtcgagtcttctcccgaacgacctatgaataactcgccagaggcccataccgtcgaggcaccaagcccagaaacgatctgcgagatgattacagacgttgtgccggaggtcgaatcccctagtcagatggacgtggagctggtaagcggatccccagtggccctttcccctcagcccaggtgcgtcagaagcgggtgcgagaatcctcctatagtcagtaaagactgggataacgagtactgttccaatgagtgcgttgtcaagcactgccgcgacgtattcttggcatgggtggcatcccggaatagcaacaccgtggtttttgttaagtag

SEQ ID NO: 138057 - DNA, 1020 bp, synthetic construct
  misc_feature 1..1020: note = Description of Artificial Sequence: Synthetic coding sequence
  source 1..1020: mol_type = other DNA
atgatgccattttgtcacaacatcattaatatctcctgtgtgaaaaacaactggtctaacgatgtgcgcgcctcactgtattcactgatggtgctcatcattctcaccactctggtggggaacttgatcgttattgtgtctatttcacatttcaagcagctgcacacacccacaaattggctcatccattctatggccaccgtcgacttcttattggggtgccttgttatgccctacagcatggttcgatctgccgagcactgctggtatttcggggaagtgttctgtaagatccacacctctactgatattatgcttagctccgcgtccatttttcacctctccttcatcagcatcgacaggtattacgctgtctgtgatccgcttagatataaagcaaagatgaatatcctagtaatctgtgtaatgatattcatatcctggtccgtcccggctgtgttcgccttcggaatgatcttcctggaactgaacttcaagggtgcagaagagatctactataagcatgttcactgtcggggcggatgttccgtgttcttctcgaagataagcggagtactgaccttcatgacgtcattttacattcctgggtccattatgttatgcgtttattacagaatctacctgatagcaaaggaacaagcccgtctcatctcagacgcaaatcagaagctgcagatcggtctggaaatgaaaaacgggataagtcagagcaaggaaaggaaggctgtcaagaccctcggtattgtgatgggagtgttcttaatctgttggtgtccctttttcatttgcactgtgatggaccccttccttcactacattattcctcctacactgaatgacgtactgatctggtttgggtacttgaacagtaccttcaaccccatggtttacgccttcttctatccctggttccggaaggctctgaagatgatgctatttggaaaaatttttcaaaaagactcctctcgatgtaagctgttcctggaactgtctagttag

SEQ ID NO: 138058 - DNA, 921 bp, synthetic construct
  misc_feature 1..921: note = Description of Artificial Sequence: Synthetic coding sequence
  source 1..921: mol_type = other DNA
atgtacagcttcatggccgggagcatattcatcaccatcttcggcaatctcgctatgattatctccatctcctatttcaagcagctgcataccccaaccaacttcctaatcttaagtatggccataacggactttctacttggcttcacgattatgccttatagcatgatcagatcagtggagaattgttggtattttggtctgacattctgcaagatttattactcttttgacttaatgctgtccattacttctatcttccatctgtgtagtgtggccattgatcgcttttatgctatctgctacccactgctgtacagcacaaaaattaccatcccagtaattaaaagactgctcctgctctgctggtccgtcccaggcgcattcgcctttggtgtggtctttagtgaggcttatgctgacggcatcgaagggtacgacatcctggtagcctgctcgagttcatgccctgtcatgtttaataaactctgggggactacactctttatggccgggttttttaccccgggctcaatgatggtgggcatctatggaaagatttttgccgtgagtcggaagcacgctcatgctatcaataatttgcgggaaaatcagaataaccaggtcaagaaagacaaaaaggctgctaagacgcttggaatagtgatcggcgtgttcctcttgtgctggtttccttgctttttcaccatccttctggatccgtttctgaatttctccaccccagtagtcctgtttgacgccttgacttggttcggatacttcaacagcacctgtaatcccctgatctatgggtttttttacccatggttcagacgggcccttaagtacatcttgctcggcaaaatcttctcatcctgtttccacaataccatcctctgtatgcagaaggagtctgaatag

SEQ ID NO: 138059 - DNA, 1056 bp, synthetic construct
  misc_feature 1..1056: note = Description of Artificial Sequence: Synthetic coding sequence
  source 1..1056: mol_type = other DNA
atggctgtgtcaagcgaacaacatgaactgagccactttaaacgcacccaaacaaagaaggagaagtttaattgctcagagtacggcaataggtcatgccccgaaaatgagagaagcttgggcgtgcgtgtggcaatgtattcttttatggccgggtccatcttcattaccatcttcgggaacttagccatgataatatccatcagttatttcaaacagctgcacacacccacgaacttcctcatcctctccatggcgataaccgatttcctgctgggttttacaatcatgccatactcaatgatccgcagtgtagagaactgttggtattttggattgaccttctgcaaaatctactacagcttcgatctgatgttatctatcaccagcatctttcacctgtgctctgtcgccatagatagattctatgctatttgctaccctctactgtacagtacaaagataactatccccgtcatcaaacgcctgctgctgctgtgctggtccgtcccaggagctttcgctttcggcgtggtgttctccgaggcttatgccgacgggattgagggatatgatattttagtcgcctgcagctcaagttgcccggtgatgtttaataagctgtggggcacaacactttttatggccggatttttcacacctgggagtatgatggtgggcatctacggcaaaatatttgcggtatccaggaaacacgcccacgcgatcaataatcttagagagaatcagaacaaccaggtgaaaaaggacaagaaagccgcaaaaacccttgggatagtgatcggagtgtttctgctctgctggtttccctgtttcttcaccatcctcctcgatcccttcctgaacttttcaacacctgtagtgctgttcgacgccttaacgtggtttggctatttcaattccacctgtaaccctctgatctacgggtttttctacccatggttccgcagggctttaaaatacatcctgctggggaaaattttctcatcgtgtttccataataccatcctgtgtatgcagaaggaaagcgagtag

SEQ ID NO: 138060 - DNA, 921 bp, synthetic construct
  misc_feature 1..921: note = Description of Artificial Sequence: Synthetic coding sequence
  source 1..921: mol_type = other DNA
atgtattcctttatggcaggaagcatttttatcaccatctttggcaatctcgctatgattatatccatctcctacttcaaacaactgcatacaccaaccaattttctgattctgtccatggctatcaccgactttttgctgggctttaccatcatgccatactccatgataagatccgtggaaaattgttggtacttcgggctgaccttttgtaaaatctattattccttcgacttgatgttgtcgataacttctatcttccatctgtgtagtgttgctattgaccgattctacgcaatctgttacccattgctgtactcaactaagatcactattcctgtgataaagaggttgttgctcctgtgctggtctgtgcccggagccttcgcattcggggttgtgtttagtgaagcttatgccgatggaatagaaggctacgacatcctagttgcgtgttccagttcttgtccagtgatgtttaataagctttggggcaccactctttttatggctggtttctttaccccaggaagcatgatggtcggtatctacgggaagatctttgcggtgtcaagaaaacacgcacatgccatcaacaacctccgcgaaaatcaaaataatcaggtaaaaaaagacaaaaaagcggcaaagacactcggtatagttatcggggtgttcttgctgtgctggtttccttgcttttttactattctgctggatcctttcctgaatttctctactcccgtggtactgttcgacgctctgacatggttcggctatttcaactccacatgtaatcccctgatctacggattcttctatccttggttccgcagggcgttaaaatatattctgctcggaaaaatattttccagctgctttcacaacaccatactgtgcatgcagaaagagtccgagtag

SEQ ID NO: 138061 - DNA, 1038 bp, synthetic construct
  misc_feature 1..1038: note = Description of Artificial Sequence: Synthetic coding sequence
  source 1..1038: mol_type = other DNA
atgtcttctaatagcagcctcctggtcgccgtgcagctctgctacgcaaacgtcaacggaagctgcgtgaaaattcctttttcccccgggtctcgcgtcattctgtacattgtgttcggatttggtgccgtgttagccgtgtttggcaacctccttgtgatgatctcaattttgcacttcaagcagctccactctcctactaactttctcgtcgcctctctcgcttgcgccgatttcctggttggggtgaccgttatgccattttctatggttcggacggttgaaagttgttggtacttcggcagatctttctgtacattccatacatgctgtgacgtagcgttttgctatagttcactcttccacctgtgcttcattagtattgacaggtatatcgccgtcactgatccacttgtttatcccactaagttcactgtgtctgtgtccggaatatgtatttcagtttcctggatcctccctctgatgtactcgggtgcggtgttttacactggcgtgtatgatgatggactggaggagttgagcgatgccctgaattgcattggtggctgccagacagtggtgaatcaaaactgggtgcttacagacttcctgtccttcttcattccaacattcattatgatcattctctacggtaatatattcctcgtggctcgacgccaggccaaaaagattgagaatacgggatcaaaaacagaaagttctagcgagagctataaagcacgcgtggccagacgagagcgcaaagctgccaagaccctcggagtaacagtggtggcctttatgattagctggctcccttactccatcgatagcctcatcgacgctttcatgggctttattaccccagcttgcatttacgagatctgttgctggtgtgcttattacaacagcgcgatgaatccgttaatctacgcattattttacccctggttcaggaaggccattaaagtaatcgtgacgggccaggtgctcaaaaacagctccgctacaatgaaccttttctccgaacatatttag

SEQ ID NO: 138062 - DNA, 957 bp, synthetic construct
  misc_feature 1..957: note = Description of Artificial Sequence: Synthetic coding sequence
  source 1..957: mol_type = other DNA
gtgaacgggtcatgcgtgaaaataccctttagccctggaagccgagtgatcttgtacattgtgttcggattcggggcagtgctggccgtctttggcaacctcctcgtaatgatctcaatcctgcatttcaaacaattgcactccccaacaaactttcttgtggcgagcctcgcctgtgctgacttcctcgttggtgtgactgttatgcccttcagcatggtccgcacagtggagagttgttggtattttggtcggagtttctgtacattccacacttgttgcgatgtggctttctgttattcaagcctgttccacctctgctttattagcatcgatagatatatagccgttacggatcctctggtataccctactaagttcacagtatcagtgtcagggatctgcattagcgtctcatggattctcccacttatgtactccggtgctgtgttttacacaggggtctacgacgatggcctcgaagagctcagcgacgcactcaactgcattggcgggtgccaaaccgtggtgaatcaaaactgggtgctcactgacttccttagcttcttcattcctaccttcatcatgatcatcctatatggcaacatcttcttagtcgctcggagacaggccaaaaagatagaaaatacagaatcatataaagcacgcgtggcgcgtagagaaagaaaagccgccaagaccctgggtgtaacagtggtggcattcatgatcagttggttaccatatagcatcgatagcctgattgacgccttcatgggatttatcactccggcatgcatctacgaaatttgctgttggtgcgcatactataactccgccatgaatccactgatttacgccctgttttacccttggtttcgcaaggcgatcaaagtgatcgtcacagggcaggttctgaagaattcttcagcaacgatgaacctcttcagtgaatag

SEQ ID NO: 138063 - DNA, 1410 bp, synthetic construct
  misc_feature 1..1410: note = Description of Artificial Sequence: Synthetic coding sequence
  source 1..1410: mol_type = other DNA
atgcctatcagagcattgtgcaccatctgctcagacttcttcgaccattcaagagatgtcgccgccatccactgcggccacacctttcacttgcagtgtttgattcagtggttcgagaccgcgccgtcccgtacatgtccacaatgccgcatccaggtgggaaagcggacaattatcaacaaactctttttcgatttggcccaggaagaggagaatgtactggatgccgagttcttaaagaacgagctggacaatgtgcgggcgcaactgagtcagaaggataaggaaaagcgcgatagccaggtgatcattgacactctgagggacacgctggaggagcggaatgcaacagtcgtatcactgcagcaggcactgggcaaggccgagatgctgtgttctaccttgaagaagcagatgaaatacctagagcagcagcaggatgaaacaaagcaggcgcaggaagaggcccgccggctacggtcaaaaatgaaaaccatggagcagattgagcttttgctgcagtcccaacgtcctgaggttgaggaaatgatccgtgacatgggtgtgggacagtccgctgttgagcagctggctgtctactgcgtctcgctaaagaaagagtacgaaaacctgaaggaagcccgcaaggccagcggggaagtggctgataagctgaggaaggatctcttctcttcacggtctaagctgcaaacggtgtatagcgaactggaccaggcgaagctcgaactgaaaagcgctcagaaagatctccagtcagccgacaaggagataatgagtctcaagaaaaagctaaccatgctgcaagagacgcttaacttgccacctgtggctagtgaaaccgtcgatcgactcgtgttagagtcacccgcccccgtggaagtcaacttgaagttacgccgccctagtttcagagacgacatagacctgaacgccactttcgacgtggacacccctcccgccagacctagctcttcacagcatgggtactacgagaaactgtgcctggagaagagtcatagccccatccaagacgttccaaaaaaaatctgcaagggacctcgtaaggaatctcaactgagtctgggaggccagagctgcgctggggaaccagacgaagagttggtgggcgctttccctatttttgtgcgcaatgctatccttggacagaaacagccaaagagacctaggagcgaatcatcttgttcaaaagatgtggtgcggacaggatttgacgggcttggtggccggacgaagtttatacagccaaccgacactgtcatgatacggccattacccgttaagccaaagacaaaggtgaagcagagggtgcgggtaaaaaccgtcccatctctgttccaagctaaactcgacacctttctttggagttag

SEQ ID NO: 138064 - DNA, 4059 bp, synthetic construct
  misc_feature 1..4059: note = Description of Artificial Sequence: Synthetic coding sequence
  source 1..4059: mol_type = other DNA
atggcctcagatagtcctgctcggagcctggatgaaatcgatctcagcgctctacgggaccctgccgggatattcgagctggtggaactggtaggaaacggcacatacggacaggtgtataagggccggcacgtcaagacagggcagctggccgcaatcaaagtgatggatgtgacaggggatgaagaagaggaaattaagcaggaaatcaatatgctcaagaagtattcccaccaccgcaacatagccacatattacggagctttcataaaaaaaaatccccctggcatggatgaccagttgtggctggttatggaattctgcggcgctggaagtgtcacggacctgattaagaacaccaaggggaacaccttgaaagaagagtggattgcctatatctgtagggagatcctgcggggcctgtcgcatctccaccagcataaggtgattcacagagacattaaaggacagaatgtcctgttaaccgaaaatgctgaggtcaagctcgttgacttcggcgtcagcgcccagctggaccgaaccgttgggcgtcgaaatacctttattggcaccccgtactggatggctcctgaggttatagcttgcgatgaaaatccagatgccacgtacgattttaaaagtgacctctggtccttgggcatcaccgctattgagatggcggaaggagcccctccactctgcgatatgcacccaatgagggcactgtttctgatcccccgcaatcctgcacctagactaaaatccaagaagtggtcaaagaagttccagtcctttatagagtcgtgtctcgtcaaaaaccattcacagaggcctgcgacagagcagctaatgaagcaccctttcattcgcgaccagccaaacgaaagacaggtgcgaatccagctcaaggaccacatcgaccgaacaaaaaagaagcggggtgagaaagacgaaaccgagtacgagtacagtggatcagaagaggaagaggaagagaacgactctggagagcctagctccatcctgaatctgcctggcgaatctaccttacgcagggactttctaaggctgcaattagccaacaaagaaagatcagaagcccttcgacgccaacaactcgaacagcaacagagggaaaatgaagaacataaaaggcagttgctggccgaaaggcaaaagagaattgaagaacagaaggagcaaagacggcgccttgaggagcaacagaggagagagaaagaattgcggaagcagcaggagagagaacagcgtagacattacgaggaacagatgcgtagggaagaagagcggagacgggctgagcacgaacaagaatatatccgaaggcagttagaggaagaacaacgtcagctggagatcctccagcaacaactcctgcacgaacaggctctgctgttggaatacaaaagaaaacagctcgaggagcaaaggcaggccgagcgcctacagcggcagctcaagcaggaacgagattacctcgtgagtttgcagcaccagcgccaggagcagagaccagtagagaaaaaaccactgtaccactataaagaaggtatgtccccctcagagaaaccagcttgggcgaaagaggttgaagaacgttcccgcctgaacaggcagagctccccggccatgcctcacaaggtggccaacagaatatccgacccgaatctgcctccccgtagcgagagcttttccattagcggcgtgcaacctgcccgtacgccaccaatgctcagacccgtggaccctcagattccccatctcgtggccgttaaaagccaagggcccgctttaacagctagtcagagcgtgcatgagcaaccaactaaggggttatccggctttcaggaggctcttaacgtgacctcacacagggtggaaatgccaagacaaaactcggaccccacgtcagagaatccaccgctccccacacgtattgaaaagtttgatcgatcctcttggctccgccaggaggaagacatccccccaaaggttcctcaaaggacgaccagcattagcccggcccttgctagaaagaacagccccggaaacggtagcgcactcggtcccaggctgggctcgcagcccatcagagcttcgaaccccgatctgcggcgaactgaaccaattctggaatcacctttgcaacgcacctccagcggaagcagcagcagcagctctaccccctcaagccaacccagctcgcagggagggtctcagcccgggtcccaggcgggctcatccgagcgcaccagagtgcgagctaactcaaaatcagaggggtctccagtacttccccacgaaccagcgaaagtcaaaccagaggaaagccgtgacatcacacgaccttctaggcctgctgatttaacggcattagcaaaagagctcagggagttgaggatcgaagagacaaaccggccaatgaagaaggtgacagactactctagctctagtgaagaatcagaaagcagcgaggaggaagaagaagatggggaaagcgagacacatgacggcaccgtcgctgtatcagatatacctagacttataccaacaggggcacccggaagcaatgagcaatataatgttggaatggttggcacgcacggactggaaactagccatgcagacagtttctcagggtctatctcacgcgaaggcaccctgatgattagggaaacatctggagaaaagaaacggtcaggacacagtgacagtaatggatttgcaggccacataaatctgcctgacctggtacagcaatcccacagccctgccggtacccccactgagggactgggaagggtgagtacccatagtcaagagatggacagtggcaccgagtatggaatggggtctagcacgaaagccagctttactccattcgtggatcccagagtctaccagacttcccctacggatgaggacgaggaggatgaggaatcctccgcggccgcattgttcacatccgagctgttacggcaggaacaggctaagttgaacgaagcgcggaagatcagtgtggtgaacgtgaatcctacgaacattcggccacactccgacacacctgaaattcgtaaatataaaaagaggtttaacagcgagattctgtgtgccgctctgtggggagtaaatcttctggtggggaccgagaacggtctcatgctgctggatagatcgggccaggggaaagtgtacaatctgattaatcgcagacggtttcaacaaatggacgtcctcgagggcctgaacgtgttagttacaatcagcggtaagaaaaataagctgcgtgtgtactatctcagttggttgaggaaccggatcctgcataacgaccctgaagtggaaaaaaaacagggatggatcactgtgggagacctggaaggatgtatccattacaaagtggtgaagtacgagagaattaaattccttgtgattgctctcaaaaatgcagtggaaatctacgcatgggctccaaagccctaccacaagttcatggcgttcaaaagtttcgccgatctgcagcataaaccattactggttgatctcaccgtcgaagagggccaaagactgaaggtcatttttggaagccacacaggatttcacgtgattgatgtggattccggtaactcatatgacatttacattccctctcacatacaaggcaatataaccccacacgcaatcgtcattctgccaaagacggacggtatggaaatgcttgtgtgttacgaggatgagggagtgtacgtgaacacctatgggcgaattactaaagatgtagtgttacaatggggagaaatgcccacctccgtggcatatatccactccaaccaaattatgggatggggagagaaggcaatcgaaattaggagcgtcgagacaggacacctggatggggtgtttatgcacaagagggcccagcggctgaagtttctgtgtgagcgcaatgataaggtcttttttgcctcggttagatcgggaggctcaagtcaggtgttttttatgaccctaaatagaaattcaatgatgaactggtag

SEQ ID NO: 138065 - DNA, 3831 bp, synthetic construct
  misc_feature 1..3831: note = Description of Artificial Sequence: Synthetic coding sequence
  source 1..3831: mol_type = other DNA
atggccagcgatagccccgcccgttcattggacgagatcgacctgtctgccctcagggatccagcaggaatctttgagcttgtcgagctagttggaaacggaacatacggacaggtgtacaagggcaggcatgtgaagaccggacagcttgcggcaataaaagtgatggatgttactggcgacgaagaggaagaaatcaagcaggaaattaatatgcttaaaaagtacagccaccacagaaacattgctacatattacggtgcattcatcaaaaaaaatccgccaggaatggatgatcagctctggctggtcatggaattttgcggggccggctcagtgactgaccttatcaaaaataccaaaggcaatacgctaaaggaagaatggatcgcctacatttgcagagagatccttcgtggcttgagtcacctgcaccaacacaaggtgattcaccgtgacatcaagggtcagaacgtcctgttgacagagaacgcggaggtgaaactggtggactttggtgttagcgcccagctggatcgcacagtgggccgccggaatacctttatcgggaccccctactggatggctcccgaggtcattgcctgtgatgaaaatccagatgccacctatgacttcaaatccgacctgtggtccctaggaattacagccatagagatggcagagggggccccccccctctgcgacatgcacccaatgcgtgcgttgttcttgatccccaggaacccagccccgcggctgaagtctaagaagtggtcgaaaaagttccaatcgttcatcgagagctgcctggtgaagaaccactcccagcgacctgccacagagcaactgatgaagcatcctttcatccgcgaccagcctaatgaaagacaggtacggatccagctcaaggaccacatcgatcggacaaagaaaaagcgaggagaaaaggacgaaaccgagtatgagtactcaggctccgaggaagaggaggaagaaaatgatagtggtgagccatcttcaatcctgaacttaccaggagagtcaacactgagaagggactttttgagactgcagctggctaataaggagagatcagaggctctccgccggcagcagctggaacagcaacagagagaaaatgaggagcacaagagacagctccttgctgaacgacagaaacgcattgaggagcaaaaggaacagcgccgacgcctcgaagagcagcagcggagagagaaggagctacggaagcagcaggaaagggagcaacggaggcattatgaggaacagatgagacgcgaagaggaaagacggagagccgaacacgaacaggagtataagcggaagcagctggaagaacagagacaggccgaaaggctccagaggcaactaaaacaggaacgggattacctggtcagcttacagcaccagcggcaagagcagcggcctgtagagaagaaacccctataccactacaaggaaggcatgagcccctcagagaagcccgcatgggcgaaggagatccctcatctggtcgctgttaaatcccaagggccagctctgacggccagccagtccgttcatgagcaaccgacaaaaggactttcgggctttcaggaagccttaaacgtaacttctcatagggtggagatgccaagacagaattcagatcctaccagtgaaaatccacctctccccaccaggattgaaaaatttgatcgatcttcgtggctgcggcaggaggaagacatcccgccaaaggtcccacagcgcacaacaagcatctctcctgcactggcgcggaaaaattctccaggtaacggaagtgccctggggcccaggttaggctctcaacctatacgcgctagcaaccctgacctccgccgcacggaacccattttagaaagtcctttacagcgtacaagcagtggctcatctagttcttcatccaccccgtccagccaaccaagctctcagggcggatctcagcccggatcccaggccggaagtagcgaaagaaccagggttagagcaaactctaaatcagagggttcgccagtattaccacacgaaccagccaaggtgaagccagaagaaagtagagatattactagaccgagtcgcccagcttcgtacaaaaaagccattgacgaggatcttacggctctcgccaaagaactgagagagctgagaatcgaagagacaaacaggcccatgaagaaggtaacggactattcgtctagctccgaggagagtgagtcctccgaagaagaggaagaggacggcgaatctgaaacgcatgacggtaccgtagccgtgtccgacatcccccgacttattcccaccggagcaccaggctcaaacgagcagtacaatgtcggcatggtagggactcacggactggagacaagtcatgccgatagcttcagcggttcgatttcaagggagggtaccctaatgattcgagaaacatccggcgaaaagaagagaagcggtcattccgatagcaacgggttcgcaggccatatcaatttaccagatctcgtacaacagtctcattcccccgcaggaactcctacggaaggcctggggagggtcagcacacacagccaagagatggattctggaacagagtacgggatggggagttccacaaaggctagtttcacccctttcgtcgatccccgcgtataccaaacctcacctacagatgaagatgaggaagatgaggagagttccgccgctgccctcttcactagcgagctcctgagacaagagcaggcaaagttaaacgaagcgaggaagataagcgtggttaatgtcaaccctacaaacattagaccccactctgacaccccagagatccgcaaatacaagaaacgatttaattcggagatactctgcgcggctctgtggggcgttaacctgctggtcggaacggagaacgggttaatgctgctggaccgctctggtcagggaaaggtgtacaacctgattaaccggaggaggttccaacaaatggacgtgctggagggtttaaatgtgttggtgaccatctcgggtaaaaaaaataaactgcgggtgtactacctatcatggctgcgaaacagaattttacacaacgaccctgaggtagaaaaaaagcaggggtggatcacagttggcgatctggaagggtgcatacactataaggtggtgaagtatgagagaattaaattcttggtcatagcattgaaaaatgcggttgaaatatacgcatgggctcccaagccctatcataagtttatggcatttaagtcgttcgctgatctgcagcataaaccactccttgtggacctgacagttgaagagggacagcgactcaaagtgattttcggctcacacaccgggtttcatgtgatcgacgtcgacagtgggaacagctatgacatctatatccctagtcacatacaaggcaacataaccccacatgcaattgtgatcttaccgaagaccgacgggatggagatgctggtctgctacgaggacgagggggtgtatgtaaacacatatgggcgcattacgaaggatgtagtgttgcagtggggcgaaatgccgacaagcgtggcctatattcactctaatcagataatgggatggggagagaaagcaatcgagatcagatctgtggaaacaggccacttagacggtgtgtttatgcataagagagcacaacgccttaagttcttgtgcgagcgaaacgataaagttttttttgcctccgtgcgcagtggaggcagctctcaggtgttttttatgaccctgaataggaacagcatgatgaattggtag

SEQ ID NO: 138066 - DNA, 3996 bp, synthetic construct
  misc_feature 1..3996: note = Description of Artificial Sequence: Synthetic coding sequence
  source 1..3996: mol_type = other DNA
atggcgtccgactcacccgcccggtcccttgacgaaatcgatcttagtgctcttcgggatcccgcaggtatcttcgagctcgtggaattggtcggaaatggtacctatggacaggtttacaagggccgtcacgtgaaaactggccaactcgctgctatcaaggtgatggacgtcaccggggacgaagaagaggagatcaagcaggaaataaacatgctgaaaaagtactcccatcatcgaaatatcgcaacatattacggggcatttattaagaaaaacccgccaggtatggatgaccagctctggctagttatggaattttgcggagccgggtctgttaccgatttaattaaaaacacaaaagggaatacactcaaagaggagtggattgcttacatttgtagagagatcctccgaggattgtcacacctgcatcagcataaagtgattcatagggatattaaagggcaaaatgtccttctgactgagaatgcggaggtgaagctagtggactttggagtgtcagcgcagctggatcgtacagtaggaagacgtaatacctttatcggcacaccttactggatggcgcccgaggttatagcttgtgacgaaaatcctgacgccacttacgacttcaagtccgacctgtggagcctgggcataacagcgatcgagatggccgaaggagcaccaccgttgtgtgacatgcatcccatgcgggccctgttcctgataccacgcaatcctgctccacgattaaagagcaaaaagtggtccaaaaagttccaaagtttcattgagtcctgtctggtgaagaatcactcgcagcgcccagcgaccgagcagctgatgaagcacccatttatccgtgatcaacccaatgagcggcaggtccgtatccagttgaaggaccatattgatagaacaaaaaaaaagaggggagagaaggacgagacagaatatgaatacagcggctcagaagaggaggaggaggaaaacgacagcggcgaacctagctcgatcctcaacctgccaggcgaatctaccttacggcgggactttttacgcctgcaactcgctaataaagagcggtcagaggccttacgcaggcagcagcttgaacagcagcagcgtgagaatgaagaacacaagcgtcaactgctcgctgaacggcagaaacgaattgaggagcagaaggaacagcgacgcagactcgaagaacagcagcggagagaaaaagagctgagaaaacagcaggagcgagaacagcgcagacattacgaagagcaaatgcggcgcgaggaggaacgtaggcgggccgagcacgaacaggagtacaaaagaaagcagctcgaagagcaacgccaggcagagcgcctgcagcgccagctcaagcaggaaagggattatctagtgagcctgcagcatcagcgccaggagcagcgccctgttgagaaaaagcctttgtaccactataaagagggcatgagcccaagcgaaaaaccagcgtgggctaaagaggtggaggagaggagcaggcttaaccgccagtccagccccgcgatgcctcataaggtcgccaaccgcatttccgaccccaatctgccacccaggtctgaatcattctcgattagcggcgtgcagcccgctcgcacccctccaatgctccggcctgtggacccacagataccccatctggttgcagtgaagagtcagggccccgcactgactgcttcccagtccgtgcatgaacagcccacgaaggggttatcaggcttccaggaagctctgaatgtcacttcccatcgcgtcgaaatgccccgacagaatagtgatcctacatcagaaaatccccccctgcctacacgcattgagaaatttgatcggagttcctggctgcgtcaggaagaggatatcccacctaaggttccgcagcgcactacgtccattagccctgctctggctaggaagaactctcccgggaacgggtccgctctggggccacgattgggctcacaacctattagggccagtaacccagacctaaggcgcacggaacccattttggagtctcctctgcagcgaacttctagcggctcctctagttcaagtagcacgccctccagccagccttcatcccagggcgggtcccagccagggtcgcaggccggcagttctgagagaacgagagttagggccaacagtaagtccgagggctccccggtgctcccccacgaaccagctaaggtgaaacccgaggagtcccgggatattacccgcccgtcgagacctgcttcatataagaaggcaatagatgaagatctgactgccctggcaaaggaattgcgggagttacgcatcgaagagaccaaccgccctatgaaaaaagtcacagactactccagctcctcagaagagtctgaatcttctgaagaagaggaagaggacggcgaatctgagacacacgacggaacagttgcagtgagcgacatcccccggctgattcccactggagctccagggtctaatgaacagtacaacgtcggcatggtgggcactcatggccttgaaacctctcatgccgatagtttcagcggatctatctccagggaagggaccttgatgattagagaaacctccggggaaaaaaagcggagcggacactctgactcaaacggtttcgccgggcacattaacttgcctgatctggtccagcagtcacatagccccgctggcactcctacagaagggctgggccgggtgagcacccattcccaagaaatggactcaggcacagagtatggaatggggagctccaccaaggcttcatttaccccttttgtggacccccgagtttaccagacaagtccaacggacgaagacgaagaagacgaggagtcatccgctgccgcactgttcacttctgagctccttcggcaagagcaggctaaattgaatgaggccagaaaaatctctgtggtcaacgtgaatcctaccaatatacgcccgcacagcgacaccccagaaattagaaagtataaaaaacggtttaactcagaaatattgtgcgctgcgttgtggggagtgaatctgctggtaggaactgaaaacggtctcatgctgctcgataggtctgggcagggaaaggtttacaatctaataaacaggagacgcttccagcagatggacgtgctcgaaggcctaaatgtgctggtaaccattagcgggaaaaagaataaactgcgggtctattatctgtcttggctacgaaatcgaatcctgcacaacgatccggaagtcgaaaagaaacagggctggataaccgtgggtgacctggagggctgcattcattacaaggtggtcaaatacgaaaggattaaatttttggtaatagcgctcaagaacgccgtagaaatatatgcttgggcaccaaaaccgtatcataaattcatggccttcaagtccttcgctgatttgcagcataagccgctcctggtggatctgactgtagaggagggccagagattgaaagttatattcggttctcacaccggatttcatgtgatagacgttgactccggcaattcttacgatatctacattccttcacatatacaagggaacatcaccccccacgcaatcgtgattctgcccaaaaccgatgggatggagatgctcgtctgttatgaagacgagggggtgtacgtgaatacgtatgggagaatcacgaaggatgtggtactgcagtggggagaaatgcccacatctgtcgcctatattcatagcaaccaaattatgggctggggcgaaaaggccatcgagatcagaagcgttgaaactggtcacttggacggcgtttttatgcacaaaagggctcagagactgaaattcctgtgtgaacgaaatgataaggtgttttttgcgagcgttaggtccggcggctctagccaggttttttttatgacactaaacagaaacagtatgatgaactggtag

SEQ ID NO: 138067 - DNA, 4017 bp, synthetic construct
  misc_feature 1..4017: note = Description of Artificial Sequence: Synthetic coding sequence
  source 1..4017: mol_type = other DNA
atggccagtgacagccccgccagatcattggacgagattgacctctccgctctgagggaccctgccggaatctttgaacttgtggaactcgtcgggaacgggacctacgggcaagtatacaaagggcgccacgtcaagacaggccagctcgcagccattaaggtcatggacgtcacaggcgatgaggaggaggaaattaagcaggaaatcaacatgttgaagaaatacagccatcaccgcaacatcgcaacatattacggcgcattcattaagaagaatcctcctggtatggatgaccagctgtggctcgtgatggaattctgtggggccggcagtgtgacagatttgatcaagaataccaaagggaatactctgaaggaagaatggatagcctatatttgcagggagatcttgcgcggcctgtcacacttgcatcagcacaaggtgatccatcgcgacatcaaaggacagaacgtgctgctgacagagaatgcagaagtaaaaattgtcgattttggagttagtgctcagttggaccggaccgttggcaggaggaacacgttcataggtaccccttattggatggcacccgaggtgatcgcttgtgacgaaaatcccgatgccacctacgactttaaaagtgatctgtggtccctgggaattactgccatcgaaatggccgagggcgcgccaccactgtgtgacatgcaccctatgcgggcactgttcttgattcctagaaatccagccccgaggctgaaaagcaagaaatggagcaaaaaatttcagtccttcatcgagagttgccttgtgaagaatcactcacaacgtccagcgactgagcagctcatgaagcaccccttcataagggaccagcccaatgaaaggcaggtgcggattcaactgaaggaccatatcgatagaactaagaagaaaagaggcgaaaaagatgaaactgagtacgagtactcaggctccgaggaggaggaggaggagaatgatagcggagaaccgagctcgatactcaatttgcctggtgaatcgaccctgcgtagggacttcctacggctccagttggccaacaaggaacggtctgaggccttgagaaggcaacagttggaacagcaacagagagagaatgaggaacacaaaaggcagctcctggccgaaaggcagaaacgcattgaggagcagaaggagcaacggaggaggctggaagagcagcagcgtcgggagaaagaactaaggaagcagcaggagcgggagcaaaggagacattacgaggaacaaatgagaagagaagaagaacggaggagggctgagcacgagcaggaatataaacgcaagcagctggaagagcagcgccaggcagagagacttcagagacagctcaagcaggagcgggactatctggtgtccctgcagcatcagcggcaagagcagaggccagtggagaagaagcctttgtaccactataaagagggcatgagccccagcgaaaaacctgcgtgggcaaaggaagtggaagagcgctcacgcctgaaccgtcaatcatctccggcaatgccacacaaggtggccaacaggatttctgatccaaacttgcccccacgctctgagtccttcagcatctctggtgtgcaacccgccagaacaccccccatgctgcggccagtggatccccaaatcccgcacctggtcgccgtcaaaagtcagggcccagccctgaccgcttcacagtccgtccacgagcagccaacaaagggactatccggattccaagaggcccttaacgtgacaagccaccgtgtggaaatgcctcgacagaactcagatcccactagcgaaaatccgccgttgccaaccagaattgagaaatttgatcgctccagctggctgagacaggaagaggacatcccgccaaaggtacctcagcgcactacaagtattagtccagctttagctcgcaagaactcccccgggaacgggtccgccttaggaccaaggctaggaagccaacctatcagggcatccaacccagaccttcggcggacagagccaatcctcgaaagccccctgcagaggacttccagtggctcctcttcttcctcaagcaccccgtcatcccagccctcctcacaagggggctcacagccgggaagtcaggcaggatcctcagagcgtacacgcgtgcgagccaactcaaagagcgagggatctcccgtgttaccccacgagcctgctaaggtgaagccagaagagagccgagatataacacgcccctctagacccgcggtctcggcatttctgagcaaatctttcgagctacttatttatcaggatctgaccgccctcgctaaagaacttcgcgaactcagaatcgaggagactaatcgaccgatgaagaaagtgactgactatagcagctctagcgaagaatccgagagtagcgaggaagaagaggaagacggcgaaagtgagacccacgacggcactgtagccgttagcgacattcccaggctgataccaactggggcgcctggaagtaatgagcagtataatgtaggcatggtcggaactcacggtctggaaacatcacatgcagatagcttctctggtagtatttctagggaagggacactgatgatcagggagacgtctggagaaaagaagcgcagcggacactcagatagcaacggattcgctgggcacattaatctgcctgacctggtacagcagtctcacagcccagccggcaccccaactgaaggtctgggaagggtgtctacccattcacaagagatggattctggcactgagtatggcatgggatcttcaacgaaagcatccttcacgccctttgtggatccgcgtgtgtaccagacttcacctaccgatgaagatgaggaagacgaggaatccagcgccgccgcactctttacgtccgagctattgaggcaggaacaggcaaagctaaacgaggcccgaaaaattagcgtggtgaatgtgaaccctacgaacattagaccccattccgatactccagagattcgtaagtacaagaaacgcttcaatagcgagatcctgtgtgctgcactctggggcgtgaatctgttggtgggcacagaaaatgggttaatgctcttggatagaagtggtcaggggaaagtctacaatttgataaatcggcggcgctttcagcagatggacgtgttggagggactaaacgtcttagtcacgattagcggaaaaaagaacaagctacgagtgtattatctgtcttggttaaggaatcgcattttgcacaacgaccctgaggtggagaaaaagcagggctggatcacggtgggcgatttggaaggctgcatccactacaaggtagtgaagtatgagaggattaagtttctggttatagctttaaaaaacgccgtggaaatctatgcttgggcccctaaaccataccataagttcatggcattcaaatcattcgccgatctccagcacaaaccactgctagtggacctgactgtggaagagggtcagcgtctcaaagtcatttttggcagccatactgggtttcacgtgattgacgtggactctggaaatagctacgacatctatataccttcccacatccagggcaatatcactcctcatgccatcgtgatcttacctaaaaccgatggaatggaaatgctggtgtgctatgaagatgaaggagtttatgttaatacctatggaagaatcacgaaggatgtggttttacagtggggcgaaatgcccaccagcgtggcttacatccactccaaccaaatcatggggtggggagagaaggcaatagagatcaggtctgtggagactggacatttggacggggtattcatgcacaagcgggctcagagactgaaattcctatgtgagcgaaatgacaaagtgtttttcgccagcgttcgatcgggaggcagctcgcaggtgttctttatgactctcaatagaaattcaatgatgaactggtag

SEQ ID NO: 138068 - DNA, 4083 bp, synthetic construct
  misc_feature 1..4083: note = Description of Artificial Sequence: Synthetic coding sequence
  source 1..4083: mol_type = other DNA
atggcgtctgactcacccgcgaggagcttggatgaaatcgacctgtcagctttacgagaccctgcaggaatattcgagctcgtagaattagtagggaatgggacctacggccaagtgtacaaggggcggcacgtgaagaccggacagctggccgctattaaggttatggacgtgaccggagatgaagaagaagaaattaaacaggagattaacatgctaaaaaagtactcccaccacaggaacattgcaacctattacggcgcctttattaaaaaaaaccctccgggcatggacgaccagctatggctggttatggagttctgcggggccggatccgtcaccgacctgataaaaaacactaagggcaacaccttaaaagaggagtggatcgcctacatttgtagagagatattgcggggccttagtcatctgcatcagcacaaggtgatccaccgtgatattaaaggtcagaacgtcctccttacagaaaacgcagaggtgaagcttgtcgatttcggagtatccgcgcaattagatagaaccgtgggacggcgcaacactttcataggtaccccctactggatggcccctgaggtcatcgcctgcgacgagaaccctgacgcgacctacgatttcaagtccgacctgtggagcctgggcatcactgcaattgagatggccgaaggagccccgcccctgtgcgatatgcatccgatgcgagccctcttcttaattccccgtaaccccgcccctcgccttaagtccaagaaatggtctaagaaatttcagagctttatcgagtcttgcctcgtaaaaaatcactcccagcgacccgcaactgagcaactcatgaagcacccttttatccgggaccaacccaacgagcgtcaggtccggatacaactgaaagatcacattgacagaacaaagaaaaagagaggcgagaaggatgaaaccgagtacgagtattccggatctgaagaagaagaggaggagaatgactcgggtgaaccatcctcaattctcaacctacccggggaatccaccctgaggcgtgacttcttgcggttgcagctggcaaacaaagagagatccgaagcactgcgcagacagcagcttgaacagcagcagcgagagaacgaagaacataagaggcagctgctggccgagcgccagaagcggatcgaagagcagaaggagcagcgccggcgtctggaggagcaacagcgccgggagaaagagctcagaaaacaacaggagagagagcagcggaggcactacgaagaacagatgcgtagggaagaagaacggcgccgcgccgagcatgaacaggagtatatccgcaggcaacttgaggaggagcagaggcagctggagattctccagcagcagctcctgcacgagcaggcacttctgctcgagtacaagcgcaagcagttagaggagcagcgacaggccgagcgtttgcagaggcagctgaagcaagaacgggattatcttgtctctctgcagcaccagcgccaggaacagagacctgtggagaagaaaccactgtaccactacaaagaaggcatgagcccttctgaaaagcctgcctgggccaaagaagtggaggaacgatcccgcttgaatcggcagagttctcccgcgatgcctcacaaagtggccaatcgcatctccgatcccaacctgcctccacgctccgaaagttttagtatctccggcgtacaacccgctcgaactcccccaatgttacgtcccgtcgaccctcaaatcccgcacctggtagccgttaagtcccaggggcccgccttaacagcatcccagtctgtccatgaacagcccacgaagggactttccggtttccaggaagctttgaacgtgacatcgcatagagtggagatgccgcgacagaattccgatccaacaagcgagaatccacctttgcctacacgcatcgagaaatttgaccggtcgagctggctgcgccaggaggaggacattccccccaaggtgccccagcggaccacttcgattagccccgccctagctcggaagaatagtccaggtaacggtagcgcactgggccctcgtctgggatcgcaacccattcgggctagcaacccagatctgagacgaacggaacctatcctcgaatctcctttacaacggactagctcgggcagctccagcagctcaagcacccccagttctcagccctcctcgcagggaggcagtcagccaggttctcaagcaggctctagcgagcggactcgagtgagggctaattctaagtcggagggttcccccgtgctcccgcatgagccggctaaagtgaagcctgaggaaagccgcgacataaccaggccctccagacctgcctcttacaagaaggctatcgacgaagacctgacagctttggccaaggaactgagggagctgcgcattgaagaaacaaaccgccctatgaagaaagtgactgactattcctccagcagcgaagagagcgaaagctctgaagaggaggaagaggacggcgagagcgaaacacacgacgggaccgtggctgtcagcgacattcccaggctgataccaacaggcgccccaggaagtaatgagcaatataatgtgggaatggtgggcacccatggactggagaccagccacgccgacagcttctcaggaagcatatctcgagagggaactctcatgatccgggaaaccagcggcgaaaaaaagcgctctggccacagtgacagcaatgggtttgcgggccacataaatcttcccgacttagtgcagcaatcccatagccctgctggaacgccgactgaaggactcgggagagtgtcaactcacagccaggaaatggacagcggtacagagtatggcatgggtagttccacaaaggccagtttcaccccgtttgtggaccctagggtctatcagacctctcccacagatgaagacgaggaggatgaagaatcatctgcggctgccctgttcaccagtgaactgctacggcaggagcaggccaaattaaacgaggcaagaaagatctccgttgtgaatgtaaacccaacaaatattcgcccccatagtgataccccggagattagaaagtacaagaaacggtttaattcggaaatcctgtgtgctgccctgtggggcgtgaacctgctggtcggcactgaaaacggccttatgctcctcgaccggagcggccagggcaaggtgtacaacctaattaacaggagacggtttcagcagatggatgtgcttgagggcctcaatgtcctggtcactatctccggcaagaagaacaagcttagggtctattatctttcatggctgagaaatagaattctgcacaacgacccagaggtagaaaaaaagcagggatggataaccgtgggagatttagaaggatgcatccactataaggttgtaaagtatgaaaggatcaaatttctggtgatcgcactgaaaaatgcagtggaaatttacgcctgggcaccaaaaccctatcacaagttcatggcatttaaatctttcgcagaccttcagcacaagccactccttgtggacctcactgtggaggaggggcagagactgaaggttatcttcggtagtcacacagggttccatgtcatcgatgtcgactccggcaacagttacgatatctatatcccaagccatattcagggaaacataacgccacatgcaatagtgatattacctaaaaccgatgggatggagatgctcgtgtgctacgaggatgaaggcgtttacgtgaatacttacgggcggattactaaggacgtcgtcctgcagtggggagaaatgccaacatcagtagcatatatccattccaaccagatcatgggttggggcgagaaagcgatcgagatcaggagcgtggagactggccatcttgacggagtatttatgcataaacgcgcgcagagactgaagtttctttgcgagagaaatgataaggtcttcttcgcatccgtgaggagtggtgggtcatctcaggtcttcttcatgacattaaatagaaatagtatgatgaattggtag

SEQ ID NO: 138069 - DNA, 3894 bp, synthetic construct
  misc_feature 1..3894: note = Description of Artificial Sequence: Synthetic coding sequence
  source 1..3894: mol_type = other DNA
atggcatccgactccccagcacgctcgttagacgagatcgatctcagtgccttgcgcgacccagccgggatctttgagctggtggagcttgtgggaaatggaacctacggacaagtttataagggcaggcacgttaagactggacaactagccgcgatcaaggtgatggacgttaccggggacgaggaggaggagatcaagcaggaaatcaacatgttaaagaagtactcccatcacagaaatattgctacctactacggcgcctttattaaaaagaatcccccagggatggacgaccagctgtggctggtaatggaattttgcggagccgggtcggtcacagacttgataaaaaataccaagggcaatacgctgaaagaagaatggatcgcttatatctgcagagaaattctgagaggcctgtctcacctccatcagcacaaagtcattcaccgggacatcaagggtcagaatgtgctgctgaccgaaaacgctgaggtgaaactggtcgatttcggagtgtcggctcagctggaccgcaccgtggggcgccggaacacatttattgggactccatattggatggctcccgaagtgatcgcctgcgatgaaaaccctgacgccacctatgacttcaaatcagacctgtggtccctggggattaccgccatcgaaatggcggagggagcccctcccttgtgcgacatgcacccaatgcgggccttattcttgatcccccgcaatccggccccgagactgaagagcaagaaatggtcaaagaagtttcagtcctttattgagagctgcctcgtaaagaaccattctcagcgcccagccaccgaacagttaatgaaacatccttttatcagagatcagccaaacgaacgccaggtacgcattcaactgaaggaccatattgatcggacaaaaaaaaaacgcggagaaaaagacgaaacggagtacgaatatagtggctctgaagaggaagaggaggagaatgatagtggagaaccctcctccatattgaatctgccgggtgaatctacactcagacgggactttctgagattgcagctggccaataaggaaagaagtgaagcccttcgaagacagcaattggagcagcaacagagggaaaacgaagagcataaaagacagctgctggcggagcggcagaaacggatcgaggaacagaaagaacagcgcaggagactggaggaacagcagcggcgggaaaaggaactgaggaagcagcaggagagggagcagagaagacactacgaagagcagatgagaagggaggaggagcgacgcagggcggaacatgagcaagaatacattcgaagacagctggaggaggaacagcgccaactcgaaattttgcagcagcagttgcttcatgagcaagcccttctgctcgaatataagcgtaagcaactggaagaacagcgtcaggctgagcggcttcagagacagttgaaacaggaacgggactacttagttagccttcaacaccaacggcaagagcagcgaccggtagagaaaaaacctctctaccattacaaggagggtatgagtccttctgaaaagcctgcctgggcgaaggaaattcctcacctcgttgcagtgaagtcccaaggtccagcattgacggcttcccaatcagtacatgagcagccgaccaagggcctttccgggtttcaggaagccttgaatgtaacctctcacagggtagaaatgcctcggcaaaacagtgatccaacctcagaaaaccccccgctgccgacacgtatcgagaaatttgatcgatctagttggctccggcaggaggaggacattccccctaaagtgccacaaaggaccacctctatatcaccagcacttgcccggaagaactctccaggcaacgggtcagccctgggaccgcgcctcggaagccagcctatcagagcatctaatcctgacctgagaaggacagaacccatcttggagtctccactacagcggaccagtagtggcagcagcagctcgtcaagcacaccctccagtcagccatcatcgcaagggggctctcagcctggctcacaggcaggctctagcgaacggactcgagtgcgggccaacagcaagtctgagggctcaccagtgctgccgcacgaaccagccaaggtcaagcctgaggagtccagggatattacaagaccaagtcgacctgccgacttgacggccctggccaaggaactgagagagctccggattgaggagacaaataggccgatgaagaaggtgaccgattactcctcctcttctgaggaaagcgagagtagcgaggaggaggaggaagacggggagtctgagacacacgacggaacggtggccgtcagcgatataccacgcctgatccctacaggtgcacccggttctaacgaacagtataacgttggtatggttggaactcacggcctggagacctcccacgccgattctttttccgggagcatatcccgagagggcacacttatgattagggaaacctctggagaaaagaagaggtctgggcattcagacagcaatggctttgccggccacatcaacctgcctgacctggttcaacagtcccattcacctgctggcacaccgacagaaggactgggccgagtgtctacacatagccaggagatggattccggcaccgaatacggcatgggttccagtactaaagcttcatttactcctttcgtcgaccctagagtttatcaaacatctccaactgatgaggatgaagaggatgaagagagctcagcggcggcgctcttcacaagcgaattactacgccaggaacaggcaaagcttaacgaggctcgcaagattagtgtagtcaacgtaaaccctaccaacatacggcctcattccgatactcccgaaatcaggaagtataaaaaacggtttaactccgaaattctctgtgcagccctgtggggtgtaaacctgttggtggggacagagaacggactgatgttattggaccgctcaggccaggggaaagtctacaacttaatcaaccggcgcaggtttcagcagatggacgtgcttgaggggctcaatgtgctggtgactatttcgggtaagaagaataaactgcgcgtctactacctatcttggctgcggaacaggatactccataacgatcccgaggtggagaaaaagcaaggctggattaccgtcggggatctcgaggggtgtattcattacaaagtggtcaaatacgagcgcattaaattccttgtgatcgcattgaagaatgcggtggagatttatgcatgggcgccaaaaccttaccataagtttatggcattcaaatcgtttgcggatctgcagcataagcccctcctcgttgacctcactgtcgaagaggggcagcgactgaaggtgatcttcggaagccacactggctttcacgtcattgacgtagatagcggaaactcttacgatatctatattccgagtcatatccaaggcaatatcactccccacgcaatcgttatcttacctaaaaccgatggtatggagatgctggtttgctatgaggacgaaggtgtatacgtgaatacctacggccgcataaccaaagatgtagttcttcagtggggcgaaatgcctacatcagtcgcttacatccattccaaccagataatgggatggggagagaaggcaatagagatcaggagcgtcgaaacaggccacttggatggggtattcatgcacaagcgggctcagcggttaaagttcctgtgcgagaggaatgacaaggtgttcttcgcttctgtgaggagcgggggatccagccaagtttttttcatgactctaaaccgaaattctatgatgaactggtag

SEQ ID NO: 138070 - DNA, 3972 bp, synthetic construct
  misc_feature 1..3972: note = Description of Artificial Sequence: Synthetic coding sequence
  source 1..3972: mol_type = other DNA
atggcttcagattctcctgccagaagtctggacgagatagacttaagcgccctgcgagaccccgctgggatcttcgaacttgtcgagctggtgggaaatggaacctatggacaggtctataaaggacggcacgtgaaaactggacagctggctgcgattaaagtgatggacgttactggggacgaggaagaggagatcaagcaggagatcaacatgctgaagaaatacagccaccataggaacatagcaacatactatggtgcgttcatcaagaagaacccccctggtatggacgaccagctttggttagtgatggagttctgcggagctgggtctgtgactgacctgataaagaataccaaaggcaacactttgaaggaagaatggattgcatacatctgcagggagattctgaggggactctctcaccttcatcagcataaggtcattcacagagacatcaaggggcagaacgttctgctgaccgagaatgcagaggtgaaacttgttgacttcggagtgtcggctcagctggaccggaccgtggggcgtcggaacactttcattggcaccccatactggatggctcctgaagtgattgcatgcgacgagaaccctgacgccacctacgacttcaaatccgatctatggagcctcggcataactgccatagaaatggcagagggcgccccgccactgtgcgacatgcaccctatgcgggcgttgtttctgattcccaggaatcccgcgcccagactcaagagcaagaaatggtccaagaagttccagtcttttattgaaagctgtttagttaagaaccacagccaaaggcccgccacagagcagcttatgaagcatcctttcattagggatcaacccaatgagcggcaggtccgtattcaactcaaggaccacatagatcgcacaaagaagaaaagaggcgagaaggacgagacagagtatgagtactctggcagcgaggaagaagaggaggagaacgactctggtgaacctagttcaatactcaacctaccaggggaatctacacttaggcgggactttttaaggctgcagcttgctaacaaagagagatctgaggcattacggagacagcagctggagcagcagcagcgagagaatgaagagcataaacgccagttactggcagagcggcagaagcgtattgaagagcagaaggaacagcgtcggcgcctcgaagagcagcaaaggcgcgagaaggaactgcgcaagcagcaggagcgggagcaaaggcggcactacgaggaacagatgcggcgtgaagaggaaagacggagggccgaacatgaacaggaatataaaagaaaacaattggaagagcagaggcaggccgagaggctccagagacagcttaaacaggaacgagattaccttgttagtctgcaacaccagcggcaggagcagcggccagtcgaaaagaaaccactttaccactacaaggaaggcatgtctccttcagagaaacctgcttgggccaaggaggtagaagaaagatctcggctcaaccgccagagcagtcccgccatgccgcacaaggtggcgaaccggatcagtgatccaaatctgccgcccaggagcgagtctttctcgattagtggggtgcagcctgcgaggacaccccccatgcttcgacctgtcgatcctcaaattccacacctggtggctgttaaatcacaaggcccagcacttaccgcctcccaatctgttcacgaacaaccaacgaaggggctgtcaggattccaggaggccctcaatgttacttctcatagagttgaaatgccgaggcaaaactcagaccctacctctgagaatccgcctctccccacaaggatcgaaaagtttgacaggtcctcctggctgaggcaggaggaagacattccaccgaaggttccgcagcgaaccacctccatctccccagccttggctcgcaagaacagccctggcaatggctccgcactagggcctagactcggatctcagccaatccgggcgagcaaccctgatctgcgtaggacagaacctattctcgaatcaccattgcagcgcaccagcagtggttcctcctcaagctcttccacaccctcatctcagccatcaagtcaagggggatcacagccaggttctcaagccgggtccagtgaaagaactagggttcgggctaattccaaatcagagggcagtcctgttttgcctcacgagcctgctaaggtgaaacccgaagagagtcgagatatcacgcggcctagtcggcccgctgatcttactgcactagcaaaagagctacgtgagctccgcatcgaggagaccaatcggccaatgaaaaaggtaaccgactacagctcctcgagcgaggaatccgaatcatcagaagaggaggaggaagacggcgaatccgagacccacgatgggacagtcgctgtttccgacatccctcgattaatccccaccggagcacctgggtccaacgaacaatacaatgtcggcatggtgggtacacatggactcgagactagtcacgcagacagcttctctgggtctatctcacgcgaagggaccctgatgatccgcgaaacctccggcgagaagaaacgaagcgggcactcagactccaatggctttgcgggtcatataaatttgcctgatttggtccagcagtcacattctccggctgggacccctaccgaaggtctgggtagggtctcaacccacagccaggagatggatagcggtaccgagtacggcatggggtccagtactaaagccagtttcacacctttcgtagacccacgcgtttaccagacaagccctaccgacgaagacgaggaagacgaagagagctctgccgccgccctcttcacgtctgaactgttacgtcaggagcaggccaagttaaacgaagcaagaaagatcagcgtcgtcaatgtcaaccccacaaacatccgccctcatagcgacaccccagagatccgtaaatataaaaaacggttcaattctgaaatcctgtgtgcagccttgtggggggtgaacttgctggtgggaacagagaatgggctaatgcttctggatcgttcaggtcaaggtaaagtatacaacctgatcaatcggcggcgttttcagcagatggatgtcctagaaggcctaaatgtactcgtgacaatcagtggaaaaaagaacaagctcagagtctactatctaagttggctgaggaaccgcattctgcacaacgatccagaggttgaaaagaaacagggatggatcactgtcggagatctcgaaggctgcatacactacaaagttgtcaagtacgaaagaatcaagtttctggtaattgcattgaaaaatgctgtggaaatctatgcatgggcacctaagccttatcacaagttcatggcgtttaagagtttcgcggacctccagcacaagcctttgctggtggacttgactgtcgaagaggggcagcgcctaaaggtgatttttggcagccatacggggttccacgttatagacgttgatagcggcaatagctacgacatctacatcccatcccacattcagggcaacattacgccgcacgcaatcgttatcctgccaaagacggacggcatggaaatgctggtgtgttacgaggacgaaggagtgtacgtaaacacatatggtcgaattacaaaagatgttgtcctgcaatggggagaaatgccgacatcagtggcttacattcactcgaatcaaataatgggttggggagagaaggccattgaaatacggtccgtggaaaccgggcatctggatggcgtgttcatgcacaagcgcgcccaacgattgaaattcctctgtgagcggaacgacaaagtcttcttcgcctccgtcaggtcaggagggtcctctcaggtttttttcatgaccctgaatcgtaatagtatgatgaattggtag

SEQ ID NO: 138071 - DNA, 3807 bp, synthetic construct
  misc_feature 1..3807: note = Description of Artificial Sequence: Synthetic coding sequence
  source 1..3807: mol_type = other DNA
atggcctccgactcacccgccaggagcctggatgagattgacctatccgcactgcgtgatcccgcaggaatcttcgaactggtggaattggtaggcaatgggacttatggtcaagtctataaaggccggcacgtgaaaacaggccagttggccgctatcaaggtgatggacgttaccggcgacgaggaggaggagattaaacaggagattaacatgctgaagaaatatagtcatcaccggaacatagctacatactacggagcattcatcaaaaagaaccctccaggcatggacgaccaactatggctggttatggagttctgcggggctgggagcgtgaccgacctaattaaaaacaccaaaggtaatacacttaaggaggagtggattgcctacatatgccgggaaattctgcggggattatcacacctgcaccagcacaaggtgatccatcgcgacatcaagggtcagaatgttctgctgactgaaaatgccgaggtaaagctagtcgatttcggggtcagcgctcaactcgaccggactgtgggcaggaggaatacctttatcggcacgccctactggatggctccagaggtgattgcttgcgacgaaaatcccgatgccacttatgatttcaagtcagatctctggtccttgggcatcactgctattgagatggctgaaggggcaccgcctttgtgtgacatgcacccgatgcgagcattgtttcttatccctcgcaatcctgcaccacggctgaagagcaagaagtggtcaaaaaagttccagtcgttcatcgagtcctgtctcgttaaaaaccactctcagaggcccgccaccgagcaactcatgaaacacccttttattagggaccagcccaacgagcgacaagtaagaatacagctcaaggatcacatcgatcggaccaagaaaaaaagaggcgagaaggatgagacagaatacgagtattccggaagtgaggaggaggaggaggagaacgatagcggggaaccgtctagcatacttaatctgcccggcgaaagtaccttgcgacgagactttcttagactgcagttggctaataaggaacggagcgaggccctgcgccggcagcagctggaacagcagcagcgcgaaaacgaggagcacaagagacaacttctggctgaacgccagaagcgaattgaagagcaaaaagaacaacggagaagactggaggagcagcaacgcagggagaaggagctgcgcaaacaacaggagcgggagcagcggcgacactacgaagaacagatgcgacgtgaggaagaacgtaggagagccgaacacgagcaagagtacaagcgcaaacagctagaagagcagcgccaggctgagagactccagcgacagttgaaacaggagcgcgactatttagttagtttgcagcaccagaggcaggaacagaggcccgtggagaagaagcccctctatcattacaaagagggaatgtcaccatccgagaagccagcttgggctaaagaaatcccacacttggttgcagtcaaaagtcagggacccgccctgacagcctctcagtctgtacacgagcagcccacaaaagggctatccggctttcaggaggctctgaacgtaacctcacatagagtggagatgccccgacagaacagcgaccccaccagcgagaatcccccccttcctacccggattgagaaatttgacaggtcaagctggttgcggcaggaggaagacataccaccaaaggtgcctcagcgcacaacgtcgatctccccggctcttgcccgcaagaatagccctgggaacgggtccgcgcttgggccacgattaggcagtcaaccaatcagagccagcaatcccgacctgagaagaaccgagcctatcctggagtccccgctccagagaacctcgagcggcagctccagttcatcttccacaccttcaagtcagccaagttcccagggtggcagccagccaggtagtcaagcaggtagcagcgagcggactagggtgagagccaactctaagtctgagggctccccagtgctgccccacgagcctgcgaaggtgaaaccagaggaatcacgcgatattacacggccttctaggccagcagatctcactgcccttgctaaggagcttagggaactgcgcattgaagagacgaacaggcctatgaaaaaggtgacagactacagttcttcctccgaagagagcgaatcatccgaggaggaggaggaggacggagaaagtgagactcacgacggaacagtggctgtgagcgatattcctcgactgatccctaccggcgcccctggcagcaacgagcagtataatgtgggcatggtgggcacccatggtctggaaacctcacatgctgatagctttagcggctccattagcagagaagggacgttgatgatccgagaaacatccggagagaaaaaaagaagtggccactctgatagtaacggctttgcaggccacatcaaccttccggacctcgtgcagcagagccacagtccagctggcacacctaccgaaggcctcggtagagtcagcacccacagccaggaaatggacagcgggaccgaatatggcatgggaagcagtacgaaagcaagtttcaccccttttgtcgacccacgagtctatcagacgagtcctacagacgaagatgaagaggacgaggagtcctcagccgcagctttatttacctccgaactgctccggcaggaacaggcaaaactgaatgaggctaggaaaatctccgtcgtaaacgtgaatcctacaaacattcgcccacactccgacacccctgagatcaggaagtataagaagcgctttaacagcgagatcctctgtgcggccttgtggggcgtcaacttactggtcgggactgagaacggtcttatgctcctagatcggagtgggcagggaaaggtctataacttgatcaatcgcaggaggttccaacagatggacgtgctagagggtctaaacgtcctcgtaacaattagtggcaagaagaataagctgcgagtgtattaccttagctggctacggaataggatcctacacaatgaccccgaggtggaaaagaaacaggggtggatcaccgtgggggatcttgaaggatgtattcattataaggttgtgaagtacgaaaggatcaaatttctggtgatcgctcttaaaaacgctgttgaaatctatgcctgggccccaaagccttaccataagtttatggcgttcaagagctttgccgacctgcagcataaaccccttctggtggacctcaccgttgaggagggtcaaagactgaaggtcatctttggtagtcacaccggatttcatgtgatcgatgtggatagtggcaattcctatgatatctacatcccgagtcatattcagggcaatatcaccccccatgccatcgttatactgcccaaaacagatggcatggaaatgctggtgtgttacgaggacgagggagtgtatgtgaacacgtacggcagaataaccaaggacgttgtgctgcagtggggagagatgcccacttccgtcgcatacattcatagcaatcagataatgggttggggcgagaaagcaattgagatccgctcggtagagactgggcacctggatggagtgttcatgcataagcgggcccagcggctaaagtttctgtgcgagcggaatgataaggtcttttttgcgtccgtaaggtcagggggttccagccaagtgtttttcatgacgctcaaccgcaacagtatgatgaactggtag

SEQ ID NO: 138072 - DNA, 3918 bp, synthetic construct
  misc_feature 1..3918: note = Description of Artificial Sequence: Synthetic coding sequence
  source 1..3918: mol_type = other DNA
atggcctctgactcgcctgcaaggagcttggatgagatcgacctgtccgcccttcgagatccggcaggaatttttgagctcgtggaactggtgggaaacggaacatacgggcaagtgtacaaagggcgccatgtgaagacgggccagttggccgccatcaaggttatggatgtgaccggagacgaggaggaagagattaagcaggagatcaatatgttgaagaagtattcgcatcatcggaacattgccacatactacggcgcttttatcaaaaagaaccctccaggaatggacgatcagctgtggctcgtgatggagttctgcggtgctgggagtgtcacagatctcattaaaaataccaaagggaacacccttaaggaagaatggatagcctatatttgccgcgagatcttgaggggcctgtctcatctgcatcagcacaaggttatccaccgcgacattaaagggcagaatgttttgctgacagagaatgccgaagtgaaactggtcgattttggcgtttcagcacagctagacagaacagttgggcggagaaacactttcattgggactccctactggatggcacctgaagttatcgcttgcgatgaaaatcctgacgctacatacgatttcaagtctgatctctggagcttaggcatcacagccattgagatggctgagggcgctccaccactgtgcgatatgcatcccatgcgggcactgttcttgataccaaggaatcctgctcccagactgaaaagcaagaaatggagcaagaagttccagtctttcatcgaaagttgtctcgttaagaaccactcgcagcggcccgctacagagcaactcatgaagcaccctttcatacgggatcagcctaacgaaaggcaggtccggattcagttgaaggatcacattgaccgcaccaagaaaaaaaggggcgagaaggatgagaccgagtatgagtactctggctcagaggaagaagaagaggagaatgattccggagagcccagttccatcctgaacctgccaggtgaatctaccctccgcagggacttccttcggctacaattggcgaacaaggagaggagcgaggcactcaggaggcaacagctggaacagcagcagcgcgaaaatgaagagcataagaggcagcttctggctgagcgtcagaaaaggattgaggagcagaaggagcaaaggcgccgattagaggagcagcagagaagggagaaggaacttaggaagcagcaggagcgggaacagcggcgacattatgaggaacagatgagacgagaggaggagcggcgacgcgccgaacacgagcaggaatacatacgtcggcaactggaggaggagcagcggcagctggaaattctgcagcaacaattgctccacgaacaagcattactgctagaatataagaggaaacaacttgaggagcagcgccaggctgaaagactccagcggcagctcaagcaagaacgtgattatctggttagcctccaacatcagcggcaggagcagcgtcccgttgagaagaagcccctctaccactataaggaagggatgtccccttccgagaaaccggcttgggcgaaagaaatccctcatctcgtggcagtcaagtctcagggaccggcccttacggcatctcaaagtgtccacgaacagccaactaaaggcctgtcaggctttcaagaggcgctcaacgtgacctcacaccgcgtggaaatgcctaggcagaattctgaccctacctctgaaaacccacccctaccaactaggatcgagaaatttgaccgttcctcttggctgagacaggaagaggacatacctcctaaagttccccagagaaccaccagcatcagtcctgctctggcaaggaaaaactctcctgggaatgggagcgcgctgggaccaagacttggaagtcagcctatcagggctagtaaccccgatctgagacggacggagcccatcttagaatctcctttacagcgcacatcgagtgggagctcatccagtagctccacaccttcttctcagccctccagccaggggggctcccagccaggcagtcaggccggctcaagtgaacgtacacgggttagagctaactccaagtcggagggcagccccgtgctgcctcacgagcccgctaaggtcaagcccgaagaaagcagggatatcacccgccccagccgccccgctagttataagaaggctatcgacgaggacttgacagccctggcaaaagaacttagagagctgaggatagaggaaactaatcgccccatgaagaaggttactgactattcctcatctagcgaagaatccgaatcaagtgaagaagaggaagaagacggcgaatctgagacacacgatggcactgtggccgttagcgacatccctcgcctgatccccactggggcaccagggagcaacgagcagtacaatgtgggcatggtgggtactcatggtctggagacatcccacgctgactccttctctggtagcatatcacgggaaggaacgcttatgatacgtgaaacctctggagagaagaagaggtctgggcatagtgacagtaatggctttgctgggcatattaacctccccgacctggtgcagcagagccatagtccggctggcacccccacagagggcctcggtagggtgagtacccacagccaagaaatggattcaggcactgagtacggcatgggctcctcaactaaggcatcattcactccttttgtagatccccgggtgtaccaaacctctcctaccgatgaagatgaggaagacgaggaaagcagcgctgccgcactgtttacatctgaactgttgcggcaggagcaggctaaactcaatgaagcacggaaaatctccgtagtaaacgtgaacccaaccaacatccgccctcactctgatactcctgagatccgtaaatataaaaaaaggttcaactctgaaatactctgcgccgcgctgtggggcgttaacctactagtcggaacagaaaatggactgatgctcctcgataggagtgggcagggcaaagtatacaacctgatcaataggcgacgcttccagcaaatggatgtactcgaaggattgaacgtgctggttaccatatctgggaaaaagaataaattaagggtctattatctcagttggctaaggaatcgcatactgcataatgacccagaggtggagaagaagcaaggctggatcactgtgggcgacttagaaggatgcattcactacaaagtggttaaatacgaaaggattaaatttctagtgatagccctcaagaatgctgtggagatctatgcgtgggctcctaaaccctaccacaagttcatggccttcaaaagcttcgcggacctgcagcacaagcctctgcttgtggatctcactgtcgaagaggggcagaggcttaaggttatcttcggatcacatactgggttccatgtgatcgacgtggactctgggaattcatacgacatctatattccttcgcatatacagggaaatattaccccccatgcaattgtgatcctgcccaagacggacgggatggagatgctcgtgtgctatgaagacgaaggcgtttacgtcaacacatacgggagaatcactaaggatgttgtgctccagtggggagagatgccgactagcgttgcatacatccactcaaaccagattatgggttggggcgagaaagccatcgagatcaggagtgtagagaccggtcaccttgacggagtttttatgcataaaagagcccaacgattaaagtttctgtgtgagcgtaacgataaggtctttttcgcatcagttagatcgggaggaagctcccaggtcttcttcatgactctgaatcggaatagcatgatgaattggtag

SEQ ID NO: 138073 - DNA, 3939 bp, synthetic construct
  misc_feature 1..3939: note = Description of Artificial Sequence: Synthetic coding sequence
  source 1..3939: mol_type = other DNA
atggcatccgacagcccagccagaagtctggatgaaatcgatcttagtgccctcagagaccccgccggcattttcgaactggtggagctcgtagggaacggaacttacggccaagtctacaagggaaggcacgttaaaaccggtcagctcgctgcaatcaaggtcatggacgtgaccggcgacgaggaggaagagattaaacaggaaatcaatatgctaaagaagtatagtcatcatcggaatattgcgacctattatggtgcattcataaaaaagaatccccctggcatggacgaccagctgtggctggtaatggagttttgtggggccggttcagttactgacctcattaaaaacaccaagggtaatacactgaaagaagagtggatcgcctatatctgccgagaaatcctcagggggttgagccacttgcatcagcacaaagtcatacacagggatataaaaggacaaaacgtgcttctcactgagaatgccgaggtgaaaatagtcgactttggagtgtctgcccagttggaccgtaccgtgggacgtcggaacacttttattgggactccatattggatggcaccagaggttatagcttgtgacgagaaccccgatgccacctacgacttcaagagcgacctgtggtccctcggaatcacggccattgagatggcggagggcgccccacccctgtgtgatatgcatcccatgcgagccttatttctgattcctcgtaatcccgccccacgccttaaatctaagaagtggtccaaaaaattccagagctttatagaaagttgtcttgtgaagaaccactctcaaaggcccgcaaccgaacaactgatgaaacatccttttatccgagatcaacctaatgagcgacaagttcggatccagctcaaggaccacatagaccgcaccaaaaagaagcgcggggaaaaggacgagactgaatacgaatattcggggagcgaagaagaagaggaggaaaacgatagcggagagccttcttcaatcctgaatttgcccggagagtccaccttgcgaagggatttccttaggctccagttggccaataaggagcggagcgaggccctccgccgtcagcagttggagcagcagcagcgggaaaatgaggaacataaacgccagctgctcgcagaacgccaaaaaaggatagaagaacagaaagaacagagaaggaggctcgaggaacagcagcggcgggaaaaggaactgcgcaagcagcaggaacgagaacagcgcagacactacgaggaacagatgcggcgcgaggaagagcgccgtcgcgctgagcacgagcaggagtacatcaggaggcagctggaagaggaacagcggcagctggaaatcttgcagcagcagttgctccatgaacaggccttgttgctggagtacaagaggaagcagctggaggaacagcggcaagccgagagacttcagcgccagctgaagcaggaacgagactacctagtgagcctacagcatcagcgccaggagcagaggcccgtagagaagaagcccctgtatcactataaagaagggatgagcccttccgagaagccagcctgggctaaggagattccgcacttggtggccgtaaagtcccaggggcccgcgctaacggcctcccaaagtgtgcacgagcaaccaaccaaagggctgtccgggtttcaggaagcactcaacgtcaccagtcaccgcgtggagatgccacgtcagaactccgatcctacctccgagaaccctcccctcccaacgcgcattgagaagttcgaccgaagtagttggctgcgtcaggaagaagatattccacctaaggtgccgcagcgaacaacctccatcagtccggctctggcccggaagaactctccaggcaatgggtctgccttgggcccgaggttgggctctcagcccatcagggccagtaatcctgacctccgtagaacagaacctatattggaatctccactgcagaggacaagcagcgggtcatcgtcatcctcatctacaccatcgtctcaacccagttcccaggggggctcacagcccggcagtcaggccgggtcaagcgaaaggactcgtgttcgtgcaaactctaagtctgagggttctcctgtgctgccccatgagcccgctaaggtaaaaccagaagagtcacgagacattactagaccctctcgcccagcggtgtctgcatttctctctaagtcattcgaactgctgatttatcaggatttgacggctctagctaaggaattgagggagctgcggatcgaggaaactaaccgacccatgaagaaggtgacggactattcaagcagctcggaggagtcagagagtagcgaggaagaggaagaggacggcgagtccgagacacatgacgggaccgtggccgtgtccgatattccgcgactcattccaactggagcccctggctccaacgaacaatataacgtaggcatggtcggtacacatggtctggagacaagtcatgccgacagctttagcggttcaatctcccgggaaggcaccttaatgattcgagaaacatccggtgagaagaagagatcgggccatagtgatagcaacgggttcgctggacatataaatctccccgatctcgtacaacagtcgcacagcccagccggcactccgaccgaaggcctaggacgcgtgagcacccactcccaagagatggactccgggaccgagtatggtatgggttcttcaacgaaggcatccttcaccccctttgttgatcccagagtttatcagacatcccctacggacgaagatgaggaagacgaagagtcatccgcagctgcccttttcacaagcgagctgctgcggcaagagcaggcaaagctcaacgaggctcgcaagatttcagtcgtcaatgtcaatccgaccaacattagaccccatagcgacacccctgagatacgtaagtacaagaagcgctttaacagcgagattctgtgtgcagctctctggggtgtcaaccttctggtgggtactgagaatggccttatgctgctcgatcggagcggccaggggaaggtttataatttgatcaatcgtaggcgatttcaacaaatggatgtgctggaggggctgaatgtgctggtaaccatttcgggcaagaagaacaaactaagagtgtattacctctcatggctgagaaacagaatcctccataacgaccctgaggtagagaagaaacagggatggattaccgtgggcgacctggaggggtgtattcactacaaagtggtgaagtatgaacgcattaaatttctggttattgcgctaaagaatgcagtagagatttatgcctgggccccaaaaccctaccacaaatttatggctttcaagtccttcgctgacttacagcataagccactcctggtggacctgactgtcgaggagggccagagattaaaagtcatcttcggtagccacacaggtttccatgtgattgacgtcgacagtggcaacagctatgatatttacataccttcccacatccaggggaacattactccccacgctattgtgatcctcccgaagactgacggaatggagatgctggtttgttacgaggatgaaggcgtgtatgttaacacgtatggaagaatcactaaggacgtcgtgctgcagtggggagagatgccaacttccgttgcctacatccattccaaccaaatcatgggctggggcgaaaaagccatcgagatcagatccgtggagacaggacatctggatggagtgtttatgcacaagcgcgctcagagactcaagttcctgtgcgagaggaatgataaagtattcttcgctagtgttcgatcaggcggatctagccaggtgttcttcatgacgttgaataggaattcgatgatgaattggtag

SEQ ID NO: 138074 - DNA, 1725 bp, synthetic construct
  misc_feature 1..1725: note = Description of Artificial Sequence: Synthetic coding sequence
  source 1..1725: mol_type = other DNA
atgcccccgcagctgcaggaaactcgaatgaaccggagcatcccagtggaggttgacgagtcagaaccttaccccagtcagctcctcaaacccatccctgaatacagcccagaagaagaatccgaaccccctgcccctaatattcggaatatggcacccaactcattgtcagcgccaacaatgctgcacaattcatccggtgatttttcacaagcccattcaactctcaaacttgccaatcatcagcggcccgtctcacgtcaggtgacctgtttgaggacacaggtgctggaggattctgaagactcattttgccgtcggcatccggggttgggaaaggcattcccttccggctgcagcgctgtctctgagccagcttctgaatctgtggtaggcgccctgcccgctgaacaccaatttagctttatggagaagcgaaaccagtggcttgtttcccaactttcagccgcgtccccagacacgggccatgactccgacaagagcgaccagagcctgcccaatgcttcggccgacagcctcggtggctcacaggagatggtgcagcggccacaaccacaccggaaccgagcgggcctagacctgcccactattgacaccgggtatgattcccagccacaggacgttctagggatccggcagctggaacgtccgctgccactgacaagtgtgtgttacccgcaggatttacctcgacctctgcgttcccgcgagttcccgcagttcgagcctcagaggtatccagcctgcgcccaaatgttgcccccgaatctttcacctcatgctccttggaattatcactaccactgccctggatcaccagaccatcaagtcccatacggacacgattatccgcgggctgcctatcagcaagtgattcagcctgccttgcccggacagcccctccctggtgcttctgtgcggggccttcatcctgtccagaaggttattcttaattatccatccccttgggaccacgaagaaagacccgcccagcgcgactgttcctttccaggtctcccacgccaccaggaccagccacaccatcaaccacccaaccgcgctggggccccaggcgagagcctcgagtgccctgccgaactccgaccacaggtcccccaacccccgtcccccgccgctgttccacgccctccttctaacccacctgcgagagggactctgaagacatcaaatctgcccgaagagttgcgaaaggtgtttatcacctactcaatggacaccgccatggaagtggtgaagtttgtgaatttccttctggtcaacgggttccagactgctatcgacatctttgaagatcgaatcagggggatcgatattatcaagtggatggagagatacttgcgcgataaaacagtgatgattatcgtggcgatttcccccaaatacaagcaggatgttgaaggcgcggaaagtcaacttgacgaagacgagcatggcctgcacaccaagtacatccaccggatgatgcaaatcgagttcatcaaacagggcagcatgaatttccggttcattcctgtcctctttccaaatgctaaaaaagagcatgtgcctacttggctccagaacacccatgtgtactcatggcctaaaaacaagaagaacatccttctgcgcctgctgcgtgaggaggagtacgttgcacccccacgcggtcctcttcctacactccaggtggtccctctttag

SEQ ID NO: 138075 - DNA, 1695 bp, synthetic construct
  misc_feature 1..1695: note = Description of Artificial Sequence: Synthetic coding sequence
  source 1..1695: mol_type = other DNA
atgaaccgctcaatccctgtagaagtcgacgagtcagagccgtatccttcccagctgctcaagcctatccccgagtacagtccagaggaagagagtgagccacctgcacctaatattcggaacatggctcccaatagcttgtctgctcctacaatgcttcacaactcttccggggacttttcgcaggcgcattctaccttgaagcttgcaaatcaccagcggcccgtgtcacgtcaagtcacctgcctgagaacacaggtgttggaagacagtgaggacagcttctgccggaggcacccagggctaggcaaagcctttcccagcggttgctccgccgtttctgagcccgcctcagagtcagtggtgggcgcgcttccggccgagcaccagtttagcttcatggaaaaacgtaatcagtggctagtgtcacaattgtccgccgccagtcctgacaccggccacgatagcgataagtcagaccagtctctgcccaatgccagcgctgattctctgggtggatcccaggagatggtgcaaagaccccagccccacagaaatcgtgccgggctggacctgcccacaatcgatactggatacgattctcaacctcaagatgtcttgggtatccgtcagttagagcgcccactgccattaacatctgtgtgctatccccaggacttaccaaggcctctgagatccagggagtttccccagttcgagccccagcggtatcctgcatgcgcacaaatgctgccgccgaacctgtccccgcacgccccatggaactaccactaccactgccctggttctcccgatcaccaggtgccctacggccatgattaccccagggctgcatatcagcaggtgatccagccagctctccccggtcagcctctgccgggggcttctgtaagggggttgcatccagttcagaaagtaatcctgaattacccaagcccttgggaccacgaagaacgcccagctcaaagagactgttcattccctggcctgccgaggcatcaggaccaaccccaccatcaaccgcccaaccgggcgggagcgccaggggaatctcttgagtgccctgccgagctaaggcctcaggtcccacagcctcccagtcccgcagccgtgccccggccgccctctaacccacctgcaaggggaaccctgaagacttcaaatttaccagaggagttacgcaaggtgtttatcacctacagcatggacacagctatggaggttgtgaaattcgttaactttttgctggttaatgggtttcaaacagccatagacatctttgaggaccgaattcgtggaattgatatcatcaaatggatggaacgctatctccgcgacaccgttatgatcattgtagcaatctcgccaaagtataaacaggatgtggagggagccgagtcacaacttgacgaggacgaacatgggctgcacacaaagtacatccatcggatgatgcaaatcgagtttattaagcagggaagtatgaattttcgctttatccccgtgctatttcccaacgccaagaaagaacacgtaccgacgtggttgcagaatacacatgtctattcatggcctaaaaacaaaaagaacattttgctgagactcctgcgggaagaagagtacgtggctccgccgagagggcccctgccgaccctgcaggtggtaccactgtag

SEQ ID NO: 138076 - DNA, 1698 bp, synthetic construct
  misc_feature 1..1698: note = Description of Artificial Sequence: Synthetic coding sequence
  source 1..1698: mol_type = other DNA
atgaatcggtccatccccgtggaagtagacgaatctgaaccctatcccagccaactactcaagcctatccccgaatacagcccagaggaagagagtgagcctccagcaccaaatatccggaacatggccccaaacagcttaagcgcacctacaatgctacacaattcatcaggggactttagtcaggcccactctaccctgaaacttgcgaatcatcagaggcctgtgtctagacaggtgacttgcctcagaactcaggtactggaggactccgaggacagtttctgtcgacgccaccccggcctggggaaagcctttccttccggctgttctgcagtctctgagccagcttctgagagtgtagtgggagcgctgcctgccgagcatcagttctcattcatggaaaagcgcaaccagtggctcgttagccagctgagcgccgcctcacccgacactgggcacgatagtgacaagagcgaccagtccttgcccaatgctagtgccgattcactagggggcagtcaggagatggtccagcggccacagcctcatagaaatagggcagggttagatcttcctaccattgacacaggatacgattcccaaccacaggacgttctaggcatccgccagctggaaagacccttgcccctgaccagtgtttgctatccgcaagaccttccaaggccactccgctctcgcgaattcccccagtttgagccacagcggtatcctgcgtgcgctcaaatgttaccccccaatctgagccctcatgccccttggaactaccactatcattgccccggatcgccagaccatcaggttccttacggccatgactacccccgcgcagcatatcagcaggtcattcagcctgctttaccagggcaacctctaccgggcgcatccgtccgaggtctccaccccgtgcagaaggtgatcctcaactatccctcgccgtgggatcatgaggagagaccagctcagcgggattgcagctttccaggccttccccggcaccaagaccagcctcaccatcagcctcctaatcgggcaggggctccaggggaatccctagaatgccctgccgaactgagaccacaggttccacagcctccgtctcccgctgctgtccctcggccaccctctaaccccccagctagaggcaccttgaagacctccaatctgcctgaagagctgagaaaggtcttcattacctatagcatggatacagcaatggaggtcgtcaaattcgttaatttcctgctggtgaatggatttcaaacagcgattgatatcttcgaggacagaataaggggcatcgatatcatcaagtggatggaacgctatttgcgtgataagactgttatgatcatcgttgctattagtccaaaatataaacaagacgtagagggagccgagagccagttagacgaggacgagcatggccttcataccaaatacattcataggatgatgcagatcgaattcatcaaacagggctccatgaacttccggtttattccagtgctctttcccaacgctaagaaggagcatgtccccacttggttgcaaaacactcatgtctattcatggcccaagaataaaaaaaacattctgctccgtttactgagggaggaggagtatgtcgcaccgccacgagggcccctgcccacactgcaggtagttcccctgtag

SEQ ID NO: 138077 - DNA, 1725 bp, synthetic construct
  misc_feature 1..1725: note = Description of Artificial Sequence: Synthetic coding sequence
  source 1..1725: mol_type = other DNA
atggcgcctcaactcgaagaaacccggatgaaccgaagcatccccgtagaggtggatgagtccgagccctatcctagtcagctcctcaaacccattcccgagtactcacctgaagaggagagcgaaccccccgcccctaatatccgcaatatggcccctaatagcctgtcggctcccacgatgctccataactctagtggggacttcagccaggcacactcaaccctgaagctggccaatcaccagaggcccgtgtcacgccaggtgacctgcttgcgtacccaagtattggaagatagtgaggattcattctgtcggaggcatcctggcctaggcaaggcgttcccgtctggttgtagtgcagtctctgaacccgctagcgaatcagtcgttggggcgttgccagcggaacaccagttcagtttcatggaaaagaggaaccagtggctcgtctcccagctctccgctgcttcccctgatactgggcacgactctgacaagtccgatcagagtctccctaatgcatctgctgatagtctaggagggagtcaggagatggtgcagcgtccgcagcctcaccggaacagagccggtctggatttgccaaccatcgacacaggttacgactcacagccacaggatgtgctcgggatccgacaactcgagcgaccactgccgctgacatccgtctgctaccctcaggaccttccacggccactgcggagccgtgagttcccacagttcgagccccagcgataccccgcttgcgcacaaatgctgccaccgaacctgagtccgcacgcgccctggaactatcactaccactgcccaggctcccccgaccatcaggtcccctatgggcacgactatccccgagcagcgtaccaacaggtcatccaacccgcccttccaggccagccgctgcccggtgcctccgtgcgcggtttacaccctgtgcagaaagtgatcctcaattaccccagcccctgggatcatgaggagaggcccgcgcaaagggattgtagttttcccggactgcccagacaccaggatcagcctcaccaccagccacctaaccgcgccggcgccccaggcgaatcccttgagtgccctgccgaattgcggcctcaggtccctcagcccccgagccctgcagccgtgccgcgacccccctccaatccacctgccagaggcaccttaaagacctccaacctgcctgaggagctcaggaaggtattcattacttattcaatggacacagccatggaggtagtcaagttcgtcaactttctgctggtgaatgggttccaaactgccatcgatatctttgaggacaggatccgggggatcgatatcataaaatggatggagcgctacctgcgagacaaaaccgtgatgatcattgttgctatatccccaaagtacaagcaggatgtggagggcgctgagtctcagctggatgaggacgaacacggtctgcataccaaatatatccaccgaatgatgcagatcgagtttatcaagcaggggagcatgaactttcggttcattcccgtgctctttccaaatgctaaaaaagagcatgtgccgacttggctccagaatactcatgtctactcatggcctaaaaataagaaaaacatcctgctgaggctgctgcgagaagaggagtacgtcgcccctccccgcggccccttgccaacgctgcaagtggtgccattatag

SEQ ID NO: 138078 - DNA, 462 bp, synthetic construct
  misc_feature 1..462: note = Description of Artificial Sequence: Synthetic coding sequence
  source 1..462: mol_type = other DNA
atggaggtggttaagttcgtgaattttttactggtcaacggattccagacagccatagacatttttgaggaccgtataagaggtatcgatatcatcaagtggatggagcgctatctccgggacaaaactgtgatgatcattgtggccattagccccaagtacaagcaggatgtggagggcgccgaatcccagctcgacgaagatgagcacggattgcatacaaaatatatccatcggatgatgcaaatcgaattcatcaaacaaggcagtatgaattttcggttcatcccagtgttgttcccaaatgcaaaaaaagaacacgtccctacttggcttcagaacacacatgtgtactcctggcccaagaacaaaaagaacatcctgctccgactgcttagggaagaggagtatgtggccccgccacggggtccactgcctactctccaagtggtcccgctctag

SEQ ID NO: 138079 - DNA, 330 bp, synthetic construct
  misc_feature 1..330: note = Description of Artificial Sequence: Synthetic coding sequence
  source 1..330: mol_type = other DNA
atgattattgtggccatctcgcctaaatacaagcaggatgtagagggcgccgagagtcaactggatgaagacgagcatggcttgcatacaaagtatattcacaggatgatgcaaatcgaatttattaaacagggaagcatgaactttcgattcatacccgtcttgtttcccaatgcaaaaaaagaacatgttccaacttggctgcaaaacacgcatgtgtactcttggcccaagaataaaaagaacatcctgctcaggttgctgagagaggaagagtacgtggctcccccgagaggtcctttaccaacgttacaagtggttccactctag

SEQ ID NO: 138080 - DNA, 1596 bp, synthetic construct
  misc_feature 1..1596: note = Description of Artificial Sequence: Synthetic coding sequence
  source 1..1596: mol_type = other DNA
atgatttcccccgatccccgtccaagccctggccttgcacgttgggcggagtcctatgaagctaaatgtgagcgtcgccaggaaatccgtgaaagtaggagatgtcgaccaaacgtcacaacttgccgccaggtgggaaaaactctcagaatacagcagagagagcagctacaacgggctcgcttacagcagttttttaggcggagaaatctcgagcttgaggagaaagggaaggctcagcatcctcaggcccgcgagcagggcccctctcgaaggccaggtcaggtcacaggaacttcttctgaggtgttccccgcccagcatccccctccctccggcatctgcagagacttgagcgaccacctgtcctctcaggccggggggttgccgcctcaagataccccaatcaagaagccacccaagcaccatcggggaacgcagacaaaagcagagggccccaccataaagaacgacgcatctcaacagacgaattatggagtcgcagtcctggacaaagaaatcattcaattgagcgactacctgaaggaggccttgcaacgagagctggtcttgaagcagaaaatggtgatcttgcaagacctgctgtctacactcatccaggcttcagattccagctggaaaggacagttgaatgaagacaagctgaagggaaagctgcgcagcctagagaatcagctatacacatgtactcaaaagtactctccatggggcatgaagaaagtgctcctggaaatggaggatcagaagaacagttacgaacagaaggcaaaggagtctctgcagaaagtgctggaggagaaaatgaacgccgagcagcagctccaaagcacacagaggtccctggcactagccgaacagaagtgtgaggagtggcggtcacaatatgaggctctgaaggaagattggaggaccttggggactcagcaccgtgagctggagtcccagttgcatgtgctgcagagtaagctccagggcgccgatagccgcgatctccagatgaaccaggcactgcgcttcttagagaacgagcatcagcagctgcaggctaaaattgagtgcttgcagggggacagagatctgtgctccctcgacacacaggatctacaggaccagctgaagcggtcggaagccgagaaactgactctcgtcacacgcgttcagcagctgcagggcttgctccagaaccagtcattacaactgcaagagcaggagaaactgctcacgaaaaaggatcaagccctgcctgtgtggagccctaaatcctttccgaatgaagtcgaacctgaaggcacgggtaaagagaaagactgggatctgcgagatcagctccagaaaaagacactccagctgcaagccaaggagaaagaatgtagggagctccactcagagctggacaacctgtctgatgagtacctctcatgtttacgtaagctgcagcattgtcgcgaagaactcaaccaaagtcagcagttacctcctcgacggcaatgtggccgctggctgcccgtactgatggtggttattgctgccgccttggcggtattcctggccaataaggataacctgatgatctag

SEQ ID NO: 138081 - DNA, 549 bp, synthetic construct
  misc_feature 1..549: note = Description of Artificial Sequence: Synthetic coding sequence
  source 1..549: mol_type = other DNA
atgaagaaggtccttttagagatggaagaccagaagaattcgtacgagcagaaggcaaaagaaagtttgcaaaaagtacttgaggaaaaaatgaatgcggaacaacagctgcagagcacccagcgctccttggccctggctgagcagaagtgcgaggagtggagatctcaatatgaagctctgaaagaggattggcggaccctcgggactcagcacagggagctggaatcccagctccatgttttacagagcaagttgcagggcgctgattcaagagatctacagatgaaccaggccctgaggtttctcgaaaacgagcatcagcagctgcaagccaagatagagtgtctccagggagatcgggatctttgttcactcgatacgcaagaccttcaagatcaacttaaaaggagtgaggccgaaaagttgactttagtcacccgcgtccagcagctgcaggggctgctgcagaaccagtcactccagctacaagaacaggagaagctgctcaccaagaaggggcaacagatctattaccacaagttctag

SEQ ID NO: 138082 - DNA, 1656 bp, synthetic construct
  misc_feature 1..1656: note = Description of Artificial Sequence: Synthetic coding sequence
  source 1..1656: mol_type = other DNA
atgattagtccagaccccagaccatcgccaggcctggccagatgggccgaaagttatgaagccaagtgcgaaaggcggcaggagattcgcgaatctcgacgctgcaggcccaacgtcactacttgccgccaggttggcaagaccctgcgcatccagcaaagagaacagctacagagggctcggctccagcaattcttccggcgtcgcaacctcgaattggaagaaaaagggaaagcgcaacaccctcaggcccgggagcagggcccctccaggaggcctggtcaggtgacggttctgaaggagcctttgagctgtgcgcgtagaatttcatcaccacgagagcaggttacagggacatctagcgaagtcttccctgcccagcacccacccccttctgggatctgtcgagacctctccgaccacctgtcctctcaagcgggtggactgccaccccaggacactccaattaagaagcctccaaaacatcacagaggcacacagaccaaagcagaggggcccactattaaaaatgatgcttctcaacagacaaattatggcgtggctgtgttggataaggaaatcatccagctgtccgattatctgaaggaagcactgcagcgtgaattggtgctcaagcagaagatggtcatcttacaggaccttctgagcacccttattcaagctagcgacagcagctggaaaggccagttaaacgaagacaagctgaagggaaagctacggagcctggaaaatcaactgtatacttgtacacagaagtactccccatggggaatgaagaaagttctcctggaaatggaggatcagaaaaactcctacgagcagaaagccaaggagagcctgcagaaggtgctggaggagaaaatgaatgccgaacagcaactccagtccacgcagcggagcctggcattggccgagcagaaatgcgaagaatggcgatcacagtatgaggccctgaaggaagattggaggacactgggtacccagcatagggaactagaaagccaactgcacgtactgcagtccaagctgcagggggccgattccagagacctgcagatgaaccaagccttgaggtttttggagaacgaacatcagcagctacaggccaagattgagtgcctgcagggggatcgcgacttgtgctcactggacactcaggatctccaggatcagttgaagcgcagcgaggcagagaaattgactttggtaactagggtgcaacagctgcaggggctcctgcaaaaccagtctcttcagttgcaggaacaggagaagctactgaccaaaaaggaccaggccctgccagtctggtcgccaaaatccttcccaaatgaagtagaacctgaaggaactgggaaagagaaggattgggacctgagagatcaacttcaaaagaaaactttgcaattgcaggccaaagagaaggaatgccgcgagctgcattccgaactggacaacctctccgatgaatacctgtcatgcctgcggaaactgcagcactgcagagaagagttaaaccagagtcaacagctgcctcctcgacgccagtgtgggcgttggttgcccgtgttgatggtcgttatcgccgcagctttagcagtcttccttgccaacaaagacaacctgatgatttag

SEQ ID NO: 138083 - DNA, 1656 bp, synthetic construct
  misc_feature 1..1656: note = Description of Artificial Sequence: Synthetic coding sequence
  source 1..1656: mol_type = other DNA
atgatctcccccgatcctaggccatcacctggcttagcgaggtgggctgaatcctatgaggcaaagtgcgaacggagacaggaaatccgtgagtcaagaagatgtcggcctaatgttacaacttgccgccaggtgggaaaaaccctcaggatccaacaacgggagcaactgcagagagctcggctacagcaatttttcagaagaaggaaccttgagctggaagaaaagggaaaggcccaacatccccaggcccgcgaacaggggccttccaggagaccagggcaagtgactgtgctaaaagagcctcttagctgtgcaagacgcatcagcagtcccagagaacaggtgaccgggactagttctgaggtgttccctgcgcagcatcccccaccctctgggatatgccgagacctttccgatcatctgagctcccaggccggcggcctgccgccccaagatacccctattaaaaaaccgcctaaacaccacaggggtacccagacgaaagcggaggggcctactatcaagaacgatgcctctcagcaaaccaattatggtgtggctgttttggataaagaaatcattcagctctccgattacttaaaggaggctctgcagcgcgaactggtgctgaagcaaaagatggttatcctgcaagatctactcagcacgctcatccaggctagcgactcttcctggaaaggacaactgaacgaagacaaactgaagggaaaactgcggtcactggaaaatcagctctatacctgcacccaaaagtattcaccatggggcatgaaaaaagtgctcctggaaatggaggatcagaagaactcatacgagcagaaggcaaaggaatctctccagaaagtcctcgaagaaaaaatgaacgcggaacaacagctacagtccacccaacgtagtctcgccctagctgagcagaaatgtgaggaatggaggagccagtacgaagcgttgaaagaagactggcgtacgctcggaacccaacaccgcgagttagagtcccagctgcacgtgctgcagtcaaagctgcagggcgccgacagccgtgacctccagatgaatcaggccctccggtttctcgagaacgagcatcaacaactgcaggctaaaatagagtgtctgcagggggatagggacctctgctctctggacactcaagacctccaggaccaattgaagaggtccgaggctgagaaactgacactcgtcactagggtgcaacagcttcaaggcctgctccagaaccagtccctgcagttacaagagcaagagaaactcctgacaaagaaggatcaggcactcccagtgtggtcccccaagagcttcccgaatgaagtagagcctgaggggacaggcaaagagaaggactgggacctgcgtgaccagcttcaaaagaagaccctgcagctacaggccaaggagaaggaatgtcgagagctacacagcgagctggacaacctgtctgatgagtatctcagctgtctgcgcaagttacagcactgtcgggaagaactaaatcagtcacaacaactcccacctaggcgacagtgtggtcggtggcttcccgttctcatggtggttattgcggctgccctcgcagtttttctggcgaataaagacaatctgatgatttag

SEQ ID NO: 138084 - DNA, 1596 bp, synthetic construct
  misc_feature 1..1596: note = Description of Artificial Sequence: Synthetic coding sequence
  source 1..1596: mol_type = other DNA
atgatatctcccgatcctcggccttctccaggcttggccagatgggccgagtcctacgaagccaagtgtgagaggcggcaggaaattcgagaatcacggcgctgcaggccgaacgtcaccacgtgtcggcaagtgggaaagacgttgcggatacagcagcgagagcagctgcagagggccaggcttcaacaattctttcgaagaagaaaccttgaactggaagagaaaggcaaggcccaacatccacaggcgagagagcagggcccttcacgcaggcccggccaggtgaccggaacatcaagtgaggtttttcccgcccaacacccgccaccatccggcatctgccgggacctctccgaccacctgagctctcaggccggtggactgcccccccaggataccccaattaagaaacccccgaaacatcaccgggggacacagactaaagccgaaggccctactatcaagaatgatgcttcgcaacagacgaactatggagtggctgtcttagataaggaaatcatccaactgtctgactacctcaaggaagcccttcaacgtgaactggtacttaagcagaagatggtcattctacaggaccttctatctacactgatacaggcatcggattcttcctggaaggggcagctgaacgaggataagctaaaagggaagttgaggagtctcgagaaccagctgtacacatgtacacagaagtactcaccgtggggcatgaaaaaggtccttctggaaatggaggatcagaagaactcatacgaacagaaagctaaagagagcctacagaaagtcttggaggagaaaatgaatgcggagcagcaattacagtccactcagagaagcctcgccctggccgagcagaaatgtgaagaatggcggtctcagtatgaggccctgaaggaggattggcgaaccttgggcacccagcaccgcgagctggagagccagttgcatgtgctgcagtctaagctgcagggtgctgatagtagggacctgcagatgaaccaggcactgcggtttttagagaacgagcaccaacagctgcaggctaagatcgagtgtctgcagggtgaccgcgatctttgttctttggatacccaggacctgcaggatcagttaaaacggtcggaggcagagaaacttacattagtgactcgtgtccagcaattgcagggattactgcagaaccagagcctgcagctgcaagaacaggaaaaactgcttaccaaaaaagaccaggccctccctgtatggagccctaagagtttcccaaatgaagtggaaccagagggaacggggaaggagaaggattgggacttgagggatcagcttcagaaaaagacactacaactgcaggccaaagagaaggaatgccgggaactccacagtgagctagataacttaagtgatgagtatctgagctgtctcagaaaactgcaacattgcagagaggagctgaatcagtcccagcagctccccccccggagacagtgcggccggtggctgcccgtcctgatggttgtaattgctgccgctctcgccgtgtttctggccaataaagataacctgatgatttag

SEQ ID NO: 138085 - DNA, 1215 bp, synthetic construct
  misc_feature 1..1215: note = Description of Artificial Sequence: Synthetic coding sequence
  source 1..1215: mol_type = other DNA
atgataagcccagatcctagacctagccctggactcgctagatgggctgaatcttacgaggctaaatgtgaaagacgccaagaaattagagagtcaaggcgatgtaggccgaatgtgacaacctgtcgccaggtgggtaaaacactgcgcattcagcagcgggaacagctgcaacgtgcacgattgcagcagtttttcaggcgaagaaacctggaactggaggaaaagggaaaagcacagcacccccaggctagggaacagggtccttctcgcagaccagggcaggttacaggcactagctcagaagttttccccgctcagcacccccctcctagtgggatttgccgcgatctttctgaccatctcagttcccaggccgggggactgcccccccaggacactccaatcaagaagccccccaagcatcacagggggacgcagacgaaagcagaaggccccactattaagaacgacgctagccagcaaaccaactacggcgtggccgtactcgataaggaaattatccagctcagcgattacttgaaggaggctctgcaaagagaactggtgctgaaacagaagatggtgatactgcaggatctcctgtcaacactcatccaggcaagtgactcctcctggaaaggccaactcaacgaggataaactcaagggaaaactgcgttccctggaaaaccagctttacacatgcactcagaagtattctccttgggggatgaaaaaggtgctgttggagatggaagaccagaagaactcctacgaacaaaaggctaaggaaagcttacagaaagtcctggaggagaagatgaacgcagaacagcagctgcagtctacccagcggtctcttgcattggccgaacagaagtgtgaagaatggaggagccagtacgaggcactcaaagaagactggcggactctgggtacacaacaccgcgagctcgaatctcaattacatgttctccagtctaagttgcagggcgctgactctagggacctccagatgaaccaggcgcttcgcttcctggagaacgagcaccaacagctgcaggccaaaattgaatgtttacaaggggatcgcgacttgtgtagcctggacactcaagatttgcaagaccagctcaagcgctcagaggcagagaagctgaccctggtgactagggtacagcagcttcaagaggccgctgggtggactacatag

SEQ ID NO: 138086 - DNA, 963 bp, synthetic construct
  misc_feature 1..963: note = Description of Artificial Sequence: Synthetic coding sequence
  source 1..963: mol_type = other DNA
atgattagccccgatccacggccttcgcctggcttggcccgttgggcagagtcatacgaggccaagtgcgagcgtagacaggaaatcagagagtcacgccggtgtcgcccaaatgtgacaacttgtcggcaggttgggaagaccctgcgaatccaacagcgcgaactcgaggagaaaggcaaagctcaacaccctcaagccagagagcaaggaccatcacgacgaccaggccaggttactgtactgaaagagccccttagctgtgccaggcgcatttcaagcccacgcgagcaggtaacaggcacgagcagcgaagtgttccccgcacagcatccgccgcctagcggaatatgtcgcgacttaagcgatcatttgagctcccaagccggaggattgccgccgcaagatacacccattaagaaacctccgaagcaccaccggggaacgcagaccaaagccgaaggtcccacaatcaagaatgatgctagccaacagaccaattacggagttgccgtgttagataaggagatcatccagctgtccgattatctcaaagaagccctccagcgcgaactagtgctgaagcagaagatggttattttgcaggatcttttatcaacactaatccaggctagtgattcttcctggaagggccagcttaacgaagacaagttgaaaggcaagctaaggagcctcgaaaaccagctgtatacttgcacacaaaagtactcaccttggggtatgaagaaagtcctgctggaaatggaagatcaaaagaattcctatgaacaaaaggccaaagagagtctgcaaaaggtacttgaggagaaaatgaatgcagagcagcagcttcagtccacccaagtatggggatgccatattgacatggggttgggcacacccggatcccttggcaataaaggttctcagctgcacaactcattggaaccatctcccctatag

SEQ ID NO: 138087 - DNA, 81 bp, synthetic construct
  misc_feature 1..81: note = Description of Artificial Sequence: Synthetic coding sequence
  source 1..81: mol_type = other DNA
atgatttctcctgatccaaggccctctccaggactggcccgctgggccgaatcgtacgaggccaagtgcgagcgaaggtag

SEQ ID NO: 138088 - DNA, 1671 bp, synthetic construct
  misc_feature 1..1671: note = Description of Artificial Sequence: Synthetic coding sequence
  source 1..1671: mol_type = other DNA
atgcagaaattcatagaggcagattattacgagctggattggtattatgaggagtgctccgatgtcctctgcgctgaacgcgtgggacagatgaccaaaacctacaacgatattgacgcagtgacacgacttttggaggaaaaggagagagatttagagctggctgcgcggattggtcaatcgctacttaagaagaacaagacgctgactgagcgtaacgagctgctggaagagcaagtcgaacatattagggaggaggtgtcccagctgaggcacgagttgagcatgaaggacgagttgttgcagttctataccagtgccgctgaggagtcagagccagagagcgtatgtagcacccctctcaaaagaaacgaatcatcatcgtccgttcagaactactttcatttggatagtctacagaaaaagctaaaggaccttgaagaggaaaacgtggtgctccggtccgaggccagccagttgaagaccgagactatcacttacgaagaaaaggagcaacaactggtaaatgactgtgtaaaggaacttagagatgctaatgtgcagattgcctccatttcggaggaactggcaaagaaaaccgaggacgccgccagacaacaagaggagatcacccacctgctgtctcagatcgtggacctgcaaaagaaggccaaagcatgcgcagttgagaacgaagagctggtccagcatctcggagccgctaaagacgcacagcgtcaactgacagcagagcttcgagagcttgaggataagtatgccgaatgtatggagatgttgcacgaagctcaggaagagctcaaaaatttaagaaataaaacaatgcccaacactacctcccggagataccactcacttgggctgtttccaatggactctctggctgcagaaatcgaaggcacaatgcgtaaggagctccagctggaggaggccgaatcgcctgatatcacacatcagaagagagtatttgagaccgtccgcaatatcaaccaagtcgtgaagcaacggtcccttacacccagcccaatgaacatccctggcagtaaccagagcagcgcaatgaattctttgctttcatcctgcgtgagcacccccaggtcttcattctacggttcagatatcggcaatgtggtgttagacaataagaccaacagcatcatcctggagaccgaggcggctgatttggggaacgatgaaaggtctaagaaaccaggaacccccggcactccaggaagccacgatctagaaaccgctctgagacgactgagtctgcgacgtgagaattacctgagtgaaaggaggttctttgaagaggagcaggaaagaaagctccaggagctggccgagaaaggggagctcagatcaggctcactaactcccaccgagagcataatgtctttaggcacccactcaagattttctgaattcaccggatttagcgggatgtctttctcgagccgctcttacctgccagaaaagcttcagattgtcaagcccttggaaggagaccatgcagggcctcggccactttctgttctgcttggcgattcattatggagcctgatccatctcagaaaagcaggccacttgtgtcacgcatactcattctttttcagagactctcatcccagatgctggttcgaattcctgtag

SEQ ID NO: 138089 - DNA, 438 bp, synthetic construct
  misc_feature 1..438: note = Description of Artificial Sequence: Synthetic coding sequence
  source 1..438: mol_type = other DNA
atgactgtgcataacctttacctgttcgaccgcaacggcgtgtgcctgcattactctgagtggcatcgcaagaaacaggctggcatccctaaggaagaggagtacaagctcatgtatggaatgttattctccattagaagttttgtgagcaaaatgtcgcccctggatatgaaagatggcttcttggcctttcaaacttctagatacaagctacactattatgaaaccccgacaggaatcaaagtggtcatgaatactgacctgggcgtgggtcccatcagggacgtccttcaccacatctactctgctttgtacgtggagctcgtggtgaagaatcccctgtgtccacttgggcagactgttcagagcgagttgtttagatctcgcctcgatagctatgtccgctcccttcctttcttctccgcccgggccggttag

SEQ ID NO: 138090 - DNA, 438 bp, synthetic construct
  misc_feature 1..438: note = Description of Artificial Sequence: Synthetic coding sequence
  source 1..438: mol_type = other DNA
atgaccgtgcacaacctgtatctttttgatagaaacggcgtctgtctgcattactccgaatggcaccgtaagaagcaggctgggattccaaaggaggaggaatacaagcttatgtatggtatgctcttcagtatccgttcctttgtgtctaaaatgtcccctcttgatatgaaggatgggttcttggcctttcagaccagccgatacaagttacattactatgagacgcctactggaattaaagtagtaatgaacactgacctcggggtgggccccatcagggacgttctccatcatatttacagtgccttgtacgtggagttggtggtgaagaaccctctttgtccccttgggcagaccgtacagagtgagctgtttagatcccgcctagacagctacgtccggtctctgccgtttttctctgccagagctggatag

SEQ ID NO: 138091 - DNA, 3402 bp, synthetic construct
  misc_feature 1..3402: note = Description of Artificial Sequence: Synthetic coding sequence
  source 1..3402: mol_type = other DNA
atgagtcccactcaatgggacttccccgtagagctgtgctgtagacctatggcatttgtcacactcaccggcttagacgtggtgtacaacgccgtccaccgcgccgtttgggacgctttttgtgcaaacagacgagccgatagggtgcccattagtttcaaggtgctgccgggagatcacgaatacccaaagtgccggccaaaacggacctcgtatgaatggtacatccctaaggggattctcaaaacaggctggatgaacaagcacctgaacctcgtgcccgctctggtcgtggtgttctatgagctggattgggatgagccgcagtggaaggaaaaacagtccgagtgcgcgacgcgggtcgagatagtgcggcagtcactgcagggtcggaatactaaggtggccgtggttctgattcagaagaaaactccgctgcctccgggggaagacgtcattgcctctgaaagggccgcggctctttgcaatgcatgcgaactctctgggaaatcactcttcgtcttgcctcacactgatcacctggtgggctatattatccggcttgaaaatgcattctatgagcatgcacagacgtactactacacagagattcggcgcgtgaaatcccataaagaattcctgaacaaaacaacccaccagctgttgttcgtcaggcaccagttcaagattgcatttttcagcgagctgaagcaggacacccaaaacgccctgaagaactaccgaacagcttacaacttggtgcacgaattgcgggctcacgaaaccaatatcctcgaaataaagaccatggctgggtttatcaattataagatatgtcggctgtgcttccagcataacaccccattggatgcgatcgcgcagtttcgcaagcatattgatctctgcaagaagaagataggcagtgccgaactgagcttcgaacacgatgcttggatgagtaagcagttccaggccttcggtgatctcttcgacgaagccattaaacttggtctgactgctatccagacccagaatcccggattctattaccagcaggccgcctactacgctcaggagagaaagcaattagcaaagaccctctgtaaccatgaggcttcagtgatgtaccccaatcccgatccgctcgagacccagaccggtgttctggacttctacggacagcggtcttggcgccaaggcattctgtcttttgatctgtctgaccccgagaaagagaaagtggggatcctggcgatacaactgaaagaacggaacgtagtgcactccgagatcataatcacccttctaagcaacgcagtcgcacagttcaaaaagtacaaatgtccacgcatgaaaagccatttgatggtccagatgggggaagagtactactatgccaaagattacactaaagctctcaagcttctcgactacgttatgtgtgattaccgcagcgagggctggtggacgctgcttaccagcgtgctaaccaccgctctcaaatgctcttatctcatggcccaactgaaagactatataacctactctttagaactgttggggagggcctccaccctgaaagacgatcagaagtctagaatcgagaagaacttgatcaatgtactgatgaacgagagtccagatccagagccagactgtgacatcttggcagtgaagactgctcagaaactgtgggcagacagaatatcactggcaggctccaacatttttaccatcggggtccaggatttcgtgccctttgtccagtgcaaagcaaaattccacgctccgtcctttcatgtggacgtgccggttcagttcgatatatacctgaaggcagactgccctcatcccattaggttctcaaagttgtgcgtgtcttttaacaatcaagagtataaccaattctgtgtgatcgaagaagctagcaaggccaacgaggtcctggagaacctgacccagggaaagatgtgtttagtgcccggcaaaaccagaaaactgctctttaaattcgtggctaagacagaggatgtgggcaagaagattgaaattactagtgtagacttggccttaggtaacgagactggacgctgtgtcgtactgaattggcaggggggaggcggcgatgctgcaagcagccaagaggctctccaggccgcccgtagcttcaagcgcagacctaagttgccggataacgaagtgcattgggactccattatcattcaggcgagtacaatgatcattagccgcgtcccgaatatttctgtccatttactacacgagccgccggccctgacaaacgaaatgtactgtctcgtggttactgtgcagtctcatgaaaaaacccaaatacgggatgttaaactgacagcgggcttaaaacccgggcaggacgcgaacctgacccagaaaacgcatgtgacactgcatgggaccgaattatgcgacgaatcatatccagctctgttgacagatatccccgtgggggatctgcacccaggagaacaactcgaaaaaatgctgtatgttcggtgcggcactgtcggctcccgaatgtttctggtctacgtgtcgtacctcattaatactacagttgaagagaaggaaatcgtgtgtaaatgccataaagacgagacagttacaattgagacagtgttcccatttgatgtggcagtgaagtttgttagtacaaagtttgaacacctggagcgagtctacgcggatattccatttcttttaatgacagacctgctttcggccagtccatgggcgctgaccatcgtgtcatcagaactccagctggctccaagtatgactacggttgaccaattggaatcacaggtggacaacgtgattctgcaaactggagagagcgcctctgaatgcttctgcctccagtgtccttctctgggcaatattgagggaggggtggcgaccggacattacatcatcagctggaaaaggacctccgcgatggagaatatcccgataattaccaccgtcatcaccttgccgcacgtgattgtggaaaacatccccctgcatgtcaacgcagacctaccgagttttgggcgggtgcgggagagccttcctgtgaaataccatctgcagaacaaaaccgatttggtgcaggacgtcgaaattagcgtggagccgagtgacgccttcatgttttcgggcctaaaacagatcagactcagaattctgcctgggactgagcaggagatgttatacaatttctaccctctgatggcgggctaccaacaactgccctctttgaatataaatctattacggttccccaactttacaaatcagctgctgaggcggtttattcccacaagcatctttgttaagccgcaggggaggctcatggacgacacaagtattgctgccgcatag

SEQ ID NO: 138092 - DNA, 3261 bp, synthetic construct
  misc_feature 1..3261: note = Description of Artificial Sequence: Synthetic coding sequence
  source 1..3261: mol_type = other DNA
atgagccctactcagtgggactttcctgtggagctctgctgccgacccatggcttttgtcaccctgaccggcctggacgtcgtctataacgcggtccacagggcggtttgggacgcattctgcgccaatagacgggccgacagagttcctatatctttcaaagtgcttcccggtgaccatgaataccctaaatgcagacctaagaggacctcttatgagtggtacatccctaagggtatcttgaagaccgggtggatgaacaagcaccttaatctcgtacccgcactcgttgtggtgttttatgaactggattgggatgagcctcagtggaaagaaaaacaatctgagtgtgcgacgcgtgtggaaatcgtacggcagtcactccagggaaggaacaccaaggtggcagtggtgctcatccagaaaaagacgccgcttcctcccggggaggacgtcatcgcctctgagcgggctgcagccctctgtaatgcttgcgagcttagcgggaaatccttgtttgtccttccacatacagatcatctcgtcggctatattattcgacttgagaatgccttctacgaacatgcccagacatattactacacagaaatccgcagagtcaagagccacaaggaattcctgaataagactactcatcagctactgtttgtgcgacatcagtttaaaattgcctttttctcagagctgaaacaggacacccaaaatgcattaaaaaattataggacagcctataacctggtacacgagcttcgcgctcatgaaactaatatactggaaattaaaaccatggccggattcatcaattataagatctgtcgactctgcttccagcacaatactcccctcgacgctatcgcacagtttcgtaagcatattgatctttgtaagaaaaagattggctcagccgagctttcttttgagcacgacgcatggatgtctaagcagtttcaggccttcggcgatctcttcgacgaagctataaagctcggcctgacggcgatacagacccagaatccaggattctactaccagcaggcagcctactatgcgcaggaacggaagcaactggccaagactctgtgcaaccacgaggcgtccgttatgtacccgaatccagaccccctggagactcaaactggcgtcctggatttctacgggcagcgctcttggcgtcagggaatactgagttttgatctgtcagaccccgagaaggagaaggtgggtatcctggcgattcagttaaaagaacggaacgtggtgcattctgagatcatcatcaccctcttaagcaacgccgtggctcaattcaaaaaatacaagtgcccccggatgaagtcccacctcatggttcaaatgggagaagagtattattacgccaaggactacaccaaggcactcaaactgcttgattatgtgatgtgtgattaccgtagcgagggctggtggaccctgctgacgtctgtgttgaccactgccctcaaatgctcatacctgatggctcagctgaaagattacatcacatacagcctcgagcttcttggtagggcctcaacgctcaaggacgatcagaagagtagaatcgaaaaaaacctgataaatgtgctcatgaatgagagcccagatcctgagccagattgcgacatcctggcagtgaagactgcgcaaaagttgtgggctgatagaatcagcctcgcaggaagcaacatcttcacgattggcgtacaagattttgtgccattcgtccagtgtaaggctaagttccacgcaccatcatttcatgtcgatgtgcctgtgcagtttgatatttatctcaaagccgattgtccccaccctattagattcagcaagctgtgtgtttcgttcaataaccaagaatacaaccagttttgcgtcatagaagaggcctccaaggccaacgaagttttagaaaatctcactcagggtaaaatgtgtctggtcccgggcaaaacccgtaagctgctttttaaattcgtagcaaaaacagaagacgtaggcaaaaagatcgagatcacctcggtggatctagcccttggtaatgaaaccggacggtgcgtggtcctcaattggcaaggtggcggtggggacgcagcatcatcccaggaggccctccaggcagcaaggtctttcaagcgcagacctaaactcccagacaatgaagtacattgggattccatcattatccaggcaagcacaatgatcatcagtagggtcccaaacatctctgtgcatctgctgcacgagccgcctgctttgactaacgaaatgtattgcctggtagtaaccgttcagagtcacgaaaaaacacaaataagggacgtaaagctgacagcaggtctgaagcctgggcaagacgccaacctaacccaaaagacgcacgtgactcttcatggcaccgaactgtgcgatgagtcctatcctgcactgctgactgatattccagtcggtgatctccatccaggcgagcagctcgagaagatgctctacgttagatgtggcactgttggctctagaatgttcctggtctacgtgtcatacctgatcaacacgacggtagaagaaaaggagatagtatgtaaatgccacaaggatgagactgtgacaatcgaaaccgtctttccattcgacgtggctgtcaagttcgtgtccaccaagttcgaacatctcgagcgtgtctacgcagacattcctttcctactcatgacagacctactgtctgcatcaccctgggcccttaccatcgtgtcctctgaactgcagctagcaccgagtatgacgactgtggatcaactggaatcacaggtggacaacgttatactgcagactggggagtccgcttcagaatgtttctgcctacagtgtcctagcttggggaatatcgaggggggagttgcgacaggccactacataatttcctggaaacgaacatcggcaatggaaaacatcccaattataactactgttattacactgccccatgtgattgtggaaaatattccccttcacgtaaatgccgacctacctagcttcgggcgggttcgagaaagtcttcccgtgaagtaccatctgcagaataagacagatctggtacaggacgtggaaatcagcgtggaaccctctgatgcattcatgttctctggtctgaagcaaatccggctgcctgctcaggcattttacacttaccagtacttctgccaggcaactggctctacccatgggtag

SEQ ID NO: 138093 - DNA, 3057 bp, synthetic construct
  misc_feature 1..3057: note = Description of Artificial Sequence: Synthetic coding sequence
  source 1..3057: mol_type = other DNA
atgagccctacgcaatgggacttcccagtcgagctctgttgtaggcctatggcgtttgtgaccctgacaggactggacgttgtttacaacgccgtacatcgagccgtctgggatgcattctgtgctaatagaagagcggatcgcgtgcctattagttttaaagtcttacccggggatcatgagtatcccaagtgcagaccaaaacggactagctacgaatggtacattccgaagggtattctcaaaaccggctggatgaataaacacctaaatcttgtgccagccctcgtggtggtattctacgagctggactgggacgagccccagtggaaagaaaagcagtctgaatgcgcaaccagagtggaaattgtgagacagtctctacagggtagaaataccaaggtggccgtcgtgctgatccagaaaaagacgcctctcccacctggagaagacgtcatcgcctccgagcgtgcggccgctctctgtaatgcatgtgagttaagcggtaagtctttattcgtcctgcctcacaccgaccaccttgtgggctacatcattcgccttgagaatgcgttttacgagcacgcgcagacgtactattacaccgaaatccgcagggtcaaatcgcataaagaatttctgaataagacaactcatcaactgctgttcgtgagacatcagttcaaaattgcattcttctctgaactgaaacaagatacccaaaatgcactcaaaaactacaggactgcatacaacctcgttcacgagctgagggcacacgaaacgaatatccttgagattaaaactatggccggcttcatcaactacaagatatgcagactgtgcttccagcataacacacccctcgatgctatcgctcagttccgcaagcacattgacctctgcaaaaagaaaatcggctccgcagaactgagcttcgagcatgatgcctggatgtcaaaacagttccaggccttcggcgatctatttgatgaagcaattaaactggggcttacagccatccaaacgcagaatccgggcttttattaccagcaggcagcatactacgcacaggaacgcaagcagctagccaagactctgtgcaaccatgaggcgagcgtgatgtaccccaaccctgatccactcgagactcagactggtgtgctggatttctacgggcagaggtcctggcggcagggcattcttagtttcgacctctcagatccagaaaaagagaaggtgggcatcttggcaatccagttaaaggaacgcaatgtggtgcacagcgagatcattattaccctgctgtctaacgcggttgctcagtttaagaagtataagtgcccaagaatgaagagccacctgatggttcaaatgggcgaagagtattattacgccaaagattacactaaagcgctaaagttgctggactacgtgatgtgcgattaccgttcagagggctggtggacactcctgacctccgtactgacgacagccttgaagtgcagttacctgatggcacagcttaaggactacattacatattctttggagttgctggggagggctagtacattaaaagacgatcagaaatcacggattgaaaagaacctcatcaacgtcctcatgaacgagagccccgatcccgagccagactgtgatatcttagccgttaagacagcacagaaattgtgggccgatcgcatatccttagccggtagtaacatcttcaccattggagttcaggatttcgtaccctttgtgcaatgtaaagcaaaatttcacgccccaagctttcacgtagatgtgcccgtgcaattcgatatttacctgaaggctgactgtcctcatccaatccggttctctaagttgtgcgttagtttcaataaccaggagtacaaccagttctgcgtcatcgaagaagctagcaaagccaacgaggtgctcgagaatcttacacaggggaagatgtgcctggtccctggtaaaaccaggaagctgctcttcaagttcgtcgcgaaaaccgaagacgtgggcaaaaagatagagattacatcagtggatttggccttgggcaatgaaaccggcaggtgcgtcgtcttgaactggcaaggcggaggcggagatgcagcaagctcccaagaagctctacaggccgccaggagcttcaagaggcgccccaagctgccggacaacgaagtgcactgggacagcatcatcattcaggcatctactatgatcatctcccgggtgccaaatatctctgtacacctgctccacgagccccctgccctgacaaacgagatgtattgcctggtcgtgaccgtgcagtcccatgagaagactcagatccgcgatgtcaagctgactgccggcctgaaacccggccaggatgcaaatctcacccagaaaacgcacgtgactctacatgggaccgagctgtgcgacgagtcatatcctgctctccttacagacatccctgtgggcgacctccatcctggtgagcagcttgagaaaatgctgtatgtcaggtgtgggactgtgggatcccgcatgtttttagtttacgtgagctacctgatcaacactactgtagaggagaaagagatcgtgtgcaagtgtcacaaagacgagaccgtgacaattgaaaccgtcttcccgttcgacgtggccgttaaattcgtgagcactaagtttgaacacctcgaacgggtttatgccgatattcctttccttcttatgacagacctgctgtcagcttcaccctgggccctcaccatcgtctctagtgagctacagctcgctccgagcatgacaaccgtcgaccagcttgaaagccaggtggataacgtgattttgcagactggtgagagcgcaagcgctttatattacctcctcgaaaaggacttgtctaatggtgaataccctcatcatcataactgccaccatagcgctgcccgtgattgtggtgaatacccaagtccctgcgaatgtaggagcgcagtgatttgggcttgccaaagagtggtcacgtgtcaggtgtccccaactgagtag

SEQ ID NO: 138094 - DNA, 2091 bp, synthetic construct
  misc_feature 1..2091: note = Description of Artificial Sequence: Synthetic coding sequence
  source 1..2091: mol_type = other DNA
atggaggacgctggcggcggtgaggaacaggggttgctattccaagaggaaactattgatctgggtggtgatgaatttgggtctgaggaaaacgagacggcaagtgaagggagtagccctcttgccgacaaactcaacgagcacatgatggagagcgtgctcattagcgacagtcccaatagcgagggcgacgccggggacctcggcagagtgcgtgatgaagccgagccaggcggtgagggggaccctgggccagagccagcaggaacaccatccccttctggggaagccgacggggattgcgctcccgaagatgcagctccctcgtcaggtggagcccccagacaagatgcggcacgagaggtcccaggctctgaagccgcgcgacccgagcaagagccccccgttgctgaacctgtgcctgtttgtacgatcttttctcagcgggccccgcctgcgtcaggcgatggcttcgagcctcaaatggttaagagtccgtcctttggcggagcttctgaagcttcagctagaacacccccacaggtcgtgcagcccagtccttctctgtcaacatttttcggagacaccgctgcatctcactccctggcttctgacttctttgatagctttacaacctctgctttcatcagtgtgagtaaccctggagctggctctcctgctccggcctcccctccccctctggcagtacccggcaccgagggacgacccgagccggtcgcaatgagagggccccaggccgcagctccccctgccagccccgagccctttgcccatatccaggccgtgtttgccggatcagatgacccattcgcaactgctttgagcatgagtgaaatggacaggagaaacgatgcctggctccctggtgaggccacaagaggcgtcctgcgcgccgtcgctacccagcagagaggagcagtgttcgtagacaaagaaaatctcacaatgccgggcctacgctttgacaacattcagggcgatgcagtaaaagacctcatgctcaggttcctgggcgaaaaagctgctgcaaagagacaagtgctgaatgctgacagcgtggagcagtcattcgtgggccttaaacagcttatctcatgccgtaactggagggctgccgtggacctgtgtggacggctgcttaccgcacacggccaggggtatgggaaatcaggacttttgacctcacacaccaccgacagcctccagctatggttcgtcaggttagcactgttggtcaagcttggtctattccagaacgccgagatggagtttgaaccattcggtaaccttgaccaacctgacctgtactacgagtattacccccatgtgtacccaggccgacgaggaagtatggtgcccttttccatgcgcatcttacacgctgagctgcagcagtacctgggcaaccctcaagaatcactcgatagattacacaaagtaaaaacagtctgcagtaagatcttggcaaacctggagcagggcctcgctgaagacggcggtatgtcgagcgttacccaggagggccggcaaggctgttcttacctcgtggctagcattcgactatggaggtcaaggttgggccgggttatgtattctatggccaattgcctgctgctgatgaaggactatgtgcttgctgtcgaggcttatcattccgtgatcaaatactatccagagcaagagccccaactgctctctggcatcggccgcatctcactgcagatcggggacatcaagaccgcggagaaatattttcaagatgtggagaaggtgacccagaaactggatggcttgcaagggaaaataatggtccttatgaacagcgcttttctccacctaggacagaataactttgcagaggctcaccgatttttcacagagatcttacggatggacccgaggaatgccgtgcagatgctatccgccagccaccctactggaaaagaaccttctcctaaggatgccgaggaacatcctgaaggccaccgcgattctgctgaacccgggcccgcccgcccaatggtcccccagcgcgctccccccgggcctgcattgtgcgcccagccgtag

SEQ ID NO: 138095 - DNA, 2208 bp, synthetic construct
  misc_feature 1..2208: note = Description of Artificial Sequence: Synthetic coding sequence
  source 1..2208: mol_type = other DNA
atggaggatgctgggggcggcgaggaaacaccggcgccagaggcgccccatccaccgcagctggctcccccagaggagcagggtctcttgtttcaagaggaaaccattgacttgggtggagacgaattcggcagtgaggagaatgagaccgcatcggaaggcagctcgcccttggccgataaactgaacgaacatatgatggagagcgtgttgatttccgactctccgaattcagaaggggatgccggagacctcggcagagttcgggatgaggcggaacccggcggggagggcgacccgggaccagaaccagccgggactccttctccatcgggcgaagcagatggcgattgcgcccccgaggatgccgccccaagcagtggcggtgcaccacggcaggatgcagcaagggaagttcccggatccgaggctgctaggcctgaacaggagccgcctgttgctgaaccagtacccgtgtgtacaatctttagtcagcgggctcccccagccagcggagacggatttgagcctcaaatggtgaaatcaccctctttcggtggtgcctctgaggcgtcagcacgcacaccgcctcaggtggttcagccatcccctagcttgagcaccttctttggcgacactgctgcctctcacagcttggcttccgatttcttcgatagcttcaccacctctgctttcatcagcgtctctaacccaggagcaggcagtccagccccggccagccctccccctttggccgtgcctggcacggaaggacgacccgagccggtcgccatgagaggcccgcaggcggccgctccgcccgcctcgccagaaccttttgcacacatccaggcagtgttcgccgggagcgacgacccctttgccacagcactgtcgatgtccgagatggaccgcagaaacgacgcatggctgcccggagaagccacccgcggagttctgcgagcagtcgcgactcaacagcgcggagcagtctttgtggacaaggaaaatctgactatgcccggtcttaggtttgacaacattcagggcgacgccgtcaaagacctgatgctgcggttccttggtgagaaagctgctgcaaagcggcaggtactcaacgctgactccgtggaacaaagtttcgtaggacttaagcagctgatctcctgtagaaactggagagcagccgtcgatctctgtggccggctattgactgcgcatggccaaggttacggcaaaagcggtctcctcaccagtcacaccactgactcactgcaattgtggttcgtgcggctggccctgctagtgaaactcggtttattccaaaacgctgagatggagttcgagccattcggtaacttggaccaacctgatctgtactacgagtattaccctcatgtgtatccagggagacggggctccatggtccccttttcaatgcgaatactgcacgcagaactgcagcagtatttaggcaacccccaggagagccttgatcgtctgcacaaggttaagactgtgtgctccaagatactcgccaacctcgagcaggggctggccgaagacggcggtatgagcagcgtaacacaggagggcagacaggcctctatacggctctggcgtagccggctagggagggtgatgtatagtatggcaaattgtctcctgctgatgaaagactatgtcctagccgtggaggcatatcactctgtcattaaatactaccctgagcaggaacctcagctgctttccggaatcggtcgcatttcattgcagattggggacataaagaccgccgagaagtacttccaggatgtcgagaaggtcacacagaagctggacggccttcagggaaaaatcatggtgctgatgaacagtgcgttccttcacctcgggcagaataattttgccgaggcacatagattctttacagagatcttgcgaatggatccccgtaacgcagtggccaataacaatgctgctgtctgtctgctttacctgggcaaattgaaggactctttgaggcagctggaggcaatggttcagcaggatcctaggcactatctgcacgaatctgtgttgttcaaccttaccactatgtacgaacttgaatcgagtaggagcatgcagaaaaaacaggccttactggaagcagttgccggcaaggagggggactcgttcaacacacaatgcctgaagcttgcttag

SEQ ID NO: 138096 - DNA, 2208 bp, synthetic construct
  misc_feature 1..2208: note = Description of Artificial Sequence: Synthetic coding sequence
  source 1..2208: mol_type = other DNA
atggaagacgcaggcggcggggaggaaactccagctcccgaggctccccatcccccacagctggcaccgccagaagagcaaggcctcctgtttcaggaggaaactattgacctggggggggacgagttcggaagcgaagagaacgaaaccgcttcagaaggcagctcccctcttgctgataagctgaacgagcacatgatggagtcagtgttgattagcgacagtcccaacagtgagggcgatgctggagacctcggcagggtaagggatgaggccgagcctggaggcgagggcgatccaggtcccgagccagctggtaccccatccccgtctggggaggctgacggtgactgtgcacctgaagacgcagcaccatcttctggcggagctcccaggcaagacgccgcccgggaggtgcccggaagtgaagctgcacgacctgaacaggaacctcccgtcgctgagccagttcctgtgtgcaccatattctcacagagggccccaccagcttcgggcgatgggttcgaaccccaaatggtgaagagccccagctttggcggtgcctcagaggcttccgccagaactccgcctcaggtcgtgcagccgagtccctcgttatccactttttttggggataccgctgcaagtcactcgcttgctagtgatttctttgatagcttcaccacatctgctttcatttccgtctcaaatcctggcgcgggctctcctgcccccgcttcaccgcctcctctcgccgtcccggggacagagggaagacccgaaccagtggcgatgagggggccgcaagctgctgctccccctgcctccccggagcctttcgcacatattcaggcagtgtttgcaggtagcgacgacccttttgctaccgcactgtccatgtccgaaatggaccggagaaacgacgcctggctcccaggtgaagctaccagaggagttcttcgggcggttgctacccagcagcggggcgccgtgttcgtcgacaaggaaaatctgacaatgcccgggctgaggttcgacaatattcagggagatgccgtcaaggacctaatgttgcgatttttgggagagaaagccgcagcaaaaaggcaggtgctcaacgccgactcagtagagcagagttttgttggcttgaagcagcttatttcctgtagaaactggagagccgctgtggacttatgcgggaggctgctaaccgctcacgggcagggatacgggaagtctgggctgctgacgagccacacaacagactcactccagctctggtttgtccggcttgctctactcgttaagctggggctgtttcagaacgcggaaatggagtttgagccatttggcaaccttgatcagccagatttatattacgaatattaccctcatgtgtacccaggacgaagaggaagcatggtgccatttagcatgagaatacttcatgccgagttacagcaatacttgggaaatcctcaggaatcactggataggttgcacaaggtcaagacggtctgttctaaaatactggctaatttagaacagggactggcagaagacggcggaatgtctagtgtgacacaggaaggaaggcaggcaagcattcggctttggagatcccgcttgggccgagtgatgtacagcatggctaattgcctgctactgatgaaagactacgtcctcgcagtagaggcatatcatagcgtgattaagtactaccctgagcaggagccgcagctgctctcaggcattggaaggatttccctgcagattggggatattaaaacagcggagaaatattttcaggacgtcgaaaaggtcacccagaaattagacggactgcagggtaagatcatggttttgatgaacagcgcctttctccatctcggacagaacaacttcgcagaggcacaccgcttctttaccgagatcctgaggatggatccccggaatgcagtagcgaataataatgcagcggtgtgcttgttatacctcggaaaattaaaggactcactgcggcagcttgaagcaatggttcagcaggaccctagacactacttgcacgagagcgtgttgtttaatttaactacgatgtacgaactggagagctcccggtctatgcagaagaagcaggctctcctggaagccgtggcaggcaaagagggggactccttcaatacccagtgtctgaaactggcttag

SEQ ID NO: 138097 - DNA, 423 bp, synthetic construct
  misc_feature 1..423: note = Description of Artificial Sequence: Synthetic coding sequence
  source 1..423: mol_type = other DNA
atgagtggaagtttctatttcgtgatcgtgggtcaccacgataacccggtgtttgagatggaattcttgccggccgggaaggcagaaagcaaggacgaccataggcacctgaaccagttcattgctcacgcggccctagatctcgtggacgagaatatgtggctgtccaataatatgtatctaaaaacagtggataaatttaatgagtggttcgtgtctgcgttcgtgacggccggccacatgcgattcatcatgctgcatgacattcgccaagaggatggcataaaaaacttcttcacggacgtgtatgatctgtacattaagttttctatgaatccattctacgaaccgaacagtcctatccgaagcagcgcctttgaccggaaggtccagttcctcgggaaaaagcacctattgtcgtag

SEQ ID NO: 138098 - DNA, 423 bp, synthetic construct
  misc_feature 1..423: note = Description of Artificial Sequence: Synthetic coding sequence
  source 1..423: mol_type = other DNA
atgtcaggatccttttacttcgtaatcgtgggccatcacgataacccagttttcgaaatggaattcttaccagccggaaaggcagagtctaaagacgaccacagacacctgaaccaatttatcgcgcacgctgccctggacctggttgatgagaatatgtggctttcaaacaacatgtatttgaagacagtggacaaattcaacgagtggttcgtttctgccttcgtgaccgccggtcatatgcgcttcatcatgttgcacgatatcaggcaggaagatggcataaaaaattttttcactgacgtctatgacctatatatcaaattctccatgaacccgttctatgagccaaacagccccatccggtctagcgcctttgatagaaaagttcaatttctcggcaagaagcacctgctgagttag

SEQ ID NO: 138099 - DNA, 423 bp, synthetic construct
  misc_feature 1..423: note = Description of Artificial Sequence: Synthetic coding sequence
  source 1..423: mol_type = other DNA
atgtctggatctttctacttcgtgatagtgggacatcatgacaacccagtcttcgaaatggagttcctgcccgccggcaaagctgagtcgaaagacgatcacaggcacctgaatcaatttatagcacacgccgcactggacctggtggacgagaatatgtggttaagcaataacatgtacctcaaaacagtggacaagtttaatgaatggttcgtctccgctttcgttacagcaggccacatgcgcttcattatgcttcatgatatcaggcaggaagacgggattaagaacttttttacggacgtgtacgacctttacattaagttttcgatgaatcctttctatgaaccaaactcccccattcggagtagcgcatttgaccgcaaagtgcagtttttagggaagaagcaccttctgagctag

SEQ ID NO: 138100 - DNA, 423 bp, synthetic construct
  misc_feature 1..423: note = Description of Artificial Sequence: Synthetic coding sequence
  source 1..423: mol_type = other DNA
atgagcggctcattttattttgttatcgtcggacatcatgataaccctgttttcgagatggaattcttgccggcagggaaagccgagagcaaagatgaccatcggcatctgaatcaatttatcgcccacgcagctctggatctggtcgatgaaaatatgtggctcagcaacaatatgtacctgaagaccgtggataaatttaatgagtggttcgtgagcgcttttgtcacagctggccatatgcgcttcatcatgctgcacgatattcgccaggaagatggcattaagaactttttcaccgacgtctatgacctctacatcaaattctcaatgaatcctttttatgaacctaacagtcccatccgttcttctgcctttgatcggaaggtgcaatttctagggaagaagcacctgctttcgtag

SEQ ID NO: 138101 - DNA, 444 bp, synthetic construct
  misc_feature 1..444: note = Description of Artificial Sequence: Synthetic coding sequence
  source 1..444: mol_type = other DNA
atgagcggcagcttttactttgtgatcgtggggcatcatgataatccagtttttgagatggagtttttgccagccggtaaggctgaaagcaaagacgaccaccgccatctcaatcagttcatcgcacatgcagcactggacctggtggacgaaaatatgtggctatcaaataatatgtatctgaagaccgtcgacaagttcaacgagtggtttgttagcgcgttcgtcacggcaggccatatattgaccttcttggtcaaaatgagattcataatgctccatgatataagacaggaggatggcatcaagaattttttcacggacgtttacgatttgtacatcaagttttcaatgaaccccttttacgagcccaactcgccaatcaggagctctgcttttgaccggaaggtgcagttcttagggaaaaaacatctcctgagttag

SEQ ID NO: 138102 - DNA, 525 bp, synthetic construct
  misc_feature 1..525: note = Description of Artificial Sequence: Synthetic coding sequence
  source 1..525: mol_type = other DNA
atgtcaagctggaaacaggatcgatcaggtttgcggagcacagaattgaacgtgctcgagtatcagcccctatgcgcagtgagaagccatatcctcaagactatgtctggaagcttttattttgtgatcgtcggtcatcacgacaaccccgtttttgagatggagttcctgccggcgggcaaagccgagagcaaggacgaccacaggcatctgaaccagtttattgcccatgctgccctggacttggtggacgaaaatatgtggctctccaataacatgtatctcaaaaccgtcgacaaatttaatgaatggtttgtcagcgcatttgtgaccgcagggcatatgcgttttatcatgcttcacgatatcaggcaggaagatggcataaagaatttttttaccgatgtgtacgacctgtacattaagttctcaatgaacccattctatgagcccaacagccccatacgatcctcagcttttgatcgcaaggtgcagttccttggtaagaaacacctgctgtcatag

SEQ ID NO: 138103 - DNA, 225 bp, synthetic construct
  misc_feature 1..225: note = Description of Artificial Sequence: Synthetic coding sequence
  source 1..225: mol_type = other DNA
atgtccgggagtttctatttcgtgatcgtcgggcaccacgacaatccagtgttcgagatggagtttcttcctgccggtaaggccgagagcaaggatgatcataggcacctgaatcagttcattgcacacgccgctctggatttggttgatgaaaacatgtggctgtcgaacaatatgtaccttaagaccgtggataagtttaatgaatggttcgtgtccgcctag

SEQ ID NO: 138104 - DNA, 423 bp, synthetic construct
  misc_feature 1..423: note = Description of Artificial Sequence: Synthetic coding sequence
  source 1..423: mol_type = other DNA
atggccgtttgtatcgccgtgatcgccaaggagaactatcccctttacatccgcagcacgcccacagagaacgaacttaaattccattacatggtacatacctccctggacgtagtcgatgagaaaatcagtgcaatgggaaaagctctcgtcgaccagagagagctctacctggggcttctttacccaacggaggactataaggtatacggatacgtgactaactcaaaggtgaaattcgtgatggtggtcgacagctccaacactgcactgcgtgataatgagatccgaagtatgttcaggaagttgcataatagctacactgatgtgatgtgtaaccctttttacaatcccggagatcggatccagtctagccgggccttcgataatatggtcacttctatgatgatccaggtctgctag

SEQ ID NO: 138105 - DNA, 357 bp, synthetic construct
  misc_feature 1..357: note = Description of Artificial Sequence: Synthetic coding sequence
  source 1..357: mol_type = other DNA
atgagtcgccaggccaacagggggaccgaatcaaaaaagatgagcagtgagctgttcaccctgacctacggggccctggttacacagctgtgcaaggattacgaaaacgatgaagacgtaaacaagcagttagacaagatgggctttaatatcggcgtgcgacttatcgaagacttcctggcccgtagtaacgttggaagatgccacgatttccgggaaactgcagacgttatcgccaaagagaggaaaatgtttttgggcaagcagaacaagacaaagaggcaggctaaactgtacgatgctgtcaaggaaagaggggccgcttcatgcactgacgcctcacctctactgagttag

SEQ ID NO: 138106 - DNA, 405 bp, synthetic construct
  misc_feature 1..405: note = Description of Artificial Sequence: Synthetic coding sequence
  source 1..405: mol_type = other DNA
atgggcttcaatatcggagtcaggctcatcgaggatttcttagctcggtccaatgtcggaagatgccacgactttagagaaacagctgacgtgatcgcgaaggtggcttttaaaatgtatctgggaatcaccccctctatcacaaattggtcaccagccggcgatgagttctcgctgatcttggagaacaatcccctcgttgactttgtggagctgccagacaaccattcttctctcatttattctaatctcctgtgcggcgtgctgcggggcgccctggagatggtgcagatggccgtggaggctaagtttgtgcaagacactttgaaaggcgacggcgttactgagatccgcatgcgctttattaggcgcatcgaggacaacctgcccgctggcgaggagtag

SEQ ID NO: 138107 - DNA, 405 bp, synthetic construct
  misc_feature 1..405: note = Description of Artificial Sequence: Synthetic coding sequence
  source 1..405: mol_type = other DNA
atgggcttcaatataggggtgaggctcattgaagattttctggctcgatccaacgtggggcggtgccacgatttcagagagacagcggatgttatcgccaaggtcgcgtttaaaatgtacctcggtatcacaccctccatcacaaattggtcccctgcaggagatgagtttagtctcatccttgaaaataaccccctggtggacttcgtagaactacctgacaaccacagctcattgatatattctaacctactctgcggtgtgcttagaggagccctcgagatggtccagatggcagtagaagcgaagtttgtccaagacacactgaagggagacggtgtgacagaaatccggatgagattcatccgacgcatagaggataacttgccagctggtgaggaatag

SEQ ID NO: 138108 - DNA, 543 bp, synthetic construct
  misc_feature 1..543: note = Description of Artificial Sequence: Synthetic coding sequence
  source 1..543: mol_type = other DNA
atgtctagacaagcaaaccgggggaccgaatctaaaaagatgtcttcggaactgtttaccctgacctacggcgctctggtaacacaactgtgtaaggattatgagaatgatgaagatgttaataagcaactggacaagatggggtttaatatcggagtacggctgatcgaagacttcctggcgcgcagtaacgtgggtaggtgtcacgatttccgggaaactgccgatgtgatcgctaaggtcgcctttaagatgtatctggggattacccctagtatcactaattggtcccccgcgggcgacgagttctctctcatattggaaaataatccgctcgtcgacttcgtggagctgcctgataaccactcctctttaatctattctaacctgctctgcggcgtcctgcgaggtgctctggagatggtgcagatggccgttgaagccaagttcgtgcaggataccctcaaaggggacggggtcaccgagatccgaatgcggtttattaggcgcatcgaggacaacctcccagccggagaagagtag

SEQ ID NO: 138109 - DNA, 498 bp, synthetic construct
  misc_feature 1..498: note = Description of Artificial Sequence: Synthetic coding sequence
  source 1..498: mol_type = other DNA
atggcaatcttctctgtgtacgtcgtcaacaaggcaggcggtttaatataccagctggacagttatgccccaagggccgaggctgaaaaaacctttagctatcccctggatttgctgctgaaattacatgacgagcgcgtgctggtagcgttcggccagagggatggtatcagagttggacacgcagtgctggctattaacggcatggacgtcaacggtcggtacacagctgatggaaaagagatgctcgaaacggatacatttaagctccactgctaccagactttgactggtatcaaatttgtggttctggcagacccccgccaggccggcattgacagtcttctgagaaaaatctacgagatttatagcgattttgccctgaagaatccgttttacagtctggagatgccgataagatgcgagctgttcgaccagaaccttaagctcgccctggaggttgcagagaaagctggtacgttcgggcctggctcatag

SEQ ID NO: 138110 - DNA, 660 bp, synthetic construct
  misc_feature 1..660: note = Description of Artificial Sequence: Synthetic coding sequence
  source 1..660: mol_type = other DNA
atggcgatttttagcgtctatgttgtcaacaaggctggaggtttgatttaccagctcgattcatacgcccctcgggccgaggctgagaagaccttcagttatccgttggatctgctcctgaagttgcacgacgaaagggttcttgtagccttcgggcagcgagatggtattagggtgggacatgctgtcttggccattaatgggatggatgtgaatggcaggtacaccgccgacggcaaagaggtgctagagtacttgggaaatcccgcgaactaccccgtgagtattcgattcggcagaccgcgcttgacctctaacgaaaagctgatgctcgcgagtatgttccactctctttttgcgatcggctcacaattatcccctgaacagggatcgtcgggtattgagatgttggagactgatacattcaagctgcattgttatcagactcttactgggattaagtttgttgtgttggccgacccacgccaagccgggatcgattccttgcttagaaaaatctacgaaatctattctgattttgcactcaaaaaccctttctattcactcgagatgccaattcggtgcgagctgtttgaccagaacctgaagctcgccctggaggtcgccgagaaggccggcacctttgggccaggatcttag

SEQ ID NO: 138111 - DNA, 4308 bp, synthetic construct
  misc_feature 1..4308: note = Description of Artificial Sequence: Synthetic coding sequence
  source 1..4308: mol_type = other DNA
atggcccaatgcgtccagagcgtgcaagaactgatccccgatagctttgtgccttgtgtggccgccctgtgttcggatgaggccgagcgactgacgcgcctgaatcatctgtccttcgccgagcttttgaaacccttctccaggctcaccagtgaggtccatatgagggaccccaacaaccagttgcacgtcattaaaaatttgaagatagcagtgtccaacattgtgacccaacccccacaacccggagccattcggaagctgcttaatgacgtggttagcggctcacaacccgcagagggactcgtagccaacgtgataactgctggcgattacgatcttaacatctcagcgactactccctggttcgaaagttatagggagacttttctacagagcatgcctgccttggatcacgagtttctcaatcattatctcgcctgtatgctcgtggcatcctctagtgaagccgagccagtggagcagtttagtaagctcagccaggagcagcaccgtatccaacataattcagattactcttaccccaagtggtttatccctaacacacttaaatattacgtgcttctgcacgatgtttcagccggagacgagcaacgggcagagtcgatctacgaagagatgaaacagaagtatggtacgcagggctgctatttgttaaaaatcaactctcgtaccagtaacagagctagcgatgagcaaattccagacccctggtctcagtaccttcagaagaacagcatacaaaatcaggagagctatgaagatgggccatgcaccatcacatcaaacaagaactctgacaataacttgctctccttggatggactagacaacgaagtgaaagacggtctgccaaataacttcagagctcacccactgcaactagaacagtcttccgaccccagcaatagtatagacggacccgatcatctccggtcagcttcgtccctgcacgagaccaaaaagggtaataccggaattatccacggtgcttgtcttaccttgacagaccatgataggattaggcagttcattcaagagttcaccttccgggggcttttgccccacatcgaaaaaacgataaggcagttgaacgaccagctgatctctcgtaaagggttatcaagatcccttttttccgcaaccaaaaagtggttctccggctcaaaagtaccagagaaatcaatcaatgacctgaagaataccagcgggctcctgtatccccccgaagctccagagctgcagattcgaaaaatggccgacttgtgcttcctggtgcagcactatgacttagcgtacagttgctatcatacagccaagaaagactttctgaatgatcaggcgatgctgtacgccgcgggggctctagaaatggctgctgtttcagccttcttgcagccaggcgcccccaggccctatcctgcccactatatggacactgctatccaaacttacagagatatatgtaagaatatggtcttggccgagcggtgtgtgctcctgtctgctgagctgttgaaatcccaatcaaagtatagcgaggccgctgccctccttatacgcctcacttccgaggactcagatcttagatcagctttgctgttggagcaagctgcccactgcttcatcaacatgaagtctcccatggtgcgcaaatacgcttttcatatgattctggccgggcatcggtttagtaaagctgggcaaaaaaagcacgcgttaagatgctactgtcaggctatgcaagtatataaaggtaagggttggtctcttgccgaggaccatataaattttacaatcggccggcagagctacacgttgcgccagctcgacaacgcggtctcagctttcaggcatatcttgatcaatgaatctaagcaatcagctgcacagcagggtgcttttctgagggaatatctgtacgtctacaaaaacgtctctcaactgtcccctgacggcccgctcccccagctccccttaccgtacatcaactcatccgccactagagtcttcttcgggcacgatcgccgaccagccgatggcgagaagcaggctgccacacacgtttctctggaccaggaatacgactcagagtcctctcagcagtggcgcgagctggaggaacaggtggtgagtgtggtcaacaagggagtgataccaagtaattttcaccccacccagtattgcctaaacagctacagtgacaatagccggttcccgctggcagtagtggaggagccgattacggtggaggtggcattcaggaacccactcaaggttttgctgctgctaaccgatctgtccttgctttggaagtttcaccccaaggacttttcggggaaggacaatgaggaggtcaagcagctggtcacctcagagcctgagatgatcggagccgaggtgatttctgaatttcttattaacggcgaggaatctaaggtggccagacttaaattattcccccatcacatcggggagttacacattttgggcgtggtttacaatttaggcacaatccagggctctatgaccgttgacggaatcggtgcactgccaggatgccatactggaaaatattcgctgtctatgagtgtgaggggcaaacaggatttggaaatccaaggccctcgtctcaacaacacaaaagaagaaaagacaagcgtgaaatatgggcccgatcgccggctggatccaattatcaccgaggaaatgcccctgctggaagtcttcttcatacatttccccacagggctcttatgtggggagattcgcaaagcttacgtggaatttgttaacgtgtcaaagtgccccctgactgggttgaaggtcgtgtcaaagagacccgaatttttcacttttggcggcaacaccgccgtgttgacgcccttgagtccgtcagcttctgaaaattgttcagcctacaagaccgtagtcacagatgcaaccagtgtgtgtaccgccttaatctcgagcgctagcagcgttgattttggaatcggaactggaagtcagccagaagttatcccggtgccacttcctgacactgttctgctgcctggcgctagcgtgcaactgcccatgtggcttagagggcctgacgaggaaggcgtccatgaaatcaattttctgttctactacgaaagcgtgaagaaacagcctaagattcggcaccgcattctccgccacaccgcaattatctgtacgtctagaagcctcaacgtgagggccactgtctgtcggtctaacagcctggaaaatgaagaaggaaggggaggcaatatgctggtctttgtcgacgtggaaaacaccaacacatctgaggcgggagtcaaagagtttcacatcgttcaggtcagctccagctcaaaacactggaagctccagaagagtgtcaatctatccgagaacaaagacacgaaactcgcgagcagagagaaaggcaaattttgctttaaggccatccgctgtgagaaggaggaggccgccacccagagtagcgagaaatatacattcgccgatattatcttcgggaatgagcaaatcatcagtagtgcttccccttgtgctgactttttttataggtctctttctagtgaactgaaaaagccccaggcgcatctaccggtccacactgagaagcagtcaaccgaagacgcggtgcggctgatccagaaatgcagcgaggtcgacctaaatattgtgatcttgtggaaggcatacgtagtggaggatagcaagcagctcatcctggaaggccagcatcacgtgattttacgcacgatcggaaaagaagcgttttcataccctcagaagcaggaacctcccgagatggagctgctaaagttcttccgacccgagaacattaccgtctcatctagaccatccgtggaacagctcagctcattgattaagaccagcttgcactaccccgagtcatttaaccacccattccaccagaaatctttgtgcctcgtgcccgtgacattactcttatctaactgctcaaaggccgatgtggatgttatagttgaccttcgccataaaactaccagtcccgaagctctcgaaatccacgggtcatttacctggctgggccagacacaatataaactccagctgaaatcccaggagattcatagcttgcagctaaaagcatgtttcgtgcacacgggggtgtataatctgggcacgcctagggtattcgcgaaactctcggaccaggtgaccgtgtttgaaacctctcagcagaactccatgcccgccttaattattatatctaatgtgtag

SEQ ID NO: 138112 - DNA, 3420 bp, synthetic construct
  misc_feature 1..3420: note = Description of Artificial Sequence: Synthetic coding sequence
  source 1..3420: mol_type = other DNA
atgtcagtcccagactacatgcagtgtgctgaggaccaccaaacacttctggtggtggtgcagcccgtaggaattgtttctgaagaaaacttttttcgaatttataaacgtatctgtagcgtgtcccagatttcagtacgggactcccagcgtgtcttgtacattcgatacaggcatcactaccctcctgagaataatgaatggggtgactttcagacccaccgaaaagtcgtgggactgattaccataaccgactgtttcagtgccaaagattggccacagaccttcgaaaaattccacgtgcaaaaagagatttatggatctactctttatgactcacggttattcgttttcggactccagggcgagattgtcgagcagccccgaaccgacgtggcattctatcctaactatgaggactgtcagacagttgagaaaaggatcgaggactttattgagtctttgtttattgtcctggagtcaaaacgcctggaccgagctaccgataaaagcggcgacaaaataccactgctgtgcgtccccttcgagaagaaagactttgttgggcttgatacggatagcaggcattataagaaacggtgccaggggagaatgcgaaagcacgttggggacctctgtctgcaggccggcatgctccaggattctctggtgcattatcacatgtctgtcgaactcctcaggagtgtcaatgactttctctggttaggagccgccttggaaggcttgtgctcggcctctgttatatatcattaccccggcggcacgggaggaaagtcaggcgctcgccgctttcagggcagtactctccctgccgaggccgctaatagacacagacccggggccttgaccacaaacggaatcaacccagacacatccactgagattggaagagccaagaactgcctgtcccctgaggatataatagacaagtacaaggaagcaataagttattacagtaagtacaaaaacgccggcgttattgagcttgaggcgtgcatcaaggccgtgcgggtactcgccattcaaaagagatcaatggaagccagcgaattcctccagaatgccgtgtacatcaatttaaggcagctgagtgaagaagagaagatccagcgttatagcatcctgagcgagttatacgaactgatcgggttccataggaaaagcgccttctttaaaagagtggcagccatgcagtgcgtcgccccttccattgccgaaccgggttggcgggcttgttacaaacttcttctagaaacactcccggggtatagtttgagcctggatccaaaggactttagtcgagggacccatcgtgggtgggcagctgtgcaaatgcggttactgcacgaactcgtctatgcgagccgccgtatgggaaaccccgccctgagtgtaagacatctctctttcctcctgcagactatgctggacttcctaagtgaccaagaaaaaaaagatgtggctcagtcactggagaattacacaagcaagtgccctggcacaatggagcccatagcacttcctggaggcctgacccttcccccagtgcctttcaccaagctgcctatcgttagacacgtgaaattattaaacttgcctgccagtctccgtcctcacaagatgaaaagcctgcttgggcagaacgtgagtactaaaagtccctttatttacagccccatcatcgcacacaaccgcggagaagaaaggaacaagaagattgacttccaatgggtgcagggggatgtctgtgaggtccagctgatggtttacaatcccatgccctttgagctgcgggtggagaacatgggcttgttgacatctggtgttgagttcgagagcctccctgcggcccttagtctccctgcggagagcggtctgtatccagtcaccctcgtgggagtgcctcagactactggcactattactgttaacggctaccacacaactgtttttggcgtcttctctgactgccttctggacaatttaccaggcattaagacaagcggttccaccgtggaggtgattccagcactgccacgcctgcaaattagtactagtctgccccggtccgctcactctctgcagcccagttctggcgatgagatctcaactaatgtatccgtccagctttacaacggcgagtctcagcagctgatcatcaaacttgagaacatcggtatggaaccgctggaaaaactggaggtgacctccaaggtccttaccacgaaggagaaactgtacggtgacttcctgtcttggaagctggaagaaaccctggctcagttccccctgcagcccggtaaggtggccaccttcacgataaacatcaaggtgaagctggacttttcctgtcaggaaaacctgctgcaggacctttcagacgatggaatctcggttagtggcttccccttgtcgtcccccttcaggcaagtcgtgagaccacgagtagaagggaagcctgtaaaccctcctgagagtaataaagccggcgactattctcacgtgaagacattggaagccgttttaaatttcaagtactccggaggtccaggccatacggaggggtactatcggaatctgtctctgggtctgcatgtcgaggtggagcctagcgtgttctttacgcgtgtgtcgacattacccgctacaagcaccagacagtgccatctgctgttggacgttttcaattctaccgagcacgaactcacagtgagcactcgctcctctgaggcactgattctgcatgccggagaatgccagagaatggccattcaggtggataaatttaatttcgagtcgtttcccgagagtcctggcgaaaagggacaattcgctaaccctaaacagctcgaggaagagaggcgcgaagcccgcggactggagattcactccaaactgggcatttgctggcgaataccctcattgaagcggtctggagaggcaagcgtagaggggctcctcaatcagttagtccttgaacaccttcaactggccccgctgcagtgggacgtcctggtggatggccagccctgcgatcgggaggcagtagctgcctgccaagtgggcgacccagtgagactggaagtcagactgactaatcgctctcccagaagtgtggggccttttgctctgacagtcgtcccctttcaggaccaccagaacggcgttcacaactatgacctgcacgacacggtgtccttcgtcgggtcaagtacgttttacctcgatgccgtccaaccttctgggcaatctgcttgtctaggcgccctgctgtttctatacactggcgactttttcctgcacatcaggttccacgaagacagcacttccaaagagctgccgccctcctggttttgcctgccatccgtgcacgtgtgcgccttagaggcacaggcatag

SEQ ID NO: 138113 - DNA, 3741 bp, synthetic construct
  misc_feature 1..3741: note = Description of Artificial Sequence: Synthetic coding sequence
  source 1..3741: mol_type = other DNA
atggtgccagccggagatcaagaccgggctcctcacagagggaagcccgctcaggctggagctagaaccagccgcgcctcgagggcattgcggtcatggcgcagatctcaggctgcgagggccacagtgacccatcctagagggggccacgataggggctctcatggggggtacagggaggggcatcggggctgtagacgggaccctcagtgggcaagcgccggaccgcctccactttcttttaccgaagaggtcaagtttgagctgcgagcacttaaggactgggatttcaagatgtctgtccctgattacatgcagtgtgccgaagatcaccaaacgctgctagtcgtcgtgcaacccgttgggatcgtcagtgaagagaactttttccggatttacaagcggatctgcagcgtgtctcagatatcagtccgtgactcccagagggtgttgtatatcaggtacaggcatcactaccccccagagaataacgaatggggggattttcagacccacagaaaggtcgtaggcttgattacaatcaccgattgcttcagcgccaaggactggccacagacctttgagaaatttcacgttcagaaagagatctacgggagcaccctgtatgactcccggctgtttgtgtttggactccagggcgaaatcgtcgagcagccacgcaccgacgtcgcattttatcctaattacgaggactgtcaaaccgtggaaaagcgcattgaggacttcatagaatcgctatttatcgttcttgagagtaaacgtctagaccgagcgacagataagtccggtgataagatccctctgttgtgtgtcccatttgaaaaaaaagatttcgtgggcttggatacggactctagacactataaaaagagatgccagggacgcatgcggaagcacgttggtgatttgtgtctccaggccggaatgctccaagactctttggttcactatcacatgtctgtggaactcctacgatctgtgaacgattttctgtggctgggggcagcacttgaaggcctgtgctcagcctccgtgatatatcactatccaggcggtacaggcggtaagagtggggcacggaggttccaggggtcgactctgcctgccgaagctgccaaccggcatcggcccggagcccaggaggtcctgatagacccgggcgctctcacaacaaacggtatcaatcctgatacgagcaccgagataggccgggcaaagaattgtcttagcccagaagacataatcgataagtataaagaagctatctcatattactcaaaatataagaatgccggcgtcatagagctcgaagcatgcatcaaggctgtgcgcgtcctagctatccaaaagcgctcaatggaggccagtgagtttttgcaaaatgcagtgtatattaacctacgtcagttgtcggaggaggaaaagattcagcggtattcaatactgagcgagctttatgagcttataggattccacagaaagtctgcttttttcaagagggtggccgcgatgcagtgtgtggctccctcaattgcagagccgggatggcgtgcatgttacaagcttctgctggagactcttcccggatatagcttgtctctcgatcctaaggatttcagtaggggcacccatcgtgggtgggccgctgtgcaaatgcgattgctgcatgagttggtatacgcttccaggcgcatggggaacccggcactgtccgtgcggcacttgagctttttacttcagacaatgttggactttctttctgaccaggaaaagaaggacgtcgcacagagcctcgaaaattacacatcaaagtgcccagggactatggagcccattgccctccccggcggtctgaccctgccaccagttccatttacaaagttgccaattgttcgtcacgtcaaactgctgaatctgcccgccagtttgaggcctcacaagatgaaaagcctgctcgggcaaaacgtaagcacaaagtctccctttatctatagccccatcatagcacataaccgaggggaagagcgcaacaaaaaaattgactttcagtgggttcagggagacgtctgtgaggtgcagctgatggtgtacaatccaatgcccttcgaattacgagtagagaacatggggttacttacaagtggagtcgaattcgaaagcctcccagctgcgctttctctcccagctgagagtggcctgtatccggtcacattggtaggcgtgcctcagactacgggtactataacagtgaacggataccacaccaccgtctttggcgttttctctgattgtctcttagataatcttccaggcatcaagacctcggggagcactgtggaagtgattccagctctcccgcggctgcaaatctccacgtccctgccccggtctgcccattctctgcagcctagcagcggcgatgaaatcagcactaacgtctctgtccaactgtacaacggagagtcgcagcagctaataattaagctggagaacatcggtatggaacccctcgaaaagctggaagttacatctaaggtcctcacaacaaaggagaagctgtacggagactttctgagctggaagcttgaagaaacccttgcacagttcccactgcagcccgggaaagtggctaccttcactatcaacatcaaggttaagcttgatttctcttgtcaggagaatttactccaggacctgagcgacgatggcatctccgtatccggattccctttgagcagcccatttcggcaagtggtcagaccacgcgttgaagggaagcccgtcaaccctccggaaagcaacaaagcgggtgactattcccacgtgaagactctggaggcagttctgaattttaaatattctggcggtccagggcatacagaaggatattaccgtaatctgtcactcggtctgcatgtcgaagttgagccatccgtattctttactagagtgtcgacactgcctgccacttctactagacagtgccacttactgctcgacgtctttaactcaaccgagcatgagctgaccgtctctacgaggagttcagaggctctgatactccacgcgggcgaatgccagcggatggcgattcaggtagataaatttaatttcgagtcattccccgaatcccctggggaaaagggacagttcgcaaatcctaaacagctggaagaggaaaggagggaggccaggggattagaaatacacagcaaactcggcatctgttggaggattccgagtttgaagcggtccggagaggcctcagttgaaggactccttaaccagctggttttagagcacctgcagctagcaccccttcagtgggacgtcctagtggatggacagccgtgcgatagagaggctgtggccgcatgccaggtcggggaccccgtacgtttggaggtgcggctcactaatagaagccctcgttccgtggggccatttgcactgacagttgttcctttccaagatcatcagaacggtgtgcacaattacgatcttcacgacacagtgtcttttgttggctcctccaccttttaccttgatgcagtgcaaccaagcggccaaagcgcctgtctcggagctctcctgtttctgtacaccggcgatttttttctgcacatcaggttccacgaggatagtacttccaaagagttgccccccagttggttttgtctacccagtgtccatgtctgtgctcttgaggcccaggcttag

SEQ ID NO: 138114 - DNA, 3447 bp, synthetic construct
  misc_feature 1..3447: note = Description of Artificial Sequence: Synthetic coding sequence
  source 1..3447: mol_type = other DNA
atgtccgttcccgactatatgcaatgtgccgaagaccaccagactttactggtggtggtgcaacccgtggggatcgtctcagaggagaatttttttcgcatctacaaacgcatctgctctgtgtcccaaatctctgtgcgcgactcacagagggtcttatacattagatataggcaccattaccctcctgagaacaacgagtggggcgacttccaaacacataggaaggtggttggcctgattacgattactgactgcttcagtgctaaggattggccacagacttttgagaagtttcatgtgcagaaggaaatttacggatcgacactatacgatagccgcctgttcgtgttcggcttgcagggcgaaatcgtggagcagcccagaacagatgtggcgttttaccccaactacgaggattgccagacggtcgagaagagaatcgaagacttcatcgaatctcttttcatagtcctggagtccaaacggttggaccgtgccactgataagagcggtgacaaaatcccacttctttgtgtgccattcgaaaaaaaagacttcgtgggactcgatacggactctcggcattacaagaagagatgccaggggcgcatgcggaagcatgtcggcgatctgtgccttcaggcaggtatgctccaagattctttagttcattatcacatgtccgtcgaactactccgatccgtcaacgacttcttgtggctcggtgctgcgcttgaaggcttgtgttccgcttctgtcatctatcactaccctgggggaaccgggggtaagagcggggctcgaagattccagggctcgacgctcccagcagaggctgcaaaccgccaccgcccaggggctcaggaagtgctgatcgaccccggagcactgaccaccaacggaattaaccctgatacgtcaaccgaaattggcagggccaagaactgcctcagcccggaagatataattgacaagtacaaggaggccatttcctattattccaagtacaagaacgccggggtgattgagctggaggcctgcataaaggccgtaagggtacttgcaatccaaaaacgtagtatggaggccagcgagttcctgcagaatgctgtctacataaacttgcggcaactgtcagaggaagaaaaaatccagcgctatagtattctgagcgagctttacgagctcatcggcttccaccgaaagtcagcattcttcaaaagagtagccgcgatgcaatgtgtggctccttccatcgcagaacctgggtggcgggcatgctacaagctgctgcttgagactctacctggatattctctgtcacttgaccctaaagatttctctcgaggtacgcatcgaggctgggcagcggtgcagatgcgattgcttcatgagctggtttatgcatctcggaggatgggcaaccctgctttaagtgtgcggcacctgagtttcctcctacaaaccatgctcgactttctctccgatcaagaaaaaaaagacgtggcccagtctttggaaaattatacatcgaaatgtcccgggactatggaacctatcgcactgcctggagggctgacgctaccccccgttccatttactaagctaccaattgtgaggcacgtgaaattgttaaacttgcccgcatctctcagaccccataaaatgaagtctctgttgggacaaaacgtctcaactaaatcaccttttatttactctccgatcatcgcccataacaggggtgaagagcgtaataaaaagatcgattttcagtgggttcaaggcgatgtctgtgaagtgcaactgatggtttataaccccatgccctttgagctcagggtagagaatatgggactcctcacctccggtgtggagttcgaatctctgccagcggcactgtcattgccggcagagtcaggcctttaccctgtgactctggtgggagtgccccagacaactggtacaattacagtcaacggataccatactacagtctttggggtgttttccgattgcctactggacaatttgcccggcattaagacctctgggagcacagttgaggtgattccagccctccctcgactgcagatctctaccagtctgcctcgctctgcccactcccttcagccctcctccggtgacgagatttccaccaacgtctcagttcagctctataacggggaatcgcaacagttgatcatcaagctggagaatattggcatggagcccttagaaaaactggaagtcacgagcaaagttctcacaacgaaggaaaagctgtacggggactttctgtcttggaaacttgaagagaccctggctcagtttccattgcagcccggaaaggttgccacctttacaattaacattaaagtcaagttggacttctcctgtcaagaaaatctgttgcaagacctcagcgatgatggcatttcagtgagcggttttcctctgagctctccgtttcgtcaggtggtcaggccacgagtggaagggaagcccgttaaccctcccgagagcaataaggctggtgactattctcacgtgaaaacactggaagcagttctaaattttaagtatagtggggggccaggccatactgaaggatactatcgtaatctgagtttaggcttacacgtggaggtggagccatccgtgttctttacacgggtgagcacattgccagcaacttcaacgcgccagtgccacctgctgcttgatgtgtttaactcgactgagcatgaactcaccgtgtcaacgcgttcatcggaggccttgatcctgcacgccggggaatgccagaggatggccatccaggtagacaaatttaatttcgaaagttttcctgaatcccccggcgaaaaagggcaatttgcaaacccgaaacagttggaggaggagcgccgagaagcaagagggcttgaaattcactcaaagctaggaatatgctggcggattccttcactgaaaagatccggagaggcgtccgtagaagggctgctgaaccagctggtgctcgagcatctgcagttagcgccactgcagtgggacgtactggtggacggccagccctgcgacagagaagcagtcgctgcatgccaggtgggggaccctgtccggcttgaagtaaggttgacaaaccgcagcccccgcagtgtggggccatttgcacttactgtagtgcccttccaggatcaccagaatggtgtccataattatgaccttcatgacactgtcagcttcgtgggctcgagtactttttacctcgacgctgtccagccgtcaggacaatcggcctgtctgggggctctactgttcctgtataccggggacttctttctgcatatccgtttccacgaagattctacctccaaggaactcccccccagctggttctgcctgccttcagtgcatgtgtgcgctttagaagcccaggcatag

SEQ ID NO: 138115 - DNA, 2862 bp, synthetic construct
  misc_feature 1..2862: note = Description of Artificial Sequence: Synthetic coding sequence
  source 1..2862: mol_type = other DNA
atggccctggtcttccagttcggccagcccgtcagagcacagccgctcccgggcctgtgtcacgggaaactgattagaaccaatgcatgcgacgtctgcaattccacagacctgccggaggtagaaattatctccctgttggaagagcaattgccccactataagctgcgcgcagacacaatatacggatacgatcacgacgactggctgcacacgccattaatttcccccgatgcgaacatcgatcttacgacagaacagattgaagagacattgaagtatttcctgctatgcgcagagagggttggacagatgaccaaaacctataacgatattgacgcggtgactcgcctcctggaggagaaagagagggatttggagcttgcagcccggattggacaatctctactaaagaaaaacaagacgttgacggagaggaacgagctgttagaagaacaggtggaacatatacgtgaagaggtttcacagcttagacacgagctgtcgatgaaggacgagctgctccagttctataccagcgcagctgaagagtctgaaccagagagcgtttgttcaaccccgctgaagcggaatgagagcagctcctcggtgcagaattactttcacctggacagcctgcagaagaagcttaaagacctcgaagaggaaaacgtggtgttgagatccgaggccagccaactgaaaacagaaacaattacgtatgaggagaaagaacagcagctagttaacgattgtgtaaaagagttgcgagacgccaacgtccagattgctagcattagcgaggaacttgcaaagaagacagaggacgcggcccgccagcaggaagaaattacacacctgttgtcccagatcgttgacctgcagaagaaagctaaagcctgtgccgttgaaaacgaagagctagttcagcatctgggtgccgccaaggacgcccagcgccagctgactgccgagttgcgggaactggaggataagtacgcagagtgtatggagatgctgcatgaagcccaggaggaactgaagaacctgcggaataagacaatgcccaacaccaccagcaggagatatcactctctgggtctattccccatggacagtctggctgccgagattgaggggacaatgagaaaggaactgcagttggaagaggccgaatcccccgatattacacatcagaaacgcgtcttcgagactgtgaggaacatcaatcaagtggtgaaacagagaagcctgaccccttcacctatgaatatcccaggctcaaatcaaagctccgcaatgaatagcctcctcagtagttgtgtgtcgactccccggagctctttttatggcagcgacatcggcaatgtggtcctcgataataaaacgaattcgatcatcctggaaactgaagctgctgacttagggaacgatgagagaagcaagaaacccggcacaccaggcacacctggaagccacgatctggaaaccgccctccggcggttatctttgcgacgggagaactatctctccgaacggcgcttcttcgaagaggaacaggagcggaaactgcaggagttggcagaaaagggagagctgcggagcgggtccctgacaccaacagagagcattatgtcactgggaacccactccaggtttagtgagtttacaggatttagcgggatgtccttttcttcccgctcgtacctgcctgagaagctccagatcgtgaagccattggagggttctgccactctccatcattggcagcagttggcgcagccacacttggggggaattcttgatccacgccctggcgtcgttaccaaaggatttcgaacgctggatgtggacctagacgaagtttactgtctcaatgatttcgaagaggatgatacgggggatcatatttccctccccagactggcaacaagcactcctgtgcaacaccccgagacttccgcccatcacccgggcaagtgcatgagtcagaccaacagcacctttaccttcaccacatgtcggattctccaccccagcgacgaactgacaagggtgactccgtccctcaactcagccccaactccagcctgtggcagcacttcccatctcaagagcacaccagttgcgactccttgtacacctagaaggctgtcactggcggagtcgttcaccaacacaagggagtccaccacgactatgtctacaagccttggattagtttggctgctcaaggaacgcggcatttctgccgccgtttacgatccccagagttgggaccgggcggggcgggggtcattattgcactcctacacccctaaaatggccgtgattccatcaaccccccctaactcgcccatgcagacccccactagcagcccgcccagttttgaattcaaatgcacgtctccaccttacgacaattttctggcaagcaagcctgctagttctatcttgcgggaagtcagggagaaaaacgttaggtcttccgaatctcagaccgacgtgtctgtgtccaacctcaacctcgtggataaggttcggcgctttggtgtggccaaagtggtcaatagcgggagggcccacgtcccaactctgacagaagagcagggtcctctcctttgtggccctcctggccccgctcccgctctcgtgccaagagggctcgtcccagaagggctaccactgaggtgccccacagtcacgagcgctataggcgggctgcagctcaacagcggcatcaggcgaaaccgatccttccccacgatggtcgggtcctctatgcaaatgaaagccccagtcaccctgacaagcggcattttgatgggtgctaagctgtctaaacagaccagcctccgctag

SEQ ID NO: 138116 - DNA, 2061 bp, synthetic construct
  misc_feature 1..2061: note = Description of Artificial Sequence: Synthetic coding sequence
  source 1..2061: mol_type = other DNA
atgtcacttagggacaagggcggagaagaggagtgcttcgagtacgactgtcaggacgaggagcgaaagcccacccaccggcaacacgatacacaggatttacttgaagaagtactatgtgcagagcgcgtgggccagatgactaagacgtataacgatattgatgccgtgacccgactcctcgaggagaaagaacgcgaccttgagcttgccgccaggataggccagagtctgcttaagaaaaataagactctgacagaaaggaacgaactgttggaggagcaagtggaacacattcgcgaggaggttagccagctcaggcatgaactttcgatgaaagacgaactcctgcagttttacactagtgccgccgaggagagcgagccggagtccgtgtgctctacccctcttaaacgtaatgagtcaagctcatccgtccaaaactacttccatctcgactccttgcagaaaaaacttaaagatctcgaagaagagaatgtggttctgcggagtgaggctagccagctgaagactgaaactattacttatgaggagaaagagcagcagttggtgaacgattgcgtgaaggaactaagggacgctaacgtacagattgcctccatcagcgaggagctggctaagaaaacagaggacgccgctcgccagcaggaagaaatcacacatctgctcagtcagatcgtggatctgcagaaaaaagccaaggcctgtgctgtggaaaacgaggaactggtccagcaccttggggccgctaaagacgcacagaggcagttaactgcagagctgcgggagctggaagacaaatatgcagagtgtatggaaatgctacacgaggcccaagaggagcttaaaaatctgagaaacaagaccatgcctaatacgactagccgtagataccacagcctcggtctcttccccatggacagtttagcagccgagatcgaaggcaccatgcggaaggagcttcaactggaagaagcagaatccccagatattacccaccagaagcgcgtgttcgagacggtccgaaatattaatcaggtggtgaagcaacgaagcctgacaccgtccccaatgaacatacctggctctaatcaatctagtgctatgaactctttgttatcctcttgcgtaagtacacctcgaagctctttctacgggtccgatatcgggaatgtggtactcgacaataagactaactccattatcctcgaaacggaggccgcagatttgggcaatgacgagaggagtaagaagcccggaacacctgggacaccgggttcccatgacctcgagacagctttgcgccggctgagtttgcgtagagagaattacctgagcgaaagaaggttttttgaagaggagcaggagagaaaattacaggagcttgctgagaaaggtgaactccggtccggtagtctgaccccgactgagagcattatgagcctcgggacccactccagattcagcgagttcaccggcttttccgggatgagcttctcctcccggagctacttgcccgagaagttacagattgtcaagccgctggaggggtcagccacactccatcactggcagcagctcgctcagccacatttaggcggcattcttgatcccaggcccggagtagtgacaaagggcttcagaaccttagacgtggacctcgacgaagtgtattgtttgaacgatttcgaagaggacgataccggtgatcacatttccttgccacgcctggccacatcgacaccagttcagcaccctgaaacttcaggagagcggtctcaggcccgtgtgacagtgtccggctcaagaagttatcctagccggccccaggcaagccctgaggaaatgcaggaaccaccagctgctaccgaagaggaagaggaggaggaagaggaagaaggctctggtgaaggcaccactatcagcccggtcaatctggcgcccttccctgaggctgaattttgggctatcctcacatccgtgccaggcacgatccggtcagggtctctcagcgtggcatctgcgcgcctgtgtggctag

SEQ ID NO: 138117 - DNA, 2688 bp, synthetic construct
  misc_feature 1..2688: note = Description of Artificial Sequence: Synthetic coding sequence
  source 1..2688: mol_type = other DNA
atgagtctacgcgataagggtggcgaagaggagtgctttgaatatgattgccaggatgaagaaaggaagcccacccaccgccagcacgacactcaggaccttctggaagaggtgttgtgcgctgagagggtagggcagatgactaaaacatacaatgatatcgacgctgtaaccagactgttggaggagaaggagagagacctggaactggcagccaggattggacagtccctgttgaagaagaacaagacattgacggagagaaacgagcttctcgaggagcaggtagaacatatccgggaggaggtctcgcagcttcgccatgagctgagcatgaaagacgaactactccagttctatacctccgcggccgaggagagcgagccggaatccgtgtgttccactccgctgaaacggaacgaatcctcctctagtgtgcagaattattttcatcttgacagcctccagaaaaagcttaaggatctcgaagaggagaacgtcgttctccgatcagaggctagccagctaaagactgaaactattacatacgaagagaaagagcagcagttggtcaacgattgtgtcaaagagcttagagacgctaatgtgcagatagccagtatatcggaggagctggccaagaagaccgaagatgccgctagacagcaagaagagattacacacctcctctcccaaatagtagatctccagaagaaagcgaaggcctgcgctgtggaaaatgaggagctggttcagcaccttggcgccgcaaaggatgctcagaggcaattaaccgcggaactaagggagcttgaagataagtacgccgaatgtatggagatgctccatgaagctcaagaggaactgaaaaatctccggaacaagacaatgccaaatacaacatcgcggcggtaccacagcctgggactgttccctatggattcgttggccgccgagatcgagggtactatgcgcaaagagctgcagctggaagaggcggagagcccagacatcacccaccagaaacgagtcttcgagaccgttagaaatattaaccaggtggtaaagcagagatcacttaccccttctcccatgaatattcccggatctaatcagtcatcagccatgaatagcctgttatccagttgtgtaagcaccccaagatcatcgttttacgggtcagacattggaaatgtcgtgctggataataagaccaactctataattctcgaaacggaagccgccgatcttggcaatgatgaacggagcaaaaagcctggaacccccggcactccaggatctcacgatctggagaccgcactccggcgtctgtcattgaggagggagaactacttgtcggagcgcagattttttgaagaggaacaagaaagaaagctgcaagagctcgcagagaagggcgagttacgctccggctcccttactccgacggagtccattatgagtctgggcacccactctcggtttagcgagttcacaggcttcagtggaatgtccttctcatcccgttcttatttgcccgaaaaacttcagatcgtaaaacccttagagggctccgcgacgttgcaccactggcagcagctggctcagccccacctgggcgggatcctggatcctcggcctggagtggttacaaagggattccggacattagacgtggaccttgacgaagtgtattgcttgaatgacttcgaagaggatgatactggggaccacatatctctccctcgactggcaacatcaacccctgttcagcacccagaaacctcagctcaccaccctgggaaatgcatgagccagactaatagtacattcacattcaccacgtgccggattctgcatccatctgatgagctcacaagagttaccccctcactgaacagcgcccccacaccggcctgcggcagcacctctcacctaaaatccacacccgtcgcaaccccatgcacaccacgcaggctgagtctggccgagtcttttacaaatacccgggaatcaaccaccaccatgtcaacatctttgggtctggtgtggcttttgaaagaacgcggcatctccgccgctgtttacgatccacagtcatgggaccgcgctggcagaggatcattactccattcttacaccccaaagatggccgtgatccctagtacaccccctaactcaccaatgcagactcctacttctagccctccatcatttgagtttaaatgtacaagcccaccgtatgataacttcctggcttcaaagcctgcaagttccattctccgcgaagtgcgcgagaaaaatgtgaggtcctctgaatcccaaactgacgtgtctgtaagtaacttgaacctggtggataaggtgcggcgttttggggtcgctaaggttgtcaactctggacgagctcacgttccaaccctcacagaggagcaaggcccactcttgtgtggacctcctggaccagcgcctgcactagtgcctaggggcctggttcccgagggcctgccactcagatgtccaactgtgacttcggccatagggggcctccaactaaatagcggaatcagaaggaatagatcctttcccacaatggtgggaagcagcatgcagatgaaagctcctgttactctcacgtcagggatactgatgggagccaagctgtcaaagcagactagcctgcgctag

SEQ ID NO: 138118 - DNA, 2361 bp, synthetic construct
  misc_feature 1..2361: note = Description of Artificial Sequence: Synthetic coding sequence
  source 1..2361: mol_type = other DNA
atggccctggtgttccaatttgggcagcccgtgcgggcacagccactgcctggactgtgtcacggcaaactgatcaggacaaacgcttgtgatgtatgcaacagcacagatctgcccgaggtggaaatcatttccctcctggaggagcagctgcctcattataagctccgcgcagatacaatctacggatatgatcacgatgactggttacatacgcctctaatctcgccggacgccaacattgacctgacaactgaacagattgaggagaccctgaaatactttctcctatgtgctgaacgggtcgggcaaatgactaagacgtataacgacattgacgcagtgacacgcctgctagaggaaaaagagagagacttagaactggctgcacgaataggccagtctcttctcaaaaaaaacaaaactctcacagaacggaatgaactgcttgaggaacaggtcgagcacatccgggaggaagtgagccagctgagacacgagttaagcatgaaggatgagttactccaattctatacttcagccgccgaggaatcagaacccgagagcgtgtgcagtacacccctcaagagaaacgaaagtagcagtagcgttcaaaactactttcatctggatagtctgcagaaaaaacttaaagacctggaggaagagaacgtggtcctcagatcagaagcctcccagctgaagacagaaacaatcacctatgaagaaaaagaacagcaattggtgaatgactgcgtcaaagagctcagggacgccaacgtgcaaattgccagcatatccgaagagctggccaagaagacagaagatgccgccagacagcaggaagaaatcacacacctcctgagccagattgttgatttgcagaaaaaagccaaagcgtgtgcagttgaaaatgaagagctggtgcagcacctgggggccgccaaggatgcgcagcggcagctgactgctgaactgcgagaactcgaggacaagtacgctgaatgcatggagatgctgcatgaggcccaggaagaacttaagaatcttcggaataagaccatgccaaacactacgagccggcgataccacagtcttgggctctttccaatggactctttggccgcagaaattgagggaacgatgaggaaggaacttcagctagaagaggctgagtcacctgatatcacacatcaaaagagagtcttcgagaccgtgcgcaacattaaccaggtggtaaagcagcgttctctgactcctagtcctatgaatattcccggcagcaatcagagctccgccatgaacagtctgctttccagttgtgttagcacgccgcggtccagtttctatggctccgatataggtaacgtcgtgctggacaacaagaccaactccatcattttagagacagaagccgcagacctgggcaatgacgaaagatctaagaagccagggacccctggtactcctggatcccatgatcttgagacggctctgagaagattgtctctccgaagggaaaactatctgtcagagaggcgcttctttgaggaagaacaggaacggaagctccaggaactggccgaaaagggtgagctgcggtccggctcactgaccccaactgagagcatcatgagcttaggcacccattcccgcttctccgagttcaccgggttttccggaatgtcattttcttccaggtcatatctgcccgagaagctgcagatcgtcaagcccctcgaaggttctgctacccttcatcattggcagcagctggcccaaccccatctaggagggatattggatccacggcccggcgtggtcaccaaaggcttccggacgctcgacgtggatctggatgaggtgtattgccttaacgactttgaggaagacgatacagcccaccaccctggcaagtgcatgtcacaaactaattccacgttcaccttcaccacatgccgcatcctgcatccgtctgatgaacttacccgggttaccccttccctcaactccgctcctacccccgcctgtgggtccaccagccatctcaaatcgaccccagttgccaccccctgcacacccagaaggctttcattggcagaatctttcacgaacactagggagtccaccactacaatgtccacctccttagggttggtctggcttcttaaggaaagggggatctccgcggctgtctatgacccgcagagttgggacagggctggacggggatcgctgctgcactcccacgaagatgtgacttgtgcaaacttgggcgagggaggtgtgttaagctccttcctgctccgctcaaccgaaaccccgaaatgcgtactcatcccttggatcggaaaccaatag

SEQ ID NO: 138119 - DNA, 2745 bp, synthetic construct
  misc_feature 1..2745: note = Description of Artificial Sequence: Synthetic coding sequence
  source 1..2745: mol_type = other DNA
atgtctcagtcccaaaacgccatattcacttcaccaacaggggaagaaaacctgatgaactccaaccaccgcgactcagaaagcattaccgacgtctgctctaacgaggacctgccagaggttgagttggtgtccttgctggaggaacagttgccccagtacaggttaaaggtagataccctttttctctatgagaaccaggattggactcagtcaccccatcagcgtcagcacgcaagcgatgccctatctcccgttctggctgaggaaacatttcgctatatgatcttgggaacagatagagtcgaacagatgaccaaaacatataacgatattgatatggttacacatcttctcgccgaacgggacagagaccttgaactggctgcgagaattggccaggcactgctaaagcggaaccacgttttgtccgaacagaatgagtctctagaggaacagttaggtcaggcgtttgatcaagtcaatcagctgcagcacgagttgtgcaaaaaggacgaactgctccggatcgtgtcaatcgcttcggaggagtctgaaactgactcttcgtgttctacccctctgcgcttcaacgaatccttcagcctctcccagggtttattgcaacttgaaatgctgcaagagaagttaaaagaactagaagaggagaatatggccctgaggtccaaagcttgccacataaagactgaaaccgttacttacgaggaaaaagaacagcagcttgtaagcgactgtgtgaaggagttgagagagaccaacgcgcagatgtcccgcatgacagaagagttgagtggcaaaagcgatgaattaatcaggtatcaggaagagctctcaagcctcctgagccaaatcgttgacctgcagcataaactgaaagagcatgtgatagaaaaggaagaattgaaactgcatctgcaggccagcaaggatgcgcagcgacaactgaccatggagctccacgagctacaggacagaaacatggagtgcctcggcatgctgcacgagtcccaggaagaaataaaggagctgcgtagtcgcagtggacctacagcacacttgtatttttcccaaagttacggagcgttcacgggcgagagcctggcagcagaaatcgagggcaccatgagaaagaaactttccttggatgaggagagctcgttgtttaagcagaaagctcaacagaagagagtctttgacactgtcagaattgcaaacgacactcggggccggagcatatccttccccgcccttcttcccatacctgggtccaataggtcatccgtgatcatgactgctaagcctttcgagtcggggctccagcagacagaagacaagagtctgttgaatcaaggcagcagtagcgaggaggtcgccggaagctcacagaagatgggccagccaggcccgtcaggagattccgaccttgcgactgctctccatcgtttgagccttcgcagacaaaattacctgtcagagaaacagttcttcgctgaggaatggcagcgcaagatacaggttcttgctgatcagaaagagggggtctccggatgtgtgacgccaaccgaaagtctcgcaagcctgtgtactacgcaatccgagataaccgatctttcttccgctagttgcctgcggggcttcatgcctgagaaactgcagatcgtgaagcctctggaggggtcacaaactctgtaccattggcagcaactggcgcagcccaatctgggtactattttagatccgagacctggcgtaatcactaaaggctttacacagcttcccggtgacgcaatctaccacatcagcgatctggaggaggacgaggaagaaggaataacatttcaagtccagcagcccctcgaagttgaggaaaagttgtctactagtaagcctgtgactggtatcttcctgcccccaatcacgagtgccggagggcctgtgaccgtggctactgccaatcccggtaagtgtctgtcttgcaccaatagtaccttcaccttcaccacgtgccgcatcctgcacccttctgacattacacaggtgaccccatcctctggctttccctcgttaagctgtggaagcagtggttccagctcttcaaataccgctgttaattctccggctctgagttatagattaagcatcggtgaaagcataactaatcgacgtgatagcacaactactttttcctctaccatgagcttggccaaactgcttcaggagcgaggtatctccgccaaagtttaccactctccaatctctgaaaaccctctacagcccttgccgaagagcctggctataccatctaccccaccaaattctccatcgcatagcccctgcccctctccgctgcctttcgagcctagggttcacttgtctgaaaactttttggcatctcgaccggccgaaaccttcctccaggagatgtacgggctgcggccctctcgaaacccacccgacgttgggcaactgaaaatgaacttggtagaccgacttaaacgtctcgggatagccagggttgtcaaaaaccctggggcccaggagaacggtaggtgtcaggaagctgaaataggtccgcagaaaccagattcagcagtgtacttgaactccgggtcttcacttctgggcggactgcgtcggaaccagtcactccctgttattatgggctcatttgcagctcctgtgtgcacttcatcacccaagatgggagtcctgaaagaggattag

SEQ ID NO: 138120 - DNA, 936 bp, synthetic construct
  misc_feature 1..936: note = Description of Artificial Sequence: Synthetic coding sequence
  source 1..936: mol_type = other DNA
atgtctcaatcccagaacgcaatcttcaccagccctactggggaggagaacttaatgaactccaatcaccgggacagtgaatcgatcacagatgtttgctctaacgaagacctgcctgaggtggagctggtgagtctcctggaagaacaactgccgcagtaccgactaaaggttgacactctgtttttatacgaaaaccaagactggactcagagccctcaccaaaggcagcacgcctcagatgcgctgtccccagtgttggcggaggaaacctttaggtatatgattctcggtacagatcgggttgaacaaatgaccaagacttacaatgatatagatatggtcacacatctcctggcagaaagagatcgcgatctggagctggctgcgagaatcggccaggccctgttgaaacggaatcatgtgttaagtgaacagaacgagagcttggaagagcaactgggccaggcgtttgaccaagtgaaccagttgcagcatgagctctgtaaaaaggatgaactgctgcggatcgtctcaatagcttccgaggagagtgagacggattcatcatgcagtactcccctgcgattcaacgagtctttctctctgagccagggcttactgcagctggagatgctgcaagagaagctcaaagagctggaggaggaaaatatggctctacggagtaaagcctgtcacattaaaactgagacagtgacctacgaggagaaggaacagcagctcgtgtccgactgtgtcaaggaacttagagagacaaacgcacagatgagtcgtatgacagaagaactgtctggaaaaagcgacgaactgatcaggtaccaagaggagctttcctcccttctgtcccagatcgtagatctgcagcataaacttaaggaagtgggcctattcattcattctacagatatctgctag

SEQ ID NO: 138121 - DNA, 93 bp, synthetic construct
  misc_feature 1..93: note = Description of Artificial Sequence: Synthetic coding sequence
  source 1..93: mol_type = other DNA
atgagtcagtctcaaaacgcaattttcacaagcccaactggagaagagaatctgatgaatagcaatcatcgagatagcgagtcaattacatag

SEQ ID NO: 138122 - DNA, 2340 bp, synthetic construct
  misc_feature 1..2340: note = Description of Artificial Sequence: Synthetic coding sequence
  source 1..2340: mol_type = other DNA
atgatcttgggcacggatagagtggagcaaatgactaaaacctacaacgacattgacatggtcacgcatcttctggcggagcgtgatagagacctcgaattagcagcgaggattggccaggcccttctgaagaggaaccatgtgttgtctgaacagaacgagtcactggaagagcagctgggccaagctttcgatcaggtaaaccagctgcagcacgagctctgtaaaaaggacgagctgctgcggatcgttagcattgcatccgaggagtccgagacggatagttcttgctccacacccttacggtttaatgagagtttctccctatcccaggggttgctgcagcttgaaatgctccaggagaagctgaaagaactcgaagaggaaaacatggctttgaggagcaaggcttgtcacattaagactgagacagtcacatatgaggagaaggagcaacagctggtgagtgattgtgttaaagagctcagggagactaatgcccagatgagtcgaatgactgaagaactatccggtaaatctgacgagctgatccgctaccaggaggagctcagttctctcctgtcgcaaatcgtggatctgcagcacaagcttaaggagcacgtgattgagaaggaggagctgaaactgcacctgcaagcttcaaaagatgctcaacgacagctgaccatggaactccacgagctccaagatagaaatatggaatgtctgggcatgctgcacgagagtcaggaggagatcaaggaactgcggtccagatctggcccaacagcccacctttattttagtcagtcttacggcgcctttacgggggaatccctcgctgctgagatcgagggaacaatgaggaagaagctgtccttggatgaggaatcatctctgttcaaacagaaagcccagcagaaaagagtgtttgacacggtgcggatcgcaaatgatacccgcgggaggtcgatctccttcccggcgctgctacctattcctggctcaaatcgtagttccgtgattatgaccgccaagcctttcgaatcaggactgcaacagaccgaagataaaagtcttctgaatcagggaagctcctccgaagaggtagcaggctcaagccagaagatgggacagcccgggccctcaggggacagcgacctcgccaccgctctccacagactctctctcagaaggcagaattatttgtctgagaaacagttctttgcagaggaatggcagcgcaaaatacaggttctggcagatcaaaaggagggggttagcggttgcgtgaccccaacagagtccctggcgagcctttgtaccacacagagtgagataacggacctgtcctcggcaagctgtctgcgcgggttcatgccagagaaattgcagattgtgaaaccactggaagggtcccagaccttgtatcactggcagcagttggctcagcccaatttgggtacaatcttagaccctcggcctggagtcataactaaggggtttactcaattgccaggagacgccatctatcatatctctgatcttgaagaagatgaggaggaaggaatcaccttccaggtacagcaacctttagaagtggaggagaagttatccactagcaaacccgtgaccggcatttttctgcccccaatcaccagcgctggagggcccgtgactgttgcgacggccaatcctgggaagtgcctctcttgcacaaactcgacgttcacctttaccacttgtagaatccttcacccatctgacattacccaggtgaccccatcctctggatttccctcattatcttgtggctcatctggctccagctctagcaatacggcggtgaactcaccagccctgagctaccggcttagcatcggtgagtctataacaaaccgccgcgactccactacaactttctccagtactatgtctctggcgaaactattacaagaacgggggatcagcgcaaaggtttatcactcgcctatttctgagaaccctttgcagccgctgccaaaaagtctcgctatcccctctacaccgcctaatagtccctcccatagcccatgccccagcccactcccatttgaaccacgggtccatctctccgagaattttctagcaagcaggccagccgagacatttctccaggagatgtatggccttagaccgtcccgcaatccgccagacgtggggcagctgaaaatgaacttagtggaccgactgaaacggttgggaattgctagagtggtcaagaacccagtgcctaaaagaatggaggatgcgcgcaggcagaagctggttcttaaaaatcaaatcttgttgttcatctag

SEQ ID NO: 138123 - DNA, 486 bp, synthetic construct
  misc_feature 1..486: note = Description of Artificial Sequence: Synthetic coding sequence
  source 1..486: mol_type = other DNA
atggagaaaccactcacggtgctccgcgtgtccctgtaccacccgactctggggccatctgcttttgccaacgtgcccccaaggctccagcacgatacatctcccttattgctcggacgaggccaggatgctcatctgcaacttcagctcccccgcctgagccggcgccatctctctctggagccctacctcgagaagggcagtgctctcttggctttttgcctgaaggcattgagccggaaaggatgtgtgtgggttaacggacttaccctgaggtatttagagcaggtacctctctctaccgtgaaccgagtgtctttctccggtatccagatgctggtccgagtcgaagaggggacatccctcgaggctttcgtctgctacttccatgtgagcccttcacctctgatatatagacccgaggccgaggaaaccgatgaatgggagggcatttctcaggggcagccaccacccggatcgggatag

SEQ ID NO: 138124 - DNA, 1749 bp, synthetic construct
  misc_feature 1..1749: note = Description of Artificial Sequence: Synthetic coding sequence
  source 1..1749: mol_type = other DNA
atggcagaattcctggatgatcaagaaacccgattatgtgacaactgcaagaaggaaatcccggtgtttaattttaccatccacgagatccattgccagcgtaacattggtatgtgtcctacctgtaaagaacctttcccgaagtcagacatggaaacccacatggctgccgaacattgccaagtcacttgtaaatgtaataaaaagttggaaaaaagactgctcaagaagcacgaagagactgagtgtccactaagactggccgtgtgtcaacactgcgatctggagctcagcatcctgaaactcaaggaacacgaagattattgcggcgccagaactgaattgtgtggtaactgcggtcggaacgtccttgtgaaggaccttaagacgcatccagaggtttgcggaagggagggcgaggagaaacgcaacgaggtggccataccccctaacgcttatgacgaatcctggggccaggacgggatttggatcgcatcccagcttttgaggcagatcgaagctctggatcctcctatgagattgccaaggcggcccctgagggcattcgaaagcgacgttttccataacagaacgaccaatcagaggaatatcacagctcaggtgagcatccagaacaatctgtttgaggagcaagagcgccaagagcggaacaggggacagcagcccccaaaagagggcggcgaagagagcgccaaccttgatttcatgctggcccttagcttgcaaaatgaagggcaagcaagtagtgtggctgagcaagatttctggagagcagtctgcgaggccgaccagtctcatggcgggccacggtccctgagtgacattaaaggcgctgctgacgaaattatgctgccttgcgagttctgtgaggaactttacccagaggaactgcttatagatcatcagacctcctgcaacccaagccgtgcattgccttctctgaacaccggctccagttcccctagaggcgttgaagaacccgacgtcatcttccagaactttctgcaacaggccgcctctaaccaactcgattcgctgatgggcctgagcaactcccacccggtcgaggagagcatcattatcccttgtgaattttgcggtgtgcagctggaagaggaagtcctttttcaccaccaggatcagtgcgaccagagaccagcaactgccacaaaccacgtgaccgaaggaatccccagattagacagccagcctcaagaaacatcacccgagcttcctcgacgacgggtacggcaccagggcgacctaagtagtggctacctggacgatacgaagcaagaaaccgccaacggacccacctcttgcttaccaccgagtcggccaattaacaatatgaccgcaacctacaatcagctgtcccggtcaacatccggaccacggccaggatgtcagccatcaagcccttgcgttccgaagttgagtaactctgatagccaggatattcagggcagaaaccgggattcccagaatggggccatcgctcctggtcacgttagcgtgatacgtccaccccagaacctctacccagaaaatatcgtgccctccttctccccaggcccctctggcagatacggtgcctccggcaggtccgaaggtgggagaaacagcagggttactccagctgctgctaattaccggtctaggactgctaaggccaagccatccaaacagcagggcgctggcgatgccgaggaagaggaggaggaatag

SEQ ID NO: 138125 - DNA, 1749 bp, synthetic construct
  misc_feature 1..1749: note = Description of Artificial Sequence: Synthetic coding sequence
  source 1..1749: mol_type = other DNA
atggccgaattcttggacgaccaggagacccgcttgtgtgacaattgtaagaaggagatccccgtctttaatttcacaattcacgagatccattgtcagcggaatatcggaatgtgtcccacatgcaaggaaccgtttcccaagtcagacatggaaacacacatggcggccgagcattgccaggtcacatgtaagtgtaacaagaaactggaaaaacgcctgctcaagaaacatgaggagaccgagtgcccccttcggcttgcggtttgccagcattgtgacctcgagttgagtatactgaaactgaaagagcacgaagactattgcggcgcccgaaccgagttgtgcgggaactgcgggaggaacgtcttagtgaaggatctgaagacccatccagaagtgtgtggaagggaaggcgaggaaaagaggaatgaggtcgccatccctccaaacgcatatgacgaatcatgggggcaagacggtatctggattgcatcccagcttttgaggcagatagaagcactggacccccccatgcgactgcctcggagaccactgcgcgcattcgagtccgatgtatttcataaccgcacaaccaaccaaaggaacatcactgcacaggtcagcatccagaacaatctgtttgaagagcaggagagacaagaacggaatcgcggtcaacagccccccaaggagggcggcgaagagtcagctaacctcgacttcatgctggccctcagcttacagaacgaaggccaagccagctccgtggcggagcaggacttttggcgtgccgtgtgtgaagcagatcagtcccatgggggacctaggtccctgtccgacataaagggtgcagcggacgaaatcatgctcccttgcgagttttgcgaggagctttatccagaagaactgctaattgaccaccagacctcatgcaatccgtcacgggccttgccaagtctaaatacaggatctagttctccacgaggagtagaagagccagacgttatcttccaaaacttcttacagcaggctgcttccaaccagctggatagcctgatgggactgtccaacagtcaccccgtggaggagtctattatcattccttgcgagttttgtggggttcagctagaggaggaagtgctgtttcaccatcaagaccagtgcgatcaacggcccgctactgccaccaaccatgtgacagaaggaattccaaggctcgatagccagccccaggagacgtcaccagagctgcctcgaagacgggtcagacaccagggcgacctgagctccggctacttggacgatactaagcaagagacagccaatggcccaacaagttgcctcccgccatcccgtcctatcaacaatatgacagccacatacaatcagctttcaagatccacatccggtccccgcccaggctgtcaaccgtcctccccttgtgtgcctaaattgtcgaactcggacagtcaggatattcagggacgtaatagggactcacagaacggcgcaatagctcctggacacgtcagtgtcatacggcccccgcagaatctttaccccgaaaacatagttccatccttctccccgggaccaagcgggaggtacggcgcatcaggccggagtgaagggggccgcaatagccgtgtaaccccggcagcagccaattacaggagcaggacagccaaagcgaaaccctcaaagcaacagggagctggcgacgccgaagaggaggaggaagagtag

SEQ ID NO: 138126 - DNA, 408 bp, synthetic construct
  misc_feature 1..408: note = Description of Artificial Sequence: Synthetic coding sequence
  source 1..408: mol_type = other DNA
atggcggaatttttggacgaccaggagacacgtctttgtgataattgtaagaaagagatcccagtgttcaacttcaccatccatgagatacattgtcagagaaatattgggatgtgtcccacttgtaaagagccatttcccaagagtgatatggaaactcacatggcggccgagcattgccaggtaacctgtaagtgtaataaaaaattggaaaaaaggctcctaaagaaacatgaagaaaccgagtgtcctctcaggctggccgtgtgccagcactgcgatctggaactctcaattctgaagctcaaggagcacgaggattactgtggagctaggactgaactgtgcggcaattgcggcagaaacgtcctggtgaaggaccttaaaacacaccccgaggtctgctag

SEQ ID NO: 138127 - DNA, 495 bp, synthetic construct
  misc_feature 1..495: note = Description of Artificial Sequence: Synthetic coding sequence
  source 1..495: mol_type = other DNA
atggcagagtttctagacgatcaggagacccgcctctgtgacaattgcaaaaaggaaatccccgttttcaatttcacaatccacgaaatccattgtcaaaggaacatcgggatgtgtcctacctgtaaggagcctttccccaagtcagatatggagacacacatggccgccgagcattgtcaggtcacgtgcaagtgcaataagaaactcgagaagaggctcctcaagaaacacgaagagacggagtgtcccctgcgactggccgtttgccagcactgtgatctggaactttctattctgaaactgaaggagcacgaagactattgtggtgccaggactgagctgtgtggcaattgcggacggaatgtcctggtcaaagatttgaaaacccatccggagctcaagaataagcgcggtcgcaaggggatcgaagcgaacagtccacccaaacgtgtggttaaacgagtccagacctggacgtcttgttggccctag

SEQ ID NO: 138128 - DNA, 852 bp, synthetic construct
  misc_feature 1..852: note = Description of Artificial Sequence: Synthetic coding sequence
  source 1..852: mol_type = other DNA
atggccgaatttctagacgaccaggagacccgactgtgtgacaactgcaagaaagagatccccgtttttaattttaccatccacgagatccactgtcagagaaacatcggaatgtgccccacctgcaaagaaccgtttcctaagtctgatatggaaactcacatggccgctgagcattgtcaggtgacgtgcaaatgtaacaaaaagttagagaagcgcctgctaaaaaaacacgaggaaaccgaatgccctctccgcctcgccgtctgtcagcattgtgacctagaactgtcaatcttaaagctgaaggagcatgaggattattgcggggcccgcaccgaactgtgcggcaattgtggcaggaatgtcctggtgaaggacctgaagactcatccagaggtgtgtggcagagagggagaggagaagcgaaatgaagttgctatcccccctaacgcatacgatgagagttggggccaggatggcatctggatcgcaagccagctgttgcggcagatcgaagctctggatccacccatgaggctgcctagacgtcctttacgagcgtttgagtccgacgttttccacaataggaccaccaatcagcgaaacatcacagcccaggtgagcatacagaacaacctctttgaggagcaggagcggcaagagagaaaccggggtcagcaaccaccaaaagagggtggggaagagagcgcaaatctagatttcatgttagctctgagtcttcagaatgaaggacaggcctccagcgtggctgaacaagatttttggagggccgtatgtgaggcggaccagtcacacggaggcccccgatcactcagtgatattaagtag

SEQ ID NO: 138129 - DNA, 414 bp, synthetic construct
  misc_feature 1..414: note = Description of Artificial Sequence: Synthetic coding sequence
  source 1..414: mol_type = other DNA
atgggggcccatctggtgagaaggtacctgggggatgccagcgtagaacccgaccctcttcagatgcccaccttcccgcctgattatggcttccccgagcgtaaagagagggaaatggtcgcaacacaacaggagatgatggatgctcaattacggcttcagctgcgggactactgcgcgcaccatctcataaggttgcttaagtgcaaacgtgactctttcccaaacttcctggcatgcaagcaggaacggcacgactgggattattgtgagcaccgcgactatgtgatgcgcatgaaagagttcgagagggagcgtcggctgctccagcgcaagaagcgacgcgaaaagaaagcggccgagctcgccaagggacaaggacctggagaggtagaccccaaggtagccctctag

SEQ ID NO: 138130 - DNA, 972 bp, synthetic construct
  misc_feature 1..972: note = Description of Artificial Sequence: Synthetic coding sequence
  source 1..972: mol_type = other DNA
atgatcctgcaggagacaaaggcagcatgcgggataccagctattccacattgttcccgagtcgagatacttgatgccaagacacgtgaaaagctgtgcttcctggataaagtggagccacacgcgacaattgctgagataaagaatttgttcacaaaaacgcatcctcaatggtaccccgctcgccagtcgctcagactagacccgaaaggaaagtccctgaaagatgaggatgtgctgcagaagctcccggtcggcaccacagcaacactgtattttagagatttgggcgctcagatctcatgggtaactgtcttcttgacggagtatgcaggcccattgttcatttatctgctgttttacttcagggtccctttcatatatggccataaatatgactttactagcagcagacacactgtcgtgcatctagcgtgtatctgtcacagtttccattacatcaagcgcctgctggagaccctattcgtgcacaggttctcccacggcaccatgcctctgagaaatatctttaagaactgcacttactactgggggtttgccgcctggatggcctactatattaaccatccgttatacactcctcctacttacggcgcccagcaggtcaagctggcactggccatcttcgtcatttgccagctcggtaatttcagtattcacatggctctacgcgacctgagaccggctgggtccaagactaggaagatcccttatccaactaaaaacccgtttacgtggctgtttctgctcgtaagctgtccaaactacacgtacgaggtgggctcctggatcgggttcgcaattatgacccagtgtctgcccgtggcacttttctctctggtaggtttcacacaaatgactatatgggccaaaggaaagcacagaagttatctgaaggagttccgggactaccccccccttcggatgcccataataccttttctcctgtag

SEQ ID NO: 138131 - DNA, 1014 bp, synthetic construct
  misc_feature 1..1014: note = Description of Artificial Sequence: Synthetic coding sequence
  source 1..1014: mol_type = other DNA
atgtccagctccccagtgaagcgccagcggatggaatccgcactagaccagcttaaacagttcacaactgtggtcgccgacacaggcgacttccacgccatcgatgagtacaagccacaggacgccacaaccaatccatccctgatactggccgcagcccaaatgcctgcatatcaggaattggttgaggaggccatcgcctacggccgcaagcttggcggtagtcaagaggaccagatcaagaacgctattgacaaactatttgttctctttggcgccgaaatcttgaaaaagattccagggcgcgtgtcgaccgaggtagacgcacgccttagttttgataaagatgccatggttgcaagggccagacgtctcatcgagctgtacaaggaggccgggatctctaaagatcgaattcttattaagctgtctagcacctgggaaggcattcaggctggaaaagaactggaggagcagcacggaatacactgtaacatgaccttgttgtttagtttcgcacaggcagtggcctgcgccgaggctggcgtaactctcatatcaccctttgtgggtaggattttggattggcatgttgccaatactgataagaaatcgtatgagcccctcgaggacccaggagttaagagcgttactaagatctataattactacaaaaagttctcctacaaaacaatcgtgatgggggcatcctttaggaatactggagaaatcaaggcactcgctggctgtgatttcctgacgatatcaccaaagctgcttggcgagctactacaagacaatgctaaactcgtccctgtgctgtctgccaaggccgcccaagcatctgatctcgagaaaattcatctggacgaaaaaagtttcagatggttgcacaacgaggatcagatggccgtggagaaactaagcgacgggataaggaagttcgccgccgatgccgtgaaacttgaacgcatgctgaccgagcgaatgtttaatgcagaaaatggtaagtag

SEQ ID NO: 138132 - DNA, 957 bp, synthetic construct
  misc_feature 1..957: note = Description of Artificial Sequence: Synthetic coding sequence
  source 1..957: mol_type = other DNA
atgtccagttcccctgtcaagaggcagaggatggagtctgcactcgatcagcttaagcaatttaccacagtggtggcagacactggggacttccacgccattgacgaatataaacctcaggatgcgaccaccaaccccagtcttattctggccgccgcccagatgccagcctaccaggagctggtagaagaagccatcgcctatgggcgcaagcttgggggttctcaggaggatcagattaagaacgccatcgacaaactattcgtactgttcggcgctgaaatccttaaaaaaatcccagggcgggtgagtaccgaggttgacgcgagactctcctttgataaagacgcgatggtagcacgcgcccggcgcctcatagaactgtataaagaagccggcatttccaaggatagaattctgataaagctcagctctacctgggaaggaatccaggcaggcaaggagcttgaagagcagcatggaattcactgtaacatgactctcctgttctcattcgctcaagcagtggcctgtgccgaggctggggtcacattgattagcccctttgtcgggagaatccttgattggcatgtagctaacaccgataagaaatcgtacgaacctttagaggatccaggggtgaagtctgtaactaagatctataactattataaaaaatttagctacaagactatcgtgatgggcgctagtttccggaatacaggtgaaattaaggctctcgcaggctgtgactttctgacgatatcccctaaactcctgggggagctgcttcaggacaatgcgaagctggtgccggtgctgagcgcgaaacctaaacctgtcacctggaaaaaaagcacttggatgagaagcctgtccgtcggatgcactacacggactaggtggttgtggcggtcgtcattgaccggctccgcttccctgccgctaatgcagtag

SEQ ID NO: 138133 - DNA, 1302 bp, synthetic construct
  misc_feature 1..1302: note = Description of Artificial Sequence: Synthetic coding sequence
  source 1..1302: mol_type = other DNA
atgcggcagtcccatcagctccctctggtgggactgttgcttttcagctttatccccagtcagctatgtgaaatctgcgaggtctcggaggagaactacatccggttgaagccattgctcaacaccatgatacaatccaactacaaccgcggaaccagtgctgttaatgtggtcctgagcctaaagctcgtcgggattcaaatccaaaccctgatgcagaaaatgatccagcagatcaagtataacgtcaaatctcgcctgtccgacgtgtcatccggcgaattggctctcattatacttgccctaggtgtgtgccgcaatgctgaggagaacctcatctacgattatcacttaattgataaactggagaataaatttcaggctgagatcgagaacatggaggcccacaacggcacaccactcaccaattactatcagctgtccctcgacgtattggctctttgcttgtttaatggaaactactccactgcagaagtggttaatcactttactccagagaacaagaattattactttggaagtcagttcagcgtggacacaggggctatggccgttctggcattgacctgtgtgaaaaagtccctgatcaacggccaaattaaggcagacgaaggcagcctgaagaacataagcatctacacaaagagcttggtcgaaaagatcctgagtgagaagaaggagaacggcctgattggcaatacattcagtactggtgaggccatgcaggccctgttcgtctcaagtgactattataatgagaatgactggaattgtcagcagacgctcaatacagtgttaactgaaatttctcagggcgcattctccaatcccaatgccgccgctcaagtactgcccgctctgatgggaaagacatttctggacataaataaggatagcagctgcgtgtctgccagcggcaatttcaacattagcgctgatgagcccatcacagttacgccaccagattctcagtcatatatcagcgtaaactacagcgtgaggataaatgagacttattttacaaacgtgacagtcctgaacgggtctgtgttcctgtccgtcatggaaaaggcccaaaagatgaatgacaccatcttcggttttacaatggaagagaggtcctggggaccctacatcacttgcattcaaggcttgtgtgccaacaataacgatcgaacctactgggaactgctgagtggtggggagcccctgtcacagggggccggatcatacgttgtgcggaatggcgagaatttggaggtgcgctggtctaagtactag

SEQ ID NO: 138134 - DNA, 1083 bp, synthetic construct
  misc_feature 1..1083: note = Description of Artificial Sequence: Synthetic coding sequence
  source 1..1083: mol_type = other DNA
atggctgctgctgctgcagccggcgccggtcccgagatggtgagaggtcaggtcttcgacgtgggtcccagatatacgaatttgtcatatattggagagggagcttacgggatggtgtgttctgcctatgacaacgtgaacaaggtgcgagtggctatcaaaaagatttctcctttcgaacatcaaacatactgtcaaaggacgctacgggagatcaaaatcctgctgcgtttcaggcacgaaaacataattggtatcaatgatataatcagagcccccactatagagcaaatgaaggacgtgtacattgtgcaagacctgatggaaaccgacctgtacaaactgctcaaaactcagcacctgagcaatgatcacatctgttattttctctaccagatcctgagaggattgaaatatatacactctgcaaacgttctgcatagggaccttaagccgtcaaacctccttttgaatacgacttgcgatctcaaaatttgtgacttcggccttgcacgggttgctgatcctgaccatgatcacacaggatttctgaccgaatatgtggcaacacggtggtaccgcgctccggaaattatgttgaattctaaaggatataccaagtccatcgatatctggtctgtggggtgtatactggcagagatgttgtctaatcggcctattttccctggcaagcactatctggaccaactaaatcatatcctgggcatcctgggatccccctcacaggaggacctgaattgtataattaatctaaaagcacggaattatttactgtctctgcctcacaagaacaaagtgccatggaaccgactattcccaaacgcggatagcaaagcacttgacctattggataaaatgctcaccttcaatccacacaagaggattgaggtggagcaggccctggcccacccgtatctggaacaatactatgacccatccgacgagccaattgccgaggctccttttaaatttgatatggaactggatgacctgcccaaggagaaactcaaggagctgatttttgaagaaactgcccgctttcaacctggctatcgttcctag

SEQ ID NO: 138135 - DNA, 1203 bp, synthetic construct
  misc_feature 1..1203: note = Description of Artificial Sequence: Synthetic coding sequence
  source 1..1203: mol_type = other DNA
atgagacatctgggagccttcctcttcctcctgggggtcctgggtgccctgaccgaaatgtgtgagattcccgagatggactcccatctcgtggagaagctgggacaacatcttctgccatggatggatagattgagcttagagcacttaaacccatcaatctatgtgggcctgcgcctgagctcactgcaggctggcacgaaggaagacctgtacctacatagcctgaagttgggataccagcaatgtctcctgggaagtgcattttccgaggatgacggagactgccagggaaagccctctatggggcagctcgctctatatctgcttgctctccgggccaactggcacgaccacaaagggcatccacacacgagctactatcagtatggcctggggatccttgcactgtgtttacatcagaaacgagttcacgattcagtcgtagacaagctactctatgccgttgaaccattccatcaagggcatcattcggtggacacagcagctatggcagggctggcatttacctgccttaaacgctcgaattttaatccgggacggaggcagagaatcaccatggcaattagaaccgtgagagaagaaatcctgaaggctcagacccccgagggccactttggaaacgtgtactccacccccctggcccttcagttcttaatgacgagccccatgcgtggagctgaactaggcacggcctgcctgaaagcgcgagtcgctctcttggctagccttcaggacggtgctttccagaatgccctgatgatcagccagctgttgcctgtcctcaatcataaaacctacatcgatttaatcttccccgactgcttggctccccgagtaatgttggaacctgccgccgaaacaatccctcaaacacaggaaatcatcagcgtgactttacaagtcctctccctgctacccccttaccgccagtcaatcagcgtgttggctgggagcacagtggaggacgtcttaaagaaagctcacgagctcggcggctttacatatgagacgcaagcatctttgtcgggtccatacctgacatctgtcatggggaaggccgcaggagaacgcgaattctggcaactcctcagagacccaaacaccccattgctccaggggatcgccgactaccgcccaaaggacggtgagaccatcgaactccggttggtttcatggtag

SEQ ID NO: 138136 - DNA, 843 bp, synthetic construct
  misc_feature 1..843: note = Description of Artificial Sequence: Synthetic coding sequence
  source 1..843: mol_type = other DNA
atggaagacgaggtggtgagatttgcgaaaaagatggacaagatggtgcagaagaaaaatgcctctacacggattggcatgtccgtcaacgccatcaggaagcagtccaccgacgaagaggtcacctcactcgctaagagcctcatcaaatcctggaaaaagttgttggatggaccaagtacggaaaaggaccttgatgagaagaagaaggagcccgccatcactagtcagaacagccctgaggccagagaggaaagtactagttctggcaacgtatcaaataggaaagacgagaccaacgcacgggacacatacgtgagtagctttcctcgggccccgtcgactagcgattcagtgcgactgaaatgccgggaaatgttagccgccgccctacgtacaggtgacgattatatcgcaataggggcagatgaggaggagctggggtcccaaatagaggaagccatctaccaagagattcgaaatacagacatgaagtataaaaatcgagtgcggagccggataagtaacttgaaagacgctaagaatccgaatttgcgcaagaacgtattgtgcggcaatattccccccgatctctttgcacggatgactgccgaggaaatggcatccgacgagctcaaggagatgcggaaaaacctgactaaggaggctattcgagagcaccagatggctaaaactggcgggactcaaacggatctgtttacgtgcgggaagtgcaaaaagaagaactgcacatacacacaggtacaaacgagatctgcagacgaacccatgactacatttgtggtgtgtaatgagtgcgggaaccggtggaaattctgctag

SEQ ID NO: 138137 - DNA, 906 bp, synthetic construct
  misc_feature 1..906: note = Description of Artificial Sequence: Synthetic coding sequence
  source 1..906: mol_type = other DNA
atggaggacgaggtagtccggttcgcaaaaaaaatggataagatggtccagaaaaagaacgccgccggagctcttgacctactgaaggagctgaaaaatattcccatgacattagagctcctgcagtccacccgcatcggaatgagcgtgaatgcgatacgaaaacagtctaccgatgaagaagtcacgagcctggctaaatcgcttatcaaatcatggaaaaaactcctggatggcccttccacagaaaaagacctggatgaaaagaaaaaggagccagccatcacttctcagaattcccccgaggcccgagaagaaagcactagtagcggcaatgtcagcaaccggaaagatgagactaatgctagagatacttatgtgtcttctttccccagggctcctagcacatctgactccgtcaggctcaagtgcagggagatgctggcagcagcgctgcgaactggcgacgattacattgcaatcggggccgatgaggaggaactagggagtcagatcgaagaggccatctaccaggaaatcaggaatactgacatgaagtataaaaatcgggttcggtctagaatttcaaatctgaaggatgccaagaatcctaatttaagaaaaaatgtactgtgtggaaatatcccgcctgacttattcgccaggatgaccgccgaagagatggccagcgacgagcttaaagagatgcggaagaatctgacaaaagaggcgattcgtgagcaccagatggcgaaaacaggggggacccaaaccgacttgtttacttgtgggaagtgcaagaaaaaaaactgtacgtacacacaggtccaaactcgaagtgccgacgagcctatgacaacatttgtagtctgtaatgagtgcgggaacaggtggaaattttgttag

SEQ ID NO: 138138 - DNA, 354 bp, synthetic construct
  misc_feature 1..354: note = Description of Artificial Sequence: Synthetic coding sequence
  source 1..354: mol_type = other DNA
atggaagacgaagtggtgcgattcgccaagaaaatggacaagatggtgcaaaagaagaatgccgcaggagcactcgacctgctgaaagaactgaagaacatcccgatgaccctggagctcctacaggaaatggcaagcgacgagctcaaggaaatgcgcaagaaccttactaaggaggccatccgggagcaccagatggccaagaccggtgggacccagacagacttgttcacctgcggtaagtgcaagaagaaaaactgtacatatacacaggtccagacccggagtgcagacgagccaatgaccacattcgtcgtttgcaacgagtgtggcaaccgctggaagttctgctag

SEQ ID NO: 138139 - DNA, 480 bp, synthetic construct
  misc_feature 1..480: note = Description of Artificial Sequence: Synthetic coding sequence
  source 1..480: mol_type = other DNA
atggataaacctagaaaagagaatgaagaggagcctcagtctgccccgaaaactgatgaggagcggcctcctgtggagcatagccctgaaaagcaaagccccgaagaacagtccagcgaagagcagtcttcagaggaggagttcttccccgaagaattactgccagagctgctgccagaaatgctcctgtccgaggaacgacccccccaagagggtctgtctcggaaggatctgtttgagggccgcccccccatggaacaacccccctgcggggtagggaaacacaagctcgaagaagggagtttcaaagaacggttagcgagaagcaggccccagtttcgcggtgacatacatggtcgcaacctgtctaacgaagagatgattcaggccgctgacgagctggaagagatgaagcgtgtgagaaataaactgatgatcatgcattggaaggccaagagatctcgtccatatcccatttag

SEQ ID NO: 138140 - DNA, 480 bp, synthetic construct
  misc_feature 1..480: note = Description of Artificial Sequence: Synthetic coding sequence
  source 1..480: mol_type = other DNA
atggataaacccaggaaggaaaacgaggaggaaccacagtcagctccaaagactgatgaagagaggccccctgtggaacactccccagagaagcagagccccgaagaacagtcatcagaagagcagtcaagtgaagaagagttttttcctgaagaactgctgcccgaactgctgcccgagatgctgctgtccgaggaacggcctccacaggagggactgagcaggaaggatctgttcgaagggcgcccacccatggaacaacccccttgcggagtgggcaagcacaagcttgaagaaggttccttcaaggaaaggttggcccgttcccggccccagtttaggggtgacatccacggtcggaatctgagcaatgaggagatgatccaggccgctgatgagctcgaggagatgaaacgagtgcgaaataagctcatgatcatgcactggaaggccaaacgatctagaccttacccaatctag

SEQ ID NO: 138141 - DNA, 480 bp, synthetic construct
  misc_feature 1..480: note = Description of Artificial Sequence: Synthetic coding sequence
  source 1..480: mol_type = other DNA
atggacaagccccgaaaggagaatgaggaagagcctcaatcggcaccaaaaaccgacgaggagagacctccagtggagcactcgcctgagaagcaatcccccgaggagcaatcctcggaggagcagtcaagcgaggaggaattcttccccgaagaacttttgccagagttacttccagaaatgctgctgtctgaggagcgacccccacaggagggactttcccggaaggatttgttcgagggaagacctccgatggaacagcccccgtgcggagtcgggaaacacaaacttgaggaaggctcatttaaggagcggctcgcccgtagcaggccccaatttcggggggatattcatgggcggaatctgtcaaacgaggaaatgatccaggcagccgacgagctggaagaaatgaaaagggtaagaaacaagctgatgattatgcactggaaagcaaaaaggagccgcccgtaccctatctag

SEQ ID NO: 138142 - DNA, 471 bp, synthetic construct
  misc_feature 1..471: note = Description of Artificial Sequence: Synthetic coding sequence
  source 1..471: mol_type = other DNA
atggataaacctcgtaaagagaatgaggaagagccacagaggcctagacccatgcgaagaggccttcggtggtccaccctccccaaatcaagtcctccccggtcctcactgcggcggtcttccccgcgccgaaggagctctttcctgcgatcttcatgcctttcgagttgtctcagatgctccagccgaaggtcaccacaggagggcctcagcaggaaggacctgttcgagggccgacctccaatggaacagccgccgtgcggagtgggaaagcataaattggaggagggttccttcaaggagcgtctggcacggtcaaggcctcagtttcgaggcgacatccacggacgcaatttgagcaatgaggagatgatccaagctgcagacgaactagaagaaatgaagcgcgtcaggaacaaattgatgatcatgcattggaaagctaagagatcacgaccgtaccctatctag

SEQ ID NO: 138143 - DNA, 303 bp, synthetic construct
  misc_feature 1..303: note = Description of Artificial Sequence: Synthetic coding sequence
  source 1..303: mol_type = other DNA
atgcagaagccatgtaaggagaatgagggtaaaccaaagtgctccgtgcccaaaagggaagaaaaaagaccatatggtgaattcgagcgccagcaaactgaaggtaatttccgccagcggctactgcagagtctcgaggagttcaaagaagacattgattaccgtcacttcaaggatgaagaaatgacgcgtgagggtgatgagatggaacgatgcctagaagagatccgcggattaagaaagaaattccgggccttgcattccaaccaccgacatagcagagatcgtccttatccaatctag

SEQ ID NO: 138144 - DNA, 303 bp, synthetic construct
  misc_feature 1..303: note = Description of Artificial Sequence: Synthetic coding sequence
  source 1..303: mol_type = other DNA
atgcagaagccatgtaaggaaaatgagggaaagccaaagtgttccgtacccaagcgagaggagaagagaccttacggagaattcgaaaggcagcagactgagggcaatttcaggcagagattactccagtccctcgaagagttcaaggaagatatagactatcgtcatttcaaggatgaagagatgacacgagagggggacgaaatggagcgctgtcttgaggaaatccggggccttagaaagaaattcagagccctccattccaaccacaggcacagccgagacagaccttaccccatttag

SEQ ID NO: 138145 - DNA, 291 bp, synthetic construct
  misc_feature 1..291: note = Description of Artificial Sequence: Synthetic coding sequence
  source 1..291: mol_type = other DNA
atgtatgtgaaattgatatcgagtgatgggcatgaatttatagtgaaacgggaacatgcccttactagcggaacaattaaggccatgttgagcggacctgggcagtttgccgaaaatgagacgaacgaggtaaattttcgggaaatcccgtcccacgtgctgtctaaggtgtgcatgtattttacctataaggtgaggtatacaaactcctctaccgagatcccggagttccctattgcccccgagatcgcgctggagctcctgatggccgcgaactttctggattgttag

SEQ ID NO: 138146 - DNA, 339 bp, synthetic construct
  misc_feature 1..339: note = Description of Artificial Sequence: Synthetic coding sequence
  source 1..339: mol_type = other DNA
atggacggcgaggagaagacttacggcggctgcgagggacccgacgctatgtacgtgaaactcatttcttccgatggtcacgagtttattgtgaaacgagaacatgcattgacctccggcaccattaaggccatgctcagcgggcctgggcaattcgccgagaatgagacgaatgaagtgaattttagagagatccccagccatgtactgagcaaggtttgtatgtattttacatataaggtcagatatactaattcttctactgaaatcccagaattcccaatcgcgccggagatagcattagaactgctcatggccgcaaatttcctcgattgctag

SEQ ID NO: 138147 - DNA, 339 bp, synthetic construct
  misc_feature 1..339: note = Description of Artificial Sequence: Synthetic coding sequence
  source 1..339: mol_type = other DNA
atggacggcgaggagaagacttacggggggtgcgaaggcccagatgctatgtatgttaagttgattagcagtgacggacatgaatttattgtgaagcgagagcatgctctcacttcaggaactattaaggcaatgttgagcggtcctggccagtttgccgaaaatgaaaccaatgaagtgaatttccgagagataccaagtcatgttttgtcaaaggtatgcatgtacttcacctataaggttcgctatacaaactcttccaccgaaatcccggagttccccattgccccagagatcgctctcgagctcttgatggctgccaactttttagactgttag

SEQ ID NO: 138148 - DNA, 339 bp, synthetic construct
  misc_feature 1..339: note = Description of Artificial Sequence: Synthetic coding sequence
  source 1..339: mol_type = other DNA
atggacggggaggagaaaacgtacggcgggtgcgagggccctgatgcaatgtacgtgaaactgattagctccgatggccatgagttcatcgtaaagagggagcacgctctcacttctggtacaattaaggcaatgctgtccggcccaggtcagtttgcggagaatgagactaatgaggtcaactttcgtgagatcccttcccacgttctatcgaaagtctgtatgtattttacttacaaggtgcgatatacaaattcttctaccgagattcctgagttccctatagcccccgaaatcgcactggaattattgatggcggcaaattttcttgactgctag

SEQ ID NO: 138149 - DNA, 339 bp, synthetic construct
  misc_feature 1..339: note = Description of Artificial Sequence: Synthetic coding sequence
  source 1..339: mol_type = other DNA
atggatggcgaagagaaaacatatggggggtgtgagggcccagatgccatgtatgtgaagttgatatcatccgatggccacgagtttattgtgaagcgtgaacacgccctgaccagcgggaccatcaaagcaatgttatcggggcctgggcagtttgctgaaaatgagacaaatgaggtgaatttcagggaaatcccatcacacgtgctgtctaaggtgtgcatgtacttcacctataaagtcaggtacaccaacagttctaccgaaatcccggaattccccattgctcccgagatagctctggagctgctcatggccgctaattttctggactgttag

SEQ ID NO: 138150 - DNA, 339 bp, synthetic construct
  misc_feature 1..339: note = Description of Artificial Sequence: Synthetic coding sequence
  source 1..339: mol_type = other DNA
atggatggcgaagaaaagacttatggcggatgtgaaggtccagacgccatgtacgtgaagcttattagctctgatggccatgaattcattgttaagagggagcacgcattaacaagcgggaccattaaggcgatgctctccggccctggccagttcgcagaaaatgaaaccaacgaggtgaacttcagggagataccatcccacgtcctgagcaaggtgtgtatgtacttcacatataaagttcggtacactaatagctcgaccgaaatccccgagttccctattgcccctgagatagcactagagctgttgatggctgccaatttcctagactgctag

SEQ ID NO: 138151 - DNA, 339 bp, synthetic construct
  misc_feature 1..339: note = Description of Artificial Sequence: Synthetic coding sequence
  source 1..339: mol_type = other DNA
atggacggcgaagaaaagacctacggtggctgcgagggccccgacgcaatgtatgtgaagttgatatctagcgatggtcacgagttcatagtgaagagggagcatgccctgacttcagggaccattaaagcaatgttgagtggacccggacaattcgcagagaacgagaccaacgaagtgaattttcgcgaaatccctagccatgtgctgtccaaagtatgcatgtactttacatacaaggtccgctatacaaacagcagcactgagatccctgagttcccgatcgcaccagaaattgctctcgaactgcttatggcagccaacttcctcgactgctag

SEQ ID NO: 138152 - DNA, 2397 bp, synthetic construct
  misc_feature 1..2397: note = Description of Artificial Sequence: Synthetic coding sequence
  source 1..2397: mol_type = other DNA
atgcacggtggccgatcctgcggtcctcgaactaggagggaaccttcaagcggtgaggaagctgcccctgttaccgcaatggctgctgagtcggcccttcaagtcgtggagaagctgcaggctcgcttggccgccaatcccgacccaaagaagctcctgaaatatcttaaaaaactctctaccctccccataactgtcgacatccttgctgagacaggagttgggaaaaccgtgaactcgctgagaaagcacgagcacgtgggtagctttgcaagagacctggtggcccagtggaagaagcttgtaccagttgagagaaacgctgagcccgacgaacaagactttgaaaagagtaatagccgcaaaagaccgagagatgctttgcagaaggaggaggaaatggaaggcgactatcaggagacctggaaagcgacaggatcacgcagttactctcccgaccatcgacagaagaaacaccgtaagctgtctgaacttgagcgaccgcacaaggtgtctcatgggcacgagcgacgggacgaaagaaaacgctgccaccgcatgtctccaacttattcgtccgaccctgaatccagcgactatggtcacgtccagtctccgccatcttgcacaagtccacaccaaatgtacgtggaccattataggtctcttgaggaggatcaggaacccatcgtgtcccatcagaagcctggtaagggacacagtaatgcatttcaggatagactgggagctagccaggaacggcacctcggcgagccgcatggaaaaggcgtggtcagtcagaacaaagagcataaaagctctcacaaagacaaacgcccggtggatgcgaagagtgatgaaaaagcctcagtagtgtctagggagaaaagtcataaggcgcttagtaaagaggaaaacaggcgacctccgtctggagataacgctcgagagaaacccccctcaagcggagtcaagaaagagaaggatagggaaggctctagcctgaagaaaaagtgcctccccccaagcgaagccgcaagcgataaccacttaaaaaaaccaaagcatagagatccagaaaaggcaaaactagacaaatcaaagcagggcctggactcatttgacacagggaagggagccggtgacttgctgccgaaggtgaaggagaaaggatcgaataacctgaaaacaccggaaggcaaagtcaaaacaaacctggatagaaagagcttgggatcactgccgaaggtcgaggagacggacatggaagacgaattcgaacagcccactatgtccttcgaaagctatcttagctatgaccagcctcgtaagaaaaaaaagaaaattgttaagacaagcgcaactgctctgggggataaaggcctcaagaagaatgactctaagtccacgggcaagaacctcgactccgtccagaagcttcctaaggtgaataagactaaatctgagaagccggcgggagccgacctggcgaagctgcggaaagttccggatgttctgccagtgctgcctgacctgccacttccagccatacaggcaaactaccggccccttccatctctggagcttatttcaagtttccaacctaaacgcaaagcattttcttccccccaggaagaggaggaagctggatttaccggccggaggatgaattcgaagatgcaagtgtattcaggatctaagtgtgcctacttgcctaagatgatgaccctgcatcagcagtgcatcagggtcttgaaaaataatattgactccatattcgaggtagggggggtgccctatagtgtgctcgagcccgtgttagagcgatgcacccccgaccagctctataggatcgaagagtacaatcatgtgctgatcgaagagactgatcagctatggaaggtgcactgtcacagggattttaaggaggaaagacctgaggaatatgaatcctggagagaaatgtacctgcggctgcaggatgcacgggaacagcggctacgtgtgctgaccaagaacatccagttcgcacacgccaacaaaccaaaaggacggcaagctaagatggcgttcgtaaattctgtggctaagccacctcgtgacgtgaggagacggcaggagaagtttggcaccgggggagccgcggtacccgaaaaaataaaaataaaacccgcgccctatcccatgggatcttcacatgcgagtgcgagctccatcagcttcaacccttcgcctgaagagcccgcgtacgacggcccaagcacctccagtgcccacctggctcccgtagtgtcctctactgtttcctatgaccctaggaagcctacagtcaagaaaatagccccaatgatggcaaaaaccatcaaggcctttaagaacagattctctcggcgctag

SEQ ID NO: 138153 - DNA, 3297 bp, synthetic construct
  misc_feature 1..3297: note = Description of Artificial Sequence: Synthetic coding sequence
  source 1..3297: mol_type = other DNA
atggccgagcgtggtggggacgggggagaatccgagcggttcaaccccggagaactccgaatggctcagcagcaggcactgaggttccgcgggccagcccccccacccaacgcagtgatgcgaggtccaccacccctgatgcgccctcctccgccattcgggatgatgcggggcccacctccccctccccggccgcccttcggaaggccgcccttcgatcctaacatgccacctatgcccccgccggggggtattccgccacctatgggcccgccacacctccagaggcctccttttatgcccccaccaatgtcctccatgccaccaccccccggcatgatgtttccccccggaatgcccccagttactgcgccaggcacccctgctcttccacccacagaggagatctgggtggaaaacaagaccccagatggtaaggtctattactataatgcgcgaacgcgggagtccgcttggactaaacccgatggggtgaaagtcatccaacagtccgaattgacccccatgctggccgcacaggctcaggtccaggcccaggcacaggctcaggcacaggcgcaggcccaggctcaggcacaagcccaggcacaggcccaggcccaggcccaggcccaggcccaggctcaggcgcaggctcaggcccaggcccaggctcaggcacaggcccaagctcaggcgcaagcgcaggcccaggcccaggcccaggtacaggcccaggtgcaggctcaggtccaagcccaggcagtcggagcttccacacctacaacttcgagcccggccccggccgtctccacgtctaccagctccagtacaccatcaagcactacgagcaccacaactactgcaacgtccgtcgcgcaaactgtgtccactccaactactcaggatcagacaccatcctctgctgtgagtgtggctaccccaaccgtgtcagtaagtacgccagcaccaacagctacccctgttcagactgtccctcagccacatccacagactctgccgccagccgtcccccacagcgtgcctcagcctacgactgccattcccgcgtttcctccggtcatggttcctccattccgggtgcctctacccggaatgccgataccacttccaggggttgccatgatgcagattgtgagttgcccctacgtgaagactgtggccaccaccaagacaggcgtactgccaggcatggccccacccatcgtcccaatgatccacccccaagtcgcaattgcagcatctcccgctacactggccggcgccaccgctgtgtcggagtggacagaatacaaaactgctgatggcaagacctactactacaacaaccgcacgttagaatcaacatgggaaaagccccaggaactgaaagaaaaagagaaacttgaggaaaagattaaggagcccatcaaggagccaagcgaagagccgcttccaatggaaactgaagaggaggatccgaaagaggagcccattaaggagattaaagaggaaccaaaggaggaggagatgactgaggaggagaaggcggctcagaaggcgaaacctgtagccacagcgcctatcccgggaacaccatggtgtgtagtgtggacaggagacgagcgcgtctttttctacaacccgaccactcgcctgtccatgtgggataggccagatgatctgatcggtcgcgctgatgttgacaaaatcattcaggaaccaccccacaagaaaggcatggaagagttgaagaagctgagacatccgactccaacgatgctgagtattcaaaagtggcaattttccatgtccgcgatcaaggaagaacaagagctgatggaggagatcaatgaggatgaacccgtgaaagccaagaaaagaaagcgcgacgataacaaggacattgattctgagaaggaggccgcgatggaggcagaaattaaagccgcgcgggaacgggcgatagtgcccctggaggcgcgtatgaagcagttcaaggacatgttattagagcggggggtgtccgccttctctacgtgggagaaagagctgcacaagatagtatttgacccaaggtacctgctactgaacccaaaagagaggaagcaggtttttgaccagtatgttaagacccgggcagaggaagagcgcagggagaagaaaaacaagataatgcaggctaaggaggatttcaagaaaatgatggaggaggccaagtttaatccgagagccaccttttccgaattcgcagccaagcatgcaaaagatagcaggtttaaggcgatcgaaaagatgaaagatcgggaggctctatttaatgagttcgtcgcagctgcaaggaagaaggagaaggaggattctaagactagaggtgaaaaaataaagagcgactttttcgagctgctatccaaccaccacttggatagtcagtctagatggtccaaggtcaaggacaaggtggaaagcgacccacggtacaaggccgtggactcctctagtatgcgtgaggacctgtttaagcagtatattgaaaaaattgccaagaacctcgacagcgagaaggaaaaagaacttgaacgccaggctaggattgaggcctccctccgggaacgcgagagggaagtgcagaaggcccgctccgagcagacaaaagagatcgacagagagagggaacagcacaaacgggaagaggctatccaaaactttaaagcactcttatctgacatggtaagaagctccgatgtatcttggtcagataccagacgcaccctgcgcaaagaccacagatgggagagtggaagtctcctcgagagagaggaaaaggaaaaactgtttaacgaacacatcgaagccctcactaagaagaagagagagcatttcaggcagttgctggatgaaacctctgcaatcaccctgacctccacttggaaggaggtcaaaaagattattaaagaggatcccaggtgcattaaattttccagttctgaccgtaaaaaacagagggaatttgaagagtacatccgcgataagtatattaccgccaaagctgacttcaggaccctcttaaaggaaactaagtttattacttatcgctcaaagaagttaattcaggaaagcgaccagcatctgaaggatgtagagaaaattctgcaaaatgataaaagatatctcgtccttgattgcgtccccgaagagcgccggaaactgatcgtcgcttacgtggatgacctagacaggcgggggcccccgccccctcccaccgcatccgaacctacaaggcgttctactaaatag

SEQ ID NO: 138154 - DNA, 3234 bp, synthetic construct
  misc_feature 1..3234: note = Description of Artificial Sequence: Synthetic coding sequence
  source 1..3234: mol_type = other DNA
atggccgagaggggaggcgacggcggggagtctgaacgcttcaaccctggggagctgcgcatggcccagcagcaagccttgagattcagagggccagcccccccacctaatgctgtgatgcgtggtcccccaccattaatgcggccaccaccaccattcggcatgatgcgcgggcctccccccccgcccagacctcccttcgggcgtccacccttcgacccaaatatgccaccaatgccccctcccggcggcattcctccccccatgggcccaccacatttacagcgcccgccctttatgccccctcctatgagcagcatgcccccgcctcctggaatgatgttcccacccgggatgcccccagtcacagctccaggaacgccagcgttgccacccacagaggaaatttgggtcgagaacaaaacccctgacggaaaagtctattactataatgcccgcactcgtgagagtgcatggacaaaacccgatggggtaaaagttattcaacagtccgagttgactccgatgctcgctgcacaagcacaggtgcaggcgcaggcccaggctcaagcccaggcccaggctcaggcccaggctcaggctcaggcacaggcgcaggcccaggcccaagctcaggcacaagcgcaggcccaggcgcaagctcaagcgcaagcacaggcacaggcgcaggcccaggcccaggctcaggcccaggctcaggctcaggtccaggctcaagtccaggcccaggtgcaggcccaggcagttggcgcatccacacccaccacgtcaagccccgcccctgcagtgagtacctccacatcctccagcacacctagcagcaccacatctaccacaactacagcaacatccgtggctcagaccgtttcaacaccgactacgcaagaccagactccatcgtccgccgtttccgtggctactcctacggtaagtgtgagcaccccagccccgaccgcgacaccagtccagacagtgccgcagccccatccacagaccctcccccccgccgtcccacattctgtgccccaacctacaacagcgattcccgccttccctccagtgatggtccctccattccgcgtccccctgccgggaatgcctatacctctacctggcgttctcccagggatggccccacctattgtcccgatgatccacccacaggtagccattgcagcatctcccgcgactctggcaggagcaaccgccgtgtcggagtggacagaatacaaaactgctgacggtaagacatattactataacaatagaacccttgagtctacctgggagaaacctcaggagctgaaagagaaagagaaattggaggagaagattaaggagcctatcaaagagccctctgaggagcccctccctatggagacagaagaggaggatccaaaagaggagccaattaaagagatcaaggaggagcccaaggaagaggaaatgaccgaggaagagaaagccgcgcagaaagcaaaaccagtggccaccgcgccaatcccgggcactccctggtgcgtcgtatggacaggggatgagcgtgtgttcttttacaatccgacaaccaggctctccatgtgggataggcctgacgacctaatcggacgcgctgacgtcgataagattatccaggaacctccgcataagaaaggtatggaggaacttaagaaattgcgccatccaacgcccactatgctgtcgatacagaagtggcagtttagcatgtcagctattaaagaggaacaagagctgatggaggaaattaatgaggatgaacccgtgaaagccaaaaaacgaaagagagacgacaataaggatattgactccgagaaggaagccgctatggaagctgagataaaagccgcccgcgagcgggcaatagtgcccttggaggcgcggatgaagcagtttaaagatatgctgctcgagagaggggttagtgctttctctacttgggaaaaagagctccacaagattgtgttcgatccccgctatttgctacttaatcccaaagagcgcaagcaggtcttcgaccaatatgtaaaaacacgcgctgaagaagaaagacgggagaagaaaaataagatcatgcaggcaaaggaggatttcaagaagatgatggaagaggccaagttcaatccaagagctaccttttccgagttcgccgccaagcatgctaaggattctcgctttaaagccatagagaagatgaaagatagagaagccctgttcaatgaattcgtcgctgcggcaagaaagaaggaaaaggaagatagcaaaactcggggagagaagattaaatctgacttctttgagcttttgagtaatcaccaccttgattcacagtcccggtggtctaaagtcaaagataaggtggagtctgacccccggtataaggccgtcgattccagttcaatgagggaagatttgtttaagcaatacatagagaagatcgctaagaacctggacagcgagaaggaaaaagagttagaacgccaggccaggattgaggcaagtttgcgggaaagggagcgggaagtgcagaaagcaaggtcagagcagacaaaagagatcgatagggagcgcgaacagcacaagcgggaagaggctatacagaatttcaaagcgctgttatccgacatggtgaggagctccgacgtcagttggagcgatacgcgcagaactcttaggaaagatcaccgatgggaatctggctctctcctggaacgcgaagagaaagaaaagttattcaatgaacatatcgaggcactgacaaaaaaaaagcgcgagcatttccggcaactgttagatgagacatctgccataaccctgacatccacatggaaagaagtcaaaaagattatcaaggaagaccctaggtgcatcaaatttagttcatctgacaggaagaaacaacgggaattcgaagagtatatccgagacaaatacattactgccaaggcagactttcgcactttgcttaaggaaacaaaatttatcacctaccgctcgaagaaattaatccaggagtcagaccagcacctgaaggacgtggaaaagatcctgcagaatgataaacgttatctggttcttgattgcgttcccgaagaacgcaggaaactcatcgtagcatacgtggatgatctcgaccgacggggtccccctcctccccccactgcctctgagcccacaaggagatcaaccaagtag

SEQ ID NO: 138155 - DNA, 2049 bp, synthetic construct
  misc_feature 1..2049: note = Description of Artificial Sequence: Synthetic coding sequence
  source 1..2049: mol_type = other DNA
atgaaccctcagcagcagagaatggcagccatcggtacagacaaagagctgtcggacctgctggatttctccgccatgttcagtcctcctgtcaatagtggaaagacaagaccaacaacgcttggatcctcccagttcagcggtagtggaattgacgagaggggaggcaccacgagctggggtacatcagggcagccatctcctagctacgatagcagtagaggctttacagacagcccacactatagcgaccatctgaacgattcgcgcctcggcgcccatgaaggtctcagtcccacaccatttatgaattccaacctgatgggcaaaacaagtgagcgcggatctttctctttatattcaagggacacaggccttcccggctgccagtctagcctgctaaggcaggacctggggctaggatctccagcacaactctcctcctccggtaaaccgggcacggcatattattcgttctcagcaacgagctctaggagacgccccttgcacgattccgctgcccttgaccctctgcaggccaagaaggtcagaaaggtcccacctgggctgccctccagcgtctatgctccctcccccaactcagatgactttaaccgcgaatccccaagttatcccagtccaaagccaccaacctcaatgttcgcctctacttttttcatgcaagatggcacgcacaactcgtctgacctgtggtccagttcaaatggcatgagtcaacccggcttcggcggcattctcggcacgtcaaccagtcacatgtcccagagctcctcctatgggaacctccactctcacgatcgcctgagctacccccctcattccgtgtctcccactgatatcaataccagccttccgccaatgagcagctttcatcgaggctctacgagctccagcccctatgtggccgcatctcacactcctcccatcaacggatccgatagtattttgggaaccagaggcaacgccgctggatcctctcagactggggatgccttaggcaaggctcttgcgagcatctactcccctgaccatacctcatcttcattcccatccaacccttcaacacccgtcggatcccccagtccactaaccggtactagtcagtggccgagaccaggggggcaagctcccagctctcccagctacgagaactccctccactccctacagtcccggatggaggatagattggacaggctcgacgacgcaatacacgtccttcgaaaccatgcagtaggcccttctacgagtctcccagcaggacattccgacattcattctcttctcggaccctcccataatgctccgattggttctctgaattcaaattacggaggcagcagcttagttgcaagctctcggtcagccagtatggtaggtacacatcgagaggatagtgtaagcctgaacggtaaccattctgttctgtctagtacagttacaactagttcaactgatctgaaccacaagacacaggagaactatcgaggaggcctgcagagccagtccggcacagtcgtcactaccgagattaaaaccgaaaataaggagaaggatgagaacctccacgagcccccatcttctgatgatatgaagtcagatgatgaatccagtcagaaggacattaaggtctcatccagaggccgaacctcctccacaaacgaggatgaggacctgaatccagagcaaaaaatcgaacgggagaaagaacgcagaatggccaacaacgctagagagagattgcgcgtgcgcgacataaatgaggccttcaaagagcttggacggatgtgccagctccaccttaaatcagagaagccccaaaccaagcttttgattctccaccaggccgttgcggtgatactgagtcttgagcaacaggtgcgagagcgtaatctgaaccctaaagctgcatgcctaaaaaggagggaggaagaaaaggtgtcagctgtcagcgccgagcctccaacaacattgccaggtacccacccaggtctgtcagagacaaccaatcccatgggccacatgtag

SEQ ID NO: 138156 - DNA, 2121 bp, synthetic construct
  misc_feature 1..2121: note = Description of Artificial Sequence: Synthetic coding sequence
  source 1..2121: mol_type = other DNA
atgaatccacagcagcagcgaatggccgctattggaaccgacaaggagctgagtgacctgctagatttcagcgcaatgttcagtccccctgtgaacagtggaaagaccaggcctacaactttaggctcctcgcagttctccggttccgggattgacgaacgcggcgggacaacctcctggggaacttctggccagccctccccctcgtacgactcctcaaggggctttacagactcccctcattattctgatcatctcaacgacagccgtctgggcgctcatgaaggcctgtcccccacacccttcatgaacagcaatctgatgggcaaaaccagcgagcgcgggagctttagcctgtattcaagggatacaggattgcccggctgccagtctagtttgcttaggcaggatctgggattgggatcacccgctcagctcagttcatctgggaagcccggcaccgcatactacagctttagcgctaccagtagccggcgacgccccctccatgactccgcagccttagaccctttgcaagctaagaaagtgcgtaaagtgccgcctggattaccaagctccgtgtacgccccttccccaaactccgatgattttaacagagaatccccgagttaccccagtcccaagccacccacaagcatgttcgcctcaactttcttcatgcaggacgggacacataactctagtgacctttggtcaagcagtaatggcatgtctcagcccggctttggtgggatccttgggacatcaacttcccacatgtcccagagtagcagctatggaaatctgcattcccacgatcgcctgtcctaccccccacacagtgtaagccctactgacataaacacctctctgcctccgatgtcctcctttcacaggggatcaactagttccagtccctacgtggctgcctctcacactccccccatcaacgggagcgacagtattttgggtacgagaggcaacgctgctggctcgtctcagactggcgacgccctgggcaaagccctagcgagtatttatagccccgaccatacaagctccagttttccaagcaatccatccacccctgtcggctctccatctcctctgaccgggaccagccagtggcccagacccggaggacaagcccctagctccccttcatacgagaacagtctgcatagcctgaaaaatagggtggaacagcaacttcacgaacacctccaggacgccatgagctttctgaaggatgtgtgtgaacagagccgcatggaggacagactagatcggcttgacgatgcgatccacgttttacgcaaccatgcggtgggcccgtctacttctctgcccgcaggacatagtgatatccactctctcctaggcccctcccataatgcccctattggcagcctaaactccaattatggcgggagttccttagtagctagctccagaagtgcatccatggtgggaacacacagggaagatagcgtaagcctcaacggcaatcactccgtgctgtcctcgactgtcacgacttcctctactgatctgaaccacaagacccaggagaactaccgtggtggattgcagtctcagtctgggactgttgtgaccactgaaattaagacagagaacaaggagaaagatgaaaatctgcacgaacctccgagcagtgacgacatgaagtcagatgatgaaagttctcagaaggacatcaaggtgagctcacgaggacggacaagcagcaccaatgaagatgaagacctcaacccagagcagaagattgagcgcgagaaggagcggagaatggcaaacaatgcccgggaaagactgagagtgcgggatattaacgaggcctttaaggagcttgggagaatgtgtcagcttcatcttaagtcagagaagccccagacaaagctcctcatccttcaccaagctgttgctgtgattctctcccttgagcagcaggtgagggagaggaacctgaacccgaaggctgcatgtctaaaaagacgcgaagaagaaaaagtatccgccgtcagcgccgaaccgccaacaactttgcctggcacccaccccggacttagcgaaactacaaatcccatggggcatatgtag

SEQ ID NO: 138157 - DNA, 2109 bp, synthetic construct
  misc_feature 1..2109: note = Description of Artificial Sequence: Synthetic coding sequence
  source 1..2109: mol_type = other DNA
atgaacccccagcagcagagaatggctgctattggcaccgacaaagaactgtcagatctgctcgattttagtgctatgttctcacctccagttaactccgggaaaacacggcctacaaccttaggaagctcacaattcagcgggagcggtactattcatgaaatgaaacagctgaattcaaaagcgagacagaaggggcaaaggatcaagggcttcacggactcacctcactattccgaccacttgaatgattctagactgggggcccacgaggggttgtcgcctactcctttcatgaattcaaatttaatggggaagacctcagagcgggggtccttcagcctgtacagtagggacacaggacttcccggttgccagtcatccttgctgagacaggatttaggcctaggaagccccgcgcaactctcaagctctggaaaacctggtacagcatattacagtttttctgccacaagtagtaggagaaggccgctgcacgactcagcggccctcgaccctttgcaggcaaagaaagtccgaaaggtaccccccggcctgccctcaagtgtgtatgctccatctcctaactccgacgattttaaccgggaaagcccaagttacccctctcccaagcccccgacttccatgttcgctagtacctttttcatgcaggatgggacacacaattcgagcgacctgtggtcaagttccaatggcatgagccaacccggtttcggcgggatactgggcacgagcaccagccacatgagtcaaagcagctcttacgggaaccttcacagtcacgacaggctgtcctatccaccgcattccgttagccccactgacatcaatacaagcctgccacctatgagctcctttcaccgcggatctacatctagctctccttatgttgcagcctcccatacccccccaattaacggatcggattccattctggggacaagaggaaacgccgctggctcctcccagaccggggacgccctgggcaaggccctggcctccatttatagtccagaccatacaagctcctcttttccctccaacccttcaacacccgtgggatccccctcacccctaacaggcactagtcagtggccccgaccagggggacaggccccctcatccccttcttacgagaactcactgcacagccttaagaacagggtggaacagcagctgcacgagcaccttcaggacgcaatgagttttctgaaagatgtatgtgagcagagccggatggaggaccggctcgacagattggacgatgcaatccacgtgcttagaaaccatgccgttggccctagcacctccctcccagcgggtcacagcgacatccactccctcctgggtcccagtcacaacgctccaatcggctctctgaattcaaactacgggggctcctcgctggtggcgagctcaaggagcgcaagcatggttgggactcatagagaagattctgtgtctctgaatggaaaccacagcgtcctgagttcgactgtgaccacaagctctaccgacctgaatcacaaaactcaagagaattacagaggcgggttgcaatcccaatcaggtacagttgtgacaacagagataaagactgagaataaagaaaaagacgagaatctgcatgagccacccagctctgacgatatgaagtcagatgatgagtcttcgcagaaagacattaaagtttctagccgcggtcgcacctcctccacaaatgaagatgaagatctgaatcctgaacagaagatcgagagggaaaaagaacgtcgcatggccaacaatgcccgggagcgtttacgagtacgagatataaatgaggcattcaaagaactgggcagaatgtgtcaacttcaccttaaatcggagaagccccagacaaaacttctgatactccaccaggcagtagccgtaatcctctcgctggaacagcaggtgcgcgagcgcaacctgaatccaaaagccgcgtgtctgaaacggagagaggaagaaaaagtcagcgcagtgagcgctgaacctcccaccaccctcccgggtactcatcccggcctgtccgagacaaccaacccaatgggccatatgtag

SEQ ID NO: 138158 - DNA, 1341 bp, synthetic construct
  misc_feature 1..1341: note = Description of Artificial Sequence: Synthetic coding sequence
  source 1..1341: mol_type = other DNA
atgggcaagcgctacatgcaccacccacagattcagatgatatcaaccgtaaacttgctggtgatccacctgctcagccaccagcccgtgtgctccctcgctctgtccctgtgtaaatcgtaccccccgcattccgtgagtcccaccgatataaatacctcccttcccccaatgtcgtcctttcacaggggctctacctcatccagcccatacgtcgccgcttcacatactccgccaatcaacggaagtgacagcatccttgggacgagggggaacgcagctggcagttcacagaccggagatgcactgggcaaagccctggcttccatctattcgcccgaccatacgtcttcttctttcccttctaacccatcaacacccgtcggctctccatcgcccctgactggaaccagccagtggccccgacccgggggtcaggcccccagctctccgagctacgagaatagtttgcacagcctgcagtctaggatggaagatagactcgaccggttggacgacgccatccatgtccttcggaatcacgccgttggccctagcacgagcctgcctgccggccactccgatatccatagtctcctaggcccgtctcataacgccccaattggctcactgaactccaattatgggggcagcagccttgttgcctcctcacgctcagccagtatggtggggacacaccgggaggattctgtgagtttgaacggaaatcactctgttctctctagcaccgtgacgacaagctcaaccgacctgaatcacaaaactcaggaaaactatcgtggcggtctccagtcacagagtggcaccgtcgtcaccacagaaatcaaaaccgagaataaagagaaggatgagaacctacacgagcccccaagttccgatgacatgaagtcggacgatgaatcatcccagaaagacattaaagtgtcatcacgcggaaggacgagcagcacgaatgaagatgaggatctgaatcctgagcagaagatcgagagggaaaaggagcgaaggatggctaacaacgctcgagaacgcctccgggtgagagatatcaatgaggccttcaaagagctcggccgtatgtgccagttgcatcttaagagcgagaagccccaaaccaagctgttaattctccatcaagcggtggcagttatactcagcttagagcagcaggtcagagagaggaacttgaatcccaaggccgcctgcttgaaacggcgtgaggaagaaaaggtttctgctgtgagtgcggagccccctactacactccctgggacgcatcctggactctccgagaccacaaaccctatgggtcacatgtag

SEQ ID NO: 138159 - DNA, 2046 bp, synthetic construct
  misc_feature 1..2046: note = Description of Artificial Sequence: Synthetic coding sequence
  source 1..2046: mol_type = other DNA
atggctgccttttctgttttacggccaagagtgccgggcagtagcggcacatgggctgcagacccagacgctagcactgccgtgtccccaagcctgagattcggcggccgggagcctgctcggccgaccagaggcggcgccaccaaatggccgaagatgaaccctcagcaacagagaatggccgccatagggactgataaagagctctccgacctgttggacttcagtgctatgtttagcccaccggtgaattctgggaagacccggccgactacactgggatcctcccaattctctggatccggcatcgatgagcggggcggtacaaccagttggggtacctcaggccagcccagtccatcgtacgactccagtagaggtttcacagactccccgcattattccgatcacctcaatgactcccgattgggcgctcacgagggattatcccctactccattcatgaacagtaacctgatgggtaaaacttctgagaggggtagcttctctctgtattcacgtgatacggggctgcccggctgccagagtagcctgctgcgtcaggacctcggtctgggcagtcccgctcagttgtccagctctggcaaacctggcaccgcctattactcattttccgcgaccagtagccggaggcgcccgcttcacgactctgcagccttggatcccttgcaagccaagaaggtaagaaaggtcccccccggtctgccatcttcagtgtatgctccctcacccaattcagacgacttcaaccgggaaagtcctagctatcctagccctaagcctcccactagtatgttcgcaagcaccttctttatgcaagatggaacacacaactcctccgacctatggtcgtcaagcaacggcatgagtcaacctggatttgggggcatcctgggtactagcactagtcacatgtcccagtcctcgagctacgggaacctccacagccacgacagattatcctatcctccgcactcagtaagtccgacagacattaacacttctctgcccccaatgagtagcttccaccgtgggtcaacatcctcgtccccatatgtggccgcctcccacacgccacctatcaatgggtcggacagcatcctgggcacccgagggaacgccgcagggtcttcacagacgggcgatgctctgggtaaagccttggcaagtatttatagcccagatcatacaagtagctcattcccttctaatcccagcacacctgttggctccccctcccccctgacaggaactagtcagtggccaaggccaggaggacaggctccgagttcacctagctatgaaaatagcctccactctcttcagtcccgaatggaggatcgccttgaccggctcgatgatgccattcatgtgctgagaaaccacgccgtgggaccttccacttcactgcctgcgggccattcggatatccactcactcctcggcccctctcacaatgcaccaatcggctctctgaattccaattatggtggctccagtttggtcgcaagttctcggtcagccagcatggtcggcacgcacagggaagatagtgtctctcttaacggaaatcattctgtcctgagttccacagtgactacctccagcacagacctgaatcataagacgcaggagaactatcgcggcgggctgcagtctcagtctggcacagtggtaacaaccgaaatcaaaactgagaataaggagaaggatgaaaatctgcatgagccaccatcatctgatgacatgaagtcagacgatgaaagctcccagaaagatatcaaagtctcctctcgtgggcgtacttcctctaccaatgaggatgaggacctcaaccccgagcagaagatcgagcgggagaaggaacgaaggatggccaataatgcccgagaaagactcagagtccgggatatcaatgaggccttcaaggaactgggtaggatgtgccaactgcacttgaagtccgaaaaaccccagactaagctgcttatacttcatcaggctgtaaccaccattggaccttag

SEQ ID NO: 138160 - DNA, 885 bp, synthetic construct
  misc_feature 1..885: note = Description of Artificial Sequence: Synthetic coding sequence
  source 1..885: mol_type = other DNA
atgagcttcctaaaagatgtatgcgagcagtcccgaatggaagataggcttgacagattggatgacgctatccacgtgctaaggaatcacgcggtcggcccctctacttccctgccagccggccactcagatatacattcgttgctgggacctagccacaatgcccccatcggctccctgaatagtaattacggcgggagctcactcgtggcgtcctctcgaagcgctagcatggtcggcactcaccgcgaggactccgtcagtctgaacgggaaccactccgttcttagttctaccgtgacaacaagctcaactgacttgaatcataagacccaggagaactatcggggcggactgcagtctcagagcggcactgtggtgacgaccgagatcaaaactgaaaacaaggagaaagacgaaaatcttcatgaacccccttcatccgatgatatgaagtccgacgacgagagcagccagaaggacattaaggtctcatcaagaggaagaacgagtaccaacgaggacgaggacctaaaccccgagcagaagatcgagcgagaaaaagagcgccgcatggccaataatgctagggagcgactcagggtgagagacatcaatgaagccttcaaagagctcggaagaatgtgccagctgcacctaaagtccgagaagccgcagacaaagctgctgattctgcaccaggccgtagcggtgattctgtctctcgaacaacaagtgagagaacgaaacctgaatccaaaggccgcatgtctgaagcgtagagaggaggaaaaagtgagtgccgtgagtgccgagccgccaacgaccctgccaggaactcaccctggtctttccgagactaccaaccccatgggacacatgtag

SEQ ID NO: 138161 - DNA, 1611 bp, synthetic construct
  misc_feature 1..1611: note = Description of Artificial Sequence: Synthetic coding sequence
  source 1..1611: mol_type = other DNA
atgtattgcgcttatcctgtgccgggtatggggtccaattcattaatgtactattataatggaaaaacagtgtacgccccttccccaaattctgatgacttcaaccgggagagtccctcatacccatcgcctaagccccctacctcgatgttcgcctccacttttttcatgcaagatggaacgcataacagttccgacttatggagctccagtaatggcatgtcacagcctggatttggcggtattctcggcacaagtacatcacacatgagccagtcttctagttacgggaacttacacagccatgatcgactgagttatcccccacatagcgtttcgccaactgatatcaatacctctctccctcccatgtcaagctttcataggggctccacttcctcatcaccctatgtggccgcttcccacactccaccaataaatggcagcgatagtattctgggcacccgaggcaacgccgcaggctctagccagaccggggacgccttgggaaaagctctggcaagcatttactcacccgaccacacctcatcgtcatttccctcaaatccctccacacccgtgggctcaccaagcccactgaccggcaccagtcagtggccacggcctggagggcaagcgccctcaagcccatcgtacgagaattccctgcacagcttgaagaatagggtagagcaacaactccacgagcatctgcaagacgctatgagcttcctgaaagatgtgtgtgaacagagtagaatggaggaccgattagaccggctggacgacgctatccatgtacttcggaaccatgccgtcggccccagcactagcctccccgcaggtcacagcgacattcactctctgctgggcccaagccataacgccccaattggcagcctcaactcaaattatggcggatccagccttgttgcctccagccgctccgcctctatggtgggaacccatcgcgaagactccgtgagccttaatggcaatcactcggtgctctcctctacagtgaccacttcaagcaccgatctaaaccacaagacccaggagaactacaggggcggactgcagagtcagagcggtaccgttgtaacaaccgagatcaaaaccgagaacaaggagaaggatgaaaacctgcacgagcccccaagctcagatgatatgaaatcagatgatgagtcctcacaaaaggacatcaaagtgtcaagccggggcaggactagttcgacaaatgaagatgaggacctgaaccctgaacagaaaatcgagagagaaaaagaaaggaggatggcaaacaatgcaagggagcggctgcgtgtgagggatattaatgaagccttcaaggagttaggtcgcatgtgccagctccatcttaaaagtgagaaaccccagaccaagctgctcatccttcaccaagctgtcgctgttattttaagcctagaacagcaggtgagagagagaaatctcaatcctaaagcggcatgccttaaaaggcgagaggaagagaaggttagcgctgtgtccgctgaaccaccaaccacactgcctgggacccaccccgggctaagcgaaactactaaccctatgggccatatgtag

SEQ ID NO: 138162 - DNA, 2049 bp, synthetic construct
  misc_feature 1..2049: note = Description of Artificial Sequence: Synthetic coding sequence
  source 1..2049: mol_type = other DNA
atgaacccgcagcagcagcgcatggccgcaattggaacagacaaggaactctccgacttgctcgacttcagtgctatgtttagccctcccgtaaactcagggaaaactagaccaactacgctgggcagctcccagttctctggtagtgggattgatgaaaggggcggtactacatcttggggcacttccggacagcctagcccaagttatgattcctcaaggggcttcaccgattcaccccactactcagatcaccttaatgattctagactgggagcacacgagggtctgagccctaccccattcatgaattctaaccttatgggtaagactagtgagcgaggctctttctccctgtacagcagagacaccgggctgcctggctgccagtctagcctgctccgacaggacctgggcctgggatcgccggcccagctcagttcttccggaaagccaggtacagcttattatagcttttctgcaacatcctcacggcgcagacctctgcacgatagcgcagcattagacccactgcaggccaaaaaggtgcgcaaagtgccacccggcttaccgagcagcgtgtacgccccaagccccaatagcgacgattttaatcgagagagcccatcatacccaagtccaaaaccccccacatcaatgtttgcatctacttttttcatgcaagacggcacacataattcatcggacctgtggagctcctccaatggtatgtcccagccgggttttggcggcatcctgggaacgtccactagccatatgtcccagagctcttcctacggaaatctgcatagccatgaccggttatcctatcccccacactctgtgtcaccgaccgacatcaacacctccctcccccccatgagtagcttccaccgtgggtcaactagttcgagcccatatgttgctgcaagtcacactcctccaattaatgggagtgattcaattctgggtacacgagggaatgcagccgggagcagtcagaccggagacgcgcttggaaaggctctagcctcaatatacagtccagaccacacctcatcctcgttcccgtccaatccctccacacctgttggtagtcccagccctctgactggtacatcacagtggcccagaccgggcgggcaggctccttcttcccccagctatgaaaactcactccacagcctgcagagcagaatggaagaccgccttgatcgactagacgatgcaatccacgttctccgcaaccacgccgttggaccatctacctccctgccggccggccacagcgatatccattcccttctgggtccctcacataatgcccctatcggcagcctcaattctaactacggaggcagttccctggtagcctctagtagaagcgcctccatggtagggactcacagggaggatagtgttagccttaacgggaatcactctgttttgagttcaacagtgacaaccagcagcactgatctaaatcataaaacgcaagagaactatagggggggtctgcagtcacagtccggaacggtggtgaccacagaaatcaagactgagaataaagagaaagatgaaaatcttcatgagcctccttccagcgacgacatgaaaagtgatgatgaatcttctcagaaggacataaaagtaagcagccgcggcaggacctccagtacaaatgaggacgaggatctcaacccagaacagaagattgagagggaaaaagaacggcggatggccaataacgcccgcgagcgactccgggttcgcgacatcaacgaagcctttaaggagttggggcgcatgtgccagcttcacttaaaatccgagaaacctcaaacaaagttattgattctacaccaggctgttgcagtaatcctttctctggaacaacaagtgagggaaagaaatttgaaccccaaggccgcgtgtctgaaacgaagagaagaagagaaggtcagtgccgtgtctgctgaacctcccacaactctccccgggacacatccaggtctcagcgaaactacaaacccaatgggccatatgtag

SEQ ID NO: 138163 - DNA, 1020 bp, synthetic construct
  misc_feature 1..1020: note = Description of Artificial Sequence: Synthetic coding sequence
  source 1..1020: mol_type = other DNA
atgagtagcaattcatccacatctcagtggcctcggcccggcggccaggccccctcttcaccgagctacgaaaatagccttcattccctgaaaaatcgggtggaacagcagctccacgagcatctgcaagacgcaatgagtttcctgaaagacgtctgcgagcagtcaagaatggaggacaggttggataggttagacgatgctattcacgtgctgaggaaccacgcagtgggcccatcgacttctctccctgcagggcacagtgacatacactctctgctcggcccttcacataatgcccctatcggatcattgaacagtaattacggagggagcagcctggttgcaagctccagaagcgccagcatggtcggtacacaccgggaggactccgtttctttgaatggaaaccacagtgtgctatcctctaccgtgaccactagctccaccgatctgaaccataaaacccaggaaaattatcggggcggacttcagtctcagtcaggaacggtggtaacaacagaaatcaagacagagaataaagaaaaggacgaaaacctgcacgagccaccctcttcagatgacatgaaatctgacgacgagtcaagtcagaaagacatcaaagtctccagccggggccggacaagcactaatgaggatgaggacctaaatcccgagcagaagattgaacgggaaaaagaacgtcgcatggccaacaacgcaagggagaggctgcgggttcgcgacattaatgaggcattcaaagaactgggtcggatgtgccagctgcatctcaagtcggagaagccccagaccaaactgttgatcctgcaccaggccgtggcagtgattttgtctctcgaacagcaagtcagggagcgcaacctaaaccctaaggctgcatgtttgaagcggcgcgaagaggaaaaagtctctgccgttagcgcagaaccacccaccaccctaccagggacccacccaggtctgagcgagacaaccaaccccatgggccacatgtag

SEQ ID NO: 138164 - DNA, 1341 bp, synthetic construct
  misc_feature 1..1341: note = Description of Artificial Sequence: Synthetic coding sequence
  source 1..1341: mol_type = other DNA
atgggaaagcgctatatgcatcatccccagatccaaatgataagcacagtgaaccttttggttatacacttgctctcacaccagccggtctgttcacttgccctgtccctgtgcaagagctatcctcctcactctgtgtctccgacagacatcaacacctcactcccgccgatgtcaagtttccatcggggcagcacatcaagcagtccctatgtcgccgcctcccacaccccgcccattaacggatctgatagtatacttggcacaaggggcaacgctgcagggtcatcccagacgggggacgctctggggaaggctctggcatcaatttactcccccgatcacacatcatccagttttccctcaaatccatccactccagttgggagtccaagcccattgaccggtacgtcccagtggccccggccaggagggcaggcgccaagctcaccaagctatgaaaactccctccactccctgcagagcagaatggaagaccgcctcgaccgcctggatgatgcgattcacgtgctgcgaaatcatgccgttggacccagcacaagcctgcctgcaggccacagcgacatccactctttacttggccctagccataacgcgcccattggatctctgaactccaactatggcggcagctccctcgtcgcctcatcccggagtgcttcgatggtgggcacccatcgcgaggacagtgtttccctcaacgggaaccacagcgttctttccagcacggtaactacctcttctacagacttgaatcataaaactcaggaaaactataggggtggccttcagtcccagtctggtacagtcgtgactaccgagattaaaactgagaataaggaaaaggacgaaaatctgcatgaaccaccttcatctgatgatatgaagagtgacgacgaatcaagtcaaaaagacattaaggtctctagtcggggcaggacatcctctactaatgaagatgaagatctgaatcctgagcagaagatcgagagggagaaggaaaggagaatggcgaataatgcccgtgagcgcctcagggtgcgagacattaacgaggccttcaaggagctgggacgaatgtgccagttacaccttaagtccgaaaagccccagactaagcttctcatcctgcaccaggctgtcgctgtgatcctgtctctggaacagcaggtcagggagcgcaacttaaacccaaaggctgcgtgcttgaaacggcgcgaggaggagaaggtatccgccgtctctgcggaaccccccactaccctgcctggtactcaccctggtctgtccgaaaccacaaatccaatggggcatatgtag

SEQ ID NO: 138165 - DNA, 1539 bp, synthetic construct
  misc_feature 1..1539: note = Description of Artificial Sequence: Synthetic coding sequence
  source 1..1539: mol_type = other DNA
atgtactgcgcataccctgtcccaggcatgggctctaacagcctaatgtattactacaatggaaagaccgtttacgcgccatcccccaactccgatgatttcaatcgggaaagcccatcctacccctctccaaaaccgcccacaagtatgtttgcgtcaacctttttcatgcaggacgggacccataactcttccgacctgtggagtagctcgaacggaatgagccagcccggattcggcggtatcctgggcacctcaaccagtcacatgtcccagtctagtagctacgggaacctccattctcatgatcgcctgagctatccaccacattccgtgagcccaacagatattaacacttctctgcctcccatgtccagcttccatcgtggaagtaccagtagctccccctatgtggcagcttctcacaccccaccaatcaacggtagcgatagcattctgggcacccggggcaatgctgccggatccagtcagaccggggacgccctcggaaaagccctggcgtcaatctactctcctgatcacacttcgtcaagttttccaagcaacccttccacccccgtgggtagccctagtccactgaccgggacctcccagtggccccgacccgggggacaggcgcccagcagcccctcatatgagaattcactgcactccctgcagtcccgtatggaggatcgccttgaccgactcgatgacgccatacacgtgttgcgaaaccatgccgtcgggccttccacctctctccccgctggccactctgatattcatagcttactcggaccctcccataatgccccaattggatcccttaattctaactacggcgggagttcgcttgtggccagtagccgctcagcaagcatggtcggcacacacagagaggatagtgtctcgctaaatggtaatcatagcgtcctgtcttctacggtcacaacttcttctacggatttgaaccataaaacccaagagaattaccggggtgggttgcagagtcaatcggggaccgtggtaaccaccgaaattaagaccgagaacaaagaaaaggacgagaacttgcatgaacccccaagttctgatgatatgaaatctgatgatgagtcttcacagaaggacatcaaagtgagctcgcgggggagaacgagcagcaccaatgaagacgaggatcttaatccagaacagaaaatcgagagggagaaagagcggagaatggcaaacaacgcgcgggagcgtctccgggtgcgagatattaatgaggctttcaaagagcttgggcgaatgtgccagctgcatctcaagtccgagaagccccagacgaaattgcttattctccaccaggccgtggcggtaattttgtctctggagcagcaggtccgcgaaagaaaccttaaccccaaggccgcctgcttaaagcgaagggaggaagagaaagtgagtgcggtctccgccgagccccctaccacattgcccgggacacatcctggcctctccgaaacaacaaaccctatggggcatatgtag

SEQ ID NO: 138166 - DNA, 600 bp, synthetic construct
  misc_feature 1..600: note = Description of Artificial Sequence: Synthetic coding sequence
  source 1..600: mol_type = other DNA
atggcttttgctctgctccgaccggttggggcccatgtgctctatcccgacgtgaggctgttgtcggaggatgaagagaatcgctctgagtccgacgcaagcgaccaatcctttggctgttgcgaaggccccgaggccgctcgcagaggcccagggccagggggcggccgtagggccggtggtgggggaggtgctggccccgtagttgttgtgagacagagacaggcggccaacgcacgggagcgggataggacccagtcagttaacacggcgttcacagccctccggaccctcatcccgactgagccagttgaccggaagctctcaaagattgagacagtgagattggcttcctcgtatattgcccacctggccaacgtcctgttactgggcgattccgccgatgatgggcaaccatgcttcagggccgcaggcagtgccaaaggggcagtgcccgcggctgccgacggcggccgccagccgcgttctatctgcaccttctgcctgagcaatcaaagaaaagggggcggacgccgggatcttggaggcagttgccttaaggtccggggagtcgcaccactgagggggccccgcaggtag

SEQ ID NO: 138167 - DNA, 1038 bp, synthetic construct
  misc_feature 1..1038: note = Description of Artificial Sequence: Synthetic coding sequence
  source 1..1038: mol_type = other DNA
atgctgccctgtttccaattactgaggatcgggggagggcgcggaggggacttgtataccttccaccctcccgcgggcgcaggatgcacttatcgactgggtcaccgggcagatttatgtgacgtcgccctgcggcctcagcaggagccaggcctcatctccggtattcatgctgaactgcacgctgagcctcgtggagatgactggcgtgtgtctctcgaagatcacagcagccagggcacactggtgaacaacgttcgattgccccggggccaccggctggagctcagcgatggagatctgctcacgttcggccccgaggggccacccgggacatcaccttcagaattctattttatgtttcaacaggttcgggtgaagccccaagactttgccgctatcactatcccaaggagtaggggcgaggctagagtgggggcagggtttcgacccatgttgccatcgcagggggcaccccaacggccgttgtccaccttctcccctgctcctaaggccactctcatcctgaatagcataggcagtctcagtaaactccggccccagcccttgacattcagcccctcttggggcgggcctaaaagcctgccagtgcccgctccccccggtgaaatgggcaccacccctagcgcgcccccccagagaaatcgccgcaagagtgtgcaccgagtcctagccgaactggatgatgagtctgagccccccgagaatccccctccggtcttgatggaacctcgcaaaaagctcagagtggacaaagctccattaaccccaaccggtaatcgcaggggcaggccacgcaagtacccggtgtccgctcctatggccccccctgccgttggcggaggcgaaccgtgtgcagccccatgttgttgtcttccgcaggaggagacagttgcttgggtgcaatgcgacggctgtgatgtctggtttcatgtcgcctgcgttggctgttccattcaggccgcccgtgaggctgattttcgctgccctgggtgtcgagccggcattcaaacctag

SEQ ID NO: 138168 - DNA, 1038 bp, synthetic construct
  misc_feature 1..1038: note = Description of Artificial Sequence: Synthetic coding sequence
  source 1..1038: mol_type = other DNA
atgctgccctgctttcagttgctgcggatagggggcgggcgcgggggcgacttatatactttccatcccccagcaggagctgggtgcacatacaggctcggacaccgggccgacttgtgcgacgttgccctccgaccacagcaagagcccgggctgatcagtggtatacacgccgagctgcatgccgagccaagaggcgacgattggcgcgtctcattagaagaccactctagccagggcactctggtgaataatgtgcgattgccccgagggcatcgtcttgaactgtcggacggtgacctcttaacattcggtccggagggccctcctggaacttcgccgtcggaattctacttcatgtttcagcaggtgcgcgtgaaaccacaagacttcgcagcaataaccatccctcgctcccgtggcgaagctagggtcggagctggtttcaggcctatgctcccatcacagggggcaccacagagaccattaagcaccttcagcccagcaccaaaagccacactgattctgaactccatcggtagtctgtcgaagctcaggccccagcctcttacgttcagccccagctggggaggtcctaaatccctgccagttccagcacctcccggcgagatgggaaccacccccagcgccccccctcagagaaatcgcaggaaaagcgtgcaccgagtgctcgctgagttggacgacgaaagcgagccacctgagaaccctcctcctgtgctgatggagccgcggaaaaagttgagagtcgacaaagcgccccttacgcctacggggaatagaaggggccgcccccgcaagtaccccgtatctgccccaatggcgccacctgccgtcggagggggggagccttgcgccgctccatgttgttgcctgccccaggaagaaactgtggcctgggtacagtgcgacggctgcgacgtgtggtttcacgtggcatgcgtggggtgttctatccaagccgcacgcgaagccgatttcagatgccctgggtgtagagcaggaatccagacgtag

SEQ ID NO: 138169 - DNA, 1038 bp, synthetic construct
  misc_feature 1..1038: note = Description of Artificial Sequence: Synthetic coding sequence
  source 1..1038: mol_type = other DNA
atgctgccatgcttccaactgctccgcatagggggagggagaggaggggatctgtacacgttccaccctcccgccggcgctgggtgcacgtacaggctgggtcatcgggccgatctctgtgacgtggccttgagaccacagcaagaacctggtttaatctccgggattcatgctgaattgcacgctgagcccagaggggacgattggagggtaagcctcgaggaccactccagccaaggaacactggtgaacaatgttcgattgccccgagggcacaggctggaattaagcgatggcgatctgttgaccttcggaccagaaggaccaccgggtaccagcccctccgaattctacttcatgtttcagcaagtcagagtgaaacctcaggactttgcagctatcacaattccccgctctagaggggaggcgcgggtgggagccgggttcagaccaatgcttccctctcagggcgcgccccagcgcccactgagcacctttagtccggcccctaaagcgaccctgattcttaactcaattgggagcctttcgaagctgaggccgcagccactcactttctccccatcttggggaggccccaagagcctacccgtcccagcgcctcctggggaagttggaaccaccccatctgcgccaccccagaggaacagacgtaagtcagtgcatcgcgtgttggccgagctggacgacgagtccgagccgccagaaaaccctcctccggtcctcatggaaccgcgcaaaaaactacgcgtagataaagcaccactgaccccaactggaaaccgccggggcagacccaggaaatatcccgtctctgcccctatggccccgcccgccgtggggggaggcgagccttgtgccgccccatgttgttgtcttcctcaggaggagaccgtggcctgggtccaatgcgacggatgtgatgtgtggttccacgtcgcttgcgttggttgcagtattcaggccgctagagaagctgatttccgatgccctggctgtagggcagggatccagacatag

SEQ ID NO: 138170 - DNA, 1038 bp, synthetic construct
  misc_feature 1..1038: note = Description of Artificial Sequence: Synthetic coding sequence
  source 1..1038: mol_type = other DNA
atgcttccgtgctttcagcttctccggattggcggtggacgcgggggcgacttatacactttccatcctccggctggggccggctgcacctaccggttaggccatagagccgatctttgtgatgttgccctgcgcccccagcaggaacccgggcttatctctgggatccacgcggagttgcatgcagagcctcggggcgacgattggagagtgtcccttgaagatcattcctcccaaggaacactggttaacaacgttcgcctcccacggggacatcggctggagctgagtgatggggacctgctgacttttggcccggagggaccaccgggcactagcccctccgaattttacttcatgttccagcaggtcagagtcaaaccccaggacttcgctgcaattactataccaaggtctagaggcgaagctagggtcggagctggattccgcccgatgctcccttcacaaggcgcacctcagcggcccctctccacgttctccccggcccccaaggccactctcattttgaactccataggatctctttcaaaactccgtcctcagccactgacattttccccaagttggggtggtcctaagtcactgccagtgcctgcaccacctggagaagtgggcaccactccctcagcacccccccaaaggaacaggcgtaagtctgtacacagggtgctggcagagttggatgacgagtcagagcccccagaaaaccccccacctgtcctaatggagccgcgtaaaaagttgcgcgtggacaaggcccccctgacccctaccggcaatcgtcggggcagacctaggaaatacccagtgtcagcccccatggccccccctgcagtggggggcggcgaaccgtgcgctgctccttgttgttgtctcccgcaggaagagaccgtcgcctgggttcagtgcgatgggtgcgacgtctggtttcacgtggcctgcgttggttgtagtatccaggccgccagagaagctgatttccggtgtccagggtgccgggcaggcatccaaacctag

SEQ ID NO: 138171 - DNA, 1038 bp, synthetic construct
  misc_feature 1..1038: note = Description of Artificial Sequence: Synthetic coding sequence
  source 1..1038: mol_type = other DNA
atgctaccttgttttcaacttctgcggatcggcggcggcagagggggtgacctctatacctttcacccaccggcaggagccggatgcacgtaccggcttgggcatcgcgctgacctttgtgatgtggccctaaggcctcagcaagagcctgggctgattagtggcatccacgcagagttgcacgccgagcctagaggggacgactggcgcgtctcattagaagatcactccagccaaggaactttagtcaataatgtaagattgcccagggggcatcgtctcgaactttcagatggcgacctgctaactttcggccctgaaggccctcctggtacgtcacccagcgagttctactttatgttccagcaagtgcgtgtcaaacctcaggacttcgccgccatcacaatcccaaggtctaggggcgaggcccgcgtgggagccggctttcggcccatgctcccatcacaaggggcgccacagcggcctctgtcaacgtttagccccgccccaaaagccactttgatcttaaattctatcggctcacttagtaagttgcgaccccagcctttgacattttctccttcctggggtggacctaaatcgcttcctgtgcctgctccacctggcgaggtgggaactaccccttctgctcccccccaacgcaaccgaagaaagagcgttcatcgagtcctggcagaactagacgacgagagcgaacccccagagaatccgccacccgtgcttatggaaccacggaagaagcttagagtcgataaagctcccctgacccctaccggtaatcgacgggggcgaccacgcaaatacccagtgtcagccccaatggctccaccagctgtgggcggtggagagccttgtgccgcaccatgttgctgtctgccccaggaggagactgtcgcatgggtgcaatgcgacggatgcgatgtttggttccatgtggcttgtgtcgggtgcagcatacaggccgcccgggaggccgactttcgctgcccaggctgtcgagccggaatccagacctag

SEQ ID NO: 138172 - DNA, 1038 bp, synthetic construct
  misc_feature 1..1038: note = Description of Artificial Sequence: Synthetic coding sequence
  source 1..1038: mol_type = other DNA
atgctgccatgcttccagctgctccgtatcggaggaggacgcggcggtgacttatatacgttccatcctcccgccggagccggctgcacctaccggctaggccatagagcggacttgtgcgatgttgctctgagaccacagcaagaacccggactgatttcaggaatccatgccgagctgcatgctgagcctagaggagatgactggcgtgttagcctcgaagatcacagcagtcagggcacattggttaataatgtgcgcctcccccggggacatagactcgagttaagcgatggcgatctgctcaccttcggcccggagggccctccagggacgagtcccagcgaattctacttcatgtttcagcaggtgcgggtgaaaccacaggattttgctgccattacaattcctaggtctcgtggggaggcgagagtcggggctggatttaggcctatgcttccctcccagggggccccacagcgacctctgagcacattctcgccagcacctaaggctacacttatccttaactctataggaagcctcagcaagctgaggcctcagccccttaccttcagccctagctggggggggcccaaaagtctgccagtccctgctcctcctggagaagtggggacgacacccagcgcacccccccagaggaatcgcaggaagtctgtacaccgggttttagcagaactcgacgacgagagtgaacctcccgaaaatccaccccctgtacttatggaaccgcggaagaagctgagggtggataaggcaccgctgacccccacggggaatagacgcggcagacctaggaaatatcctgtgtctgcccccatggcccctccagccgtcggaggcggagaaccatgtgcagccccctgctgctgtcttccgcaggaagaaactgttgcatgggtgcagtgtgatggctgtgacgtttggttccatgtcgcctgtgtgggatgcagtatacaggcagctcgggaggctgacttcaggtgcccggggtgccgcgctggaatccagacttag

SEQ ID NO: 138173 - DNA, 1038 bp, synthetic construct
  misc_feature 1..1038: note = Description of Artificial Sequence: Synthetic coding sequence
  source 1..1038: mol_type = other DNA
atgcttccctgcttccagctactgcgaatcggcggcggccgtggcggggatctctatacttttcacccgccagccggagcagggtgcacttaccgactggggcatagggcggatttatgcgacgttgccctccggccccagcaggagccaggtctcatctctggtattcacgcagaattgcatgcagagcctaggggcgacgactggcgggtgtcgctcgaagatcattcatcacagggtaccctggtgaataatgtacggttgccacgcggacaccggctggaactgagcgatggtgatctgttgacttttgggccggagggaccgccagggaccagcccatcagagttttactttatgtttcagcaagtgcgagtgaaaccccaggacttcgccgctattacaattcctcgctcccgaggagaggcaagagtgggggctggtttccgcccaatgctacccagtcagggagcgccgcagcgcccccttagtaccttctcccctgcacccaaggccacgctgattctgaatagcatcggttcgctgtcaaagctgcggccccagccactgaccttctctccgtcctgggggggacccaaaagccttccggtacctgcacctccgggcgaggtcggaactaccccttctgccccgccacagcggaatcgtagaaagtctgtccaccgcgttctggccgagctggacgatgaaagcgagccaccggaaaatccaccacctgtgctgatggagccaagaaaaaagctccgcgtggataaggcgccccttaccccaacgggcaataggagaggcaggcctaggaaatacccagttagcgcaccaatggccccgccagctgtagggggaggagaaccttgtgccgccccgtgctgctgtttaccgcaggaagagaccgttgcttgggtgcaatgcgacggatgcgacgtgtggttccacgtcgcctgcgtcggatgttcaatccaagcagcccgggaagctgattttagatgccctggttgccgggccggcatccagacttag

SEQ ID NO: 138174 - DNA, 1038 bp, synthetic construct
  misc_feature 1..1038: note = Description of Artificial Sequence: Synthetic coding sequence
  source 1..1038: mol_type = other DNA
atgctcccatgcttccaactccttaggattgggggagggcgcgggggagatctgtatacgtttcatccacctgccggcgccgggtgcacgtatcgtctggggcatcgcgctgacctttgtgacgtggcgctgcggcctcagcaagagccgggccttattagcgggattcatgccgagcttcacgccgagccgaggggggacgactggcgggtgagtttagaggatcactctagtcagggcacactggtgaataatgttcgattacctcgcggacaccgcctggaactgtctgacggcgacttgctcacatttggaccagaggggagcccgggcactagtccttccgaattctattttatgtttcaacaagtaagggtgaagccgcaggattttgcagccatcactatccctaggtctagaggagaagcccgagtcggcgctggttttcgccctatgctgccctcccaaggcgctccacaaaggccgctgtcaactttctcacccgcccctaaggccacactgatcctgaacagcatcggctccctttccaaattgcgcccacagcctctgacgttttcaccgtcctggggtggtccaaagagcctgccggtgccagctcctcccggtgaggtggggacaactccatctgccccccctcagcgcaatcgtaggaagagtgtccaccgagtgctggcggagctggatgatgagagcgagcctcctgaaaacccacctcctgttctcatggagcctcgcaaaaaattgagagttgacaaggctccgctgacacccaccgggaataggcgaggtcgcccaaggaaataccccgtcagtgctccaatggcgcctccagcagtagggggcggtgaaccgtgtgcggccccttgctgctgtctgccgcaagaggaaaccgttgcttgggtacagtgcgatggctgtgacgtttggttccatgtggcttgtgtgggttgttccatccaggcagctagggaagccgacttccgctgtcccggatgtagagctggcatccaaacctag

SEQ ID NO: 138175 - DNA, 1038 bp, synthetic construct
  misc_feature 1..1038: note = Description of Artificial Sequence: Synthetic coding sequence
  source 1..1038: mol_type = other DNA
atgctgccctgtttccaactcctgcgaataggtgggggcaggggcggggacctgtatacctttcatccacctgcgggggccgggtgtacctatcgcttgggtcacagggctgatctgtgcgacgtagctctgcgaccccaacaggaacctggccttatatccggtattcacgccgagctgcatgctgagccgagaggggatgactggagagtaagcctggaggatcattcctctcagggtacccttgtcaataacgtgagactgccaaggggacacaggctcgagctgtcagacggcgatctcctcaccttcggacccgaaggcccgccagggacatctccaagtgagttttattttatgtttcagcaggtgcgggtgaaaccacaagattttgcagccatcactattccacgcagtaggggcgaagcacgggtgggggcgggatttaggcctatgctgccctctcagggagcgccccagcgccctctgtcaaccttctcacctgcccctaaggcaacccttatcttaaactccattggcagcctgagcaagttgagaccccagcctctcacattcagtcctagttggggtggccctaaaagtctaccggtgcctgcaccccctggagaggtcggcacaacaccctccgctcctccccaaagaaaccgtcggaaatccgtccaccgggttctggcagaattggacgatgagtcggaaccccccgagaaccccccaccagtgctgatggagcctcgcaagaagctgcgcgtggacaaagcgccactcacccccacgggaaacagacgcgggcggcctagaaagtaccccgtatccgctccaatggcaccgcccgccgtcggcggaggagaaccatgcgccgcaccctgttgttgtttgccccaggaggaaactgttgcctgggtacagtgtgatgggtgtgatgtgtggttccatgttgcttgtgttggctgctccatccaggccgcccgtgaagccgacttcaggtgtcccggatgtcgcgcagggattcagacttag

SEQ ID NO: 138176 - DNA, 1038 bp, synthetic construct
  misc_feature 1..1038: note = Description of Artificial Sequence: Synthetic coding sequence
  source 1..1038: mol_type = other DNA
atgctcccctgttttcagctgctgcggattggtggtggtcgagggggggacctctacacattccacccccccgccggcgccggctgcacatataggttgggtcatagagcagatctctgtgacgttgcactgagacctcagcaagaaccaggcttaatctccggcattcacgccgagcttcatgctgaaccgagaggggatgactggagagtctcactcgaggaccactcctcacagggaacactcgtcaacaacgtcagactgcctaggggccatcgtctggagttatcagacggcgaccttctgactttcggacccgaaggccccccaggaacaagcccaagcgagttctatttcatgtttcaacaggtgagggtcaaaccccaggattttgcagcgatcaccatcccccgctctcgtggggaggcccgggttggcgccggctttagaccaatgctgccctcccagggggccccccagcggccgttgtccacatttagccctgctcccaaagccacgctgatactcaattccatagggtccttgagtaaactgcgccctcaacccctcacttttagccccagttggggtggacccaagagcctgcccgtgcctgcccctcctggagaggtcggaacgacacctagtgcccctccgcaacggaatagaaggaagagcgtgcacagagtgctcgctgaactggatgacgaatccgagccacctgaaaacccacccccagtgctcatggagcccagaaaaaagcttagggtcgacaaggccccacttacacctacagggaataggcggggccgtcccaggaaatacccggtgtccgccccgatggcaccgcctgctgtgggcggcggtgagccctgtgcagccccttgctgctgccttccccaagaagaaactgtggcttgggttcagtgtgacggctgcgatgtgtggttccacgttgcctgtgtgggctgttctattcaggccgcccgcgaggctgatttccgctgccctggctgccgggctggcattcaaacatag

SEQ ID NO: 138177 - DNA, 1038 bp, synthetic construct
  misc_feature 1..1038: note = Description of Artificial Sequence: Synthetic coding sequence
  source 1..1038: mol_type = other DNA
atgctgccatgttttcaactgttgcgcataggaggcgggcgcgggggagatctgtatacgtttcatccccccgctggcgctggctgtacgtataggctgggacatcgcgctgacttgtgtgatgtagcccttaggccccaacaggagccaggcctgatcagcggcatccacgccgaactgcacgcggaacccaggggcgacgactggcgagtgagtctggaagaccattcctcccagggcacattggtaaataatgtgagactcccaagaggacacagattagaactgagcgacggggacctgctgactttcggaccagagggtccccctggtacctctccttcagagttttatttcatgtttcagcaggttcgcgtgaaaccacaggacttcgccgccataaccatccctagaagccggggagaagcgagagtgggggctgggtttagacctatgctgccctcccaaggtgctcctcagcggcctttgtcaaccttcagtccagcgcctaaggctactcttatcctgaattccattgggtcactaagcaaattgcggccacagcccctgaccttctcacctagctggggcggacccaaatccttgcctgttccagcccccccaggagaggtagggaccactccatccgcaccaccccagcgcaatcggaggaaatcggtgcaccgtgtgctcgctgagctggacgatgagtcagagcctcccgaaaatcctcctcctgtattgatggagccgcggaaaaaactgcgcgtggacaaagcccctctgactcccaccggaaatagacgaggcaggccgcggaagtatcccgtatccgctcccatggcgcccccagccgtggggggaggggaaccctgcgccgcaccttgctgctgtttaccacaggaagagactgtggcatgggtgcagtgcgacggttgcgatgtgtggttccacgttgcatgcgtgggctgcagtattcaagcagccagggaagctgactttcgctgcccagggtgtagggctggcatccaaacgtag

SEQ ID NO: 138178 - DNA, 1038 bp, synthetic construct
  misc_feature 1..1038: note = Description of Artificial Sequence: Synthetic coding sequence
  source 1..1038: mol_type = other DNA
atgctcccatgcttccagctgttgcgaattggaggtgggcgcggcggggatctttacacttttcaccctcccgcgggagccggatgcacctatcgactcggccacagagccgatctctgcgatgtggctctgcgacctcagcaagaacccgggctcatcagcggcattcatgcggagctgcatgccgagcccaggggtgatgactggagggtctctttggaggaccattcaagccagggcacactcgtcaataatgtgcgcttgcctaggggacaccggcttgagctaagtgacggtgacctgcttacatttggccccgagggtcccccaggtacctccccttcagagttttacttcatgtttcaacaagtgcgggtcaaaccacaagatttcgcagccatcacgattccgaggagtaggggggaggctcgcgtcggggctggtttcagaccaatgctaccatcccagggagcgccccagcggcctctgagcacatttagccccgctccaaaagcaacacttattctgaattccattgggagcctatccaaacttaggccacagcccctcacgttcagtccttcttgggggggccccaaaagcctgccggtgcccgcccccccaggagaagtgggaactacaccaagtgcccccccccagcgcaatagaagaaaatcagtacaccgtgtactcgcagagctcgacgatgaatccgagccaccagaaaaccctccacctgtcctgatggagccccgcaaaaaactcagagtggataaggcgccactgaccccgaccgggaatcgacgcggcagaccgcggaaatacccagtgtccgccccaatggcacccccagcggtagggggtggagagccctgtgctgccccctgttgctgcctgcctcaggaagaaacagttgcctgggttcagtgtgacgggtgcgacgtctggttccacgttgcgtgcgttggatgcagcattcaggctgccagggaggccgattttaggtgcccaggttgccgcgcgggcatccagacctag

SEQ ID NO: 138179 - DNA, 1038 bp, synthetic construct
  misc_feature 1..1038: note = Description of Artificial Sequence: Synthetic coding sequence
  source 1..1038: mol_type = other DNA
atgctgccttgttttcaactccttaggatcggaggaggaagagggggagatctgtacacttttcaccctcccgcaggagcagggtgtacttatcggttgggccaccgggcggacctgtgtgatgtggctctgagaccacagcaagaacccggtttgattagcggcatacacgccgagttgcacgctgaaccaaggggagacgactggcgcgtaagtctggaggaccactcttcacaagggacactggtaaataatgtgcggctgccacgcgggcatcgactggagctgtccgacggggatcttctgacttttggtcccgagggccccccaggcacctccccaagcgagttttatttcatgttccagcaagttcgggtcaagcctcaggacttcgccgccataactatccctaggtctcgcggcgaggcgagggtcggtgcagggttccgccctatgctgccgagccaaggggcgcctcagagacccttgtctacgttctcccccgcacccaaagctactctgatcttgaacagtataggatctctgtccaagctgaggccccagcctctgactttttctcctagttggggaggccccaagtccctgcccgtgcctgcgcctccaggcgaagtcggaaccaccccaagcgccccaccacagcgcaataggcgcaagtctgtgcaccgagtgctggcggagctcgacgacgaaagtgagccacccgagaatccccctcccgttcttatggaacctagaaaaaagctacgcgtggacaaagctcctctgaccccaacagggaaccgacgtggacgtcctaggaagtaccctgtgtctgcacctatggctccccctgcagtggggggaggggagccgtgtgcggccccttgttgttgtctgccccaggaagaaacagtcgcctgggtgcaatgcgatggctgtgacgtgtggtttcacgtggcttgtgttggttgtagtatccaggcagccagggaggcagacttccggtgtcccggatgtagagcaggtatccagacctag

SEQ ID NO: 138180 - DNA, 1038 bp, synthetic construct
  misc_feature 1..1038: note = Description of Artificial Sequence: Synthetic coding sequence
  source 1..1038: mol_type = other DNA
atgctgccttgcttccaactcctgaggataggcggaggccgtggaggggatctatatacgtttcacccccccgccggggcaggatgtacctatagattggggcaccgcgccgacctgtgcgacgtcgccctgcgaccgcaacaggaacccggtctcatttccgggattcacgctgagctgcatgctgagccgcgcggcgatgattggcgagttagccttgaggatcattcaagccaggggacattagtgaacaatgtccgtttgcctcgtggccaccggctggaactgtcagacggagacttgctcacattcggcccagaaggatctcccggcacctcaccctctgaattctactttatgttccaacaggtgcgcgtgaagccacaggattttgcggccatcaccatacctagatctcgtggggaggctcgcgtcggggccggctttcgtccaatgttgccaagtcaaggagcaccccaaagacctctgtctaccttcagccctgcccccaaagccacactgatcctgaatagtatcggctctttgtctaagctgcgcccccagcctttaaccttctcgcctagctggggtggacccaaaagtctgcccgtgccagcaccgcctggtgaagttggtactacaccctcagctcctcctcagcgcaatagaagaaagagtgtgcaccgagtgcttgccgagctagatgatgagtctgagccgcccgaaaaccccccaccagtattgatggaacctaggaaaaagttgagagtagataaagcacctctgacccccactggcaaccgacgagggcgaccgcgcaaatatcccgtttctgccccaatggctccgcctgctgttggaggcggcgagccatgtgccgccccatgctgctgcctgcctcaggaagagacagtggcctgggttcagtgcgacggatgcgacgtgtggtttcatgtggcctgtgttggatgctcaatccaggcagcaagagaagctgatttccgttgtcccggctgtcgtgccgggatccagacctag

SEQ ID NO: 138181 - DNA, 654 bp, synthetic construct
  misc_feature 1..654: note = Description of Artificial Sequence: Synthetic coding sequence
  source 1..654: mol_type = other DNA
acacttgtcaataacgtcagactgcctaggggccataggcttgagctttctgatggagacctgctgacttttggcccagaagggccccccggcactagcccaagcgagttctacttcatgtttcaacaggtgagagttaagccccaagattttgcggccataacaatccctcggagcaggggcgaggcacgagtcggcgctggattccggcccatgctaccctcacagggagcgccgcagcggccgttgagcaccttttcaccagcacccaaggccacacttattttgaactcaataggaagcctaagcaagctgcgacctcagcctctcactttctcaccgagctggggcggacccaagagtctgccagtgccagctcctccaggcgaaatgggtacgaccccatccgccccccctcaaaggaaccgccggaagagcgtgcacagggtgttagctgagttggacgatgagagtgagccaccggagaaccctccacctgtgttaatggaacccaggaagaagcttcgagtcgataaagcccctctgacaccaaccggtaactggcacattcaaggcatgcaatccatagtgaagggacaaaaggaaagaccctggcctcgtgaacacctcagcgggtatgaggaggcttcttag

SEQ ID NO: 138182 - DNA, 645 bp, synthetic construct
  misc_feature 1..645: note = Description of Artificial Sequence: Synthetic coding sequence
  source 1..645: mol_type = other DNA
atgtcacagcgcaaggctaggggaccaccagctatgcccggcgtagggcactcacagacacaagctaaggcacgactgctcccaggggcggaccggaagcgcagtagattgtcccgtacccgccaggacccttgggaagaaaggagctggagcaatcagaggtggagtagggcgacaccagggcctcgcggcacccgcgcgggaggcctggctctgggacggtcagaagcatctcctgagaatgccgcgcgtgaacgctcacgggtgcgaaccctacggcaggcctttcttgccctccaggccgcccttccagcagtcccaccagacactaagttatctaaactggacgttctggtgctcgccgcttcttacatcgcacatctgaccaggacacttggtcatgaactgccaggccctgcttggcccccctttctgagagggttaaggtacttacaccctctgaagaaatggccaatgcggtctcgtctgtacgccggggggctggggtacagtgacctcgattctacaacagcttcgacgcccagtcaaaggacacgggatgcagaagtgggatcccaggtgcccggggaggctgacgcactcctttccactacaccgctcagcccagcgctgggggacaagtag

SEQ ID NO: 138183 - DNA, 2031 bp, synthetic construct
  misc_feature 1..2031: note = Description of Artificial Sequence: Synthetic coding sequence
  source 1..2031: mol_type = other DNA
atgtcccggagagctctgagaagactgcgcggcgaacagcgcggtcaagagcctttggggccaggggccctgcactttgatctgcgggacgacgacgacgcggaggaggagggccccaaacgggagctgggagttaggcgccctggaggcgcagggaaagagggggtcagggtaaataatcgattcgagcttatcaacatcgatgacttggaagacgaccctgtggtaaatggagagaggagcggctgtgctctcaccgatgctgtagcccccgggaataaaggtagaggacaacgaggtaacacagaatcaaagaccgatggagacgacactgagacagtgccttccgaacagtcccatgcatcaggaaaactccgaaaaaaaaagaagaagcagaaaaacaaaaaatcttctaccggagaggccagcgagaacggtcttgaggacatcgaccggatccttgaaagaatagaggattcaactggccttaataggccaggccccgcaccactgtcgtcacggaaacacgtgctgtacgtggagcatcgtcatctcaacccggacactgaacttaaacggtatttcggggcgcgagccatactcggggaacaacgccccagacagcggcagcgggtgtacccaaagtgcacatggcttacgacaccaaagagcacttggcctagatactcaaaacccgggctatcgatgagactattggaaagcaagaagggactaagcttcttcgctttcgaacattctgaagaataccagcaagcccaacacaaattcctggttgccgttgagtcaatggagccaaataacatcgtggttctgctgcagaccagcccctaccacgttgactcactgcttcagttgagcgacgcgtgccgcttccaggaggaccaggagatggcgagggatctcgtagaacgggctctatactcaatggagtgcgccttccaccctcttttctctctcaccagcggcgcctgtagattagactaccgacgcccagagaacaggtccttttatctggctttatataagcagatgtccttcctcgaaaagcgagggtgccctcgcactgctctcgaatattgcaagctcatattgagtcttgaacccgacgaggatccactgtgcatgctccttctgatcgaccacttggctctgagggcccggaattatgagtaccttatacgactctttcaggaatgggaggcgcataggaatctgtctcagctgcctaactttgcatttagcgtgcctttggcctactttctcctctcccagcaaaccgacctacccgagtgcgaacaatcctcggccaggcagaaagcatcactgctgatccagcaggctctcacaatgttccccggcgtcctgttgcccctgttagagtcatgttccgtgcgcccagacgcctcggtctcttcgcataggttttttgggcccaacgctgagatctcacagccccccgcactgtctcagctcgtcaacctatacctaggaagaagccattttctctggaaagagcctgccactatgagctggttagaggagaacgtgcatgaagtcttgcaagctgttgatgccggagaccccgccgtcgaggcctgtgaaaacaggcggaaagtgctgtatcaaagagccccgcgaaacattcacagacacgtgatcttgtctgagatcaaggaagccgtcgcggcactccccccagatgtgacaactcagagcgtgatggggttcgacccactccccccctctgatacaatatattcatacgttcgacccgagagactcagcccaatctctcacggtaatacaatagcgctgttctttagatctctcctcccgaactacacaatggaaggggaaagacccgaggagggcgtggcaggcggactgaaccgcaatcagggcctgaatcgattgatgttggccgttcgcgacatgatggcaaactttcacctaaatgacctggaggccccccacgaagacgatgctgagggggaaggcgagtgggattag

SEQ ID NO: 138184 - DNA, 1422 bp, synthetic construct
  misc_feature 1..1422: note = Description of Artificial Sequence: Synthetic coding sequence
  source 1..1422: mol_type = other DNA
atgagactactggaatccaaaaaagggttgtcctttttcgctttcgaacacagcgaagagtatcagcaggctcagcataagtttcttgtcgccgtggagagcatggagccgaacaacattgttgtgctccttcagactagtccttatcacgtggacagtctactccagttgtcagacgcatgccgtttccaggaagaccaggaaatggccagggaccttgtggagcgggccctgtattctatggagtgcgccttccacccgctattcagtcttacctctggagcctgtcgtctcgactaccgcagaccagaaaacagaagcttttatctggccctgtataaacaaatgtcctttcttgagaagagggggtgtccacgcaccgctttggagtactgtaaattaattttgtcccttgagccagatgaggatcctctctgcatgctgctgctcattgaccatcttgccctccgtgccaggaattacgagtatcttatcagactgtttcaagaatgggaagcacatcggaacctgtcgcagcttccaaatttcgcgttttcggtccccctggcctactttctgctgtctcagcagacagatttacccgagtgcgaacaatcatcagcccggcagaaggcgtctttgctaatccagcaggcccttaccatgtttcctggtgttctgttacccctcctggagtcatgtagtgttcgccccgacgctagtgtgagttcccatcgctttttcggacctaacgccgagattagccagccccccgccctatcacaactcgtgaatctctatctggggcgctcccatttcttgtggaaggagcccgccactatgtcgtggcttgaagagaacgtccacgaggtactacaggcggtcgatgcaggggatcctgctgtggaagcctgtgagaatcgacggaaggtgctgtatcagcgggcgccccggaatatacaccgacacgtgatactgtcagagattaaggaggctgtggccgccttaccacccgatgtgaccacgcagagcgttatgggctttgacccgcttccgccttccgataccatttactcatacgtccggcctgaaaggaaaggggaggaagaaaggaactccgtcatttggggtagccagttatgtgtctgccggccaaggagttttccgtccccccccaatgtacaggcacttgcttgccgaccgctgtggcaggcgaagtcctaccagccttggaaacaccactgtagcttgctccctgtcacggtggctaaactttatcacggtggtggggaggccaggggcaggagcgggtgggggtctgagccacagcccggccccgagcaagctgacgccggttgtgcaaggcacgatggccaactcccaccgcagcggcccggcggcgctgctcgcggtcgtcgatag

SEQ ID NO: 138185 - DNA, 651 bp, synthetic construct
  misc_feature 1..651: note = Description of Artificial Sequence: Synthetic coding sequence
  source 1..651: mol_type = other DNA
atgagtaggagggcattgcgccgacttaggggcgaacaaagaggccaggagcccctggggcctggggctttgcattttgatctccgcgacgatgatgatgccgaagaagagggaccaaagcgcgagcttggagtgaggcgaccaggaggcgctgggaaagagggggtcagggtcaacaatagattcgaactcatcaatattgatgacctggaagacgatcccgtggtgaacggggagcgatcaggttgtgctctgaccgatgctgtggcccccggtaataagggaagaggccaacgggggaataccgaatccaaaacagacggggacgatacggagacagtcccttccgagcaaagccacgctagcgggaaactccggaagaaaaaaaagaaacagaaaaataagaagagcagcaccggcgaggccagtgaaaacggcctagaagacattgaccggatcctggaacgtatagaggatagcacggggcttaataggcccggaccagcccctctgtccagccgcaaacacgttctttatgttgaacaccggcatctgaatcccgataccgaactgaagagatactttggcgcccgggccatattgggcgaacagcgcgacagggtgctgctaggttgtcctgtctggttttag

SEQ ID NO: 138186 - DNA, 624 bp, synthetic construct
  misc_feature 1..624: note = Description of Artificial Sequence: Synthetic coding sequence
  source 1..624: mol_type = other DNA
cttactgtgaacgcatctatgagccggtttccccctcacatggttccccctcatcacacgctgcatactactggcattccgcaccccgccatagtcactcccactgttaagcaggaatcaagccagtccgacgttggttctctgcattcatccaaacaccaagattctaaaaaggaggaggagaaaaaaaaacctcatataaagaaacctctgaacgcatttatgttgtatatgaaagagatgagggccaaggtcgtggcagaatgtacactgaaagagtcagcagccattaaccagatcttggggaggcggtggcatgctctttcaagagaggaacaggccaaatattatgaactcgcccgcaaagaaagacagctacatatgcagctgtacccaggatggagtgcgagagataattacggaaaaaagaagaagaggaagagggataaacaacctggcgagacaaacgatctatctgcaccaaagaaatgccgagcaagattcgggctggaccagcaaaataattggtgcggcccttgtagaagaaaaaagaaatgtgttcggtatattcagggcgaaggcagctgcctgtcacctccctccagcgacggctccctgttgtag

SEQ ID NO: 138187 - DNA, 669 bp, synthetic construct
  misc_feature 1..669: note = Description of Artificial Sequence: Synthetic coding sequence
  source 1..669: mol_type = other DNA
accaatcagaacagcagcagcgacagcgaagccgagcgtcggcctccaccacggagtgagtcgtttcgcgataaatctcgtgaaagtctcgaggaggccgctaaacggcaggatggaggcctgttcaagggccccccttatcctgggtatccatttatcatgattcctgatctcacctctccctatctgcctaacggatcgctgtcccccaccgcacgcaccctgcacttccagtccggaagcacccactattctgcctacaaaactatagaacaccagatcgccgtgcagtatctccagatgaaatggccgctgttggatgtacaagctggttctctgcaatcccgacaggcactgaaggatgctagatccccaagcccagcccatatagtatcccccttgccatgctgtacccagggacacgattgccagcatttctatcctccgtctgatttcactgtcagcacccaagtgttcagggatatgaaaaggtcccacagcttacaaaaggtaggagaaccatggtgtatagaatcaaataaggtgcccgtcgtgcagcatccccatcatgtgcaccccttaacgccactcattacttactcaaatgagcatttcacccctgggaaccccccaccccacctcccggccgacgtggacccaaagacatag

SEQ ID NO: 138188 - DNA, 867 bp, synthetic construct
  misc_feature 1..867: note = Description of Artificial Sequence: Synthetic coding sequence
  source 1..867: mol_type = other DNA
atgccacaactaaacggaggcggaggcgacgacctgggggccaacgatgagctgatatctttcaaggatgagggcgagcaagaggaaaagtcatctgaaaacagctctgctgaaagggatctggctgacgtgaaaagtagtttagtcaatgagtcagaaaccaaccagaattcttcatctgattctgaggccgaacgaagacctccacccaggagtgagtctttccgcgacaagtccagggagagccttgaagaagccgctaaacggcaggatggagggcttttcaaagggccaccttatcctggctaccctttcattatgatcccagatcttaccagtccttatctacctaacgggagtttgtccccaactgctcgcaccctgcattttcaatctgggagtacccactattccgcatacaagacaatcgaacaccagattgccgtgcaatatctgcaaatgaaatggcctttgctggatgtgcaggccggttccctgcagagccgacaagctctgaaggacgctcgcagtcccagtccggctcacattgtctctaataaggttccagtggtacagcacccccaccacgtgcaccctctgaccccgttaatcacgtactccaatgagcactttacccctggaaatccgccacctcacttgccggccgatgttgatcctaaaaccgggattcctcggcccccacacccgccagatattagcccatattatcctctgtcgccaggtactgtgggacagatcccccatcccctcggctggcaggggcaacccgtatacccaatcacgactggaggctttagacatccatatcccacagcgctgactgtgaatgcgagcatgagccgctag

SEQ ID NO: 138189 - DNA, 1380 bp, synthetic construct
  misc_feature 1..1380: note = Description of Artificial Sequence: Synthetic coding sequence
  source 1..1380: mol_type = other DNA
atgcctcagttgaatggaggtggaggggatgatctgggagctaatgatgagctcatctctttcaaggatgagggtgagcaggaggagaagtcctcagaaaacagctccgcggagcgcgatttggcggatgtcaaaagctcactggtaaatgagagcgagacgaaccagaactcttcctcggactccgaggccgagaggaggccccccccccgctcggagagcttccgggataaatctcgggaaagtctcgaagaggccgctaagaggcaagacggcgggttgtttaaaggcccaccttacccaggctacccttttatcatgatccccgatttaacaagcccttatctgccaaacggttccctgagccctacagccaggacctatctgcagatgaaatggcccctcctggacgtgcaggcaggcagtctccaatctagacaggctctgaaagacgctagatctccgagtcccgcccacatcgtttcaaacaaggtgcccgtcgtgcagcatccccaccatgtccaccctctgacaccactgatcacctattccaatgagcacttcacccccgggaacccacccccccacctacctgccgatgtggacccaaaaacgggtatacctcgccctcctcacccccccgacatcagtccctattaccctcttagtcctggcacggttggtcagatccctcatcctctgggctggcttgtgccacagcaggggcagcccgtctaccccatcacaaccggcggctttcggcatccctatcctactgctctcacagtaaacgccagcatgagtcgattcccaccccacatggttccaccacatcacaccttacacacaactggtattccccatccagctatcgttactcccacagttaaacaggaaagtagccagtccgatgtcgggtccttgcacagctccaaacatcaggattctaagaaagaggaggaaaaaaagaagcctcacatcaaaaaaccattaaatgcctttatgctgtacatgaaggagatgcgggctaaggtggtagccgaatgcaccctcaaggagtctgcagctatcaaccagatcctggggcgccgctggcatgctctgtcccgggaggaacaggctaagtactacgagcttgcgagaaaagaacgccagctacatatgcagctgtaccccggatggagcgcccgcgataattacggaaagaaaaagaagagaaaacgagacaaacagcctggtgagacaaacgagcattctgagtgtttcttgaacccctgtctatcactacctcccataactgatctgtccgcacccaaaaagtgccgagccagatttgggctggaccaacagaacaactggtgtggtccttgctccttatag

SEQ ID NO: 138190 - DNA, 1470 bp, synthetic construct
  misc_feature 1..1470: note = Description of Artificial Sequence: Synthetic coding sequence
  source 1..1470: mol_type = other DNA
atgcctcagctaaacggaggggggggggatgaccttggcgctaacgatgagcttatctcattcaaggatgaaggcgagcaggaagagaaatcctccgagaactcgagtgccgaacgggatctggctgacgtaaagagcagtctggtaaatgagagcgaaactaatcagaactccagtagtgacagcgaagcggagagacgccccccacctcgatcagagtctttcagggacaagagcagggaatctttggaggaagctgcgaagcgtcaggacggtggcctgtttaaaggtcctccttatccagggtatcctttcataatgatacctgacctgacctccccctatctacctaatgggtccctttcccccacagcacggacttaccttcagatgaagtggcccctgcttgacgtccaggccggatctctacagagcaggcaggctctgaaggacgcgcgctcacccagtcctgcccatatcgtcagccctctcccatgttgcacacagggccacgattgccagcatttctaccctccttccgacttcacggtgtcaacacaggtcttcagagatatgaagcggagtcacagcctgcagaaggtgggcgaaccttggtgcattgaaagtaacaaagtgccagtggttcaacacccacatcatgtgcatccacttacccctctgattacatactcaaatgagcactttacacccggaaaccccccgccacaccttcctgctgacgtagacccaaaaacaggaatccctcgccctccccaccctcccgacatctcaccatactaccccttatcccccggcaccgtgggccaaataccacaccctctgggttggcttgttccgcagcaaggccagcccgtgtatccaatcactaccggagggttcaggcacccttaccccaccgcactgactgtaaacgcctctatgtctcgatttccccctcacatggttccccctcaccacaccctgcatacgacgggaattccccacccggctatcgtcacacccacagttaagcaggagtcatcccagtcagacgtgggatcgctccacagctccaaacatcaggactcgaagaaggaagaggagaaaaaaaagccacacattaagaagccgctgaacgcctttatgctgtacatgaaagaaatgcgcgctaaggtggtggctgagtgcacattaaaagagtctgctgcgattaatcaaattctcgggaggcgctggcacgccctttctcgggaggagcaggccaagtactacgagcttgctagaaaggagcgtcagctccacatgcagctttaccccggatggtcggccagagacaactatggtaaaaaaaagaagcggaagagggataaacagccaggtgagaccaatggagagaagaagtccgcttttgcgacctacaaagtcaaagcagctgcctcggctcatcccttacagatggaagcatactag

SEQ ID NO: 138191 - DNA, 1860 bp, synthetic construct
  misc_feature 1..1860: note = Description of Artificial Sequence: Synthetic coding sequence
  source 1..1860: mol_type = other DNA
atgccacaattgaacggcgggggcggcgacgatctgggggccaatgacgagctgataagttttaaggacgaaggcgagcaagaggagaaatccagcgagaactcatcagccgaacgcgatcttgccgatgtgaagtcctcacttgtgaatgagtcagagactaatcaaaacagcagctccgacagtgaagcagaacggcgccctccaccgagatccgagagctttcgggataagagccgggaatccttagaggaggcagctaaacggcaggatggcggtctcttcaagggacctccttaccctggctaccccttcatcatgatcccagacctgacatctccatacttgcccaatggcagcctgagccctacggctcgtacattgcactttcagagcggatctacccactacagcgcctacaagacaatcgaacatcagatagcggtccaatacttgcagatgaagtggccgctgctcgacgtccaggcaggtagtttgcagtctaggcaggccttgaaggatgcccgcagcccttccccagcccacattgttagcaacaaagtgccagtcgtccagcacccgcatcacgtccaccctcttactcctctcattacatatagtaacgagcacttcacaccgggcaacccgcctccacatcttccagccgatgtggatcccaaaacagggattcccagacccccccatccacctgatatatctccctactatccattgtctcctgggactgtgggccagatcccccaccctcttggttggttggtcccccagcagggtcagccagtttatcctatcacgacgggcggctttagacacccctatcctactgcactcacagtgaatgcctcaatgagccgtttccctccccacatggtgcctccacatcacaccctgcacacaaccgggatcccccaccccgccatcgtgacccctacggtaaagcaggaatctagccagtccgacgtcggctcccttcatagcagcaagcaccaagattcgaaaaaggaggaagagaaaaagaagccccatatcaagaagccattgaacgctttcatgctgtacatgaaagagatgagggccaaggtcgttgcagaatgtaccctcaaagagtctgcagccataaaccaaatccttgggcgccggtggcacgccctaagcagagaggaacaggctaagtattacgagctggcgaggaaggagagacaattgcacatgcaattatatcctgggtggtctgctagggacaactacggtaagaagaagaaacggaaaagagacaagcagcctggtgagaccaacgagcactcagagtgtttcttgaacccttgcctctcattgccacctataacggatctgagcgctcctaagaagtgtcgagccaggttcggcctggaccaacagaataactggtgtggcccctgtagaaggaagaagaaatgcgtgcgttacatccagggggagggctcttgtctgtctcccccctctagcgatggtagtctgttagattcccctccacctagtcccaaccttctggggtctcccccgcgcgacgccaagtcccagaccgaacagacccaacccttaagcctttcacttaaaccagaccctctggctcatctatcaatgatgccaccccccccagccctgctgctagccgaggcgacccacaaagcctcagccctttgcccaaacggggccctagatcttccccccgcagccctgcagcctgccgcacccagttcatcaattgctcagccctctactagcagtctgcactcccatagttcactagccgggacccagccccagcctctctcccttgttacaaaaagtctggagtag

SEQ ID NO: 138192 - DNA, 363 bp, synthetic construct
  misc_feature 1..363: note = Description of Artificial Sequence: Synthetic coding sequence
  source 1..363: mol_type = other DNA
atgctatacatgaaagaaatgcgcgccaaggttgtcgccgaatgtactctgaaggagagcgcagctataaatcagatcctcggcaggcggtggcacgccctttctagagaggagcaagccaagtactatgagctggctaggaaagagcgccagcttcatatgcagctttatcctgggtggtctgccagggacaactatggcaaaaagaaaaaacggaagcgggataaacaaccaggggaaaccaatgatctgtcagcaccaaagaagtgtagagcccgttttggactggaccagcagaacaattggtgcggcccgtgtcgatgtaaatactcgaaggaagtgtctggcactgtgcgagcctag

SEQ ID NO: 138193 - DNA, 531 bp, synthetic construct
  misc_feature 1..531: note = Description of Artificial Sequence: Synthetic coding sequence
  source 1..531: mol_type = other DNA
atgagtcgcttcccgcctcatatggtgcctccccatcacactctgcatactactggcattcctcatcctgctatcgtcaccccaacggtgaaacaagagtcttcacagagcgatgtggggtctctccattcatctaagcaccaggactccaaaaaggaagaagaaaagaagaagccacatatcaagaagccattaaatgcattcatgctctatatgaaggaaatgcgagcaaaggtggtggctgaatgtacactgaaggagtccgcagccatcaaccagatcctggggcgccgttggcacgcgctgtctcgggaggaacaggctaaatactatgagttagcccgcaaggagcgacagctgcacatgcaattataccctggctggtcagctcgggacaactacgggaaaaaaaagaagcggaaaagggataaacaacccggggaaactaacggggaaaaaaagtccgcttttgctacgtacaaggtaaaagctgccgccagcgcccatcctctacaaatggaagcgtactag

SEQ ID NO: 138194 - DNA, 954 bp, synthetic construct
  misc_feature 1..954: note = Description of Artificial Sequence: Synthetic coding sequence
  source 1..954: mol_type = other DNA
atgccccagctgaatggaggaggcggggatgacctgggcgccaacgatgagctgatctcattcaaagatgaaggcgagcaggaggaaaagtcatctgagaatagcagcgccgagagagatctggccgacgttaaaagctccttagtgaacgagtccgaaactaaccaaaattctagctcagacagcgaagctgaacggcggcctccccctcgttccgagagcttccgcgacaaatcacgtgagagtcttgaagaagccgcaaaaagacaggatgggggcttgttcaaagggcccccttacccaggatacccatttattatgattcccgacctcacgtccccttatctgcccaacggctctctgagcccaacagcaaggacctacctgcagatgaaatggcctctgctggacgtccaggccggctcactgcagagccggcaggctttaaaggatgcgcgttcaccatcacctgcgcacattgtgcaatccccactcccgtgctgcacccaaggccacgactgccaacatttctatccccctagcgactttacagtgtccacccaggtgttcagagatatgaaacgatctcactcactgcaaaaagtgggcgagccctggtgcatagaatccaataaagtgcccgtggtgcagcacccacatcatgtacatcctctgacacccctgatcacctactccaatgaacacttcactcctgggaacccaccgccacatttgcctgccgatgttgacccaaaaaccggaattccccgcccaccacaccccccagacatctccccctactaccctctcagccctggcaccgtcggacaaatacctcaccccctgggttggctggtaccccagcagggccagccagtttaccctatcactacgggggggttccgccatccttaccccacggccttaacagtgaacgctagcatgagccggtag

SEQ ID NO: 138195 - DNA, 1791 bp, synthetic construct
  misc_feature 1..1791: note = Description of Artificial Sequence: Synthetic coding sequence
  source 1..1791: mol_type = other DNA
atgcctcaactgaatgggggaggcggtgacgacctcggagccaatgatgagctcatttcctttaaagacgagggagagcaggaagaaaaatccagcgaaaactcatcagccgagagagacttagctgatgttaaatcttccttggtgaatgagagcgagacaaaccagaattcgagtagcgactcggaagcagagagaagacctccccctagatccgagtcctttagagacaaaagtcgggaatctctagaggaggctgctaaaaggcaggatggaggcctttttaagggccccccttatcctggctatccctttatcatgattcccgacctgacgtccccttatctgccaaacggatctctttcacccactgcccggacctaccttcagatgaagtggccactcttggatgtgcaggccgggagcttgcagtcaaggcaggcccttaaagacgcaagaagtcctagcccagcccacatcgtcagcaataaggttcccgtggtgcagcatccgcatcacgttcacccgttaacaccactcatcacttatagcaatgagcacttcacgcccggtaatccccctccgcatctaccagcggacgtcgatcctaaaactggcatcccccggcccccccaccctcccgatatctccccttattatccgctctctccaggcacggtgggacaaatccctcatcccctgggatggttagtgccacaacaagggcagcccgtgtacccaattaccacgggggggttccggcacccctatccgacagcactgacagtgaacgcctctatgtctagattcccacctcacatggttcctccccatcacaccctgcacaccactggcatacctcacccagctattgtgaccccgacagtgaagcaggagagttcccagtcagacgtgggttcactacatagtagtaaacaccaggattcgaagaaggaggaggagaaaaaaaaaccacacattaaaaagccgctaaacgctttcatgttgtacatgaaagagatgagggccaaagtggtcgcggagtgcacccttaaagagagcgccgctatcaaccagattcttggcaggagatggcacgctctaagtagggaggaacaggccaaatactatgagctggctcgtaaagagagacagctgcatatgcagctctacccaggctggagcgcacgtgacaactacggaaagaagaaaaagagaaagcgcgataaacagcctggtgagacaaacgaacattctgagtgctttcttaatccctgcctgtccctgccacctattacagatctcagtgctcccaagaagtgccgggcccgatttggcctcgatcagcagaacaactggtgtggaccttgtcggcggaagaagaaatgcgttcggtatattcagggagaggggtcatgtctgagccccccgtcttcagacggctctctgcttgatagtccccccccgtcccctaatctgttaggcagtcccccaagagacgcaaaatcccagactgaacagacgcagcccttgtcattaagcctgaagccggacccactggctcacctatccatgatgccaccccctcccgcactgctccttgctgaggcgactcacaaggcatcagctctatgtccaaacggcgctctagacctccctcccgcggccctgcaacccgccgctccttcatcttctatcgcccaaccatccacatctagtctccactcccattcgtctctggccggaacgcagccccagcccctaagtctggttacaaaatcgctggaatag

SEQ ID NO: 138196 - DNA, 1485 bp, synthetic construct
  misc_feature 1..1485: note = Description of Artificial Sequence: Synthetic coding sequence
  source 1..1485: mol_type = other DNA
atgcctcagctgaatggtggggggggcgatgatctgggagccaacgatgaactcatcagcttcaaggatgaaggagagcaagaagagaaatccagtgagaattcatcagcggagcgagacctggccgacgtgaagtcatcccttgtgaacgagtctgaaactaatcaaaacagtagttccgattccgaagcggagcgccgaccaccacccaggtccgaatcatttcgtgataagtctcgagagagtctggaggaggcagccaaacggcaggacggggggctgttcaaggggccgccatacccagggtatccatttattatgatacctgatctgaccagtccatatctccccaatggtagcctgtctcctacggcacgcaccttgcatttccagtctggctctacacattattccgcatataagacaatagagcaccagattgccgtgcagtacctgcagatgaagtggccccttctagacgtccaagccggctctcttcagtcaaggcaggcacttaaggacgcccggagtccgagcccggctcatattgtctcaaataaggtgccagtggtccagcacccgcaccacgtccatcccctaacaccacttattacttattcaaacgagcattttacccctggaaacccgccaccccacttgcccgctgacgtcgaccctaaaacagggatccctcgtcccccacacccacccgatatctctccctactacccgttgagtcccgggaccgtggggcagatacctcatcctctcggttggctggtccctcaacaaggacagcctgtgtatcccataacaaccggggggtttaggcacccttaccctaccgccttgacagtgaatgcatcaatgagccgattccccccccatatggttcctccccaccacactctccatacaacagggatccctcatcctgctattgtgacccctaccgtgaaacaggaaagctctcaatctgacgtcggatcactgcattccagtaagcaccaggatagcaaaaaggaagaagaaaagaaaaaacctcatatcaagaaaccgctcaacgccttcatgttgtatatgaaggagatgcgtgctaaagtcgtggctgagtgcactctgaaggaatcggcagcaattaaccaaattttgggccggaggtggcacgccttgtcacgcgaggaacaagccaaatactatgagctcgcccggaaagagaggcagctacacatgcaactgtatccgggatggagcgcgcgtgataactacggaaaaaagaagaagaggaagagagacaaacagcccggcgagactaacgaacactcagagtgcttcctgaatccctgtcttagcttgccccctataacagatttaagcgcaccaaaaaagtgcagggcccggtttggactggatcagcaaaataactggtgcggaccctgccgctgtaagtactcaaaagaagtgagtgggacagtgcgagcctag

SEQ ID NO: 138197 - DNA, 1809 bp, synthetic construct
  misc_feature 1..1809: note = Description of Artificial Sequence: Synthetic coding sequence
  source 1..1809: mol_type = other DNA
atgccccagctgaatgggggtggcggagatgatctcggtgccaacgacgaactaatctcctttaaagacgagggcgagcaggaggaaaaatcgtccgagaattcatccgcagagcgggatcttgctgacgtgaagtccagcctagtcaacgagtccgagactaatcaaaactcatcctccgactctgaggcagagcggagacccccgcctagatccgagtcctttagagataaatcccgcgaatcactggaggaggctgccaaaagacaggacggcggactgttcaaaggtcccccatacccgggctatcccttcattatgatccccgacttaacctcgccttacctaccgaacggatcactgagcccaacagctcgcacactccactttcagtctgggtcaacacactatagcgcttacaagactatcgaacaccagattgctgttcaatatttgcagatgaagtggccccttctggacgtccaagccgggagcctgcagtctcgccaggccctgaaagacgctaggtctccttctcctgcccacattgtgagcaataaggtgcctgtggttcagcatccacaccacgtccaccctttaacccctctcatcacgtatagtaacgagcatttcactcctggaaatccgcctcctcatcttcctgcagacgtagaccccaagactggcatcccccggccaccccaccctcctgacatttcaccgtactatcccctgtccccaggcaccgtgggtcaaattccgcaccccctcggttggctcgttcctcagcagggccagccggtttatccaatcacgacaggaggttttcggcatccttaccccactgccctgacggttaacgcctctatgagtaggttcccaccgcatatggttccaccgcaccacacactgcacactaccgggattcctcatccggcaatagttactcctactgtgaagcaggagagttctcagagcgatgttggcagccttcattcaagtaaacaccaagactcaaagaaagaggaggagaaaaaaaaacctcacatcaaaaagccactcaacgccttcatgctctacatgaaggaaatgcgcgccaaggtcgtcgcagagtgcacgctgaaggaatcagccgccatcaaccaaatccttggcagacgctggcacgccctgagccgtgaggaacaggccaagtactatgagctggccagaaaggaaaggcaactgcatatgcaactctatccaggttggagtgcccgtgacaattacggtaagaagaagaagaggaagagggataaacagcccggagagacgaatgatctcagtgccccaaagaagtgtcgcgcacgcttcggcctggatcagcagaataattggtgcggaccctgtaggaggaaaaaaaaatgtgtgagatacatccagggggaaggatcctgtctcagtcctcccagctctgacggctccctgcttgatagccctccaccatcacctaacttgctcggtagccctccccgggacgcaaagtcgcaaaccgagcagacacaaccactgtccctgagcctgaaaccggatcccctggcccacctatcaatgatgccacctccccctgccctattgctggctgaagctactcataaagcatctgctttatgtccgaacggcgcgctggacctacccccagctgccttgcagcccgccgccccctcgtcttctatcgctcagccatccaccagtagcctgcatagccactcatcactggcgggaacacagcctcagcccctgagtctggtcacaaaatctctggaatag

SEQ ID NO: 138198 - DNA, 1449 bp, synthetic construct
  misc_feature 1..1449: note = Description of Artificial Sequence: Synthetic coding sequence
  source 1..1449: mol_type = other DNA
atgccacagctaaatggtggggggggagatgacctgggagccaacgatgaacttattagcttcaaggacgagggcgaacaagaggagaagtcttctgaaaattcatcggcagagcgcgaccttgccgacgtgaagtcaagcctcgtgaacgagtctgagacaaaccaaaactccagctctgattcagaagcagagagaaggcccccccccaggtctgagtccttccgcgacaaatccagggaatcgcttgaagaagccgccaaacggcaggatggagggctcttcaagggcccaccatatcccggttatccgtttatcatgatacctgacctgacatcaccctacttacccaatggtagcctctcaccaaccgcgcgcactctgcactttcagagtgggtcgacacactacagtgcttacaagacaatagaacaccagatcgccgtgcagtacctccagatgaaatggccactcctcgatgtccaagcaggctccctgcagagcagacaagccttaaaagatgctcggtctccgtctcctgcccatattgtgagcaacaaggttcctgtggtgcagcatcctcaccacgtgcaccccctgaccccacttatcacatactcaaatgagcattttactcctggaaacccacctccgcacctgcctgctgacgttgatcctaaaactggcattccaaggccaccgcatccccccgacatcagcccctactatcccctttctccgggaaccgtcggccagataccccatcccctgggttggctggtgccccagcagggccagccagtttaccccatcactacagggggctttagacacccttatccgacagcactaaccgtgaatgcctctatgtcccgttttcctccccatatggtgcctccgcaccacacgcttcacactacgggaattccacaccccgcaattgttacgcctactgtgaagcaggagtcatctcaatcagatgtaggaagtctgcattcctccaaacaccaggactccaagaaagaggaggaaaaaaagaagcctcacatcaaaaaacccctcaatgccttcatgctatatatgaaagaaatgcgtgcaaaggtcgtggctgagtgcacattgaaagagtcagccgcgatcaatcagatcctgggtcgaaggtggcatgcgctgtctcgcgaggaacaggcgaagtactacgagttggctcgaaaggagcgccagctgcatatgcagctatatcccggttggtctgccagggacaattacgggaagaaaaagaagaggaaaagggataaacaacccggagaaaccaacgaacactccgagtgctttctaaatccttgcctgtcattgcctcctataacaggcgaaaaaaagtcagccttcgctacctacaaggtgaaggccgctgcctctgctcatcccctgcagatggaggcatattag

SEQ ID NO: 138199 - DNA, 1008 bp, synthetic construct
  misc_feature 1..1008: note = Description of Artificial Sequence: Synthetic coding sequence
  source 1..1008: mol_type = other DNA
atgtccagttttcttagttcacgctttcctccccacatggtgcccccacatcacacccttcacaccactggcatccctcatcccgctatcgtgacccccacggtgaagcaggaatcttcgcaatccgacgtcggctctctccactccagcaagcaccaggattctaaaaaggaagaagagaagaagaaaccgcacatcaagaagcccctgaacgctttcatgctctatatgaaggaaatgagggccaaggtagttgcagagtgcaccctgaaagagtccgctgcaatcaaccagattcttgggcgtaggtggcacgctctttctagggaggagcaggcaaagtattacgagttagcaagaaaagagcggcagctgcatatgcagctttaccctggatggtcagcaagggacaactacggcaaaaaaaaaaagcgcaagagggataaacaaccaggtgaaaccaatgagcacagcgaatgctttctgaatccttgcttatctctaccgcctatcaccgatcttagcgcccctaagaagtgcagagcccgctttggtctggatcagcagaataattggtgtggtccgtgcaggcgcaaaaagaagtgcgtgaggtacattcagggcgaggggagctgtctgtcaccgccctccagtgatggaagcttgctggatagtcctcctccgagtcctaacttgctcggctccccaccccgtgacgctaaatctcaaactgagcagacacagccactgtctctaagcctgaaacccgatcccctcgcacacctcagcatgatgccccccccacctgctctcctgctggcagaggctacccacaaagcctccgccttgtgtccaaacggcgcgcttgaccttccacccgcagctctacagccagccgctccttctagttccatcgcccaaccttcaaccagtagtttacattctcattcctctcttgctgggactcagccccaaccccttagcctggtgactaagagtcttgagtag

SEQ ID NO: 138200 - DNA, 1809 bp, synthetic construct
  misc_feature 1..1809: note = Description of Artificial Sequence: Synthetic coding sequence
  source 1..1809: mol_type = other DNA
atgccccaactgaacggtggtggaggcgatgacctgggggccaacgatgagctgatcagctttaaggatgaaggcgagcaggaggagaagagcagtgaaaacagctctgcggagcgcgacctggcagatgttaagtctagtctggtgaacgagtcagagactaatcagaacagttccagtgactccgaagccgagcgaaggccaccgcctaggagcgaatcctttcgtgataaatcaagagagtccctggaggaagcagctaaacgccaggacggcggcctctttaagggaccaccttacccagggtatcctttcataatgatcccagacttaaccagtccctacctgccaaacgggtctttgtcccctacagcacgcaccttacatttccagagtgggtcaacacactactctgcctacaagactatcgaacaccagattgcagtgcagtatctccagatgaaatggccactcctcgatgtgcaggcgggcagcttgcagtcacgacaggctttaaaagacgctagatcaccttcgcctgctcatatagtctctaataaggtgcctgtggtgcagcaccctcaccacgtccatcctttgactcccctcataacatacagcaatgaacacttcacaccagggaaccctccccctcatcttcctgccgacgtagatcctaagaccggcattccgagaccccctcaccctcccgacatctcaccatactacccacttagccccggtaccgtcggacagattccacatcctttgggctggttagtgcctcagcagggacagcccgtgtatcctatcaccaccggtggtttccgccatccgtaccccaccgcactgacagtcaacgcctctatgtcaaggttcccacctcatatggtgcctccccatcataccctgcataccaccgggattcctcaccccgctattgttacccccaccgtcaaacaggaatcctcccagtcagacgtgggaagcctgcactcaagcaaacatcaggactccaaaaaagaagaagagaaaaaaaaaccccatataaagaagccgctcaatgctttcatgctgtatatgaaggagatgagggctaaggtggtggccgagtgtaccttaaaggaatctgcggcgatcaatcaaatcctcgggcgccggtggcatgccctttcaagagaggaacaagcgaaatactatgagcttgcccgcaaagaacgtcaactgcacatgcaattataccctggatggtcagctcgggataactacggcaaaaaaaaaaaacggaagagagacaaacagccaggtgagaccaacgacgccaataccccaaaaaaatgtcgcgctttattcgggttggatcggcagacactgtggtgcaagccgtgccgcaggaagaaaaaatgcgtgcgttatatacaaggggagggatcatgcctgtctcctccaagcagtgacgggagcctgctggatagccccccaccatctcccaatctgctgggcagtccacctagagacgctaagagtcaaacagaacaaactcagcccctcagtcttagtctcaaaccggaccctcttgcccacctctctatgatgcccccccctcccgcgctccttcttgcagaagccacgcacaaagcctccgccctgtgccccaatggcgcgctggatcttcctccggcagctctccaacctgctgcccctagcagctccatcgcccagcctagcacaagctccctgcattcgcattcaagtctcgccggcacccagccccagcctctgtctctcgtgacaaagtcactagagtag

SEQ ID NO: 138201 - DNA, 1860 bp, synthetic construct
  misc_feature 1..1860: note = Description of Artificial Sequence: Synthetic coding sequence
  source 1..1860: mol_type = other DNA
atgcctcaattgaacggcggagggggagatgacttgggcgcaaatgacgaactaatttcttttaaggatgagggagagcaagaagaaaagtcctccgagaacagtagcgccgagcgtgatttggctgatgtgaagtcctcacttgtgaatgagagcgaaactaatcagaacagttcttcagacagtgaagccgagcggcggcctcctccacggagtgaatcctttcgcgacaagtctagagaatcactggaagaagctgctaagcggcaagatggtgggcttttcaaaggacctccttatcccggatatccttttataatgatcccagacctaacctccccatacctcccaaacgggagcctgagccctactgctagaacactgcatttccagtcaggcagcactcactattctgcgtacaagacaatcgagcaccaaatcgcagtgcaatacttgcaaatgaagtggccactgctagacgtccaggccgggtcactgcaaagtagacaggcactgaaggatgcacgctcacccagtcccgcacatatcgtgagtaataaggtgcccgtggttcaacatccacatcatgtgcaccccctgaccccacttattacctactctaatgagcacttcacaccaggcaacccgcctccccacttgcctgctgatgtggatccaaaaaccggcatcccacgcccgccccacccacctgatattagcccttactatcctcttagtcccggaactgtaggccagattccacacccactgggatggctcgtcccacagcaagggcagccagtctaccccatcactaccggtgggttccgacatccctatcctaccgctctcaccgtgaatgcctctatgtctagatttcctccccatatggttccccctcatcacaccctgcatacgaccgggatcccgcacccagccatcgttacgcccacggtgaagcaagaaagctcccagtccgacgtcggctcgctgcacagctccaagcaccaggattccaagaaggaagaggaaaagaaaaagcctcatattaagaagccgctgaacgcttttatgctgtatatgaaagagatgcgggccaaggtggtggcggaatgcaccctgaaggaaagtgctgcaattaatcagatactcggacgcagatggcatgccttatcgagggaggaacaggccaagtattacgaattagcccgcaaagagagacagttgcacatgcagctgtatcctggctggagcgctagggataactacggcaagaagaaaaagcggaagagggacaagcagcccggcgaaaccaacgagcattcagagtgttttctgaacccgtgtctgtcacttccgccaatcaccgacgctaatacccctaaaaagtgtagggccttgttcgggctagatagacagactctttggtgcaaaccctgtaggcgtaagaaaaagtgtgtccggtacatccaaggggagggctcctgcctgagccccccctccagtgacgggtcacttctggactcaccccctccgagcccaaacctgctgggctctcctcccagagacgcaaaaagtcagaccgagcaaactcaacccctttccctctctctgaagcccgaccccttggcccatctgtccatgatgccgccccctcccgcactattgttagccgaggctacccacaaggcatccgccttgtgccctaacggcgccctcgacctgcccccagcggccttgcaacctgctgcaccttccagctccattgcccaaccgtctacttcgtctctccactctcatagtagcctcgcagggacccagcctcaacctctatcccttgtcacaaaatcactggaatag

SEQ ID NO: 138202 - DNA, 645 bp, synthetic construct
  misc_feature 1..645: note = Description of Artificial Sequence: Synthetic coding sequence
  source 1..645: mol_type = other DNA
atggcttttctcaggagcatgtggggagttttgagcgcactgggccgcagcggcgcagagttgtgtactggatgcggaagcaggctgaggtcaccgtttagtttcgtgtatctgccccgctggttttcttctgtgctggcgagctgtcccaagaagcccgtgtcgtcatacttgaggttctccaaggaacagctcccaatcttcaaggcccagaatccagatgcgaaaactactgagctcatcagacgcatcgcccaacgatggagagagctgcccgactctaaaaagaagatctaccaggacgcctatcgggctgagtggcaagtctacaaagaagaaatatcccgttttaaagaacaactgacaccgtcacagataatgtctctggagaaagagatcatggacaaacacttgaagcgtaaggcaatgactaaaaaaaaggaaaaacttaagactgttaaagagaattggaagaatttatctgattcagagaaagagctgtacatccaacacgccaaggaagacgaaactagatatcacaacgaaatgaagtcttgggaggagcaaatgatagaggttggtcggaaggacctgctgagacgcacgattaagaagcaacggaagtatggcgccgaggagtgttag

SEQ ID NO: 138203 - DNA, 660 bp, synthetic construct
  misc_feature 1..660: note = Description of Artificial Sequence: Synthetic coding sequence
  source 1..660: mol_type = other DNA
taagagctctgcacaggatgcggcagcagactgcgtagccccttctctttcgtgtacctgccaaggtggttttcttccgtgctcgcaagctgcccaaagaagccagtcagtagctacttaaggttcagtaaagagcaactgcctatattcaaagcgcagaaccctgacgccaagaccaccgaactgatacgacggattgcacagaggtggcgggagttgcctgactcgaaaaagaagatttaccaggatgcataccgggccgaatggcaggtttataaggaagaaatcagtcggtttaaggaacagctcacccccagccagattatgtccctcgagaaggagattatggacaagcatctcaagaggaaggcgatgacaaagaaaaaggaactaactttactgggtaaacctaagcggcctaggagtgcgtacaatgtgtatgtggctgaacgatttcaggaggccaaaggggactcaccccaggagaaactgaagacagtcaaggaaaattggaagaatctgtcagactcagaaaaggaagtcagcatcaccgtggtgtcactgaaatgcttgctcaggatctcagtgagggaatgcataagggcaagactagatagttgcgaggataacctcgtattgctaataattcaagttttttag

SEQ ID NO: 138204 - DNA, 741 bp, synthetic construct
  misc_feature 1..741: note = Description of Artificial Sequence: Synthetic coding sequence
  source 1..741: mol_type = other DNA
atggccttcttgcggagcatgtggggagtgctgtccgctctcggccgaagtggggctgaactgtgcacaggatgcggctcacgcctccggagtcctttttcctttgtatatttgccaagatggttctcttctgtgctggcttcctgcccaaagaagccagtaagtagctacctcagattttctaaggaacaattacctatcttcaaggcacagaacccagatgctaaaaccaccgagcttatcagacgcatcgcacagcgttggcgcgaactccctgactctaagaaaaagatataccaggacgcctacagggctgaatggcaagtgtacaaggaggaaatctcacgcttcaaagaacagctcacaccaagccagatcatgtcactcgagaaggaaatcatggataaacacctcaagcggaaagccatgaccaaaaagaaagagctgactcttctaggaaagccaaaacgcccccgtagcgcgtataacgtctatgtggctgagagattccaggaggccaaaggggactccccccaggagaaattgaagactgttaaggagaactggaagaatctgtctgactcagaaaaggagctgtacatacaacacgctaaggaagacgaaactcgctaccacaacgaaatgaagtcctgggaggaacagatgatcgaagtgggaagaaaagatctgttacgtcgcactattaaaaagcaacgtaagtacggtgctgaggaatgttag

SEQ ID NO: 138205 - DNA, 1302 bp, synthetic construct
  misc_feature 1..1302: note = Description of Artificial Sequence: Synthetic coding sequence
  source 1..1302: mol_type = other DNA
atgtctattttggcaaagatgggcgattggcaggacagacacgacgggaccagcaacggcaccgctagactcccccagctcggaaccgtcggccaatccccatacacttctgcaccgccactgtcgcacaccccgaacgccgacttccagccaccatacttccccccaccataccagccgatataccctcaatcacaggacccttacagccatgtaaacgacccatattctctaaatccactccacgcccagccccaaccacagcaccccgggtggccagggcaaaggcaatcccaggaatctggactcctgcatacacaccggggtctgcctcatcaattatccggcctggatcctcgccgtgattaccgccgacacgaagacctgttacacgggcctcacgcgctatctagcggcctcggagatctctccatacacagcctgccacacgcgattgaggaagtgccccatgttgaggatcctggaattaatatccccgaccagacagttataaaaaaggggccggtgagtcttagtaagagcaactccaacgctgtctcagccataccaattaataaggacaacctttttggtggcgtagttaaccctaacgaagtgttctgctcggttccgggacggctgtccctgctttcttctacctcgaagtataaagtcactgtcgccgaggtacagcgccgactttctccccctgaatgtctcaatgcatctctgctaggaggcgtgctgagacgcgccaagagcaaaaacgggggtagatccctgagagaaaagctggacaaaatcggattgaacttgcccgcagggcggagaaaggcagccaatgttacactgctaacctccttagtcgaaggagaagcggtccacctggcccgtgactttggctatgtgtgcgaaacggaattcccagccaaggctgtggcggagttcttgaataggcagcactcggaccccaatgaacaggtgacgcggaaaaatatgctgctcgctactaagcagatctgcaaggaattcactgacctgttggcccaggacaggtctcctctgggcaactctagaccgaatcccatcctcgaaccagggatccagtcatgtttaacccacttcaacctgatctcacacggttttggatcacctgccgtgtgcgctgcagttacagcgctgcagaattatctgaccgaggctttgaaggccatggataagatgtacctgtctaacaacccaaatagtcacaccgataataacgcgaagtcctctgataaggaggagaaacatcggaaatag

SEQ ID NO: 138206 - DNA, 1314 bp, synthetic construct
  misc_feature 1..1314: note = Description of Artificial Sequence: Synthetic coding sequence
  source 1..1314: mol_type = other DNA
atgctttggaaactcaccgataacattaaatatgaggactgcgaagacaggcacgacgggacaagcaatggaacagctaggctgccgcagctaggcacagtgggccagtctccatacacaagcgcaccgccactctcacacaccccaaacgccgacttccaacctccatacttccctcctccataccaaccgatatacccccagagccaggatccctattcacatgtgaatgatccctactcactgaaccccctgcatgcccagccacagccacagcacccaggatggccggggcagagacaatctcaggaaagcggcctactccacactcacaggggtttaccccaccaactgagtggtctggatccaagaagggattaccgtagacatgaggatttgttgcacggcccacacgcgctttcttctggactgggtgacttgtcaattcattctctgccacatgccatcgaagaagttcctcacgtagaggatcccggaataaacattccagaccagacagttatcaagaaagggccagttagcctctctaaatcaaactcaaatgctgtgtcagccattcctatcaataaggataatctgtttggcggggtcgtgaatccgaatgaagttttttgcagcgtcccgggtagattgtctctgctgagtagtacgtccaagtacaaggttactgtcgcggaggtgcagagaagactgtcaccgccagagtgcctcaatgccagtctgttggggggagtgctcagacgggcaaagagtaaaaacgggggccgcagtctcagagagaaactagataagatcggcctgaaccttccggccggacgtcgtaaggccgcaaatgtaactctcctgacatcgctggtggaaggcgaggcagttcacctggctagagactttggttatgtgtgtgaaactgaattccccgcgaaggctgtcgcggagttcctgaaccgacagcattccgatccaaacgagcaggtcacccgcaaaaacatgctcctggctaccaagcagatatgcaaagagttcacagacttgcttgcacaagaccggagtccacttggaaatagcagacccaatccaatcctggaaccaggcatacagagctgcctgacccactttaacttgatctctcacgggttcgggtccccagccgtatgcgcagcggtgacggccctacaaaactacctgactgaagctttgaaggctatggacaagatgtacctgtccaacaatcccaactcccacaccgacaacaacgcaaagtcttcagacaaggaggaaaagcatagaaaatag

SEQ ID NO: 138207 - DNA, 1296 bp, synthetic construct
  misc_feature 1..1296: note = Description of Artificial Sequence: Synthetic coding sequence
  source 1..1296: mol_type = other DNA
atgttagtccattcgttttctgctatggatcgacacgatggtacctccaacggtactgcccggcttccccaactcggcacggtggggcagtcaccttacacatccgctccccctctttcacatacaccaaacgcagactttcagcccccctactttccgcctccttatcagcctatctatccacagagtcaggatccgtactcacatgtcaatgacccatactctctcaatcctctccacgctcagccccagcctcagcatcccggctggcccggtcagcgacagtcccaggaatcaggactcctgcacactcaccgcgggttgccccatcagctgagcggcctggatcctcggcgggactatagaaggcacgaggatctgctacacggtccgcatgcgctctccagcgggctgggtgatttgtccattcacagccttccacacgcaatcgaggaagttccccatgtcgaggaccccgggatcaacatacctgaccagactgtgattaagaaagggcccgtgagcttgagcaagtcgaactcaaatgccgtttcagcgatccccataaacaaggataacctgttcgggggtgttgtgaaccctaatgaggtcttctgttccgtgccgggcagactcagcctgctctcgagtacgtccaagtacaaagtgaccgtcgctgaggtacagcgtaggctaagcccacccgagtgtctgaacgcatcgctacttgggggagtgttgcgccgggccaaaagtaaaaatggcggccgcagcctgagagaaaaacttgataagataggacttaacctaccagctggaagacgcaaggctgcaaatgtgacattacttacgtccttggtggagggagaggctgtgcatttggctagggatttcggctatgtttgtgaaaccgagttcccagcaaaggccgtcgcggagtttctaaatcggcaacactcagacccaaatgagcaggtaactcgcaagaacatgctgctcgcaactaaacagatatgcaaagagtttaccgatctgcttgcgcaagatcgttcgcctctgggaaactcccgaccaaacccaatcctggaaccaggcatacagagttgcctaacccactttaacctcatctcccatggattcggctcccccgcagtatgtgctgcggtgacggccttgcagaattacctgacagaggcccttaaggccatggataagatgtatctctccaacaacccgaacagccacactgataataacgctaaatcttccgataaagaggaaaaacatcgtaagtag

SEQ ID NO: 138208 - DNA, 1320 bp, synthetic construct
  misc_feature 1..1320: note = Description of Artificial Sequence: Synthetic coding sequence
  source 1..1320: mol_type = other DNA
atgaagatgttatggaagttgaccgacaacatcaagtacgaggattgtgaggaccggcacgatggcacttcgaatgggactgccaggttgccccagctcggtacagtgggccagtctccttatacttcagcaccacctctgagccatactcccaacgctgactttcagcccccttattttcctccaccttaccagcctatataccctcagtctcaggatccctactcccatgtgaatgacccctattccctcaacccgcttcacgctcaacctcagccacagcaccccggctggcctgggcagcgccagtcacaggagtcaggactgctgcacactcatcgcgggctcccccatcagctgtccggcctggatccccgacgcgattaccgaagacacgaagacttactgcacggtccccacgcgctttcttcaggtcttggagatttaagcatacacagccttccccatgcaattgaagaggtgcctcacgtggaagatccagggataaacattccggaccagaccgtgatcaagaaaggccccgtgtctctctccaagtctaatagtaatgccgtcagcgccatccccatcaataaggacaacctgttcggaggcgtcgtgaatcctaatgaagtgttctgcagcgtgcctggcaggctgtctttgctctcttccacttctaagtataaggtaactgtagcagaagtgcagaggcgcttgagtccaccagagtgcctgaacgcatcactcttggggggagtgcttcggagagctaagtcgaaaaatggcggcagatccttacgtgagaagttagacaaaatcggactcaatctgcctgctgggcgccgcaaagctgcgaatgtgacactccttacaagcctggtggaaggcgaggctgtgcacttagcccgggatttcggttacgtgtgcgagaccgaatttcccgccaaagcagtagctgaatttctcaaccgtcaacacagtgacccaaatgagcaggtcacccgtaagaacatgttgcttgccactaagcagatctgcaaggagtttaccgacttgttggctcaggaccggtcacctctggggaactcccgccccaatccgatcttggagccaggaattcagagttgcctgacacatttcaacctgattagtcacggttttggtagcccagcagtatgcgcggcagtgacagctcttcagaattacttgactgaggcactaaaggccatggataagatgtacctttcaaacaatccaaactcccatacggataataacgccaagtccagcgataaagaggaaaaacaccgaaagtag

SEQ ID NO: 138209 - DNA, 987 bp, synthetic construct
  misc_feature 1..987: note = Description of Artificial Sequence: Synthetic coding sequence
  source 1..987: mol_type = other DNA
atgctttggaagctaaccgataatattaagtacgaggattgtgaagatagacatgatggaacttctaacggtacagctcgactcccacagcttggaacagtagggcaaagcccttataccagtgcgccacccttgtctcacacccctaacgctgattttcagcccccttacttccccccaccataccaacctatctacccccagtcgcaggacccttactctcacgtgaacgatccgtactccctaaatcccctgcatgcacagccccaaccacagcacccgggctggccaggccagagacagtcacaggaaagtggactgcttcacactcacagggggctgcctcaccaattatcaggcttggacccacggcgagattaccgtcggcacgaggatctgctccacggcccacatgcattgtcttcaggactaggggacctgagcatccactcattgccccacgctatcgaggaagtcccacatgtggaggatcctggcatcaacatacccgatcaaactgttatcaaaaaaggtccggtgtctttgtctaagtctaacagcaatgctgtttcagccattcctatcaataaagacaacctgttcgggggcgtggtgaacccgaacgaggtcttctgctccgttcctggaaggctgagcctcctgagctcaacgagcaagtacaaagtcaccgtggccgaggttcaacgtagactgtctccccccgagtgcctaaacgcctccttgttaggcggggtgctccgcagggccaaaagcaagaatggtgggaggtccctgcgggagaaactggacaagatcggccttaatctgccggccggccggcgcaaagccgccaacgtaacactgttaacttcgctggtggaagaccgatacgctaagtcttcacccacatgctggttgcgtactgacctgccctggggaactcatgggcctaccccctcttggtcacctgcctcccgggccgcctag

SEQ ID NO: 138210 - DNA, 1314 bp, synthetic construct
  misc_feature 1..1314: note = Description of Artificial Sequence: Synthetic coding sequence
  source 1..1314: mol_type = other DNA
atgctttggaaacttaccgacaatattaagtacgaggattgtgaggatagacacgacggtacctccaacggtaccgcccgcctgccccagctcggtactgttggacagagtccgtatacctctgcgccaccactgagccatacaccgaatgcagactttcagcccccctacttcccccccccgtaccagccaatctatccacagtcacaggacccttactctcatgttaatgacccttactcactgaatcctctacacgcgcagccacagccccagcacccagggtggccgggacagagacagagtcaagagagcggacttttacatacccacaggggactccctcaccagttaagcggattggaccctcggagagattaccggcgccatgaggacctcctgcatgggccccacgccctgagcagtgggcttggagacctgtcgattcacagcctgccacacgctatcgaggaagttcctcacgtagaggatccgggaattaatatcccagatcagacggtcattaagaagggacccgtgagtctgagtaagtccaattcaaacgcggtctcagcaattcctatcaacaaagataacttatttgggggggtagtgaatcctaacgaggtgttctgtagcgtgcccggaagactgtctctcctaagcagtacatccaagtataaggtcacagttgccgaggtgcagagaagactttcaccccccgaatgtctgaacgccagtctgctgggaggggtgttgaggcgggccaaatcgaagaatggcggacgatctcttagggaaaagctagataagattggcctgaacctgcccgccggcaggcgcaaggccgcaaatgtgaccttactgactagcttagttgaaggagaggcagtgcaccttgcacgtgactttgggtacgtctgtgaaactgaattccctgcaaaggcggtcgccgagtttctgaatagacagcatagcgatccgaacgaacaagttacccgaaagaacatgctgctagctactaagcagatatgtaaggagtttacagatctgctagcgcaggaccggtcccccctggggaatagtcggccaaatccgatccttgaacctggcatccagagctgcctcacccactttaacttgatctcccatggcttcggcagccctgccgtgtgtgccgctgttaccgccctccaaaattatctgactgaggccctcaaggctatggacaagatgtacctgtccaacaacccaaactctcacaccgataacaacgccaagtccagtgacaaagaagagaagcatagaaaatag

SEQ ID NO: 138211 - DNA, 1410 bp, synthetic construct
  misc_feature 1..1410: note = Description of Artificial Sequence: Synthetic coding sequence
  source 1..1410: mol_type = other DNA
atgcacagtccacctagagatcaagccgccatcatgttgtggaaattggttgaaaacgtcaagtacgaagacatctacgagatgctggtgcacacttatagttcgatggatcgccacgatggtgtgcctagccactcctcacgtctctcacagctcggcagcgtgtcccaggggccttatagcagtgcgcccccactgagtcacactcctagcagcgatttccagcccccttactttccaccaccttaccagcccctgccataccatcagtcccaagatccctactcacacgtgaatgatccctatagtcttaaccccctgcaccaaccccagcaacacccgtggggccaacgacaaagacaggaagtaggcagtgaggcaggcagcctgcttccccagccgcgcgcagccctgccgcaactgtcgggccttgacccacgccgggactaccacagcgtgcggagacctgacgtcctgctccacagcgctcaccatgggctagacgccggcatgggggacagcctgtcattgcatggcttggggcaccctggtatggaggacgtacaaagcgtggaagatgcaaacaacagcggcatgaacctgcttgaccagagcgttataaagaaagtgccagtccctcccaaaagtgttacatcgctaatgatgaacaaagatggcttcctgggagggatgagtgttaatacaggggaggtgttttgctctgtcccggggcgtttatcccttttaagctcgacaagcaaatacaaggtcaccgtcggcgaggtccagaggagactttcacctccagagtgcctgaacgccagccttctaggcggggtcctgcgtcgcgctaagtccaaaaatgggggacgctcactgcgggagcgacttgaaaagatcggcctgaatctcccagcagggaggagaaaggctgcaaacgtcaccctgctgaccagcctcgtggagggggaagctgtccatctggcacgagattttggctatatatgtgagaccgagtttcctgctaaagccgtgtctgagtacctcaacaggcaacacaccgatccttcggatctgcatagcagaaagaatatgcttcttgccaccaagcagctctgtaaggagttcacagaccttctagctcaagaccgtaccccgatcggcaattccaggccttctcccattcttgaaccgggtatccagagctgtcttacacacttctctctgattacccacggcttcggagcgcccgccatctgtgcagccttgacggctctgcaaaattatctgacagaagccttgaagggaatggacaaaatgtttcttaataatacaactactaaccgacatacgtccggcgagggcccaggttccaaaacgggcgacaaggaggagaagcatcgaaaatag

SEQ ID NO: 138212 - DNA, 597 bp, synthetic construct
  misc_feature 1..597: note = Description of Artificial Sequence: Synthetic coding sequence
  source 1..597: mol_type = other DNA
atgttgtggaagctcgtggagaatgtgaaatatgaggacatctatgaaatgcttgtccatacctactccagcatggaccggcacgatggagtgcctagtcacagcagtcggctctcccagctggggtccgtgagccagggtccatactcttccgcacctcccctcagccacaccccatcgagtgattttcagcctccgtattttccccccccataccaaccccttccgtaccatcagtcccaagatccctattctcatgtgaatgatccctatagtctcaacccacttcaccagccacagcaacacccctgggggcagcgacagcggcaggaggtcggctctgaggctgggagcctgctaccccaaccaagagccgcattgccccagctgtcgggcctggatcctcgccgcgattatcattcagtacgtcgcccggacgtcctcctgcatagtgctcatcacggcctggacgctggcatgggggacagtctgtcgctgcacggtctggggcaccccggcatggaggacgttcagagcgtggaggatgcaaataactccggaatgaatctcctggaccagagcgtcataaagaaatag

SEQ ID NO: 138213 - DNA, 1383 bp, synthetic construct
  misc_feature 1..1383: note = Description of Artificial Sequence: Synthetic coding sequence
  source 1..1383: mol_type = other DNA
atgcatagcccaccccgtgaccaggcagcaatcatgctctggaaacttgtggagaacgtgaagtacgaggacatttatgaggatcggcacgatggcgtcccttcacacagctccagactaagccagctcggatccgtgagccaaggcccctatagtagtgctcctccactgagccacacacctagctccgactttcagcctccttattttccgccgccctaccagccactgccataccatcagagccaggatccatattcacatgtcaatgacccctactccctgaacccactacatcagccccagcaacacccctgggggcaaaggcagcggcaggaggttggctcggaagcaggatccctgctgccccaacctcgggctgccctgccgcaactttccgggcttgatcctcggagagattaccactccgtgaggcgccccgatgtgctgctgcattctgcccaccatgggctcgatgccggaatgggagattcccttagcttgcatggcctaggacacccaggcatggaggatgtgcagtccgttgaggacgccaataactcaggtatgaacctgctggatcagagcgtgatcaaaaaagtgcctgtcccgcctaagtcagttaccagcctgatgatgaacaaggatgggtttctgggaggcatgtcagttaacaccggtgaggtcttctgctccgtgcctggacggctgagcctgctgtcttcgacgtcaaagtacaaggtaacagtgggtgaggtccagcgtcggctgagtccacctgagtgtcttaatgcttctctcctgggcggagtcttgcgccgggctaagagcaagaatggggggcggtctctcagagaaaggctcgaaaaaatcggtctgaatctccccgcaggcagacgcaaagctgcaaatgtcaccttactgaccagtttagtggaaggcgaggcagtacacctggcaagggattttggttatatctgtgaaacagaatttcctgcgaaggccgtcagcgaataccttaacaggcagcacacagatccttccgatctgcattccagaaagaatatgctccttgcaactaaacaactgtgtaaggagttcacagatctgctggcccaggataggacgccgatcggcaatagtcggccctcccctatcctggagccgggcatacaaagttgtcttacacatttttctctgattacccacggctttggcgctcctgccatttgcgccgcgctgaccgccttgcagaactacctgacagaagccctgaaagggatggataaaatgttcctgaacaacactacgaccaacagacacactagcggggaaggtccaggtagtaagactggagacaaagaggagaagcacagaaagtag

SEQ ID NO: 138214 - DNA, 1359 bp, synthetic construct
  misc_feature 1..1359: note = Description of Artificial Sequence: Synthetic coding sequence
  source 1..1359: mol_type = other DNA
atgagcactacgttcccagggcttgtccacgacgccgaaattcggcacgatggctccaattcctaccgtctgatgcagttaggttgtctggagtcagttgcaaattcaacagtggcctattcttcctccagccccctcacgtactccaccacaggaacggagttcgccagcccatatttcagcaccaatcaccagtacacccccctccatcatcaaagtttccactatgagttccaacacagtcaccccgctgtaacgccagacgcctacagcctgaactcccttcaccatagtcagcaatattatcaacagatacaccatggagagcccacagacttcattaatcttcacaacgctcgtgcccttaagagctcatgcctggacgagcagaggcgtgagctgggctgtctcgacgcctatagaagacacgacctctcattgatgtcccatggaagccagtacggcatgcaccctgatcagcgcctgctacctgggccctccctgggtttggctgcagccggggctgatgacctccagggctcggtcgaagcgcaatgtggactggtccttaatggccagggaggagtcatcagacgtggagggacctgtgttgttaatccgaccgacttgttctgctcggttcccggcaggctgagcctactgtccagcacctccaaatacaaagtcacaattgctgaagtgaaaaggaggctctccccgccagaatgtctcaacgccagccttctgggaggcatcctccgtagagctaagagcaaaaatggcggccgctgcctgagggaaaagctggacaggctaggtctgaatttgcccgccggccggaggaaggcagccaatgtgacactgctgactagcttggtcgaaggtgaggctttacatctagcaagagactttgggtacacttgcgagacggaattccccgccaaagcggtaggcgaacacctggcgcgtcagcacatggaacagaaggaacagaccgcccggaagaagatgattttggcaacaaagcagatttgcaaagagtttcaggatctgctttcgcaggatcgctctccactaggcagttccagaccaaccccaatcctggatttagatatccagagacacttaacgcatttttccctgattacccatggctttggaacgcctgctatttgcgccgctttgtccacatttcagacggtactgtccgagatgctcaactatctggagaagcacacaacccacaaaaacgggggcgcagcagactccggccagggtcacgccaatagcgagaaagcccccctgagaaaaacatcagaggcggcagtgaaggaaggaaagacagaaaaaacagactag

SEQ ID NO: 138215 - DNA, 1329 bp, synthetic construct
  misc_feature 1..1329: note = Description of Artificial Sequence: Synthetic coding sequence
  source 1..1329: mol_type = other DNA
atgcttgtccatacttattccgcaatggaacgtcctgacggactgggggcagccgcgggcggcgcccgcttaagttctctgccacaggcagcatatgggccagccccacccttgtgccacactcccgctgccaccgctgccgctgagttccagcccccatactttccacctccatatccacagccaccactcccatatggccaggcaccggacgctgcagccgccttcccacaccttgctggcgacccttatggaggtttggctcctttagctcagccccagccgccgcaagctgcttgggctgctcctcgggctgctgctcgggctcatgaggagccacccggcctcctggcccccccagctcgcgctctcggcctggatccccgcagggattacgccaccgccgtacctcgtctgctgcacggactcgccgacggcgcacatggactggccgacgcaccactaggattacctgggcttgctgccgctcctggcctcgaggacctgcaggccatggatgaacctggaatgtccttgctcgatcaatctgtgatcaaaaaggttcctatcccttccaaggcatcgtctctgtcagcgttgtcccttgcaaaggactccttggttggcggcatcaccaaccccggcgaggtgttctgttccgtgcctgggcggctctcactccttagctcaacctccaagtataaagtcacagtcggtgaagtccagcggcgcctctccccccctgagtgcctcaatgcatccctacttgggggagtgctcaggcgagccaagtccaagaatgggggcagatgtctgcgcgaaagacttgagaaaatcgggctgaatctcccggcaggacgccgcaaagccgctaacgtgacactgctgacatccttggtggaaggggaagcggtgcatttagcacgcgactttggctatgtgtgtgaaactgagttccctgctaaagcggccgcggagtatctctgtaggcagcacgccgacccaggcgaactccacagcagaaaaagcatgctgctcgctgcgaaacagatttgcaaagagtttgcagacctgatggcccaggataggagcccccttggaaatagtcgcccagcccttatcttggaaccaggcgtgcagtcctgtctgacacatttctctttgatcactcacggcttcggcggacccgctatctgcgcggcattgaccgctttccaaaattacctcctcgaaagtctcaaagggcttgacaagatgttcctttcttcggtaggctctggccacggagagactaaggcctccgaaaaagatgctaaacaccgcaagtag

SEQ ID NO: 138216 - DNA, 1353 bp, synthetic construct
  misc_feature 1..1353: note = Description of Artificial Sequence: Synthetic coding sequence
  source 1..1353: mol_type = other DNA
atgttatggaagattactgacaacgttaagtatgaagaagactgcgaggaccgtcacgatggatctagtaatggtaatccacgagtacctcatctttcatccgcaggtcagcatctgtattctcccgcgccacctctctctcatactggcgtcgctgaatatcaaccccctccttattttccccccccgtatcagcaactggcatattcacagtccgccgacccctactcccatcttggcgaggcttacgcagcggcaataaatcccctacaccaacctgcccccacaggcagtcagcagcaagcctggcccggtaggcagagccaggaaggggctgggctgccaagccatcacggccggcccgctgggcttctcccacacctgagtgggttggaggcaggagcggttagtgcaagaagagacgcctatagaagatctgacctgttactgccacatgcccacgctctagatgccgccgggctcgcggaaaacctcgggctgcacgatatgccccaccaaatggacgaggtgcagaatgttgacgaccagcacctcctgttgcacgatcagactgttatcagaaagggcccaattagcatgactaaaaacccattgaatctcccttgccaaaaggaattagtgggagctgttatgaaccccactgaggtgttctgcagcgtgcccgggagactgtcccttttgagttctacctcaaaatataaggtaacggtggccgaggtgcagcggaggctttcgccaccagaatgcctgaacgcctccctgctaggtggtgtcctgcgtcgcgccaaatccaagaatggtggaagaagtctgagggaaaaactggacaaaatcggtctgaacttacccgccggccgtcgaaaagcggcccatgtgacattgcttacttccctcgtggaaggagaggctgtgcacctcgctcgggactttgcatacgtttgcgaagcggaattccctagcaaacccgttgctgaatatctgaccaggcctcatctgggtggtcgtaatgagatggcagcaagaaagaatatgttgttagctgcccaacagctgtgcaaggaatttacagaactcctgtctcaggaccggacacctcacggaactagccggctggcaccagtcttggagactaatatccagaattgcctatcccactttagcctaataacccacgggtttgggagccaggcaatctgtgctgccgttagtgccctccagaactacatcaaagaggctcttattgttattgacaaatcttatatgaatcccggtgaccagagcccggccgacagcaacaagactcttgagaagatggaaaaacatcgcaagtag

SEQ ID NO: 138217 - DNA, 357 bp, synthetic construct
  misc_feature 1..357: note = Description of Artificial Sequence: Synthetic coding sequence
  source 1..357: mol_type = other DNA
atgttcttacaagatcgccacgatgggtcttcaaacgggaaccctcgcgtaccccacctttcaagtgcagggcagcatctatactctccagctcctcctctgtcacatacaggggtggccgaataccaacctcccccttattttcctcctccgtaccagcagcttgcctacagtcagtcagctgatccttatagccacctgggtgaagcctacgcggccgctatcaacccactccatcagccagccccaaccggtagccaacaacaggcctggccaggtcggcaaagccaggaaggagccggcttgcctagtcaccacgggaggcctgctgggcttctgccgcatctgtcaggatag

SEQ ID NO: 138218 - DNA, 846 bp, synthetic construct
  misc_feature 1..846: note = Description of Artificial Sequence: Synthetic coding sequence
  source 1..846: mol_type = other DNA
atgccccatcagatggatgaagtccaaaatgtcgacgaccagcatctgctgttgcatgaccagacggtgatccgcaaagggcctatcagcatgaccaagaatcctctgaacctgccctgtcagaaagaactggtgggcgccgttatgaatcctaccgaagtattctgctccgttcctgggcgactctctttactgtcgtccaccagtaaatacaaagttactgttgcagaagtgcaacggcgcttgtctccccctgaatgcctgaatgcatcgctgctgggaggcgttcttcgcagagccaagagtaaaaatgggggcagatcacttagggagaaactcgataagattgggctgaaccttccagctgggagacgaaaggctgcacacgtgactttgttgaccagcctagtggagggcgaggctgtccatctggcacgagattttgcttatgtgtgcgaggccgaattcccgtcaaagcccgtggccgagtacttaactcgcccccacctcggcgggcggaatgagatggctgcacggaaaaatatgcttctcgcagcccagcagctgtgtaaggagtttacggaacttctatcccaagacagaacgccgcatgggacgtctaggttagcccctgttctggaaactaacatccagaactgcttgagtcatttttcgctgataactcatggttttggctcacaggctatttgcgccgccgtgtcggctttacagaattatatcaaagaggccctgattgtgattgataaatcgtatatgaatcccggcgatcagtcacctgccgatagtaataagaccttagagaagatggagaagcacaggaagtag

SEQ ID NO: 138219 - DNA, 1041 bp, synthetic construct
  misc_feature 1..1041: note = Description of Artificial Sequence: Synthetic coding sequence
  source 1..1041: mol_type = other DNA
atggccgcgtctgggaaactaagcacatgccggctgcctcccttacccacaatcagagaaataatcaagctgctccggttgcaggcggccaaacagctgagccagaattttctcctggatcttagactgacagataagatcgtacgcaaagccggcaatctgacaaatgcctacgtatacgaagtggggcccggacccggcggtattacaaggtctatccttaacgccgatgtagccgagttgcttgtggttgaaaaagatacacggttcatccctggcctccaaatgctgagcgacgccgctccaggtaaactccgaatcgtgcacggtgacgttctcacattcaaagtggaaaaagcgttctccgagagccttaaacgaccctgggaagacgacccgcccaacgtgcatatcattggaaacttgccattttccgtgtccaccccactgattatcaagtggcttgagaatatttcttgcagagacggcccttttgtttatggacggactcagatgacgttaacttttcaaaaagaggtggcagagcggttggcagcaaacactgggagtaagcaaagaagtaggctgtcggtaatggctcagtacctttgtaacgtcagacacatattcaccataccaggacaagcgttcgttcccaagcccgaggtggatgtaggcgtcgtacactttacacccttaatccagccaaagatagagcagccttttaaactggtagagaaagtagtgcagaatgtgttccagtttcgtcgaaagtactgccatcgaggcttgcgtatgctttttccggaggctcagagactggagtcgactgggaggcttctggagctagccgatatagacccgacactgaggccacggcagctgagtatttcccacttcaagagtctgtgcgacgtctaccgaaaaatgtgtgatgaagatccccagctgtttgcatataacttccgcgaggagctaaagcgtcggaaatctaagaacgaggaaaaggaagaggatgacgcagagaattacaggctctag

SEQ ID NO: 138220 - DNA, 1728 bp, synthetic construct
  misc_feature 1..1728: note = Description of Artificial Sequence: Synthetic coding sequence
  source 1..1728: mol_type = other DNA
atgagccatgccgcagagcctgctcgggatggggtggaggccagcgcagagggtccacgggcagtgttcgtacttcttgaggagcgtcgccctgctgattcagctcagctcctttctctgaattccctgttgcccgaatctggaatagttgccgatatcgaactggaaaatgtcctagatcctgactccttctacgaactcaagagtcagcctctgccactccgcagcagtctgccgatcagtctgcaggccactcctgctactccggcaaccctgtcagctagcagctccgccggtgggtctcgcacccccgccatgagtagctcatcttccagcagggttttgctgagacagcagctgatgagggcccaggctcaggaacaggagcgacgcgaacggcgtgaacaggccgcagccgcacctttcccatcccccgcccctgcttctcccgccatctctgtggtcggagtaagcgcgggcggccatacactgtctcgcccccctccagctcaagtgccaagggaggtcctgaaggtgcaaactcatcttgagaaccctacaaggtaccacctccagcaggcccgtaggcagcaggtaaaacagtatctgtcaaccaccttggggcccaaactcgcaagtcaggcgttgaccccacccccgggaccagccagcgcccagccactccctgcacccgaggccgcccacactaccggccccacgggatcagcacctaattctccgatggctctgttgaccatcgggtcgtcaagcgagaaagagattgatgatgttatcgacgagattatttcccttgagagcagttacaacgacgagatgctgtcctacctccccgggggaacgactggtctgcaactcccctccactcttcccgtgtctggcaacctgctggacgtttattcttcacaaggcgttgccacgccagctatcactgtgagcaatagttgtccggctgaactccccaatataaagcgtgaaatttctgagacggaagccaaggcactgctgaaagagagacagaagaaagacaatcataatcttattgagcgacggcgccgcttcaatatcaacgataggataaaggaactgggcacactgataccgaagagcagcgatccagaaatgagatggaataaggggaccattttgaaggcctccgtggactatatccggaagctgcagaaggagcaacagaggagcaaagacctggagagccgacagcgcagccttgagcaagcgaatagatcgctgcagctccggatccaggaattggagctgcaggcacagatccacggtttgcccgtgccgcccactccaggcctcctgagcctggctacaacatcagcttcagactctctcaagccagaacagctggacattgaggaggagggccgaccaggcgctgctacatttcacgtggggggcggacctgcacagaacgccccacatcagcaaccaccagcccccccttcggatgccctgttggatcttcactttccatccgatcacctgggggacctgggagacccttttcatcttggtctcgaggacatccttatggaagaggaggagggggtagtggggggtctgtctggcggtgcattgagcccactgcgggccgcatcagatccccttctgtcgtccgtgtctccggcggtatcaaaggccagctcacggagatccagcttttccatggaagaggagtcctag

SEQ ID NO: 138221 - DNA, 1509 bp, synthetic construct
  misc_feature 1..1509: note = Description of Artificial Sequence: Synthetic coding sequence
  source 1..1509: mol_type = other DNA
atggcttgggccctgaagctgccgctggctgacgaagttatcgaaagtgggctggtacaggacttcgacgcatctctcagtggcattggacaagagctcggagccggtgcctactccatgtctgatgtgctggcactacctatctttaagcaggaggagagttcacttccccccgataatgaaaataagattctgccgttccagtatgtgctgtgtgccgcaaccagcccggctgtgaaattacacgatgagaccctcacctatttgaatcaaggacaatcatatgaaattcgcatgctagacaaccgaaagctgggcgaactgcctgagattaacggtaagttggttaaatctatctttcgggtcgtcttccatgaccggcgcttgcaatataccgaacatcagcagctggagggttggaggtggaaccgtccgggcgatcgaatcctggacatcgacattcctatgtcagtgggcataattgatccccgtgcaaacccaactcaactgaacacggtcgaattcttgtgggatcctgccaaacgcaccagcgtcttcatacaggtgcattgtatatccaccgagttcaccatgcgcaagcacggcggggagaaaggggtccccttccgcgtccaaatcgacacttttaaagagaacgaaaatggggaatacacagagcatttgcatagcgcaagctgtcaaatcaaagtcttcaaaccgaagggtgctgaccgaaagcagaagactgacagagagaaaatggagaaaagaacgcctcatgagaaagagaagtatcagccctcctatgagaccaccatattgaccgaatgtagcccgtggcctgaaataacatacgtcaacaattcccctagcccaggcttcaattctagccattcaagctttagtctgggagagggaaacggatcccctaaccaccaaccagagcctcctcccccagtgaccgacaatctgctgccaacaactacaccacaggaggctcagcagtggctacatcgcaatagattttctacttttacacggctgtttaccaacttcagcggggctgatctgctgaaattgacccgggatgatgtcatccagatttgtgggcctgccgatgggatccggctgtttaacgcgttaaaaggccgtatggtgcggccccggttaaccatctatgtctgccaagagagtctgcagctccgggagcagcagcaacagcaacagcaacagcagcagaagcacgaagatggagacagcaacgggactttctttgtctatcacgccatatacctggaagaactgacggccgtggaattgactgagaaaatcgcacaactattcagcatatccccttgtcaaattagtcagatttataagcaggggcctactggaatccacgttctgatctctgatgagatgattcaaaatttccaagaagaagcatgtttcattttggacactatgaaggctgaaactaacgattcctatcatataatactcaagtag

SEQ ID NO: 138222 - DNA, 1356 bp, synthetic construct
  misc_feature 1..1356: note = Description of Artificial Sequence: Synthetic coding sequence
  source 1..1356: mol_type = other DNA
atggcatgggccctaaagctccctctcgccgacgaagttattgaaagcgggctcgtacaggacttcgatgcctcgctcagcggaatcggacaggagttgggcgccggcgcctactctatgagtgacgttcttgcgctgcctatttttaaacaagaggaatcctccttgcctcctgacaacgagaataaaatccttccatttcagtacgtgctgtgcgcagccacctcccccgccgttaagctccacgatgaaaccctcacatacctgaatcaggggcagagttatgagattcgtatgctcgataaccggaagctgggcgaacttccggaaattaacgggaagctggttaagtccatattccgcgtcgtttttcacgatcgccggttgcaatacaccgagcaccagcagctggaagggtggagatggaaccggcccggcgatcggatcttagatatagacattccaatgtcagtgggcataatcgacccccgtgcgaacccgacacagctcaacaccgtggaatttctatgggatccagcgaagcgtacaagcgtattcatacagcccaagggagcggacagaaagcagaagacagatcgagagaaaatggagaagaggactccgcacgagaaggagaaataccaacccagctacgaaaccaccatcctgaccgagtgcagtccatggcccgaaatcacctacgttaacaattccccatcccccggctttaacagctcccacagcagcttctcattgggagagggcaatggatcccccaaccatcaacccgagccccctcctcctgtgacagacaaccttctgccgaccactacgccgcaggaagctcaacagtggttacaccgaaaccgcttcagtacgttcactcgcctattcactaatttttccggcgcagacctcctgaagctgacgcgcgatgacgtcatccagatttgcggacctgctgatgggatccgcctgtttaacgccctcaaggggcgaatggtacggccaaggctcaccatctatgtctgtcaagagtccctgcagttacgcgagcaacagcaacagcagcagcagcaacaacagaagcatgaagatggggacagcaatgggaccttctttgtctatcatgctatatacctggaggaactgactgccgtggagctgaccgagaaaattgctcaactcttctcaatctctccttgccagatctctcagatttataagcagggccccaccggcatccacgttctgatctctgacgagatgatacagaattttcaggaagaggcttgctttattctggacacgatgaaggcagagactaacgatagctaccacatcattttgaagtag

SEQ ID NO: 138223 - DNA, 1353 bp, synthetic construct
  misc_feature 1..1353: note = Description of Artificial Sequence: Synthetic coding sequence
  source 1..1353: mol_type = other DNA
atggcatgggctctcaagcttcctctggccgatgaagtgatcgaaagcggtttggttcaggattttgatgcttccctatccggaatcggccaagagctgggcgccggcgcttactcaatgtcagacgtgcttgccctccctatcttcaagcaggaggagagttcactgccaccagataatgaaaataagatccttccctttcaatatgtcctttgtgctgcgacaagccccgccgtcaagcttcacgacgaaactttaacctacctcaatcagggccagtcttatgaaatccgaatgttggataatcgcaaactcggcgagctgcccgagatcaacggtaaattagtgaagagcatttttcgggttgtattccatgaccgacgcctccagtacacagagcatcagcaattggagggatggcgatggaataggcccggagaccggatcctggatatcgatatcccgatgagcgtgggtatcattgaccccagggctaaccccacccagcttaacacagttgagttcctgtgggaccccgcaaagcgcacctctgtgtttatccagcctaagggagccgatagaaagcagaaaaccgatcgagaaaagatggagaagaggacacctcatgagaaggagaagtaccaaccctcttacgagactaccatcctgaccgagtgttcaccatggccagagattacgtatgtgaacaactcaccttcccccggctttaatagttctcactcttcgttctctttaggcgaaggtaacggcagcccaaaccatcagccggagcctcctccccccgtgaccgataacttgctgcctacaactaccccccaagaagcccagcaatggctgcatcggaaccgatttagcacatttaccagattgtttaccaacttctccggcgccgacctgctgaagctgacacgggacgacgtgatacagatttgcggtcctgccgatggcatcaggttgtttaacgctttgaaaggccgaatggtgcgcccgcggttgactatttacgtgtgccaggagagcctgcagttgagagagcagcaacagcagcagcagcagcagcagcaaaaacacgaggacggagattcaaacggcaccttttttgtctaccacgccatttatctggaagaactcacagccgtggagctcactgagaaaatcgcccagctgtttagcatttcaccctgtcaaatctcccagatttataagcagggaccaactgggatccacgtgttaatttctgacgaaatgattcagaattttcaggaagaagcctgctttatcctggacacaatgaaggaaaccaacgacagttaccacatcatacttaaatag

SEQ ID NO: 138224 - DNA, 1440 bp, synthetic construct
  misc_feature 1..1440: note = Description of Artificial Sequence: Synthetic coding sequence
  source 1..1440: mol_type = other DNA
atgctgttctggcatactcagccggagcattacaaccagcataatagcgggagttacctccgtgatgtgcttgcactacccatctttaagcaggaggagcctcagctttctccagagaatgaggcacgtttgccacccttacaatatgtgctgtgtgccgccacctcacctgccgtgaagttacacgaggagacactgacctatcttaaccagggccagagctacgaaatcaggctattagaaaatcggaagctcggcgacttccaggacctgaatactaagtacgtgaagagcatcataagagtagtcttccacgataggcgcctgcagtatactgaacatcagcaattggaaggatggcgttggtcgaggcccggggataggattttggacattgatattcctctctctgtgggaattctggacccacgggccagccctacccaacttaatgccgtcgagttcctttgggatcccgctaagagggccagcgccttcattcaagtacattgcatttccacagagttcactccgagaaaacacggaggagaaaagggcgtaccctttcgagtacagatcgacaccttcaagcagaatgaaaatggcgagtacactgaacatctacactctgcttcctgccagattaaagtgttcaaaccaaagggcgctgacaggaaacagaagacagatagggaaaagatggagaaacgaacagcccaagaaaaagaaaagtaccagccgtcctatgaaacaaccatcctgactgaatgctccccctggccggatgtcgcctaccaggtgaatagcgcaccttccccttcctacaatggttcccccaacagctttgggctgggagagggtaacgcatcacccacacaccccgtagaggctctgccagtggggtccgaccacctgttaccctcggctagcatccaggatgcccagcagtggttacaccgcaatcgcttttcacagttttgccgcctgtttgcatctttctctggagccgatctgttgaagatgtcccgcgatgacttggttcagatatgtggcccggcagatggaattcgccttttcaatgcaatcaagggtcggaacgtgagacccaaaatgacgatctatgtttgccaggagctggagcagaatcgggtaccccttcaacagaagcgcgatggctcaggggacagcaacctgtctgtctaccacgcaatcttcctcgaggaactgactacgttggaactaatagagaaaattgcaaacctctattctataagtccccagcatatacaccgcgtataccggcagggacccaccggaatacatgtggtcgtctctaatgaaatggtgcagaatttccaagacgagagctgctttgtcctgtccacaatcaaagctgagtcaaacgacggctatcatattatcctcaagtgcggactgtag

SEQ ID NO: 138225 - DNA, 99 bp, synthetic construct
  misc_feature 1..99: note = Description of Artificial Sequence: Synthetic coding sequence
  source 1..99: mol_type = other DNA
atggtgcaaaatttccaggacgagtcttgcttcgtgctgtcaacaattaaggccgaaagtaatgatgggtaccacattatactcaaatgcggcctctag

SEQ ID NO: 138226 - DNA, 1218 bp, synthetic construct
  misc_feature 1..1218: note = Description of Artificial Sequence: Synthetic coding sequence
  source 1..1218: mol_type = other DNA
atggcaaaatacgtgtcgctcaccgaggcaaatgaggaacttaaagtcctcatggatgagaatcagactagccggcccgtggctgtgcatacttctacagttaatccccttggtaagcagcttttgcccaagaccttcgggcagtcatctgtaaacatcgaccaacaggttgtaataggaatgccccaaaggccggccgctagtaatattccggtggtggggtctccaaatccacctagcactcactttgccagccagaaccaacattcttatagcagcccaccttgggctggccagcacaacaggaagggggagaagaatggcatgggtctatgtaggctgagcatgaaagtctgggagaccgtgcaaagaaaaggcactacctcatgccaggaagtggtgggggagctggtggcaaagtttcgggcagcatctaaccatgcctcccctaacgaatctgcttatgacgtcaagaacatcaaaaggcggacgtacgacgcactcaacgtgttgatggccatgaacattatctcacgcgaaaaaaaaaaaatcaagtggatcggcctaacaacaaatagtgcccaaaattgtcaaaatctgagggtcgagcggcagaaaagattagaacgcattaaacaaaagcagagcgaactgcagcaattaatcctgcagcagatcgcctttaagaatctggttttgagaaatcagtacgtcgaggagcaggtgagtcaaagaccgttgcccaactccgtcattcacgttccatttattatcatttcgtcaagtaagaagaccgttattaattgttcaatcagcgacgacaagagtgaatacctgttcaaattcaactcaagtttcgagatacacgacgacactgaagtcctaatgtggatgggtatgacatttggtcttgaatccggctcttgctcagcggaagacctgaaaatggcccgcaatctcgtgcccaaagcgctggaaccatatgtgacggagatggcccagggaaccttcggcggtgtcttcacgactgccggcagcaggtccaatggcacttggctgtcagccagcgatctgacaaacatcgccattgggatgctcgcgacatcatcgggcggcagccaatactccggttcaagagtggagacacctgctgtggaggaagaagaagaagaggacaacaacgacgacgacctcagtgagaacgacgaagatgactag

SEQ ID NO: 138227 - DNA, 2649 bp, synthetic construct
  misc_feature 1..2649: note = Description of Artificial Sequence: Synthetic coding sequence
  source 1..2649: mol_type = other DNA
atggaaggcgagagctctagatttgagatccataccccagtcagcgataagaagaaaaaaaagtgtagcatacataaagagcgcccccagaagcactcccatgaaatctttagggatagttcgctggttaacgaacagtcccagatcaccagacgcaaaaagaggaagaaggattttcagcacctcatatcaagcccccttaaaaagagcagaatttgcgatgaaactgctaatgcaactagcacccttaaaaagcgtaaaaagcggcggtattccgccttggaggttgacgaggaggcgggagtaacagtcgtactcgtggacaaagagaacataaataatacaccaaaacactttagaaaggacgttgacgttgtgtgcgtggatatgagcatagaacaaaagctgccacggaagcctaaaacagataagttccaagtgctggctaaaagccatgcccacaaaagtgaagccctccacagcaaggtgcgagagaaaaaaaataagaagcatcagcggaaggctgcctcttgggagtcccaaagggccagagacacattgccgcagtctgagtcccatcaggaagagagttggctttccgtgggacccgggggtgaaattacagaactgcccgccagcgctcataagaacaaatcgaagaagaaaaagaaaaagtcttccaacagagagtatgagacactggccatgcctgagggttcccaagcggggcgggaggccggtacagatatgcaggagagccaacctaccgtaggactcgacgacgagactcctcagctgctgggccctacccacaagaagaaatccaaaaagaaaaagaagaagaaaagcaatcaccaagaattcgaagcgctcgccatgcccgagggttcacaggtcggcagtgaagtaggcgccgacatgcaagaaagcagaccagctgtgggcttgcatggcgagactgcaggaatccctgcccctgcttataaaaataagtctaaaaagaaaaaaaaaaagtctaatcaccaagagttcgaggccgttgccatgcctgagtccctcgaatccgcctaccctgaagggtctcaagtcggaagtgaggtcgggacagtcgaggggtccacagctctgaagggcttcaaagaatctaactctactaagaagaagtccaagaaacggaagcttaccagcgtcaaaagagctcgggtctccggggatgacttttcagtgcccagtaagaattcagaatcgacactttttgattcagtggaaggcgacggcgctatgatggaggagggagtgaaatcccgccccagacagaaaaagacccaggcatgcctggcatccaagcacgtacaagaggctccccgtctggaacctgcaaacgaggaacataacgtagaaaccgctgaggattctgaaattcgatatttatcagcggattctggcgacgctgatgatagtgatgcagacctcggctcagccgtgaagcaactgcaggagttcatccctaatatcaaagatcgagccacgagtacaataaagcgtatgtaccgcgacgatcttgaaaggttcaaagaattcaaggcgcaaggggtggctattaagtttggtaagttcagcgttaaggagaataagcagctcgaaaaaaacgtggaggattttcttgcactgacaggaatcgaatcagctgacaagttgctgtatactgaccgctaccccgaggaaaaatctgttatcactaacctgaaacgaagatatagctttcggttgcacattggacggaatattgccaggccatggaagctgatctactaccgcgcaaaaaaaatgtttgacgttaataactacaaggggagatattccgaaggcgacactgagaagcttaagatgtaccactccctgttagggaacgattggaaaaccatcggtgagatggtggcccgaagcagcctgagcgttgccctcaagttctcccagatcagctcccaacggaacagaggagcatggagcaagagtgagacaaggaagcttataaaagccgttgaagaggtgattttgaaaaaaatgagtccccaagagcttaaagaggtggactcaaagttacaggaaaatcctgagtcctgtctgtccattgtacgtgagaagctctataaaggcatctcctgggtcgaagtagaagccaaggtgcagactcgcaactggatgcagtgtaagtcgaaatggactgaaattttaaccaaaagaatgacgaacggtcggcggatctactacggcatgaatgccctgcgggcaaaagtgtctctgatcgagcgcttgtacgaaatcaatgtggaggacacaaacgaaatcgactgggaagacttagcttcagccatcggggacgttcccccatcttatgttcagacaaagtttagcagactcaaagccgtttacgtgcccttctggcagaaaaagacatttcccgagatcatcgactatctgtatgaaaccacactgccccttctgaaagaaaagttggaaaagatgatggagaagaaaggcaccaagattcagaccccagccgccccaaaacaggtcttccctttcagggatattttctactatgaggacgactccgaaggaggacatcgaaaacggaaacggagatag

SEQ ID NO: 138228 - DNA, 2718 bp, synthetic construct
  misc_feature 1..2718: note = Description of Artificial Sequence: Synthetic coding sequence
  source 1..2718: mol_type = other DNA
atggaaggtgaaagctctcggtttgagatccacaccccagttagcgataagaaaaaaaagaaatgtagcatccacaaagaacgcccacagaagcactcccacgagatattcagagacagctctctggtgaatgagcaatcacagatcacccgcaggaaaaagcgcaaaaaagattttcagcacctgatctcatctcccctgaagaaatcccgcatatgtgacgagacagctaacgccacctccacgctgaagaaacgaaaaaagcgccggtactctgccctcgaagtcgatgaggaggctggggtcaccgtggtgctggtagacaaggagaatatcaacaacacacccaagcatttccgtaaagacgtggacgtggtgtgcgtggatatgtcgatcgaacagaaactgcctcgcaagcctaagaccgacaagtttcaggtccttgctaaatctcatgctcacaagagtgaggcactgcactcaaaggtccgggagaagaagaacaagaagcatcagcgcaaggctgcgtcttgggagagtcagagggcaagagacaccctccctcaatctgaatcccatcaggaggaatcctggctcagtgttggcccgggtggggagatcacggagttacccgctagtgctcataaaaataagagtaagaagaagaagaagaagtcctccaaccgggagtacgagaccctggcaatgcccgagggatctcaggcaggaagggaagcgggaacagatatgcaggaatctcagcctactgtgggcctggacgatgaaacaccgcagttgttggggcctactcataagaagaagagcaagaaaaagaagaagaagaaaagcaaccaccaggagtttgaagccctcgcaatgccggaggggagtcaggtcggctctgaagtcggcgccgatatgcaggaatcgcggccagccgtgggtctgcacggtgagactgcaggaattccagcaccagcttacaaaaataaatccaaaaagaagaaaaaaaaatcaaatcatcaggaattcgaagctgtggccatgccagagtcgctggagtctgcctacccagagggctcccaggtcggctccgaagttggaaccgtggagggctctaccgcccttaaaggtttcaaggaatctaattctacgaagaagaaatcgaaaaagcggaaactgacgtccgtgaaaagggctcgcgtgagcggcgatgatttttccgtcccgagcaaaaactcagaatcgacgctttttgatagtgtggaaggcgatggtgccatgatggaggaaggtgtcaaatctagaccgaggcaaaaaaaaacacaggcctgcctggcatctaagcacgtccaggaagcgccgcgtctggaacccgcaaatgaggagcacaatgtggaaacggctgaggatagcgaaatccggtacttgtcagccgacagcggagacgcagatgacagcgacgcggatcttggcagtgctgtcaagcagctgcaggagttcattccgaacataaaggacagagccacctcgactattaaacgcatgtatagggatgacctcgagcgctttaaggagtttaaggctcagggtgtggccattaagttcggcaaatttagcgtgaaggaaaataagcagctggaaaagaatgtggaggattttttggccttaactggcatagagtccgctgacaaacttctctacaccgataggtacccagaggagaagagtgtcatcactaaccttaagagacgttattctttccgcttacatatcggcagaaatatcgcgcgtccatggaagttgatctattacagagcaaagaagatgtttgatgtgaataactacaaagggaggtactctgaaggcgacactgaaaaactcaagatgtaccattccctgctggggaacgattggaagacaatcggggaaatggtagcccgctcttcattgagtgtagcccttaaattctcccagatctcttctcagagaaacagaggagcctggtctaaaagtgaaacccgtaaactcatcaaggctgtcgaagaggtaatattgaagaagatgagcccgcaggagctgaaggaagtggacagcaagcttcaagagaacccagagtcttgcctgagtattgtccgggagaaattgtataagggcatatcctgggttgaagtggaggcgaaagtgcagacacggaactggatgcagtgcaaaagcaagtggacagaaatcctgaccaagagaatgaccaatgggcgccgcatctattatggcatgaacgccttgcgcgctaaggtgagcctcatcgaacgtctgtatgagatcaatgtggaagatacgaacgaaatcgactgggaagacttagcgtccgctattggtgacgtcccccctagctatgtgcagacaaaattcagccgcctgaaggcagtgtatgttcctttttggcagaagaaaacctttcccgaaattatagattacctgtatgaaacaactttgcctttactgaaggagaaactcgagaaaatgatggagaagaagggaacaaaaatacagacacccgcagcccctaaacaagtcttccctttcagggatatcttctattacgaggacgatagcgaaggagaggatattgaaaaggaatctgagggacaggccccctgtatggctcatgcctgtaacagcagcactctgggcggacagggccgctggattatatag

SEQ ID NO: 138229 - DNA, 3489 bp, synthetic construct
  misc_feature 1..3489: note = Description of Artificial Sequence: Synthetic coding sequence
  source 1..3489: mol_type = other DNA
atggaggaggtgcgatgccccgaacatggaaccttctgttttttgaagacaggggttagagacggcccaaataaaggtaaatccttctacgtttgcagagccgatacctgtagctttgtgagggccacggatatcccagtttcccattgcctcctccatgaggactttgttgttgaactccagggtttactgctccctcaagataagaaagagtaccgtttgttctttaggtgcataaggagtaaggctgaaggaaaaaggtggtgcgggtctataccctggcaggacccagacagtaaggaacattctgtctccaacaaatctcagcacgcttccgaaacattccaccatagctccaattggctgcggaaccctttcaaggtcttagataaaaatcaggaaccagctctgtggaaacagctgatcaagggggaaggagaggagaaaaaggctgacaagaagcagagagagaaaggagaccagctgtttgatcagaagaaggagcaaaagcccgaaatgatggagaaagacctgtcatcaggattggtgcccaagaagaaacaaagtgtagttcaggagaagaaacaagaggagggagcggaaattcagtgtgaggccgagactggggggacgcacaaaagggatttctccgaaattaaaagtcagcaatgtcaggggaatgaactcaccagaccctccgccagctcccaggaaaagtcaagcgggaagagccaagacgtccagagagagtccgagcccttgagggagaaagtgacacagcttttgccacagaatgtgcactctcataactccatttccaagcctcagaagggggggccgttgaacaaagagtacacgaattgggaagccaaggagacaaaagccaaagacggacccagtatacaggccacgcagaaatcattgccccagggtcattttcaggagcgccccgagacacacagcgtgccagcaccagggggacctgcagcacaagcagcccctgcagctccagggttaagcctgggtgagggtcgcgaggcagccacttcctctgatgacgaggaggaagacgatgttgtgttcgtcagctcaaaaccaggctccccactgctgtttgactctaccctggacctggaaactaaggagaaccttcaattcccggatagaagcgtgcaacggaaggtgagcccagcttccggagtgagcaagaaagttgagccgtctgaccctgtggccaggagggtttatctgacaacccagctgaaacaaaaaaagtccacgctcgcttctgtcaatatccaggctcttcccgacaaaggccagaagttaattaagcagattcaggaattagaagaggtcttgtcagggctgacactgagtcccgagcaggggacaaatgaaaagtccaatagtcaagtcccccaacagagccattttaccaaaacaacaacagggccgcctcacttggtaccccctcagccactgcctcgaagaggaacccaacctgttgggagcctggagctgaagtccgcatgtcaggtgactgcagggggcagctcgcagtgctacagaggacacacaaaccaggaccacgtccacgccgtgtggaaaatcacatcagaggccattggtcagctgcatagatcattagagtcctgccccggggaaacagtggtagcggaagatcccgcaggcttgaaagtgccccttctgctccaccagaaacaggcccttgcatggttgctatggagggagagccagaagccacagggggggatattagctgacgatatggggttaggcaagacactgaccatgattgccctcattttgacccagaagaatcaggaaaaaaaggaagaaaaagagaaaagtaccgcgctcacctggcttagcaaggacgatagctgtgatttcaccagtcatgggacccttattatctgtccggcctctcttatccaccactggaagaacgaagtagagaagcgtgtcaatagcaacaaactcagggtctacctttaccatgggccaaatagggattctagggccagagtcctgtctacttacgacatcgtcataacaacatactccttggttgccaaggaaataccgaccaataagcaggaggcagaaatccctggggcaaatctaaacgtcgaggggacaagcacacccctgcttagaatcgcctgggccagaattattcttgatgaagcccataacgtgaaaaacccgagggtccagacctctattgctgtgtgtaagttacaggcatgtgcccgctgggctgtcacagggactccaatccagaacaacctgctggatatgtacagtctgctcaagttccttcggtgtagtcccttcgatgagttcaatctatggcggtcacaggtagacaacggttcaaaaaagggtggagagcgcctatccattctgacgaaaagtttgctgctgcgccggaccaaggatcagctcgactccactggacgcccgctcgtgatcctgcctcagagaaaattccaattacatcaccttaagctgagcgaggatgaggaaactgtttacaacgtattttttgctaggtcacgttctgcccttcagtcctacctgaaacgccatgagagtcggggaaaccagtcgggcagatcacccaataaccccttttcccgtgtggcactggaattcggttccgaggagcctcgccactcagaggcagctgattcacctcgctcctcgaccgtgcacatcctcagtcagttgctccgattgaggcagtgctgctgccacctgagtctcctaaagtctgcactcgaccctatggagcttaaaggcgaggggctggtcctgagtctggaagaacagctgagtgcattgactctatctgaactgcgggattctgagccgtcttctactgtgtctcttaacggtactttttttaagatggaactattcgagggcatgagagagtccactaaaatctcctctctcctcgctgaactggaggccatccagagaaactcagcgtctcagaagtcggtgatcgtgtcccagtggaccaatatgcttaaagtcgtggcactgcacctcaaaaagcacggactcacttacgccaccattgatggatccgtcaaccctaagcagaggatggatctggtggaggcctttaaccactcccggggaccacaggtgatgcttatctccttactcgctgggggggtaggcctcaatctcactgggggaaatcatctatttctgctggatatgcactggaatccttccctcgaggaccaagcttgcgataggatttaccgcgtgggtcaacagaaagacgtggtaattcaccggtttgtgtgtgaagggacagtggaagagaagattctccaattacaggagaagaaaaaggatctggccaagcaggtcctgtccggaagcggcgagagtgtaacgaaactcaccttggctgatctgcgtgttttgttcgggatctag

SEQ ID NO: 138230 - DNA, 432 bp, synthetic construct
  misc_feature 1..432: note = Description of Artificial Sequence: Synthetic coding sequence
  source 1..432: mol_type = other DNA
aatatgttgaaggttgtcgctctgcatctgaagaagcacggcctgacgtacgcaactatagatggatcggtcaacccaaaacaaaggatggacctggttgaagcctttaaccactccaggggccctcaggttatgttgatttcattgctggcggggggagttggccttaacctcactgggggaaaccatctgtttctgttggacatgcactggaatccttcgctggaagaccaggcttgtgacaggatctatcgggtggggcagcagaaagacgttgtcattcatcgtttcgtctgcgaggggaccgtcgaggaaaagatcttgcagctgcaggaaaagaagaaagatctcgctaaacaggttctttctgggagtggagagtctgtcacaaaacttacgctcgccgaccttagagttctgttcgggatctag

SEQ ID NO: 138231 - DNA, 1263 bp, synthetic construct
  misc_feature 1..1263: note = Description of Artificial Sequence: Synthetic coding sequence
  source 1..1263: mol_type = other DNA
atggccgagttagggaagaagtattgtgtgtactgcttggccgaggtctccccactgcggttccgctgtacagaatgccaggatatcgaactctgcccagagtgcttttccgcgggggcagagatcggacaccatcggcgctaccacggctaccagctggttgacggcggaaggttcactctatggggccctgaggcagagggaggatggaccagccgagaggaacagcttctcctcgatgccattgagcagttcgggtttggcaactgggaagatatggctgcacacgtcggtgcaagtcgcacccctcaagaagttatggaacactacgtttctatgtatatccacggcaacctaggaaaagcttgcattcccgacacaatccccaaccgcgtaactgaccatacatgccccagcgggggccccctgtcgccgtctttgacaaccccacttccaccgctcgatatctcagtcgcagagcagcagcagctggggtatatgcccttgcgggacgattatgagattgagtatgaccaggatgccgagacgctgatctccgggctgagcgtgaattacgacgacgacgacgtggaaattgagctgaaacgtgctcacgtggacatgtatgtgcgtaagttgaaggagcggcaacgccggaagaacatcgccagagactataatctggtccctgcctttctcggaaaagataagaaagagaaagagaaagcactgaaacgcaaaatcacaaaagaagagaaggagcttcgccttaagttgagacctttatatcaatttatgagctgtaaagaattcgacgatctgtttgaaaatatgcataaggagaagatgctgcgcgccaagatacgggaacttcagaggtataggcggaacggcatcacaaagatggaggaatctgctgaatacgaggcagcaaggcacaagcgcgagaaaaggaaagagaacaaaaatctggctggatccaaacgaggaaaggaggacggcaaagactccgagtttgccgcaattgagaatcttcccggattcgagttgttatctgatagagagaaggtgctttgctcctccctcaacctgtcgcccgccagatacgtcactgtaaaaacgattataatcaaagaccacctgcagaagcggcagggtattccgtccaaaagcaggctgccctcttacctcgacaaagtgctgaaaaaaagaattttgaatttcttaacagagagcggctggatctcacgggatgctagctag

SEQ ID NO: 138232 - DNA, 366 bp, synthetic construct
  misc_feature 1..366: note = Description of Artificial Sequence: Synthetic coding sequence
  source 1..366: mol_type = other DNA
atggccgcccacgtaggcgcaagtcggaccccacaggaagtcatggagcactatgtgtctatgtacatccatgggaatctggggaaggcctgcatacctgatactatcccaaacagggtcaccgatcatacctgtccctccggaggccccctttcacctagtcttacgacaccgctaccacccctcgacatttcggtggctgagcaacaacaactcgggtatatgcccctgcgggatgattacgaaattgagtacgaccaggacgccgagactttaattagcggcctgtcggtgaattatgatgacgacgatgtggaaatcgagctgaaacgagcacatgtagacatgtacgttcgcaagttgtag

SEQ ID NO: 138233 - DNA, 390 bp, synthetic construct
  misc_feature 1..390: note = Description of Artificial Sequence: Synthetic coding sequence
  source 1..390: mol_type = other DNA
atggccgctcacgtgggtgctagccgcacaccccaggaggtgatggaacattacgtgtcaatgtacatacacgggaatctaggtaaggcatgcatcccagacacaatccccaatcgtgtcacggatcacacctgtccatcgggcggccctctttccccatcacttaccacaccccttccccccctggacatcagtgtagccgagcaacagcagttaggctacatgccactccgggatgactacgaaatcgagtacgaccaagatgctgaaacactaatcagcggcctcagcgtgaattacgatgacgatgatgtggaaattgaactcaaaagagcccacgttgacatgtacgttcgcaaactgaaggagcgtcagaggcgtaaaaattag

SEQ ID NO: 138234 - DNA, 1038 bp, synthetic construct
  misc_feature 1..1038: note = Description of Artificial Sequence: Synthetic coding sequence
  source 1..1038: mol_type = other DNA
atggccgagttaggtaagaaatattgtgtatactgcctggcggaagaagacatggccgcgcacgttggagcttctcggacaccacaggaagttatggaacactatgtgagtatgtacatccatggtaacctgggaaaagcatgcatccccgatacaattcctaatagagtgaccgaccatacatgcccttccggaggaccactgtcaccatcccttaccacgcctctacctccgttggacatctctgtggctgagcagcagcagctgggctacatgcccctgcgtgatgactacgagattgaatacgaccaggatgctgaaacactgatctccggtctcagcgtgaactacgacgatgacgatgttgagatcgaactcaaacgcgcacacgttgacatgtatgttcggaaactgaaagagcggcagcggcgcaaaaacatcgcgcgggattataatctggtccccgcatttttaggcaaagacaaaaaggaaaaagaaaaagccttgaagcgtaagatcaccaaagaggaaaaggagttgcgattgaagctgaggccattgtaccagtttatgagttgcaaagagttcgatgacctcttcgagaacatgcataaggagaagatgcttcgagccaaaatcagagagctacagcgataccggagaaacggcattacgaagatggaggagtcagcagaatatgaggcggccagacacaagagggagaagaggaaggagaataaaaatctggctgggagcaagcgcggaaaggaagatggcaaggattcggaatttgctgccatcgagaacctgccaggatttgaactcctatctgaccgtgagaaagtgctctgctcttcactcaacctgtcacctgcccgatatgtgactgtaaaaacaatcataattaaagatcacctgcagaaaaggcagggtatccctagtaagtcccgtctaccttcgtatctggataaggtgctcaagaagcggatccttaacttcctgaccgaaagcgggtggatatcaagggacgcatcctag

SEQ ID NO: 138235 - DNA, 987 bp, synthetic construct
  misc_feature 1..987: note = Description of Artificial Sequence: Synthetic coding sequence
  source 1..987: mol_type = other DNA
atggctgctcatgtgggcgcctcccggacccctcaggaggtgatggagcattatgtatcgatgtacatccacggcaaccttgggaaagcatgcattcccgacactatccccaacagagtaaccgaccatacatgcccctccggtgggcctctctctccctccctgacaacacccctacccccacttgatatcagtgtggctgagcagcagcagctcggctatatgcccctgcgtgatgactacgagatcgaatacgaccaagatgctgagacacttatttctggattaagcgtaaactatgacgatgacgacgtcgagattgagcttaaaagagcacacgtcgacatgtacgtgcggaagctcaaggagcgccagaggagaaagaacatagccagggactataaccttgttcccgcatttctcggtaaggacaaaaaagaaaaagaaaaggcgctgaaaagaaaaattaccaaggaagagaaggagttaagactgaagcttcggcctctataccagttcatgtcctgcaaggaatttgatgatcttttcgagaacatgcataaagagaaaatgctgcgggccaagattagagagctgcagcgttacagacgtaatggcattaccaagatggaggagagcgctgaatatgaggcggcaaggcacaaacgggaaaaacgtaaagaaaataagaatctcgctggttccaaaaggggaaaggaggatggcaaggacagcgagttcgccgccatcgaaaacctcccagggttcgagctactttctgaccgtgaaaaggtactgtgtagcagtcttaatctgtctcctgcacgatacgtgactgttaagacaatcatcataaaggaccacttacagaagcgacagggcattccctctaaatcaagactcccaagttacctggataaggtgttaaaaaaaaggatcttaaacttcctgacagagtctggatggataagtagagacgcctcatag

SEQ ID NO: 138236 - DNA, 1299 bp, synthetic construct
  misc_feature 1..1299: note = Description of Artificial Sequence: Synthetic coding sequence
  source 1..1299: mol_type = other DNA
atgtctgagctgaaggattgtccgctacaattccacgacttcaagagcgtggaccatctgaaggtatgtccacgttacaccgcagttcttgcccggagcgaggacgatggcataggcatcgaagagttggatactttacagctagaacttgagaccctgttaagttctgccagccggcgactcagagtccttgaggcagagacccagatcctgactgactggcaagataaaaaaggtgatcggcgctttctgaagttggggcgggatcatgagctgggggccccgccaaaacatggcaagcctaaaaagcagaaactcgaaggcaaggcaggtcacggaccaggaccgggccctgggagaccaaagtctaagaatctccaacctaaaatccaagaatatgaatttaccgacgacccaatcgacgtcccccgaattcctaagaatgacgcaccaaatcgattctgggcttctgtggaaccttattgcgctgacatcacatcggaagaagtgagaactcttgaggagctgttgaagccgcccgaggacgaggcagaacactacaagattccccctctggggaaacactatagccagaggtgggctcaagaggacctgctcgaggagcagaaggatggggcaagggctgcagctgtcgctgataagaagaaggggttgatgggacccctcaccgagttagatactaaggacgtggatgcactcctgaagaaatcagaggctcagcatgagcagccagaagacggatgtccgttcggtgccctcacccaacgattactccaggcccttgtggaagagaatatcattagcccaatggaagactccccaatcccagacatgtcaggaaaggaatccggagcggacggcgcatcaacttcccccaggaatcaaaacaagccattctccgtccctcataccaaatctctggaaagcaggatcaaggaggagctgattgcccagggcctgctagagagtgaagatcgccctgccgaagactcagaggatgaagttttagccgagttacggaaaagacaagcagaacttaaggccctctcagctcacaaccggactaaaaagcatgatttgcttagactggctaaggaagaagtgagccgccaggagctgcggcagcgcgtgcgtatggccgataatgaagtgatggacgccttccgcaagatcatggcagcccgacagaagaaacggacgcctacaaagaaggaaaaggaccaagcctggaagacgctaaaggagcgcgaaagcattttaaagctccttgacggctag

SEQ ID NO: 138237 - DNA, 1110 bp, synthetic construct
  misc_feature 1..1110: note = Description of Artificial Sequence: Synthetic coding sequence
  source 1..1110: mol_type = other DNA
atgtcagagctcaaggattgcccattgcagtttcacgattttaaaagcgtggaccatctcaaagtatgccccaggtacacagctgtgctggcaagatccgaggatgacggtattggaatcgaagagctagacactcttcagctggaactggaaacccttctttcgagtgcctcgaggcggctgcgcgttttggaagccgaaacccaaatcctgactgactggcaggacaagaaaggcgataggcgcttcctgaagttaggccgggatcatgaactaggggcccctccaaaacatggaaaacccaaaaaacagaaactggaagggaaggctggtcatgggcccggaccaggccctggtcgtccaaagtcaaaaaacctgcagcccaagatccaggaatacgagtttactgatgatcccatcgacgtgccacgcatccctaaaaacgacgcccccaaccggttttgggcctcagtggaaccctattgtgccgatatcacatcagaagaagtccgtacgctggaggagttgcttaaacctccagaggacgaggctgagcattacaagatcccaccattaggaaaacactattctcagcgctgggcgcaggaggacctgttagaggaacaaaaggatggcgccagggcagccgcagtggccgacaaaaagaaggggctgatgggacccctgaccgagctggacactaaagacgtggacgcacttttgaaaaagagcgaagcgcaacacgaacagcccgaggatgggtgccccttcggggcccttacccaacggcttttgcaagcactagtggaggaaaacatcatttctcctatggaagactccccgatacctgatatgtccggtaaggagtcaggcgccgatggggcctccactagcccaagaaaccaaaataaaccatttagcgtgccccacacaaaaagcttagaaagccgcatcaaagaggaacttatagcacaggggcttctagagtctgaggatcggccagccgaggattcagaagacgaagtgctagctgaactgcggaaaagacaagccgaactaaaagcactgtcagctcataatcgcacgaaaaaacacgacctgcttcgatag

SEQ ID NO: 138238 - DNA, 288 bp, synthetic construct
  misc_feature 1..288: note = Description of Artificial Sequence: Synthetic coding sequence
  source 1..288: mol_type = other DNA
atgagcgaactgaaagactgtccacttcagtttcatgatttcaaatcggtggaccacctcaaggtatgccctcggtatacggccgtattagcacggagcgaagacgacggcattggtattgaagagctggacaccctacagctggaactggagacactgttgtccagtgcttccaggcgtcttcgcgtgctggaggccgagacacagatcctcacagattggcaggataagaagggcgatcgcagattcctaaaactgggaagagaccacgaactcggcgctccttag

SEQ ID NO: 138239 - DNA, 1299 bp, synthetic construct
  misc_feature 1..1299: note = Description of Artificial Sequence: Synthetic coding sequence
  source 1..1299: mol_type = other DNA
atgtccgagctgaaagattgtcccctacagtttcacgactttaaatccgtcgatcatctgaaagtgtgtcctcgctacaccgctgtgctcgcccgttcggaggatgacggtatcggcattgaagagctggataccctacaacttgaactggagaccttactaagtagcgccagtagacgcttgagagtgctggaggcagaaacacagattctgaccgactggcaggacaagaagggcgaccgacggtttctaaaattgggccgcgatcatgagctgggggcccctcccaagcacgggaagcccaagaaacagaagctcgaaggcaaggctggacatggccctggccccggcccaggacgccccaaatcaaaaaatctgcaacctaagatacaggaatatgaatttacagatgaccccatcgatgtcccacggatccccaaaaacgacgctcctaaccgattctgggcttcagtggaaccatattgcgccgacatcacctctgaggaggtgcgcaccttagaggagctgctgaagccacccgaagatgaagccgaacattacaaaataccacccctgggcaaacactactcccagaggtgggcacaagaggacttattggaagaacagaaggatggcgcaagggccgccgccgtggccgataagaagaaaggcctgatgggcccactcaccgagcttgataccaaggacgtggacgctcttctgaagaagagcgaggctcagcatgaacagccagaggatggttgtccattcggcgccctaactcagcgcttgctgcaagccctggtggaggagaacatcatatcacctatggaagatagccctattcctgacatgtcgggcaaagagagcggcgcagacggagcctccacttctcctcgcaaccagaataagccctttagcgtgccccatacgaagagcctagagagccgaattaaggaggagctcatcgcacagggactcctggagagcgaagaccgaccagcggaggacagcgaggacgaagttttggctgagctcagaaagagacaggcagagttgaaagccctgtccgcccacaaccgtactaaaaagcatgatctcctgaggctcgcgaaagaggaggtgagccgtcaggagctgaggcagcgagttaggatggccgataacgaggtgatggatgcttttcgcaagattatggccgctcgtcagaaaaaaaggactcctactaagaaagagaaggaccaggcatggaagaccttgaaggaacgtgaatcaattctcaagcttcttgatggctag

SEQ ID NO: 138240 - DNA, 1038 bp, synthetic construct
  misc_feature 1..1038: note = Description of Artificial Sequence: Synthetic coding sequence
  source 1..1038: mol_type = other DNA
atgcagctggaaattcaggtcgcactaaactttattatttcctacctctataacaagcttcctaggcggcgggtgaacatatttggcgaagagctggaaagactgctgaagaagaaatatgagggccactggtatcccgaaaaaccttataaagggagtgggtttaggtgtatccacataggcgaaaaggtcgacccagtgattgaacaagcctccaaagaaagcggcctcgatattgacgatgttcggggtaatctcccacaggacctctctgtctggattgatccctttgaagtctcttatcagatcggggagaagggcccagtcaaggtactgtacgtggacgataataatgaaaacgggtgcgagttggataaggagattaagaactcctttaatccggaggcgcaggtgtttatgccaattagcgatccggcaagctctgtgtcctcatccccaagccccccttttggccattccgcagcggtgtctcctacgttcatgcctcgatccacccagccgctgacgtttactacagccacctttgcggcgaccaaatttggatccaccaagatgaagaatagtgggagatcaaacaaggtggcccggacctccccgatcaatttgggtctgaatgttaacgacttactgaaacagaaagcgatctcaagctccatgcactctctctatggtctgggattgggcagtcagcagcagccccaacaacagcagcagcccgcacaaccacctccccctccaccccctcctcagcaacagcagcagcaaaagacctccgccctgtctcccaacgctaaggaatttatattccctaatatgcagggccagggtagctccaccaacggaatgttccctggcgactcccctctcaatctgtcccctctgcagtattcgaatgcattcgacgtattcgcagcctacggcgggctaaacgagaagtcattcgtcgacggcttgaatttttcacttaacaatatgcagtactcgaaccagcagttccaacctgtgatggccaattag

SEQ ID NO: 138241 - DNA, 1038 bp, synthetic construct
  misc_feature 1..1038: note = Description of Artificial Sequence: Synthetic coding sequence
  source 1..1038: mol_type = other DNA
atgcagttagaaattcaggttgccctgaattttataatatcctatctctataataagttgcccaggaggagagtgaacatattcggggaggaactggagaggctgctaaaaaagaagtacgagggtcattggtatcccgagaagccttataagggttccggctttcggtgtatccacattggtgaaaaggttgacccagttatagaacaggctagcaaggaatcgggcttggatatcgacgacgtgaggggcaatcttcctcaggacctcagcgtttggattgatccgttcgaagtgagttaccagattggcgaaaaggggcccgtgaaagttctatacgtggacgataacaatgagaatgggtgcgaactagataaagagatcaagaactctttcaatccagaagctcaggtgttcatgcctatttctgatcccgcatcttcggtgagttcctccccgtcaccccctttcggccactccgctgctgtcagcccaacattcatgcccagaagcacacagcccctgacgttcacaaccgccacctttgcagccaccaagttcggcagtactaaaatgaaaaatagtgggaggtctaataaagtggcgagaacctccccaatcaacctgggactcaatgtaaatgacttacttaagcagaaggctataagttcgtccatgcatagcctgtacggcctcggcttaggcagtcagcaacaaccacaacaacagcagcagcccgcacagcctcctccaccaccgcccccaccccaacaacagcagcagcaaaaaacatcagccctcagcccaaacgccaaggagttcattttccccaacatgcaaggccaagggagctctacaaatggaatgttccccggagacagtcccttaaacctgtctccactgcaatatagcaatgctttcgacgtgtttgctgcttatggtggactgaatgagaaaagcttcgtggacggactgaacttctccctgaataacatgcagtattcgaaccaacagttccagcccgtaatggctaattag

SEQ ID NO: 138242 - DNA, 1035 bp, synthetic construct
  misc_feature 1..1035: note = Description of Artificial Sequence: Synthetic coding sequence
  source 1..1035: mol_type = other DNA
atgcagctggagatcaaggttgctctgaactttatcatctcttatctgtataacaagctgcctcgcaggcgggccgacttattcggtgaggagctggaaagacttctgaaaaaaaaatacgaaggtcactggtaccccgaaaaacctctgaagggctctggctttcggtgtgtgcacatcggagaaatggtggatcccgtcgtcgagttggccgccaagagatccggcctggcagtggaagacgtgcgagccaatgtcccggaagagctctcggtgtggatcgaccctttcgaggttagctatcagatcggagagaaaggcgccgtgaaagtgctgtatctggatgatagtgaggggtgtggggcccccgagctcgataaggaaattaagtcgtcctttaacccggacgcacaagtgttcgtgcccattgggtcacaggactctagtctttcgaactctccctcaccttctttcggccagagccccagccccacctttatccccaggtcagcacagccaatcacctttactactgcttcatttgcggcaacaaaatttggatcaacaaaaatgaagaaaggcggtggcgccgcatccgggggcggagtggcctcctcaggcgccggcggacagcaaccccctcagcagccgaggatggcacggagtcccaccaacagcttattgaagcacaagtccctcagcctctcaatgcacagtctcaacttcatcaccgcaaatcccgcaccacagtcccagctaagccccaatgctaaagagtttgtgtataatgggggtggcagcccttctctgttcttcgatgctgctgacgggcagggctccgggaccccgggcccttttggcgggagcggagcggggacctgcaactcatcatccttcgacatggcacaggtctttgggggaggagcgaactctcttttcttggagaagactcccttcgtggaaggtctctcttataacctgaacacaatgcagtatccctcccaacagtttcagcctgtggtcttggccaattag

SEQ ID NO: 138243 - DNA, 306 bp, synthetic construct
  misc_feature 1..306: note = Description of Artificial Sequence: Synthetic coding sequence
  source 1..306: mol_type = other DNA
atgcagctggagataaaagtggctttgaactttatcataagctacctgtataataaactgccgagacggcgcgccgatttgttcggggaagaattggagaggctgctgaaaaaaaaatatgagggacattggtaccctgagaagcctttgaagggctcaggttttcgatgcgtgcacattggcgaaatggtggaccccgtcgtggagctggccgccaaacgcagcggcttggcggtagaagatgtacgggctaatgtccccgaagagctgagcgtttggattgacccctttgaggtctcatactag

SEQ ID NO: 138244 - DNA, 1569 bp, synthetic construct
  misc_feature 1..1569: note = Description of Artificial Sequence: Synthetic coding sequence
  source 1..1569: mol_type = other DNA
atgagtatcacatcagatgaagttaacttcttagtgtaccgatacctgcaagagagtggattttcccactccgcctttacctttggaatcgagagccatatctcccaatccaatatcaacggaaccctggtgccgccctctgcactcatctccattctacagaaaggtcttcagtacgtggaagccgagataagcatcaataaagacgggactgtgtttgattcacgccctattgagagcctgtctcttattgtggcggtgattccggatgtggtacagatgagacagcaagctttcggagagaagctcacccagcagcaggcttccgccgcggcaactgaggcttctgcaatggccaaagctgccaccatgactcccgccgccatatcacagcagaaccctcccaagaaccgggaggccaccgtaaacggtgaagagaatggcgcccacgagatcaacaaccatagcaagccaatggagatcgatggcgacgtggaaattccccccaataaggccacagtactcaggggccacgagtccgaggtcttcatttgtgcatggaatccagtgtcggatctgctcgcatcaggctcaggggactccactgcgagaatttggaacctgaacgaaaactcaaatggaggttctactcagttggtgctgcggcattgcataagagagggagggcatgatgtcccatccaacaaagacgtcacctcactggattggaacagcgacggaactctactggccatgggttcttatgatggatttgcccgcatttggactgaaaacggcaatttggcgtcaaccttaggtcaacacaaggggccgatatttgccttgaagtggaataaaaaaggcaattatgttttgagcgctggcgtggacaagactaccatcatctgggatgcccatacgggcgaggccaagcagcagtttccctttcattcagctcctgcactggacgttgattggcagaataatatgacatttgcctcctgctcaactgatatgtgcatacacgtatgtcgtttggggtgtgatcaccctgttaaaaccttccaagggcatacaaatgaggtgaacgctatcaaatgggacccatcagggatgcttttggcctcctgctccgacgatatgacattgaaaatatggagtatgaaacaagatgcctgcgttcacgatcttcaggcacattccaaagaaatatacactatcaaatggagtcctacgggtccagccactagcaatccgaattcctccatcatgttggcctctgcctccttcgatagcactgtcagactctgggatgtggaacagggagtctgcacgcacacgctaatgaagcatcaggaaccagtctacagcgtggccttcagtcccgatggcaaatacctggcctctgggagcttcgacaagtatgttcatatttggaatacccagtctggttctttggtccactcgtaccagggaaccgggggcattttcgaggtgtgctggaatgctcggggggataaggtaggggcatccgccagtgacgggagcgtctgtgtgctggacttgtag

SEQ ID NO: 138245 - DNA, 1569 bp, synthetic construct
  misc_feature 1..1569: note = Description of Artificial Sequence: Synthetic coding sequence
  source 1..1569: mol_type = other DNA
atgagcatcaccagtgatgaggtcaattttctggtctacaggtatctccaagagtccggtttttcccacagtgccttcacctttgggatcgaaagccatatctcacagagcaacataaatggaaccttggtgccaccgagcgctctgataagtatcctccagaagggcctgcagtacgtcgaagcggaaatctccatcaacaaggacgggactgtcttcgatagccggccaatcgagtctctcagcctgatcgtcgcagtcatcccggatgtcgtacagatgcggcagcaagccttcggtgaaaagctgacccagcagcaggcaagcgctgcagctacggaagcctcagccatggccaaggctgcgaccatgacgccagctgcaatctctcagcaaaacccacctaagaatagggaggccactgtgaatggagaggagaatggtgcccatgagattaataatcattctaagcccatggagattgacggggacgtcgaaatcccccctaacaaggcgactgttctgagggggcatgagtcggaggtcttcatctgcgcttggaatccagtctcagatttactggcatcgggctctggggactccactgctagaatctggaatctgaacgagaactctaatggaggcagcacacagctggtgctgcggcattgcatccgtgaaggggggcacgatgttccctcaaataaagacgtaaccagtttggattggaattcagacggcacactgctggctatgggctcttatgacggctttgcacggatatggaccgagaatggcaatctagcaagcacgctggggcagcataagggccctatctttgcgctcaagtggaacaagaaaggaaattacgtgctgtccgctggggtggacaaaacaacgattatttgggacgcacatacaggtgaggcaaagcagcagtttccgttccactcggctccagctttggatgtggattggcagaacaacatgactttcgctagctgctccactgacatgtgcatccacgtctgcagacttggatgcgaccatcctgtgaaaacgttccagggtcacactaatgaagtgaacgctataaagtgggacccatcgggcatgctactggcctcttgcagcgacgacatgacactcaagatttggtccatgaagcaggatgcttgcgttcatgacctccaagcccattcgaaggagatctacacgatcaagtggagcccaaccggtcccgcaacatctaatcctaattccagtattatgctcgcctccgccagcttcgacagtaccgttcggctttgggacgtggagcaaggcgtgtgtacccacacccttatgaaacaccaggaacccgtttattccgtggcattcagccccgatggaaagtaccttgccagcggcagcttcgacaagtatgtgcatatctggaatacacagagcggctctctagtgcattcctaccagggcactggtggaattttcgaagtgtgctggaacgctcgcggagataaggtgggcgcctcagcatccgatgggtcagtctgcgtcctcgatctctag

SEQ ID NO: 138246 - DNA, 1569 bp, synthetic construct
  misc_feature 1..1569: note = Description of Artificial Sequence: Synthetic coding sequence
  source 1..1569: mol_type = other DNA
atgagcattacaagcgatgaggtaaacttccttgtttatcgctatttacaggagtccgggttctctcatagcgcgttcacttttggaatcgaatcacatatcagccagtcaaatatcaacggcactctggtccccccatccgctttgatcagcatcctgcagaagggtctgcaatacgtcgaagccgaaattagcataaataaggacggcacagtcttcgacagccgtcctatcgaaagcctcagcctcatagtagccgtgatcccggatgtcgtgcagatgcggcaacaggcctttggtgagaagttgacccagcaacaggccagtgccgccgctacggaggccagcgccatggccaaggccgccaccatgacacctgccgctatctctcaacagaaccccccaaaaaaccgcgaagccacagtcaatggagaagaaaatggagcacatgagataaacaaccacagcaaaccaatggagattgacggggatgtcgagatccctcctaataaggcgaccgtcttgcgcggccacgagtcagaagtgttcatctgtgcatggaacccggtgagtgatctgctggcttccggatccggggactctactgcacggatttggaaccttaacgaaaattcgaacggtggctctacccagctcgtgttacggcactgtattagagaagggggacacgacgttccgagcaacaaggacgtgacgtctctagactggaactcagatggaactttactggccatggggtcttacgacggctttgcaagaatttggacagagaatgggaacctagcttccactctgggacagcacaagggcccgattttcgcactgaaatggaataagaaagggaactacgtcctttcagctggggttgacaaaacgacaatcatatgggacgctcacactggtgaggcaaagcagcagtttccgttccattccgcgcccgctctcgacgtcgattggcaaaataatatgacgtttgcttcatgcagtaccgacatgtgtattcatgtgtgtagactcggctgcgaccacccagtaaagacgtttcagggccataccaatgaggtcaatgctattaagtgggatcctagcgggatgctcttggccagttgctccgacgatatgactctaaagatatggtctatgaagcaggacgcctgcgtacacgatctccaggctcatagcaaggagatctataccatcaaatggagccccactggaccggcaactagcaatccaaactccagcatcatgcttgcaagtgctagcttcgattccaccgtcaggctctgggacgtggagcagggtgtctgcactcacaccctgatgaagcaccaggagccagtgtattccgtcgccttcagccccgatggaaagtacttagcttcgggaagctttgataaatatgtccacatctggaacacacagtctggctccttagtgcatagctaccaaggcactgggggcattttcgaggtctgctggaacgctcggggggacaaggtgggcgcttctgcttccgacggctctgtttgtgtgttggacctgtag

SEQ ID NO: 138247 - DNA, 1095 bp, synthetic construct
  misc_feature 1..1095: note = Description of Artificial Sequence: Synthetic coding sequence
  source 1..1095: mol_type = other DNA
atggagatagatggcgacgttgagattcccccaaataaagctacggtcctcagaggtcatgaaagcgaagtctttatttgcgcttggaatcccgtgtcagacttgttggcctccggatctggtgattctactgccaggatctggaatttgaatgagaactctaacggtggatccacacagctggtcctgaggcactgcatccgggagggggggcatgacgtgccatctaataaagacgtaactagcctcgattggaattccgacggcacactcctcgcgatgggcagctacgacgggttcgcccggatttggacagaaaacgggaatctggccagcacactgggccaacataaaggcccaatctttgcattaaaatggaataagaagggcaattatgtgttgtctgcaggtgtggacaaaacaacaattatatgggacgctcacactggggaggctaaacagcaattcccattccattcagccccagccctcgatgttgactggcagaacaatatgacctttgctagctgttctaccgacatgtgtattcacgtgtgcaggttagggtgtgatcatcctgtgaaaactttccaagggcataccaacgaggtgaatgcaattaagtgggatccttccggcatgcttttagcttcctgctccgacgatatgaccctgaagatctggagtatgaagcaggacgcctgtgtgcatgatctgcaagcacattctaaagagatttacaccattaaatggagccccacaggacccgctacctccaatccgaatagcagcattatgttggccagtgccagcttcgacagtacagttcgtctgtgggatgttgaacaaggagtatgtactcacacccttatgaagcaccaagagcccgtttattcagtggccttctccccagacggaaaatacctggcctcaggcagctttgataagtatgtgcacatatggaatactcagagcggttccctcgtgcacagctatcaggggactggcgggatctttgaggtgtgttggaacgccagaggggacaaggttggtgccagcgcttctgatgggagcgtttgtgtgctggatttgtag

SEQ ID NO: 138248 - DNA, 1752 bp, synthetic construct
  misc_feature 1..1752: note = Description of Artificial Sequence: Synthetic coding sequence
  source 1..1752: mol_type = other DNA
atgcccctgcgaaaaatgaaaattccatttcttctcctgtttttcctgtgggaagccgagtcccacgcggcaagtaggcccaacattatactggtaatggccgatgatctcggtatcggtgatcctgggtgttacgggaataaaaccatccggactcccaacatcgacagactggcttccggcggcgtcaagttgactcagcatctggcagcttcacctctgtgcacgcctagtcgagccgcgtttatgaccggacggtaccccgtccggtcaggcatggcctcctggagtaggaccggcgtcttcctttttaccgccagctccggcggccttcctaccgatgagataaccttcgcgaaactgctcaaggaccaaggctacagtacagcacttattgggaagtggcaccttgggatgagttgtcactcaaagactgacttttgccatcatccgttacatcacggttttaactatttctacggaatctctctgactaatttaagggattgtaagcccggggaaggctccgtgtttaccactggctttaaaagactcgtcttcctacccttacagattgtgggcgtcaccctactaaccctggccgcactcaattgcttgggtttgttgcacgtgcctctgggagtgttcttctctctcttgttcctcgccgcactgattcttacgctgttcctcggctttcttcattacttccgtccactaaattgttttatgatgaggaactacgagatcatacagcaacccatgtcatatgacaacctcacccaaaggctgaccgttgaagctgctcaatttatccagagaaacacagaaacccctttcctgctggtcctgtcatatttgcacgttcacacagccctgttttcttccaaggatttcgccggcaagtcccaacacggcgtttatggcgatgccgtcgaagaaatggattggtccgtaggccagatactgaatctgctcgacgaactgcgcctggccaatgacactcttatctattttacgtcagaccagggcgcacatgttgaggaggtgagctcaaagggtgaaatccacggaggaagtaacggcatttataagggcgggaaagccaacaattgggaagggggcatacgggtccctggcattctgaggtggcccagggtgatacaggctggccagaagattgacgaacccacctccaatatggatatcttccctaccgtagcaaagttagccggagcccctctgcctgaggatcgaattatcgatggtcgggacttgatgccactcctcgagggaaaatctcaacgttccgaccatgaattcctgtttcattactgcaacgcatatttgaatgccgtgagatggcatccccagaattccacgagcatctggaaagctttcttcttcacccccaactttaaccccgtgggaagcaacggttgttttgccacccacgtgtgcttctgctttggaagctacgtaacccatcatgacccgccattgcttttcgacattagtaaggacccgcgggaacggaacccacttacgccggcgtcagagcctcgtttctacgagattttaaaagtgatgcaggaagccgctgacaggcatacccagacactgcccgaggtacccgatcaattctcgtggaacaattttctgtggaagccctggctccaactctgctgtcctagcaccgggttatcctgccagtgcgatcgcgagaagcaggacaaacggctgtctcgatag

SEQ ID NO: 138249 - DNA, 1581 bp, synthetic construct
  misc_feature 1..1581: note = Description of Artificial Sequence: Synthetic coding sequence
  source 1..1581: mol_type = other DNA
atgtcaatcacatcggatgaagtcaactttttagtgtaccggtacttgcaggagagcgggttttcccactccgcctttacatttggcatagagtcccacatcagtcaatcaaatattaatggcacgttggttccgcctgccgctctgatcagcatcctgcagaaaggtctgcaatatgttgaggccgaaatttcaataaacgaagatggaacagtgttcgacggccggcctatcgagtccctctcattaatcgatgccgtgatgccagacgtggtgcagacaagacagcaggcatttagggaaaagcttgcccaacagcaggcatccgctgcagctgcggccgcagctgctaccgctgcagcaacagcagccactaccacttccgcaggcgtgtctcaccagaatccatccaagaatcgtgaagcaaccgtaaacggagaagagaatcgggcacactcagttaacaatcatgcgaagcctatggagatcgatggagaggtggagattccgagctccaaagcaacggtgcttcgggggcacgagtcggaagtattcatttgtgcttggaacccagtgagcgacctgcttgcttcagggtccggtgattcaaccgcacgaatctggaatctaaacgagaacagcaatgggggaagtacccagctggttctgaggcattgtattagagaaggtggccacgacgtcccttcgaataaggatgtaactagcttagattggaataccaacggaacgctgctggccacaggctcatacgatggttttgccaggatctggactgaagatgggaacctggccagcacccttggccagcataaaggccccatcttcgcgctcaagtggaacagaaagggaaattatatcctcagcgcaggtgtggacaagacaacgattatatgggacgcacataccggggaggcgaagcagcagttcccatttcactcggcccctgccctcgatgtagattggcagaataacaccacattcgctagttgtagcacagacatgtgcattcacgtctgccgcctgggctgtgatcggcctgttaaaaccttccaaggccacaccaacgaagtaaacgccatcaaatgggatccttcaggtatgctgctggctagttgctccgacgacatgaccctgaaaatatggagtatgaaacaagaggtgtgcatacatgacctgcaagcccacaacaaggaaatctacaccatcaaatggtctccaaccgggcctgcaactagtaaccctaatagtaacataatgttggcctctgcttcattcgactccaccgttaggctctgggatattgagcggggcgtttgcacccacactttaaccaaacaccaagaaccggtctactccgtggctttctcccctgatggcaagtatttggcgagcggcagttttgataagtgtgtgcacatctggaacacacagtccggaaatctggtgcactcttaccggggcaccggagggatttttgaggtctgctggaacgcacggggagacaaagtgggagcctccgcctctgacggatctgtttgcgtgcttgacttaagaaaatag

SEQ ID NO: 138250 - DNA, 1734 bp, synthetic construct
  misc_feature 1..1734: note = Description of Artificial Sequence: Synthetic coding sequence
  source 1..1734: mol_type = other DNA
atgactgagctggcaggagcaagctctagctgttgtcatagaccagcagggcgcggggctatgcagtccgtgcttcatcatttccagcgcctgcggggccgcgagggcggctcacacttcataaataccagcagtcccaggggggaggctaagatgtccataacttcagatgaagtgaactttctggtctataggtatctccaggaatctggcttttcacattctgcttttacatttggaatcgaaagccacatatcccagagtaacattaatggcactctcgtgcctcctgctgcgctgattagcattctgcagaaagggctgcaatacgtggaggctgagatcagcatcaacgaagacggtacagtatttgacgggagaccaatagagtcgctgagtctaattgatgctgtgatgcccgacgtcgtccagacacggcaacaggcctttcgggagaaactggctcagcagcaggcctcagcggcagcggccgccgccgctgccaccgccgccgctactgcagctactaccacctccgctggtgtctctcaccagaacccctctaaaaatagggaggctactgtcaacggagaagagaacagggctcacagtgtcaacaatcatgctaagcccatggaaatcgatggagaggtggagattcctagcagcaaggcgactgttctccggggccatgagtccgaggttttcatctgcgcctggaatcctgtatcggacctgctggcttcagggagcggagactctacagcaagaatctggaacctgaacgagaattcaaacgggggctctacacagctggttctgagacattgcatcagagaaggcggtcatgacgtcccttcaaataaggatgtgacgagtttagattggaatacaaatggcaccctgcttgccaccgggagttacgacggctttgcccgcatctggactgaggacggaaacctggcctccacactcggtcagcacaagggtcctatttttgccctgaagtggaaccgcaaaggcaattatatcttgtcggccggagttgacaaaacaacgattatctgggacgcccatacgggggaggctaagcagcagtttccatttcactctgctcctgctttagacgtagattggcagaataacacaacatttgcttcttgcagcaccgatatgtgtatccatgtctgtcggctgggatgcgatcggccggtcaagacctttcagggccacacaaatgaggtgaatgccattaaatgggacccttcggggatgctactggcctcctgctcagacgacatgacccttaaaatttggtccatgaagcaggaggtgtgcattcacgacctgcaggcccacaataaggaaatctacacaatcaaatggagtcccaccggcccagccaccagtaaccctaactctaacatcatgctggctagcgcatcctttgactcaaccgtgcgattgtgggatattgagagaggcgtttgcacacatactctgacaaagcaccaggagccagtgtatagcgtcgccttctcacctgacgggaagtatttggccagcggatcattcgacaagtgcgtgcacatatggaatacacagtccggcaatctcgtgcactcttaccggggtacaggcggcatctttgaagtatgctggaacgcaaggggcgataaggtcggcgcaagcgcttctgacggcagcgtatgcgtactggacctgcgcaaatag

SEQ ID NO: 138251 - DNA, 228 bp, synthetic construct
  misc_feature 1..228: note = Description of Artificial Sequence: Synthetic coding sequence
  source 1..228: mol_type = other DNA
atgtccatcaccagcgatgaagtgaactttctagtctataggtacctgcaagagagcggtttttctcactcagcctttaccttcgggatcgaaagccatatcagtcaaagcaatatcaatggcactctcgtgccccctgctgcattaatctctattctgcagaaaggtctccagtatgtggaggctgagattagcatcaacgaagatggtactgtctttgacgggtag

SEQ ID NO: 138252 - DNA, 138 bp, synthetic construct
  misc_feature 1..138: note = Description of Artificial Sequence: Synthetic coding sequence
  source 1..138: mol_type = other DNA
atgtccattacttccgatgaagtgaatttcctcgtttataggtatctgcaggagagcggcttctcacattcagcctttacatttggcatcgaatcacatatttcccagtctaatattaatggcacactcgtcccctag

SEQ ID NO: 138253 - DNA, 1581 bp, synthetic construct
  misc_feature 1..1581: note = Description of Artificial Sequence: Synthetic coding sequence
  source 1..1581: mol_type = other DNA
atgtccattaccagcgacgaagttaatttcctagtgtaccggtatcttcaggagagtgggtttagccattctgcattcactttcgggatcgaatcccatatctcacagagtaatatcaacggaacgttggtaccgcctgctgctctgataagtatactccagaagggccttcaatatgtcgaggcagaaatttcaatcaacgaggatggcacagtattcgatggccgccctattgagtctctctccctgatcgatgccgtcatgcctgatgttgtacagacgcgacagcaggcctttcgagaaaagctcgcccaacagcaggcatctgccgcagccgcagcagctgccgccacagcagcagcgactgcagcaacgacaactagcgccggcgtcagccatcagaacccaagcaagaatagggaagcaactgtgaacggtgaggagaatcgggcccattcagtgaacaatcatgctaagcccatggagatagacggcgaggttgaaatcccaagcagtaaggccactgttctgcggggccatgaaagcgaggtctttatctgtgcctggaatccagtgtccgacttactggccagcggatccggcgacagcacagctcgcatttggaatctgaacgaaaattcgaatggcgggtccactcaactggtgcttagacattgtatccgagagggtggccacgacgtgccaagcaataaggatgtgactagcttggattggaacaccaacggcaccttgctcgccacgggcagctatgatggcttcgcacggatatggacggaagacggcaacctcgcatcgactctgggtcaacacaaaggcccaatcttcgcactcaagtggaaccgtaaaggtaactacattctctctgcgggcgtggataagactaccattatttgggatgcacacaccggggaggccaaacaacagttccccttccacagcgcccctgcactcgatgtcgactggcagaacaacacaacttttgcttcttgctcaacagatatgtgcattcatgtgtgccgcctgggctgcgatcgccccgtgaagacgttccagggacacaccaacgaggttaatgccatcaaatgggacccctctggtatgctgttggcctcctgttcagacgacatgacactgaaaatttggtcgatgaaacaggaagtttgtatacacgatcttcaggcccataacaaggaaatctacaccatcaagtggagtcctacaggaccagccacctccaacccgaactccaacattatgttagccagtgctagctttgattcaaccgtccggttatgggatatcgagcgaggcgtgtgcactcacacactgaccaaacaccaggagcccgtgtatagcgtggcattcagccctgatgggaaatacctggccagcggcagttttgacaagtgtgtgcacatctggaatacccagagcggaaacctcgtacactcttatagaggcactggaggaattttcgaagtctgttggaacgctcgtggagacaaagttggcgccagcgcgtccgacggctccgtctgtgtgttggatcttagaaaatag

SEQ ID NO: 138254 - DNA, 180 bp, synthetic construct
  misc_feature 1..180: note = Description of Artificial Sequence: Synthetic coding sequence
  source 1..180: mol_type = other DNA
atgaccgagctggccggagccagttcgagttgctgccaccggcccgccggccgaggggctatgcagagcgtgctgcaccatttccagcggctacggggacgagaggggggctcccacttcatcaacacaagctcgccaaggggggaagccaaaatgtccattacctctgacgaggtgtag

SEQ ID NO: 138255 - DNA, 243 bp, synthetic construct
  misc_feature 1..243: note = Description of Artificial Sequence: Synthetic coding sequence
  source 1..243: mol_type = other DNA
atgactgaattggccggggcttcctcctcatgctgccatcggcccgccggcagaggtgccatgcagtctgtcctgcaccattttcagcgcttaaggggtcgggaaggcgggtcgcattttatcaatacaagctcaccgcgcggtgaggccaagatgtctatcacttcggatgaagttaatttcctggtgtaccgctatctgcaggaatccggcttttctcactcagcattcacatttggttag

SEQ ID NO: 138256 - DNA, 1581 bp, synthetic construct
  misc_feature 1..1581: note = Description of Artificial Sequence: Synthetic coding sequence
  source 1..1581: mol_type = other DNA
atgtctatcacttctgacgaggtgaactttctcgtctaccgctacttacaggagtccggctttagtcacagtgcctttacctttggcatagagtcccatatttctcagagcaatataaatggcacgcttgtccccccagcagctttaataagtattttgcagaaggggctgcagtacgtagaagctgaaatctccatcaatgaagacgggactgtgtttgatggaaggccaattgaaagcttatcactcattgatgccgtgatgcctgatgtcgtgcagaccagacagcaggcgttcagggagaagctggctcagcagcaagcatccgcggctgccgctgcggctgccgctaccgcagctgctacagcggctactaccactagtgctggcgtgtcccatcagaacccaagtaaaaatagggaggccacagttaatggcgaggaaaaccgcgcccactctgtcaacaaccatgccaagccaatggagatcgacggggaggtggagattccatcttccaaggccaccgtactcagaggacatgagagtgaagtgtttatttgcgcatggaaccccgtttccgacctgctggcttccggtagtggggactccacagcccgtatttggaacttgaacgagaattccaatggtggcagcacacaacttgtgctgcgccattgtatccgcgagggaggtcacgatgtcccatcgaataaggatgtgaccagcctcgattggaatacaaatggcactctacttgcgacaggaagttacgatgggttcgcaaggatctggactgaggatgggaacctggctagcacgctgggacaacacaaggggcctatttttgcccttaaatggaaccggaaagggaattacattctttctgcaggtgtagacaagacaactatcatttgggatgctcacaccggagaggcaaagcagcagttcccattccatagtgctcctgcgttggatgtggattggcagaacaacaccacctttgcatcttgttccacggatatgtgtatccatgtgtgtcgtcttggttgcgacagacctgtgaaaactttccaggggcatacaaatgaggtgaacgcgatcaagtgggatcctagcgggatgctcctggcgtcctgctcagacgacatgacattgaagatatggtcaatgaagcaggaggtgtgcattcacgacctgcaggcccataacaaagaaatctatacaataaagtggtcccccaccggtccggcaacgtctaaccccaattcaaatataatgttagcctccgcttcgttcgacagtactgttagattatgggacatagaaaggggggtgtgcacgcacacactgaccaaacatcaggaaccagtgtacagcgtcgccttttcccccgacggcaaatatctggcatccggatcttttgataagtgcgtacatatctggaacacccaatcaggaaacctcgtgcactcctatcgcggtacagggggtatattcgaggtctgctggaacgctcggggagacaaggttggtgcttcagcttccgatgggtctgtctgcgtgcttgatctcaggaagtag

SEQ ID NO: 138257 - DNA, 1344 bp, synthetic construct
  misc_feature 1..1344: note = Description of Artificial Sequence: Synthetic coding sequence
  source 1..1344: mol_type = other DNA
atggaattgtctcaaatgtctgagctgatgggactgtctgtgttattgggattgctggcactcatggccacggcggcagtggccagggggtggctgcgagcaggcgaggaacgtagcggccgaccggcctgtcaaaaggcaaatgggtttccacccgacaagagctcagggtcaaagaagcaaaaacagtatcagagaattaggaaggagaaaccccaacaacacaactttacccataggctgttagccgcggctttaaaatctcactcaggcaatataagttgcatggatttcagcagcaatgggaagtacttggctacttgtgcagacgaccggaccattcgtatctggtctactaaggattttctgcagagggagcataggtctatgagagccaacgtcgaacttgaccacgcgactctcgttaggtttagtcctgattgtagggctttcatcgtctggttagcaaatggggataccctgcgcgtgttcaagatgacaaagcgggaggacgggggatacacgttcactgctacaccagaggatttcccaaagaagcacaaggcaccggtcatcgatatcggcattgctaacactggcaaattcataatgacagccagttctgacacgacagttttaatatggtcactgaaagggcaggtgctgtctacaattaacactaatcagatgaataatacccacgccgctgtgtcgccctgcggaaggtttgtggcatcgtgtggctttaccccagatgttaaagtctgggaggtgtgctttggcaagaagggagagttccaggaagtagtgcgcgcctttgagctgaaggggcactccgctgcagtacactctttcgctttctctaacgactcgcggcgaatggcttccgtctccaaagatggcacctggaagctttgggatactgatgtagaatacaagaaaaagcaggatccctatctactgaaaactggtaggtttgaggaagctgcaggagcggccccgtgcagactcgcactctctccaaatgctcaggtgcttgcgctggcaagcggcagttctatccacctatacaatacacgaaggggggaaaaagaggaatgctttgaacgggttcacggagagtgcatcgccaacctgtcttttgatattaccggcagatttctcgccagctgcggcgatcgagcagtcagacttttccacaacactcccgggcaccgagcaatggtcgaggaaatgcaaggccacttaaagcgggccagtaatgaatctactagacagcggttacagcaacagttgacgcaggctcaggaaaccctgaagagcctgggcgcccttaagaagtag

SEQ ID NO: 138258 - DNA, 1341 bp, synthetic construct
  misc_feature 1..1341: note = Description of Artificial Sequence: Synthetic coding sequence
  source 1..1341: mol_type = other DNA
atggaactaagtcaaatgtccgagcttatggggctttccgtgctgttgggcctgctggcactcatggcgaccgccgccgttgcccgcggctggcttcgggccggggaggagcgatcagggaggccagcatgccagaaagccaacgggttccctccagataaaagcagtggatcaaaaaaacagaagcaataccagagaattcgaaaagaaaaaccacagcagcataatttcacccataggctcctggccgccgcactgaagtcgcactcaggaaacatttcctgtatggacttttcaagcaacggaaaatatttagccacttgtgccgatgacaggaccatacgcatttggtccactaaggatttcctgcaaagagagcatagaagtatgagagcaaacgtggagctggaccatgcaacactggtgaggttttcgcccgactgtcgggcctttattgtttggctggcaaacggagatactttacgcgtgttcaagatgaccaaaagggaagatggcggttacacttttacagctaccccagaagacttcccaaaaaaacacaaggcgcctgttatagacatcggcattgctaacacggggaagttcatcatgacagcctcttccgacaccactgtgttaatctggtcgcttaagggacaggtgctcagtaccatcaacacaaaccagatgaacaacacacacgcagcagtgtcaccttgtggacggttcgtggccagttgtggatttactcctgacgtcaaggtctgggaggtgtgtttcggcaaaaagggggaattccaggaagtcgttcgagctttcgagcttaaaggccattcagctgccgtccactcctttgctttctcaaatgactctaggagaatggcatcagtgagcaaggatggaacctggaaactttgggacaccgatgtcgagtataagaaaaagcaggatccatacctgcttaaaacaggtagattcgaggaagcagctggcgcagcgccttgtcggctggctttaagtccaaatgcccaggtgcttgcacttgcctccgggtcttcaattcacttgtataacacccgacgcggagagaaagaggagtgcttcgagagggtgcacggcgaatgtattgctaacctttcgttcgatataacgggccgattcctggctagttgtggagaccgagcagtgagactgttccacaacacccctgggcaccgtgccatggtcgaagaaatgcaggggcaccttaagcgggcatccaatgaatcgactcgtcagcgcctgcagcagcagttgactcaggcgcaggtgaccctgggcggtccaggggctgaagattag

SEQ ID NO: 138259 - DNA, 2427 bp, synthetic construct
  misc_feature 1..2427: note = Description of Artificial Sequence: Synthetic coding sequence
  source 1..2427: mol_type = other DNA
atggctgagaccgccgctggcgtaggaaggtttaaaaccaactatgccgtcgagagaaaaatcgagcccttttataaagggggaaaggcccagttggatcaaactggccagcacttgttttgtgtgtgcggcacacgagttaacatcctggaggtggcttctggcgccgtgctcaggagcctggagcaggaagaccaggaggatattacggcgttcgatctctctccagataacgaggttctcgttactgctagccgggctcttttattggctcagtgggcctggcaagaagggtcagtcacgcggctttggaaagctattcacacagcccccgtggccacaatggcctttgacccaactagtaccctccttgcaacaggcgggtgcgatggcgccgtgcgggtctgggacatagtcaggcactacggaactcatcatttccgcggctcccctggcgtggtgcacctggtggcattccacccggatcctacgaggcttcttctgttcagttccgccacagatgcggccataagggtctggagtctccaggacaggtcttgtctggccgttctcaccgcccattattccgcagtgacatctctcgccttctctgccgacgggcacaccatgctgagttctggcagagataaaatttgtatcatctgggacctgcagtcttgccaggcaacgagaaccgtgcccgttttcgaatcggttgaggctgccgtcctgctgcccgaggaaccagtttctcaactgggcgttaagagtcctggcctctattttttaaccgctggagatcaggggaccctgagagtgtgggaagctgcatctgggcagtgcgtgtacacacaagctcagccaccagggcctgggcaggaactgacgcactgtacgctggcccacactgccggtgttgtgctgaccgctacagcggaccacaatctccttttatatgaagctcgttctctgaggctccagaaacagtttgcaggctacagcgaggaagtgctggacgtgagatttttggggcccgaagactcccatgtggtggttgccagcaactccccctgccttaaggtctttgaattgcagaccagcgcctgccaaatcttgcatggccacacggacatcgtccttgccctagatgtttttcgtaaagggtggctgttcgccagctgcgcaaaggaccaaagcgtgaggatctggaggatgaacaaagctgggcaggtgatgtgtgtggcacaaggatccggacatactcattctgtcggtacggtgtgctgttcacgtttgaaggaatcgttcctcgttaccgggtcacaggactgcaccgtgaagctgtggcctctccctaaggctctcctgagcaagaataccgctcccgacaacggaccaatcttgctccaagctcaaactacacaacgctgccacgataaagacatcaactccgtggcaattgctccaaatgacaagctgctcgcaaccggcagccaggacaggacagctaagctttgggcattgcctcagtgccaactcttaggagtgttctccggccaccgacgcggcctgtggtgtgtccagttcagtcctatggaccaggttcttgcaactgcaagcgcagatgggacaattaagctgtgggctcttcaggacttttcctgtctcaaaactttcgaaggtcatgacgcttccgtgctaaaggtagctttcgtcagccgcggcacccagctgctttcatccggctctgacggtcttgtgaaattgtggaccattaaaaacaatgagtgtgtgaggactctggatgctcatgaagataaggtgtggggacttcactgttcaagactcgatgaccacgctctgaccggtgcttccgatagtagagttattctgtggaaggatgttaccgaggcagaacaagctgaggagcaggctcggcaggaggaacaggtcgttcgtcagcaggaactcgacaacctcctgcacgagaagcgttacctgcgggcactgggcctggcaatctccctggatcgtccgcatacagtgctgaccgtcatccaggcgatccgcagagatcccgaggcctgtgaaaaactggaggcaacgatgttaaggctccgcagagaccagaaagaggccttgctgaggttttgtgtaacttggaatactaacagccgacactgtcacgaggctcaggccgtcctgggtgttctgctcaggcgcgaggcgcctgaggagctgctagcctacgaaggcgtacgggcagcactggaagctctcttgccctacacagagaggcacttccagcgtctgagcagaactctgcaagccgcggcattcctcgatttcctgtggcacaatatgaagctacctgtcccggctgccgcaccaacaccttgggagactcacaaaggcgctctcccctag

SEQ ID NO: 138260 - DNA, 2427 bp, synthetic construct
  misc_feature 1..2427: note = Description of Artificial Sequence: Synthetic coding sequence
  source 1..2427: mol_type = other DNA
atggccgagacggccgccggagtggggcggtttaagactaattatgcggtggaaagaaaaattgaacctttttacaaaggggggaaggcgcagcttgatcagacgggccagcatctcttttgcgtgtgcgggacaagggtcaatattctcgaagtggcatccggtgcggtactccgaagcttagaacaggaggatcaagaagacattactgcatttgatcttagcccagacaacgaagtgctcgtaaccgcatctcgagccttgctcctcgcgcaatgggcctggcaagaggggagtgtaaccagactatggaaggccatccacacagctcctgttgcgaccatggcattcgaccccaccagtacgctgttagcgactggcggctgcgatggtgcagtgagggtttgggatattgtccgacactacgggactcaccatttccgcgggagcccaggcgtggtgcacctggtggctttccatcccgatcctacgaggcttttgctgttttcttctgcaaccgacgccgccatcagagtgtggtctttgcaggacagaagttgtctagctgtgctcaccgctcattactccgccgtcacaagtctcgctttttcagctgatggccacaccatgctttcctccggtcgtgataaaatctgtatcatctgggatctccagtcctgtcaggccactcggacagtgcccgtattcgagtccgtggaggctgccgtgcttctgcccgaggaacccgtgtcccaactcggggtgaagtcccccgggctctacttcctgactgccggtgatcagggcacgctcagagtatgggaggccgccagcggacagtgcgtatacacacaggcccagccacccggccctggacaagagttgacacactgtaccctggcccataccgctggcgtggtgctaacagcaaccgccgaccacaaccttttactttacgaggcacgatcactcagactgcagaagcagtttgcgggatacagtgaggaagtgctggacgtgcgcttcctgggaccggaggatagccacgtggtggtggccagcaacagtccctgcttgaaggtttttgagctccagaccagcgcttgtcagatattacatggtcacaccgatattgtgttggcgcttgatgtgttcaggaagggatggctcttcgcgagctgcgctaaagaccagagcgtgcgcatttggcgtatgaataaagcagggcaggttatgtgcgtcgcacaaggatcagggcatacccactcagtcggcactgtatgctgttctcgcctgaaggagtccttcctggtcaccgggtcccaagattgtacagtgaaactttggcccctccccaaagctctgctgtcgaagaatacggcccccgacaatggacccattctgttgcaagcccagactacacaacggtgtcatgacaaagacataaactcggttgccatcgctcctaatgataagttgctcgcgaccgggagtcaagacaggaccgccaagctctgggcactgccacagtgtcaactgctaggggtcttctccggacacagaagaggtctgtggtgcgtgcagttctccccgatggaccaggtgctcgctactgctagtgcagacgggaccattaaactctgggctctacaggattttagctgtctaaagactttcgaggggcatgacgcatccgtactcaaagtggccttcgtttctcgcggcacccagctgctgtcctccggatccgacgggttggtcaagttatggaccattaaaaataatgaatgtgtcaggacactggacgcacacgaagataaagtctggggcctgcactgcagtcggttggatgaccacgctctcaccggtgcttcagattctagggttattttgtggaaagacgtgaccgaggcagagcaggccgaagaacaggcaaggcaggaggaacaagttgtaagacagcaagagctcgataatctgctccatgagaagcggtatctgcgcgccttggggctggctatcagcttggatcgtccacataccgtgctgacagtcatccaggctattaggagggatcctgaggcttgcgaaaaactggaagcaacaatgctgcgcttgcgtagagatcagaaggaggctctcctgagattctgtgtgacttggaataccaactccaggcactgccacgaggcccaggctgttctgggggtgctcctgcggcgagaggcccctgaagagttgctcgcctatgaaggcgtgcgcgcagcattggaagcactactgccatatactgagcgccacttccagaggctgtcccggaccttgcaggccgccgcatttctggacttcctttggcataatatgaagttaccggtaccggctgccgcgcctacaccttgggagactcataaaggagctttgccttag

SEQ ID NO: 138261 - DNA, 729 bp, synthetic construct
  misc_feature 1..729: note = Description of Artificial Sequence: Synthetic coding sequence
  source 1..729: mol_type = other DNA
atgtttccccagagccgtcaccctaccccacaccaggctgccgggcaacccttcaagttcacgatccctgagtctctcgatcgcatcaaggaagagtttcagtttctccaggcccagtatcattcattgaagctggaatgtgagaagttagctagtgaaaaaactgagatgcagcggcattacgtgatgtactacgagatgtcatacggcctgaacatagaaatgcataagcagacagaaatcgctaagcggctgaataccatctgcgcccaagtcattccatttctgtcccaggagcatcagcagcaggttgcgcaggcagtggagagggcgaagcaggtgacaatggccgagctgaacgctatcataggagtgcgcggcttgccaggccttccaccaacccaacagcagctgcaggcccagcacctgtcccacggtcatggtccacccgtgcccctgacaccccacccctcaggactgcagccacccgggatcccccccctggggggatctgccggattgctcgcactaagcagcgcattaagtggccagagccatttggccatcaaggatgacaagaaacatcatgacgcagaacatcatcgcggggaaagacctggtaagagcaactcgctgctggtcccagactccttgcgtggcacggataaacgccgtaatggacccgaattcagcaacgatataaagaaacgcaaagtggacgataaatag

SEQ ID NO: 138262 - DNA, 435 bp, synthetic construct
  misc_feature 1..435: note = Description of Artificial Sequence: Synthetic coding sequence
  source 1..435: mol_type = other DNA
atgcagagacactacgtcatgtactatgaaatgagttacgggttgaacatcgagatgcataagcagactgagatcgccaaaaggcttaatacaatctgcgcacaggttatcccattcctcagtcaggaacaccaacaacaggtagcccaggccgtggaacgtgccaagcaagtcaccatggcggaattgaatgctatcatcgggcagcagcaactgcaagctcagcatctgtcccatgggcatgggccaccggtgcctttaacaccgcacccttctggtctgcagccccctggaattcctcctctggggggatccgcgggactgctggctctcagttcagctctgagtggccagtcacacctggccattaaggatgataagaaacaccatgatgctgagcaccaccggggggagcgccccggaaaacctgattag

SEQ ID NO: 138263 - DNA, 384 bp, synthetic construct
  misc_feature 1..384: note = Description of Artificial Sequence: Synthetic coding sequence
  source 1..384: mol_type = other DNA
atgcccacaccagggacgagtgctacccccggattgaggcctgggctcggaaaacccccggctatcgatccactggttaaccaggctgcagccggtttaagaacaccgttagcggtccctggcccatacccggcccccttcggcatggtgccacacgccggtatgaatggagagttaaccagccccggagctgcttacgcctcgctgcacaacatgtctcctcagatgagtgcagctgctgcagccgccgcggtcgtggcttacgggcgttccccgatggtcggcttcgaccctccgccccacatgagggttcccaccataccaccgaacttggcaggcattccaggggggaagcctagcctagtgcctgctcccgcccattag

SEQ ID NO: 138264 - DNA, 384 bp, synthetic construct
  misc_feature 1..384: note = Description of Artificial Sequence: Synthetic coding sequence
  source 1..384: mol_type = other DNA
atgccaacaccgggaacctccgcaacccccggattgagaccggggctcggcaagccacctgctatcgatccattggttaatcaggcagctgcaggtctccgcacgcctctggctgtgccaggcccttatcctgccccgttcggcatggtcccgcacgctgggatgaatggggagctgactagtcccggggctgcctacgcatccctccacaacatgagcccacaaatgagcgctgctgctgcggctgccgccgtggtagcttatggaaggagtcctatggtggggtttgacccacctccccatatgagagtcccaacgattcctcctaatctcgccggaatacctggcggcaagccctcacttgtacccgctcccgctcattag

SEQ ID NO: 138265 - DNA, 2313 bp, synthetic construct
  misc_feature 1..2313: note = Description of Artificial Sequence: Synthetic coding sequence
  source 1..2313: mol_type = other DNA
atgttcccccagtctagacaccctacgccacatcaggccgctggacagcctttcaagtttacgataccggaaagtctcgatcgtataaaggaggaatttcagttcctgcaggctcagtaccatagtttaaagctggaatgtgaaaagctggcctcggaaaagaccgagatgcagagacactacgtcatgtattatgaaatgagctatggcttgaatattgaaatgcacaaacaaaccgaaattgccaaaaggctgaataccatctgtgcgcaggttataccctttcttagtcaagaacatcagcagcaggtggcacaggccgttgagagggcaaaacaggtgacgatggctgaattgaatgccatcattggacagcaacagctgcaagcacagcacctgagccacggccatggacctcccgtcccactcacaccgcacccatccggattgcagcctccaggtatcccgcctctcggcggctctgccgggttactggcactgagcagcgctttgagcggtcagagccatcttgcgatcaaggacgacaagaagcaccatgatgccgagcaccaccgggatagagaaccgggcacttctaactctctcctagttcctgattccttaaggggtacagataagaggaggaatggtcctgaattcagtaatgacattaaaaaaaggaaggtggacgacaaagactcaagccattatgactctgacggagataaatctgatgacaacctggtcgtcgatgttagcaacgaagaccctagtagtccaagggcctcaccagctcattctcctagagagaacggcatcgacaagaaccgacttctcaaaaaggatgccagctctagcccagcaagcacagcttcatctgcctcttccaccagcttaaagtctaaagagatgagcttgcatgagaaggccagtaccccggttttgaaaagctctaccccgacgcccaggtccgacatgccaactcccggtacatctgctacccccggtcttcgcccagggttggggaagccccctgctatcgacccattggtgaatcaggccgcggccgggcttagaacaccacttgcagtgccgggcccttaccccgcgcctttcgggatggtcccacacgccggtatgaatggcgaactaacctctcccggagccgcctacgcttctctgcacaatatgagccctcagatgtccgccgccgccgcagccgccgccgtggtggcatacgggcggtctcccatggttggatttgaccctccaccccatatgagagtgcctacgatacctcccaatctggccggcattcccggcgggaagcccgcatattcattccacgtgacggccgatggccaaatgcaacccgtcccattcccccctgatgccctcattggacccggtatcccacgccatgctcggcagatcaataccttgaatcatggggaagtcgtctgcgcggtgacaattagtaatcctacccgccacgtatacaccggaggcaagggctgtgtgaaggtgtgggatattagccaccccggcaacaagtcgccggtcagtcagctcgattgcctgaaccgagacaattacatacgatcctgtaaactgctgccggacggttgtacactgattgtggggggggaggcatccacgctgagcatttgggacctggcagcccctaccccccgaattaaggccgaactcacgtccagtgctcccgcttgttacgctctggccattagtcctgatagcaaggtgtgctttagctgttgctctgacgggaatattgccgtctgggatctccataaccagacattggtacggcagtttcagggccacacggacggggcttcctgcatagatatctctaacgatggcacaaagctctggaccggtggcctggataacactgtgcgtagctgggacctgcgggaaggtcggcagctccagcaacacgactttaccagccagattttttcactcgggtattgcccaactggggagtggctcgctgtgggaatggaatcatccaatgtcgaagtgctccacgtaaacaagcctgacaagtatcaactgcacctgcacgaaagttgcgtattatccctgaaattcgcctactgtggcaagtggttcgtgtcgacaggaaaagataatctgctcaacgcctggcggactccctatggcgctagcatttttcagagcaaggagtcctcctcagtgctcagttgtgatatcagcgttgacgacaaatacattgtgaccgggtctggagacaaaaaggcaacagtatatgaagtgatttattag

SEQ ID NO: 138266 - DNA, 729 bp, synthetic construct
  misc_feature 1..729: note = Description of Artificial Sequence: Synthetic coding sequence
  source 1..729: mol_type = other DNA
atgttccctcagtcccgccatccaactccccatcaggctgctggccagcctttcaagttcactataccagagagccttgatcgcatcaaggaagaattccagttcctgcaggcccagtaccactcgctcaaactcgagtgtgagaagctggcttcggagaagaccgagatgcaaagacattacgtgatgtattacgagatgagttatgggcttaatattgaaatgcacaagcaaaccgagatagccaagcgcctcaatacaatctgtgcacaggtcatacccttcctgagtcaagagcatcagcagcaggtggcacaggccgtcgagagagcgaaacaggtaaccatggcggagctgaacgcaatcattggggtgcgaggtctgccagggttgccacccacacagcagcagctgcaggcccagcacttgagtcacgggcacggtcccccggtccccctaacaccgcacccctctggattacagccgcccggcatcccgccccttggaggaagtgcaggcctgctcgcactgagttccgctttgagcggacagagccatctcgccattaaggatgacaaaaagcatcatgatgccgagcaccatagggatagggaacctggaacttcaaatagcctcttagtacctgactcgctacgcgggaccgacaagagaagaaatgggccagagttttccaatgacataaagaagcgaaaggtggatgacaaatag

SEQ ID NO: 138267 - DNA, 2121 bp, synthetic construct
  misc_feature 1..2121: note = Description of Artificial Sequence: Synthetic coding sequence
  source 1..2121: mol_type = other DNA
atggtccaatcgcgactgactgcaacatccgcctcacaggattctcctgcctccgggctccagactcccctgcagtcgggacagcctttcaagttctcaattcttgagatatgtgatagaattaaggaggagttccaattcctgcaggcacagtatcacagtttgaaactggaatgcgaaaaactggcgtctgaaaaaacggaaatgcaacgacactatgtgatgtattacgagatgtcctacgggctcaacatcgagatgcataaacaagcagaaattgtcaagcgtctaagtggaatctgcgctcaaataataccctttttgacccaggagcaccagcagcaggtactccaggccgtagaaagagctaagcaggtaaccgtcggagaactaaacagtttgatcggccagcagcagctgcaaccccttagccaccatgctccaccagtcccgctcaccccgaggccggccggccttgtcggtggctccgcaacggggctcctggccctctctggcgcacttgctgctcaagctcaactggccgccgccgtgaaagaagatcgagcaggggtggaggctgaaggatcccgtgtggagcgtgctccatctcgcagcgcctccccatctccacccgaaagtctggtagaagaggaacggcccagcggacccgggggaggaggcaaacagagggcagacgaaaaggaacctagcggtccatacgaatcagatgaggataaaagcgattacaatcttgtggtggatgaagaccagcctagcgagccgccatctcccgccacaacaccctgcgggaaggtccctatttgcatccctgccaggagggacctggtcgactcccctgcaagcctcgctagctcgcttggcagccccctaccacgcgcaaaggaacttatattgaacgaccttcctgcctcgacccccgctagcaagtcatgtgactcttccccgcctcaggacgctagtacacctggtccctctagtgcttcacacttatgccaactggctgctaaacctgcgccttctactgattcagtggccctgcgctccccattgacactgtcaagcccgtttaccactagcttctcactgggtagccacagcacattgaatggcgaccttagcgtgccctcatcgtacgtgtccttacacctgtctccccaagtgtccagtagcgtggtttatggccgctctccggtcatggcgttcgagtctcacccgcatctgcgcgggagcagtgtctcctcgagtctgccttcaataccgggaggcaaacctgcttacagcttccacgtaagcgctgatggccagatgcagcccgtgccttttcccagcgacgctttggtgggggccggaatcccccgccacgctaggcagctccataccttggcgcacggcgaagttgtgtgtgctgtgaccatatcaggaagcacacagcacgtgtacactggtggaaaaggctgcgtgaaagtctgggacgttggtcagcccggagccaagacacctgtggcacaactcgattgcctcaatagagacaactatattaggagttgtaagcttctgcccgatggccgttcactcattgtgggaggcgaagcctctacactctccatatgggatctggcagcgcccacacctcgcattaaggcggagctgacctctagcgccccagcatgttatgccctggctgtcagcccagatgctaaagtttgcttttcctgttgtagtgacggaaatattgtcgtgtgggatctgcagaatcagaccatggttcgccagttccaggggcataccgacggggcttcgtgcatcgacatcagtgattacgggacacggctgtggaccggagggctggataatacggttcggtgctgggacttgcgggaggggagacaactgcagcagcatgacttttcatctcaaatattctccctcggccactgcccaaaccaagattggctggccgtcggcatggaatcctccaatgttgaaatcctgcatgttaggaagccggagaagtaccagcttcatttacacgagagttgtgtgctaagtttgaagttcgccagctgtgtgcagggcgtcgtgctgtctccagagctgtag

SEQ ID NO: 138268 - DNA, 2232 bp, synthetic construct
  misc_feature 1..2232: note = Description of Artificial Sequence: Synthetic coding sequence
  source 1..2232: mol_type = other DNA
atgtacccacaaggccggcacccaaccccactacagtcaggacaaccttttaaattcagcatcctggagatctgcgacaggatcaaggaggagttccagttcctccaggcccaatatcattccctaaaactggagtgtgaaaagctcgcatccgagaaaacagagatgcaaaggcactatgttatgtattacgaaatgagttacggcctgaacattgagatgcacaaacaagcagagatcgtgaagcgcctctctggaatctgcgctcaaatcattccatttctcactcaggagcatcaacagcaggtactgcaggcagtggagcgagcgaaacaggtgaccgtgggcgaactgaattcactgatcggccaacagctccaaccgcttagccatcatgccccccccgtgccactgacccccagaccagccggactggtcggcggttctgctacaggcctgctagctctgtcaggggccctggcagcacaagcacagctggctgctgcagtcaaggaggatcgcgctggcgtcgaggccgaagggtccagggtagagagagcaccatccagaagcgccagcccttctcctcctgagtctctggtggaggaagagaggccctccgggccgggaggcggcggcaaacagagggcagacgaaaaagagccttccggcccctatgaatccgacgaggataagtcagattataatcttgtggtcgacgaggatcagccctccgagcctccttcccccgccacaacgccctgcggcaaggtcccaatttgcatccccgccagaagggatctggtagacagccctgccagccttgcttcctctctcggaagtccactccctcgggcgaaagaactcattttaaacgatctccctgccagcactcctgcgagcaagtcctgtgactcctcacccccccaggacgcctccacccctggaccaagtagtgctagccacctgtgccagctggctgcaaagcccgcgccctcaaccgatagcgtggccttaaggtcacctctgacgttaagttcccctttcacaactagcttcagcctgggatctcactccacactaaatggtgatctgagcgtgccatcatcctacgttagtctgcacctctctccgcaggtctcttcgagcgttgtatatggcagatcaccagtgatggccttcgagtcccaccctcacctcagaggctcttcagtttcctcatccctacccagtatcccgggaggcaaaccggcttatagcttccatgtgtccgctgatggccagatgcagccggtaccattcccttccgatgccctcgtgggggctggcatcccacgacacgccaggcagctgcatacactcgctcatggtgaggtcgtgtgcgcggttacaatctctggctcaacacaacacgtgtatacaggaggaaaaggttgcgtgaaagtttgggatgttggccagccaggagccaaaacccctgtggctcaattggactgcctcaatcgggataactatattcggagctgtaagttactgcctgacggacgctcactgatagtcggcggcgaagcatctacactttctatttgggacctagctgctccaactcctaggattaaagccgagctcaccagttccgcacccgcctgttacgcattagccgtatcgccagacgcgaaagtctgtttcagctgttgcagtgatggaaacatagtagtatgggatttacagaatcagaccatggtgagacaattccagggacacaccgacggggctagttgcatagatatttccgattacggaacccgtctttggaccggtggactggataacaccgtgcgctgttgggacctgagggaagggaggcaactccaacaacatgatttctccagccagatcttcagtctgggacattgtccgaaccaagactggctggctgttggaatggaatcctccaatgtcgaaatcctgcacgtgagaaagcctgagaagtatcagctgcatcttcatgagtcctgcgtcctgtctctgaaatttgctagctgcggtcgatggttcgtttccaccggcaaagacaaccttctcaacgcttggagaactccttacggagcatccatctttcagagcaaggaatcctctagcgtgctgtcatgcgatatttctcgcaacaataagtacatcgtcaccggctccggagataagaaagccactgtgtatgaggtagtgtactag

SEQ ID NO: 138269 - DNA, 879 bp, synthetic construct
  misc_feature 1..879: note = Description of Artificial Sequence: Synthetic coding sequence
  source 1..879: mol_type = other DNA
cttgcccacggcgaggtggtttgcgccgtaaccattagtggctccacccagcacgtgtataccggagggaagggctgcgtgaaggtgtgggatgtagatggtgcagtgttcgcagggcagcggggaggggcacaccagcctatacgtaatagggacaactatatccgctcttgtaagctgttacccgatgggcgttcactgatagtggggggtgaagccagcactctgtcaatctgggacctggccgcccccactcctcgaataaaggccgagcttacatctagcgcccccgcgtgttacgctcttgctgtaagtcctgacgctaaagtttgcttctcatgctgcagcgacggcaatatagtggtctgggatctgcagaatcagaccatggtaagacaattccaaggacacacagacggtgcctcgtgtatcgacattagcgattacggaaccaggctgtggaccggcgggctagataacacagttcgatgctgggatctgagggagggccgtcaactgcagcaacatgatttcagctcccagatattcagcctgggtcattgtcctaaccaggattggctggccgtcggtatggaatcgagcaatgttgagattctccatgtcagaaagcccgaaaaatatcagctgcatctgcatgaatcttgcgtgctgtcattgaagtttgcttcatgcggtcggtggttcgtcagtactggcaaggataatctactgaacgcctggcggacgccttacggtgccagtatcttccagtctaaggagtcttcatctgtcctgtcctgcgacatttcccgcaacaataagtacatcgtgaccggctctggagataaaaaagcaaccgtctacgaagtggtgtattag

SEQ ID NO: 138270 - DNA, 2121 bp, synthetic construct
  misc_feature 1..2121: note = Description of Artificial Sequence: Synthetic coding sequence
  source 1..2121: mol_type = other DNA
atggttcaatctagacttactgcaaccagcgcttcccaagacagtcctgcctcaggcctgcagacacctttgcagtctgggcagccctttaagtttagcattctggagatctgcgaccgcattaaggaggagtttcagtttctgcaggcccagtatcattccttaaaactggaatgtgagaaattggcttctgagaaaaccgagatgcagaggcactacgtcatgtactacgaaatgtcgtacggtctgaatattgaaatgcataaacaggccgaaattgttaaacgactcagtggaatttgcgctcagatcatccccttcttgacccaggagcaccagcagcaggtcctgcaggccgttgagcgcgctaagcaggtcaccgtgggcgaacttaattcattgataggtcagcagcagcttcagccactgagccaccacgctcctccagtgcccctgacaccgaggccggctgggctggtcggaggctctgcgaccgggcttctcgctctgtccggggcgctggcagcccaggcccagctggcagcggccgtgaaagaggacagggctggcgtggaggccgaaggctctcgggtggaacgggcaccgagcagatcggcgtccccgtcgcctcctgaaagcttagtagaagaggaacgccctagcggccctggaggaggtggcaaacaaagggcggacgagaaggaaccatctggaccttacgagtcagacgaagacaagagtgactacaaccttgtcgtagatgaggatcaacctagcgagccgccatcgcctgccacaactccatgtgggaaagttcctatctgcataccggcaaggagagacctggtggattcccccgcctctcttgctagcagcctcgggagtccactcccacgagcaaaagaattgatcctgaatgacttaccagcaagcactcctgcaagcaaatcgtgcgactcctcacccccacaggatgcttctacccctgggcccagcagcgcttctcacctgtgccagctcgccgccaagcccgccccaagtacagatagcgtggcactgaggtcccccttaacactttcttccccattcacaacatccttctctctgggaagccacagcacactcaatggcgatctttccgtgccctcctcttatgttagcctgcacctcagcccccaggtcagtagcagcgtcgtgtacggtcgctcacccgtcatggcttttgagtcacatccccaccttcgagggtcttctgtgtcttcgagcctcccgtccatccctggaggcaaacccgcctacagctttcacgttagcgccgacggtcagatgcagccagtgcccttcccaagtgatgcactagtcggagccggtatcccgcggcatgcccgccagttgcacaccctggcgcatggtgaagtcgtatgcgcagtgacaatcagcgggagtactcagcacgtatacactggcggcaagggttgcgtcaaagtctgggacgtggggcagccaggagccaagactcctgtagcccagttagactgtcttaaccgagacaattacatcagatcctgtaagctgctgccagatggaagatcactgatagtgggcggagaagcttctacactctccatatgggacctagcggcacctactccgcggataaaggccgaactcacctcgtcagccccggcgtgttatgccctggccgttagccccgatgctaaggtttgtttctcgtgttgcagtgacggcaatatcgttgtctgggatctgcagaatcagaccatggtgagacagtttcaagggcataccgacggggcgtcttgcatcgatattagcgattacggtactcgattgtggactggcggactggataacaccgtccgatgctgggacctgcgggagggtcggcaactgcagcagcacgacttctcatcccaaattttttcactgggtcattgccctaatcaggactggctcgccgtggggatggaatctagcaatgttgaaatcctgcatgtgcgcaaacctgagaaataccagttacacttgcatgagtcttgcgttctgtctctgaagttcgcctcttgcgtccaaggcgtggtactgtcacccgaactgtag

SEQ ID NO: 138271 - DNA, 1083 bp, synthetic construct
  misc_feature 1..1083: note = Description of Artificial Sequence: Synthetic coding sequence
  source 1..1083: mol_type = other DNA
atgtatccacagggtcgccatccgaccccattgcaaagcggccagccctttaagtttagcatccttgagatatgcgatagaataaaagaggaatttcagtttctgcaagcacaatatcacagcctcaagttagagtgcgaaaaacttgcttctgagaagaccgaaatgcagcgccactacgtcatgtactatgaaatgtcctacggcctcaacatagagatgcacaaacaagcagagatcgtaaagcgactgtcgggtatttgcgcccagataatccccttcttgacccaggaatctgccagcccatcccccccggaaagcctagtggaggaagaacggccctccggcccaggcggaggtggcaagcaaagggctgacgaaaaagaacctagcggtccttacgaaagcgatgaggataagagtgactataatctggtggtagacgaagaccagccaagtgaacccccgtccccagcgactacaccctgtggcaaggtcccaatttgcataccagctaggcgtgatctggtggactcacccgcttctctagcttctagtctgggctctcccctgcctagggcaaaggaattaattctcaacgatctgcctgcaagtacgcccgcttccaaatcttgtgacagtagcccacctcaagacgcttccacccccgggccaagctctgcatctcacctgtgccaattagcagctaaaccggcccctagtacagatagtgttgccctccggtcaccactgaccctcagcagcccgttcactaccagtttctccctaggtagccattcgactctgaatggcgatctgagcgtaccctcttcctatgtgagtctgcacctctcgccacaagtcagttcttcagtcgtttacggacgatcgcccgtgatggcattcgagagccatcctcatctccgggggagctcggtgtcgtccagcctgccttcaatacccggaggtaagcctgcttattccttccatgtaagtgccgatggccagatgcagccagtcccatttccttcggacgcgctggttggtgccgggattcctccctggccctcatccaccgcttag

SEQ ID NO: 138272 - DNA, 1866 bp, synthetic construct
  misc_feature 1..1866: note = Description of Artificial Sequence: Synthetic coding sequence
  source 1..1866: mol_type = other DNA
atgcagagacattatgtaatgtattatgagatgtcctacggactgaatatcgagatgcataaacaggcagaaattgtgaagcggctcagcggcatctgcgctcaaattatcccgttccttacgcaagagcatcagcagcaagtgcttcaggccgttgaaagagccaagcaggtcacagtgggcgagctcaactctctgatagggtctgcatccccctcaccgcccgagagcctggtcgaggaggagaggccatccggaccaggcggcggtggaaaacaacgggctgatgagaaggagccatcgggaccgtacgaaagcgacgaagacaagagcgactataatctggttgttgacgaggaccagccaagcgagccgcctagccccgctacaactccatgcgggaaagttcctatttgtattcccgcaaggcgcgacctggtcgacagccccgcttccttagcctccagtctggggagtccactgccccgggccaaggaattgatcctaaacgacctccccgcatctactcccgcctctaagtcttgtgattcttctcctccacaggacgccagcaccccaggtccttcgtcagcaagccacctttgccagctcgctgccaagcccgccccaagcactgatagcgtagcactccggagcccgctgaccctgtcttcccccttcacaacaagtttctccctgggtagccactctacacttaacggcgatttgagcgtgcccagctcttacgttagcttgcatctttcaccccaagtttccagcagcgttgtctatggtcggtcccccgtaatggcatttgagtcacatccacacctacggggctcctcagtcagctctagcctgccatccatcccgggtggcaagccggcttattccttccatgtttctgcggacgggcagatgcagcctgttccattccccagcgatgcacttgtcggagccgggattccacgccacgccaggcagctccacaccctggcacatggcgaagtggtatgcgcagtcaccattagtgggtccacccaacatgtgtatacgggcggtaaaggctgcgttaaagtgtgggatgtcgggcagcccggggctaagacaccagtggcccaactcgactgcctgaatagggataattatatccgcagttgcaaactgctaccggatgggaggagtctgatagttggaggagaggcttctacccttagcatttgggatcttgcagccccgacaccaaggattaaagcagaactcactagctctgcacccgcctgttacgccttagcagtgtctccggacgctaaagtgtgctttagttgctgctccgacggcaatattgtagtgtgggatcttcagaatcagacaatggttaggcaattccaggggcacacagatggggcatcgtgtatcgacattagcgattatggcacaaggctgtggactggcggcctggataatactgtcagatgttgggatctacgtgaaggaagacaacttcaacagcacgatttttcctcgcagatattctctctaggacactgccccaatcaggactggctcgcagtagggatggagagctcgaatgtagaaatcctgcatgtgcgcaagcccgagaagtatcagttgcacttgcacgagtcgtgcgtcctctcgctgaaatttgcgagttgcgggcggtggttcgtttctaccggcaaagataatctcttgaacgcctggcggaccccgtatggggcgtccattttccagtctaaggaaagcagctcagtactctcatgcgacatatcacgtaataacaaatacatcgtcacaggcagcggcgataagaaagcaactgtttatgaggtcgtatactag

SEQ ID NO: 138273 - DNA, 1233 bp, synthetic construct
  misc_feature 1..1233: note = Description of Artificial Sequence: Synthetic coding sequence
  source 1..1233: mol_type = other DNA
atgaccttcccccctgcactgttaccccccaatccagtaactcctccgagaccaagaaccttgccacccccaggcccggcacgacccgtgacctctgcaagtctgctaccaagccagcacctaccccgtaccgctagcgtctcttcttcagtggtctacggaagatcgccggtgatggcctttgagagtcacccgcatttgcgcggctctagcgtcagctccagcctgccttccattcccggagggaagcccgcatacagcttccatgtgtctgccgacggccagatgcagccagttccattccctagtgatgccttggttggagccgggatccctagacacgcaaggcagctgcatactctggcgcatggagaggtcgtttgtgcagtcactatctccggcagcacccaacatgtgtatacgggaggtaaaggttgcgtgaaggtttgggacgtcgggcagcccggcgccaaaacacccgtagcacagctggattgcctgaacagggataactatatcagaagctgcaaacttttgcctgatggacggagtttaatcgtcgggggggaggctagtacactgtctatatgggatctagcagctccaacgccccgcatcaaggccgaattgacatccagcgcacccgcatgctatgcattggccgtgagcccagacgcaaaggtatgtttctcatgctgttcagacggtaatatagtcgtctgggatctgcaaaatcagacaatggtgcggcagtttcagggccacactgacggggcctcatgcatcgacatctcagattacgggacgcggctttggaccggaggccttgacaacaccgtacgatgttgggacctgagagaggggcggcagctgcagcagcacgacttctcttctcagattttctcgctggggcactgtcctaatcaggattggctggctgtcggcatggaatcatccaatgtcgagatcctgcatgtgaggaaacccgaaaagtatcagctacatttacacgaatcttgcgttctgagcctgaagttcgcttcatgtggacgatggttcgtgagcacaggcaaagacaatcttctgaatgcctggaggacaccatatggcgcctccatcttccagagtaaagagtcctccagtgtgctgtcatgcgacattagccgcaacaacaagtacattgttaccggatcaggggataaaaaggccaccgtgtacgaggttgtgtactag

SEQ ID NO: 138274 - DNA, 2061 bp, synthetic construct
  misc_feature 1..2061: note = Description of Artificial Sequence: Synthetic coding sequence
  source 1..2061: mol_type = other DNA
caaacccctctgcaatccggtcagccctttaaattctctatcttggaaatctgtgatcggataaaggaggagttccagtttctacaggcccagtaccacagccttaaactggaatgcgaaaagctggccagcgaaaaaaccgagatgcagcgtcattatgtgatgtactacgagatgagctatggcctgaacatcgagatgcacaaacaagccgaaatcgtcaaaagactctctggaatctgcgctcaaattatcccatttctcacccaggagcatcaacagcaggttttgcaggcggtggaacgcgccaagcaggtaactgtcggagagctaaattcgctgataggccagcaacagttgcagcccctctcccatcatgctcccccagtgcctctgacaccccggccggctggactagtggggggttcagccaccggtttactcgccctgtctggggcccttgctgcacaggctcagctcgccgccgctgtgaaagaggatagggcaggcgtggaggctgaaggtagtcgagtcgagcgagctccgtcccgctcagcttcgccatccccccctgaaagtttggtggaggaggaacggccgtctggccccggaggcggcgggaaacagcgcgctgacgagaaggaaccgagtggcccctacgagtctgatgaagataagagcgactacaacctggttgtggatgaggatcagcctagtgagccaccctcaccagccaccaccccctgtggaaaagtccccatttgcatcccagcgcgccgcgacttggtggactctccagctagtctcgcgtcctcccttggttctcctcttccgcgggcaaaagaattaatcctgaatgatctgccagcgtccactcctgcaagtaagtcatgtgattctagccctcctcaggatgcaagtacccccggtccctcctccgcctctcacctttgtcagctcgcagctaaacccgcaccgtctacagatagcgtagctctcagatccccactgaccctctcctctcctttcacaacaagctttagcctggggtcacactctacactcaatggcgacctgagcgttccgtcgtcttatgtttctctgcacctaagtccacaagtgtcaagctcagtcgtgtatggccgttctcctgtgatggcctttgaaagtcacccacacttgcgaggcagcagcgtttccagcagtcttcccagcattcctggtggaaaaccagcctactcgtttcatgtctccgcagatggtcaaatgcaaccagtaccattccctagcgacgctctcgtgggggccggaattcctcggcacgcaagacaactgcacactttggcccatggagaggtagtgtgcgcggtaaccatttccggtagtactcagcatgtctacactggggggaaggggtgcgttaaggtttgggacgtggggcagccaggggccaaaaccccagtcgctcagttggactgtcttaaccgagataattatattcgaagctgcaaactgctgccagatggcaggagtctcattgttggcggcgaggcatccaccctcagtatttgggatttagccgcccctactcctcgcataaaagcagagttgacaagctctgctccagcatgctatgcactagcagtctcaccagatgcgaaagtgtgcttcagttgctgctctgacggcaacatagtcgtttgggatctacagaatcaaaccatggttagacaattccaggggcacactgacggggcgtcttgtatagatatctcagattacggcaccaggctatggacaggggggttagataatacagtgcgttgttgggacttacgtgaggggcgccagctgcagcagcacgacttctcctcccaaattttctcgcttgggcattgtcccaaccaggactggctagcagtggggatggaaagtagtaatgtggagatcttacacgtccggaaacccgaaaagtaccagttgcacctgcatgagtcctgcgtgctgagcttgaaattcgcgagttgcgtgcagggagtggtgctctcccctgagctctag

SEQ ID NO: 138275 - DNA, 1866 bp, synthetic construct
  misc_feature 1..1866: note = Description of Artificial Sequence: Synthetic coding sequence
  source 1..1866: mol_type = other DNA
atgcagcgccactacgtgatgtattatgaaatgtcttatggactgaacatcgagatgcacaaacaggccgagatagtgaagcgcctgtcagggatttgcgcccagatcatcccgttccttacccaagagcatcaacagcaggtccttcaggccgtggaacgggccaaacaggtgactgtgggtgaactaaattccctgatcggatctgcgtctccgtctccaccagagagcttggtcgaagaggaaagaccctcagggccaggcgggggtgggaaacagcgagccgacgagaaagagccctccgggccatatgaaagtgacgaagacaaaagtgattacaacctggtcgtggatgaggatcaaccaagtgagcctccaagccccgctacgaccccatgtggcaaggtgcccatatgcattccagccaggagggatctcgtggactcccccgccagcctagctagctcattgggcagtcccctccctcgggccaaggagcttattctgaatgatctgcccgcttcaacacccgcatccaagagttgcgatagctcacccccacaagatgcttctaccccaggccccagttcagccagtcacctttgccaactggcagcaaaaccagccccatctactgactccgtggctctcagatcaccactgactctgagttctcctttcacaacatcttttagcttgggttcacacagtactttgaatggtgatttgtccgtcccatcaagctatgtgagtctgcatttgtctccacaggtgagtagcagtgttgtgtacgggaggtctcccgtgatggcatttgaatcccaccctcacctgaggggttcctctgtgagctcttcgctcccgtctatccccggtggcaagccagcatacagctttcatgtgagcgccgatggacagatgcaacctgtcccattcccttctgatgccctggtgggcgcaggaatacctagacatgcacgccagcttcatacactggctcatggagaagtcgtgtgcgccgtgaccatctctggaagtactcagcatgtctataccgggggcaagggatgcgtcaaggtctgggacgttggacagccaggagctaaaactccagtggcccagttggattgtttaaaccgggataactacatccgatcctgtaaactactccccgacggtcggagtttaattgtgggcggggaagcgtctacactcagtatttgggatctcgcggctcccactccgcggatcaaagctgagctgacatcttccgctcctgcttgctatgcactggctgtatctcctgatgccaaagtctgcttttcttgctgttccgacggcaatatcgtggtgtgggatctgcagaatcaaacgatggtgagacagttccaaggacacactgacggggcttcatgtatcgacatatctgattatggcactcggttatggaccggagggctggacaacacagtccgctgttgggacttgcgtgaaggacggcaattacagcagcatgatttttcctcacagattttctctttgggacactgccctaatcaggattggttagctgtcggaatggagagttccaacgtggaaattttacacgtacgtaaacctgaaaagtatcagttgcatctgcatgagagttgtgtgcttagtcttaagttcgccagctgtggacggtggttcgtgtctacagggaaagacaacctgttaaacgcttggaggactccttacggtgcttctatcttccagtccaaggagagcagctctgtgctgtcatgtgacattagtagaaacaacaaatatatcgtgaccgggtccggggataagaaggccaccgtgtatgaggtggtttattag

SEQ ID NO: 138276 - DNA, 2283 bp, synthetic construct
  misc_feature 1..2283: note = Description of Artificial Sequence: Synthetic coding sequence
  source 1..2283: mol_type = other DNA
atgtacccacagggcaggcatccagcaccccaccagcccggtcagcccgggtttaaatttaccgtggcagaaagttgcgatcgaattaaagacgagtttcagttcctgcaggcccagtatcattctcttaaagtcgagtacgataagctggccaacgaaaagaccgagatgcagcggcattacgtgatgtactacgaaatgagttatggcctcaatatcgagatgcacaagcagaccgaaatcgccaagcgattaaacaccatccttgctcaaattatgccttttttgtctcaggagcaccaacagcaggtggcgcaggcagttgagcgcgcaaaacaggttaccatgaccgaactcaatgctatcattggacagcagcagttgcaggcacagcatctgagccacgctactcacggacctcccgtccagctgccaccacaccccagcggactgcaacccccaggtatcccacctgtgaccggctcatcctccggcttgcttgccctcggggccttgggaagtcaggctcaccttaccgtgaaagacgagaagaatcatcatgaactggatcatcgtgaaagggaatcctcagctaataactccgtcagtcctagtgaatccctgcgtgccagcgagaaacacaggggcagtgctgattattctatggaagctaaaaaaaggaaagctgaggaaaaagactctctctccaggtacgattccgacggcgacaaatccgatgatctggtagtcgatgtcagtaatgaggaccccgcgacaccccgcgtatcaccagcccactcccctcccgagaatggcctcgacaaagcccgaagtttaaaaaaggacgccccgacaagccctgcctcagtggctagctcgagttccacgccgtctagcaaaactaaagatctcggtcacaatgacaaaagcagtactccaggcctgaaatctaacacaccaacgcctcgcaacgacgctcccactcccggtacatccaccactcccggattacgatccatgccagcctctgccttgcgaacaccaatctccatcacttcttcatacgctgctcctttcgcaatgatgtctcatcatgagatgaatgggtcactgacttcccctggggcctatgctggcctccacaacattccaccgcaaatgtcagcagccgctgcagccgcggcagccgcttatgggagaagccccatggtctcatttggggccgtggggttcgaccctcacccacctatgagggccacaggactgccctcatcccttgcatccattcctgggggcaagcccgcctactctttccacgtgtcagctgacgggcaaatgcagccagtccccttccctcatgacgctttagctggtcccgggatacctagacatgctcgccaaattaataccctcagccacggggaggtggtatgtgctgtgactatctccaatccaacacggcatgtttacaccgggggaaagggatgcgttaagatctgggatatatctcagcctggtagcaaaagtcctatctctcaactggattgtttaaatcgagacaactacatcaggagctgcaagctcctgccagacggaaggactctaatcgttggcggcgaggcttcaactctgactatttgggacctggccagcccaacaccaaggataaaagccgagttaacatcctccgctcccgcctgctatgccctggctatatcacccgacgcaaaagtctgtttctcgtgctgttctgatgggaacatcgcagtgtgggatctgcataatcagaccttggtcaggcagtttcagggccacacagatggggctagctgcatagacattagccacgacggcactaaactttggacaggcgggctggataacacggtgagatcctgggacctgcgggaaggccgccagcttcaacaacacgactttacgagtcaaatcttctctctggggtattgccctacgggtgaatggctcgctgtcgggatggagtcctcaaatgtggaagtgctgcaccacaccaaaccagacaaataccaactccacctccacgagtcctgtgtcctgagcctgaagttcgcatattgtgggaaatggtttgtttccacagggaaggataatttgcttaatgcctggcgcactccttatggggcttcaatttttcaaagcaaagagagctcatccgtacttagttgcgatatttctgctgacgataagtatattgttaccggcagcggtgacaagaaggctacagtgtacgaggtgatctactag

SEQ ID NO: 138277 - DNA, 2289 bp, synthetic construct
  misc_feature 1..2289: note = Description of Artificial Sequence: Synthetic coding sequence
  source 1..2289: mol_type = other DNA
atggcaccgcaccaaccaggacagcctggtttcaaatttactgttgccgagtcctgtgatagaataaaagatgaattccagttccttcaggcacaatatcactccctgaaagttgaatacgacaagcttgccaatgagaagacagaaatgcagaggcactacgttatgtattacgaaatgagttacggattgaatatcgaaatgcataagcagacagagatagcaaaaagacttaacaccattctcgcccaaatcatgcctttcctgtcccaggagcatcagcagcaagtggcccaagcagtagaaagagctaagcaggttacaatgactgagttgaacgccatcatcgggcagcagcagttgcaagcccagcacttaagccacgccacgcacggccctccggttcagttgccgccccacccatctggcctccaaccgcctggaatccctccagtcaccggaagcagctcaggacttctggcgctgggagccctgggctcacaggcccacttgaccgttaaggacgagaaaaaccaccatgaactggatcaccgcgagagagagagctcagctaataattccgtgagcccatccgagtcacttagagcctctgagaagcatagaggaagcgccgattacagtatggaggcaaagaagagaaaggcagaggaaaaggatagcttgagccgctatgatagtgatggcgataaatctgatgacttggtggtcgacgtttccaacgaggacccagctacacctagagtctcccccgcccattccccccccgagaacggactcgataaggctcgaagcctcaagaaagacgcgcccaccagcccagcaagtgtagcctcctcaagtagtactccgtccagcaagacaaaagatcttgggcacaacgacaagagcagtacccctggcctgaagtcaaacacacctaccccacggaacgacgcccctactccagggactagcacaacacccgggctaagatccatgcccggaaaaccaccaggaatggaccccatagcaagtgccctgcggaccccgatcagcataacatcctcttacgccgcaccattcgcaatgatgtctcatcacgagatgaacgggagcttgacaagccccggagcttacgctggactgcacaatattcctcctcaaatgtctgctgctgccgcggccgcagccgccgcctacggacgatcacctatggttagctttggtgccgtgggctttgatcctcacccacctatgcgagccaccggactgccctcttcattagcgtcgattccgggaggcaagcccgcctattcattccacgtgtccgctgatggtcaaatgcagccagtcccttttcctcatgatgccctggctggcccgggcatcccgcgacacgcaaggcaaattaacacactgtcccatggagaggtcgtgtgcgccgttacgatctccaatcctacgcgccatgtgtataccgggggcaaaggctgcgtaaaaatttgggacattagtcagccgggctctaaatctccaatttctcaacttgactgcctaaacagagataactacatccggtcctgcaaactgctgcccgacggcaggacgctcatagttggcggggaagccagtacattaaccatctgggacttagcaagccctaccccaagaattaaagcagagctgacaagcagcgcccctgcctgttacgctttggccatctcccccgacgctaaagtttgcttttcctgctgctctgatggaaatattgcagtgtgggatctgcacaaccagaccctcgtgcggcagttccagggccacacagacggcgcctcttgtattgacatatcccacgatggaactaaattgtggactggcggcttggataatactgtgcggtcctgggacttacgcgagggacggcaactgcagcagcacgattttacttcacagatcttctctcttggctattgtcctactggagagtggctcgcagttggcatggagtcatccaatgtggaggttttgcatcacacaaaacccgacaaataccagttgcacctccacgagagctgcgttctctctctgaagttcgcatattgcgggaagtggttcgtgtccaccgggaaagacaacctcctcaatgcctggcggaccccctacggggctagcatattccagtctaaggagagctccagcgtgttgtcttgcgatattagtgctgatgataaatatatcgtgacgggttctggagataaaaaggctactgtttacgaagtgatttactag

SEQ ID NO: 138278 - DNA, 2295 bp, synthetic construct
  misc_feature 1..2295: note = Description of Artificial Sequence: Synthetic coding sequence
  source 1..2295: mol_type = other DNA
atgtatccccaagggcgtcaccctgccccccatcaacctggacagcctggtttcaagtttaccgtcgctgaatcatgcgacaggatcaaggatgaattccaatttttgcaggcacagtaccattccctcaaagtagagtacgacaaactagccaacgaaaagaccgagatgcagagacattacgtcatgtactacgagatgtcctatggcttgaacatagagatgcacaagcagactgagattgccaaaaggctcaacacgatccttgcacagatcatgccctttctgagtcaggaacaccagcagcaggtagctcaagcggtggagcgggcaaaacaggtcactatgacagagctcaacgctatcattggtcagcagcagcttcaagcacaacacctaagtcatgccacacacgggccccccgttcaacttcccccacacccctccgggctgcagcctccgggcattcctccagttactggcagttcctcgggcctgctggccctcggagcgctggggtctcaggcccacttgaccgtgaaggatgaaaagaaccaccatgagctcgatcacagggagcgcagtagcgcaagtaacaacagcgtgagcccaagtgagtccctcagagctagcgaaaagcatcggggcagtgccgactactccatggaggccaagaaacgcaaggctgaagagaaggactccctgagccgctacgattctgacggggacaagagcgacgacctagtcgtggacgtgtcgaacgaagacccggctacccctagggtctcccccgctcatagcccacccgaaaatggactcgataaggccagatctttgaaaaaagatgcgccaacaagtccggcttccgtggccagttcgtcctccacacctagcagtaaaaccaaggacttggggcacaatgataagagttccacgcccggattaaagagcaacaccccgacaccgagaaacgatgcaccgacccctgggacttctactacccctggtctccggagcatgcctggcaaacctccaggcatggaccctatagcctcagcgcttcgcactcccataagcattacctcttcttacgctgctcctttcgctatgatgagccatcacgagatgaatgggagcctgacaagtcctggcgcctatgccggcctccacaacatcccgccacagatgagcgccgccgctgctgcagcggccgcagcttacgggaggtcccctatggttggctttgacccacacccgccgatgcgcgctactggtctcccatcttcgctggcatctatccctggtggcaagccggcttacagcttccacgtgagcgccgatgggcagatgcagcctgtgcctttcccacacgacgcgttggccggtcctggtattcctcgtcatgcccggcaaataaacactttatcacatggagaggttgtgtgcgccgttaccatttccaacccaactaggcatgtttacacagggggtaaagggtgtgtcaaaatctgggacatctcccagccaggatcgaagagtcccatatcgcagttggactgcctgaaccgcgataactatatccgcagctgtaaactacttcctgatggcaggacattgatcgtcggaggtgaagctagcacactcacgatctgggatctggctagccccacaccccggatcaaggccgaattgacaagctccgctccggcctgttatgccttggccatctccccagatgctaaggtgtgtttcagctgttgttccgatgggaatattgcagtttgggacctgcacaaccagactctggtaaggcaatttcaaggccacacagacggcgcatcctgcatcgacatctcccatgacggtactaagttgtggaccggggggctcgataacacggtgagatcctgggacctcagggagggcagacagctgcagcagcacgactttactagccagatcttctccctggggtactgcccgacaggtgaatggcttgccgttggaatggaatcatcaaatgtggaggttctgcatcacaccaaacccgacaaataccaactgcacctgcatgagagctgcgtgctatccctaaaattcgcttattgcgggaaatggtttgtgtcgacaggcaaggacaacttgttaaacgcttggcggaccccatacggtgcttcaatcttccagtcaaaagaaagttcgtctgtgttgagttgcgatatttcagccgacgacaaatatatcgtgacgggatcaggggacaagaaagccactgtttatgaggtaatttactag

SEQ ID NO: 138279 - DNA, 2310 bp, synthetic construct
  misc_feature 1..2310: note = Description of Artificial Sequence: Synthetic coding sequence
  source 1..2310: mol_type = other DNA
atgtatccccaggggcgccaccccgccccacaccaacctggtcagcccggcttcaagttcaccgtggccgagtcctgcgaccgaataaaggacgagttccagttccttcaggcccagtaccattcactgaaggtcgaatacgataagctcgcaaacgaaaaaaccgaaatgcagcgccactacgttatgtactacgagatgagttacggcttgaatattgaaatgcacaagcaaactgaaattgcaaagaggcttaacactatcctcgctcagataatgccatttttgtctcaggagcaccaacagcaagttgctcaggccgtagaacgcgctaagcaggttacaatgactgaacttaatgctattattgggcagcaacagctgcaagcgcagcatctgagccatgccactcacggtcctcccgtacaactgccaccccatccctccggtttgcagcccccggggatcccccctgtgaccggatcttccagtggcttacttgcactaggtgctttgggcagtcaagctcatttaaccgtaaaagacgaaaagaatcaccatgaactggatcatagagagagggaatcaagcgctaataacagtgtaagcccctcagagtcgcttagggcaagcgagaagcatcggggctccgcggactatagcatggaggccaagaaaaggaaggccgaagaaaaagatagcctctcaaggtatgactcagacggcgacaagtccgatgatctggtggtggatgtcagcaatgaggatcctgccaccccgcgcgtgagtcctgcccattccccccctgagaacggcctggacaaggcccggtctctgaagaaagacgcccccacaagcccggctagcgtggctagctcttccagtacgcccagcagcaagactaaggacttggggcataacgataagtcaagcacccccggccttaaatctaacacacctaccccaagaaacgatgcccctacccctggcacctctaccaccccaggcctgcgctctatgcccgggaaaccacctggaatggacccgatcgcttctgcactgcggacccctataagcatcacaagttcttacgcggcacctttcgccatgatgtcacaccacgaaatgaatggctccttaaccagccctggggcatacgccggtctccataacatccctcctcaaatgtccgcagcggccgcggctgcagcagcagcgtacgggcggtcacccatggtgagcttcggagctgttggcttcgaccctcacccacctatgcgggcaaccggactccctagttccttagccagtataccggggggaaaacctgcatactccttccatgtgagcgccgacggtcagatgcagccagtgccttttccccacgatgctctggcagggccagggattccacggcacgcacggcagattaataccttgtcccatggagaagtagtctgcgccgtaacaatctccaaccccaccagacacgtgtatacaggaggaaaaggttgcgtaaaaatctgggatatatctcaacctggatctaaaagccctatctcgcagttggattgcctgaaccgcgataactacattaggtcctgcaagcttttgcccgacggcaggactctcatcgtcggtggagaggcttcgaccctaaccatttgggatctggcgagtcctacgcctaggatcaaggccgagctgacttcctctgcccctgcctgctatgcactcgccattagtcctgacgccaaggtttgctttagttgctgtagtgacggaaacatcgcggtttgggatctacataatcagacgcttgtgaggcagtttcaaggccataccgacggcgcaagctgcattgacatctcgcacgatggtaccaagctttggacaggagggctcgacaacacagtgcggtcgtgggatcttagggaaggtagacagttacagcaacacgatttcaccagccaaatctttagcttgggctattgtcccacaggggaatggctggccgtgggcatggagtcttctaatgtcgaggtcttacatcatacgaaaccggacaagtaccaattgcatcttcacgagtcctgtgttctctcccttaagtttgcatattgcggcaaatggtttgtcagcactggcaaggataacctactgaatgcttggaggacgccttacggtgcaagtatctttcagagcaaagaaagttcatctgtactcagttgcgacatatccgctgacgacaaatatattgtcacaggctctggggataagaaggcgaccgtatacgaagtcatctactag

SEQ ID NO: 138280 - DNA, 2295 bp, synthetic construct
  misc_feature 1..2295: note = Description of Artificial Sequence: Synthetic coding sequence
  source 1..2295: mol_type = other DNA
atgtaccctcaggggaggcacccagccccccaccagccagggcagcccgggttcaaatttaccgttgccgaaagctgtgacagaattaaggacgaattccagtttctgcaagctcagtaccactcacttaaggtcgagtacgacaagctcgccaatgagaaaaccgagatgcaaaggcactatgttatgtactatgaaatgagctatggcctgaacattgaaatgcataaacagactgagatagcaaagcggctaaacacaatccttgcgcagataatgcccttcctatcacaggagcaccaacaacaagtcgcccaggccgtagaaagggccaaacaggtaacaatgaccgaactgaacgccataatcggacagcagcagttgcaagcccaacacctctcccatgcgactcatggcccccccgtccaactccctccccatccgtctggactgcagccacctggaattccccctgtgacgggatccagtagcggtctgctcgctctgggagccctggggagtcaagcacacctgacagtgaaggatgaaaagaaccaccatgaactggatcacagggaacgggagagcagcgccaataactctgtgtcaccctccgaatccttacgtgctagcgaaaagcacagggggtccgctgattactccatggaagcaaagaagcggaaagctgaagagaaggattctttaagcagatatgatagcgatggcgacaaatcagatgacctggtggttgatgtgtcaaatgaggatccggccacccccagagtgtcccccgcccacagtccaccagagaatggcttggataaagccaggagtctgaagaaggatgcccctaccagtcccgcttctgtcgcaagcagttcctccaccccaagtagcaagacaaaagacctgggccataatgacaaatcatcaaccccgggccttaaaagtaatacacctacccctagaaacgacgcccctactccagggacctctaccacaccaggcctgcgaagcatgccaggtaaaccacctggcatggaccctatagcttccgcactgaggaccccaattagcattactagcagttacgcggccccatttgcaatgatgtcccaccacgagatgaacggcagtctcacctcgccaggggcctacgccggcctgcataacattcccccgcagatgtccgctgccgcagctgccgccgcggccgcctacggccgctcccctatggtgggttttgaccctcacccaccgatgcgcgccaccggtctgcctagtagcctggcttctattcctgggggaaagcctgcctactcgttccacgtcagcgcagacgggcaaatgcagccggtgcccttcccacacgatgccctcgccggaccagggattcctcggcacgcccgacagattaatacattgtctcacggcgaggtcgtttgtgccgtgactatcagcaatccaacccggcatgtctataccggagggaaggggtgcgtgaagatttgggacatctcacaacctgggtcaaaatccccaatcagtcagttagactgcttgaatcgtgataattacatacgttcatgtaaactcctccctgatgggcgaacactaattgttgggggcgaggcctccacccttaccatctgggaccttgcctctcccacacctcgcatcaaagcagaacttacttcaagtgccccagcctgctatgccctggccatctcgccagatgccaaggtctgttttagctgttgctctgatgggaacatcgctgtatgggatctgcataaccagactttggtgcgacagtttcagggacacactgacggggcaagttgcattgacatctcacacgatggcacaaaactgtggactggagggctagacaatactgtgagatcatgggacctccgggaaggaaggcagctccagcagcacgactttactagtcagattttctcactcggttattgccccaccggagaatggctggccgtgggaatggaatcctctaatgtggaagtcttgcatcatactaagcccgacaagtaccagctccacctccatgaatcgtgcgtgctgtctctgaaattcgcctattgtgggaagtggttcgtctctactgggaaggacaacctcctgaacgcatggcggaccccatatggtgccagtattttccagtctaaagaaagcagtagcgttctttcatgcgatatttcagctgatgataaatacatcgtaacgggttccggagataaaaaggccacggtatacgaggtaatatattag

SEQ ID NO: 138281 - DNA, 2319 bp, synthetic construct
  misc_feature 1..2319: note = Description of Artificial Sequence: Synthetic coding sequence
  source 1..2319: mol_type = other DNA
atgtatccccagggaagacacccagctccacaccaacccggccagcccggttttaaattcacagtcgctgagagctgtgatcgaatcaaagacgagtttcaatttttacaggctcagtaccattctctaaaagtggagtacgacaagctggccaatgagaagacggaaatgcagcgacactacgtgatgtattacgagatgtcctatggcctgaatatcgagatgcataaacagacagaaatcgccaaacgcctcaacacaattctggcacagatcatgccctttctctctcaggaacaccagcagcaggtcgcccaggctgttgagagggcaaaacaggtcaccatgacggagctgaacgcgatcatcgggcaacagcaattgcaggcacagcatctttcccacgcaacacacggtccaccagttcagctgccccctcaccccagtggactgcagcctccgggtataccaccagttacagggagctccagtggcctgctggcgttaggtgctttagggagccaggctcacctgacagtaaaggacgaaaagaatcaccacgaactggatcatcgcgaaagggaaagtagcgcaaataatagtgtgagtccctccgagtctctcagagcctccgagaaacatcgaggatcggctgactactcaatggaagctaaaaaaagaaaagccgaagagaaggacagcctatcccgttacgactccgatggagacaaatctgatgatctggtggttgatgtcagcaacgaggatcctgccactcccagagtctctccagctcattctcctccagagaacggtttggacaaagccagatctttaaagaaggacgctccaactagccccgcctctgtggcaagtagctcaagcacaccctctagcaaaactaaagacttaggccacaatgataagagctctactccaggcttaaaatcaaacacaccaaccccaaggaatgacgctcccacccctggcaccagtactactcctggcctcaggtccatgcccggtaaacctccagggatggatccaattggaattatggcatctgccttaaggactcccatctctataacgtcatcttacgccgccccctttgcgatgatgtcccaccacgagatgaatggcagcttgacttcaccgggagcttacgcaggcctacataacattcccccccaaatgagcgctgctgccgccgcggctgcggcggcctacgggcggtcccccatggtctcatttggcgctgtaggctttgatccgcatccaccaatgcgtgctaccgggctgccgagcagtctcgccagtatcccaggtgggaagcccgcttacagctttcacgtgagcgccgacggccagatgcagcctgtaccgtttcctcacgatgccctggccggtccagggatccccagacacgcgcggcagatcaatactctcagtcacggagaggtagtgtgcgccgttaccatctcaaatccaaccagacatgtgtacactggcggcaagggttgtgtgaagatctgggacatctctcagcccgggtccaagagtccaattagccagctcgactgcctaaaccgcgacaactacatcaggagctgtaagctgttacccgacggacgcaccctcattgtggggggggaagcatctaccctaacaatctgggacctcgcctcacctactcctcgtatcaaagccgagctgacctcaagcgctccagcgtgctatgctctagcaattagtcccgacgcaaaagtgtgcttcagctgctgcagcgacggaaacatcgcagtgtgggatctgcataatcagaccctggtgcgacaattccagggccatacggatggggcctcatgtatcgatatttctcacgatgggaccaaactttggacaggcggtctggataacactgtgcgatcttgggacctccgtgagggaagacagttgcagcagcatgacttcacgtcacagatcttcagcctgggatactgcccaactggggagtggctagcagtgggaatggaatctagtaacgtggaagtgctccaccatacaaaaccggacaaatatcagctccacttacacgagagctgcgttctgtccttgaagtttgcctattgcggcaaatggtttgtaagtactggaaaggacaatctgctgaacgcctggagaacaccctacggagcttctatttttcagtcaaaagagtcctccagtgtcctgtcttgcgatataagtgcggacgacaaatacatcgttaccggatccggtgataagaaggctacggtatatgaagtaatttattag

SEQ ID NO: 138282 - DNA, 2319 bp, synthetic construct
  misc_feature 1..2319: note = Description of Artificial Sequence: Synthetic coding sequence
  source 1..2319: mol_type = other DNA
atgccccctcccccgccactgtcctgcctgcgcggtcttcaggctccccatcagcccggccagcccggctttaaatttaccgtggccgagagctgtgatcgaattaaggatgaattccaatttttgcaggcccaatatcattccctgaaagtggagtatgacaaacttgccaatgagaagaccgagatgcagagacactacgtcatgtattacgagatgagctacgggttaaacatagaaatgcacaagcagacagagatcgcgaagaggctgaacaccatcctcgcccaaatcatgccatttcttagccaggaacaccagcagcaggtcgcacaggccgtggagcgggcaaaacaggtgacaatgacggaactgaacgccataatcggccagcaactccaggcacagcacctgtcccatgcaacacacggtcctcctgtgcagcttcctcctcaccccagtggcctgcagccccctggtattccaccggttacaggcagttcctccggactcctggcattaggtgccctcggctcacaggcccacttaactgtgaaggatgagaagaaccatcacgagctagatcacagagaacgagaaagctcagcgaacaactccgtgagtccatctgagtctttgcgggctagcgagaaacatcggggctccgcggattactctatggaggcgaagaagcgaaaggcggaggagaaggactcattaagccggtatgacagtgacggcgacaagtcagatgacctcgtcgttgacgtaagtaacgaggacccagcaactccgcgcgtaagcccagcccattcccctccagagaatgggctggacaaggctcgcagcctgaaaaaggacgcccccacctcgcccgcaagcgtggccagttcttccagcactccctctagtaaaaccaaggacctgggccacaacgacaaaagcagcacacccggcctgaagagcaacaccccaacacctcgcaatgatgccccaacgccggggacatctactacacccggattgaggagcatgcccgggaagcccccagggatggacccaatcgggatcatggctagcgctttgagaacgccaatctccataacttcaagctatgcagcaccttttgccatgatgagtcatcatgaaatgaatggctccctcactagcccaggagcttacgctggcctgcacaatatcccaccccagatgtccgcagcagccgctgcagccgccgccgcctatggtcgtagcccgatggttggatttgatccccacccccccatgagagccacggggctaccttcaagcctggcttctatccctggcggcaagcctgcatactcctttcatgtatctgccgacggacagatgcagcccgttccctttcctcatgatgcgctcgccgggcccggcattccgcgacacgccaggcagattaatacccttagccatggagaagtagtctgcgcagtgacaattagtaatcccactaggcacgtctacacaggaggcaagggttgcgtgaagatttgggacatatcgcagccaggcagcaagtctccaatctcccagttagattgcctcaatagagataactatatccgttcatgtaagttactgcctgatgggaggaccttgatcgtgggcggggaggcttcaaccctgactatttgggatctggcatccccaaccccaagaattaaggccgaattgacatcatccgcccccgcctgttatgcgctcgcaatcagccctgatgcaaaggtgtgctttagttgctgctccgatggaaacatcgcagtctgggatctccataatcagaccctggtccgtcaatttcagggacacaccgacggcgccagctgtatcgatatctcacacgatgggacaaagctttggaccggcggtctggacaacacggtgcgctcatgggatctgcgggagggcagacagctccagcagcacgactttacaagccagatattcagtttaggttattgtcctacaggggaatggctggcggtgggaatggaatcaagcaacgtggaggtgctgcaccacactaagcctgacaagtatcagctccaccttcacgagtcttgcgtgttaagcctgaagttcgcctattgcggaaagtggtttgtctcgactggaaaagataacctgctgaacgcctggagaacaccctacggtgcttcgatctttcagagcaaggaaagttcatcggttctttcttgcgatatttctgcagatgacaagtatattgtaaccggatctggggacaaaaaagccacagtgtatgaagtgatatactag

SEQ ID NO: 138283 - DNA, 2325 bp, synthetic construct
  misc_feature 1..2325: note = Description of Artificial Sequence: Synthetic coding sequence
  source 1..2325: mol_type = other DNA
atgccgcctccaccacctctgtcttgtctgcggggccttcaggcgccacatcagcctggtcagccaggatttaagttcaccgtggccgagagctgtgatagaataaaggatgaatttcaattcctccaggcacagtaccacagcctgaaagttgagtatgataaactggcaaacgagaaaactgaaatgcagaggcattacgtgatgtattatgaaatgtcttacggtttaaacatcgagatgcacaaacagaccgaaatcgccaaacggttgaacacgattctggctcagatcatgcccttcttgtctcaggagcaccagcaacaggtcgcacaggcagtggagcgcgcgaagcaggtaacaatgaccgagcttaatgcaattataggacagcagctccaggcacaacacctgagccatgcaacccacgggcctcctgtgcagttacctccccacccctcagggctgcagccacccggaatacccccagtgactggatcctcctccggcctgctcgccctgggggccttggggtcccaggctcatctcacagtgaaggacgaaaagaaccatcacgagctggatcaccgggagagggaaagctctgccaacaattctgtgtctcctagtgagagccttcgggccagtgaaaagcaccggggcagcgcagactacagcatggaggccaagaagcggaaagctgaagagaaagacagtttatcccgatatgatagcgatggagataagtccgacgacctggttgttgacgtgtctaacgaggatccagcaacaccacgggtgagtccagctcactcaccacccgaaaacggacttgataaggcccgtagcctgaaaaaagacgctcccacaagcccggcctctgttgcctcaagctctagcacgccttcatctaagaccaaggatttgggacataacgataagtcctcaacccctggcttaaaatcaaatactcccacgccaaggaatgatgcccccacccctggcacctctaccacaccggggctgcgaagcatgcctggcaagccacccgggatggacccaatcgccagcgctctgcggactccgatctccatcacctctagttatgcagccccctttgcaatgatgtcgcatcacgagatgaacggcagcctgaccagccctggggcctacgctggcctgcacaacatacctccccagatgtccgcggctgcagccgctgctgcagctgcctatgggagatctcccatggttagtttcggggctgttgggtttgaccctcatcccccaatgagggcaacgggtttaccctcaagccttgcttctattcctggcgggaagcctgcgtacagcttccatgtttctgctgatggccagatgcagcccgttcctttcccccacgacgccctggccggccctggaattccacggcacgcaaggcaaatcaatacgctaagccacggtgaggtggtttgtgccgtaaccataagcaacccaactcggcacgtttatacgggcgggaagggctgtgtcaagatctgggacatctctcagcctggctctaagtcacctatttcacagctcgactgccttaaccgagataattatatacgctcctgtaagctgctgcctgacggaaggaccctcatcgtgggaggcgaggcctcgaccctgacaatttgggatctggcatctcctactccacgtatcaaggccgaactgacctcgagtgccccggcttgttatgccttggccatctcccctgatgccaaggtgtgctttagttgttgttcagatgggaacatcgcggtgtgggatctgcacaaccagaccctagtccgccagtttcaaggacacaccgacggcgcaagttgtatcgatattagccatgatggaaccaagctttggactgggggattggacaatacagtcagatcctgggatctgcgtgaagggcgccaattgcagcagcatgactttaccagccagatcttttccctgggatactgcccgactggcgagtggctcgctgtcggcatggagagttcaaacgtggaggtgttacaccacactaagccagacaagtaccagctacatctgcacgagtcatgtgtgttatcactgaaattcgcgtactgcggcaagtggttcgtgagcacgggaaaggataacttactgaacgcttggaggaccccatatggagcttcaatttttcaaagcaaagagagctcaagcgtactgtcatgcgacatctctgctgacgacaaatatatagtgactggcagtggtgataagaaggcaactgtctacgaagtgatttattag

SEQ ID NO: 138284 - DNA, 1719 bp, synthetic construct
  misc_feature 1..1719: note = Description of Artificial Sequence: Synthetic coding sequence
  source 1..1719: mol_type = other DNA
atgacctctagggatcaacctcgacctaagggacccccaaagtcaacttcgccttgccccggcatctcaaatagtgagagctccccgacactgaactatcagggcatcctgaaccgcttaaaacagttccctagattttccccccattttgccgccgaactggagtctatctattactccctgcacaagattcaacaagatgtggctgaacaccataagcagattgggaatgtactgcagattgttgaatcctgctcacagcttcagggctttcagtccgaggaggtgtctcccgccgaaccagccagccctggcactccacagcaagtgaaggataaaaccctgcaagagagctcctttgaggacatcatggcaaccaggtccagcgactggctgaggcgccccttaggggaggacaaccagcccgaaacacaactgttttgggacaaagagccctggttctggcacgacactctgaccgaacagctgtggcgaatctttgccggagtgcacgacgaaaaggcaaaaccccgtgatagacagcaagcgccgggccttggtcaggagagcaaggccccggggtcctgtgacccaggcactgacccttgtccggaagacgcttcaacaccacgaccaccggaagccagctcttccccacccgagggaagccaggatagaaacaccagctggggcgtcgttcaggaaccacccgggcgggctagcagattcctgcagagtatcagttgggacccagaggatttcgaggatgcctggaagcgcccagacgcactccctgggcagtccaagcgtctggcagtgccctgcaagctggagaaaatgcgaatcttagcacatggtgaactcgtactggcaacagccatcagtagctttaccaggcacgtgtttacatgcggaaggcgggggataaaagtgtggagcctcaccggccaggtggccgaggataggttcccagagagccatctgcctattcagacacctggtgctttcttgcgcacatgcttgctctcatcaaacagccggtcgctgctgactggaggctacaatctcgcgtccgtgtctgtctgggacctagctgctccgtcgctccacgtcaaagagcaacttccatgcgccggccttaactgtcaggcactggacgcgaacctggatgccaatcttgcctttgcttccttcaccagtggagtcgtccgcatttgggacctgcgcgaccagtccgtggtgcgggatctgaaaggctacccagacggcgtgaagagtattgtagttaaggggtataatatctggacaggaggtcctgacgcatgcttaaggtgctgggaccaacgcactatcatgaaacctctcgagtaccagttcaagagtcagatcatgtcgttgtcccactcaccacaggaagactgggtgcttttaggtatggcaaacgggcagcagtggctgcagtcaaccagcggctcccagagacacatggtgggacagaaggacagtgtgatcttgtctgtgaagttctctccgttcggccaatggtgggcctcagtcggaatggacgatttccttggtgtatactctatgcctgcagggacaaaagtatttgaggtgcctgaaatgtcccctgtgacatgctgtgacgtctcgtccaataaccgtctagtggtgactggttcgggtgagcacgcttctgtatatcaaatcacctattag

SEQ ID NO: 138285 - DNA, 1251 bp, synthetic construct
  misc_feature 1..1251: note = Description of Artificial Sequence: Synthetic coding sequence
  source 1..1251: mol_type = other DNA
atggcaacaaggtctagcgattggctgcgtagaccacttggcgaggacaaccagccagagacacagcttttttgggacaaagagccttggttttggcacgacacgttgacagagcagctttggcgcatatttgccggagtgcacgacgaaaaagcaaaaccgagagatagacagcaagccccaggcctgggtcaggagtcaaaagcacctggcagttgtgatccaggcaccgacccctgtccggaggatgcatctactccgaggccccctgaggccagttcttccccacccgaggggagccaagacagaaacacatcgtggggagtcgtccaggagcctcctggacgcgcaagccggtttttacagtcgatctcttgggaccctgaagactttgaggacgcatggaagcgccccgacgccctcccggggcagagtaagagattggcggtgccttgcaaacttgagaagatgaggatcttggcccatggcgaattggtgctggcgacagccatcagcagctttacacggcacgtgttcacgtgcggtaggaggggtatcaaggtatggtctctaaccgggcaggtagctgaggatcgcttccctgaatcccacttacctatacagacacctggagctttcctgcgaacctgcctcctgagtagcaacagccggtccctcctgactgggggctataaccttgcgtccgtttctgtgtgggacttagccgcgccctccctgcatgtgaaggagcagctgccctgtgcaggcctgaactgtcaggcccttgacgcaaatttggatgcaaatttggcgtttgccagctttacatcaggagtggtgaggatttgggacttaagagaccaatccgtggtgagagacttgaaaggatacccggatggtgttaagagcatcgtggtgaagggctacaatatatggacggggggtcccgacgcctgtctgagatgctgggaccagcggactataatgaaacccctggagtatcagttcaagtcacagattatgtcactcagccattcaccgcaggaagattgggtgctgctgggcatggccaacggacagcagtggctgcagtccacttccggctcgcagaggcacatggtgggacagaggcagcgccatccggaacgccaagtactcccactgtggcctgtggtgggtaaaaggtggaacgggaggctgccatggcggttgcagcatgctggcggtgataagagcgtaagaggggcctag

SEQ ID NO: 138286 - DNA, 1719 bp, synthetic construct
  misc_feature 1..1719: note = Description of Artificial Sequence: Synthetic coding sequence
  source 1..1719: mol_type = other DNA
atgaccagtcgcgatcagccaagacccaaagggccccctaaatccacgtccccttgccccggcattagtaattccgagagcagccccaccctcaattatcagggtatcctgaaccgactgaagcagtttccccggttcagcccccacttcgccgctgaactggaaagtatctactattcactgcataaaatacagcaggacgtagccgaacaccacaaacagatcgggaacgtgcttcagattgtggagtcatgctcccaattacagggattccagagcgaagaagtgagtcccgcagagcctgcctcccccggcactccacagcaggttaaggacaaaacccttcaggagagctcattcgaggatatcatggcaactcggagctctgactggctccggaggccactgggggaagacaatcaaccggaaacccagcttttctgggacaaagaaccctggttctggcacgacaccctcacggagcagctgtggcgaatctttgctggcgttcacgatgagaaagcaaaacccagagatcgtcatttcagtattttccagggacaagaatccaaagcacctggcagctgcgaccccggcacagatccctgccctgaagatgctagtactcccagaccaccagaggccagctctagcccgccggaaggcagccaagaccggaacactagctggggcgtcgtacaggagcctcctgggagggcctcacggtttctgcagtcaattagttgggatcccgaggactttgaggatgcttggaagcgcccagatgcactgcccggtcagagcaagagactcgcagtgccttgtaagctggaaaagatgcgcatcttagctcatggcgagcttgtgctggccaccgcaatatcatcattcaccaggcacgtctttacctgtgggcggagaggaattaaagtttggtctttgaccggccaggtcgcagaggacagatttcccgagtcccaccttcctatacagaccccaggcgccttccttaggacttgcttgctgtcttcaaattctaggtcccttctgacaggaggctataatcttgcctccgtgagcgtctgggacctggctgctcctagtttgcacgtgaaagagcagttaccttgcgcaggactgaactgccaggccctcgatgccaaccttgatgcgaacttagcgttcgcgtcttttacttctggcgtcgttcgcatctgggatctacgggatcagtccgtggtacgcgacctgaagggctaccctgatggggtcaagtccatcgtggtgaagggatacaacatttggactgggggcccagacgcttgcctgcggtgttgggaccaacgcaccattatgaaacccctggagtaccaattcaaaagtcagatcatgtctttaagccacagccctcaggaggattgggtcttgctgggaatggcgaatgggcagcagtggctgcaaagtacctccggtagccagcgacacatggtaggacaaaaagatagcgtcatcctgagcgtgaaattttccccgtttggccagtggtgggcatcagtgggcatggacgacttcctaggcgtctatagtatgcctgccggcacaaaagttttcgaggtccctgagatgagccctgtgacatgttgtgacgtgtccagtaataaccgtctggtggtcaccggatctggtgaacatgctagcgtttaccaaatcacctactag

SEQ ID NO: 138287 - DNA, 1350 bp, synthetic construct
  misc_feature 1..1350: note = Description of Artificial Sequence: Synthetic coding sequence
  source 1..1350: mol_type = other DNA
atggccacgaggagtagcgactggctgcggcgcccactgggtgaggacaaccaaccagaaacacaattgttctgggataaggaaccttggttctggcacgatacactgactgagcagctgtggcggatcttcgcaggagtgcatgacgagaaggctaaacctcgcgatcggcaacaagcccctggtctggggcaagaatccaaagcacctggttcatgcgatcccggcacggatccatgtcccgaggacgcctcaacaccaaggccacctgaggcgtctagtagcccgcccgagggctcacaggataggaatacctcatggggtgtggtgcaggaaccaccaggtagagcctctcgttttctgcaaagtatttcatgggatcctgaggactttgaagatgcctggaagcgtcccgatgccctgcctggccagagtaaacgacttgccgtcccttgcaagttagaaaaaatgcgcatcctcgcacatggagaactggtgttggcaacagctatcagtagcttcacccggcatgtgttcacctgtggcaggaggggcatcaaggtttggtccctaaccgggcaggtcgccgaagacagatttccagaaagccatctcccgatccaaacccccggagccttcctccggacatgcttactttcatctaactctcggtctctcttgactggaggctacaatcttgcgagcgtgtctgtatgggatttggcggcccccagcctgcacgtcaaagaacagcttccttgtgcggggctgaattgtcaggccctagacgccaaccttgacgccaatctggcgttcgcatcctttacaagcggggttgttcgaatttgggacttacgggatcagagcgtcgtgcgcgatcttaagggctacccggatggggttaagagcatcgtcgtgaagggctataatatctggacagggggaccggacgcatgcctgagatgttgggaccaaaggaccatcatgaagccactggaataccaattcaaaagtcagattatgagcctgagtcattccccccaggaggactgggttctcctgggtatggctaacgggcaacagtggttacagagtacctccggtagccagcgccatatggtcgggcagaaagattcagttatcctcagcgttaagttcagccctttcggacaatggtgggctagcgtcgggatggatgatttcctcggtgtttactccatgccagcagggaccaaggtgtttgaagtgccagaaatgtctccggtcacatgttgcgatgtatctagcaataataggttggttgtgacagggagcggggagcacgccagtgtttaccagatcacatactag

SEQ ID NO: 138288 - DNA, 1716 bp, synthetic construct
  misc_feature 1..1716: note = Description of Artificial Sequence: Synthetic coding sequence
  source 1..1716: mol_type = other DNA
atgaaccagctgcgaggtaagaagtcctgtcacacaggactcgggagatcagctggatggaacattcccattggtctcctttactgcgatcttccagagcctagaaagcccctggaaaaggccgtggccaacttcttctcaggtagttgcgctccatgcgctgacggaacagacttcccccaactttgtcagctgtgtcccggttgcgggtgttccaccttgaatcaatatttcggatactcaggggccttcaaatgcttaaaggatggagctggagatgttgcatttgtgaagcacagcactatttttgagaatctggccaacaaggcggatcgtgatcagtatgagcttctctgtctcgataatacccggaagcctgtggacgagtacaaagactgccatctcgcacaggtcccgagccacacagttgttgctcgctctatgggcggaaaggaggacctgatttgggagttgttaaaccaggcccaggagcactttggcaaggacaaatccaaggaattccagttgtttagctctcctcatggaaaggaccttctgttcaaggacagcgcacacggatttctgaaggtcccccctcggatggatgccaagatgtacctggggtatgagtatgttaccgccatccgaaatcttcgggagggcacttgtcctgaggcgcccacagacgagtgcaagccggttaaatggtgtgcgctgagtcaccacgagcggctgaagtgcgatgaatggagcgtcaactctgtggggaaaatagaatgtgtgtctgcagagaccaccgaggactgtatcgccaaaatcatgaacggcgaggctgacgcaatgagtctggacggggggttcgtgtacattgctggaaaatgtggcttagtaccagtactcgccgaaaactacaacaagtccgataattgtgaggacactcctgaggccggatacttcgccatagccgttgtaaagaaaagtgcttcagacctcacttgggacaatttgaagggcaaaaaatcctgtcacaccgctgtcggcaggactgccggatggaatatacccatgggattactgtataacaagatcaaccattgtagatttgatgaattctttagtgagggctgcgccccagggagcaaaaaggatagctcactttgtaagctgtgtatggggagcgggttgaacctctgtgagcctaacaataaagaaggctactatggatacaccggcgcctttagatgcctggtggaaaagggagatgtagcattcgtgaagcatcaaactgtaccccagaacacaggaggaaagaacccagacccctgggcaaaaaacctgaatgaaaaggactacgagttgctgtgcctggatggaaccaggaagcctgtggaggagtatgccaactgccacctcgctagggctcccaatcacgctgtggtcactcgcaaagataaggaagcttgtgtgcacaagatcttgcgccagcaacaacacctgttcggctccaatgtaaccgattgttccgggaatttctgcttgttccgtagcgaaacgaaagatttactttttagggacgacacagtctgcctcgccaagctgcatgaccggaacacatatgagaaatatttgggcgaggaatacgtgaaggcagtaggcaatttaagaaaatgtagcacttcgtccttacttgaagcttgcacatttcggcgaccctag

SEQ ID NO: 138289 - DNA, 2097 bp, synthetic construct
  misc_feature 1..2097: note = Description of Artificial Sequence: Synthetic coding sequence
  source 1..2097: mol_type = other DNA
atgcgtctggccgtcggcgcacttcttgtgtgtgctgtcctgggactgtgcctggctgtccccgataagaccgtaaggtggtgtgccgtgtccgagcatgaggcaacaaaatgccagtcgtttcgagaccacatgaaaagcgtgatccccagtgatggaccttcggtagcttgtgtcaagaaagcgtcatatctggactgcataagagccattgcggcgaatgaggccgatgcagtgaccttggacgccggattggtatatgacgcttatctagcgcccaacaatttgaagccagtggtggcagaattctacggctcgaaggaggaccctcaaactttttactacgctgtggctgtggtcaaaaaagactcaggtttccaaatgaatcagttgcgaggcaagaaatcatgtcacacaggcttagggaggtccgctgggtggaacatcccaatcggcctgttatactgtgacctgccagagccccggaaaccgctggagaaagctgtagcgaacttcttcagtgggagctgcgcgccctgcgcagacgggactgactttccacagctctgtcaactctgcccaggatgtgggtgctcgacactcaatcaatactttggctattctggggctttcaagtgtcttaaagatggagccggggatgtagcatttgtgaaacattcaaccatttttgagaatcttgccaacaaagccgacagagatcagtacgagctgctgtgtttggacaacacgcgcaaaccggtggacgaatacaaggactgccatctggcccaggtccctagtcataccgtagtagcacggagtatgggcgggaaagaagacttgatctgggagcttctgaatcaggcgcaggaacattttggtaaagataaaagcaaggagtttcagcttttttcgtcccctcatggaaaagatctactctttaaggacagtgcgcacggttttctgaaggtccccccaaggatggacgctaagatgtatttgggctatgaatatgtgaccgctataaggaacttgagagaggggacctgccccgaggctcccaccgatgaatgcaagccggtgaagtggtgcgcactaagtcaccacgagaggttgaaatgcgatgagtggtcagtgaatagcgtggggaagatagagtgcgtatcggctgagaccaccgaagactgcatagccaagatcatgaacggtgaggctgatgccatgtcactcgatgggggctttgtctatatagctggaaagtgcgggcttgtgcctgtgctggccgaaaactacaacaagtccgataactgcgaagataccccggaagcaggttattttgccatcgctgtggtgaagaaatctgccagcgatttaacatgggacaatttgaaaggtaagaaaagttgccacactgccgtggggcggaccgccggctggaatatcccaatgggactcttgtataacaaaataaatcactgtcgattcgacgaatttttctcagagggatgcgctcccgggtctaagaaagactctagtctctgcaaattatgtatggggtcaggcctgaatctgtgcgaacctaacaataaagaaggatactacggttataccggggcattcaggtgtctggtggagaagggggacgttgccttcgtcaagcaccaaactgtaccccagaacacaggtgggaagaaccccgacccatgggcaaaaaatctcaacgaaaaagactacgagctgttatgtctagatggtactcggaaacctgtagaagagtatgccaactgtcatcttgccagagcccccaaccacgcggtagtcacccgcaaggataaggaagcgtgtgtgcacaaaatcctccgtcagcagcaacacctattcgggtcaaacgtaactgactgtagtggcaacttctgcctctttcgttcggaaactaaagaccttctgtttcgtgacgacaccgtctgcttggctaaactgcacgatcggaacacatatgagaagtatcttggggaggaatatgtgaaagctgtaggaaatcttcgtaaatgctcaacttcttcacttttggaagcctgcactttccgtaggccatag

SEQ ID NO: 138290 - DNA, 2283 bp, synthetic construct
  misc_feature 1..2283: note = Description of Artificial Sequence: Synthetic coding sequence
  source 1..2283: mol_type = other DNA
atgatggatcaggcccgatcggcgttctctaatctgtttggcggggaacctctctcttatactcgcttctcattagcgcgccaggtagatggtgacaactcccatgttgagatgaagctcgcagtggatgaggaggaaaacgcagataacaatactaaagccaacgtgacgaagccgaagaggtgcagtggttcgatttgctacggaaccatagcagtcatcgtgttcttcctgattggatttatgataggctacctgggatactgtaaaggcgtggagcctaaaacagagtgcgaaaggctggcgggcaccgagagccctgtcagagaggaacctggcgaagacttcccagctgcacggcgtctctactgggatgatctgaagagaaaactcagcgagaaattggacagtactgacttcacagggaccatcaagctgttgaacgaaaactcatacgtaccgagagaagctggctcacaaaaagatgagaacctagcactgtacgtggagaatcagttcagagagttcaaattaagcaaggtgtggcgggaccagcacttcgtcaagatacaagtgaaggatagcgctcagaatagtgtgatcattgtggataaaaacggcagactggtatatctggtcgagaaccctggtggctacgttgcttactccaaggctgctactgtgacgggcaaacttgttcatgccaattttggcacaaagaaggatttcgaagatctgtacacacccgtgaatggatctatcgtcatcgtcagagccggaaagataaccttcgccgaaaaggtggctaatgctgaaagtctgaacgccattggggtgctgatctacatggaccagacgaaattcccaattgtgaatgctgagctgtcattctttggccatgcacatttgggaacaggagacccatacacacctgggttcccatcttttaaccacacccaattccctccttcccggagctccggattacccaatatcccggtgcagactatatcgcgcgccgccgcagagaagctcttcgggaatatggagggagattgcccttctgactggaagacagactctacctgccggatggtcacgagtgagtcaaagaatgtgaagctcaccgtttctaacgtcctgaaagagatcaagatactgaacatttttggagtgataaaaggctttgttgagcctgatcattacgtagtggtgggcgctcagagagacgcctggggccctggcgcagcaaagagtggagtgggaacagccttgcttttgaaactcgcacaaatgtttagcgacatggtgcttaaggacggattccaaccatcccggtccatcatcttcgcttcttggtccgccggcgacttcggaagcgtgggagcgaccgagtggttggaggggtatctcagctcactccatttgaaagcgttcacatatataaacctggataaagcggtgctgggaacctctaacttcaaagtttctgcttcgccgcttctctacacactcattgagaaaactatgcagaacgtcaaacatcctgtgaccggacagtttttgtaccaggactccaactgggccagcaaagtggagaagcttaccctggataacgccgcctttccgtttctggcttatagcggcatacctgcagtgtccttttgcttttgcgaagataccgactatccttacctaggcactactatggatacttacaaggagctgattgaaagaattcctgagctcaacaaggtcgcaagagccgccgctgaggtggccggccaatttgtcattaagctcacgcacgatgtagagctgaatcttgattacgagcgttacaattcccagcttctgtcgtttgtgagagaccttaaccagtaccgcgccgatataaaggagatgggcctaagcttacaatggctctatagtgctcgaggagatttcttcagggcgacatctaggcttaccactgactttggtaatgcagaaaagaccgatagattcgtgatgaaaaagctaaacgatcgagtcatgagagttgaatatcacttcctgagtccatacgtgtctcctaaggagtccccttttagacatgtcttctggggctcaggatcgcatacactgccagcacttctagaaaatttgaagttaagaaagcagaacaatggcgccttcaacgaaaccctgttcagaaatcagttggcactggccacatggaccatacagggggcagcaaatgccctgtcaggcgatgtgtgggatatcgacaacgaattctag

SEQ ID NO: 138291 - DNA, 2283 bp, synthetic construct
  misc_feature 1..2283: note = Description of Artificial Sequence: Synthetic coding sequence
  source 1..2283: mol_type = other DNA
atgatggaccaggctaggtccgctttctcaaaccttttcggtggggagcctctgtcttatacccggtttagccttgcgcgccaagtggatggcgacaactctcacgttgaaatgaaactggccgtagacgaggaggaaaacgccgacaacaatacaaaagcaaatgtcaccaaacctaagaggtgctcagggtctatctgctacggcacaatcgccgtgattgtgttctttctgattgggttcatgataggttacctaggctattgcaaaggggtagaacctaagaccgagtgcgagcgcctcgcgggcacagagagtccggttcgggaggaacccggcgaggactttccggccgcgaggagactctattgggacgacctgaagaggaaactgagtgagaaattggactccacggatttcacaggcaccatcaaactgttgaatgagaactcttatgtaccccgagaggcaggttcacagaaagacgaaaaccttgcactctacgtggaaaaccagttccgcgaatttaaactgtctaaggtgtggagggaccagcacttcgtcaagattcaggttaaagactccgcccagaacagtgtgataattgtggacaagaatggtaggctcgtgtacctggttgaaaaccccgggggatatgtggcctactccaaagcagcgacagtaacgggtaaactggtgcacgccaactttgggaccaagaaagactttgaggatctttatacccctgttaatggttccatcgttattgtaagagccggtaagataacctttgccgaaaaggtagccaacgcagagtcgttgaacgctataggcgtgctaatctacatggaccaaacaaagttccccattgtcaacgcagagctttctttttttggccatgcccacctggggacgggggatccctatacccccggtttcccctcatttaatcatacacagttccccccctctaggagctctgggttgcccaatatcccggttcagaccatctcccgagccgcggcagagaaattattcggaaatatggaaggtgactgtccctctgactggaagacggacagcacatgtagaatggtgacttcagaatctaagaatgtgaaactgacagtgtctaacgtgctcaaggagatcaagattctgaacatattcggagtaatcaaggggttcgtcgagcccgaccactatgtggtggttggggctcagagagacgcttggggacctggtgccgctaaatcaggcgtaggcaccgctctgctcctcaaacttgcgcagatgtttagcgacatggtgctgaaagatggatttcagccctcacgctccatcatctttgcatcctggtcggcaggcgattttggctctgtcggggccacagagtggctcgaaggatacctttcctccttgcatctgaaagcgttcacgtatatcaaccttgataaagccgtgcttggaacatctaacttcaaagtgtctgcatccccactgttatacacactcatcgaaaagacaatgcaaaacgtcaaacacccagtgactggtcagttcctgtaccaagacagcaactgggcctcaaaggtagaaaaattaacactggacaatgctgcatttccttttttggcttactctggcatcccggccgtgtcattctgcttctgcgaggataccgattatccttatctggggactaccatggatacttacaaggaactgatagaaaggatccctgagctcaataaggtggcccgggctgctgctgaggtggcaggccagtttgtaatcaaacttacacacgacgtcgagttaaatttagactatgagaggtacaattcccaattacttagttttgtcagagatctcaaccagtatagggcagacattaaagagatgggactcagcctgcagtggctttactcagctcgcggggatttctttagggctactagtcgtttgacaaccgattttggaaatgccgaaaaaaccgacagatttgtgatgaagaagttgaacgaccgagtgatgagggttgagtaccattttctgtccccatacgtctctcctaaggagagccccttccggcacgtgttctgggggtctggatcccacaccctgcctgcactgctggaaaacttgaagcttcggaaacaaaataatggcgccttcaacgagactttgtttcgtaatcaactcgctctggccacctggacgatacagggagctgccaatgccctcagtggagacgtctgggacatagataacgaattttag

SEQ ID NO: 138292 - DNA, 1437 bp, synthetic construct
  misc_feature 1..1437: note = Description of Artificial Sequence: Synthetic coding sequence
  source 1..1437: mol_type = other DNA
atggaccagaccaagttccccatagttaacgctgaattatcttttttcggccacgcccatctggggaccggggacccgtacactcctgggtttccaagctttaatcatacccaattcccaccttctagatcgagcgggctgcccaacattcccgtccaaacaatttcacgcgctgccgcagaaaaactgtttggcaacatggagggcgattgccctagtgattggaaaaccgatagcacatgtagaatggtgacatctgagtctaagaatgtcaagctaaccgtctccaatgtcctaaaagaaataaagatcctgaacatcttcggagtgatcaagggatttgttgaaccagaccactacgtggtcgtgggcgcgcaacgcgatgcctggggacccggcgcagctaaaagtggcgtggggactgctctgctgttaaagctggcacagatgttttcggacatggtgctaaaggatggtttccagcccagtagatctataatttttgccagctggagtgctggcgacttcgggtcagtaggagcaacagagtggctggagggatacttgtcctcgctacacctgaaggctttcacttatataaatctggataaggctgtgcttgggaccagtaatttcaaggtaagcgcgtctcccctgctatacaccttgattgagaagactatgcagaacgtaaagcaccccgtgactgggcagttcctgtatcaggactcgaactgggcaagtaaagttgaaaaactaaccttagataacgccgccttccctttcctcgcttactctgggattccagccgtgagtttctgcttctgtgaagacactgattatccctatctcggtacaacaatggatacatacaaggaactgatcgaacggatacctgaactgaacaaagtcgctcgtgcagccgcagaagttgctggccagttcgtcatcaagctgacccacgatgttgaactcaacctcgattacgagagatacaattcccagctgctgtcattcgtacgggatctgaaccagtacagggctgatatcaaagagatgggattgtctcttcagtggctttactccgctcggggcgacttttttcgagctacaagcagacttaccaccgacttcggaaatgcagagaagacagatcgctttgtgatgaagaaactgaacgatagggttatgcgcgttgagtaccattttctgtcaccatatgtctcacctaaggagagccccttcagacatgttttctgggggtccggttctcatacgcttcctgccctgttagagaacttaaagctgaggaagcagaataacggggcttttaacgagaccctgttcaggaaccagcttgccctggcaacatggacaatacaaggtgctgcaaatgccctgagcggtgacgtctgggatatcgataacgaattttag

SEQ ID NO: 138293 - DNA, 42 bp, synthetic construct
  misc_feature 1..42: note = Description of Artificial Sequence: Synthetic coding sequence
  source 1..42: mol_type = other DNA
atggaccaggctcgctctgcctttagcaacctggacctgtag

SEQ ID NO: 138294 - DNA, 11493 bp, synthetic construct
  misc_feature 1..11493: note = Description of Artificial Sequence: Synthetic coding sequence
  source 1..11493: mol_type = other DNA
atggcctttgtggctactcagggggcaactgtggtagaccaaactacattgatgaagaagtacttacagttcgtggcagccctgaccgacgtgaatacccctgacgaaacaaagctcaaaatgatgcaagaggtgtctgaaaactttgagaacgtcacctcttcaccacaatattctacatttctcgagcatatcattcccaggttcctgacgtttctccaagacggggaggtgcagttcttgcaagagaagccggcacagcagctgcgtaaactagttctggaaatcatccaccggatacccacaaacgaacacctccgtccacacaccaaaaacgttctgtccgtcatgttccggttcctagaaacggaaaacgaggagaacgttctcatttgtttacgcattatcatagaactgcacaagcaattcagacctccgatcacacaggagatccatcacttcttagactttgtaaagcagatttacaaagaactgcctaaggtcgtcaatagatatttcgagaacccacaggtcattccggagaacacggtgccacctcctgaaatggtcggaatgataaccaccatcgccgtcaaagtaaatcccgagcgcgaagactctgaaacccgtacccactctataatcccacgtggatctttgtctctcaaagtgctcgctgagctgcccatcatcgttgtactcatgtaccagctgtacaagcttaacatccataacgttgtcgctgagttcgtgcctcttatcatgaacaccatcgccatccaggtctctgcccaagctcgccaacacaagctctataacaaagaactttatgcagacttcatcgccgctcagattaagactctgtcctttttggcttatatcatccggatctatcaggagctggtcactaagtacagccaacagatggtcaagggaatgcttcagctgcttagtaattgccctgcggagacagcccacctgcgaaaggaactcctgatagcggctaagcatatcctgaccacggagcttaggaatcagtttataccttgtatggacaaattgttcgacgaatccatactcatcgggtctgggtacactgctcgagagacactgaggcctctggcttatagcacactcgctgatcttgtccaccatgtccgccagcaccttcccctatcagatctgagtcttgcagtgcaacttttcgctaaaaatatcgacgatgaaagcctacctagttctatacagacaatgtcatgcaagctccttttgaacctagttgactgtatacggtccaaatccgagcaggaaagcggaaatggacgagatgttctcatgcgtatgctcgaagtgttcgtcctgaaattccataccattgcccggtaccaactctccgccatcttcaagaagtgcaaaccccaaagcgagctgggagctgttgaagccgctttgccaggagtccctaccgccccagccgcaccaggcccagccccctctccggcccctgtaccagccccacccccacctccacctccgccaccacccgccaccccagttacccctgctcccgtgcccccttttgagaaacagggcgagaaagacaaagaggataagcagaccttccaagtcaccgactgcaggagtcttgtgaaaacacttgtctgtggggtgaaaactatcacttggggaatcactagctgcaaggcccctggagaagctcaattcattccgaacaagcagttacagccaaaagagacccagatatatattaagttagtgaaatacgcaatgcaggcattggatatctatcaggttcagattgcaggtaacgggcaaacctacattcgggttgcaaactgccagacagtgagaatgaaagaggaaaaggaagtgttggaacactttgcaggggtgttcaccatgatgaaccccctgacctttaaagagattttccagactacagtgccatatatggtcgagaggatatccaaaaactatgcactacagatagtagccaatagctttcttgccaaccctaccacctcagcactcttcgcgaccattctcgttgagtatctcctggaccgcctgcccgagatgggctcgaatgtggaactgtccaatctttacttgaagctctttaaactggttttcggctccgtgtcattgttcgcagctgaaaatgagcagatgctcaaacctcatcttcacaaaattgttaactccagtatggagctcgcccaaaccgcaaaggagccttataattatttcttgctcctgcgggcattgttcagatcaatcggcggaggttcacatgacttgctgtatcaggaattcctacctctgctgccaaacctgctgcagggcttgaatatgctgcagagtggcttgcataagcagcatatgaaagacttgtttgtggaactgtgcctcacagtgcctgtgagactgtcctccctgttgccctacctgcctatgttgatggatcccttggtaagcgccctcaatggttcccagacactagtttcccagggcctgaggactctagagctctgcgtggacaatctgcagcctgacttcttatacgaccacatccagccagtccgcgccgaacttatgcaggccttgtggcgtacacttcggaaccctgcggacagcatctcacatgtggcttatagggtgttgggaaagtttggcggaagtaatcgaaaaatgttaaaggagtcccagaagctgcattacgtggtaaccgaggtgcagggtccttccatcaccgtggaattctccgattgtaaggcctcgctacaattacctatggagaaggcaatcgagaccgctttggactgcttaaagtctgccaatactgaaccttattaccggcggcaagcttgggaggtgatcaagtgtttccttgttgctatgatgagcctagaggataacaagcacgctctataccagctcctcgctcaccccaacttcaccgaaaagactataccaaacgtgatcatctctcaccgctacaaggcacaagatacacccgctcgtaagacctttgaacaggcactgaccggcgctttcatgtcggccgtgattaaggatctccgaccctcagcattgccattcgtggcctcacttatccggcactatacaatggttgccgtggcgcagcagtgcggcccgttccttctgccatgctaccaggtcgggtcccagccaagtactgccatgttccactccgaggagaatggaagcaaggggatggacccgctcgtgctcattgatgcaatcgcaatttgcatggcctacgaggaaaaggaactgtgtaaaatcggggaagtcgccctagccgtgatttttgatgtcgctagcattattctcggttcaaaggagcgcgcttgccagctccctttattttcctacatcgttgagagactatgcgcttgttgctacgaacaggcctggtacgctaagttagggggagtggtcagcattaaatttctcatggagcggctacctctcacatgggtgctgcaaaaccagcagacttttcttaaggccctgctcttcgttatgatggacttgacaggcgaggtgtccaatggcgctgtagccatggctaaaactaccctggagcagctgttgatgcggtgcgctacgccacttaaagacgaagaaagggcggaagagattgttgcagctcaagagaaatccttccaccatgtcacccacgacctcgtcagggaggttacgagccccaattctaccgtacggaagcaggcaatgcattcactacaggtcctcgcccaggtcaccggcaagtctgtgacagttatcatggagccccataaagaggtgctacaagacatggtgccccctaaaaaacacctgcttcggcaccaacccgccaacgcacagattggactaatggaggggaacaccttttgcaccaccctccagccacggttgtttaccatggatctcaatgtagtggaacacaaggtgttttacaccgagctcctgaatctttgtgaagctgaggacagcgcactgacaaaactcccgtgttacaagtctcttccatccctcgtgcctctacgaatagcagccctgaatgccctggcagcctgtaattatctcccccagtcccgcgaaaagatcattgccgcactgtttaaagccctgaactccaccaatagtgaattgcaagaagcaggggaagcctgcatgcgcaagtttctcgagggcgcaacgatagaagtcgatcaaattcacacgcacatgagacccctgttgatgatgctaggagactaccggagcctcacgctgaatgtggtcaatcggctgaccagcgtcactcgcctctttcccaacagcttcaatgataagttttgcgaccagatgatgcagcacctgcgtaaatggatggaagtagtggtaataacccataaaggcgggcagaggtctgacggcaatgaaatgaagatctgcagcgccatcatcaatctgttccatctgattcccgccgctccgcagaccctggttaagccgcttttagaggtggttatgaagacagaacgtgcaatgttgatcgaagctggatccccgtttcgcgaaccactcattaagtttctcacgcgccatcccagtcagacagtggaactgtttatgatggaggccacgctgaacgatccccaatggagtcggatgtttatgtcatttttgaaacacaaggacgctagaccactcagagacgtcctggcagctaatcccaatcggttcatcaccttacttctgccaggtggagctcagactgcggtgcggccaggatctccatcaacctcgaccatgagactggacctccagttccaagcaatcaaaatcatcagtataatcgtcaaaaacgatgactcctggctggccagccaacacagcctggttagccagctgaggagggtgtgggtgtctgagaattttcaggaacgccatcggaaggaaaatatggcagctacaaattggaaagagccaaagctgttagcctactgccttctgaattattgcaagcggaactatggtgatattgaacttttatttcagctcctccgagcattcaccggtagatttctctgcaatatgacgttcctgaaggagtatatggaagaggaaatcccaaagaattactctatagcccagaaaagggcactcttctttcggttcgtcgactttaacgatcccaatttcggggacgagctgaaggcaaaggttctgcaacacattcttaaccctgctttcctgtacagctttgaaaaaggggaaggcgagcagctcctcggaccacctaaccccgagggcgataatccggagtccattactagtgttttcataacaaaggtacttgaccccgaaaagcaggctgacatgctggacagcttgagaatttacctgctccaatatgccaccctcctggtcgaacacgccccacaccatatccacgataataataagaatcgcaattctaagctgaggcgacttatgacttttgcgtggccttgtctcctgtccaaggcctgtgtggatcctgcatgtaaatattccggacacctattactggcacacatcattgccaaatttgcaattcacaagaagatagtcctccaggtgttccattccctgctgaaagcccacgccatggaggctagagccatcgttcggcaggccatggctattctgacgcctgcggttccggcacgtatggaggacggacatcagatgctcacgcactggacacgcaagatcatagttgaggagggccatactgtgccgcagctggtccacatccttcatctaattgtgcaacactttaaggtgtattaccctgtacgacatcacttagtacagcacatggtgagtgcgatgcagaggctaggttttaccccaagcgttactatcgagcaacgccggttagcagtggatctcagtgaggtcgtgattaagtgggagctgcagcgcataaaggatcaacagcctgatagcgacatggatcctaactcatccggagagggcgttaattcagtctcctccagcataaaacggggtttgtccgtggattctgctcaggaagtgaaacggtttagaacggcaacaggtgccatttcagctgttttcggtcgctctcagtcccttcccggggccgacagtctacttgccaagcccattgacaaacagcatacagatactgttgtcaatttcttaatcagagtggcttgtcaagtgaacgacaacacaaatacagcaggatcaccaggggaagtgctcagccggcgatgcgtgaacctcctcaaaacagcactgcggcccgacatgtggcctaaaagcgaactaaagctgcagtggtttgacaagctactaatgaccgtggaacagcccaaccaggtcaattatgggaacatctgcaccggtctggaggttctaagttttcttcttaccgtgctgcagagcccagcaatcctgtcttcattcaaaccacttcagcgtgggatcgccgcctgtatgacttgtggtaacacaaaagtgctgagagctgtacacagtctgttatcgcgattaatgtccatcttccctactgagccctctacttcctcagtggcttccaagtacgaggagctggaatgtctgtatgcagccgtcggaaaagtcatatatgaaggtcttacaaattacgagaaagcaaccaacgctaacccttcgcagctatttggaactcttatgatacttaaatcggcctgtagcaataacccgagctacattgatcggctgatctcagtctttatgcgctccttgcagaagatggtaagagagcacttgaaccctcaggctgccagcggatcaacagaagctacatcaggaacttctgagctggtcatgctcagcttggaacttgtgaaaacaaggctggctgtcatgtccatggagatgagaaagaattttatccaagcaatccttacatctctgatagagaaaagtcctgacgctaaaattctgagagcggtagtcaaaatcgtggaagagtgggttaagaacaattctccaatggccgccaatcagacgcctaccctgcgcgagaagagcatcctgctggtgaagatgatgacttacattgaaaaacggttcccggaggacctggagttaaatgcccagttccttgatctggtaaattatgtctacagggacgagaccctctctggaagcgaactgacggccaagctcgagccggcctttcttagcggtttgagatgtgcccagccactcattagggccaagttttttgaggtttttgataattcaatgaagaggagagtatacgaacgacttctatacgtaacttgcagccaaaattgggaggcgatgggcaaccatttctggattaaacagtgtattgaactcctacttgccgtatgcgagaagagtacccccattggtacctcatgtcagggcgctatgctgccctccattacaaacgttattaacttggcagactcccacgacagggctgcatttgccatggtgacccatgtgaaacaggagcctcgtgaacgagagaactccgaatccaaagaggaagatgtggaaatcgatattgagctcgcgccaggtgatcagacgtccacacctaaaacaaaagagctctcagagaaagacatcggcaatcagctccacatgctgactaataggcacgacaagttcttagacacattgcgagaggtgaaaaccggggcactgctcagcgccttcgtccagctgtgccacatttcaaccacactcgccgaaaagacttgggtccagttgtttccaagactttggaagatcctgtcagacaggcaacagcatgccctcgcgggtgagatcagcccgttcctgtgttccgggtcgcatcaagttcaaagagactgtcaaccaagtgcattaaattgtttcgttgaggcaatgagccaatgcgttccacccatcccaatacgcccttgcgtattgaaatatctgggaaaaacccacaatttgtggtttcgctctaccttaatgttggaacatcaggccttcgagaagggattgagcctgcaaataaagcccaaacagactactgaattctatgagcaggaatccatcaccccgccccagcaggagattctggacagcctggcagagctatacagtctgctgcaggaggaggatatgtgggccggactatggcagaagcgctgcaagtactctgaaactgccactgctattgcatacgagcagcatggcttcttcgagcaggcacaggagtcctacgagaaagcaatggacaaagccaaaaaggaacatgagcgctccaatgcctctcctgctatattccctgagtatcagctctgggaagatcactggatacggtgttcaaaagaactcaaccagtgggaagctctcaccgagtatggtcagagcaagggtcacatcaatccctacctggttctcgaatgcgcctggcgcgtgtcgaactggaccgcaatgaaagaggcactcgtgcaggtggaagtgagttgcccaaaggagatggcgtggaaagtcaatatgtaccgcggctacctggccatttgccatccagaagagcagcaattatcttttattgaaaggttggttgagatggcatcctctctcgccatccgagagtggagaaggctccctcatgtcgtgtcacacgtgcatacccctctgctgcaggccgctcaacaaataatagagctgcaggaagcggctcagattaacgcaggcctccagccaacgaatctggggagaaacaactctctacatgatatgaagacggtggtaaaaacgtggcggaataggctccctatcgtgagtgatgatttgtcgcattggagtagcatcttcatgtggcggcagcatcactaccaggcaatcgtgaccgcatacgaaaattccagccaacacgatccctccagcaataatgcgatgcttggcgtccatgctagtgcaagcgctattatccaatatggcaaaattgcgagaaagcaggggcttgtgaacgtggcccttgatatcctgtcgcgcatccatacaatccccactgtaccaatcgtggattgtttccagaagatcaggcagcaggtgaagtgttaccttcaactggctggcgttatgggcaagaacgaatgcatgcaagggctagaggtgattgagagcacgaaccttaaatactttaccaaagagatgactgccgaattttatgcgctgaaggggatgtttctggcccaaattaacaagtctgaggaggccaataaggctttttctgccgccgtgcagatgcatgatgtattggtgaaggcatgggccatgtggggtgactaccttgagaacattttcgttaaggagaggcaactgcatctgggagtcagtgctattacgtgctacttacacgcatgccgccatcagaatgaatccaaaagccgcaagtatctggccaaagtgctgtggctcttgtcatttgatgatgacaagaataccctcgccgatgcagttgataagtattgcattggagttcctccaattcaatggctggcgtggattcctcaactgctgacatgcctggtggggtcggagggaaaactattactgaatctgatatctcaggtaggcagagtctacccccaggctgtttatttcccaatacggaccctgtaccttaccttaaaaattgagcagcgcgagcgatataagagcgaccccggccccatccgcgccactgctcccatgtggcgctgcagccgaatcatgcacatgcaacgcgagctgcacccgactctcctgagtagccttgaaggaatagtggaccagatggtgtggttcagagaaaactggcacgaagaggtgttgcgccagctccagcagggcctagctaaatgctactccgtggcgttcgagaaatccggagccgtgtctgacgccaagatcactcctcatacgctaaactttgtcaagaaacttgtgtccacgttcggcgtgggcctcgagaatgtaagtaacgttagtactatgtttagtagcgctgctagcgagtctctggcacgtagggcccaggcgaccgcacaggatccagtgtttcagaagctgaaagggcaatttacgacggatttcgatttctctgtgccaggatcaatgaagctgcataacctgatcagtaagctgaagaagtggatcaagattttagaggccaaaaccaaacaactccctaagtttttcctcattgaagaaaaatgccgattcctatctaacttttcagctcaaaccgcagaggtcgaaattcctggggagtttctcatgccgaaacccactcactattatattaagatcgcacgattcatgccacgagtagaaatcgtgcagaagcataacaccgccgcccggagattatatattaggggacacaacggcaagatctatccttatttggtcatgaatgacgcgtgtttgaccgaaagtcgtcgagaggaacgcgtgctgcagctgttgcgcttactgaacccatgcctggagaaaagaaaagagacaaccaagagacacctgttctttaccgtgcccagagtagtcgcagtctcccctcagatgagactcgtcgaggataatccctcctccctctcacttgtcgaaatctataagcagagatgtgctaaaaaaggaatagaacacgacaatccaataagtaggtactacgacagactggcaacagttcaggcaaggggcacacaagcttctcaccaggtgctgagggatattctgaaagaagtgcagtcaaacatggtcccgcgaagtatgctcaaggagtgggctcttcatacatttcccaatgctacagattactggacgttccggaaaatgttcaccatccagctcgccctgattggctttgccgagtttgtcttgcatctgaatcggttgaaccccgagatgttgcaaatagcccaagacaccggcaagctcaatgttgcctattttcggttcgatatcaatgacgccaccggagatcttgacgcaaataggccagtcccgttccgacttacccccaacatttccgagttcctgacgacgattggggtgtccggcccactgacagctagtatgatcgctgtggcccggtgcttcgctcagccaaattttaaggtggatggtattctaaagactgtgttgagggatgagatcatcgcctggcacaagaagactcaggaggacacttcctcgccgctgagtgccgcgggccaacctgagaacatggacagccagcagctcgtgagccttgtccagaaggccgtcaccgccataatgacaaggctccacaatctcgcacagttcgaagggggcgagagcaaggtgaatactttagtcgccgcagctaacagtctggacaatttatgccgaatggaccccgcatggcacccctggctgtag

SEQ ID NO: 138295 - DNA, 11580 bp, synthetic construct
  misc_feature 1..11580: note = Description of Artificial Sequence: Synthetic coding sequence
  source 1..11580: mol_type = other DNA
atggcattcgtggcaacccagggcgcaacagtagtcgaccaaacaacgctcatgaagaaatatttacagttcgtcgcagctctgactgatgtgaacacgcctgatgagacaaagcttaaaatgatgcaagaggtcagcgaaaattttgaaaatgtgacgagttctccacagtacagcacattcctggaacatatcattccacggttccttacctttctgcaggacggcgaagtgcagttcctgcaggaaaagcccgcccagcagctaagaaaactggtgctggagataatccataggatccccacaaacgaacacctgagaccccacaccaagaatgtgttaagtgtcatgtttcgtttcttggaaactgaaaatgaagaaaacgttttgatctgcctgcggattattatcgagctgcataagcagttccgacctcctataacccaggaaatccatcacttcttggatttcgtaaagcagatatacaaagagctgcccaaagtcgtgaaccggtactttgagaacccccaagtgatccccgagaatactgtccctccccctgagatggtgggcatgattactacaattgccgtaaaagtcaacccagagagagaggacagtgagacacgcacacactccattatacctaggggaagcctctccttgaaggtactagccgaactgcctattattgtggtactgatgtaccaactgtacaagttaaacatacataatgtggtagccgagttcgtcccactaatcatgaatactattgcaatacaggtctctgcacaggctcgacaacataagctgtataataaggagctgtatgcagatttcatcgctgcccagatcaagaccctctcgtttcttgcatatatcatccgcatctaccaggagttggtcacaaagtactctcaacagatggttaaaggaatgctacagctgctgagcaattgccccgcggaaaccgcccaccttagaaaagagctgttgatagccgctaagcatatattaaccactgagttgcgaaaccagttcattccctgtatggacaaattgttcgacgaaagcatcctgattggatctggatataccgccagggagacccttcgtccactcgcctacagtacactggctgatttggtgcaccacgtgcggcagcatttgcccttgtccgacctgagcctggctgtgcagctttttgctaagaatatcgatgacgagagtctcccatccagcattcagactatgtcttgtaagttacttctgaatctggtagactgtatccgaagcaaatcagagcaggagagcgggaatgggagggacgtactcatgaggatgctggaagttttcgtactgaagttccacactatagctcgctaccaactctcagctattttcaaaaagtgtaagccccaaagcgagttaggcgccgttgaggcagctctccccggagtgcccactgcacctgctgcacctgggccggcaccttcgcctgcgcctgtgcctgcacccccacctccccccccccctcctccacctgcaacccccgttactcctgcccctgttccgccattcgaaaaacagggcgaaaaagataaggaggataaacaaacttttcaggtcactgattgcagatcattggtgaagaccctcgtctgcggtgtgaaaacaattacctgggggatcacatcttgcaaagctcctggcgaggcccagttcattcctaataaacaacttcagcccaaagagactcagatctacatcaagttagtgaagtacgcaatgcaagccctggacatttaccaagtacagattgccggaaatggccagacctacatccgcgtggctaattgtcaaaccgtccgtatgaaggaggagaaggaggtcttggagcactttgccggcgtcttcacgatgatgaatccactcacttttaaggagatattccagacaacggtgccatatatggtcgagcggatctccaaaaattatgctttacagatcgtcgctaattcattcctcgcaaatcccaccactagcgctctttttgctacaatactagtcgaatatctgctcgaccgcttgcccgagatgggcagcaacgtggaactgtctaacctttatttgaaactcttcaaactagtgttcggatccgtcagcctttttgccgccgagaacgaacagatgttgaaaccgcacctgcacaagatagtcaactctagcatggaattggcgcagacagctaaggaaccatacaactattttctgctgctgagggccctgtttagaagcataggcggcggtagtcatgacctgctttaccaggagtttctgccactgctgccaaacctgttacagggtttgaacatgctacaaagcggcttacataaacaacacatgaaagatctctttgtggagctatgtctgaccgttcccgtccggctctcctccttgctgccctatctgcctatgcttatggaccccttggtgtcagccctcaacggctcacaaacacttgtgtcccagggtttacggactctggagctctgtgttgacaatttgcagcccgacttcttatatgaccacattcagcctgtccgagccgagctgatgcaggccctgtggcgcaccctaagaaacccagcagattccattagccacgttgcctacagagtgctggggaaatttggcgggagcaacaggaaaatgctaaaagagtcccagaagttgcattacgtagtgaccgaggttcaagggcccagtatcacagtggagttcagtgattgtaaagcgtccctccagctgcctatggagaaggccatcgagaccgctttagactgcctaaaaagcgcaaataccgaaccctattaccgccgccaagcctgggaagtgatcaaatgttttttagtcgctatgatgagcctggaggataacaagcacgctctataccagctgctcgctcaccctaatttcaccgagaagacaatccctaatgtgatcatctcacaccggtataaggcccaggatacacctgctcgtaaaacttttgagcaggcacttacaggagccttcatgagtgctgtaattaaggacctgaggcctagtgccctcccattcgtcgcgtctttgatccgacactacaccatggttgccgttgctcagcaatgtggccctttcctcctgccatgttaccaagtaggatctcagccatccactgccatgttccatagcgaggaaaatgggagtaaagggatggaccctctcgttctcatagatgccatcgcaatctgcatggcctatgaagagaaagaattgtgcaagataggtgaggtggccctggccgtgattttcgatgtggcaagcatcatcctcggctccaaagaacgagcatgccagcttcctttgttttcatatattgtcgaacgcttatgcgcatgctgctacgagcaggcctggtatgcaaagttgggcggagtggtttccattaagttcttgatggaaagattgcctcttacgtgggtcctacagaatcagcagactttcctgaaagccctgctgttcgtgatgatggatctgaccggggaagtgtcaaatggggccgtagcaatggcaaagaccacactggaacagctcctgatgaggtgtgctacgccgctaaaggatgaggaaagagcagaggagattgtcgctgctcaggagaaaagcttccatcatgtaacacacgacctggtgcgcgaagtgacaagcccgaacagcactgtccgaaagcaagccatgcactccctacaagtgctggcccaggtgacaggaaagtctgtaaccgtgatcatggaaccacataaggaagtactgcaggacatggttccccccaagaaacatctccttcgccaccaacccgccaacgcgcaaatcggtctgatggagggaaacactttttgcacaaccctgcaacccagactctttactatggacctcaatgttgtggagcacaaggtgttctatactgaactgctgaacctctgcgaagccgaggactcggcactgacaaaactgccgtgttataagtccctaccctcactagtgccactgcggatagccgccctaaatgcgctagcagcctgcaactatctgccccagagcagagaaaagatcatcgccgctctcttcaaagccctgaattccactaattccgaattgcaggaggcaggagaagcctgtatgagaaagttcctggagggcgccacaattgaagtggaccagatccatacgcatatgcggcccctgcttatgatgctgggcgattacaggtccctaacactgaacgtggtgaacaggctaacaagcgtgacacgcctcttccccaactcttttaatgataagttttgtgaccagatgatgcagcaccttcgtaagtggatggaagttgtggtcatcacacacaaaggcggtcagcggtcggacgggaacgagagtatcagcgaatgcggccggtgtccattgtcccccttctgccagttcgaggaaatgaagatctgctcagcaattattaatttatttcacctcatacccgctgcccctcaaactttggtaaaacctctgctggaggttgtgatgaagaccgagcgggctatgttgatcgaagccggctccccatttagagaacctcttatcaaattcctgactaggcatcccagccagacagtggaactgttcatgatggaggcaaccctaaacgatccgcagtggtctcggatgttcatgagctttctgaaacacaaggatgctagaccgctgcgggacgtattagctgcaaacccaaatcgattcatcacactgctgctgccaggaggagcacagaccgcagtccggcccggcagcccatcaactagcaccatgcgattagacttgcaattccaggccattaaaataatctccataatagttaaaaacgatgattcatggctcgcgagccaacattctcttgtatcccagctgcgccgagtgtgggtcagcgagaatttccaggagcgccatcggaaagaaaatatggccgctacaaactggaaagaaccaaagctgcttgcatactgcctcctgaattactgtaaaaggaattatggggacatcgagctactgtttcagctgttaagagcttttaccggccggttcctgtgtaatatgaccttcctcaaggaatacatggaagaagaaattcccaagaattacagtatcgctcagaaaagggccctgtttttcagatttgtggactttaacgatcccaactttggtgatgagctgaaggctaaagtacttcagcacatattgaaccctgcattcctctactcattcgaaaagggcgagggagaacagctcctgggaccacctaatcctgagggcgataacccagagtcaatcacaagcgtattcatcacaaaagtgttggatccggagaagcaggcagatatgctcgatagccttaggatttatctgttgcagtatgccaccctcttggtggagcacgccccccatcatatccatgataacaacaaaaacagaaactctaagcttcgccggctgatgacctttgcctggccatgtctgctgagtaaagcatgtgtcgatccggcttgtaagtacagtggccatctcctcttggcacacatcatcgccaagtttgctatccacaaaaagatcgtgctgcaggtattccacagcctccttaaggcccacgcaatggaggccagagctattgtcagacaagccatggcaattctgactcctgcagtgccagctagaatggaggacggccaccagatgctgacgcactggaccagaaaaataatcgtggaggaaggacacactgtgcctcagttggtccacattctgcatttgatagtacagcactttaaagtatattacccggtccgacaccatctcgttcagcacatggtttcagctatgcagagattgggcttcaccccctccgtgacgatcgagcagcggcgccttgctgtggatctgtccgaggttgtaattaaatgggaattgcagagaatcaaggatcaacaacctgactccgacatggacccaaattcttctggagagggcgttaattccgtatcctcgagcattaagaggggattgtcggtggactctgcccaggaggtgaagagatttagaactgccacgggtgccatctccgcagtatttggaaggtctcagtccctgcctggagctgatagtctgctggccaagccaatcgacaagcagcacaccgacactgttgtcaatttcttgattagagtcgcctgccaggtgaacgataacacaaacactgctgggtctccgggggaagtactgtcgagaaggtgcgttaacctacttaaaaccgcgctgagaccagacatgtggcctaagtccgaattgaagctccagtggtttgacaagctgctcatgacagtagaacagcccaatcaggtcaattatggaaacatctgcactggcctggaggtcctttccttcttgctgaccgttctgcagtcaccagctattttgtcctctttcaagccgctgcaaagggggatagccgcgtgtatgacatgtggaaatacgaaggttcttagggcagttcactcacttctgagcagactgatgagtattttccctacggaacccagcacttcctcagtggcgagtaagtacgaggaactggagtgtctgtatgcggctgtgggaaaagttatttacgagggcctcaccaactatgagaaggcaacaaatgccaacccgagccagctgttcggaaccctgatgatccttaagtccgcttgctcaaataacccctcttacattgatcgcctgattagcgtgtttatgcggtccctgcaaaaaatggtgcgggagcacctgaatcctcaggcagcctccgggagcaccgaggcaacctccggtacttccgagctcgtcatgttgtcgttagaactcgtcaagacgagattagctgtgatgagtatggaaatgcgcaagaatttcattcaggccattctgacttctctgatagagaagtcgccagacgctaagattctcagagcagtcgtgaaaatcgtagaggagtgggtaaagaacaacagcccaatggcagcaaaccagacccccacattacgcgagaaatccatcctattggtaaagatgatgacgtacatcgaaaagagattccctgaggatctggaattgaatgcacagtttctcgacctggtgaactacgtttaccgcgatgaaaccctgtccggtagtgagctgacagcaaagctcgagcccgcatttttgtccggtttaagatgtgcacaacctctgattcgcgccaagttcttcgaggtcttcgacaactcaatgaagcggagagtttacgagcgcctcctgtatgtgacgtgctctcagaactgggaagctatgggcaaccatttctggataaaacagtgtatagagctgctgctggctgtatgcgagaagtcgacaccaatcggcacatcatgccagggcgcaatgctacctagtatcactaacgtgataaacctagctgatagccacgatcgtgccgcatttgccatggttacgcacgtgaaacaggaaccacgcgaacgggaaaactccgagtccaaagaagaagacgtcgagatagacatcgaactcgcccctggggatcagacgtcaacaccaaagaccaaagaacttagcgagaaagatattggcaaccagctacacatgttgacaaataggcacgataagtttctcgacactctgagggaggtcaagacgggagctctcctgagcgcttttgtgcagctctgtcacatcagcaccacactcgctgaaaagacgtgggtgcaactgttcccaaggttatggaagatcctatccgataggcagcagcacgcactagcaggtgaaatcagccccttcctctgttcagggagccatcaagtgcaacgagactgccagccttccgcattgaattgtttcgtggaagctatgagtcagtgcgtgccgccgatcccaataaggccatgcgtgctcaagtacctcggaaaaactcacaatctgtggttccggagtacacttatgttagagcaccaagcttttgagaaaggcctgtccctccagattaaacccaagcagaccacagaattctacgagcaggagagcatcacccctcctcagcaagagattttggactccctcgccgaattgtactctcttttgcaggaggaggatatgtgggccgggctctggcagaaacgttgcaagtattcggaaactgcaaccgccatcgcatatgaacagcacggattttttgagcaagcccaagagtcatatgagaaagcgatggataaagctaagaaagaacacgagcggtcgaatgcctccccggccattttccccgaataccaattgtgggaggaccattggatccgctgttccaaggaactgaaccagtgggaggctttgaccgaatatggacaaagcaaagggcacataaacccctacctggtactggagtgcgcctggcgggtctctaactggacagcaatgaaggaggcactcgttcaggtcgaggtgtcctgcccaaaggagatggcatggaaagtaaacatgtaccgcggctacctcgctatttgtcaccctgaagagcagcaactttccttcatcgagaggctggtggagatggcctcgtctcttgctatacgtgaatggcgaaggcttccacacgtggtcagccatgtgcacacgcctctcctgcaggccgctcaacagatcatcgaactgcaagaggccgcccagataaatgctggcctccagcctactaatcttgggaggaacaacagtcttcacgatatgaagactgtggtcaagacctggcggaatcgtctgccaatagtgtctgacgacctgtcacactggtcttcgatctttatgtggaggcagcatcattatcagggcaagcccacatggtctgggatgcattcctctagtatagtgactgcctatgagaacagctcccagcatgatccttcttctaataatgcaatgctgggcgtccacgcctcggcttcggccatcattcagtacggaaaaatcgcccgcaagcagggcctggttaatgtggccttggacatattaagtcggattcatactatacccaccgtgccgattgtcgactgcttccagaagattaggcaacaggttaaatgctatctgcagttagcaggagttatgggcaaaaacgagtgcatgcaaggactcgaagtcatcgagagtaccaatctcaagtacttcaccaaggaaatgacagcagaattttatgctttgaagggaatgttcttggctcagatcaacaaaagcgaagaagcgaacaaggcattcagtgccgccgtgcaaatgcacgatgtgctcgtaaaggcgtgggcaatgtggggtgactatcttgaaaatattttcgttaaggaacgtcagctacacctcggcgtttccgcaataacgtgctaccttcatgcttgccggcatcagaacgagtcgaaatcccggaagtatctggccaaagtgctgtggctactctcctttgacgatgataagaatacactagctgacgctgtggataaatactgcatcggggtgcctcctattcaatggctcgcgtggataccgcaacttttaacatgtctcgtcggttcagaaggtaaactgctgctgaacctcatttctcaggtcggtagggtgtacccacaggccgtttatttccccataaggacgctatatcttaccctgaaaatcgagcagcgggagagatacaaatcagatcccggtcccattcgcgctactgcccctatgtggaggtgctcacgcatcatgcacatgcagagggaactgcaccccaccttgctctcgtctctcgagggtatcgttgaccagatggtgtggttccgcgaaaactggcacgaggaagtcctgaggcagctgcagcagggtctcgctaaatgctattctgtagcattcgagaagtcgggggccgtttctgatgcaaagatcacacctcacacattaaactttgtgaagaaattggtgtcaacattcggcgtgggactggagaatgtgagcaatgtgagtacgatgtttagtagtgcagcaagtgagtccctcgcacgtagggcccaggcaacagcccaagatcccgtgtttcaaaaactcaaaggacagttcacgacagatttcgacttcagcgttcctggtagtatgaagctacataacctgatcagtaaacttaagaagtggatcaagattctagaggccaagacaaagcagctgcccaagtttttcttgatagaggagaagtgtaggttcctgagtaatttctccgcacaaacggcggaggtggaaattcccggagagttcctaatgcccaagcccacacactactacataaaaattgccaggtttatgccccgcgtggaaattgtgcagaaacacaacactgcagcccgtaggctttatatccgagggcacaacggcaagatctacccatacctggtgatgaatgatgcttgtctaacagagtctcgacgtgaggagcgggtgctgcaattgcttagactcttaaatccctgcctcgagaagcgcaaagagaccacaaaacgccatctattttttaccgttccgagggtggtagctgtgtccccgcaaatgcggttggttgaggataatccctcctcattatctctggtcgaaatatacaagcagcgctgcgcaaaaaagggcattgagcatgataatcctatctcacgttactatgacaggctggctacagtacaggcccgtgggacccaggcttcacatcaggtactgcgagacatcctaaaggaggtacagtccaacatggttccacgttctatgctaaaggagtgggccctgcatacgttcccgaacgccactgactattggacttttcgcaagatgtttactatccaactggctttgattggcttcgcggagtttgtcctccatttgaaccgcttgaaccccgagatgctgcagattgcccaggatacaggcaagctaaacgtggcatacttcaggttcgatattaatgatgccacaggcgacctcgacgctaacagacccgttcctttccggcttactcctaatatcagcgagtttctgactacaattggtgtctccggccccctgacagcctcaatgatagccgtggcccgctgttttgcccagccaaattttaaggtagatggcatactcaagacagtgctccgggatgaaatcatcgcctggcataagaagacccaggaagacacctcctccccgctttctgccgctgggcagcctgaaaatatggactcccagcagctcgtctccctggtgcagaaagccgtgactgctattatgacccggctgcacaacctggcacagtttgaaggtggcgaatcgaaagtgaacactctggtcgccgcagcaaattccttagacaatctctgcaggatggatcctgcctggcatccctggttatag

SEQ ID NO: 138296 - DNA, 216 bp, synthetic construct
  misc_feature 1..216: note = Description of Artificial Sequence: Synthetic coding sequence
  source 1..216: mol_type = other DNA
atggcattcgtcgctacccaaggtgcaaccgttgttgatcagaccacactgatgaagaaatacctccagttcgtcgccgcactgacagacgtgaataccccagatgaaacgaaacttaagatgatgcaggaagtctcggagaattttgagaacgtgacgtcgtctccacagtatagtaccttcctggagcatattatcccccgcttcctcacctag

SEQ ID NO: 138297 - DNA, 117 bp, synthetic construct
  misc_feature 1..117: note = Description of Artificial Sequence: Synthetic coding sequence
  source 1..117: mol_type = other DNA
atgagcgatagtggcgagcagaattatggcgagagagttaatgtcgaggagggaaagtgcggctcccgccatctgacctccttcattaacgaatacctcaaacttaggaacaaatag

SEQ ID NO: 138298 - DNA, 567 bp, synthetic construct
  misc_feature 1..567: note = Description of Artificial Sequence: Synthetic coding sequence
  source 1..567: mol_type = other DNA
atgtccacccgacggcgacacgtgggcaatcgagccaacccggatccaaactgctgcctgggggttttcgggctctccctgtataccaccgaaagagacctccgtgaggtgttttcaaaatacggacctatcgctgatgtcagtattgtgtatgaccagcagtcacgacgctctagaggtttcgccttcgtctactttgagaatgttgacgacgccaaagaagccaaggaaagggccaatgggatggagctcgacggcaggagaatcagggtggatttctcaatcaccaagcgtccgcacacaccaacgcccggaatttacatgggaagacccacttacggctcttctagaagaagagattactacgatcgaggttacgatcggggatacgatgatcgagattattactctcggtcctaccgggggggagggggaggaggaggaggctggagagcggcccaagatagggaccagatttacagacgaagaagcccaagcccttattactctcggggggggtaccgttccagaagccggtcaagaagttactcaccccgcaggtattag

SEQ ID NO: 138299 - DNA, 867 bp, synthetic construct
  misc_feature 1..867: note = Description of Artificial Sequence: Synthetic coding sequence
  source 1..867: mol_type = other DNA
atgtcggactctggagagcagaattacggggaacgggaaagtaggtccgctagccgcagtgggtctgcccacggttccgggaagtccgccaggcacacccctgcgagaagtaggtcgaaggaagattcccgccggagcagatcaaagagtcggagtcgcagcgagtcccggtcaaggagccgcagatcttctcgacgacattatactcgatcaaggagccggtcaagaagccacaggaggtcccgctcacggtcttactcacgtgattaccgaagacgccacagccattcccactctccgatgtcaacaaggcgccgccatgtggggaatagggcgaaccccgacccaaattgctgccttggagtctttggcctgagcctgtacactactgagcgcgatctgagagaggtttttagcaaatacgggcccatcgctgatgtgtcaatagtgtacgaccagcaatcacgaaggagccggggttttgctttcgtttacttcgagaacgtggacgatgctaaggaggccaaagaaagagctaacggcatggaactggacggacgccgtataagagttgacttcagcatcactaaaaggccccatactcctactccagggatatacatggggcggccgacatacgggagttcaaggagacgcgattattacgaccgcggctacgatcggggctatgacgatcgtgattactattcacggtcgtataggggaggcggaggagggggcggcggttggcgtgcagctcaggaccgagatcaaatctatcggcggcgctccccaagcccttactacagtaggggtggctataggtctagaagcaggtcaagatcatatagtcctaggaggtactag

SEQ ID NO: 138300 - DNA, 483 bp, synthetic construct
  misc_feature 1..483: note = Description of Artificial Sequence: Synthetic coding sequence
  source 1..483: mol_type = other DNA
atggttccatctgccggacagttagccctctttgctttagggatcgtcttggccgcatgtcaagccctcgaaaactccacatccccgctgagcgccgatcctccggtagctgcagcagtggtctcgcacttcaacgattgtcccgactcacatactcagttttgcttccacggcacttgtagatttcttgtccaggaggacaaaccggcttgtgtatgccacagcgggtatgtgggtgccagatgtgagcatgcagatttgctagccgtagttgctgcgtctcaaaagaaacaggctataacagccctggtcgttgtgtcaatcgtggccctcgcggtcctaattataacttgcgttctgatacactgctgccaagtgcggaaacactgcgaatggtgcagggctctgatctgcaggcacgaaaaaccttcagccctgttaaaggggcgtacagcttgctgtcattccgaaactgttgtttag

SEQ ID NO: 138301 - DNA, 480 bp, synthetic construct
  misc_feature 1..480: note = Description of Artificial Sequence: Synthetic coding sequence
  source 1..480: mol_type = other DNA
atggtgccctccgccggacaactggcattgtttgccttgggaattgtgctggccgcatgccaggctctcgaaaacagcaccagccccctctcggacccccctgttgccgccgccgtcgtctcccatttcaacgactgccctgacagtcatacccagttctgtttccacgggacttgcaggtttctggtgcaggaggacaagcctgcatgtgtctgccatagcggctatgtgggagcacgctgcgaacacgccgacttactagcagtggttgccgcttcccagaagaagcaggccatcactgcactcgtggttgtgagcatcgtggctcttgccgtgctgatcattacttgcgtcctcatccactgctgccaagtaagaaagcactgcgaatggtgccgggctctaatctgcaggcatgagaaaccttcagcactgcttaagggacggacagcttgttgtcacagtgagactgttgtgtag

SEQ ID NO: 138302 - DNA, 2583 bp, synthetic construct
  misc_feature 1..2583: note = Description of Artificial Sequence: Synthetic coding sequence
  source 1..2583: mol_type = other DNA
atgatgtcaattaaagcctttacactggtcagcgcagtggagagggaactgcttatgggggataaagaacgcgtcaatatcgaatgcgtagagtgctgcggacgcgacctctatgtggggaccaacgattgtttcgtctaccactttctgttggaagagcggccagtgcccgccggacctgctacctttactgcgacaaagcagttgcaacggcacctgggatttaagaagccagttaacgaactccgggcagcctcagctctgaacaggctactggtactgtgtgacaactccattagccttgtcaatatgctgaatctggagcccgttccatccggcgctagaatcaaaggcgcagccacgttcgctctcaacgaaaatccagtttccggcgaccctttctgcgtcgaagtttgcatcattagcgtgaaacgcagaactatacagatgttcctggtgtacgaggaccgggtgcaaatcgtaaaggaagtgagtactgccgagcagcctctggctgtagccgtagacggccactttctctgtctggcactaacaacacagtatattatacacaactacagtaccggcgtctcccaggacctgtttccatattgtagtgaggagagaccccctattgtgaaacgtatcggacggcaggaattcctgctggcggggcccggaggcttagggatgttcgctactgtcgctgggatttctcaaagagccccagtgcactggagcgagaacgtaatcggtgctgctgtttctttcccctacgtgatcgccctggatgatgaatttattacagttcactccatgttggatcaacagcagaagcagaccctgccttttaaggaggggcatattctgcaggatttcgagggccgtgtaattgtcgccacctctaaaggcgtgtatatactggtgcccttgccactggagaaacagatccaggaccttctcgccagccgcagggtggaggaggcactggtgttggccaagggggcccgaagaaacatcccaaaggagaagttccaagtcatgtatcgtagaatcctccagcaggcaggcttcatccagtttgcccagctgcagttcttggaggccaaggaactgtttcggagcggccagctagacgtcagagaactcatatctctctacccatttctgctgcctacttccagctccttcaccaggtcgcacccccccctgcatgagtacgccgaccttaatcagctgacacagggggatcaggaaaagatggccaagtgcaagcgctttttaatgtcatatctgaacgaagtccggtcaacggaggtcgccaacggctataaggaggacattgatacagccctccttaagttatatgcggaggctgatcacgacagcttattggacctcctggtgacggaaaatttttgtctcctaaccgattccgcagcatggctggaaaaacataagaaatacttcgcattgggtctactttaccattataataaccaggatgccgcagcagtgcagctctgggtgaatatcgttaacggggacgtgcaggacagtacaaggtccgatctttacgagtatatcgttgactttctgacgtattgtcttgacgaggagcttgtctgggcctacgcagactgggtcttacagaagtccgaggaggtgggcgtccaggtgttcactaagcgaccgcttgacgagcagcaaaagaactctttcaatccagatgacatcatcaactgcctgaaaaagtaccctaaagctctcgtaaagtaccttgaacacctggtgattgataaacgacttcagaaggaagaatatcacactcatctggctgtgctatatctggaggaggtcctgttgcagcgagccagcgccagtggcaaaggcgcggaggccactgagactcaggccaagctcagacggcttcttcaaaaaagcgacttgtatcgtgtgcattttctcctggagaggctacagggtgcaggtctccccatggaatctgctatattgcatgggaagttgggcgagcatgagaaggccctgcatatactggtccatgagctgcaggattttgcggccgccgaagactactgcctttggtgcagtgaaggtcgggacccccctcatcgccagcagcttttccacacgctcctcgctatttacctgcacgccggacctactgctcacgagctcgctgttgccgccgtggacttgctgaacagacacgctactgagttcgacgccgcacaggtcctgcagatgctccctgacacatggagtgttcaactgctctgcccctttctcatgggggcaatgcgtgactccatccacgccaggcgcacaatgcaagtggcattgggactggccaggtctgagaacctcatttatacctatgataaaatgaagctcaaggggagctccattcagctgtcggataagaagctgtgccaaatctgccagaaccccttctgtgagccagtgttcgtgcgatatcctaacggaggtttagtgcacacccactgtgctgcctctagacacacaaatcccagttcatcctcccctggtacccgaacatag

SEQ ID NO: 138303 - DNA, 2583 bp, synthetic construct
  misc_feature 1..2583: note = Description of Artificial Sequence: Synthetic coding sequence
  source 1..2583: mol_type = other DNA
atgatgtctattaaggccttcactttagtgtccgccgtagaacgagaactgctaatgggcgataaggagcgggtgaacattgagtgtgttgagtgttgtgggcgagacctgtacgtaggcactaacgactgctttgtgtatcactttctgctcgaggagcgaccagtccccgctggtcctgccaccttcaccgcgactaagcagctgcagagacacctgggattcaaaaaacctgtgaacgagctgagagccgcaagcgcattgaacagactgctggtgttgtgcgataatagtatttccctagttaatatgctgaatctggagcctgtacccagtggagcacgcatcaaaggggctgcaacttttgctttaaacgaaaatccagtaagcggagatcccttctgtgttgaagtgtgcatcatcagtgtcaaaagaaggactatccagatgtttctcgtgtacgaggaccgggtacagatagtgaaagaagtcagcaccgccgaacagcctctggcagttgcggtcgatgggcacttcctttgtctggctttgaccacccagtacatcatccacaactactccaccggtgtatctcaagatctgttcccttactgctccgaggagcgccctcccatcgtgaagaggatcggtagacaggaattcctcctggccggcccaggaggactggggatgttcgccaccgttgccggcatcagccagcgtgcccctgtacattggagcgagaacgtgattggggctgccgttagttttccatacgtgatagcactggacgatgagttcatcacagtccactcaatgctggaccaacaacaaaaacagactcttccttttaaggaggggcatattctacaagacttcgaggggagagtaatagtggctacctcaaagggggtctatatcctcgtaccgttgcccttggagaagcaaattcaggatcttttggcaagtagaagagtggaagaggcactggtcctggctaagggcgcccgtaggaatattcccaaggaaaaatttcaagtgatgtatcgaagaatcttgcaacaggcaggcttcatacagttcgctcagcttcagttcctcgaggctaaagaactgtttcgaagcggacagttggatgtgagagaactcatttcgctgtatccatttctattaccaacatccagttctttcactcggagccatccccccctgcatgagtacgctgatttgaaccagcttacacagggcgaccaggaaaagatggcgaagtgcaagcgatttcttatgtcttacctaaacgaagtgcgtagcacggaagtcgctaatggttacaaagaagacatcgacactgccctgctaaaactctacgcggaggcagaccatgactccctcctggacctcttagtgaccgaaaatttctgtttgctaacggactctgccgcatggctcgagaaacataagaagtatttcgcactcggactgctctatcattataacaaccaagatgctgctgctgtccaattgtgggtgaatatcgtgaacggagacgtgcaagattctacacgctccgacctgtatgagtacatcgtcgattttctcacttattgtttagatgaggaactcgtctgggcctatgctgactgggtgttacaaaaaagcgaagaggtgggggtgcaggtctttaccaagcgcccgttagatgaacagcagaagaactcctttaacccagacgatatcattaattgcttaaaaaaatatcccaaagctctggtcaagtatctcgaacacttagttatcgataagcggttgcagaaggaggaataccacacacatctcgccgtgctttaccttgaggaggtacttctacagagggccagcgccagcggcaaaggtgctgaggctaccgaaactcaagccaagctgaggcgcctcttacaaaagagcgacctttacagggtgcactttctgctcgagcggctgcagggcgccggacttcccatggagagtgcaatcctacacggcaagctgggagaacacgagaaggccctacacatcctggtccacgagcttcaggactttgccgcagcagaggactattgcctgtggtgctctgaaggtcgggacccaccccatcgccaacagttgtttcacactctgctggctatttacctgcacgcaggacctacagcccatgagctggccgtggcagcggtcgaccttttgaacaggcatgctactgagtttgacgctgctcaggtgcttcaaatgttgcctgacacttggagcgtgcagctgctgtgcccattccttatgggtgccatgagagatagcattcacgcacgtcgcaccatgcaggttgctctcggtttggcccgttccgaaaatctgatttacacatatgataaaatgaaactgaagggcagttcaatacagctctcagataaaaagctgtgtcagatttgtcagaatcctttttgtgagcccgtctttgtcagataccctaacggcggcttggtgcatacgcattgcgccgcttcccgacatacaaatccgagtagctccagcccagggacaagaacatag

SEQ ID NO: 138304 - DNA, 948 bp, synthetic construct
  misc_feature 1..948: note = Description of Artificial Sequence: Synthetic coding sequence
  source 1..948: mol_type = other DNA
atgttgattggctcctgcaggaaggtaaaaagaagcgtgcaagtgtttaccaagaggcccctcgacgaacagcagaaaaatagttttaacccagatgacatcatcaactgcctgaaaaaatatcctaaggccctggtgaagtacttagagcacctagtgatcgacaaacggttacagaaagaggagtaccatactcacctggccgtgctgtacctcgaggaggttctcctccagagagctagcgcttccgggaagggcgccgaggcaacggagactcaggccaaactgcggagacttctgcaaaagagcgatctgtacagagtgcacttcctcttggagcgcttacagggagcgggattaccgatggaatccgccattctgcacgggaagttaggcgaacacgagaaggccctgcacattttggtgcacgagctgcaagatttcgccgctgcagaagattactgcctgtggtgtagcgaggggcgggatccgcctcaccgacaacagctcttccacacgctgctcgctatttacctacatgccgggccaactgcccacgagctagctgttgcagcagtggatctgttgaatagacacgctactgaattcgacgcggcccaagttctgcagatgttaccggatacttggagtgtacaattattatgcccctttctgatgggggccatgcgcgacagtatccacgcccgtagaacgatgcaggtcgctctgggtctggccaggtctgagaatcttatctacacatatgataaaatgaaattaaaagggtcatcaatccagctaagcgacaaaaaactgtgccagatatgccagaatcccttttgtgaacccgtattcgtgaggtaccctaatggcggtctggttcacacacactgtgcagcctcaagacatacaaacccaagcagtagttcccccggtacgagaacctag

SEQ ID NO: 138305 - DNA, 1704 bp, synthetic construct
  misc_feature 1..1704: note = Description of Artificial Sequence: Synthetic coding sequence
  source 1..1704: mol_type = other DNA
atgggcagaggactcctccgagggctctggcccctgcatattgtgctctggacacgtatagctagcaccatcccgcctcacgtacagaaatctgttaataatgatatgattgtcactgataataatggcgcggtaaaattcccgcagctttgtaaattctgcgatgtcaggttctcaacttgtgataaccagaaaagctgtatgtctaattgtagcataacttctatctgcgaaaaaccacaggaggtgtgtgtggccgtgtggcgaaaaaatgatgagaacattactctcgagacggtctgtcacgatccaaagctgccataccacgattttatcttggaagatgctgccagtccgaagtgcattatgaaggagaagaagaaacctggggaaacatttttcatgtgctcctgcagctcagatgagtgtaacgataatatcatcttcagtgaagaatacaatacctccaatcccgacctgctgctcgtgatctttcaggttactggcatatctctactgcctccactaggcgtagccattagcgtaatcatcatcttttactgctatagagttaaccgtcaacaaaagctgagctctacttgggagaccggcaaaacgcgcaagcttatggaattttcagagcattgtgctataattcttgaggatgacagaagtgatatctcatccacgtgtgccaacaatatcaaccacaatacagagttgcttcccattgagcttgacacattggtaggcaaggggcggttcgcggaggtctacaaggccaaactgaagcagaatacctcagagcagtttgagaccgtggccgtcaaaatcttcccctacgaagagtacgcatcttggaaaacagaaaaggacattttctctgacatcaaccttaagcacgaaaatatactgcaattcctgacagctgaggagagaaagacagagttgggtaagcagtactggctgatcacagccttccatgccaaaggcaacctgcaggaatacctgacccgacatgtgatttcatgggaggacctcaggaaactgggcagctccctcgcaagaggcatagcccatttgcacagtgaccatactccttgtggcaggccaaagatgcctatcgtccaccgcgatctgaagtcctccaacatcttggtcaaaaatgacctgacatgctgtctgtgtgacttcggcctctccctgcgcctggacccaactctcagcgtggacgacctggcaaattccggccaagtcgggacagcacgctacatggcaccggaagtgttggaatctaggatgaacctcgagaacgtcgaaagctttaagcaaaccgatgtgtattccatggcactggtgctctgggagatgacaagccgatgcaatgccgtcggggaggttaaagactatgaacctccgtttggtagtaaggtgcgtgagcacccctgtgtcgagagtatgaaggataacgtcttacgagatagaggtagacctgagatccccagcttctggttaaatcatcaaggtattcagatggtgtgcgagaccctgactgaatgctgggatcatgatcccgaagccagattgacagcgcaatgcgtcgcagagcgattctccgaattggagcacctggatcgcctgagcggacgaagctgttctgaagagaagattccagaagacgggagccttaatactaccaagtag

SEQ ID NO: 138306 - DNA, 1779 bp, synthetic construct
  misc_feature 1..1779: note = Description of Artificial Sequence: Synthetic coding sequence
  source 1..1779: mol_type = other DNA
atgggtcgaggattgttgaggggactgtggccactccacattgtgctgtggacacgcattgcttccacaattccaccacacgttcagaagtccgacgtggaaatggaagctcagaaggatgagataatctgtccttcctgtaaccgaactgctcatcccctccgtcacatcaataacgacatgatcgttaccgacaacaatggtgcagtcaaattcccacagctatgcaagttctgtgacgtgcgtttctccacatgtgacaatcagaagtcctgcatgtccaactgttccatcactagcatctgtgagaaaccccaagaggtgtgcgtggccgtgtggcggaagaatgatgagaatatcaccctggagaccgtatgtcatgaccccaaactgccataccacgacttcatcttggaagatgctgcttctccaaaatgtattatgaaggagaagaaaaagcctggagagacctttttcatgtgctcttgtagctccgatgaatgcaatgacaacattatcttctctgaggagtataacaccagcaatccagacctattgctcgtaatattccaggttactggtatcagtctgctgcctcctctaggagtggctatctcagtcattataattttttactgctacagagttaatcgccagcagaaactttccagcacctgggaaaccgggaaaactagaaagctaatggagttttctgagcactgcgcgatcatcctcgaggacgaccggagcgatatctcttcaacctgtgctaacaatattaaccataatactgaactgctacccatcgagctcgacacattggtgggcaaaggcaggttcgctgaggtgtacaaagccaagctaaagcagaacacttcagaacagttcgagactgtcgccgtcaagattttcccatacgaggagtacgcttcctggaagactgagaaagacatattttcagacattaacctgaaacacgaaaatatcttacagttcttgacggctgaggagagaaagaccgagctgggcaaacaatactggttgattaccgcatttcacgccaagggtaatctccaagaatatctaactagacacgttatcagctgggaagatctgcggaagctgggatcgtcgttagcccgcggcatagcacacctccattccgatcacacaccctgcggccggcctaaaatgcctatcgtgcatagggatcttaagtcatccaatattctcgtgaagaacgatctgacctgttgcctatgtgattttggactcagtctgcgccttgacccaacactgtccgtggacgacttagccaactccggtcaggtcggcacagccaggtacatggctcccgaagtactcgagagtagaatgaatctggaaaatgtggaatctttcaaacagaccgacgtgtattctatggcactggtgttatgggagatgacctcccggtgtaacgctgtgggggaagttaaggattacgaaccaccattcggatctaaagtgcgggagcatccttgcgttgagtcaatgaaggacaacgtactgcgggaccgtgggagaccagaaataccttctttctggctaaaccaccagggcatccagatggtgtgcgagacactcaccgaatgttgggaccacgatccagaagcccggctgacggcccagtgcgtggcagaacgattctctgaactggagcacttagaccggctcagtgggagaagctgttccgaggaaaagatccctgaagatggttccctgaacacaacaaaatag

SEQ ID NO: 138307 - DNA, 339 bp, synthetic construct
  misc_feature 1..339: note = Description of Artificial Sequence: Synthetic coding sequence
  source 1..339: mol_type = other DNA
atgtgctcatgctctagtgacgaatgcaacgataatatcattttcagtgagggacgatgtaaaattcgacacattggaagtaataatcgattgcagcggtccacatgtcagaataccggttgggaaagcgctcacgttatgaagacccctggctttagagaatacaatacaagcaatcccgacctgctactagtcatattccaagtcaccggaataagtctcctgcctcctcttggcgtggctatttcagtcataatcatcttctactgttacagagtcaatagacagcagaaattatcatcgacatgggagacaggcaagacgagaaaattaatgtag

SEQ ID NO: 138308 - DNA, 1194 bp, synthetic construct
  misc_feature 1..1194: note = Description of Artificial Sequence: Synthetic coding sequence
  source 1..1194: mol_type = other DNA
atgtgcagctgttcctctgacgagtgtaatgataacatcattttttctgaagagtataacacatccaacccggacctgctgcttgtcatctttcaggttacgggcatcagcttgctgcctcccctgggagttgctataagtgtgatcattatattttactgctatcgggtgaatagacaacagaaactatcttctacgtgggagaccggcaagacgagaaagctgatggaattctccgagcactgtgctatcatactcgaggatgaccgatccgatattagttcaacatgtgcaaataatattaatcataatacagaattactgcctatcgagttggatacactagtgggcaaaggaagattcgcagaggtgtacaaagctaagttgaagcatgaaaatatcctgcagttcctcacagctgaggagaggaagaccgaactcggaaaacagtattggcttattaccgccttccacgctaaaggtaacctgcaagagtacttgactcggcatgttatctcgtgggaggatctccgcaaactgggctcttctctggcacgcggcatagcccatctgcacagcgatcataccccgtgcggtcgccctaagatgccgattgttcaccgggacttaaagagctccaacatcctggtgaagaatgacttaacctgttgcttatgcgacttcggcctctcactgaggctggaccccacgttgagcgtggatgacctcgccaacagtggacaggtggggactgcgagatatatggctcccgaagttttggaatcgaggatgaatctggaaaatgtagagtctttcaaacagacagatgtgtattcaatggccctggtactgtgggagatgacctcacggtgtaatgccgtgggggaggtgaaggattatgaaccaccctttggctccaaggttcgggagcacccatgcgtggaatcaatgaaggataatgtattaagggatagaggtcgtccagagatcccgtcattctggttaaatcatcaggggatccagatggtgtgtgagacactgacggagtgctgggaccatgatccggaagctagactcacggcccaatgcgtggctgagagattctctgaattagagcacctagaccgcctatccggccgctcttgctccgaggagaagatccccgaggatgggtcactgaacacaaccaaatag

SEQ ID NO: 138309 - DNA, 2244 bp, synthetic construct
  misc_feature 1..2244: note = Description of Artificial Sequence: Synthetic coding sequence
  source 1..2244: mol_type = other DNA
atggcagatgaagcagctcttgccctgcagccgggcggttctccgtctgcggctggagctgacagggaggctgcttccagtccagccggagaacctctacgaaaacggccgagacgagatggacccggtcttgagcggtcaccgggcgagccaggtggcgctgccccggaacgcgaagtccctgcagccgcccgtgggtgtcctggagcagccgcagccgctctctggagagaagcagaggcagaagccgccgcggcaggcggtgagcaggaggcgcaggcaaccgcggcagcgggcgaaggggacaacggcccaggacttcaggggccttcccgagagccacctctagccgacaacttgtatgacgaggatgatgacgacgaaggagaagaggaagaggaggccgctgcagccgccattggttatagggataatctcctcttcggcgacgaaattataacaaatggattccactcctgtgaaagcgacgaggaagatcgagccagtcacgcatcatcctcagactggacaccccgaccccgtatcggaccttatactttcgtgcaacaacacctcatgataggaaccgatcctcgaacaattctgaaagatctgctgccagagactatcccccctcccgaactcgatgatatgaccctttggcagattgtgattaacattctttccgagccaccaaaacgaaaaaaacgcaaagacatcaacacaatcgaggacgctgttaagctgctgcaggagtgcaagaagatcatcgtgctcacaggcgcaggggtctccgtgtcatgtgggatacccgactttaggagccgcgacggaatctacgctagactggccgtcgactttcctgatctccctgaccctcaggccatgtttgatattgagtactttagaaaggatcccaggccattctttaagttcgcaaaagaaatttatcctggacagttccagcctagcctgtgccacaaattcattgccctgtcagataaggagggcaagttgctgaggaattatacccagaatatcgataccctggaacaggtggcaggcatccagcgaatcatccagtgtcacggcagtttcgccacagcaagttgtctaatttgcaaatataaggtcgactgtgaggctgtgagaggggacattttcaaccaggttgttcccaggtgccccagatgccccgccgatgagccactagcaatcatgaagccagaaatagttttcttcggcgaaaaccttcccgagcagtttcatagagccatgaaatatgataaggatgaggtagaccttcttattgtcatcggcagttctttgaaagtgaggcccgttgccctgattccctcatccatcccacacgaagtgccccagattctaattaatcgggaaccattaccccatctgcacttcgatgtggaattattgggggattgtgacgttattatcaatgagttgtgccatcgactgggaggagagtacgctaaactgtgttgcaatccggtcaagctttccgagataacagagaagcctcctaggactcagaaagagcttgcctatctcagcgagctgccaccgactcctctgcacgtctcagaagattcaagctctcctgaacgcactagcccacctgattcctccgtgatcgtgacgttactggaccaggctgcaaaaagcaatgatgatcttgacgtgagtgagagcaaagggtgtatggaagagaagcctcaggaggtgcagaccagccgcaatgtcgagagcattgcagaacagatggaaaatcccgatttgaagaacgtggggtcatctacgggggagaaaaacgaacgcacttcagtcgctggcacagtgcggaaatgctggcctaatagagtggcaaaagagcagatcagccgcaggcttgacggcaatcagtatctgtttctgcctcccaacaggtatatcttccacggggccgaggtgtacagtgatagcgaagatgacgttctgtcgtccagttcctgtggctcaaacagtgactccggaacttgccaatcgccatctttggaagagccaatggaggatgagtctgagattgaggaattttataatggtcttgaggacgagccagacgtgcccgagcgggctggcggcgccggatttggaacagatggtgatgatcaggaggctatcaacgaggctatctcagtgaaacaagaagtgaccgacatgaactacccaagcaacaagagctag

SEQ ID NO: 138310 - DNA, 2553 bp, synthetic construct
  misc_feature 1..2553: note = Description of Artificial Sequence: Synthetic coding sequence
  source 1..2553: mol_type = other DNA
atgacgtcccattacgtgatagccatattcgccctgatgtcgtcctgtctcgcaactgcaggtcctgaacccggggctttgtgcgaactgagccctgtttccgcctcccatcccgtgcaagcacttatggaaagcttcactgttctctccggctgcgccagtcgtggaaccacaggcctcccacaggaggttcacgtgctgaatttacgcacagctggacagggtccaggtcaactgcaacgtgaggtgaccctgcacctgaaccctatctctagtgtacacatccaccacaaatcagtggtgttcctgcttaactcaccccatccactcgtgtggcatctcaaaaccgagcgcttagctacaggagtgagtcggctcttcttagtcagcgagggctctgttgtgcagttttcctccgcgaattttagcctcacagccgagaccgaggagcgtaactttccacatggcaacgaacacttgctgaactgggccagaaaagagtacggggctgtgacttcattcactgaattgaaaattgccaggaacatttatattaaagttggggaggatcaggtcttcccacctaagtgtaacatcggtaagaatttccttagcctgaattacttggctgagtatctccagcctaaggcagccgaaggctgtgtaatgtcctcccagccacagaacgaggaagtccatattatcgagttgattacccccaattccaatccctatagtgcttttcaggtggacatcaccattgacataagaccaagccaagaggatctggaggtggtaaaaaacctgattttgatcctgaaatgcaagaaatctgttaattgggttattaagtctttcgatgtgaaaggcagtttgaaaatcatcgcacctaacagtattgggttcggtaaggagtctgaacgcagtatgaccatgaccaaaagcatcagagatgacatccccagcacacagggaaacctggtgaaatgggccctagataacgggtactcaccgatcactagctatactatggcacccgtcgctaacagatttcatctgcgattggagaacaacgaagagatgggggatgaggaggtacacaccattccgcccgagctcagaattctgcttgatcctggggcccttccagcacttcaaaatccacccattaggggcggtgagggacagaatggaggcctgcccttcccctttcccgatatttcgcgacgagtgtggaatgaggaaggggaagacggactgccaaggccgaaagatcctgtcattcctagcatacagctgtttcccgggctccgagaaccggaagaagtgcaagggagtgtggatatagccctctccgtaaagtgcgacaacgaaaaaatgatcgtagctgtggagaaggactcttttcaggcctcaggatacagtggcatggatgtgactctgctggaccccacgtgcaaagcaaagatgaacgggacccatttcgtgttggagtctccactgaacggatgcgggacgagaccccgctggagcgccctagacggggtcgtctactacaatagcatcgtgatacaggtgccggccctcggtgattcaagtggttggccagacggctatgaagaccttgaaagcggcgacaatggattccccggagatatggatgaaggtgacgcctccctctttaccagacccgaaatcgtcgtgttcaattgctccctccaacaggtgagaaatccatctagcttccaggaacaaccacatggtaatatcacatttaacatggagctctacaacacagacctgtttctcgtgcccagccagggtgtgttcagtgtgcctgaaaacgggcacgtttatgtggaggtgagtgtaacaaaggccgagcaggagctgggcttcgccatacagacttgctttatctctccatactcaaatccagatcggatgtctcactataccatcattgaaaatatttgtccaaaagacgaatctgtcaagttttatagccctaagagagtccatttccccatacctcaagctgacatggacaaaaagagattttcgttcgtatttaagcccgtcttcaatacttccctgctgttcctgcagtgcgagctgactctgtgcacaaaaatggaaaagcacccgcagaaactgccaaaatgcgtgcctcccgacgaagcatgcacatcactcgatgccagcattatctgggctatgatgcagaacaaaaagacatttacaaaacctctggcagtgattcatcacgaggccgagtccaaagagaaaggcccatcaatgaaagaaccgaaccccatcagcccgccaatcttccacgggctggacaccttgacggtaatgggaattgcatttgccgcgttcgttatcggagcgttgctaacaggcgccttgtggtatatttactctcacaccggcgagactgccggaagacagcaggtgcctacttcgcctcccgcctctgaaaactcctccgcagctcattccattgggtcaacccagtccactccttgttcaagcagttctacagcctag

SEQ ID NO: 138311 - DNA, 108 bp, synthetic construct
  misc_feature 1..108: note = Description of Artificial Sequence: Synthetic coding sequence
  source 1..108: mol_type = other DNA
atgacttcacactacgtcattgcaatctttgccttgatgagtagctgcctggctactgctggaccagaacctggggccctttgcgaactgagcccagttagtgcttag

SEQ ID NO: 138312 - DNA, 2553 bp, synthetic construct
  misc_feature 1..2553: note = Description of Artificial Sequence: Synthetic coding sequence
  source 1..2553: mol_type = other DNA
atgactagtcactacgtgatcgccatcttcgcacttatgagttcttgcttagcaacagctggacctgagcccggagctctttgcgaactcagccctgtgtccgcgtcacatcctgtacaggctctcatggaatcatttacagtgctgagtggatgtgcttctcggggaaccaccggcctgcctcaggaagtacacgttctgaatctgcgcactgcaggccagggccctggacagctgcagcgggaggtaacactgcaccttaaccccataagctccgtgcatatacaccataaatccgtcgtgttcctactgaattccccccacccactcgtttggcacctcaaaactgaaaggttggcaacgggagtgtcacgcctctttttagtctccgaggggtccgtcgtacaatttagcagtgccaatttttccctgacggccgaaaccgaggaaagaaatttcccccacggcaacgaacatttactgaactgggcgcgaaaagaatacggtgccgttacatcttttacagaactgaagatcgcacggaatatctacataaaggttggagaggaccaggtcttcccgcctaaatgcaacattggaaagaatttcctttctctcaactatttggctgagtacctgcagccgaaggccgcggaagggtgcgtgatgagctctcagccacagaatgaggaggtccacattattgaactgattacccctaacagtaatccatactccgcattccaagtcgatatcactattgacattcgcccgtctcaagaagatctggaggttgtcaagaatctaattcttattttgaagtgtaaaaagagcgtgaattgggtaataaagtccttcgacgtaaaaggtagtctgaaaatcattgcccccaatagtattggattcgggaaagagtcagagcggtctatgaccatgaccaagagcatccgggatgacatccctagtacacaggggaacctggttaagtgggccttagacaacggatattcgccgattactagctacactatggcaccagtggccaatcgatttcaccttcggttggaaaataacgaggagatgggagatgaggaagtgcacacaatcccccccgagctgagaatcctgctagaccctggcgctctccccgcacttcagaacccccccatcagggggggggagggccagaatggaggcctccccttccctttcccagatattagcagaagggtctggaacgaagagggcgaggatggcctgcctcgaccaaaagatcctgtgataccatccatacagctatttcccgggctaagagagcccgaggaagtgcagggctccgtggatatcgccctgagcgtaaaatgtgacaacgaaaaaatgatcgtggctgtggagaaagattctttccaggcatccgggtattctggtatggatgttactctcctcgaccctacgtgcaaagccaagatgaatggcacacacttcgtgttggagtctccactcaacggctgtggcacccggccccggtggtctgccctcgatggagtagtgtattacaactctattgtgattcaggtccctgccctgggcgacagcagcggatggcccgatgggtacgaagatctggagtcaggggacaacggctttcctggagatatggacgagggggatgcctctctgttcactcgccccgaaatcgtcgtctttaattgctctctccagcaagtcagaaaccccagctctttccaggaacagcctcacggtaatatcacgttcaatatggaactgtataacacggatctctttctggtgccctcgcaaggtgttttttcagtgccagagaacgggcacgtctatgtcgaggtgagcgtgaccaaggcagaacaggagctggggtttgccatacaaacatgtttcatctctccatactccaatcccgaccgaatgtcacactatacgataattgagaatatatgtcccaaggatgaaagcgtgaaattctactccccaaaacgggtccactttccaatacctcaagccgacatggacaaaaagcgatttagttttgtgttcaaacctgtgtttaacactagcctgcttttcctgcaatgtgagctgacgctctgcacgaagatggagaagcacccccaaaaactcccgaagtgcgtgcctccggatgaagcatgtacatcactggacgcctccatcatctgggctatgatgcagaataagaagactttcacaaagcctctagctgtaatccatcatgaagctgaaagtaaagagaagggacccagtatgaaggagcccaaccccatctcaccccctatctttcacggtctggacaccctgaccgtgatgggcatcgccttcgccgctttcgtgattggggccctactcacaggcgccctgtggtatatctatagccatacaggtgagactgccggacggcagcaggttcccaccagcccccccgcatctgaaaacagctcagctgcccattcaatcgggagcacccaaagcaccccgtgcagctctagcagtacagcctag

SEQ ID NO: 138313 - DNA, 2556 bp, synthetic construct
  misc_feature 1..2556: note = Description of Artificial Sequence: Synthetic coding sequence
  source 1..2556: mol_type = other DNA
atgacctctcattatgtgattgcaatttttgcgttgatgtctagttgtctggctacggccggtccagagccaggcgcattatgtgagttatccccagtaagcgctagtcatcccgtgcaagccctgatggaatcatttacagtactgagcggctgcgcgtcccgggggaccacaggactaccccaggaagttcacgtgctgaatctgagaaccgctggccagggccccggacagctgcaaagggaggtgactctacaccttaatcccatttccagtgttcacatccaccataaatcggtggtatttctgctgaactcgccccacccccttgtgtggcacctgaagaccgagcgcctggctaccggcgtgtcccggctctttctggtgagcgagggatccgtggttcagttctcttccgccaatttcagtctcacagcagaaaccgaagagcgcaattttccacacggcaatgagcacctactgaattgggcccggaaggagtatggggccgtaacttcttttacagagctgaagatcgctcggaacatctacatcaaggtcggcgaagatcaggtgttccctcccaagtgtaacatcgggaaaaatttcttgagcctcaactaccttgccgagtaccttcagcccaaggcagccgaaggatgcgtcatgtcaagccaaccccagaacgaggaggttcacataattgagctgatcacccccaatagcaatccttacagcgcctttcaggtggacataaccattgatatccggccttcccaggaagacttggaagtcgtgaaaaacctcatactgatccttaagtgtaagaaaagtgtcaactgggtgattaaaagcttcgatgtcaaaggctccctcaaaatcatcgcccctaacagcattgggtttgggaaggagtccgaaagaagcatgactatgaccaaatctatcagggatgatattcccagcacccaggggaaccttgtgaagtgggccctcgacaacggatatagtcccattacctcatacactatggctccagtggccaaccgcttccacctccgactggagaataatgcagaggagatgggcgatgaagaagtccacaccatacccccggagctccgcatattgctcgatcccggtgctcttccagctcttcagaatccccctataagggggggggagggccagaatggcggcctcccctttccctttcccgatattagccgcagagtctggaatgaagagggcgaagatggactgccccgacctaaggatccggtgattccctctattcagctcttccctggattaagggaaccagaagaagtgcaggggagtgtggatatcgctcttagtgtaaagtgtgataatgaaaaaatgattgtggcagtggagaaagactcctttcaggcatccggttactctggtatggatgtgaccttgcttgacccaacctgcaaagcaaaaatgaatggtacacacttcgtcctcgagagccctctaaacggctgcggtacccggccgcgctggtcagctctggacggagtggtgtattacaactcgattgtcattcaggtcccggcgctaggggattcctcgggatggccggacggttacgaggacctggagagcggagataatggattccccggtgatatggatgaaggggatgcatctctgtttacccgtcctgagatcgtggtatttaattgttcgctgcagcaggtgagaaaccccagctcctttcaggagcagccccacggcaacatcacttttaacatggaactgtataacacggacctgtttctggttccctcccaaggcgtcttttctgtgccggaaaatggccacgtttatgttgaggtgtccgttaccaaggcggaacaggaattagggttcgctattcagacgtgtttcatttcaccttactccaaccccgacaggatgtcccattatactatcatagaaaatatctgcccaaaagacgagagcgtgaagttctatagtcccaagcgggttcatttcccaataccccaggcagatatggacaaaaagcgattttcattcgtttttaagccagtttttaacacctctctgctttttcttcaatgcgagttgactctgtgcactaagatggagaaacacccccagaaacttcctaagtgtgtacctccagacgaagcatgcacttccttggacgccagcatcatctgggccatgatgcagaataaaaaaacttttaccaaaccattggccgtgattcatcacgaagccgaatctaaagagaagggcccatcaatgaaggagccaaatcctatcagtcctcctatcttccatggcttggacactctcacggtgatgggcattgctttcgcagctttcgttatcggcgccctgctcacaggcgccttgtggtatatttattctcacacgggagagactgctggcagacagcaggtgcccacttcgcccccggcctctgaaaacagctctgcggctcatagtatcggaagtacgcagtccacgccatgttcctcctcttccacagcatag

SEQ ID NO: 138314 - DNA, 2052 bp, synthetic construct
  misc_feature 1..2052: note = Description of Artificial Sequence: Synthetic coding sequence
  source 1..2052: mol_type = other DNA
atggccctgttcgtgagattgctcgctctagccctagcgctcgccctggggccagccgcaacactggcagggcctgcaaaatcgccatatcagttggttctgcagcacagccgtctgcggggcagacaacatgggcccaatgtatgtgcagttcaaaaagtgatcggcacaaaccgtaaatacttcacaaactgcaagcagtggtatcaaagaaagatatgcggcaagtccactgtcatcagctacgagtgctgtcctggatatgaaaaagtacccggcgagaagggttgccccgcagctctaccactgagcaatctgtacgagactttgggagtggttggctctactacaacccagttgtacaccgatcgaactgagaagctgcgccccgagatggaaggtcctggctcttttacaatcttcgcccctagcaatgaggcgtgggcttcccttcccgctgaagtgctcgattctctcgtgagtaacgtgaatattgagctgctgaatgccctgaggtaccatatggtaggtcggcgcgtgctgaccgacgagctgaagcacggcatgaccctcaccagcatgtaccagaatagcaacatccagatccaccactaccccaatggcatagtcacagtgaattgtgcccggctcctgaaagcggaccatcacgccaccaatggcgtcgtgcatctgatcgataaagtcataagcactataaccaacaatattcagcagatcatcgaaatcgaagatacttttgaaacactgcgcgccgctgtagcggcttccgggctcaatactatgctcgagggaaatggccaatataccttactggctcctactaacgaggccttcgaaaaaatacctagtgagactctgaacagaattctcggagaccctgaggcactaagggatcttctcaataatcacattttaaagtcagccatgtgcgccgaggctattgtcgctggactttctgttgagaccttggagggcactacactcgaggttggctgttccggcgatatgctgacaattaatgggaaggcaatcatatcaaacaaagacatccttgccaccaatggcgtaatccactacatcgatgagctgttgatcccagactcggccaaaacgctgttcgaactggcggcagagagcgatgttagcaccgccattgacttatttcggcaggcaggcctggggaatcatctgagcggatcagaacgattgactcttctggctccgctgaacagcgtgttcaaggacgggacaccacctatcgatgcccatactcgcaacctgctcagaaaccacattattaaagaccagctggctagtaagtacctataccacggacagaccctggaaacactgggcggcaaaaagctgagagtcttcgtgtaccgcaatagcctgtgtattgagaactcatgcattgccgctcacgataagcggggccggtacggcaccctgtttactatggaccgtgtgctgaccccacctatgggtaccgtgatggacgtactcaaaggagataaccgttttagcatgcttgtggccgccatccaatccgccggtcttactgagacattgaacagagaaggagtgtacactgtgtttgccccaactaacgaggccttccgcgcattacctcctcgtgaacgtagtaggctgctgggcgacgccaaggaattggccaatatcttaaagtaccacatcggcgatgaaatactggtgtccggagggattggtgctctagttaggttgaaatcattgcagggagacaaattggaagtgtcactcaagaataacgtggtgtcagttaataaagaacccgtcgcggagccagacatcatggctaccaacggagtggtgcacgtaattactaacgtgcttcagccaccagcaaaccgaccacaggagcggggcgacgaattagctgatagcgctctggagatttttaagcaggcgtccgcattctcaagaccagaacagccccaggtgctgtgcagccccgtgtaccagaagcttcttgagcgtatgaagcattag

SEQ ID NO: 138315 - DNA, 1251 bp, synthetic construct
  misc_feature 1..1251: note = Description of Artificial Sequence: Synthetic coding sequence
  source 1..1251: mol_type = other DNA
atgctcgagggcaatggccaatacactcttttggcgccaacaaacgaggctttcgagaaaattccctcagagaccttgaataggatcctgggcgaccccgaggccctccgcgacctgttgaataaccacatcttgaaatccgcgatgtgtgccgaagcaatcgtcgctgggcttagtgttgagactcttgaaggaactacgcttgaagtcggctgcagcggcgatatgcttactataaatggaaaagcaatcatatcaaataaagatattttggcaacgaatggcgttatccattacatcgatgagctcctgattcctgattcggccaaaacccttttcgagttggccgcggaaagcgacgtttccaccgccatagacctttttcgtcaggctgggctgggtaaccacctgtccggctcggagcggcttacactattagcccccctcaactccgtgttcaaagatggcacacctccaattgacgcacatacacgaaacctgttgagaaatcatatcatcaaggaccaactggcctctaaatacttataccatggccagactctcgagacgttaggggggaaaaaacttagggtctttgtttatcggaacagcctttgcatcgaaaatagttgcattgccgcccatgacaagagagggagatacggtacgctgttcacaatggatcgggttttgaccccgcctatggggaccgtgatggacgtattgaagggagataaccggttctcaatgcttgttgccgccattcagagcgccggccttaccgagactctgaatagggagggcgtctatacggtctttgcacctaccaacgaggcctttagagcactcccccccagggagaggagtcgcctgctgggggatgcaaaggagttggcgaacattttaaaatatcacattggcgacgagatcttggtttcgggggggatcggggctctcgtccgcctgaagagtctgcagggagacaaattggaggtttctctcaaaaataatgttgtgtccgttaataaggaacctgtggctgaacccgatatcatggctaccaatggcgtcgtccatgtcataactaacgtgctgcagccacccgcgaaccggccacaggagcgcggagacgagctcgccgacagcgccctggaaatcttcaaacaggcctcggctttctcacgcgcatcgcagcgctccgtaagattggcacccgtgtatcaaaagctgttggagcgcatgaaacactag

SEQ ID NO: 138316 - DNA, 2052 bp, synthetic construct
  misc_feature 1..2052: note = Description of Artificial Sequence: Synthetic coding sequence
  source 1..2052: mol_type = other DNA
atggcactgttcgttagactcctggccctcgctctcgcactcgcactcgggcccgccgcaacactggccgggcctgctaagtccccatatcagctggtgttgcagcactcgaggctgcgggggcggcaacatgggcctaacgtgtgtgcagttcagaaggttataggaaccaacagaaagtactttactaactgtaaacagtggtaccaaagaaagatttgcgggaaaagcaccgtgatttcgtacgaatgttgtcccggatacgagaaggtgccgggcgaaaaggggtgtcccgccgccctgcccctgagcaatttgtatgaaacattaggagtggtaggatctacaacaacgcaactctacaccgaccgaactgagaaacttaggccagagatggaagggcccgggtcctttacaattttcgcccccagcaatgaagcatgggcgagtctgcctgccgaggttcttgatagcctcgtttccaacgtcaatatcgagctacttaatgccctgcgctatcacatggtgggccgccgcgtgcttaccgacgaactcaagcatggcatgactctgactagtatgtaccaaaacagcaatatccagatccaccactaccccaacggaatcgtgactgtcaattgcgccaggctcctgaaggctgaccaccatgcaaccaatggagtggttcacttaattgacaaggtgattagtacaattactaacaacattcagcagataatcgaaatagaagacacgtttgagaccctgagggctgcagtggctgctagcgggctgaatactatgttggaaggaaacggccaatacacactgttagcccccacaaacgaggcattcgaaaagattccctccgaaaccttgaacaggatccttggagaccctgaggctctgcgggacctcctgaataatcacatcctgaagagtgccatgtgcgcagaagccatcgttgcaggactgtctgtggagacactggaagggactactcttgaggttggctgttcgggggacatgctcactattaacggtaaagcaattatttccaataaagatatactggcaaccaacggcgtgattcattacatcgacgagctgcttattcccgactccgccaaaacactgttcgagctcgcagccgaatctgacgtgagtacagcgattgacttgtttaggcaggctggattgggaaaccacctgagtggaagcgagaggttgaccctcctggcccctcttaactcagtatttaaggatgggacgccgccgatagacgctcacacgaggaacttgctgcgcaatcacatcatcaaagatcagctcgcctctaagtacctctatcatgggcagaccctggagaccctcggcggaaaaaagttgcgcgtctttgtttaccggaatagtctttgtatagaaaatagctgtatagctgcccacgacaaacggggacggtatggtacactttttacgatggaccgggttttgaccccccctatgggtacggtgatggatgttctgaagggtgataaccgctttagcatgctcgtggctgcaatccagtcggcgggactgactgagactctcaatagggaaggagtgtataccgtgttcgcacctaccaatgaagcattccgcgccttgccgccacgggaacgctcaagattattgggggatgccaaagagctcgctaacattctgaagtatcacatcggtgacgaaatcttagtgtcagggggtataggagcgttggttagactgaaatctctgcagggcgataagctggaagtgagtctcaaaaacaatgtggtgtcagtgaataaggagccagttgcggagcccgacataatggcaacaaatggggtggttcatgtcatcacaaacgttctgcagcctcctgcaaatcggcctcaggaaaggggtgatgaactggcggactctgctctggaaatctttaaacaggcgtccgcattctcaagggcttcccagcggtctgtcagactcgccccagtgtaccaaaagctccttgaacggatgaaacattag

SEQ ID NO: 138317 - DNA, 1188 bp, synthetic construct
  misc_feature 1..1188: note = Description of Artificial Sequence: Synthetic coding sequence
  source 1..1188: mol_type = other DNA
atggccttctccccatggcagatactttcccccgtacagtgggctaagtggacctggagtgcagtccgggggggggccgctggtgaggacgaggcaggcggcccagaaggagaccccgaggaggaggactcgcaagccgaaactaaatcactgtctttcaggagcggttgcaaggtgaagaagcatgaaacacaaagcctcgctctggacgcctgctcccgtgatgagggggcggttatttcgcaaatatccgacataagcaacagagacggccatgccactgatgaagaaaaactcgcctcaacgtcttgtggacagaaatcagctggcgctgaggttaaaggcgagccagaggaggacctggaatacttcgagtgcagcaatgtgccagtctcaacaatcaaccatgccttctcctcatctgaggcgggcatcgagaaagaaacctgtcagaagatggaggaggatggcagcaccgtgctgggcctgctcgagagtagcgccgaaaaagcccccgtgagtgtgagctgcggcggagagtcgcccctagacggcatatgtctatccgaatccgacaagaccgccgtcctgacgctgatccgggaagagatcatcaccaaggagatcgaggccaatgaatggaaaaagaagtacgaggagactcgacaagaggtgctagaaatgcggaagatagtagccgagtacgaaaagaccattgctcagatgatcgaagatgagcaaagaacgtccatgaccagccagaaatcctttcagcagctgacaatggagaaggaacaggctcttgccgaccttaattccgtggagcggagtctgtccgacctgttccggaggtatgagaatctgaagggagtactcgaggggtttaagaagaacgaagaagcgttgaaaaaatgtgcccaggactatttggccagagtgaagcaggaagaacagaggtatcaagcgcttaaaattcacgccgaggaaaaattggataaggctaacgaagagattgcacaggttaggaccaaggccaaggccgaaagcgcggctctccacgcaggcctccgcaaggagcagatgaaggtggaatcactggaaagggcactacagcaaaagaaccaagagatcgaggagctcaccaaaatctgtgacgagctcatcgccaaactgggtaaaactgactag

SEQ ID NO: 138318 - DNA, 2418 bp, synthetic construct
  misc_feature 1..2418: note = Description of Artificial Sequence: Synthetic coding sequence
  source 1..2418: mol_type = other DNA
atggccttctccccctggcagatcctatctcccgtgcaatgggccaaatggacttggagcgcggttaggggcggcgcagccggcgaagacgaagcaggaggcccagagggagatccggaggaggaggatagccaggccgaaaccaaatccctctccttttcaagtgatagtgagggaaacttcgagacccctgaggccgagactcctattcgtagcccatttaaggagtcatgtgaccctagcctggggctggctggccctggagccaaatcccaagagtctcaggaggcagacgaacagctagtggccgaagttgtggagaagtgcagctctaaaacttgctcgaaaccttcagagaacgaagtgccccagcaggcgatagacagccattctgtaaagaactttcgagaggaaccagagcatgatttctccaagatcagcatcgtgagaccgttctccattgagaccaaggactcaacagatatatccgcagtgctcggcacaaaggccgcacatggatgtgttacagccgtgtccgggaaagcattgccttcctccccaccagacgccctgcaagacgaagcaatgactgaaggtagtatgggcgtgacacttgaggcgtctgctgaggcggatctgaaggcaggaaattcctgtcccgaactggttccatccagacgaagcaagcttcgcaagcccaagcccgttcccctcagaaaaaaggcaattggaggagaattttctgacacaaatgctgcggtggaaggaacaccactgcctaaggccagctaccacttctctccagaagagctggacgagaacaccagtccattactgggcgacgcaaggtttcagaaaagtccccctgacctcaaggagacacctgggacactaagctccgacacaaatgactccggcgtagagttgggggaagaatcgcgcagcagcccactcaaacttgagttcgattttaccgaggataccggtaatattgaggcccgaaaggccctgccaagaaagctcggtaggaagctagggtcaacattaactcctaagatccagaaggacgggatttctaagtctgccggactggagcagcctactgaccctgtcgctcgcgatgggccactcagtcagacaagttctaagcccgatcctagccagtgggagagtccttcatttaatccatttggttctcattctgttcttcagaactccccccccctgtccagtgaaggatcatatcatttcgatcccgataattttgacgagtccatggacccgtttaagcctactaccaccctcacctcgtccgatttttgctctccaactggaaaccacgtgaatgaaatcctggagagcccaaagaaagccaagagcagactgattacatcgggatgcaaggtgaaaaaacatgagacacaaagcctcgccttggatgcatgttcaagagatgagggcgcggtaatcagccaaatcagcgacatcagcaatcgcgatgggcacgcaactgatgaggaaaaactcgcttctacttcctgcggccagaaatccgccggagccgaggtcaagggagagcctgaggaggacttggagtatttcgaatgctctaatgtgccagtaagcactattaatcacgcattctcaagttctgaagctggtattgagaaggagacctgccagaagatggaagaagatgggagcactgttctcggtttgctcgagagctcagccgagaaggcccccgtctccgtttcatgtgggggtgagagtcctctggatggaatctgtctgagtgaatccgacaaaaccgcagtgctgacgctaatcagagaagaaattatcaccaaagaaattgaggccaatgaatggaagaagaaatacgaagagacgcggcaagaagtgctggagatgcggaagatcgtggccgagtatgagaaaaccatcgcccaaatgatcgaggatgagcagagaacatcgatgacttcacaaaagagctttcagcagctcactatggagaaggagcaggcccttgctgacctcaactcagtggagaggtcattgtcggacctgttccgaagatacgagaatctgaagggtgtgctggagggctttaagaaaaacgaggaggcactgaagaaatgtgcccaggattacctcgcccgggtgaagcaggaggagcagagataccaggccttaaagattcacgcagaggagaaactcgataaagctaatgaggaaatcgcccaagtccgcactaaggccaaagccgagtctgccgctcttcatgcgggtctacgaaaagagcagatgaaggtggaatctctcgagcgagctctgcaacaaaagaaccaggaaattgaggaactaaccaagatttgtgacgaactgattgctaaactaggaaagactgactag

SEQ ID NO: 138319 - DNA, 1140 bp, synthetic construct
  misc_feature 1..1140: note = Description of Artificial Sequence: Synthetic coding sequence
  source 1..1140: mol_type = other DNA
atgggcggttcacacagccagacccctcgggggagggaacctgctggcgagcggcacccacgcccaactgaaacggctaccactgagcaggttaaattcttgtgctttttgctctctggctgtaaagtcaagaaacacgagacccagtccttggccctcgacgcatgtagccgtgatgagggcgcggtgatcagccagatcagtgacatctctaatagggacggtcacgctaccgacgaagagaagttggcttcaactagttgcggacagaagtcggcaggggcagaggttaagggagagcccgaagaggaccttgagtacttcgaatgctccaatgttcctgtctccaccattaatcacgccttctctagtagtgaagccggcattgaaaaggagacctgccaaaaaatggaggaggacggcagcactgtgctgggcctgttagagtcttctgccgaaaaagcccctgtgtcagtctcatgcggcggcgagtccccgttagatggcatctgtctgtcggaatccgataagactgccgtgttgacacttattcgggaggagatcatcaccaaggagatcgaggcaaatgaatggaaaaagaaatacgaagagactcgtcaggaagtcctcgagatgcggaagatcgtagcagaatatgaaaagacgatcgcccagatgattgaggatgagcagagaaccagtatgacgtctcaaaagtccttccagcagctcaccatggaaaaagaacaggctctcgcggatctaaactcagtagagcgaagtttatccgacttgttccggcggtacgaaaacctaaaaggggtattggagggatttaagaagaacgaggaagccctaaaaaagtgcgctcaggattacctggctagagtcaaacaggaggaacaacgataccaggcgctcaaaatacatgccgaagagaagttggacaaggccaacgaagaaatcgctcaagttcggaccaaggcaaaggccgaatcagcagctcttcacgcgggtctgcggaaggagcagatgaaggtcgaatcactggaaagggccctgcagcagaagaatcaagagatcgaggagttgacaaaaatctgcgatgagctgatcgccaagctgggaaagacagattag

SEQ ID NO: 138320 - DNA, 1104 bp, synthetic construct
  misc_feature 1..1104: note = Description of Artificial Sequence: Synthetic coding sequence
  source 1..1104: mol_type = other DNA
atggggggcagccacagtcaaactccaagaggccgtgagcctgccggcgaacgacatccaagacctaccgaaaccgctagtggatgcaaggtaaaaaaacacgaaacgcaaagccttgcgttggacgcatgtagccgcgatgagggggcagtaatctctcagatctctgacatctcgaaccgcgatggacatgcaacggacgaggagaagctcgcctcgacatcttgcggccaaaaaagtgctggcgccgaagtcaaaggcgagccagaagaggatctggaatactttgaatgtagtaatgtgcctgtgagcacaatcaaccacgcattcagtagctcagaagcagggatagagaaagagacatgtcagaaaatggaggaggacggcagtacagtgctgggtctgttggagtcatcggcagagaaggccccagtgtcagtttcttgcggcggggaaagtcctctggatggaatatgtctgagcgaatcggataagacagcagtgttgacccttataagagaggaaattatcaccaaggagatcgaggccaacgagtggaaaaaaaagtacgaggagactcgccaggaagtgctggaaatgaggaagatcgtggcagaatatgagaaaaccattgcccagatgatcgaggatgaacagcgcacttctatgacctcccaaaaatcctttcagcagctgacaatggaaaaagaacaagctctggctgatctcaattcagtcgaaagatctttgtctgacctgttcaggcggtacgagaacttaaagggggtgttggaaggctttaagaagaacgaggaggcactgaaaaagtgcgcccaggattacctcgcaagagtcaaacaggaggagcagaggtatcaggccctgaagatccatgcagaagaaaaattagacaaggcgaatgaggaaattgcgcaagtgagaactaaagctaaggcggagagcgctgccctgcacgcaggacttcggaaggaacaaatgaaagttgaaagcttagaaagggcccttcaacaaaaaaatcaggaaattgaagaactcactaagatatgtgatgaattgatagctaaacttggaaaaaccgattag

SEQ ID NO: 138321 - DNA, 2454 bp, synthetic construct
  misc_feature 1..2454: note = Description of Artificial Sequence: Synthetic coding sequence
  source 1..2454: mol_type = other DNA
atggccttctctccctggcagatactgtcccccgtgcagtgggctaaatggacttggtctgcggttaggggaggcgccgcaggggaagacgaggccggcggtccagagggcgaccctgaggaagaggatagccaggccgagaccaaatccctctcttttagtagtgacagcgaggggaactttgagacaccggaagccgagactccaattcggtcccccttcaaagaaagctgcgacccctcactcggtcttgcgggaccaggcgccaagagccaagaaagccaggaggcagatgaacagctggtggctgaggttgtggaaaaatgcagttctaaaacatgctccaagccctctgagaatgaggtgccccaacaagctattgactcccactccgtgaaaaacttccgtgaggaaccggagcacgatttcagcaaaatctctattgttcgccccttctccattgaaacaaaggatagcactgatatttcggccgttctcggtaccaaggcagcccacggctgtgttacggccgtgagtggcaaggctctccctagctccccgcctgatgccctgcaggacgaagccatgactgagggatctatgggtgtcaccctggaggcctccgccgaagcagacctcaaggctggcaacagctgcccagaattggtgccgtcccggcgctctaaactgcgaaaacccaagcctgtgccgctgcgtaagaaggccataggtggggagttcagtgatacaaacgccgcagtcgagggcacaccgctacccaaggcatcctatcacttctcaccagaggagctagacgaaaacacatcccccctgctgggagacgctagattccaaaaaagcccgcccgatctgaaagagaccccaggaaccctgagctccgataccaacgattctggtgtggaactcggcgaggaatcccgctcaagccccctgaagctggagttcgattttactgaagacacaggaaacatagaggcacggaaggccctgcccagaaaattgggtagaaaactcggtagcacacttactcctaagattcagaaagacggaattagtaagagcgcaggcttggaacaaccgacagaccccgtggctcgcgacggccctctgtctcaaacgagctccaagcctgatccctcccagtgggaaagcccgagctttaacccctttggatcccactcagtactccagaacagccctcccttaagttccgaaggctcctaccacttcgatccagacaactttgatgagtcaatggatccattcaagcccacaacaactcttacttcaagtgatttttgttcgccaacaggcaatcacgtaaacgagattctagagtcaccaaagaaggcaaagtcacggctaattactaccaccgagcaggtcaaattcctgtgcttcctgcttagcggctgcaaggttaaaaaacacgaaacccagagccttgcacttgacgcctgctcacgcgacgagggagccgtcatttctcagatatcagacatttctaaccgtgacggccatgctacagatgaagaaaaactcgcctctactagctgtggacagaagagcgccggagctgaagtgaaaggagagcccgaggaggatctcgagtattttgagtgcagtaacgtgccagttagtaccattaaccatgccttctcctcaagtgaagcaggcattgagaaagagacctgtcagaagatggaggaagacggctctacagtacttggcctgctggaatctagcgccgagaaagcccccgtctcagtgagctgcggcggagagagccccttagatgggatatgtctctcggaaagtgacaagactgccgttctgacactgattagggaagagataattacaaaggaaattgaagcgaacgagtggaagaaaaagtatgaggagacgagacaggaggtgctggaaatgcgaaaaatagtggctgaatatgagaagaccattgcccagatgatcgaggacgaacagagaacgagcatgaccagccagaaatcattccagcagctcacaatggaaaaggaacaggccttagcagatctgaacagcgtggagcggtccttatcagacctattccgccgttatgaaaatctgaagggggtcttggaaggattcaaaaagaacgaagaggccttgaagaagtgcgcgcaggactacctggccagggtgaaacaggaggagcagaggtaccaggcactgaaaatccacgccgaagagaagctcgataaagccaatgaggaaatcgcacaggtgagaaccaaggcaaaggccgagagcgcggcccttcacgccgggctgcgcaaggaacagatgaaagtcgagagcttagagcgggctctgcagcagaaaaaccaagagatcgaggagctgactaagatttgtgatgaattgatcgctaagctgggtaaaacagactag

SEQ ID NO: 138322 - DNA, 2379 bp, synthetic construct
  misc_feature 1..2379: note = Description of Artificial Sequence: Synthetic coding sequence
  source 1..2379: mol_type = other DNA
atgcaaaggcagacaatcaagggagcaggtgcaggaggagccgcacttatggcgttctccccctggcaaattttatctccggtccaatgggcaaagtggacgtggtccgccgtgcgcgggggtgctgctggcgaggatgaagctggggggcctgaaggtgatccggaggaggaagattcgcaggccgaaacaaaaagcctgagttttagtagcgactcggagggcaatttcgaaacccccgaggccgagaccccaatccgcagcccctttaaggagtcatgtgaccctagcctgggactcgcgggccctggtgccaaatcgcaggaaagccaggaggctgatgagcagctggtggctgaggtggtagagaagtgctcatccaagacatgttcaaaacctagcgagaacgaggttcctcagcaagcaatcgacagccattccgtgaagaacttcagggaagaacccgagcacgatttctcaaagattagcatcgtgcgcccttttagtattgagacgaaagactccactgacatctccgcagtattggggaccaaggcagcccatggctgcgtgacagcagtcagtggcaaggccttgccatcttctcctccagatgccctccaagacgaggctatgacagaaggctccatgggcgtgactctcgaagcatccgccgaagccgaccttaaggctggcaactcatgccccgagctggtgccctcaaggagaagtaagctgaggaagcctaagccagtgcccctcagaaagaaagctattggcggcgagttctccgacacgaatgcagccgttgagggcacaccactgccgaaggcttcttatcactttagtcccgaggaactggacgagaatacctctcctctgctgggcgacgcgcgcttccaaaagagtcctcctgacctgaaggagaccccaggcaccttatcgagtgataccaacgatagcggggtggagctcggggaagagagccgttcaagccctctgaaactggagttcgatttcactgaagacactggaaatatagaggctcgtaaagctctcccacgaaagcttgggagaaagctaggctctacactgacccctaaaattcagaaagatggtatttctaagtccgcaggccttgaacagcccactgacccagtggctcgcgatggacccctgtcgcagacctctagcaagcccgatccttcgcaatgggaaagcccttcgtttaatccttttggatctcactccgtcctacaaaactcccccccattaagcagtgaaggtagctaccacttcgacccggataattttgacgagtcaatggatcccttcaaacccaccactacgctgacgagctccgatttctgttcccccaccgggaatcatgtgaacgaaattcttgagagcccgaaaaaggccaagagccgtctgatcacctctggctgcaaagtcaaaaagcatgaaacacaatccctagctctcgacgcctgctcaagggatgagggagccgtgataagccagatttctgatatcagcaacagggatgggcatgcgaccgacgaagaaaagcttgccagtaccagttgtgggcagaagtctgccggcgctgaagtgaagggcatagaaaaggagacctgtcagaagatggaggaggatggcagcacagtgctcggtctgctagaatcatccgccgaaaaggcaccggtgtccgtttcttgcggcggagagagtccattggatggcatatgtctgagcgagtctgataaaaccgctgtgctgacactcatccgggaggaaataattacaaaggaaatcgaggctaacgaatggaaaaagaaatatgaggagactcgccaagaggtattggagatgcgcaagatcgtggctgaatacgagaaaacgatagctcagatgatcgaggatgaacaaagaacatctatgacctctcagaaatcctttcagcagctgaccatggagaaggaacaggcattggcggatctgaatagcgtcgagcgatctctatccgaccttttcagaaggtatgagaatctgaaaggggtgcttgaaggattcaaaaagaatgaagaggcgctcaaaaaatgcgcccaggattacctggctcgggtgaaacaagaggagcagcgttaccaggcacttaagattcacgccgaggagaagctcgacaaagcaaatgaagaaatagcacaggtgaggactaaagctaaggccgaatcagccgccctgcatgccggtctgcgcaaggaacagatgaaagttgaaagcctggaaagggctctccagcaaaagaatcaagaaattgaggagctgaccaagatatgcgacgaactgattgcaaagctcggcaaaactgactag

SEQ ID NO: 138323 - DNA, 1431 bp, synthetic construct
  misc_feature 1..1431: note = Description of Artificial Sequence: Synthetic coding sequence
  source 1..1431: mol_type = other DNA
atgaccgaaggctccatgggggtgaccctggaagcttcagctgaggccgacttgaaagcgggcaactcatgcccagaactggtgcccagcaggcgtagcaagttgaggaagcctaaacctgtccctctacggaagaaagccattggaggggagttctctgatactaacgctgcggtagaaggcacacctttaccaaaggcctcatatcatttttcccctgaggaacttgacgagaatacatcccccctgctgggtgatgctaggttccagaagagtccgcctgatctgaaagaaacccctggcacactgagctcggatacaaatgactctggtgtggaattgggagaagagtcgagaagctctcccctcaaattggaattcgactttacggaggatacgggaaatatcgaggcgcgaaaagcgctgccccggaagctaggccggaagctcggaagtactctgacacccaaaatacagaaagatggtatcagcaagtccgctggcctggaacaacccaccgacccagtggcccgggatggtccactatcacagacgtcgagcaagcctgacccaagccagtgggaatccccttccttcaatccttttggctcacattctgtgctccagaattcacctcccctctcctctgaggggtcatatcacttcgatccagataacttcgacgaaagcatggacccttttaaaccaaccactacgttaaccagtagtgatttctgttcccctaccggcaatcatgtcaacgagatcctcgagagcccaaagaaagcaaaaagccggctgataacttccggctgcaaggtgaagaaacatgagacacaaagtctggccttggatgcgtgttcccgcgatgagggtgccgtaatctcacagattagcgacatttccaaccgcgatggacacgcaaccgacgaagaaaagctcgcatccactagctgtggccagaagagcgccggcgcggaagtgaagggagaacccgaagaggacttggaatactttgagtgttcaaatgtgcccgtctcgaccattaatcacgctttttcaagcagcgaggctggcattgagaaagaaacctgccaaaagatggaggaagatggttccacagtcctgggtctcttagaatcaagcgcggaaaaggcgccagtcagcgtgagctgtggcggcgaatcccctcttgacgggatttgccttagcgagtccgataagacagctgttctaacactaatacgcgaggagatcatcacgaaggaaatcgaggccaatgaatggaagaagaagtattttaacaaggaggtgttcagaggtgacatttgccccaaaaggttcggcctacagattcccgtgatcttcaagaaacagcttaccacaaagagcctcagcctccatcgggtaacagtgaaaaagctcatgtag

SEQ ID NO: 138324 - DNA, 2196 bp, synthetic construct
  misc_feature 1..2196: note = Description of Artificial Sequence: Synthetic coding sequence
  source 1..2196: mol_type = other DNA
atgaacaatatactaaagcttaaatctagtgacagtgaaggcaacttcgaaaccccagaagctgagaccccaatcagatccccatttaaagaaagttgtgatccatccctgggcctggccgggcccggtgctaagtcgcaggaaagtcaggaggctgatgagcagcttgtagccgaagtggtggagaaatgctcaagcaagacctgcagcaagccaagtgagaatgaagtaccacagcaggctatcgattctcatagcgtaaagaactttcgtgaagaaccagagcacgatttctccaagatcagcatcgtgcggcctttcagcatagagaccaaggattcgactgacatttccgccgtgcttggaaccaaagcagcacatggttgtgtgaccgctgtgagcggcaaagcactcccttctagtccccctgacgccctccaagacgaagccatgaccgaggggtccatgggcgtcaccttagaggcctccgctgaagccgacctgaaagcaggcaatagctgtcctgaactggtcccaagccgtcgctccaagctcagaaaacctaaacctgtgcccctccggaagaaagcgatcggcggagagttcagcgataccaacgccgctgtcgagggcactccccttcccaaggcgagctatcactttagccctgaggagctcgatgagaatacgtcccctctgttaggagatgcccggtttcaaaagtctcctcccgacttgaaggagacacctggcacactgtcctccgatacaaatgattcgggtgtggagttgggggaagagagtcgctccagtcccctcaaacttgagttcgacttcaccgaggacactggtaacatcgaagctcggaaggcgctccctcggaaactgggccgtaaactgggaagtactctgactcctaaaatccagaaggacgggataagcaaatctgcaggcctggagcagcccacggaccctgtggccagggatggtccgctcagccagacttcctctaaaccagatccaagccagtgggagtctccttctttcaaccctttcgggtcccactccgttctgcagaactcgccccctcttagctctgagggaagctaccatttcgaccctgacaatttcgatgagtcaatggatcctttcaaaccaacgactactcttacttcatctgacttctgctcccccacaggaaaccacgttaacgaaatactagaatcccctaagaaagccaagtcccgcctgatcacttcaggctgtaaggtcaagaagcatgagacccaatccttggcattagacgcgtgtagccgcgacgagggggcggtgataagccagatttccgacatttctaaccgggatgggcacgctactgacgaagaaaaactggccagtacatcgtgcggtcagaagtctgccggggcagaggtcaagggtattgaaaaggagacatgccagaaaatggaggaagacggttccactgtcttggggctcctggagtcctctgcagaaaaggctcccgttagcgtgtcctgcggcggagagtcccctctcgacggcatttgcctttccgagtcagacaagaccgccgtgctgacattaattcgagaggaaattatcactaaagaaatagaggctaacgagtggaagaaaaagtacgaggaaactcgccaggaggtcctcgagatgcgaaaaattgtggcagagtatgaaaagacaatcgctcagatgattgaggacgagcagcggacctcaatgacctcccagaagtcattccagcaactgaccatggagaaggaacaagcactggcagatctgaatagcgtggagcggtcacttagcgacctctttcgacgctacgaaaatctcaaaggagttctcgaagggttcaagaaaaatgaggaggcgctgaagaagtgcgcccaggattaccttgctagagtcaagcaagaggaacagcgataccaggctcttaagattcacgctgaagaaaagctggacaaagccaacgaggagatcgcccaggttcgaacgaaagcaaaggcagagagcgcagctttgcatgccgggcttaggaaagaacagatgaaggtcgaatcacttgagcgtgcactccagcaaaaaaatcaagaaatcgaggagctgactaagatctgtgatgaactgatagccaagctcggcaaaacggattag

SEQ ID NO: 138325 - DNA, 1833 bp, synthetic construct
  misc_feature 1..1833: note = Description of Artificial Sequence: Synthetic coding sequence
  source 1..1833: mol_type = other DNA
atgactgagggcagcatgggcgtgaccctagaagccagcgcagaagcagacctcaaagctggcaactcatgtcccgagttggttccgtctaggcgaagcaaactgcgcaagccaaagccagtacctttaagaaagaaggccattggcggagaattttcggatacaaatgcggcagtggagggtacgccactgccaaaggccagctatcactttagtcctgaagaacttgacgaaaacacatctccacttcttggcgacgccagatttcagaagagcccgcctgacctgaaggagacaccaggtacacttagttcggataccaatgactccggggtagaactcggggaggagtctcgaagttctccgcttaaactcgaattcgatttcacagaagacactgggaatatcgaagcccgcaaggcccttcctcgaaaattgggccgaaagttggggtccacacttacacccaaaattcagaaggatggaatatcaaaaagcgcaggactggaacagccgactgatcccgtagccagggatggtcctctttctcagacttctagcaagccagatccttctcagtgggagtctcccagttttaacccatttggcagccacagcgtcctccagaacagtccccccctaagttccgaaggatcatatcactttgatccagacaattttgatgagagcatggatccatttaaacctaccaccactctcaccagctcagatttctgctcccccacagggaatcacgtcaatgaaatcctcgagagccccaagaaggctaaatcccgcctcattacctcagggtgcaaagtgaaaaagcatgaaacccagagtctagcgctggacgcctgctctcgggacgagggggccgttatcagccaaattagcgacataagcaatagagatgggcacgccaccgacgaagagaaactggccagcacctcatgtggccagaagagtgccggggcggaagttaaaggcgaacctgaggaggacctggagtacttcgaatgttccaacgtgcccgtgtccaccattaatcacgcctttagcagtagcgaggccgggatagagaaggaaacttgtcagaagatggaggaagatggttctaccgtgttaggattgctcgaaagtagtgccgagaaagctcctgtgtctgtgtcttgcgggggagagtcacctctggacggaatctgcctttccgagagcgacaagacggccgttcttacactgatccgggaagagattattacgaaagaaattgaggctaacgaatggaagaagaagtacgaagaaaccaggcaggaggtgttggaaatgaggaaaattgtcgctgaatacgaaaaaacaatcgcccagatgattgaagacgaacagcgcaccagcatgacttctcagaagtcttttcagcagctgaccatggagaaggagcaagcgctggctgacctgaactccgtggaacgctccctgagcgacctcttcagaagatacgagaatcttaagggggttctagagggattcaagaagaatgaggaagcactgaagaaatgcgcgcaagattacctggcccgagtgaagcaggaggaacagcgctaccaggcgctgaaaatccacgccgaggagaagctggataaggcgaacgaagagatcgcccaagtgagaacaaaggccaaagcagagtccgccgccctccatgccggattgcggaaagaacagatgaaagtggagagtctggaacgcgccctacaacagaaaaatcaggaaatcgaggagttgactaaaatctgtgacgagctgatcgccaagcttggcaagacagattag

SEQ ID NO: 138326 - DNA, 1746 bp, synthetic construct
  misc_feature 1..1746: note = Description of Artificial Sequence: Synthetic coding sequence
  source 1..1746: mol_type = other DNA
atgacagaaggatctatgggtgtcaccttagaggcaagtgctgaagctgacctcaaggcagggaacagctgcccggaattggtcccatctcggagatccaagctacgcaaaccaaagcccgtccccctgcgcaagaaagctataggcggagagttctcagacacaaacgcagccgttgaggggaccccgcttcctaaggcctcctaccattttagtcccgaggagcttgacgagaacacttcccccttacttggagatgccagatttcagaagagtccaccagatctgaaggagacccccggaaccctatcatctgacaccaatgacagcggagtggaattgggggaggagtctaggtcctccccgctgaaactggaattcgacttcacagaggacacagggaatattgaagctcgcaaagcactacctcgcaagctggggagaaaactgggatctaccctgacacccaaaatccagaaggatggtatcagcaagtccgccggattggagcaaccgacagatcccgtggcacgcgacggccctctgagccagacatcatccaaaccggatccatctcaatgggagagcccgtcatttaatccatttggttcgcattcggtgttgcaaaattcaccacccctcagcagcgagggctcttatcactttgaccctgataattttgacgagagcatggaccccttcaaaccgaccactactctgacaagttcagacttctgtagccctactggcaaccacgttaacgagatcttggagtctcccaagaaagctaagagccggcttataacttctggatgcaaggtgaaaaagcatgagacacagtcccttgccctcgacgcttgcagccgggatgaaggggccgtgatctcccaaatttccgatatttcaaatagggatgggcacgcgactgacgaggagaagcttgcttctacctcctgtggtcagaaaagcgcaggagcagaggtaaagggaatagaaaaagaaacgtgccaaaagatggaagaggacggatctacggttctgggattgctagagagtagtgctgagaaggcaccagtcagcgtcagctgcggaggggagtcacctcttgatggtatctgcttgagtgagagcgacaagacagcggttctaacattgatcagagaagaaattattacaaaagagattgaagctaacgagtggaagaagaagtacgaagaaaccagacaggaggtgttggaaatgcgcaaaatcgtcgccgaatatgaaaagactatagctcagatgatagaagacgagcagaggacaagtatgaccagtcaaaaatccttccagcagcttaccatggagaaagagcaagctctggcagatctgaactctgtagagcgaagtctgagcgatctgttcagaaggtacgaaaacttgaaaggcgtactcgaagggttcaagaagaacgaggaggccttgaagaagtgtgctcaggactacctcgccagagtaaagcaagaagagcaaagataccaagcccttaagattcacgccgaagagaaactggataaagctaatgaggaaatcgcccaggtgagaacaaaggctaaggctgagtcagccgccctgcacgccggcctgaggaaggaacagatgaaggtggagtcacttgagagggctctgcaacagaaaaaccaagaaatcgaggaactcacgaagatatgcgacgagcttattgctaagctggggaagaccgactag

SEQ ID NO: 138327 - DNA, 93 bp, synthetic construct
  misc_feature 1..93: note = Description of Artificial Sequence: Synthetic coding sequence
  source 1..93: mol_type = other DNA
atgactgagggttccatgggagttactcttgaggcctcagccgaggccgacctgaaggccggcaattcatgtccagagttggttccgtcttag

SEQ ID NO: 138328 - DNA, 417 bp, synthetic construct
  misc_feature 1..417: note = Description of Artificial Sequence: Synthetic coding sequence
  source 1..417: mol_type = other DNA
atgactgaaggcagtatgggggtcaccctggaagcgagcgctgaagcagacctgaaggcaggaaacagctgtcctgagctggtcccatctagacgaagcaaactacggaagccgaaacccgtgccgcttcggaaaaaagccatcgggggcgagtttagcgatacgaacgccgccgtcgagggcacgccccttcctaaagcttcctaccattttagccccgaagaacttgacgagaacacctctcctctcctaggcgatgctcgattccagaaatctccacctgatctgaaagagacacctggtactttgtcatcagacacaaatgattctggagtcgagctgggtgaagaatcgaggtcatctcctctaaaactggaattcgactttactgaggacaccgggaacatcgaagcatag

SEQ ID NO: 138329 - DNA, 186 bp, synthetic construct
  misc_feature 1..186: note = Description of Artificial Sequence: Synthetic coding sequence
  source 1..186: mol_type = other DNA
atgacagaggggtctatgggcgtgacattggaggcgtctgctgaagccgatctgaaggctggcaatagctgccctgaactcgtcccatcccggcgcagcaagttacgtaaacctaagccggttccgctaaggaagaaagccatcgggggcgagttttccgatactaacgcagcagtagagggctag

SEQ ID NO: 138330 - DNA, 390 bp, synthetic construct
  misc_feature 1..390: note = Description of Artificial Sequence: Synthetic coding sequence
  source 1..390: mol_type = other DNA
atggctttctccccttggcagatcctctctcccgtccagtgggccaaatggacctggagtgctgtgcgagggggagccgcaggggaggacgaagccggcggtcctgagggggatcctgaggaggaggacagtcaggccgagactaaaagtctgagcttttcttctgatagtgaggggaacttcgagacccctgaagccgaaacacccatccgaagtccattcaaggagtcctgtgatccctctttagggcttgctggtcctggggcaaaatcccaggagagccaggaggctgacgagcagctggtcgcggaagtggtcgaaaagtgttcaagtaagacatgctcgaagccatcggagaatgaggtaccccagcaggccattgattcctag

SEQ ID NO: 138331 - DNA, 3081 bp, synthetic construct
  misc_feature 1..3081: note = Description of Artificial Sequence: Synthetic coding sequence
  source 1..3081: mol_type = other DNA
atgggaggctcccagtctctccagcccgccccagcgagcgacctgaacctggaggccagcgaagccatgagtagcgactctgaagaagcttttgagacccccgagtccactacccccgtaaaagctccacccgctcccccaccacctccaccagaggtaatcccagaacccgaggtgagcacccaacctcctcccgaggagcctgggtgcggatctgagactgtgcctgtgcccgacgggcctagaagcgattctgttgagggttctcctttcaggcccccttcccatagtttctctgctgtgttcgacgaggataagccaattgcctcctctgggacatacaacctggactttgacaacatcgagctcgtggacactttccagaccctggagcctagagccagcgacgcaaagaaccaggagggtaaggtcaacacccgaagaaagagcacagacagcgtgcccatttccaagtccacactcagtagatcacttagtctccaagcctctgactttgatggagccagctcttcaggtaatccggaggccgttgccttggctccagacgcctattctaccggatcaagctcagcatccagcactctcaagaggaccaagaaaccccgcccaccaagcttaaaaaagaagcagacgactaagaagcctacggaaacccccccagtcaaagaaacccagcaggagccagatgaggaatccctggttccaagcggggaaaacctggcctcagaaaccaaaaccgagtccgcaaaaaccgaaggaccatctcccgctttgctggaagaaacaccattggagcccgctgtgggaccaaaagccgcctgcccgctcgattccgagagcgcagagggagtagtccctcccgcctcagggggcggaagggtccaaaactctccacctgtagggcgtaagaccctccccttgacaaccgcccccgaggcaggcgaagtgacccctagtgacagcgggggccaagaagattcaccagccaagggtctgtccgtacgtttggagttcgactacagcgaggacaaaagttcctgggataatcagcaggagaatccacccccaactaaaaaaatcgggaaaaagcccgtggccaagatgcctctcagaagacctaagatgaaaaagaccccagaaaaattagacaacacaccagcctctcctccacgcagcccagccgagcctaatgacatcccgatagctaagggaacatatacctttgacatcgataaatgggatgacccaaacttcaaccccttctcgtctactagtaaaatgcaggaatcaccaaagcttcctcagcagtcctataactttgacccagatacgtgtgacgaatctgttgatccttttaagacgtctagtaagaccccgtcttcaccaagtaagtcacccgcatccttcgagatccctgcctccgccatggaggcgaacggtgttgatggggacggcctgaataaaccggctaagaagaagaagacccccctcaagaccgacacttttagagtcaagaaatcacccaaaagatctccactgtcagaccctccaagccaagatcctacccctgccgctactcctgaaacccctcccgttatctctgccgtggtccacgcgaccgacgaggaaaaactggccgtgactaatcaaaaatggacctgtatgactgttgatctggaggcggataagcaagactaccctcagccaagcgatctgtctacgtttgtgaacgagaccaaattcagcagcccgaccgaggagctggactatcggaattcatatgagattgagtatatggagaaaattggcagcagtctgccacaggatgacgacgcaccaaagaaacaggccttgtaccttatgtttgacacctcccaagagtctccagtgaagagcagccctgtacggatgtcagaatctcccaccccttgcagcggaagctcttttgaggaaactgaggctctggtgaataccgccgccaagaatcaacaccccgtccctcggggcctggcgcctaaccaagagagtcacctccaggtgccagagaagtcatcgcaaaaggagctggaggccatgggtctagggacaccatccgaggccattgagattaccgctcccgaaggctccttcgcaagtgctgacgcacttctcagcaggctggcccacccggtgtcactttgcggcgcattagattatctggaaccggacctagcagagaagaaccctccgttattcgcccagaaactgcaggaagagctggagttcgcaattatgcgtatcgaggctttaaagctggcccggcagatcgccctcgccagccgttctcatcaagacgccaagcgggaagcggcacacccaaccgatgtttcaattagcaagaccgcactttatagccgcattggaactgcggaagtggaaaagcccgccggcctcttattccagcagcccgatctggattccgccctgcagattgccagggccgaaataatcaccaaggaacgcgaggtcagtgaatggaaggataagtacgaagagtcccgtcgtgaagtaatggagatgcggaaaatcgtcgccgagtatgaaaagaccatcgcacagatgatcgaagatgagcaacgtgaaaaaagcgtctcacatcagactgtgcagcagctcgtgcttgagaaggagcaagctctggcggacctcaacagcgtggagaaaagcctggcagacctgttccgccgctacgaaaagatgaaagaggttttggagggatttagaaaaaatgaagaggtgctcaagcgttgtgctcaggagtatctctcaagagtcaagaaggaagagcagcggtaccaagcgcttaaggtacacgcggaggaaaaattggatcgagctaatgccgagatagcccaggtccgtgggaaggctcagcaagagcaagccgcgcatcaagccagtctccgtaaggaacagctgagggttgatgccctcgaaagaactctggagcagaaaaataaggaaattgaagagctgactaaaatttgtgacgaattaattgcaaaaatggggaagtcctag

SEQ ID NO: 138332 - DNA, 8847 bp, synthetic construct
  misc_feature 1..8847: note = Description of Artificial Sequence: Synthetic coding sequence
  source 1..8847: mol_type = other DNA
atgggcaacgagaactccacctccgataaccagaggaccctcagtgctcaaaccccccggtcagcacagcccccagggaattcccagaacattaaacgaaagcagcaggatacccccggttcccccgatcatcgagacgcttcatctatcggttcggtggggctgggtgggttttgcactgcctcagagagcagcgcctcacttgatccatgcctggtaagcccagaggtgactgaaccaaggaaggatccacaaggagctagaggacccgagggcagcctcctgcccagccctcctcccagccaggagagagagcacccgtccagttcgatgccgttcgccgaatgtccgccggagggatgtctggccagccctgctgcggcccccgaagacggtccacagacccaaagtccgagaagggagccggcacctaatgcccccggcgatatcgctgctgcgttccctgcagagagagactcctctacaccgtaccaggaaattgcagctgtccctagtgccgggcgcgaacggcagcccaaagaggaaggccagaagtcgagctttagcttttcttccgggattgatcagtcacccggtatgagccccgtgccactgagggagcccatgaaggcccctctgtgcggcgagggcgaccagccgggggggttcgaatcccaagagaaagaggctgccggcggctttccgccagctgagagccgccaaggtgtagccagtgtccaagtgacccctgaggcccctgctgcggcccaacagggaacagaatctagcgccgttctcgagaagtctccattgaaacccatggcccctattcctcaagatcccgcaccaagggcttccgaccgtgaaagaggacaaggagaggctcctccacagtatttaacggacgacctggaatttctccgggcctgccacttgcctagaagtaattccggggccgctccagaggccgaggtcaacgcggcatcacaggagtcatgccaacaaccggttggagcttacttaccacacgccgaacttccatggggcctgccctcccccgcactggtcccagaagctggcggttctggcaaagaggcacttgatacgatcgacgtccaaggtcacccacagactggcatgcggggtaccaagccaaatcaagtcgtgtgcgtggccgctgggggtcagcctgaaggcggactgccagtaagtcccgaaccttccttactgacccctaccgaggaggctcacccagcatcttccttggctagcttccccgctgctcaaatacccattgccgtagaggaacctgggtcatccagtcgagaaagtgtgtcaaaagctggcatgcccgtctcagccgatgccgctaaggaggtggtggatgccggccttgtaggactggagcgtcaggtctccgatttaggaagtaagggagagcatcccgaaggtgacccaggtgaggtgcctgcaccttctccacaggagcgcggcgagcacctaaatacagaacaaagccacgaagtgcagccaggggtgcctccccccccactgccaaaagagcagtcacacgaggtgcagccaggcgctcctcccccccctctgcctaaggcaccttctgagagtgcccgtgggcctcctggacctaccgacggtgctaaggtgcatgaagattccactagtccagcggtggctaaagaggggtcccggtctcccggcgattcacccggcggaaaagaggaggcgcccgagccacctgacgggggagatccgggcaacctacaaggagaagattcccaagcatttagtagtaaacgtgatcccgaagtgggcaaggatgagctgtccaagccgtcatctgacgcagagtccagagaccacccgagctcccactcagcccagcccccaaggaagggaggcgccgggcatactgatggtcctcattcccagaccgcggaagccgacgccagcggactgccccacaagttaggtgaagaagaccctgtgctgccacctgtcccagacggcgctggagaaccaactgtgccagagggtgccatttgggaagggtccggccttcagcccaagtgtcctgataccctgcagagccgcgaggggttagggcggatggaaagctttttgacgttggaatcagaaaagtcagattttccgcccacaccggtggcggaggtggcacctaaagcccaagagggagagtcaaccttggagatcaggaaaatgggctcatgcgacggcgagggcttgcttacaagccctgaccagcccagaggcccagcgtgtgatgccagcagacaggaatttcatgctggggtcccacacccacctcaaggtgagaacctggctgctgatctcggactgaccgctctcattctcgaccaggatcaacagggaataccatcttgcccaggcgaaggctggattaggggggcggcaagcgagtggcctctcttatcatccgagaaacacctgcagccatcccaggcccaaccggaaacatctatctttgacgttctcaaagaacaagcccagcccccggagaatgggaaagagacaagcccaagccaccccggctttaaggatcagggagcagactctagccagatccacgtgcccgtcgaacctcaagaggacaacaatctacctacccatggtggacaggaacaagcactgggctccgagctgcagtcccaactccccaaggggaccctgtctgacaccccgactagtagtcccacagatatggtctgggaaagttccctgactgaagagtcagagctatccgccccaacccggcagaaactaccggccctgggcgagaagaggcccgagggggcatgtggcgacggtcagtccagtcgagtttctccacccgccgccgatgttctgaaggacttttctctcgccggtaacttctctaggaaggagacctgttgtactgggcagggcccaaacaagtcccagcaggctttagctgacgcactcgaggagggttcgcagcatgaggaagcttgccagcgtcaccccggggcatctgaagcagctgatggctgttcaccactgtggggcctcagcaaacgcgagatggcatccggtaacaccggagaggcccctccttgccagccggactccgtcgcgcttttagacgcagtgccatgcctgccggccttggcaccagcatcccccggcgtgacacccacgcaggatgccccggagactgaagcatgcgacgagacacaggaagggaggcagcagcccgtccctgcaccccagcaaaaaatggaatgttgggccacaagcgatgccgagagtccaaagctactggccagcttcccctccgcaggggagcaaggtggggaagccggagccgcagaaaccggaggcagcgcgggagctggtgatcctggtaagcaacaggcgcctgagaagcccggagaggctacattaagctgtggactgcttcagactgaacactgtcttacatccggggaagaggcatcaacctcagccctccgcgaatcatgccaggcagaacaccccatggcctcctgccaggacgctctcctgcctgccagggaactgggaggcataccgcgctcaacaatggacttttctacccatcaggctgtccccgatccgaaggagctcctgttgtctgggcccccagaagtagctgctccagatacaccatacttgcatgttgacagcgcggcacagcgcggagcggaagatagtggcgtgaaggcagtgagcagtgctgatcctcgtgcacccggagagtctccttgtcccgtaggcgagccaccactggcgctcgagaacgctgcttctctgaaactgtttgccggatcacttgcacctctactgcagcctggagccgcaggcggcgagatacctgccgtgcaggcatccagcggcagccccaaggcaagaaccacggagggtccagttgactccatgccttgcctggaccggatgccgctgcttgcaaagggcaaacaggcaaccggagaagaaaaggctgctacagccccgggcgccggcgccaaggcatctggcgaagggatggcaggggatgcagccggtgagaccgagggaagcatggaacgaatgggcgaaccttctcaggaccctaagcagggcaccagtggaggagtcgacacaagttccgaacagattgccacactgacaggattccccgattttcgcgaacacatcgccaaaattttcgaaaagccagtgttgggagccctggcaacaccaggggaaaaggcaggggcgggaaggagcgcggtcggaaaggacctcacaaggccactgggtcccgagaaactgctggatggtccccccggcgttgacgtcacattgctgcccgcccccccagcccgccttcaagtcgagaaaaaacagcagttggcaggagaagctgagatatcacatcttgccctgcaagatcctgcgagcgacaaattgctggggcccgctggcctgacatgggaacggaatctgcctggagctggcgtgggaaaggagatggccggggtgcctcccactttacgagaagatgagagacccgaggggccgggggctgcctggccgggactggagggccaggcttatagccagttagagcgctctagacaggaacttgcgagcgggctgccaagtcctgctgccacacaagagttgcctgtggaaagggcggctgcgttccaggttgcgcctcatagtcacggcgaagaagccgttgcccaggatagaattccaagcggaaaacagcatcaggaaacaagtgcatgtgactccccacatggtgaagatggtcccggcgattttgctcacacaggcgttccggggcacgtgcctaggagtacgtgtgccccatcccctcagcgcgaggtcttgacagttcccgaagccaactcagagccctggaccctggacaccctgggcggagagcggaggcccggtgtaaccgcaggcattctggaaatgcggaacgccctcggaaatcaatctaccccagcgccacccaccggcgaagtagctgatactccacttgaaccaggaaaggtcgccggagcggctggcgaagctgagggtgatattaccctcagtactgcagagacacaggcttgcgcgtcaggtgacttaccagaggctggtactactcgcactttttctgtggttgctggggacctcgttctcccggggtcttgccaggatccagcgtgttcagataaggcgccagggatggaagggacagctgcccttcatggggattctccggcccggccccaacaggccaaagagcagcctgggccagagcggccgatccctgccggtgacgggaaagtttgtgtgagctccccgcccgagcctgatgagactcatgacccaaagcttcagcacttggccccagaagagctccataccgaccgggagtctcccagacctggcccatccatgcttccttccgtgcctaaaaaggacgcgcctcgcgtgatggataaggtgacatctgacgaaacccggggagccgaaggcaccgagagtagtcccgttgccgatgacattattcaacccgcagctcctgccgatctggaaagccctacacttgccgcttcttcttaccacggagacgttgttggacaggtgagcacagatctgatcgcacagagtataagtcctgccgcagcacacgccgggctgccccccagcgccgccgagcacattgtttcaccttctgcccccgccggtgatcgagttgaggccagcactccttcatgcccggaccccgctaaagatttatcaaggtcatcagactccgaagaggcgtttgaaaccccagaatcgacgacacccgtgaaagctccacccgcgccgccccctcctccaccagaggtgatccccgagcctgaagtctccacacagccacctccggaagagcccggctgtggtagtgagacagttcccgtacccgacgggccaaggtcagacagtgtggaaggcagtcccttcagacccccttcccacagtttttccgccgtttttgatgaggacaaacccatagcctcctctggtacctacaaccttgatttcgacaacatcgagcttgtggatacttttcagacactggaaccgcgtgcaagtgatgccaagaaccaggaagggaaagtaaatacacggcgcaagagtaccgatagcgtgcccatctctaaaagcacactgtcacgttcactcagtttacaggcaagtgacttcgatggggctagctccagtggaaatcctgaggccgttgcactggccccagacgcttacagcacgggatccagttccgctagctctaccttaaagcgcacaaagaaaccccgccccccgagtttgaaaaaaaaacagacgacaaagaagcccaccgaaaccccccccgtgaaagaaacccagcaggagcccgatgaagagtccctggtcccttccggagagaatttggccagtgagaccaagactgagtctgccaagaccgaagggccatcccccgccctgctggaagagacacccttggagcccgcggttggacctaaagccgcctgtcccctggacagcgaatccgcagagggtgtcgtgccacccgcaagcgggggcggtagagtacaaaacagccctccagtgggtcgtaagaccctccctttaaccacagctccagaggctggggaagtcactccctccgatagtggggggcaggaagacagcccagccaagggactgagcgtgcgtcttgagttcgattatagcgaggataagtcatcatgggataaccagcaggagaaccctcccccaacaaagaagattggcaagaagccggttgccaagatgccacttagaaggcctaaaatgaagaagacacctgaaaaactggacaatactcctgcatcacccccccggagtcccgctgagcccaacgacatccccattgccaagggcacttatacattcgacatcgataagtgggatgatccaaatttcaatccctttagctcaacttcaaaaatgcaggaatccccaaagttacctcagcagagttacaacttcgaccccgacacatgtgacgaatcagtggatccgttcaaaacatcctctaagacacctagcagtccctccaaatcaccggccagctttgagatcccagcctcggcaatggaagccaatggggtggatggggatgggctcaataaacccgctaagaaaaagaagaccccgctgaagacagatacttttagggtgaaaaagtcaccaaaacggagccccttgtccgaccctccttcgcaggatcccacaccagccgctacccctgaaacacctcctgtgatctcagcagtggtccatgctactgatgaagaaaagctggctgtgaccaatcagaagtggacttgcatgactgtggacctcgaagccgacaaacaggactacccacagcccagcgatctctccacgttcgtgaacgagaccaagtttagttcaccaaccgaggagctcgactaccgcaacagctatgaaatcgagtatatggagaaaatcgggagtagcctgccacaggacgatgatgcgcccaagaaacaagccctttatttgatgttcgacacaagccaggagtccccagtaaagtcatcaccggtgcggatgtctgaaagtccaacaccttgttcgggaagctcattcgaggagactgaagcactggtgaacactgccgcgaagaaccagcacccagtgccccggggccttgcgcctaatcaggaatcccatctgcaggttccagaaaagtctagtcagaaagagctggaggccatgggtctaggtacaccatctgaggccatagaaatcactgcacctgagggttcctttgcctcagccgacgctctattgtcacggttagcacaccccgtcagcctctgtggtgctctggattatttggaacctgacctggccgaaaagaatccacctttatttgctcagaaactgcaagaagagctcgaatttgccatcatgagaattgaggcactgaaattggctagacagatcgctcttgcatctcgatcccaccaggacgcgaagcgggaggctgcacacccaacggacgtttctattagcaaaacagccctgtactctagaatcggcacagctgaagtggaaaaaccagccggcttgctcttccagcaaccagacttggatagtgccctccagattgcacgcgcagagataattacaaaggagagagaggtttccgaatggaaagataagtacgaagagtcccgacgagaggtgatggagatgaggaaaatcgtcgccgaatacgagaaaaccattgctcagatgatcgaagacgaacaaagggagaagagcgtgtcccatcagactgtccagcagcttgtgcttgagaaagagcaggccctggccgacctgaattctgtggagaaatcacttgctgatctctttcggagatatgaaaagatgaaagaagtgctggaagggtttaggaaaaatgaagaggtgctgaaacggtgtgctcaagaatatctgagccgtgtaaagaaggaagagcaacgttaccaggccctgaaggttcatgctgaagaaaagctggatcgcgccaatgcagaaattgcgcaggttcgcgggaaggcccaacaggagcaagccgcccaccaggccagccttcgtaaggagcagctccgagttgatgccttggagagaacactggagcagaaaaataaagagatagaagagctgactaagatttgcgacgagttgatcgctaagatgggcaaatcctag

SEQ ID NO: 138333 - DNA, 8586 bp, synthetic construct
  misc_feature 1..8586: note = Description of Artificial Sequence: Synthetic coding sequence
  source 1..8586: mol_type = other DNA
caacgcaccttgtccgctcagacgccacggagtgcccagccacccggcaattcacagaatatcaagagaaaacagcaagacacccctggatccccggatcatcgtgacgcatcaagtatcgggtcggttggactgggtggcttctgtacagcaagtgagagctccgcctctctggatccgtgtctggttagcccagaggtgaccgagcccagaaaagaccctcagggcgctcgggggcccgaaggcagcctgctaccgtctccaccacctagccaggagagagaacaccctagtagtagcatgccgtttgctgaatgcccacctgagggatgtctcgcttcaccagccgctgcccctgaagatggccctcaaactcaatcacctaggcgcgaacctgctcctaatgctcctggtgatatcgccgctgcgtttccagccgaaagggatagctccacaccttatcaggaaatcgccgcggtgccttcagcagggcgtgagaggcagcctaaggaagaggggcaaaaaagctcattttccttctcatcaggaattgaccagtccccaggcatgtcacctgtcccattgagagagcctatgaaggctccactgtgtggcgagggcgatcaaccaggtggctttgaatctcaggagaaagaggctgcgggaggtttcccaccggcggaatctagacagggcgtggcaagcgtgcaggtgactcccgaagctccagccgctgcccagcagggcaccgaatcctccgctgtcctggagaagagtccccttaagcctatggcccccattccccaagatcccgcgccccgagcaagtgatcgagaacggggccaaggcgaggctccacctcagtacctgacagacgacttggaattcctgagggcctgccaccttcccaggagcaattccggggctgccccagaggccgaggtaaacgccgcctcccaggaatcttgtcaacagcctgtcggtgcctacctgccacacgccgagttgccgtgggggctgccctcacccgccctggtccctgaagccggaggaagcggcaaggaagctctggataccatagatgtgcaggggcacccacagaccgggatgaggggtacaaagccaaaccaggtggtgtgcgtggcagctggcggccagcctgagggggggctgccagtgtcaccggagccgtccttactaactccgacagaggaagcccatcctgcttcctccctcgcatcctttcctgctgcgcaaattcctattgccgtagaagaaccaggatctagttcacgcgagtccgtgagtaaggccggtatgcccgtttctgctgatgcagccaaggaggtcgtggacgctgggctggtggggttagaacgacaggtgtctgatctcggctccaagggtgagcatcccgaaggagatccaggcgaagtgcctgccccctccccacaggaacgaggcgaacatttaaacacagagcagtctcacgaggtgcaaccaggggttcccccgccgcctctgcccaaggagcagtcacatgaggtgcagcctggcgctccacctccccccttgcccaaggcacccagcgaatctgctcggggacctcctggacctacagatggggccaaagtgcatgaggatagcacttctccagcagtggcgaaagagggttcgcggtcacctggggactcgcctggaggaaaagaagaggcccccgagccacccgatggcggcgatcctgggaacttacagggagaagactcacaggcctttagttcaaagcgcgatccggaggtcggaaaggacgaattatcaaagccaagctccgacgccgaatcacgggaccatccctcttctcacagtgcacaaccacctcgcaagggaggggcaggccatacggacggcccacactctcagaccgcggaggcagatgcgagcggactcccacataaactgggcgaagaggaccccgtgctgccacccgtgccagacggtgctggcgagccaactgtcccggagggggcaatatgggagggctcagggcttcaaccaaaatgtccagatacccttcagagcagagagggcctgggccggatggagagttttctaactttagagtcggagaagagcgactttcctcccacaccagtagccgaagtagcaccaaaagcgcaggagggcgagtccacgctggagatccggaagatgggcagctgcgatggagaagggctgctcacgtccccggatcagccgagaggccccgcctgtgacgcctcccggcaggagttccatgccggggtcccccatccccctcagggcgaaaatctggcagcggacttgggcctcactgccctgatcctggatcaggaccaacaagggatccccagttgcccgggcgagggatggatcagaggagctgcatccgagtggcccctgctgtcatcagaaaaacacttgcagccctcccaggcccagccagaaaccagcatcttcgatgtgctgaaggaacaggcccagccgcctgagaatggcaaggaaacttccccaagccaccccggatttaaggaccaaggggcggacagcagtcaaatccacgttccagtcgaaccacaagaggataacaatctgccgacccacggtgggcaggaacaggcactgggctcagagctccagtcgcagctacccaaagggactttgtctgacacccccacttcttcacccaccgacatggtctgggagtcgtctctgaccgaagaatcagagctgtctgcccccactaggcagaagttgcctgcgctgggcgagaagcgacccgagggggcatgcggcgacggacaaagctcgcgtgttagccccccagcagccgatgtcctcaaggacttctcccttgccggcaacttttcccgcaaagaaacctgctgtaccggccagggccctaataagtcccagcaggctctcgcggacgcactggaggaagggagtcaacacgaggaggcatgccagcgacatcctggggcaagcgaggccgctgatggatgctcccccctgtggggtctctctaaaagggaaatggcgtctgggaatactggcgaggccccgccttgtcaaccggatagcgtcgcactactggacgccgtaccctgcctgcccgccttggccccagcctcacccggcgttacccccacacaagacgccccggaaacagaggcctgcgatgaaacccaagaggggcgccagcagccagtccccgccccacagcagaagatggagtgttgggctacctccgacgccgaatctcctaaactcctcgcttccttccccagtgctggagaacagggcggggaggccggggccgcagaaacgggtgggagcgccggtgcgggtgatcctggtaagcagcaggcccccgagaagcctggcgaagccacccttagttgcgggctgctgcagactgaacactgcctgacctcaggagaggaggccagtaccagcgccctgagggagagctgccaagcagagcatcccatggctagttgccaggacgccctgctcccagccagggagctcggcgggattcccagatctaccatggacttctccacccaccaggctgttcctgacccaaaggagctgctgctatctgggccccccgaagtggcagcccctgataccccttaccttcatgtcgactctgctgctcagcgaggcgctgaagatagtggcgttaaagcagtgagcagcgcggaccctagggcacccggcgagtcaccctgcccggtgggagagccgccacttgccctcgagaacgccgcaagccttaaactcttcgctggatccctcgcccccctcttacaacctggagccgcaggaggcgaaattcctgccgtacaggcgagttccggttcccctaaggccaggaccacggagggaccagtagatagcatgccctgcctcgatagaatgcctctgttggccaagggcaagcaagccacgggtgaagaaaaagctgccacagccccaggcgcaggggctaaagcctcaggggaaggcatggcaggagacgctgccggcgagacagaaggctctatggagagaatgggagagccctctcaggatcctaaacagggcaccagcggaggggtagacacatcgagcgagcagattgctaccctgacaggtttcccagatttcagggaacacatcgccaagatcttcgaaaaaccagttctaggagccctggctacaccaggtgagaaggcgggcgccggaaggagcgccgtgggaaaagatttaacaaggccgctgggtcccgaaaagctgttagatggcccccccggcgttgatgtgactttattacccgctccaccagcgaggcttcaagtggagaaaaaacaacaactggccggagaagccgagatctctcaccttgctctgcaggacccagcctccgataagctgttgggccccgccggactgacatgggagcgcaatctccctggcgcaggggttggtaaagagatggcaggtgtgcctccaaccttgcgcgaggacgagcggccagagggtccgggcgctgcttggccaggtctcgagggtcaggcctactcccagctagagcgaagtcgtcaggaactggcaagcgggctgccctcccctgctgcgactcaagaacttcccgtggagcgcgcggcagccttccaggtcgccccccacagccatggagaggaagcggtggcccaagacaggattccaagtggtaaacagcatcaagaaacatccgcttgcgacagccctcacggggaggatgggccaggcgacttcgctcatacaggcgtcccaggccatgtacctagaagtacctgtgcgccctcaccacagagggaggttttgaccgtgcccgaggctaattccgaaccctggaccctcgacacgttgggtggcgaaaggagacccggcgttactgccggcattctggagatgcggaatgctctgggcaatcagtctacacccgcaccacctacaggcgaggttgccgatacaccgttagagccgggtaaggttgccggcgccgccggagaggcggaaggagacatcactctttctaccgcagagacacaggcttgcgccagtggagacttgccggaagctgggaccacccgcaccttctctgttgtggcaggggatctagtactgcccgggagctgccaggaccccgcttgtagtgataaagcccccggaatggaaggtactgctgctctccacggagatagcccggcacggccgcaacaggcaaaggagcagcccggacctgaacgaccaatccccgctggagacggcaaagtttgtgtaagcagccccccagagccagacgagacccacgaccctaaactccagcacctcgccccagaggagctgcatactgacagggagagtccacgccccggcccctcaatgctgccatccgttcccaagaaggacgctccgcgagtcatggacaaagtgacaagcgatgagactcgaggcgccgaaggcacagagagctcccctgtcgccgacgatatcattcaaccggcagcaccagcagacctggaatcccctacactcgcagcgagttcgtatcacggtgatgtcgtcggacaggtttcaacagatctcatcgcccagagcatctccccagcagctgcacacgcgggcttacctccttctgcagcagagcacattgtttcaccaagtgcccccgccggcgaccgcgtggaggccagcaccccttcctgtcctgatccagctaaagacctttcaagaagctctgattccgaggaagcgttcgagacccccgagagtacgacccctgtcaaagcacctcctgcacctcccccgccgccccccgaggtaatccccgaaccggaggtgtctacgcagcctccgcccgaagagcctggctgtgggtccgaaactgtaccagtgccagacggcccaaggtccgactctgttgagggctcaccattcagacccccgtcccactcattttccgccgtctttgacgaggataagccaattgcctcttctgggacatataatctggattttgacaacatcgaattggtagatacattccagactcttgagccacgagcctctgacgcaaagaatcaagaagggaaggtcaatacaaggcgaaagtccactgactctgtgcccatctctaagtcgacgctctcacgatccttgagtctacaggcctctgatttcgacggcgcctcttctagcggcaatccagaagcggtcgcgctggcacccgatgcttatagcacaggcagctcaagcgctagttcaactctgaagcgcactaagaagcccaggcccccatctttgaagaagaaacagacaacaaagaaaccaaccgagacccctcctgtgaaggagacgcagcaggaacctgacgaggagtctcttgtgccttccggggaaaacctggcctcggagactaaaaccgaatccgccaaaaccgaaggcccctccccagcccttctagaggaaaccccactcgagcctgccgtgggccctaaggccgcttgccctttagattcggagagtgctgaaggggtggtgccccccgcctcaggcggagggagggtgcagaactctccccctgttgggagaaaaactcttcccctgaccacggcccccgaagctggagaggtgactccttccgattcgggaggtcaggaggatagcccagctaaggggctgagtgtaaggttggaattcgactattcagaggacaaatccagctgggacaaccagcaggaaaatccgccaccgaccaaaaagatcggtaagaaacccgtagcaaagatgccactccgacgtcctaagatgaagaagaccccggagaaacttgacaatacccccgcatctcctcctagatcccctgccgagccaaatgatatcccgatagccaaggggacatacacgttcgatatcgataaatgggatgatccgaacttcaatcccttcagctcaaccagcaaaatgcaggaatctcctaaattaccacagcagtcgtacaatttcgacccggatacctgtgacgagtctgttgatccttttaagactagctccaaaactccaagctcgcctagcaagagcccggcaagctttgagatccccgcgtccgcaatggaagctaacggagtagacggggatggcctgaataagccagcaaagaagaagaagacacccctgaaaaccgacacattccgggtgaaaaagtctcccaagaggtccccgctgtctgatccaccaagtcaggacccaactccagccgccacaccggaaacccctcccgtaatttccgctgtcgtacacgctactgatgaggagaagttggccgtcacaaaccaaaagtggacatgtatgaccgttgacctggaggcagataaacaggattacccccagcccagcgacctgtccacgtttgtaaatgagactaaattctcaagtccaactgaggaactggactatcgtaattcctacgagatcgagtatatggagaaaatcggctcctctcttcctcaggacgacgacgcacctaagaaacaggcactctacctcatgttcgacacatcacaggaaagccccgtgaagtccagccctgtcagaatgtccgagtctccaacaccctgctccggctcctcattcgaggagactgaggcgctagttaatacggccgccaagaaccagcatcccgttccccgaggcttggctccgaaccaggaatcccacttacaagtacctgaaaagagctctcaaaaggaattggaggcaatggggctcggtaccccaagcgaagccatcgaaatacgggaggcggcacatcccaccgatgtgagcatttctaaaacagccctatatagccgcataggcacagccgaagttgagaaacctgccgggctcctgtttcaacagccagatttagattcagccctgcagatcgctcgtgctgaaatcataaccaaggaacgggaagtcagcgagtggaaagataaatacgaggagtcccgtagagaggtaatggagatgcgcaaaatcgttgcagagtacgaaaaaacaattgcacagatgattgaagatgagcagcgggagaaaagcgtctctcatcagactgtccagcaactggtccttgaaaaggagcaggcactggcagacttgaacagcgtggaaaagtccctggccgatctcttccgacggtatgaaaaaatgaaggaggtcttggagggctttcggaagaacgaggaggtgcttaaaagatgtgcccaggagtatctgagtcgggtgaagaaagaagaacagagatatcaggctttaaaagttcacgcggaggagaagcttgatagagctaatgccgagatagcccaggtaaggggaaaagcccaacaggagcaggccgcacaccaggcctccttgcggaaggagcaactcagggtggacgcactggaaaggacccttgaacagaaaaataaggagatcgaggagcttactaagatctgcgatgaattgatcgcaaagatgggcaaaagttag

SEQ ID NO: 138334 - DNA, 3285 bp, synthetic construct
  misc_feature 1..3285: note = Description of Artificial Sequence: Synthetic coding sequence
  source 1..3285: mol_type = other DNA
atggggaacgagaattccaccagcgacaatcagcgcacactcagtgctcaaacacctcgcagtgcacagcctccgggcaatagccagaatataaagaggaaacaacaagataccccaggctcgcctgatcaccgggatgcctccagtagtcccgtggcagatgatattatccagcctgcagctccggcggatttggagtcaccgactctcgccgcttcttcttatcacggagacgttgtaggccaggtgagcacagacctgatcgcgcaacggtcgtcagattcggaggaggcttttgagacccctgaaagcaccacgcctgttaaggccccccctgctcctccgcccccaccacccgaagtcattccagagcccgaggtttcaacacagccaccaccagaagaaccgggctgtggcagtgaaaccgtcccagtgccggatggacctcggagtgacagcgtcgagggctccccttttagacccccttcacactccttttctgccgtgttcgacgaagataagcctatcgcttcaagcggcacctacaatctggatttcgataacattgagctggtcgatactttccagaccctggaacctcgagcctctgatgccaaaaaccaagaagggaaggtgaatacccggagaaaaagtactgactccgtgcctatttcaaagagcacactaagtaggtccctctctttgcaagcttcggactttgatggcgcaagttcgtctggcaacccagaagcggtggcgttagcccctgatgcgtacagcaccggctcttccagcgcttctagcaccttaaagcgcactaaaaagccccgcccgcccagcctgaagaagaagcagaccactaagaagccaaccgagacaccaccagtcaaagaaacccagcaagaacccgatgaagaaagcttagtcccttctggtgaaaatctcgctagcgaaactaaaacagaatcagctaagacagaggggccctcacccgcattacttgaggaaactcccttagagccagcagtagggccaaaagccgcatgcccccttgatagcgagagcgctgagggagtagttccacccgcatcaggcgggggccgagtgcagaactctcctcccgtgggcagaaagactctgccactgacaactgctcccgaggcaggtgaagttacgccaagcgatagcgggggacaggaggactctcccgccaaagggctgtcagttagacttgagtttgattattctgaagataagtcttcatgggacaaccagcaggagaaccccccgccaacaaaaaagatcggcaagaaacccgtagctaaaatgcctctcaggagacccaagatgaaaaagacgcctgaaaaactggacaacacacccgcctctccacctcgctctcccgccgagcctaacgacattcctatcgccaaaggcacttatacctttgatatcgataagtgggacgatcctaatttcaatccattttcaagtacatccaagatgcaagagtccccaaaactgccacagcagagctataactttgaccccgatacctgcgatgagtcagttgaccctttcaaaacaagcagcaaaacaccgtcgtcaccatctaaatcccccgccagcttcgaaatccctgccagcgctatggaagcaaacggtgtggacggtgatgggttgaacaagccggccaaaaaaaagaagaccccgctgaagacagacacattcagggttaagaaatcaccgaaaaggtcccctctaagcgaccccccgtcacaagatcccacccccgctgcaaccccggaaactccaccagtaataagtgcagtcgtgcatgccacagacgaggagaagctggctgtgaccaaccagaagtggacatgcatgacggtggacctggaagcagacaagcaggattacccacagccctccgatttgtccacttttgtgaatgagactaagttctcctctccaacagaagagctggattaccggaatagctatgaaatcgagtacatggaaaagatcggtagctccctgccacaagacgatgacgcccccaagaaacaggcactgtacctgatgttcgataccagtcaggagtcacccgtcaaaagttcccccgtacggatgtccgagagtcctacgccctgcagtggtagttccttcgaagaaactgaggccctggtgaacaccgctgccaagaatcagcatcccgtcccccgggggctcgctccaaaccaggaatcccacttgcaggtgcctgaaaaatcatctcagaaggaactagaagcaatgggtcttggcaccccctccgaggccatcgaaataaccgctccggaaggatccttcgcttcggctgacgcacttctgagcaggttggcgcatcccgttagtttatgtggagccctggattatctcgaacccgacctggccgaaaagaacccccccctgttcgcgcaaaaactccaagaggaactcgaatttgcaattatgcggatcgaggctctgaagcttgcccgccagattgccctggccagtcggagtcaccaagatgcgaagagagaggctgctcatcctaccgacgtcagtatctccaagaccgccctttatagtcggatcggaacagccgaagtggagaagccggccggcctgctgttccaacagcctgatttggactctgcccttcaaattgcccgggccgagatcattactaaggaaagggaagtatccgagtggaaggataagtacgaagagtcccgacgggaagttatggagatgcgtaagattgtggctgaatatgaaaaaacaatagctcagatgatcgaggatgaacaaagagagaagtccgtaagccaccagacagtgcaacaactggtacttgaaaaggagcaggccctggccgatctcaattcagttgagaagtccctggctgatctgttcagacggtatgagaagatgaaagaggtgcttgaagggttccggaagaacgaggaagtactaaagaggtgtgcgcaggagtacctgagtcgggtgaagaaggaggagcagcgctaccaagctttgaaagtgcacgcagaagagaagctggacagggccaatgccgagatcgcacaggtgcgcggcaaagcccaacaggagcaggcagcccaccaggctagcttgagaaaggagcagctgcgggtggacgctctggagcgaaccttggagcaaaagaacaaggagatcgaggagctgactaaaatctgtgacgaactgatcgctaaaatgggcaagagctag

SEQ ID NO: 138335 - DNA, 2991 bp, synthetic construct
  misc_feature 1..2991: note = Description of Artificial Sequence: Synthetic coding sequence
  source 1..2991: mol_type = other DNA
atgggcggcagtcagtcactgcagccagccccagccagcgatctaaaccttgaagcctccgaagctatgtccagtgatagcgaagaggcattcgagacgcctgaaagtacaacccccgttaaagctcccccagcaccgcctccacctccccccgaggtcatccctgaacctgaagtatccactcagccccctcctgaggaaccagggtgtgggagtgagaccgtacctgttccggacgggccacgaagcgactcagtggaaggcagcccctttcgcccaccgtcccacagtttctcagctgtctttgatgaagacaagcccattgcgtctagtggcacgtataatcttgattttgacaatattgaactggtggacacattccagacattggagccccgtgcgagcgatgctaaaaatcaggagggcaaggtaaatacacggaggaaaagtactgactcagtgccaatctccaagagcacactgtccaggagcctatctctccaagccagtgacttcgacggcgctagctctagcggaaacccagaggcagttgcgcttgcccccgacgcatatagtaccggctcaagttcagcctctagtaccctcaagcggacgaagaaaccgcgccccccttcgcttaagaaaaagcaaaccactaaaaaaccaaccgaaacccccccagtcaaggaaacacagcaggagcctgacgaggagtcattagtcccctccggggagaacctggcgtcagaaaccaaaacagagtctgccaagacggaggggccaagccccgccttgctggaggaaactcccttggagccagccgtggggccaaaggccgcatgtcccctggattctgaaagtgctgagggagtggtcccccctgcttcaggcggcggccgtgtgcagaacagcccgcctgtgggacggaagactctgcccttgacaactgccccggaggccggcgaggtaactccttctgacagtggcgggcaggaagacagcccagcgaagggacttagcgttcgcttagagtttgattattctgaggacaagtcatcgtgggacaatcagcaggagaaccccccacccaccaagaaaattggaaagaagcctgtagctaagatgccccttcgccgccccaagatgaaaaagacacctgagaagttggataacacaccagcgagcccacctagatctcccgcagaacctaacgacattcccatagcaaagggcacatacaccttcgatatagacaagtgggatgaccccaattttaacccattctcttccaccagcaagatgcaagaatctccaaagctgcctcagcagtcttataacttcgatccagatacctgcgatgaatccgtggatccttttaagaccagcagcaaaactccatctagcccctccaaaagcccagcctcttttgagattcctgcttctgcaatggaggcaaatggcgtggatggggacgggcttaataagcctgccaagaagaagaaaactcccctgaaaacagacactttccgcgttaaaaagtccccgaaaaggtctccactctcagacccaccctcacaggaccccacacctgctgctacccccgaaacccctcccgtgatcagtgccgtggtgcacgccaccgacgaggaaaaattggccgtgactaaccaaaaatggacttgtatgaccgtggacctcgaagccgataagcaggattatcctcagccgagcgatctaagcacatttgtaaacgagaccaagttcagcagtcctacagaggagttggattacagaaacagctacgagatcgaatacatggaaaagataggtagcagcctcccccaggatgatgacgcaccaaaaaagcaggccctgtacctgatgtttgacactagccaagaatctcccgtgaagtcctccccagtgcggatgtctgaaagtcccactccgtgctccggttcctcgtttgaagaaacagaggctctagtcaataccgcggccaaaaatcagcacccggtacctcgcggactcgcacctaaccaagagtcccacctacaagtaccggagaagagttcgcagaaagaactcgaagcaatgggacttggtacaccttccgaagccatcgaaataacagcacccgaaggctcatttgccagcgcagatgccctcttgagccggctggcccatcccgtgagtctgtgcggcgctttagactacttggagcccgacctcgcggaaaaaaacccgcctctgttcgcacagaaactacagcgggaagccgcccaccctactgatgtgtccatcagcaagaccgccctctacagccgcatcggtaccgcggaagttgagaagcccgctggtttgttgtttcagcaacctgatctcgactcagccctgcaaatcgctagggcagagataattactaaagaacgcgaagttagtgagtggaaagataaatacgaagaaagccgtcgcgaggtaatggagatgcgaaaaatagttgctgagtatgagaagacaatcgctcagatgatagaggacgagcagcgtgaaaaatccgtaagccatcaaacagtgcaacaattggtactggaaaaggagcaggctctggcagatctgaactctgtggagaagagtctggctgatctcttccggaggtacgagaaaatgaaagaagtgcttgaggggtttcgaaagaacgaggaagtgctcaagagatgtgcccaggaatacctttcgcgcgtgaaaaaagaggaacagcggtaccaagccttgaaggtgcacgctgaagagaagctcgacagagccaatgcagagattgctcaggtgagaggcaaggctcagcaggaacaggctgcccaccaggcaagtctccggaaagaacagctcagagttgacgccctcgaaaggactttggagcagaaaaataaggaaatcgaggagctaactaaaatctgcgacgaacttatcgctaagatgggaaaatcgtag

SEQ ID NO: 138336 - DNA, 1716 bp, synthetic construct
  misc_feature 1..1716: note = Description of Artificial Sequence: Synthetic coding sequence
  source 1..1716: mol_type = other DNA
atgcccttgcgtaggccaaaaatgaaaaaaactccagagaaactagacaacacccctgcctctccccctcggtctccggcagaaccgaatgacatacctatcgccaaaggcacctatactttcgacatagacaagtgggatgaccctaacttcaacccattttcttccacatccaagatgcaggagagcccaaagttgcctcagcagtcttataactttgatccagacacttgcgatgaatctgttgatccattcaagacctcttctaaaactccctctagcccatcaaaaagtccagcaagttttgaaattcccgcttcggcgatggaggctaacggcgtggatggcgatggcctcaacaagcctgcaaaaaaaaaaaaaactccgctcaagaccgtcaagaaaagtcccaaaagatcccctctctccgaccctccaagccaagaccccactcccgccgcaacacccgaaacccccccagtgatatcagctgtcgtgcatgcgacggatgaggaaaagcttgcagtcactaatcagaagtggacttgcatgactgtagacctggaagccgataagcaggattacccacagcccagtgacttatcaaccttcgtgaatgagactaaattctcttctcccaccgaagagctcgattatcggaatagctatgaaatcgaatacatggagaagattggaagctcgttgccccaagatgatgacgcaccaaaaaagcaagccctgtaccttatgtttgacacctcacaggagtcccctgtcaaaagttcccccgtacgaatgtcagaaagcccgactccctgcagtgggagctctttcgaggagaccgaggcacttgttaacaccgccgccaaaaatcagcatccagtcccccggggtctggcccccaatcaggaatcccatctgcaggtgccagagaaatccagtcagaaggaactggaagcaatgggcctgggtaccccaagcgaggctattgaaattcgggaggccgcccatccaacagatgtctctattagcaaaactgccctttatagcaggattggcacagccgaggtggagaagccggccggcttgctgttccagcagccagacctggacagcgcactgcagattgcgcgggccgaaatcataactaaagagagggaagtatccgagtggaaggataaatatgaagagtccagacgcgaagtaatggagatgcgcaagattgtcgcagagtacgagaagaccatcgctcagatgattgaggacgaacagcgggagaaatcagtgagccatcagactgtccagcagctcgtgctggaaaaggaacaagcactggctgacctaaatagcgtggagaaatccctcgccgatttatttcgtcgctatgaaaagatgaaagaggtgttagaaggctttcgaaaaaacgaggaagtattgaaaagatgcgcacaagagtacctgtcaagggtgaagaaggaagagcaacgctaccaggctctgaaggtgcacgccgaagagaagttagatagggccaatgctgagatagcccaggtccgggggaaagcacagcaggaacaggctgcccaccaagcctctcttagaaaggagcaactaagggtcgatgcactggagcgcaccctggaacagaagaacaaggaaattgaggagttgaccaaaatttgcgacgaattaatcgccaagatggggaaaagctag

SEQ ID NO: 138337 - DNA, 8847 bp, synthetic construct
  misc_feature 1..8847: note = Description of Artificial Sequence: Synthetic coding sequence
  source 1..8847: mol_type = other DNA
atgggtaatgagaactcaacatccgacaatcaacgtactctgagtgctcaaactcctcgcagtgcccagcccccaggtaacagtcagaacattaaaaggaagcagcaggacacgccaggctcccccgatcatcgggacgcttcatctattgggtctgtgggcttgggaggcttctgtacagcttctgaaagcagcgcctcccttgacccatgcttggtcagccctgaggttactgagccacgcaaggatccccaaggcgcccgtggaccagagggcagccttctcccgagcccccctcctagccaggaacgcgaacacccaagtagctctatgcctttcgcggaatgcccgcccgaaggttgtctcgcatcccccgcggccgcaccggaggacggccctcagacacagtccccccgacgtgagccagcccctaacgcccctggagacattgccgcagcattccccgccgaacgcgactcctccacgccttatcaagagatcgctgctgtacccagtgcggggcgcgaacggcagcctaaggaggagggtcagaaaagctcgtttagtttttcatcaggcatcgatcagtctccaggtatgagtcccgtgccccttcgggagccaatgaaagctcccctgtgcggagaaggcgatcagccaggaggtttcgagtcacaggaaaaggaggccgcgggcgggttcccccccgcagagagcagacagggagtggccagcgtgcaggtgacacccgaagccccagccgcagcgcaacagggcactgaatcgagcgctgtgctggagaaaagcccactgaaacctatggctcccattccacaggatcccgcgccccgcgctagcgaccgagaacgtggccagggggaagcccccccacagtatctcaccgacgacctggagttcctgcgcgcttgtcatctgccgagatccaactctggagctgcaccagaggccgaggtgaacgccgcatcgcaagaaagctgtcagcagccggtgggagcgtacctcccacacgcagagttaccatggggacttcctagccctgccctggtgcctgaggccggggggtctggcaaagaggccctggacacgattgacgtacaggggcaccctcaaaccgggatgcgcggaaccaaacctaaccaggtagtgtgtgtggccgccggaggccaaccggaggggggcttgcctgttagccccgaacccagtctgctgacccccactgaggaagcccaccctgcaagttctctggcatcctttcccgctgcgcaaataccaatcgctgtcgaggaacctgggagtagtagtagagagtccgtttctaaagcaggaatgccggtctccgccgacgccgctaaagaagttgttgacgccggtctggtagggctagaacgacaggtgagcgacttagggtccaaaggggagcacccagagggtgaccccggcgaagtgcccgcaccgtcccctcaggagaggggagaacacttaaacactgaacaatcccacgaagtgcagcctggagtgccaccccctccgcttcccaaggaacaatcccacgaggtgcagcctggcgcacctccaccacctcttcccaaggcaccgtcagaaagtgcacgggggccgcctggaccaaccgacggggccaaggtgcacgaggactccacctcacccgccgtcgctaaggagggtagccgctcaccaggagattcgcctggcggaaaggaagaagccccagaaccgcctgatgggggagatccaggcaacctgcaaggtgaagattcccaagcatttagttctaaacgcgacccagaagtagggaaagatgaactgagtaagccttcttccgacgcagaaagtagggaccatccaagcagccatagtgcacagccaccacgaaaaggtggggcagggcataccgacggtccccacagccagacggcggaagcggatgcctctggcttacctcacaagctcggagaggaggaccctgtattgccaccggtgcctgacggcgcaggtgaaccaacagtccccgaaggggccatctgggaggggtccggtctgcagcccaagtgtccggacactttacagagcagagaaggactcggccgaatggagagtttcctgacactcgaatccgagaaatccgattttcccccaacacccgtagctgaagtggcccccaaagcccaggagggagaatcaactctcgagatccgtaagatgggaagctgtgacggtgaagggctgctcacatcgccagaccaaccccgggggccagcctgtgacgcaagcagacaagagtttcacgctggtgtgcctcatccaccccagggggagaacctggcggccgaccttgggttaacggcgttaatccttgaccaggatcagcagggaattccaagctgccctggcgaagggtggattcggggggctgcaagcgaatggccgctgctctcatctgaaaagcacctgcagccttctcaggcacagcccgaaacctctatcttcgatgttctgaaggaacaggcccagccacctgaaaacgggaaagagactagccccagccatccaggctttaaagaccagggagctgattcatcccagatccacgtccctgtcgaacctcaagaagacaataacctgccaacacacgggggccaggaacaggccctgggcagtgaattgcagtcgcaactgcctaaaggtaccctgtccgacactcccacgtcaagtcctactgacatggtgtgggagtcaagtctgaccgaagaatccgagctgagcgcacctacacgccagaaactccccgccttaggagagaaacggcccgagggtgcgtgtggcgacggtcagagctctcgggtcagtcctcccgccgccgatgtgctgaaagacttcagcctcgccggcaatttcagtcgcaaggagacgtgttgcactgggcaaggccctaacaagagccagcaagccctggcggacgcgctcgaagagggcagtcagcatgaggaagcgtgtcagcgacatcccggagcatcggaggccgcggatggctgctcccctctgtggggtctgtcaaagcgcgaaatggcctccggcaacacaggcgaagctccaccctgccaacccgattctgtcgctctactcgacgcagttccctgtttgccagccctagcacccgcttcccccggagttacccccacccaggacgcgcctgaaacggaagcttgtgacgagacccaagaaggccgacagcagcctgttcctgcccctcaacaaaaaatggagtgttgggctaccagcgacgcagagtcccccaagctgctcgcctctttcccatcagccggagaacaaggaggggaagcaggagccgcagagacgggcgggtccgctggagcaggggatccaggaaaacagcaagctcctgaaaagcctggcgaggcaacgctgtcctgcggcctgctgcagacagaacactgcctgacatctggcgaggaagcctcaacatctgccctcagagaaagctgccaggccgaacacccgatggcttcctgtcaggatgccctgctgccagctcgggaacttggaggtattccacggtccacaatggactttagcacacaccaggcggttccggatcccaaagagcttctgctgagcggacctcccgaagtagctgccccagacacaccgtatcttcatgtggatagcgccgcccagcgtggagctgaggattccggagtcaaggccgtatcaagcgccgacccgcgggccccaggcgagagtccgtgccccgtgggagaacctccgctggcattagagaatgccgcgagccttaaactttttgctggcagcctagcaccccttctacaaccaggagccgctggaggagaaattcctgcagtccaggctagtagcgggagcccgaaggcaaggaccaccgaggggcccgttgactcgatgccgtgcctggataggatgcctctgcttgcaaagggtaagcaggctacaggcgaagaaaaggctgctactgcacctggtgctggagctaaggcatccggagagggcatggcaggagatgccgcaggcgagactgaaggaagcatggaacggatgggcgagcctagtcaggatccgaagcaggggacatcgggcggcgttgacacctcctcagaacaaattgctaccctgaccggttttccagactttcgggaacacatagccaagatctttgagaagcccgtgctcggcgcgctggccacccccggcgagaaggctggcgcgggtcggtcagcagtgggaaaggatttaacgaggccgctcggtcccgagaagctgctggacggccctccgggggtggatgtgacacttctgcccgcacccccagcccggctgcaggtggaaaaaaaacagcaattagccggcgaagccgagattagtcacttggcactgcaggacccagcctctgataaactcttaggacctgcagggctgacttgggagcgcaatctgcctggcgctggtgtcggcaaggaaatggccggtgtgcccccaaccctgcgggaggatgagcgtccagagggtcctggggctgcgtggcccggactagaagggcaagcctactctcagctggaacggtcaagacaagagctggcgtctggccttccctcccccgccgcgacccaagagctgcccgtcgagcgtgccgctgcgttccaggtggccccgcacagccacggcgaggaagctgttgcgcaagaccggattccaagtggcaagcaacatcaggaaacatcagcttgcgactctcctcatggtgaggacggccctggcgactttgcgcatacaggcgttccaggacacgtgccaagaagcacgtgtgccccctctcctcagcgagaagtgctcactgtgcctgaggcaaattctgaaccctggacactcgacaccctaggcggtgaacgtagacccggagtgaccgcaggcattctcgaaatgaggaatgccctgggtaaccaaagtacaccagccccccctaccggagaagtggctgatacacccctcgaacctggcaaggttgccggggcagcaggagaggccgagggggatattaccctctctaccgctgaaacgcaggcgtgcgcaagcggcgacttgcctgaggctgggaccacccgaacattctcggtagtggcaggggatcttgttctgcctggttcctgtcaggatccagcctgttcggacaaagctccgggcatggaagggacagccgcactgcacggtgactccccggctaggcctcaacaggcaaaggaacaacctgggcctgaacggccaatccccgcgggcgatggcaaggtgtgtgtcagcagccctccagaaccggacgagacacacgatcccaaactccagcacttggccccagaggagctccacacagatagggagtcgccacgacctggtcccagcatgcttcctagcgtgcccaagaaagacgcacccagagttatggataaggttacctcagacgagacccggggggctgaggggactgaaagcagtcctgttgccgacgacattatacagccggccgccccagccgatctcgagtcccccacactcgccgcttcaagttaccacggcgacgtcgtcgggcaggttagtaccgatctcatcgcccaatcgattagtcctgcggcagcccacgctggacttcctccgtctgccgctgagcacatcgtcagcccctccgcccccgcaggcgacagagttgaagcttctacccccagttgcccggacccagcaaaggacttatcccggagttctgacagtgaagaggcctttgagaccccagaatccactacacccgtaaaggcacctcccgccccacctccacctccgcccgaggttattccggagccagaggtatccactcaacctccgcctgaagaacccggctgcggctcagagacagtgcccgtgccagatggacctcgaagcgatagtgtggagggaagtccgttcagaccaccatctcatagtttcagcgctgttttcgacgaggataaaccaattgcatcatccggaacctataacctggacttcgataacatagagcttgtagacactttccaaacactggaaccacgcgcctctgatgcaaagaatcaggagggaaaggtgaatacgcggcgcaagtcgactgattccgtgcccatctctaaaagcacactctcacgcagcctgagcctgcaggcaagcgattttgatggagcctcttccagcggcaacccagaggcagtggccctggcccctgatgcatattcgactgggagcagttcggccagcagtacactgaaaagaacgaagaagcccaggccccccagtctgaagaagaagcagaccacaaaaaagcccacagagacaccaccagtcaaagagacacagcaggaacctgatgaggagagtctggtgccaagtggggagaatctcgcttcagaaacgaaaactgagtcggccaagaccgaaggcccatcaccagcgttattagaagagactccactggagccagccgtcggacctaaagccgcatgcccgcttgattccgaatccgccgaaggagtagttcctcctgcatctggaggggggagggtccagaactcgccacccgtcgggcgcaaaacgctgcccttaactacagccccagaggctggagaggtaacaccttccgattcgggagggcaagaggacagtcctgccaaaggactgtccgtacggctcgaattcgactattctgaggataaatcttcatgggacaatcagcaagaaaacccacctccaacaaagaagatcggaaaaaaacctgtagccaaaatgccactgcggcggcctaagatgaagaaaacgcctgagaagttggataacactccagcatccccaccccgctctcccgccgagcctaacgatattcccatcgccaaagggacgtataccttcgatattgacaaatgggatgaccctaactttaatccattcagctccacaagcaagatgcaggagagcccaaaactaccacaacagtcctacaacttcgacccagacacttgtgatgagagcgtcgacccatttaagacaagttctaaaaccccatccagccctagtaagagccccgcttcatttgaaatccctgcctctgcaatggaagcaaatggggtggatggcgacgggctgaataagccagccaagaagaaaaaaacgccactgaagactgacacgttccgggtcaaaaaatctcccaagcggagccccctttctgatccccccagccaggacccaacaccggccgctaccccggagacacctccagtgatttctgctgtggtgcacgccacggacgaggaaaagctcgccgtgaccaatcagaagtggacttgtatgacggtggatctggaggccgacaaacaggattatccgcagccatctgacctgtccacattcgtgaacgagacaaagtttagcagtcctaccgaagagctggattacagaaacagctacgaaatcgagtacatggaaaagatcggcagctcccttccacaggatgacgacgctccgaaaaagcaggcactgtaccttatgtttgacactagtcaagaatccccggtgaaatcttccccggttagaatgagtgagtcgcctactccctgctcaggaagtagcttcgaggaaacagaggcgttagtgaacactgcggccaagaatcagcaccccgttcctagaggcctcgcacctaaccaggaaagtcatctgcaggttcccgagaagagctctcaaaaagagctggaagcgatgggcttaggcacaccctcggaagccatagagatcaccgcacctgagggcagcttcgcctcagctgacgcattactgtcaagattagcccaccctgtgtccctctgtggagccctggattacctcgaacccgacctcgccgagaagaaccctcctcttttcgctcagaagctccaagaagaactggaatttgccattatgcggatcgaggcactgaagttggcccgacagattgcgctcgcaagtcgatcacatcaggatgccaaaagggaggccgcccatcctactgatgtaagcattagcaagacagcactttattcaaggattggcactgcagaagttgagaaaccagccggcctactctttcagcaacccgatctcgactccgccctccaaatcgcaagagcggaaatcatcacaaaagagcgcgaagtgtccgagtggaaagacaaatatgaggagtcccgacgcgaagtcatggagatgcggaaaatcgtagccgagtatgagaagactatcgcccagatgatcgaggatgagcagagggaaaaatctgtgagtcatcagaccgtccagcaactcgtgctcgagaaggaacaggccctcgccgatctcaactccgtggagaaaagccttgccgatctctttcgcagatatgaaaaaatgaaggaagtgttggaaggcttccgtaagaacgaggaagtactaaagcgttgcgcccaagagtatctctctcgcgtcaagaaggaagagcagaggtatcaagccttaaaggttcacgccgaagagaagctggatcgcgccaacgcagaaattgctcaggtgagaggaaaggcacaacaagaacaggcagcacatcaggctagcctgaggaaagagcagctgcgcgttgacgctttggagcgcactctggaacagaaaaataaggagattgaagaactcacaaaaatctgtgatgagctgattgccaagatgggcaaatcatag

SEQ ID NO: 138338 - DNA, 8628 bp, synthetic construct
  misc_feature 1..8628: note = Description of Artificial Sequence: Synthetic coding sequence
  source 1..8628: mol_type = other DNA
atggggaacgagaattcaaccagtgacaatcagcgcaccctgagtgcgcaaactccaaggtctgcccagccccccggcaattcacagaacattaaacgcaaacagcaagacactccgggaagccccgaccaccgggatgcctcttccattggctcagtggggctgggtggcttctgtacagcctctgagagctctgcttcattggacccttgcctggtgtctcctgaggtcaccgaacctcgcaaggaccctcagggcgcaagaggcccagagggtagtttactgcccagcccccccccgtcccaagaaagagagcatcctagcagctcaatgccattcgcagaatgtcctcccgagggttgtctcgccagtcccgccgccgctcccgaggatgggccacagacccagtcaccccgtcgcgagcccgcaccaaatgcaccaggggacatcgccgcagctttccctgcggaaagggactcaagcacgccatatcaggagattgccgctgtaccgagtgccggacgcgaaaggcagccaaaagaggagggccagaaatctagcttttctttctcatctggcatagatcagtcccctgggatgtcacctgtccctctaagggagccaatgaaggcacctctatgtggagagggggaccagcctggcggctttgagagtcaggagaaggaagccgccggcggcttcccaccagccgagagccggcaaggcgtagccagcgtgcaggtgacacctgaagcacccgctgctgctcagcagggaactgaatcatctgccgtgctagagaagtcacctctcaagcccatggcacccatcccacaagaccctgcccctagggcttcagacagggaacgcggacagggcgaagctcctcctcagtatctgacagacgaccttgagttccttcgagcatgtcatctacccaggtccaatagcggtgccgcccccgaggctgaagttaacgccgcatcgcaagaatcttgtcaacagccggtgggggcttacctcccccatgccgagttgccctggggcctgccctcccccgccctggtgcctgaggcaggagggagcggcaaggaggcactggacactatcgatgtgcagggacacccacagactggaatgcgtggcactaagcctaaccaggtcgtttgtgtggccgctggcggccagcctgagggcgggcttccagtttcaccagagcccagtctgttaacccccactgaggaggcgcaccctgcctcttctttggccagttttcctgcagctcagatacccatcgccgtggaggaacccgggtcgtcgagccgcgaatctgtaagcaaggccgggatgcctgtgtcggccgacgccgccaaggaggtcgtagatgccggcttagtaggcctagagaggcaagtgagtgacctgggctccaagggcgaacatccagagggggacccgggtgaagtccctgccccatcaccacaagaacggggtgaacacctgaacacagagcagtctcacgaggtccaacccggcgttccccctcctccactgcctaaagagcagtcacacgaggtgcagccgggcgcccccccacccccactgccaaaggctccgagcgagtcagctcggggccctccaggtcctacggacggagccaaagttcatgaggattccacaagccctgcagtagcaaaagagggttcaaggtcaccgggcgattctccaggcggtaaggaagaggcccccgaaccccctgatggtggggaccctgggaatctccagggcgaagacagccaggcattctcgagtaagcgggacccagaagtgggaaaggatgagctgtcaaagccatcttcagacgctgaatcaagggaccaccctagcagtcacagcgcccagccaccaaggaaggggggcgctggccatactgacgggccacacagtcagacagccgaagccgatgcctcgggtctgccgcacaagctgggcgaggaagatccagtgttaccacccgtccccgatggcgccggtgagccaaccgtgcctgagggagccatctgggaagggagcggactacaacctaaatgcccagacacactgcaaagccgcgagggactagggagaatggagtctttccttacattggaaagcgagaagagcgacttccctcccacaccagtggccgaagtggccccaaaggcccaggaaggcgaatcaacactggagatacgaaagatggggtcgtgtgatggggaggggctactcacatcccctgatcagccacggggacctgcctgcgacgcgtccagacaagaattccacgccggggtacctcaccctcctcagggagaaaacttggctgccgacctaggactgacagctctaattctggatcaggaccagcagggtatcccaagttgtcccggtgagggctggatcaggggcgcagccagcgagtggccacttctcagctctgaaaagcatctccagccatcccaggcccaacccgaaacttccatatttgacgtcttgaaggaacaagcccagcctcctgagaacgggaaggaaacatcacctagccatcccggcttcaaggaccaaggcgccgacagctctcagatccatgtccctgtggaaccacaagaggataacaacctgcctacccacggcggccaagaacaggcacttgggtccgaactccaaagccagctgcccaagggaaccttatcagacacacctaccagctccccaacagatatggtctgggagtcctccttgactgaagagagtgagctgagtgcccccaccaggcagaagctccccgccctgggcgaaaaacggccagagggtgcttgcggagatggccagtccagtcgggtgtcccctcctgccgcagatgttcttaaagactttagcctggccgggaactttagcaggaaggaaacgtgttgtaccggccaggggcccaacaagagtcaacaagcactcgccgatgccctcgaagaggggtcgcagcacgaggaagcctgtcagaggcaccctggagctagcgaggctgccgacggttgctctccactgtgggggctttcaaaaagagagatggccagcggaaataccggggaggcacctccctgtcagcctgactcagtggcactgcttgacgccgttccctgcctcccggcactggcccctgctagtccaggcgtcactcctactcaggacgccccagagacagaagcgtgtgatgagacccaggagggacggcagcaacccgtgcccgcgccccaacaaaagatggagtgttgggccacatcagatgcagagtcgcctaaacttttagcctcttttccttcagctggggagcagggcggagaagcgggagcagcagagaccggaggaagcgctggcgccggagaccccggaaagcagcaagcacctgaaaagcctggcgaggccactctgagctgcggattactccagaccgagcactgtttgacctctggcgaggaagcctctacttctgctctcagggagagctgtcaagcggagcatcccatggcttcttgccaggacgctctgctgccggctcgcgagctgggaggcatcccccggagtaccatggattttagcacccatcaggccgtgcctgacccaaaggaattactcctttctggacctcccgaagtggctgctcccgacaccccatatttgcacgttgactccgccgcccaacggggtgctgaagatagcggggtgaaggcagtgtccagtgctgacccccgcgccccgggcgagagtccatgtccagtcggcgaaccgccccttgccctcgagaacgctgcctccttaaaactgttcgcaggttcccttgcaccattactgcagccgggggctgctgggggcgagattcctgcagtgcaagcctctagtgggagcccgaaagcacggaccacggaggggccagtggattccatgccttgcctggaccggatgcctttactggctaagggcaaacaggctaccggagaagaaaaagccgccacggctcccggagctggcgccaaagcgtcaggagaagggatggccggcgacgccgctggggagaccgagggctcaatggagcgaatgggagaacccagtcaggacccaaagcaaggaaccagtggcggggtggatacctcttctgagcagatcgcaacactcacgggctttcccgatttcagagaacacattgctaaaattttcgaaaagcccgttttgggggccctggcaacccctggagaaaaagctggtgccggcaggagcgccgtcggcaaggacctcactaggccgctgggcccagagaagctgttagacggtccaccaggcgtggatgttacattgctccctgccccacccgcacgcctgcaagtggaaaaaaaacaacagttagctggggaggccgagatctcacacctggccctccaagatccagctagtgataaactactgggacctgccggcctgacatgggagagaaatttgcccggcgcaggagtgggaaaggagatggccggcgtgccacctactctgcgagaagacgagcggccggagggaccaggcgctgcctggccgggtctggaggggcaggcctacagtcagctagaaagatcacgtcaggaattggccagtggcctgccatctcctgccgccactcaggagttgccagttgaaagggctgccgcgtttcaggtggcacctcattcccacggggaggaagctgttgcccaggatcggataccctctgggaaacagcatcaggaaacgtctgcctgcgatagtccgcatggagaggatgggcctggggattttgctcatactggggtgccgggccacgtgccacggtctacttgcgccccaagccctcagcgtgaagtgctcactgtgcctgaggcaaatagtgagccctggactcttgatacactgggaggggagcggagacctggcgtcactgccggaatcctggaaatgaggaacgctttgggcaatcagtctactcccgcccctccaaccggggaggtcgcggataccccattggaaccagggaaagtggcaggtgcggccggagaagctgaaggcgatattactctgtcaacggctgagacgcaggcttgcgcctcaggtgacctcccagaggcagggacaacacgcactttctcagtggtggcaggcgatctggttctgcctgggtcatgccaggatcctgcatgtagtgataaggctccaggcatggagggcaccgccgccctgcatggagattcacccgctagaccgcagcaggcaaaggaacagccaggacctgaaagacccatccctgctggtgatggtaaagtctgtgtgtcctccccgccagagccagacgagactcacgatcccaagctacaacacctcgccccggaagaactgcatacggacagagaatctccccgtccagggccttccatgctgccctccgtgccaaaaaaggacgcgccccgtgtaatggacaaggtgactagcgatgaaacacgaggcgctgaggggacagaaaggagtgctaaggatatcggcctttggaaagctatgatgccttctctcgacaccgacaccttggacgtcctggagcgcagagtggtgctgattcagcacgagtttctgcataagaaggaagctaacggccactccaggttcatgtattccagcccagtcgctgacgatattatccaacccgccgccccggctgatctagagagtcctaccctggccgcgagttcatatcacggcgatgtggtgggccaggtctccacagacctgatcgcacagcgaagctcagattcagaggaggcgtttgagacccccgagtctaccacccccgtgaaagcccctcctgcccctcctccacctcctcctgaggtcatacccgagcctgaggtgagtactcagcctccaccggaagaaccaggctgcggaagtgaaacagtccctgttcctgacggacctcgctccgattctgtcgaaggctctccctttagaccgccctcacactccttttctgcagttttcgacgaagacaagccgatcgcatccagtggtacatataacctggacttcgacaacatagaactagtagatacatttcagacactcgagccccgggcctctgacgcgaagaatcaggagggaaaggttaacacccgtcgtaaatcgacggacagcgtacccatcagcaagtctacactcagtagaagcctgtcgctgcaggccagtgattttgatggtgccagtagcagcggcaaccctgaagcagtcgcactagccccggacgcttattccacgggaagctcttccgcttcaagcacacttaagcgtaccaagaaaccccgacccccgagcctgaaaaaaaagcaaaccaccaaaaagccgactgaaacacccccagtgaaagagacgcaacaggagccggacgaggagtcactggttccttcaggtgaaaatctcgcctctgaaacaaagactgagagcgcaaaaactgaagggccaagcccagccctccttgaggagacacctttagaacccgccgtgggacctaaggccgcctgtccactcgatagcgagtccgctgagggagtagtgccccccgcaagtggcggagggcgggtgcagaactctccaccagttggccggaaaacattaccactgaccacagcccctgaagcaggcgaagtgaccccgtcagacagtggaggccaggaggacagtcctgccaagggactgagcgtgcgccttgagtttgactacagcgaagacaaaagctcatgggataatcagcaggaaaacccccccccaaccaagaagatcgggaagaagcctgtggccaaaatgcctttgcggaggcctaagatgaaaaaaactcccgagaagcttgacaatactcctgcatcccccccacggtcccctgctgaaccgaatgacatacccatcgccaaagggacatacacgtttgacatagataagtgggacgaccccaacttcaaccctttttcatccacttctaagatgcaggagtccccaaagctgcctcagcaatcatacaactttgatcccgacacgtgtgatgaatcagtggacccttttaagacatcaagtaagacccctagctccccttctaagtcccctgcttcctttgaaattcctgcctccgccatggaggccaacggggtcgacggcgacggcctgaacaaaccagctaagaaaaagaagacacccctcaaaaccgatactttcagggtgaagaaatccccgaaacgatcaccgttgtctgatcctccatctcaggaccccacccccgctgcaaccccggagacccctccagttatttccgctgttgtgcacgctaccgacgaagaaaaactcgccgtgaccaatcagaagtggacctgtatgacggttgacctcgaagccgacaagcaggattatccgcagccatcagacctgagcactttcgtgaatgaaaccaagttctctagtcctacggaggagctagattatagaaactcctacgagattgaatacatggagaagataggatctagtttgcctcaggatgatgatgcaccaaagaagcaggcgttgtatcttatgttcgacacctctcaggagtcacccgtgaagtcaagccctgttcgaatgtctgagagccccacgccctgctccggaagctctttcgaggagacggaagcactggtcaataccgccgccaagaaccagcatcccgtcccccggggactggcccctaaccaagagtcacatctccaggttcctgagaaaagttcacaaaaggagctggaagccatgggcttggggactccatccgaggctattgagattcgcgaggcagcgcatccaaccgacgtgagcatatcaaagaccgccctctacagtcgaatcggcactgcagaagttgaaaagcctgcggggctgctttttcaacagccagaccttgactccgcactacagatcgctagggcagagattatcaccaaggagcgcgaggtgtccgagtggaaggataaatatgaggaatcacgaagagaggtgatggagatgagaaaaatcgtggctgagtatgaaaagaccatcgcccagatgatcgaggatgaacagagagagaagtccgtgtcccaccagaccgtacagcagctcgtgctggaaaaagagcaggccctggccgaccttaactccgttgagaaatcgctggctgacttgttccgcagatatgaaaagatgaaggaagtcctggaaggtttcaggaaaaatgaggaagtcctgaaaaggtgcgctcaagagtacctgagccgtgtcaaaaaggaggagcagcgttatcaggccctgaaagtgcacgccgaggagaagctcgatcgagctaacgcggagatagcgcaagtacgcggaaaggcacagcaagaacaggctgctcaccaggcctccctgcgaaaagagcagctccgcgtagacgccttggaaaggaccctcgagcagaagaataaggaaattgaagagcttacaaagatctgcgacgagctgattgctaaaatgggcaagtcttag

SEQ ID NO: 138339 - DNA, 3285 bp, synthetic construct
  misc_feature 1..3285: note = Description of Artificial Sequence: Synthetic coding sequence
  source 1..3285: mol_type = other DNA
atgggtaacgaaaactctacttccgataatcagaggaccctgagcgcgcagactcccagaagcgctcagccccctggcaattcacagaacattaagaggaagcagcaagataccccaggatcccccgatcacagggatgcgagctccagcccagttgccgatgatatcatccaacccgcagcccctgcggacttggagtctccaacactcgcagcttcttcctaccacggcgacgtcgtggggcaagtcagtaccgacctgatcgcccagcggtcttcagactctgaagaagccttcgaaactcccgaatctactaccccagtaaaggcccctccagcaccacccccacctccccctgaggtaatcccggaacctgaggtttctacccaacccccaccagaggaaccgggctgcggttctgagaccgtgccagttccggacgggcctagatctgacagtgtggagggctccccgtttcggcccccaagccattccttctctgctgtgtttgatgaggataagcccatagctagttccgggacctacaatctggatttcgacaatatcgagctggtcgacacgtttcagactctggaaccgagagcgagcgatgccaaaaaccaggagggtaaagtcaacactcgccggaagtccacagattctgtgccaataagcaaaagcactctgtcccgctcgctgtccctgcaggccagcgacttcgatggagcttctagttccggaaatcccgaagccgtggcccttgcgccagatgcatatagtacaggttcctcttcagcctcatctacactgaagcgaactaaaaagccaagacctccgagtcttaagaagaaacagactaccaaaaaacctaccgagacccctcctgtaaaggaaacccagcaggagcctgacgaggagtcattagtgccatccggagagaacctggctagtgagactaaaacagagtcagcaaagacggaagggcccagccccgctctgcttgaagaaaccccactggaaccggccgtgggtcccaaagcagcctgtccactcgactcggaatccgcagaaggagtcgtgcctccagctagcggcggcggccgcgtccagaatagtcctcccgtcggaagaaagacactgccccttaccacggctccagaggccggggaggtgacaccatcagattccggggggcaggaagattcgcctgccaagggcctgtctgtgagactggagttcgattatagcgaggataagtcttcgtgggacaaccagcaggagaaccccccccctaccaaaaagatcgggaagaagccagtggctaaaatgcctctcaggagacctaaaatgaaaaagaccccagaaaagttagacaatacaccggcgagcccaccacgctctcccgcggaaccaaatgatattcccattgctaagggaacgtacaccttcgatattgataaatgggacgatccgaattttaacccattcagttctactagcaaaatgcaggaatcacctaaactgccccaacagtcttacaacttcgatcctgacacttgcgatgagtccgtggatcccttcaaaacttcttccaagacacctagctctccttcaaaatcccccgcgagcttcgaaattcccgcatcagccatggaggccaacggcgtggacggggatggcctgaataagcccgcaaaaaaaaagaaaacccctttaaaaaccgacacttttcgagtgaagaagagtcccaagcgctcccctttatctgatcccccttctcaggaccctacacccgcagccacccccgagactccgcccgtgatttctgctgtggtgcacgctacggatgaggagaaactcgcagtgaccaaccaaaaatggacttgcatgactgtggacctggaggcggacaaacaggactatccgcagccgtcagatctcagcacttttgttaatgagacaaagtttagctctccgacagaagaactggactatcgaaatagttatgagattgagtatatggaaaaaatcggctcgtctctgccccaggatgatgacgcccctaagaaacaggccttatatctcatgtttgacactagtcaggagagtccggttaaatcatcacccgttaggatgtcagaatcaccaacaccctgcagcggaagcagctttgaagagacagaggcactggtgaacactgctgctaaaaatcaacatcccgtgccaaggggacttgcccccaatcaggaaagtcacttgcaggtgccagaaaaaagctctcagaaggaattggaagcaatgggtctcggaactccatcagaggctattgagatcacggctcctgagggctcgttcgcgagcgcagatgctctgctcagcagacttgcgcacccagtgtccctatgtggtgctctggattacctcgagcctgatctcgctgaaaagaaccctccattgttcgctcaaaagctacaggaggagcttgagttcgccatcatgaggattgaagccctgaagctcgcccggcagatcgcgctcgctagtcggtcccaccaggacgcaaaacgggaagcagcccatccaacagacgtgtctatttctaagacggcactctacagcagaattggcacagccgaagtggaaaaacccgctggactacttttccagcagccggacctagattctgcactgcagattgctagggctgagataatcacaaaagagagggaagtcagcgagtggaaggataaatacgaagagtctagacgtgaggtgatggagatgagaaaaattgtggctgagtacgaaaagacaattgcccaaatgatcgaagacgaacaacgggagaaaagcgtatctcatcaaaccgtgcagcagctcgtgctcgagaaagaacaggcgttagctgatcttaactccgtcgagaagtcgttggccgatttgtttagaaggtacgaaaaaatgaaggaagtcctggaggggtttcgcaagaatgaggaggtgctgaagcgatgcgctcaggagtatctgtctcgggtgaagaaggaggagcagcggtaccaggccctcaaggtccacgccgaggaaaagctggaccgtgccaacgctgaaatcgcccaagttagggggaaggcacaacaagaacaggccgcgcaccaggcctcccttcggaaagagcagctccgcgtggatgctctcgagcggaccctggagcaaaaaaacaaagaaattgaggagctcactaagatttgtgacgagctcattgcaaagatggggaagagttag

SEQ ID NO: 138340 - DNA, 2517 bp, synthetic construct
  misc_feature 1..2517: note = Description of Artificial Sequence: Synthetic coding sequence
  source 1..2517: mol_type = other DNA
atgtcacttcaagtgctcaatgataaaaacgtgtctaacgaaaagaacaccgagaattgcgactttttgttctcaccgcccgaagtgacggggcggtcctcagtcctgcgagttagccagaaagagaatgtcccgcccaaaaacttagcaaaagcaatgaaggtaaccttccagactcctctccgggatccacaaacacaccgcatcctgagcccatcaatggctagcaagctagaggcgccgtttacccaggatgacacccttggcctggagaacagccacccagtttggacacagaaagagaaccagcaactaatcaaagaagtggatgctaaaacaactcacggcatcctgcagaaaccagtagaggctgacacggatctgctgggtgatgcatcccctgcctttggctccggatcaagttccgagtcaggcccgggcgcacttgccgatctcgattgttccagttcatcacaaagcccaggttcatcggaaaatcagatggtctccccgggcaaggtctccggatcccccgaacaggctgtggaagagaacctgagcagctacagtcttgataggcgagtcactcctgcatctgaaaccctggaagatccatgtcgcaccgagtctcaacataaagctgaaactcctcacggagcggaagaggaatgtaaggccgagacaccccacggtgccgaggaagaatgccgacacggtggcgtttgcgcaccagcagcagtggcaacaagtccccctggcgcaataccaaaagaagcttgcggaggcgctccattgcagggtcttcccggtgaagctctgggctgcccagcaggggtggggactcccgtgcctgccgatggaacacagaccctcacctgtgcccacacgtccgcgccggagagtacagcccccacgaaccacctggtcgccggcagggccatgactttgtctcctcaagaagaggtcgccgccggacagatggcgtcctcctcccggtctgggccagtgaagctcgagttcgatgtgtccgacggtgctacaagcaaacgcgccccaccaccccgcaggttgggcgagcggagtgggctaaaacctcctttgcgtaaggcagccgttcgacagcagaaggctccccaagaagttgaagaagacgatggcagaagcggcgccggggaggacccccccatgcccgcatcacggggatcatatcacctggactgggataagatggatgaccctaactttataccttttggcggagatactaaatccggatgctccgaggcacagcctccagaaagtcccgaaactagattgggccaacctgcggcagagcaattgcacgcaggaccagctacggaagaaccaggaccgtgcctgtctcagcagttgcactctgccagcgcagaggacaccccagtcgtgcagctggcagccgaaacgcccacagctgagtccaaagaacgtgctcttaatagtgcatccacatcacttcccacttcatgccccggaagcgagccagtgcccacccatcagcagggccagccagctcttgagctcaaggaggaatcattcagagaccccgctgaagtgctgggtaccggtgccgaagttgactacctggagcagttcggaacgtccagctttaaggagtcggcactgcggaagcaatccctgtatctgaagtttgaccccctgctcagggacagccctggccgacctgtgcccgtggcaactgagacatcgtcaatgcatggtgcaaacgaaacaccttctgggcggcctcgggaggctaagctggtggagtttgatttcttaggtgccctcgacatcccggtgccggggccgcctcctggcgtccctgcgccaggaggcccaccattatcaactggcccaatcgtggacctgttacaatactcacagaaggatctcgatgccgtcgttaaggccactcaggaagaaaatcgggaactccgctctcgctgcgaagaactgcacggaaagaacctagaactgggaaagatcatggatcggtttgaggaggtggtctatcaggccatggaggaggtccagaagcaaaaagagctgtctaaagcagagattcagaaggtgctgaaagaaaaggaccaactaacgaccgatcttaactccatggagaaatcttttagtgacctgtttaagaggttcgagaaacaaaaagaggtaattgagggatatcgtaagaatgaggaaagcctgaaaaagtgcgttgaagattatctggcacgcattacccaggaaggtcaacggtatcaagccctcaaagcccacgctgaggaaaaattgcagttggctaacgaggagattgcccaggtgcggtctaaagcacaggccgaggcactcgcattacaggcttctctacggaaagaacagatgaggatccaatctctggagaagacagtggagcaaaagacaaaagaaaatgaagaactgacacgaatatgtgacgacctcatcagcaagatggaaaaaatttag

SEQ ID NO: 138341 - DNA, 438 bp, synthetic construct
  misc_feature 1..438: note = Description of Artificial Sequence: Synthetic coding sequence
  source 1..438: mol_type = other DNA
atgagtttgcaggtgttgaatgataagaatgtttccaatgagaaaaacacggaaaattgcgactttctgttctccccccccgaggtcactgggaggagtagcgtactcagggtgtctcagaaagaaaatgtgcccccaaagaatctggccaaagctatgaaggtcacctttcagacacctctgcgggatccacagacacacagaatactttccccaagcatggcatcaaagctcgaggccccttttacccaggatgacacactgggtttggagaactcccacccggtgtggactcagaaggagaaagctgcagcttttagcttatccggtggacatgcctgtggggccgtaggtagcagagatcccaattctagggaacagggcgaaagcctggagctctgccagcaccttgcaagccataagttgagtagacaatag

SEQ ID NO: 138342 - DNA, 666 bp, synthetic construct
  misc_feature 1..666: note = Description of Artificial Sequence: Synthetic coding sequence
  source 1..666: mol_type = other DNA
atgtcacttcaggtgctgaatgataagaatgtgtctaatgagaagaatacagagaactgtgattttttgttttcaccccccgaggtcaccggtaggagctcagtcttaagagttagtcagaaagagaacgtcccccccaaaaacctggcaaaggccatgaaagtgacattccaaactccactccgcgatccgcagactcatcgaatcctctctcctagtatggcttcgaagcttgaggctccattcactcaggatgacacactcgggttagaaaattcccaccctgtctggacccagaaggagaaccaacaacttattaaagaagttgacgccaagaccactcacggcattctgcagaagcccgtagaggcggacactgatctgcttggagatgctagtccagctttcggttccggctcctcttccgagagtggtcccggagcccttgccgacctggactgtagtagctcatctcagagccccggctcatccgagaatcagatggtctcccccggtaaagttagcgggtcacccgagcaggccgtggaagagaacctgtcctcatactctttggataggagggttacacccgcatcagagaccctcgaggacccatgcaggacggagtcacaacataaggcagaaacccctcacggggctgaatag

SEQ ID NO: 138343 - DNA, 696 bp, synthetic construct
  misc_feature 1..696: note = Description of Artificial Sequence: Synthetic coding sequence
  source 1..696: mol_type = other DNA
atgagcttacaggtgttgaatgataaaaatgtgtcaaacgaaaagaatacagaaaactgtgacttcctattctcaccgcccgaggttacaggcaggtcctcggtattgagggtgtctcagaaggagaacgtgccccccaagaacctggccaaagcaatgaaggttaccttccagactcccctcagggatccgcaaacacaccgcattctctcacccagcatggccagtaaattggaagctcccttcacacaagacgataccctcgggctcgagaattcccatccagtatggactcagaaagagaatcagcagcttataaaggaggtcgatgccaaaacgacccacggcattctccaaaaacctgtcgaagccgacaccgatctgttgggcgacgcatctcctgccttcgggagtggctctagttctgaatcgggccctggagccctcgccgatctggactgttcatcctcaagtcagagtcccggttcatcagagaatcaaatggtctcaccaggtaaagtcagcggctccccagaacaggcagtggaggaaaatctcagttcctattcccttgaccgccgcgtgactccagcctccgagaccctcgaggacccttgtcgtacagagtctcagcataaagcagagacaccccatggggccgaggaggaatgtaaggccgaaacgcctcacggctag

SEQ ID NO: 138344 - DNA, 606 bp, synthetic construct
  misc_feature 1..606: note = Description of Artificial Sequence: Synthetic coding sequence
  source 1..606: mol_type = other DNA
atggcaaacaagggtcccagctacggcatgtcgagagaagtccagagcaaaatcgagaaaaaatacgacgaagagctggaagagcgtctggtggagtggatcattgtgcagtgtggaccggacgttggcaggccggataggggtcggttggggttccaggtctggctgaagaacggcgtgatcctgagcaaactagtgaatagtctgtatcctgatggctccaagcctgtcaaggtgcctgagaaccctcctagcatggtgtttaaacaaatggagcaggtcgcacagtttctgaaagccgccgaggattatggagtcattaagacagatatgttccagacagtggacctgtttgaaggaaaggatatggccgcggtgcagcgcaccctgatggcgctggggtctcttgctgtgactaaaaatgacggtcattaccggggagatcccaactggttcatgaagaaagcccaagagcacaaaagggaatttacagaatcacagctgcaggagggtaagcatgtaattgggctgcagatgggatcgaacagaggagcttctcaggctggcatgacaggatacgggagacctcggcagattatttcgtag

SEQ ID NO: 138345 - DNA, 108 bp, synthetic construct
  misc_feature 1..108: note = Description of Artificial Sequence: Synthetic coding sequence
  source 1..108: mol_type = other DNA
atggccaataagggcccgtcttatggaatgagccgcgaggtccagccctccagactagcatgtctgacacatacccgtgtggtcccatcggccctagctaaattgtag

SEQ ID NO: 138346 - DNA, 606 bp, synthetic construct
  misc_feature 1..606: note = Description of Artificial Sequence: Synthetic coding sequence
  source 1..606: mol_type = other DNA
atggccaacaaaggcccttcttacggcatgagtagagaggtacaaagtaagattgaaaagaagtatgacgaggaattggaagaacggcttgttgagtggataatcgttcagtgtggtccggacgtcggccgaccagacagaggcagactcggttttcaagtgtggctaaagaatggcgttatcctcagcaaactggtgaattcgttatatcctgacggcagcaaacctgtcaaggtgcccgagaatccccccagtatggtctttaaacagatggagcaggtggctcagtttctgaaggccgctgaggactacggggtcattaaaactgatatgtttcagaccgtggatctatttgaaggtaaagatatggccgccgtgcagagaactctcatggccttggggtccctagcagtgaccaaaaacgatggtcactacaggggcgatccaaattggtttatgaagaaggctcaagaacacaaaagagaattcactgaatctcagctgcaggaggggaagcacgtcattggactccagatgggctccaaccgtggtgcttctcaggccggcatgaccggctacggtcgaccacggcagatcattagttag

SEQ ID NO: 138347 - DNA, 606 bp, synthetic construct
  misc_feature 1..606: note = Description of Artificial Sequence: Synthetic coding sequence
  source 1..606: mol_type = other DNA
atggctaacaaggggccatcctacgggatgtcgcgcgaggtccagtcgaaaatcgagaagaaatacgacgaggaactggaagaaaggttagtggaatggattattgtccagtgcggtcctgacgttggccgacctgatcgtggccgccttggctttcaggtgtggctgaagaacggtgtaattcttagcaagctagtgaatagcctgtacccagatggatcaaaacccgtgaaggtgcccgagaaccctccttctatggtgttcaagcagatggaacaggtggcacagttcctaaaggcagccgaggactacggcgtgattaaaactgatatgttccagactgtcgatctgtttgaagggaaggatatggccgctgttcagcggaccttaatggcccttggttctctggccgtcacaaagaacgacgggcactataggggtgatcctaactggtttatgaagaaagcgcaggagcacaaacgggagtttactgaatctcagctccaggagggaaagcacgttatcggcctgcaaatgggcagcaacagaggcgcaagccaggctgggatgactggctatggacgccctcggcagattatctcctag

SEQ ID NO: 138348 - DNA, 276 bp, synthetic construct
  misc_feature 1..276: note = Description of Artificial Sequence: Synthetic coding sequence
  source 1..276: mol_type = other DNA
atggcaaacaagggcccatcttacggcatgtcacgcgaggtgcagtctaaaatcgaaaagaagtatgacgaggagctggaggaacgccttgtggagtggataatcgtccagtgcgggccagacgtgggccggccagaccgcggacggctcgggtttcaagtttggcttaagaatggcgttatcctgagtaaactggtgaatagcctatacccagatgggtctaaaccagtgaaagtgccagagaacccgccatctatggtttttaagcaaatgtag

SEQ ID NO: 138349 - DNA, 606 bp, synthetic construct
  misc_feature 1..606: note = Description of Artificial Sequence: Synthetic coding sequence
  source 1..606: mol_type = other DNA
atggctaacaaagggccctcatacggtatgagcagggaagtgcagtctaagatagaaaaaaagtatgatgaggaactcgaggagcgcctcgtggagtggattatagtgcagtgtggtcctgacgttggcagaccggaccggggaaggctcggtttccaggtttggctgaagaatggagtcattctgtcaaagctcgtgaactcgctgtatcccgatggaagtaaaccagtaaaggtgccggaaaacccaccctctatggtgtttaagcagatggagcaggttgcccagttcctcaaggcagcagaggactacggggtgatcaaaaccgacatgtttcagactgtggacctgttcgaaggaaaggatatggcagcagtacaacgcacgctaatggctctgggctcactggcggttaccaaaaatgacggccactatcggggggaccctaactggttcatgaagaaggcacaggagcataagagggaatttaccgagagtcagttgcaggaggggaagcatgtgatcgggctgcagatggggtccaatcgcggcgcttctcaagcaggcatgacaggctatggcagaccacgccagattattagctag

SEQ ID NO: 138350 - DNA, 606 bp, synthetic construct
  misc_feature 1..606: note = Description of Artificial Sequence: Synthetic coding sequence
  source 1..606: mol_type = other DNA
atggccaataaggggcccagttacggcatgtcccgggaggtccagtctaaaatcgagaagaagtacgacgaggaactcgaggaaagactagtcgaatggatcattgtccaatgtggacctgacgtgggtaggccagatcggggccggctggggtttcaagtatggttaaagaatggagtcattttatccaaattggtgaacagtttgtaccccgacggctctaagcccgtgaaggtccccgagaacccaccatctatggtgttcaaacagatggaacaggtggcacagttcctgaaggcagccgaggactatggcgttatcaagaccgacatgtttcagaccgtagacttgtttgagggcaaggatatggctgccgtccagcggactcttatggctcttgggtctctcgctgtgaccaaaaacgatggtcactaccgcggggaccccaattggttcatgaagaaggcgcaggagcataaaagagagttcaccgaatctcagctgcaggaaggaaagcacgttatcggtctgcagatgggaagtaaccgaggcgcctcccaggccggaatgaccggctacggcaggcctagacagataatttcctag

SEQ ID NO: 138351 - DNA, 600 bp, synthetic construct
  misc_feature 1..600: note = Description of Artificial Sequence: Synthetic coding sequence
  source 1..600: mol_type = other DNA
atggccaatagaggcccagcatatggtctgtcccgggaggttcagcagaaaattgagaaacagtacgacgccgacttggagcagatcctaatccaatggattactacgcagtgccggaaggacgtagggaggccccaacccgggagagagaattttcagaactggttaaaagatgggactgtgctttgcgagctgattaacgcattataccctgaaggtcaggccccagtgaagaagattcaggcttccactatggctttcaaacagatggagcagatttctcagttcctgcaggcagccgagcgttatggcattaacactaccgacattttccaaaccgtggacctatgggaaggaaagaacatggcctgcgtccagcggacattgatgaatttgggtgggcttgcagtagcccgtgacgacgggttgtttagtggagaccccaactggttccctaaaaaaagcaaggagaatccaaggaatttctcagataatcaactgcaggagggtaaaaacgttataggtctgcagatggggactaaccgcggcgcaagccaggccggcatgaccggatacgggatgccaagacaaatactctag

SEQ ID NO: 138352 - DNA, 663 bp, synthetic construct
  misc_feature 1..663: note = Description of Artificial Sequence: Synthetic coding sequence
  source 1..663: mol_type = other DNA
atgagcgccttcagcttagccttggcccttgtctcatctcctcagcctcccccgccaatagggatggctaatcgcgggcctgcctatggcctttctagagaggttcaacagaagattgagaagcagtatgacgcagaccttgaacagatcttaattcagtggattactacgcaatgtaggaaggatgtcggccgaccccagcccggtcgggagaattttcagaattggctgaaagacgggacagtgctctgcgagctgatcaacgccctgtatcctgagggacaggcaccagtgaaaaaaatccaggccagcaccatggcttttaaacagatggaacagatttcacagttcctgcaggccgctgaacgatacggcattaacaccaccgatatctttcagaccgtagacctctgggagggtaaaaatatggcctgcgtgcagcggactctaatgaacctcgggggactggctgttgccagagacgatggactttttagcggagaccctaactggtttcccaagaagtcaaaggagaaccctagaaattttagtgacaaccagctgcaggagggcaaaaatgtcatcggattgcaaatgggaacgaataggggcgcctcccaagctggtatgactgggtatggaatgccaaggcaaatcttgtag

SEQ ID NO: 138353 - DNA, 600 bp, synthetic construct
  misc_feature 1..600: note = Description of Artificial Sequence: Synthetic coding sequence
  source 1..600: mol_type = other DNA
atggcaaatcgagggcccgcatatggactcagccgggaggttcaacagaaaattgaaaaacagtatgatgcggatcttgaacagatactcatccaatggatcacgacccagtgccgcaaagatgtgggccgccctcagcctggccgtgagaacttccagaattggttgaaggatggaacggtcctctgtgaacttattaacgcgctctaccccgaaggacaagcccccgtaaagaaaatccaggctagtactatggcattcaaacagatggaacagataagccaatttttgcaggcagccgaacgatatggcattaatacgacagatatctttcagaccgtcgatctgtgggaaggcaagaacatggcctgtgtacaaagaactctcatgaatttaggagggctcgccgtggcaagagatgacggcctgttcagcggcgatcccaattggtttccaaagaagagcaaagagaaccctaggaacttcagcgataaccagttacaggaaggaaaaaatgttattggactgcagatgggtacaaacaggggggccagccaggctggtatgacaggatacggcatgcccaggcagatactgtag

SEQ ID NO: 138354 - DNA, 564 bp, synthetic construct
  misc_feature 1..564: note = Description of Artificial Sequence: Synthetic coding sequence
  source 1..564: mol_type = other DNA
atggccaacagagggccggcatatgggctgagcagagaagtgcagcagaaaatcgaaaaacagtacgacgcggacctggagcagatactgattcagtggatcactacccaatgcagaaaggatgttgggaggcctcagcccggcagggagaatttccaaaattggctgaaagacgggacagttctgtgcgaactgattaacgctctctaccctgagggccaagcccctgtcaaaaaaatccaggcatcaaccatggccttcaaacagatggaacagatttcacagttcttacaggctgcagaacggtacgggataaacaccacagacatcttccagaccgtcgatttatgggaaggcaaaaacatggcttgtgtgcagcggacattaatgaatcttggcggacttgccgtggcgcgagatgacgggctattcagtggagacccgaattggtttcccaagaagtcaaaagaaaacccacggaacttcagcgacaatcagctgcaagaaggtaaaaatgttatcgggcttcagatgggcactaatcggggagccagtcaagcatag

SEQ ID NO: 138355 - DNA, 3861 bp, synthetic construct
  misc_feature 1..3861: note = Description of Artificial Sequence: Synthetic coding sequence
  source 1..3861: mol_type = other DNA
atgtctcacctggttgatccaacctccggagacctacccgtgcgggacatcgacgccataccccttgtcctccccgcctctaaaggaaagaatatgaagactcagcctcccctgtcgcgaatgaacagggaggaactagaggattctttttttcggcttcgcgaagaccacatgttggtgaaggagctttcgtggaaacagcaggacgagatcaaaagacttagaacaacacttctgaggttaacagccgccggaagagatctgcgcgttgcggaagaggccgccccgctatccgaaacagcacgccggggacagaaggctgggtggagacagcgcctctccatgcaccaaaggccccagatgcaccgactacagggtcacttccattgtgtgggaccagctagccctcgtcgagcacagcctcgtgtacaggtgggacacagacagctgcacacagccggtgcccccgtacctgaaaagcccaagcgggggccaagagaccgcttgtcatacacagcacccccctcatttaaagagcacgccacaaacgagaatagaggtgaggtggcctccaagccctccgagctggtatctggcagcaacagcattatctccttttctagcgtaatctcaatggccaaaccgattggactttgtatgccaaactccgcccatatcatggcctctaataccatgcaggtggaggaacctccaaagagccctgaaaagatgtggcccaaagacgagaactttgagcagcggagctcccttgaatgcgcccaaaaagcagccgagctgagagcaagtataaaagagaaagtggagttgatcaggctgaagaaactgctccatgaacgtaacgcatcccttgtgatgaccaaggcccaactcactgaagtgcaggaggcctgtacatttctgctgactcaaaaccagggaatcctcagcgcagcccacgaggcacttctaaaacaagttaacgagctgcgagccgagctgaaggaagaatcaaaaaaggcggtgagccttaaatctcagctcgaagatgtgtctattctccaaatgacgctcaaggaattccaggaacgtgtcgaagaccttgaaaaggaaagaaagctgctgaacgacaattatgataaactcctggaaagcatgttggatagctccgacagctctagtcagcctcactggtccaatgagctgatcgccgagcagcttcagcagcaggttagccagttgcaagaccagctggacgccgagctggaggataaaaggaaggttctactggaactgagcagggaaaaggcccaaaatgaggacctcaagttggaggtgacaaatatcctgcagaagcacaagcaggaggtcgaactgctgcagaatgcggcaacaatttctcagccaccagatcgtcagtccgaacctgcgacccaccccgccgtgctccaggaaaatacccagattgaaccatccgagccaaaaaatcaggaggaaaagaagctttctcaggtgctgaatgagctgcaggtgagccacgctgaaaccaccttagagttggagaagacccgggacatgttgattctgcagcgcaaaattaatgtctgctatcaagaagagctggaagctatgatgactaaggcagataatgataaccgggaccacaaggagaaactggagcgactcacgagactgttggatctgaaaaataacaggatcaaacagctggaaggcatcttgcggtcccacgatctcccaactagcgagcagcttaaggatgtcgcttacggtacacggcccctctctctgtgtttagaaaccttaccagctcacggcgacgaagataaggtggatattagccttttacaccagggagagaatctgtttgaactgcacattcaccaagcctttctaaccagtgctgccctggcccaggccggagacacccagcccactacgttctgcacctactcgttttacgactttgagacacactgtactcccctgtctgtggggcctcaaccattgtatgattttacttcccaatatgtgatggaaaccgatagtctgtttctgcattaccttcaggaggctagcgcccgcctggatattcaccaggcaatggccagtgagcactccacactcgcagctgggtggatctgcttcgatcgtgtacttgagacagtagaaaaggtacacgggctcgcaacacttatcggcgccggcggtgaggaatttggagtcctagaatattggatgaggctaaggtttcctattaagcccagcctgcaggcttgcaacaaaaggaaaaaggcccaggtttatcttagtacagatgtgcttggcggcaggaaagcgcaggaggaggagtttcgaagcgagagctgggagccacagaatgaactttggatcgagatcaccaaatgctgtggcctgaggtccaggtggctcggtactcagccctctccttacgctgtttacagatttttcacatttagcgatcatgacacagccattatccccgccagcaataacccgtacttccgcgatcaggcacgttttccagtgctcgtgacctctgatctagaccactacctgcgccgggaagcactgagtatacacgtgtttgacgatgaggacctagaacctgggagctacttgggcagggcccgggtgcctctgctgccacttgccaaaaatgagagtataaagggcgatttcaacctgacagatccggccgagaagccgaatggcagcatccaggtccagctcgattggaaattcccctatattcctcccgagagttttctgaaaccggaagctcaaactaaaggaaaggatacaaaagattcaagcaagatctccagtgaggaggagaaggcaagtttcccttcccaagaccagatggcatcccctgaggtcccaatcgaggcaggtcagtatcggtcaaagcgtaaacctcctcatggaggggaaagaaaggagaaggaacaccaggtcgtctcttattcacggcgcaagcatggcaaacgcattggtgtgcaggggaagaataggatggagtatttgtccttgaacattttaaatggtaacactccggagcaagtcaactacactgaatggaaattttccgagacgaacagtttcataggagatggcttcaagaatcaacatgaagaagaagagatgactttgtctcactccgcactgaagcaaaaagagccactgcaccccgtgaatgacaaggagtcatccgaacagggctctgaagtcagtgaagcacaaaccacggatagtgatgacgtgatcgtaccaccgatgtcccaaaaatatcccaaagcggacagcgaaaagatgtgtatcgaaattgtgtccttagccttctatcctgaggcagaggtgatgtcggatgagaatattaaacaggtctatgtggagtacaagttctatgatctgcctctgtctgagacagagaccccagtctcgctgaggaagcctagggctggggaagaaattcacttccatttttcgaaagttatcgacctcgaccctcaagagcagcagggcaggcgaaggttcctatttgacatgttgaatggtcaagaccctgaccagggccacttaaaattcacagttgtgagtgatccattggatgaggaaaaaaaggaatgtgaagaggtgggttatgcctatctgcaactgtggcagattcttgagtcggggagagacatcttggaacaggagctagacattgtgagccctgaggatctcgccaccccaatcgggagattgaaagtgtcccttcaggctgcagcggtgctccacgctatatataaagaaatgaccgaagatcttttctcctag

SEQ ID NO: 138356 - DNA, 1128 bp, synthetic construct
  misc_feature 1..1128: note = Description of Artificial Sequence: Synthetic coding sequence
  source 1..1128: mol_type = other DNA
atgaaacgtccagatcttcctagcggatttgacggttggcaggtcgttgatgctaccccccaagaaacctcatctggcattttttgttgcggcccctgttcagtcgagtctatcaaaaacggattggtgtatatgaagtacgacaccccatttatctttgctgaggtgaattcagataaagtttactggcagagacaggacgacggaagctttaagatcgtctacgtggaagaaaaagcaatcggaacccttattgtgaccaaggcaatctcctctaacatgcgcgaagacataacttacctctacaagcacccagaagggagtgacgcagaacggaaggcagtcgagactgccgcggcccatgggtccaagccgaatgtttatgcaaacagaggtagcgccgaggacgttgcaatgcaggttgaagctcaggacgcggtgatgggccaagatctgatggtgagtgtaatgctcatcaaccactcatctagccggcgtacagtgaagctgcacctgtacctatctgtcactttctatacgggtgttagcggcacgatctttaaagaaaccaagaaagaggtcgagctcgcacctggcgcttccgaccgcgtgaccatgccagtggcgtataaagaatatcgccctcacttggtggatcagggggctatgcttctcaatgtgtccggacatgtcaaggagagtggtcaagttctggctaagcagcatacctttcggctgagaacacccgacctctcccttacgcttctgggcgctgcagtggttggacaggagtgtgaggtccaaattgtgtttaaaaaccctcttcctgtcacacttaccaatgtagtattccgcttggaaggctctggattacaacgcccaaagatattgaatgtgggtgatattggtggaaacgagactgtgacccttagacagtcctttgtgcctgtgcgccctgggccccgccaactaatcgccagccttgatagtccccagctctctcaggtgcatggagtcattcaggtggatgtcgcacctgcccccggagatgggggattctttagcgacgccggaggagattctcacttgggggaaaccattcccatggccagcagaggaggtgcttag

SEQ ID NO: 138357 - DNA, 408 bp, synthetic construct
  misc_feature 1..408: note = Description of Artificial Sequence: Synthetic coding sequence
  source 1..408: mol_type = other DNA
atgatggatggaccccggtctgatgttggccgctgggggggcaacccactccaaccaccaaccactccttcccctgagcctgagcccgaacccgatggccgctcgagacgcgggggcggacgtagtttttgggcgcgctgctgtggatgttgctcttgtcgcaacgccgcggatgatgattggggacccgagcccagtgattctcggggacggggcagcagttccggaactaggcggcccggctcaagggggtccgactccaggcggcccgtgtcacgcggaagcggagtgaacgccgcaggagacgggaccatccgggagggcatgctggtagtgaatggcgtggatctgttgtcatctagatccgaccaaaatcgaagagagcaccacactgacgagtacgagtag

SEQ ID NO: 138358 - DNA, 129 bp, synthetic construct
  misc_feature 1..129: note = Description of Artificial Sequence: Synthetic coding sequence
  source 1..129: mol_type = other DNA
atgatggacggccctcggagcgacgtcggccgatggggaggcaaccctctgcagccccctacaaccccgtcccctgagccagaacctgaaccagacggaagatctcgccggggcggtggtagatcctag

SEQ ID NO: 138359 - DNA, 198 bp, synthetic construct
  misc_feature 1..198: note = Description of Artificial Sequence: Synthetic coding sequence
  source 1..198: mol_type = other DNA
atgatggacgggcctaggtcggatgtgggaaggtgggggggaaatccattgcagccccccactactccttcacccgaacccgagcctgagccagatggccgatctagacgaggcggcggccgatcattttgggcacgatgttgtggctgttgttcctgccgcaatgccgctgacgatgactggggaccagaaccctag

SEQ ID NO: 138360 - DNA, 153 bp, synthetic construct
  misc_feature 1..153: note = Description of Artificial Sequence: Synthetic coding sequence
  source 1..153: mol_type = other DNA
atgatggacggtcctcggtccgacgtgggcaggtggggcggcaacccactgcagccccccacaacgccctcaccggagcccgaaccagaacctgacggtcgctcccgccgtggcggtggccgaagtttctgggcacgttgctgtggctgttag

SEQ ID NO: 138361 - DNA, 30 bp, synthetic construct
  misc_feature 1..30: note = Description of Artificial Sequence: Synthetic coding sequence
  source 1..30: mol_type = other DNA
atgatggatggacctagatccgacgtctag

SEQ ID NO: 138362 - DNA, 2064 bp, synthetic construct
  misc_feature 1..2064: note = Description of Artificial Sequence: Synthetic coding sequence
  source 1..2064: mol_type = other DNA
atggctgaggagttagtgctcgaaaggtgcgacttggagctggagactaatggacgcgaccaccataccgccgacttatgtcgtgagaagctcgttgtacggcggggccaacccttttggcttacactgcactttgagggacgcaattacgaggctagcgtcgactctctgactttcagcgtcgttaccggccctgcccccagtcaggaagccggcactaaggcccgcttccctctgagagacgccgtggaggagggcgactggacagccacggtggttgatcaacaggactgtacactgtcactccagctcactactcccgcgaatgccccaattgggttatacaggttatcactagaggcctccacaggctaccagggttcctccttcgttctgggacactttattctcctgttcaatgcctggtgccctgcagacgctgtgtatctcgactcagaggaggaacgccaggagtatgtgctgactcaacaaggatttatctaccaaggatcggcaaagttcataaagaatatcccttggaacttcggacagtttgaagacggtattttggatatctgcctgatcctgctggacgtgaatccaaagtttttaaaaaatgctggacgcgactgctctcgtcgctcatccccagtctacgtcggccgcgtagtgtcgggtatggtgaattgcaacgacgaccaaggggtgttgctcggccgatgggataataactatggcgacggagtttccccaatgagctggatcgggagcgtcgatattctccgtagatggaagaaccatggctgtcagcgagtgaagtatgggcagtgttgggtatttgcagcggtggcctgcaccgtgttgcgctgtctcggcattcctacaagggtggtgacgaattacaattctgcccacgaccagaactcgaacctgctgatcgaatattttagaaatgagttcggcgagatccaaggggacaagtccgaaatgatctggaactttcactgctgggtggaatcttggatgaccagaccggacttgcagcccgggtatgaagggtggcaggctctggatcccacgccccaagagaagtccgagggtacatactgttgcggccctgtgcccgtccgggctattaaagaaggcgacctgagcactaaatatgacgctccctttgttttcgctgaagtgaacgcagatgtcgtggattggatccagcaagatgatggttcagttcataagtctataaaccggtccctcatcgtgggcttgaagatttctaccaaatccgtggggagggacgagcgcgaggatatcacacacacctacaagtatccggaaggtagcagtgaagagcgagaggcctttacacgtgcgaaccatcttaacaagctcgccgagaaggaggagaccggtatggccatgagaattagggtgggccagtcaatgaacatgggcagcgactttgatgttttcgcccatatcaccaataacacggccgaagagtacgtttgtcgattactgctgtgtgctagaacagtctcatataacggaattctggggccagaatgcgggaccaagtacctcctgaatctaaatttggagcccttctcagaaaagtctgtccctctgtgcatcctgtacgagaaataccgcgattgtttgacggaaagcaatctgatcaaggtgagggccctactggtcgagccagtcattaattcctatctgttggccgagagggatctctacctggaaaatccggaaatcaaaataaggattttaggggagccgaagcaaaagcgtaaacttgtggccgaagtgagcctacaaaacccactcccagtggccctagagggatgcacctttaccgttgagggtgccggcttaacagaggaacagaagacggtggaaatcccggaccctgttgaggccggcgaggaggtaaaagttcggatggatttattgcctctgcatatggggctgcacaagttggtcgtcaacttcgagtccgataagctaaaggctgtgaagggcttcaggaacgtcatcatcggccccgcctag

SEQ ID NO: 138363 - DNA, 846 bp, synthetic construct
  misc_feature 1..846: note = Description of Artificial Sequence: Synthetic coding sequence
  source 1..846: mol_type = other DNA
atggcggaagagctggtattggaaagatgcgatctcgagctcgagacaaacggtcgcgatcaccacacagcggacttatgccgcgaaaagctagtagtgcgtcgcgggcaacctttctggcttactctacattttgagggacgtaattacgaagcatctgtggattccctcaccttctcagtggtaactgggccagcccctagtcaggaggccgggaccaaagcacggtttccgctgagggatgccgttgaagagggggactggacggctaccgttgtggaccagcaagattgcactctgtccctccagttgactacacctgcaaacgcccccatcggtctttatcgcctcagcctggaggccagcactggttatcagggctccagctttgtacttggccactttattctgttatttaatgcctggtgtcccgcagacgcggtgtatcttgacagtgaagaggagaggcaggaatacgttctaacacagcagggattcatataccaaggatcggccaagttcatcaagaatatcccgtggaacttcgggcaatttgaggacggaattcttgacatttgtctcattctcctcgacgtgaacccgaagtttctgaagaatgcaggcagggactgcagtcgacgcagcagcccggtctatgtgggccgggtcgtgagtggtatggttaactgtaacgatgaccagggagttctgctgggacgatgggacaataactacggagacggcgtgtcaccaatgtcctggattgggtctgtagatatattgaggcgctggaaaaatcacggctgtcaacgagtaaaatacggacaatgctgggtgttcgcatag

SEQ ID NO: 138364 - DNA, 483 bp, synthetic construct
  misc_feature 1..483: note = Description of Artificial Sequence: Synthetic coding sequence
  source 1..483: mol_type = other DNA
atggcggaggaactggtgctcgaacgttgtgatctggaattggagactaatggtcgggatcaccacaccgccgacttatgcagggagaaacttgtcgtgcgccggggtcagccattctggctcacgctgcactttgagggaaggaattatgaggcctctgtggacagtctgacattttccgttgtgacgggccctgccccctcacaggaagcggggacaaaagccagatttcctctgagagatgccgttgaagagggagactggaccgccaccgtggtggatcagcaagattgtactctttcactgcaactgacgaccccggccaatgccccaatcgggctctatcgactgtctcttgaagcctcaaccgggtatcagggaagctcattcgtgctgggtcatttcatcctacttttcaatgcgtggtgccccgctgacgccgtgtacctcgattcagaagaagaaaggcaggagtacgtgtag

SEQ ID NO: 138365 - DNA, 1821 bp, synthetic construct
  misc_feature 1..1821: note = Description of Artificial Sequence: Synthetic coding sequence
  source 1..1821: mol_type = other DNA
atggcagaggagttagtgctcgaaagatgcgacctggagctggagacaaatggtagagaccaccacactgccgacctctgtcgggaaaagcttgttgttcgaagaggacagccattttggttgacactccacttcgaagggcgaaattatgaagctagcgtggattccttgacctttagcgtcgtaacagccgacgccgtgtacctagactctgaggaggaacgtcaggagtacgtgctaactcagcagggtttcatctatcaagggagtgctaagttcattaagaacataccctggaatttcggccaattcgaggacgggattctagacatttgcctgattctactcgacgtcaatccaaagttcctgaagaatgccggtcgagactgcagcagacgcagctctcctgtctacgttggaagggttgtgtccggaatggtaaactgtaacgatgatcagggcgtcctgctcgggagatgggacaacaattatggggacggcgtgagtccgatgtcttggatcggctcggtcgacattctgcggcggtggaagaaccacggctgtcagcgagttaagtatgggcagtgctgggtattcgctgcagttgcctgtactgtcttgcggtgcttggggattcccacccgcgtggttactaattacaactccgcacatgaccaaaatagcaatctgcttattgagtactttagaaatgagttcggggagatccagggtgacaagtctgagatgatttggaacttccactgctgggtggagagctggatgactcggcctgatctgcagcctggctatgaaggctggcaggcactcgatcccacaccccaagaaaaaagcgaagggacatactgttgcggacctgttccagtgcgagcaatcaaggagggggatcttagcacaaaatacgatgctcctttcgtcttcgctgaagtgaacgccgatgtggtggattggatccagcaggacgatggaagtgtgcataaaagcattaaccgcagcttaatcgtcgggttgaagatcagtactaagagtgtcggcagagacgaaagagaagacattacacatacctacaaatatccggagggcagctcggaggagagagaagctttcaccagggccaaccatctcaataagctggcagagaaagaagagacgggcatggccatgcggatccgcgtgggccaatctatgaacatgggctctgacttcgacgtgttcgcccatattactaacaatacagcagaggagtatgtatgcagactcctgctgtgtgcacgcacagtttcatacaatggcattctagggcccgagtgtggcaccaaatatctgctgaacctgaacctggagccattcagtgaaaagtccgtcccattgtgcattctctatgagaagtatagggactgtctaaccgaatcgaaccttatcaaggtgcgcgctctgcttgttgagcccgtaataaactcttacctcttagccgagagagatctttatctagagaatcccgagattaagatccgaattttaggagaacctaaacagaagcggaaactggtagccgaggtgagtctgcagaaccctctgccagtggcattggaaggatgcacctttacagtagaaggcgcaggcctgaccgaggagcagaaaaccgtagaaatcccggatccagtggaggccggtgaggaagttaaagttcgcatggacttgctgccactacatatgggcctccacaaactagtggtcaatttcgagtccgacaagctcaaggctgtgaaaggttttagaaatgtgatcattggacccgcctag

SEQ ID NO: 138366 - DNA, 1884 bp, synthetic construct
  misc_feature 1..1884: note = Description of Artificial Sequence: Synthetic coding sequence
  source 1..1884: mol_type = other DNA
atggcagaaggccccgcaccttcccaggaagctggcacaaaggcccgattcccattacgagatgctgttgaggagggggactggacagcaacggtagtcgatcagcaagattgtactctgagcctgcaattgactacccccgccaacgcccctatcggactttacaggcttagcctggaagcaagcacggggtaccagggaagttccttcgtgctcggacatttcattcttttattcaatgcttggtgtcccgccgacgcggtgtatcttgactccgaagaagagcgtcaggaatatgtcttaactcagcagggtttcatctaccagggtagtgccaagttcattaagaacatcccttggaattttggccagtttgaggatggaattctggatatctgcctgatactgctggatgtaaacccaaagttcctgaagaacgccgggcgggactgcagcaggcggtcgagccccgtgtatgtaggaagggtcgtatcaggtatggttaactgcaatgatgaccagggcgttctgctgggcaggtgggacaacaattacggcgacggcgtttccccgatgtcctggatagggagcgtggatatcttgcgtagatggaagaaccacgggtgccagagagtcaagtacgggcaatgctgggtgttcgccgccgtggcttgcacagtactccgatgcctgggaatccccacaagagtggtgacaaattataatagcgctcacgatcagaactctaatctcttaatagagtactttaggaacgagttcggagagatccagggcgacaagtctgaaatgatatggaactttcattgctgggtggagagctggatgactagacccgacttacaaccaggttatgaagggtggcaggcgctcgatccaactccccaggagaagtcggagggaacatattgctgtggacccgttcccgtgagagccatcaaggaaggcgacttgtccactaaatatgatgcaccctttgtgttcgccgaagtaaacgccgacgtagtcgattggatccaacaggacgatgggtctgtacataaaagcataaataggtcattaatcgtcggcctaaagatttctaccaagagcgtcggccgtgatgagagagaagatattacccatacgtataagtacccggagggttctagtgaggagcgcgaggcattcactcgcgccaatcatcttaataagttggctgagaaggaggagaccgggatggcaatgcgaatccgggtcggccagtccatgaacatgggcagtgacttcgacgtgtttgcccacattacaaacaatacagcagaagagtatgtgtgtagactgttactatgtgcccgcactgtgtcatacaatggcatcttggggcctgaatgcggaactaagtatctcctgaatctaaacctggagccgttctctgagaagtctgtgccactatgcatcctttacgagaagtaccgcgattgcctgaccgagagcaaccttatcaaagtccgggctcttctagtcgagccggtaatcaatagctatctgctcgccgagcgcgatctgtacctcgagaaccctgaaatcaagatcaggatcctgggcgaacctaagcagaaacggaaattggtcgctgaggtgagtctccagaacccactgccagtggctctggaagggtgcacgttcaccgtggaaggggccgggctgaccgaagagcagaaaaccgtggagatcccggatcccgtggaagctggagaagaagtgaaggtccggatggaccttctgccactacatatgggacttcacaagctggtggtcaactttgagagcgacaagctcaaggccgtgaaaggattccgcaacgtcatcattggacccgcttag

SEQ ID NO: 138367 - DNA, 2082 bp, synthetic construct
  misc_feature 1..2082: note = Description of Artificial Sequence: Synthetic coding sequence
  source 1..2082: mol_type = other DNA
atggctgctctgggagtgcagtccattaactggcaaaccgcatttaataggcaggcccaccataccgataagttctcttcgcaggagctgatcctgagacgcgggcaaaattttcaggtgctgatgatcatgaacaagggcctgggttccaatgagcggctagagtttattgtcagcaccggcccgtacccctccgagagtgcaatgacgaaagctgtctttccgctgagcaatggctcttctggcgggtggagcgccgttctgcaagcctcaaacgggaataccctgaccatctctatatcatctcccgcgagtgcccccattggcaggtacacaatggcacttcagatcttctcgcaggggggaatcagctccgtaaaactgggtaccttcatactgctttttaacccctggctcaatgtggacagcgtgttcatggggaaccacgctgaacgcgaggagtatgtccaggaggacgctggaatcatcttcgtgggatctacaaatcggattgggatgattgggtggaacttcggacaattcgaggaggacattcttagcatctgtctgtcaatcttggaccgttcacttaacttccgtagagacgctgctaccgacgttgcatcgcgtaacgaccctaagtacgttgggcgggttttgtctgcaatgattaattcaaatgatgacaacggggtcctcgctggcaattggagcgggacgtacaccgggggacgcgatccacggtcctggaatggtagcgtggaaatactgaagaattggaaaaaatcagggttttcaccggtaagatatggccagtgctgggttttcgcaggaaccctaaacacagccctgcgctccctcggaatcccctcccgggtgatcactaactttaactctgctcacgacacagatagaaacttgtcagtggatgtctattatgacccgatgggtaaccccctggataaaggcagcgatagcgtgtggaacttccacgtttggaacgaggggtggtttgtgcggtccgatctgggaccgagttacggcggatggcaggtgctagacgcaaccccacaggaacgcagccaaggcgtgttccagtgcggccccgcctctgtcatcggtgttagggagggagacgtgcagttgaattttgacatgcctttcattttcgctgaggttaacgccgatcgcattacttggctctacgacaacactacaggcaaacagtggaaaaactctgtgaacagccatactataggacgctatatctccacaaaagctgtgggctccaatgcacgcatggacgtaaccgacaaatacaaatacccagaagggagcgaccaagagagacaggtattccagaaggcgctaggaaagcttaagccaaataccccatttgccgctacaagtagcatgggactcgaaacggaagaacaagagccaagcattattgggaagctgaaagtggccggcatgctggctgttgggaaggaagtcaacctggtactactgctgaagaacctctctagggacacaaagaccgtgactgtaaatatgaccgcgtggaccatcatctataacgggacactggtgcatgaggtgtggaaggattccgcgaccatgtctttggacccggaggaggaagccgaacacccaataaaaatcagctatgcccagtatgaaaaatacctcaagtcggataatatgatcaggattacagctgtgtgcaaagtccctgacgagtctgaggtggttgttgaaagagatattatactggacaatcccaccctgactcttgaggtgctgaacgaggctcgcgttagaaagccagtcaacgtacagatgttgttcagcaaccctctggacgagcctgtacgggactgtgtgctaatggtggaaggatcaggccttctcttgggcaatttaaagatcgatgttcccactctgggccccaaggagggctcgagagttcgtttcgatatcctcccctccagaagcggaacgaagcagctgcttgctgacttctcgtgtaataagtttcctgccataaaagccatgctgtccattgatgtcgctgaatag

SEQ ID NO: 138368 - DNA, 1602 bp, synthetic construct
  misc_feature 1..1602: note = Description of Artificial Sequence: Synthetic coding sequence
  source 1..1602: mol_type = other DNA
atggctgctctcggcgtgcagagtattaactggcaaactgctttcaacaggcaagcacatcatactgacaagtttagttcacaggagttgattctgcgaagggggcagaattttcaagtgctgatgattatgaataaaggcctcggctctaacgagcgcctagaatttattgtctctaccggcccctacccttcagagagcgccatgacaaaggctgtgtttccactgtcgaacggcagctccggtggatggagtgccgttctgcaggcgagcaatggcaacacactgactatctctatcagcagccctgcctcggcaccgatcggacgttacaccatggctctgcagatcttttctcagggcggtatctcaagtgtaaagttgggcacatttatactgctttttaacccctggttgaatgtggatagtgttttcatgggcaaccacgctgagcgagaggagtacgtgcaggaagacgctggtatcatctttgtgggctcaaccaatcgaattggaatgattgggtggaactttggccagtttgaagaggacatcttgtcaatctgcctgtccattcttgacagatccctgaattttcggcgggatgctgccactgatgtcgccagtcggaatgatcccaagtatgtcggtcgtgtgctgtcagccatgatcaattctaatgacgataatggagtgctggctggaaattggagtggcacatatactggcggccgcgaccccagaagctggaacgggagcgtggaaatcctcaaaaattggaaaaagtccggctttagtcctgtgaggtatggtcagtgttgggtgttcgctggaactctgaacacagccctgcgatccctaggaatcccatcaagagtaataactaactttaattctgcacacgacactgaccgaaacctcagtgtggacgtgtactacgaccccatgggtaatcccttggacaaaggctccgatagcgtatggaatttccatgtgtggaatgaggggtggtttgtccgttccgatctgggaccctcctacggtgggtggcaggtccttgacgccacgcctcaggaacgcagccaaggggtgtttcaatgtggccctgcaagtgtgattggggtgagggaaggagacgtacagcttaatttcgatatgccatttatctttgccgaagttaacgcagacaggataacctggctttacgataatactaccggcaagcaatggaaaaactcggtgaactcacatactattgggcgctacatttcaacgaaagcagtggggagcaacgctagaatggacgtgacagacaagtacaagtatcccgaggggtcagaccaggaaagacaggtgtttcagaaggccctaggcaagttaaaacccaacactccctttgccgccactagctccatgggtctggaaacagaggagcaagagccatctatcatcgggaagttaaaagtggcaggcatgctggcggtcggaaaagaggtgaatctcgtcctcctgcttatcccgcacgcactccagtgctgtcggatggattggcctctcacgcaaggtctgagcaagcgtgatacaggggagaagttagtgtag

SEQ ID NO: 138369 - DNA, 2055 bp, synthetic construct
  misc_feature 1..2055: note = Description of Artificial Sequence: Synthetic coding sequence
  source 1..2055: mol_type = other DNA
atgatggatgcatcaaaggaattacaggtattgcatattgactttctcaatcaggataatgctgtcagtcaccatacgtgggaatttcagacctcgagcccagtgttccgaagaggtcaggttttccacctgagattggtgctaaaccagccgctgcagagttatcatcaactaaaactggaattttcaactggcccaaacccgagcattgcgaagcacaccttggtagtactcgaccctaggacgccatctgatcattataactggcaggcaaccctccagaatgaatctggaaaagaggtgaccgttgccgtgaccagtagccctaatgccattcttggcaagtaccagctgaatgttaaaacaggaaaccacatcctgaagtctgaggagaacatactctacctgctctttaatccttggtgcaaggaggatatggtattcatgcccgacgaagatgaaaggaaagaatatatcctgaacgacaccgggtgccactacgtgggcgcggctagatcaatcaaatgtaagccctggaattttggacagttcgaaaagaacgtcctggactgctgtatttccttgcttaccgagtccagtttaaaaccaaccgatagaagagaccctgttttggtatgcagggccatgtgtgctatgatgtcgtttgagaaagggcagggcgttctcatcggcaactggacgggtgactatgaaggagggactgcaccctataaatggacagggagcgcaccaattcttcagcaatactataataccaagcaggccgtctgctttggccaatgttgggtctttgcaggcatactaaccacagtcctccgagccctggggatacccgcacggtctgtgacgggctttgattctgcccacgatacggaacgaaacctgaccgtggacacctatgtgaacgagaacggcgagaaaatcacgtctatgactcacgactctgtttggaatttccatgtgtggaccgatgcttggatgaagaggcctgaccttccaaagggttatgacgggtggcaagccgtggatgctaccccccaggagaggtcgcagggcgtgttctgctgtggccctagcccgctgaccgccatccgtaagggagacatatttattgtgtacgatacgcgttttgtattctcagaggtcaatggcgatcggctgatctggctagtgaagatggttaacggacaggaggagctccatgtaataagcatggagaccacatcaatcgggaaaaatatcagcaccaaggcagttgggcaggatcggcgccgtgacataacatatgagtacaaataccctgagggtagcagcgaggaacggcaggtcatggaccatgctttcctgctgctttcctctgaaagggaacacagaaggcccgtcaaggaaaattttctgcacatgagcgtgcagagtgacgatgtactgctgggcaacagcgttaactttaccgtaattctcaagcgcaaaaccgcggcgcttcagaacgtgaatatactgggaagcttcgagctgcaactgtacaccggtaaaaagatggccaaactgtgcgacttaaacaagaccagccagattcagggtcaggtctcagaagtgacgctgaccttggattctaagacatatatcaacagccttgcaatcctcgacgacgagcctgtcatcagagggtttattattgcagagattgtcgagtcaaaagaaattatggcctccgaggtttttaccagtttccaatatcccgagttttcaattgaactgcctaataccggacggatcgggcaattgctggtgtgcaattgtatattcaaaaataccctcgcgattcctttgactgatgttaaattctcactcgaatcattaggtattagtagccttcagaccagtgatcacggcacggtgcagcccggggagaccatacagtcacaaatcaaatgtacgcccatcaaaactggtcccaagaagtttatcgtgaagcttagtagcaagcaagttaaggagatcaatgcccagaagatagtactgattaccaaatag

SEQ ID NO: 138370 - DNA, 1626 bp, synthetic construct
  misc_feature 1..1626: note = Description of Artificial Sequence: Synthetic coding sequence
  source 1..1626: mol_type = other DNA
atgttctcctggatggggagacaagcgggcgggcgcgagagagctggaggcgccgacgcagtccagacggtgaccggaggactaaggtctctgtacttgcggaaggtcttgcccctggaagaagcgtaccgcttccatgagtttcactcccccgctcttgaggacgcagatttcgaaaacaagccaatgattttgttggtgggccagtattctacgggaaagacaaccttcatccgatacctcttagaacaagacttcccaggtatgcggatcggacctgagccaactaccgatagctttatcgctgtgatgtatggggagaccgagggctccacacccggcaatgctctggtcgtggatccaaagaagccatttagaaagctgtctaggttcgggaacgccttcctaaacagatttatgtgtagccagcttccgaaccaggtactcaagtccatctcggtgatcgacagtccaggaattctaagtggcgaaaagcaacgcatctccagaggctacgatttctgccaggtcctgcagtggtttgcggaacgagtggaccgcattatcttgcttttcgacgcccataaacttgatatctccgacgagttctcggaggcaatcaaggcattccggggacaggatgataaaattagagtggtgcttaacaaggcggatcaggtggacacccagcagttgatgagggtgtacggagctctgatgtggtcgttaggaaaggtcatcaacactcccgaagtgctgcgagtgtacatcgggtccttctgggctcaacccctgcaaaataccgataaccgcaggttgttcgaggccgaagcccaggacctgtttcgggatattcagtcgctgcctcagaaggccgctgtacgcaaattaaacgacctgattaagcgggcacggcttgcgaaagtacacgcctacatcatctcttacctgaagaaggaaatgcctagcgtttttggaaaagagaacaagaagcgcgaactcataagtcgccttcccgaaatttatatccagctgcaacgtgaatatcaaatttcagctggagattttccagaggtgaaggccatgcaggaacagcttgaaaattacgactttactaagttccactccctcaagccaaaattgatagaggccgtggacaacatgttgtcgaataaaatttctcccttaatgaatctgatctcccaggaagaaacctcaactccaacgcagctggtgcagggaggagccttcgacgggactactgagggtcctttcaaccaggggtatggcgaaggagctaaggaaggggcagatgaagaagaatgggtagtggccaaagataagcccgtttacgatgaacttttctacacgctgtcacctattaatggcaaaataagcggcgtgaacgctaagaaggagatggtgaccagcaagcttcccaatagcgttctgggcaagatttggaagttggctgattgtgattgtgatgggatgttagacgaggaagagttcgccctcgctaagcacctcatcaaaatcaagcttgatggatatgaactcccttcctccctgcccccccatctcgtgcccccctctcacaggaagtccctcccaaaggctgattag

SEQ ID NO: 138371 - DNA, 1917 bp, synthetic construct
  misc_feature 1..1917: note = Description of Artificial Sequence: Synthetic coding sequence
  source 1..1917: mol_type = other DNA
atggcccagggcctagaagtggccttaacagacctgcagtctagcagaaataacgtgaggcaccacactgaagagataaccgttgaccacctcctggtgcgcaggggccaggccttcaacctcacgttgtatttccgaaacaggtcctttcagcccggactcgataatatcatattcgtcgttgaaacggaggacgctgtctacctcgattcagaaccccagcgtcaggaatacgtcatgaacgattatggcttcatttaccaaggttcaaaaaactggatccggccgtgtccttggaactacggccagtttgaggacaagatcatcgatatctgcctgaagttgttggataagagtttgcacttccagacagacccagccaccgactgtgcactgcgtggatccccagtgtatgtgtcgcgcgtggtgtgtgccatgataaattcaaatgacgacaatggggtccttaatggaaactggtccgagaattatacagacggggcgaatcccgcggaatggactggatccgtggctatcttgaagcagtggaacgcgacagggtgtcagccagtacgctacggacagtgctgggtgttcgccgcggtgatgtgtacagtgatgcggtgtttgggtatcccaacacgcgtgattactaacttcgacagtggccacgacaccgacggcaatctgataatcgatgaatattacgataatacagggcgtatcttgggaaataagaaaaaagataccatctggaactttcacgtttggaacgagtgctggatggcgcggaaagacctccctcctgcctacggcgggtggcaggttttggacgccaccccacaggaaatgtccaatggggtgtattgctgtggtcccgcaagtgtgagggctatcaaggagggggaggtagacctgaactacgacactccttttgtcttctcaatggtgaatgccgattgcatgtcctggctcgtccagggaggcaaagaacagaagctgcaccaagacacttcttctgtcggcaattttatttccaccaagtcgatccagtccgacgagcgcgatgacatcactgagaattacaagtacgaagagggtagcctccaggagaggcaggttttcctgaaagctctgcagaagttaaaagctcgctcttttcacgggagccagcgcggcgccgaattacaaccaagccggcctacgtctctctcgcaggacagcccaaggagcttacacactcctagtttacgacccagcgatgtcgtgcaggtgtctctgaaattcaagctactggatccccctaacatgggccaggatatttgtttcgtactccttgctctcaacatgtctagccagttcaaggacctaaaggtgaacctaagcgcacagtcacttctgcatgatgggtcccctctgagccctttttggcaggacactgcctttataactctgtcccctaaggaggccaaaacatacccatgcaagatcagttattctcagtactcccagtacctgagtactgataagctgatacgcatttcagcattgggcgaggagaagagcagccccgaaaaaatactggtaaataagatcattacccttagttaccctagtattaccatcaacgtcctcggagccgccgtggtgaatcaacccctttccattcaggttatttttagtaaccccctcagtgaacaggtcgaagattgtgtgctgaccgtggaagggagcgggttattcaaaaagcagcagaaggttttcctaggagttctaaagccacaacaccaggcaagcattatcctcgagacagtgccctttaaaagcggccagcgccagatccaggcaaacatgcgaagcaacaaatttaaggatattaagggataccgaaacgtgtatgtggattttgccttgtag

SEQ ID NO: 138372 - DNA, 2160 bp, synthetic construct
  misc_feature 1..2160: note = Description of Artificial Sequence: Synthetic coding sequence
  source 1..2160: mol_type = other DNA
gcccagggtctggaagtggctctgaccgaccttcagtcgagcaggaataatgtcaggcatcacaccgaagagatcactgtggatcatctgctggttaggcgcgggcaagctttcaaccttacactgtatttccgcaacaggtcattccagccaggtctggataacattatcttcgtagtggagaccggtccccttccagacttggccctgggcactcgagctgtgttttcactggcacgccaccactccccttctccttggattgcctggctggagactaacggagccaccagtactgaggtctccctgtgtgcccctcccacggccgctgtgggtcgctacctgctcaaaattcacatcgattcttttcagggaagtgtcacggcctatcagctgggggaatttattttgctgtttaacccatggtgtcctgaggatgccgtctatctggattcggagcctcagcgccaggaatatgtcatgaacgattatggctttatctaccaaggtagtaagaattggatacggccttgtccttggaactacggacaattcgaggataagattatagatatttgtttgaagcttctggacaagtcgctacatttccagacggacccggccactgattgtgctctgcggggatcgcccgtgtacgtcagcagagtagtgtgtgctatgatcaacagcaacgatgacaatggcgtcctgaacggcaattggagcgagaattacactgatggcgccaaccctgcagagtggaccggatcagtagctattttaaaacagtggaatgctactggatgccaaccagtgcgatatggtcagtgttgggttttcgcagcagtcatgtgtaccgtaatgagatgtctgggcattcccacccgcgtcatcaccaatttcgatagcggccatgataccgacggaaacttgatcattgacgaatactatgacaacactgggcgtattttaggtaataaaaaaaaagacactatatggaattttcacgtctggaacgagtgctggatggcgcggaaggacctgcctccggcatatggcggttggcaggttctggatgccacccctcaggagatgtcaaacggcgtgtattgctgcggtcccgccagcgtgagggctatcaaggaaggtgaggtggacttgaactacgataccccctttgtgttttccatggtcaatgccgattgtatgtcatggctggtacaaggagggaaggagcagaaactacaccaggatacaagttccgttggcaattttatttcaacaaagtccatacaatctgatgagagagacgacatcaccgagaattataagtatgaagaaggctcattacaagaacgccaggtttttctcaaagccctgcagaagctcaaagcgcgatcattccatggctcccagcggggggccgaactacagccaagtagacccacatccctgagtcaggattcgccccgttctttgcacaccccaagcctcagaccctccgatgttgtccaggtcagcctgaaattcaagctcctcgatccacccaacatgggacaggacatttgttttgtgctccttgccctcaatatgtcctcccaattcaaggacctcaaagtgaatctgtcagcacaatccctgttacatgacgggtcccccctctctccattctggcaagacacagcttttattacgctgtcccctaaagaagccaagacttatccctgtaagatcagttactcacagtactcccagtacctgtccactgacaagctgattaggatcagtgctttgggggaggaaaagtcctctcctgagaaaattcttgtaaataaaatcataaccctcagctatccctctatcacaataaatgtgctgggagccgctgttgtgaaccaaccactgtctatacaggtcattttttccaaccccttatctgagcaggtggaggactgcgtgctcacagtggagggttcagggctgtttaagaagcagcaaaaggtgttcttgggagtactcaagcctcagcatcaagcttccattatcctcgaaactgtgcctttcaagagtggccagaggcagatccaggccaacatgagatctaacaaatttaaagatataaaagggtatcgcaatgtttatgtggattttgccttgtag

SEQ ID NO: 138373 - DNA, 2121 bp, synthetic construct
  misc_feature 1..2121: note = Description of Artificial Sequence: Synthetic coding sequence
  source 1..2121: mol_type = other DNA
atggcggggatccgcgtgactaaagtcgactggcagcggtcccgtaacggcgcggcccaccatacgcaggaatacccatgcccggagttggtcgtgcgccgcggtcaatctttttccctgaccttggagctgagcagggccctcgattgcgaggaaatccttatattcacgatggaaaccggcccacgggcctcggaagccttgcacacaaaggctgtgttccaaaccagcgagttggaacgcggggaaggttggacagcagctagggaagcacagatggagaagactctcactgtctcccttgcgagtcccccctctgccgtaatcggaaggtacctgctctcaatcaggctcagcagtcaccgcaagcattccaatcgccgcctgggagagttcgttctgttgtttaatccatggtgcgctgaagatgatgtgttcctcgcttccgaggaggagaggcaggagtatgtactgagtgatagtggtattattttccgcggagtcgagaaacacatcagggctcagggttggaattacggacagttcgaggaagatattctgaatatttgtttatccattttggatcggagcccggggcaccaaaacaatcccgcgaccgatgtgtcatgcagacataacccaatctatgtgactcgcgtgataagcgccatggtaaatagcaacaatgataggggagtagtgcagggtcaatggcagggcaagtatggcgggggaacctcgcctctgcattggcggggtagcgtggccattctgcagaagtggttaaagggtagatataaacccgtaaagtatggtcagtgctgggtgtttgcaggggtgctttgtaccgtgttgagatgcctgggcatcgccacccgcgtagtatccaactttaacagtgctcatgacaccgaccagaacctaagcgtagacaagtacgtcgattcattcggtaggaccctggaagacctgacagaagattccatgtggaatttccacgtctggaacgaatcatggttcgcccgccaggatctgggccctagctataacggatggcaagttctggatgccactcctcaggaggagtccgaaggggtcttcaggtgtggacctgccagcgttacagcaatacgggaaggagatgtgcacctcgctcacgacggtcccttcgtcttcgctgaggtcaacgctgactatatcacctggctgtggcacgaagatgagagccgggagcgcgtatattctaacactaagaagattgggcgctgtatcagcaccaaagccgttggctccgactccagagttgatatcaccgacctttataaataccctgagggctcaaggaaagaaaggcaggtctacagcaaggctgtcaatagactgtttggggtggaggcctccggccgacgaatctggattagaagggccggggggcgctgcctctggagagatgacctgcttgagcccgccacaaagcctagcatcgccggcaaattcaaagttttagaacccccaatgctggggcacgatttgagattggcgttgtgtctggccaacctgacctctcgagcacagcgggtgcgcgttaatctgtctggggcgaccatactttacactaggaaacccgtagcagagatcttacatgaaagccacgctgtgcgacttgggccacaggaagagaagagaattccaatcactatatcgtattctaagtacaaagaagatctgactgaggataagaagattctactggcggcgatgtgcctcgttactaaaggagagaagttgttggtcgagaaggacatcactctcgaggacttcataactatcaaggtgttgggcccagctatggtgggagtggccgtgaccgtggaagtcacagttgtaaaccccttgattgaaagagtcaaagattgcgctctgatggtcgagggttccggtctcctacaagaacaactgtcaatcgatgttcccacactcgagcctcaggagcgggccagtgttcagtttgatataacgccctccaagtcgggaccccgtcaactccaggtagacctggtcagtcctcactttcctgatataaagggattcgtgatcgtgcacgtcgccactgctaaatag

SEQ ID NO: 138374 - DNA, 1878 bp, synthetic construct
  misc_feature 1..1878: note = Description of Artificial Sequence: Synthetic coding sequence
  source 1..1878: mol_type = other DNA
atggctggcattagggtgacaaaggtggactggcagcgcagccggaatggcgcggcccaccacacgcaggagtatccatgcccagaacttgtggtgcgcaggggacaaagcttctcccttaccctggagttatcgagggcactggattgtgaggagattctgatcttcacaatggagactggaccacgggctagtgaggctctccacactaaggccgttttccaaacctctgagctagagagaggggaggggtggaccgcggctagggaagctcagatggagaagacactgactgtaagcctggcgtctcctcccagtgcggtgatcggacgctacctgctgtcaatcagactcagttcacatcggaagcactctaacagacgactgggagagttcgtgcttctctttaacccatggtgcgcggaagatgacgtcttcctggcaagcgaggaagagcggcaggagtatgtgttgtcagattccggcatcatattccgcggcgtcgaaaagcacattagggcacaggggtggaattatggacagtttgaggaagacatcctgaacatctgtcttagtatcttagaccggagccccggccaccagaataatcccgccactgacgtgtcttgtcgccacaatccaatctacgtcacacgggtgatttccgccatggtgaactctaataatgacaggggcgttgtgcaaggccagtggcagggaaaatacggaggcgggacgagccccctgcattggcgaggcagcgtcgcgattctgcagaaatggctaaaaggcagatacaagcccgtcaagtacggccagtgctgggtgttcgccggtgtcttgtgcaccgtcttaagatgtctcgggattgctaccagagtggtgtcgaatttcaactctgcccatgatacagaccaaaacctctcagtggataaatatgttgactctttcggcagaacactcgaggacttgaccgaggactccatgtggaactttcatgtctggaacgagtcttggtttgcccgccaggatcttgggccgtcctacaacggctggcaggtcctggacgctacacctcaggaggagagcgagggggtgttccggtgcggccccgcgtccgtgaccgccatcagagaaggggatgtccatctcgcccacgatggtcctttcgttttcgctgaggttaatgccgattacattacatggctttggcacgaagatgagtctcgggaacgggtgtatagcaacactaagaaaatagggcgttgtatcagcactaaagcggtgggctcagactcacgtgttgatatcactgatctctacaaataccccgaagggagccggaaggagagacaagtgtactccaaggccgttaataggctgttcggtgtagaagccagtggtcgcagaatttggattaggagggctggaggcaggtgtttgtggagagacgatttactcgaacctgcaactaaacccagcatcgctggaaagttcaaggtgctggaaccccccatgctgggtcacgacctgaggctggcactgtgcctggcgaaccttacttctcgagctcagagggtccgcgtcaatctgtcaggtgcgacaatcctttacacaaggaagcccgtggctgaaattctgcatgagagtcacgccgtccgcctggggcctcaggaggagaagcgaattccaatcaccatatcctattctaagtacaaagaagaccttactgaggataaaaaaattctgttggccgcaatgtgcctggtcacaaagggcgagaagctcctcgtagaaaaagatatcacgctggaagatttcattacaattaagagggcttatcccggggccagtggcgagggactcagtccagtgtag

SEQ ID NO: 138375 - DNA, 2133 bp, synthetic construct
  misc_feature 1..2133: note = Description of Artificial Sequence: Synthetic coding sequence
  source 1..2133: mol_type = other DNA
atggatcaggtggcgaccctcagattggaatcagtggatctccagagttcgaggaataacaaggagcaccacacacaggaaatgggagtcaagcggctgaccgtgaggcgtggccagccgttttacctgaggctctccttttctagacctttccagagtcaaaacgatcatattacgtttgtggccgagaccggtccaaagccctcggaacttctcggaactagagccaccttctttttgactagagtccaacctggcaatgtttggagcgctagcgacttcactatcgacagtaactctctccaggtcagcctattcaccccagcaaatgcggtcattgggcattatacccttaagattgaaattagtcagggccaggggcactcagtcacttatcctttagggacatttattcttctgtttaatccatggtcgcccgaggatgatgtgtatctgcccagtgagattctgctacaggaatatataatgcgtgattatggtttcgtgtacaaaggccatgaaagattcatcacctcatggccctggaattacggtcaattcgaagaggacattatcgatatctgctttgagatcctgaacaagtccctttatcatctgaaaaatccagccaaagattgctctcaaaggaacgatgtagtatacgtttgcagggtggtaagcgccatgataaactcaaacgatgacaatggggtgttgcaggggaattggggggaggactatagcaaaggagtctccccgcttgaatggaaaggcagcgtcgctattctccagcagtggtctgccagaggcggacaacccgtgaaatatggccagtgctgggtttttgccagcgttatgtgcacagttatgcgctgtctaggggtacctacccgagtggtgagtaactttcgttcggcgcacaatgtggaccgcaacctgacaattgacacttactatgatcgaaacgctgagatgctctctacacaaaagagggataagatctggaactttcacgtgtggaacgagtgctggatgatccgaaaggacctgccacctggctacaatggctggcaggtgttagaccctactccccagcagacctcttctggtttattctgctgcggcccagcaagtgtgaaagcgatcagagagggagacgtgcacctggcatacgacaccccgttcgtgtatgcggaggttaacgcggacgaagtgatctggctcttgggggacggccaggcccaggagatactcgcccacaatacgtccagcatcggcaaggaaatcagtaccaaaatggtcggatctgaccagaggcagtctattacgagtagctataaatatccagaaggcagtccagaagaaagggcagtctttatgaaagcgtctcggaagatgctcggaccacagagggcctctctgcccttcctcgacctgctggagagcggcgggctgagagatcagcccgcacaactgcaactgcacctggccaggatcccggagtgggggcaggatctgcagctcctgctacggatacagagagtgccggactcaacacatcctcggggccctattgggcttgtggtgcggttctgcgcacaggcccttctgcacggtggaggcacacagaaacctttttggcgccacactgttcggatgaacctcgatttcgggaaggaaacacagtggccactgctgttgccatactccaactatcgaaataagcttaccgacgaaaagctgatacgtgtaagcgggattgctgaggtggaggagactgggcggtccatgctggtattgaaggacatatgtctcgaacctccccaccttagcatcgaggttagtgaacgcgcagaagtgggcaaagccttgcgagtccatgtgactctgaccaacacattgatggtcgccctgagttcttgcacgatggtgcttgaagggagtggccttattaacggacagattgccaaagatctgggtactctggtggccgggcatacccttcaaatccagctggacctctaccccaccaaggccggtcccaggcagctgcaggtgctgatatcaagtaatgaagtgaaggaaataaaagggtataaggacatcttcgtcactgtggccggagccccctag

SEQ ID NO: 138376 - DNA, 846 bp, synthetic construct
  misc_feature 1..846: note = Description of Artificial Sequence: Synthetic coding sequence
  source 1..846: mol_type = other DNA
atgaggttcgtcgtcgctttagtcttattgaatgtggcggcagccggcgctgtgccgttgctggcaacggaaagtgtcaaacaagaagaggccggagtgcgcccatcagccggtaatgtgtccactcacccctccctgtcccagcgccccggaggctccacaaagagtcatccagagccccagactccgaaggactctcctagtaagtcttctagcgaggctcagaccacaaaagacgttcctaataagagcggtgcagacgggcagacaccaaaggacggctcatcgaaaagcggcgcagaagatcaaacccctaaagacgtccccaacaagtctggagccgaaaagcagacccccaaagacggctccaataaatctggcgccgaggaacagggccctatcgatggaccgtcaaaaagcggtgcagaggaacagacaagcaaggacagccctaataaggaggaagttaaaagcagcgagcccaccgaagatgttgagcccaaggaggccgaggacgacgataccgggcccgaggaggggtcccctcccaaggaggaaaaagaaaaaatgagcgggtccgcgagttctgagaacagagagggaacattaagcgactctaccggatccgagaaagatgatctatatcccaatggtagcggaaatgggtctgcggagtccagccatttcttcgcgtatctggtgaccgccgccatcctggttgctgtcctctatattgcccaccacaataagagaaaaatcattgctttcgtacttgaagggaagagatccaaggtcacaagacgtccaaaagcgtcggattatcagcgcctggaccagaaatcttag

SEQ ID NO: 138377 - DNA, 1314 bp, synthetic construct
  misc_feature 1..1314: note = Description of Artificial Sequence: Synthetic coding sequence
  source 1..1314: mol_type = other DNA
atgagatttgtggtggccttggtcctcctaaacgttgcagcggccggtgcagttcccctcttggccacagagagcgtaaaacaggaggaggctggagtccggccttctgctggcaatgtgtcaacacaccccagcttgtcccagaggccaggcgggagcactaaatcccacccagaaccccaaacccctaaagattcgccctcgaaatcatccgcagaagcccagacacctgaagatacaccgaacaaatccggcgccgaagccaaaacacaaaaggattcatcaaataagtctggcgccgaagctaagactcagaaaggatctaccagtaagtctggctctgaggcccagaccaccaaggacagtactagtaaatcccaccctgagctacagactcccaaggacagcaccggtaagagtggggccgaagcccaaacaccagaggactcccctaaccggtcaggggctgaggccaagacgcaaaaggacagtccctcaaagtcaggtagtgaagcccagaccactaaggatgttccgaacaagagcggtgccgacgggcaaacacctaaggacggctcaagcaagtcaggtgctgaagaccagacccctaaggacgtgcctaataagagcggagccgagaagcagactcccaaggatggctctaacaagtccggcgccgaggagcagggccccattgacggtccaagcaagtccggcgccgaagagcagactagcaaggactctcccaataaggtagtgccagaacaaccctcacgaaaagatcattcgaagcccatcagcaacccatcagataataaggaactgcccaaagctgacacaaaccagctggctgataaggggaagctgtccccgcatgctttcaagaccgaaagcggcgaggaaaccgatcttatttcccccccacaggaggaggtgaaatctagtgagccaactgaagacgtcgagccaaaagaagcagaagatgacgatacaggacctgaagaaggttcgcctccgaaggaggagaaagagaagatgagcgggtcggcttcctctgagaatagagaaggaaccttgagcgattccacaggcagtgaaaaggacgacctttaccctaatggcagcggcaatggctccgctgaatcctctcacttttttgcctatctggtcaccgcagccattcttgtggccgtgctctacatcgcacaccacaacaagcggaagatcatagcttttgtactggaaggcaaacgaagcaaagtgaccagacggccaaaagccagcgactaccagcgattggatcagaaaagctag

SEQ ID NO: 138378 - DNA, 1140 bp, synthetic construct
  misc_feature 1..1140: note = Description of Artificial Sequence: Synthetic coding sequence
  source 1..1140: mol_type = other DNA
atgagattcgtggttgcgttagtcctgctcaatgtggctgcagcaggtgccgttcccctgctggctaccgagtccgtgaagcaggaggaagctggtgttaggccttccgcgggtaatgttagcactcacccaagtctcagccaacgcccaggggggagtacaaagagccacccagagccccaaacccccaaagatagcccctccaaatcaagcgccgaagcccagaccccagaagatacgcctaataaatccggggccgaagctaaaactcagaaggactcatcaaataagtcgggggcagaggccaaaacgcagaagggttcaaccagcaaatcaggaagcgaagcccagacaacgaaggattcaacaagcaaatcccacccagagctccagacacctaaagattccaccggcaaaagcggggccgaagcacagactccggaggatagcccaaatagaagtggggctgaggcgaagacccaaaaggactcccctagtaagtccggctctgaggctcaaacaactaaggacgtgcccaataagtctggcgctgacggacagacacccaaagatggcagtagtaaatctggcgcagaagaccagacccccaaagacgtgcccaacaagtcaggcgctgagaaacagaccccaaaggatggttccaataagagcggtgctgaagagcagggacccatcgatgggccctcaaaatccggcgcagaagaacagactagcaaggactcaccaaataaggaagaggtcaagtcctccgagcccaccgaggacgttgagcctaaagaagccgaggatgatgataccgggcccgaggaaggcagcccacctaaggaggagaaagaaaagatgtcaggcagcgcttcatctgagaatagggagggtactttaagcgattctaccggtagtgagaaagacgacctgtatccaaacggtagcggcaacggatctgccgaatcttcacacttttttgcctacctggtcaccgccgcaatccttgtcgccgtgttatacatcgcccatcacaacaagcgcaaaatcattgcttttgtgctggaggggaagagaagcaaagttacgcgacgccctaaggcctcagattatcagagattagatcagaagtcctag

SEQ ID NO: 138379 - DNA, 1362 bp, synthetic construct
  misc_feature 1..1362: note = Description of Artificial Sequence: Synthetic coding sequence
  source 1..1362: mol_type = other DNA
atgcgtttcgtggtggcattggtcttgctgaacgtggccgctgcaggcgcagtgcccttattggctacggaatctgtaaaacaggaggaggccggggtgagaccttctgccggtaacgtaagtacacacccatccttgtcacaacgccccggggggtcaacaaagtcgcaccctgaaccccagacaccgaaggacagcccatctaagtcatcagctgaggcacagacaccagaagacactcctaataaaagcggggcagaggccaagactcagaaagactcttctaataaatccggagctgaggctaagacccaaaaggggtctacttcaaagtcaggctccgaagcccagacaaccaaggattctacgtccaagtctcaccctgaactccagacgcctaaagacagcaccggtaagtccggtgctgaagcccagacgccagaggattcgccaaaccgcagcggtgccgaagccaagacacaaaaagattcacccagcaagagtgggagcgaggcccaaaccacaaaagacgtgcccaacaagtctggagcggacggacagacgccgaaggacggctctagcaagagcggcgccgaggaccagactcccaaggatgtccccaacaagtctggtgcagagaagcagacccccaaagacggttcaaataagtcgggggcggaggagcagggacctatcgacggaccaagtaaaagcggtgccgaggaacagacgtccaaggacagtcccaataaggtggtgcccgagcagcctagtagaaaggaccactcaaaaccgattagcaatcccagcgataacaaggaactgcctaaagccgatacgaaccagctggctgataaaggaaagctgagtcctcacgcttttaaaacagaaagtggcgaagagacagacctgatctcaccaccacaggaagaggttaagagcagcgaacccacagaagacgtggagccgaaggaagctgaggacgacgacacaggaccagaggagggaagcccaccaaaagaggaaaaggagaagatgtcagggtccgcgtcatcagaaaatcgtgaaggaaccctgtcggattccactggctctgagaaggacgacctgtatcctaatgggtcggggaacggatccgccgaaagttcacattttttcgcctatctcgtgaccgccgcaatcctcgtcgccgttctctacattgcccatcacaacaagagaaaaatcatcgcattcgtgctcgaggggaagcggagcaaagtgacccgacgtccaaaggccagcgactaccaaagactagatcagaagattttttttcctctgagccccaatagaatggtctattcatcaggaaagagatag

SEQ ID NO: 138380 - DNA, 693 bp, synthetic construct
  misc_feature 1..693: note = Description of Artificial Sequence: Synthetic coding sequence
  source 1..693: mol_type = other DNA
atgtatgtgcgggtgagcttcgataccaaaccagacctccttctccacctaatgacaaaggagtggcagctggagttgcccaagttgctgatatctgtacacggggggctgcagaattttgagttacaacctaaactgaaacaggtatttggaaagggcctaataaaggccgcaatgactactggagcctggatctttaccggtggagttaacacaggcgtgatccggcatgtcggggacgccttaaaggaccatgctagtaaatcccgtgggaagatttgcactattggcatcgctccatgggggatcgtagagaatcaggaggatcttatcggccgggacgtagttcgcccctatcagaccatgagcaaccctatgagtaaactcaccgtgctgaacagtatgcatagccatttcatcctcgccgataacgggactaccggcaagtatggcgctgaagttaaactccgtcgccagcttgaaaagcacatttctttgcaaaaaatcaatacaagaataggccagggtgtgcctgtagtagctctgatcgtggagggcggcccaaatgtaatcagtattgtcctagaataccttagagacactccaccggttccagtggtcgtgtgtgacggatcggggagggcctcagacatccttgccttcggccacaagtactccgaagagggaggttag

SEQ ID NO: 138381 - DNA, 2520 bp, synthetic construct
  misc_feature 1..2520: note = Description of Artificial Sequence: Synthetic coding sequence
  source 1..2520: mol_type = other DNA
atgaagaaatggagctcaacggacctgggcgccgctgccgacccgttgcagaaagacacatgtcctgatcctctggatggagatcctaactctagacctccccccgccaaaccacagttgagtacggccaagtcccggactaggttgtttggtaaaggcgatagcgaggaggcttttccagtggactgtccgcacgaggagggcgaacttgactcttgccccaccattacagtcagcccagtcattaccatccagagacccggggatggtcccaccggagctaggttattgagccaggatagcgtggccgcttccactgagaaaaccctccgtttgtacgaccgacggagcatcttcgaggctgtcgcacaaaataactgtcaagacctggagtctctgctgctgtttctccagaagtcgaaaaagcacctgacagacaacgaatttaaagaccctgaaacaggcaagacatgtcttttaaaggccatgctgaacctccatgacgggcaaaacaccaccatccctctgcttctggagattgctaggcagactgattcactgaaggagctggtcaacgcttcctataccgatagctattacaagggccaaaccgccctgcacattgccatcgaacggcggaacatggctctggtgaccctcctcgtggaaaacggggcagatgtgcaggctgcagcacatggcgatttctttaagaagacaaagggccgtccgggattttatttcggcgagctcccccttagcctcgctgcatgtaccaaccagctcggcatcgtgaagttcctgcttcagaactcctggcagaccgcagacattagtgcacgggactccgtcggaaacactgtcctgcacgctctcgttgaagtcgcggataacactgctgacaatacgaagttcgtgacatccatgtacaatgagattctcatgctcggggccaaacttcaccccaccctaaagctggaggagctcaccaataaaaaaggtatgacaccccttgctctggctgcaggaactggaaagatcggggtgttggcatatatcctccaacgggagatccaggagccagaatgtcgtcacctgtcacggaaattcaccgagtgggcctacggacctgtgcactccagcctttatgacctttcttgtattgacacatgtgaaaagaactctgtgctggaggtcatcgcatacagttcttccgagaccccaaaccgtcacgatatgctgttagtagagccattaaacagactcctgcaggacaagtgggataggtttgtgaaaagaattttttattttaatttcctggtctactgcctgtatatgatcatattcacgatggcggcatactacaggcccgttgatggtctgcccccattcaagatggaaaaaactggtgactattttagagtcacgggcgagatactatctgtgctcggtggcgtttatttctttttccggggtatacagtatttcctgcagagacgccctagcatgaagaccctgttcgtggactcctactcagagatgctctttttcctgcagtcattatttatgctggctactgtggtcctctacttctcacatttgaaggaatacgtggctagcatggtattctccttggccctgggatggacgaacatgttatattatacccgcggctttcaacagatgggtatttacgccgtcatgatcgagaagatgatcttgagggatctttgtcgattcatgttcgtgtacattgtgtttctattcggtttctcgaccgctgtagttacgctcatagaggacggaaagaatgactcccttcctagcgaatcaacctctcaccgctggcgggggcctgcctgccggcccccagactctagttataattcactgtactctacatgcttggaactgttcaagttcaccattggaatgggtgaccttgagttcacggagaactatgacttcaaagcagtgttcattatcttgctgttggcatacgttatcctcacctacatactgcttttgaacatgcttatcgctttaatgggagagacagtcaataagattgcccaagaaagcaaaaacatatggaagttgcagcgtgcgattacaatactcgataccgaaaaatcctttctgaagtgtatgcgtaaagcctttcggtcgggcaaacttctgcaagtggggtatacgcccgacggcaaggatgactacagatggtgtttcagggttgacgaggtgaactggaccacctggaatacaaacgttggtattattaatgaggaccccggcaactgcgagggggttaagcgcactctgagctttagcttgcggagcagtagagttagtggtagacactggaagaattttgcacttgtgcccttgttgagggaggccagtgcgagagatagacagtcagcgcaaccggaggaagtctacctaagacaattcagcggcagcctcaagcctgaggacgctgaggttttcaaatcccctgcggcctctggcgagaagtag

SEQ ID NO: 138382 - DNA, 2373 bp, synthetic construct
  misc_feature 1..2373: note = Description of Artificial Sequence: Synthetic coding sequence
  source 1..2373: mol_type = other DNA
atgaaggcacaccctaaagaaatggtgccactaatgggtaaacgcgtggctgcaccatccggtaacccggcgattctgcctgaaaagagacccgcagagatcacccccactaagaaaagcgcccatttcttcctggaaattgagggttttgagcccaatcccactgtcgctaaaacatctccaccggtcttcagtaaaccgatggacagcaatattcggcaatgtatctcgggcaattgtgacgacatggattctccccaaagtcctcaagatgatgtgacagagactccatctaaccccaatagtccctctgcccagctggcaaaggaagagcagcgaaggaaaaaaagacgtctgaaaaaacgtatctttgcagcagtctccgaaggttgtgttgaggaactagtagagcttctggtagaactccaggaactgtgtcgccgtagacatgatgaagacgtccccgatttcttaatgcacaaactgaccgctagtgataccggtaaaacctgtctgatgaaagctttgctgaatatcaaccctaataccaaagaaatcgtacggatcctcctagcgttcgccgaggagaacgatattctaggccggttcattaacgcagagtacacagaggaagcctacgaggggcaaacagctctgaatatcgcgatcgaacggaggcagggggatattgcagcccttcttatcgctgctggagcagacgtaaatgcccacgccaagggcgcttttttcaaccccaaataccaacacgaaggattctacttcggggaaacacctctcgcgctcgctgcctgtacgaatcaacctgaaatagtccagctcctgatggaacatgaacagactgacatcacttcccgagattctagggggaacaatatattgcacgctctcgttactgtcgctgaagacttcaagacacagaacgactttgtaaaaaggatgtatgatatgattctgttaagaagtggaaactgggagctggaaaccactcgcaacaacgatggacttactcccttacagctggccgctaaaatgggcaaggccgagatactcaaatacattctgtcacgtgaaataaaggagaagagactgagaagcctcagcaggaagttcaccgactgggcctacggaccagtgtccagtagtctgtatgatttaacgaatgtggataccactaccgataacagcgtacttgagatcaccgtctataataccaatatcgacaatagacacgaaatgctgactttagaaccactgcatactcttctgcacatgaaatggaagaaatttgccaagcatatgttctttctgtccttctgcttttactttttttacaatatcaccttgacactggtgtcgtattatagaccccgggaggaagaagctattccccacccactggccctgactcataaaatggggtggctgcagttgctgggtcggatgtttgttcttatctgggcgatgtgtatatctgtgaaagaagggatcgctatctttctcttacggccttccgatctccaatcaatcctgtccgacgcttggtttcactttgtgtttttcatccaggcagttttggtaatcctgagcgtgtttctgtacctctttgcctacaaagagtaccttgcttgcctggtgcttgcaatggcactcggctgggctaacatgctgtattacaccagagggttccagagcatgggtatgtacagcgtgatgatccagaaggtgattctccatgatgttctcaagttcttgtttgtatatatagtgttccttcttggctttggggttgcgctggcatcgctgatcgaaaagtgtcccaaagataacaaagactgttcctcttacgggtcattctctgacgccgtactggaactctttaagctgacaatcgggcttggggaccttaacatccaacagaattcaaagtatcccatcctctttctgtttcttttgattacctacgtaattttaacgttcgtgctccttcttaacatgctcattgctcttatgggagagacagtggaaaacgtgagtaaggaatccgagagaatatggcgtcttcagagggcccgtaccattctggagttcgagaaaatgttgcccgaatggttaagaagccgcttcaggatgggagagctgtgtaaggttgccgaagatgatttccgcttgtgtctgaggatcaacgaagtcaagtggacagagtggaaaacacacgtctcattcctgaatgaggaccctggccctgttaggaggaccgacttcaataagatccaggacagttcaaggaacaacagtaagacaaccctcaacgcctttgaggaagtggaggaatttcctgaaacatccgtatag

SEQ ID NO: 138383 - DNA, 3360 bp, synthetic construct
  misc_feature 1..3360: note = Description of Artificial Sequence: Synthetic coding sequence
  source 1..3360: mol_type = other DNA
atgaagcgctcactacgaaagatgtggaggcctggtgagaagaaagagccacagggagtggtatacgaggacgtgccagatgacactgaggatttcaaggagtcgctcaaggtggtgtttgagggtagcgcctacgggttacagaattttaacaagcagaaaaagctgaaacggtgcgacgatatggataccttcttcctgcactatgcagcagccgagggtcaaattgagctgatggagaagatcactagagattcttctttagaagtcctgcacgaaatggacgactacgggaataccccactgcactgcgcagtggagaagaaccagattgagtcagtaaagtttctgctgtcgagaggcgccaaccctaatttgaggaattttaatatgatggcgcctctgcacatagctgtgcagggcatgaataacgaagttatgaaggtcctgctggaacaccggaccattgatgtgaatcttgagggggaaaacggaaataccgccgtcattatcgcctgtacgaccaataattccgaggccctgcagatcctcctgaagaagggcgctaaaccctgcaagtctaacaaatgggggtgcttccccatccaccaagctgctttctcagggtctaaagaatgcatggagatcatcctgcgattcggcgaagaacatggctacagccgtcagctacacattaacttcatgaataatggtaaggcaactccgctgcacctcgcagttcaaaacggtgaccttgagatgattaaaatgtgtctggacaatggtgctcagattgatcccgtggagaaaggtcgttgtacagcgatccacttcgctgctactcagggagcgaccgagatcgtgaagctgatgattagtagttactccggctctgtcgacatcgtcaacacaacagatggttgccacgagaccatgctgcatagagccagtctatttgaccaccacgagctggcagattatcttattagtgttggcgctgatatcaataagatagattcagaaggaaggtcacctttgattctcgccactgcatccgccagctggaatatcgtaaacctcctgctgagcaaaggagcacaggtcgacataaaggacaatttcgggaggaattttctacacctgacagtgcagcagccctatggactgaagaacctgcggccagagttcatgcaaatgcagcagatcaaggagttggtcatggatgaagacaatgacgggtgcacaccgctgcactacgcatgcaggcagggaggtcctggcagcgttaacaacctcctgggttttaatgtgtctatccacagtaagagtaaagacaaaaaaagccccctacatttcgccgcctcctacggaagaatcaacacgtgtcagcggctcctgcaggacatcagtgacacccgcttgctgaacgagggggacttgcacggaatgacccccctacacctggccgcaaagaatggacacgacaaagttgtccagttgctgctcaagaaaggggccttgtttctgtcggaccacaatggctggactgccctgcaccacgccagtatggggggatatacccagaccatgaaagtcatccttgatacgaatttaaagtgtaccgaccgactagatgaggacggtaatacagcccttcatttcgccgcccgggagggccacgccaaggctgtggccctgctgcttagtcacaatgccgacattgtgctgaataaacagcaggccagttttctgcaccttgcgctccataacaaacggaaagaagtggtattgacaataatcaggagcaagagatgggatgaatgcctcaagattttcagtcataatagccccggcaacaagtgccccataaccgaaatgatcgaataccttccggagtgtatgaaagttctcctcgatttttgcatgttacattctaccgaggacaaaagctgcagggactactacatagaatataatttcaagtacttgcagtgcccgctggagtttactaagaaaacccctacccaggacgtgatctacgaacctctgaccgctctgaacgcgatggttcagaataacaggatagagcttttgaaccacccggtctgtaaagaatacctgttaatgaaatggttagcgtatggatttcgcgcgcacatgatgaacttgggtagctactgtctcggactcatccctatgaccatactagtggttaatattaaacccggtatggcctttaactccactggcataatcaatgagacaagcgatcacagcgagatcctggacaccacaaactcttatctcatcaagacatgcatgattctcgtttttctgtcatctattttcggatattgcaaagaggccgggcagatctttcagcagaagcggaattacttcatggatatcagcaatgtactcgaatggataatatacacaacagggatcatcttcgtccttccattattcgtggagattcccgcccacttacaatggcagtgcggcgccatcgcagtgtatttctattggatgaacttcctgctttatctgcagaggttcgaaaactgcggaatctttatcgtaatgctcgaagtcatcctaaaaacgctgctgcgcagcacagtagttttcatttttttgctactggcctttgggctaagcttttatattctgttgaatttgcaggatcccttctccagccctctgctgtcaattatacagactttttccatgatgctgggggacattaactacagggaatcgttcttggaaccatacctcaggaacgaacttgcccatcctgtgctgagtttcgcccaactggtgagcttcacaatcttcgtacctatagtcctgatgaacttgttaattggactggcagtaggagacatcgctgaggtgcagaagcatgcgagcttgaagagaatcgcaatgcaagtggaactccatacaagcttggagaaaaaactgcctctgtggttcctgcgaaaggtggaccaaaagtccaccatagtctacccaaacaaacccagatctggaggcatgcttttccacattttttgttttctgttctgcacaggagagattcgccaggagattcccaacgccgacaagagtcttgagatggaaatcttaaagcagaagtatcgtctgaaagatcttacgttcctattggaaaagcagcatgaacttattaagctcatcattcagaaaatggagattatttcggagactgaggacgacgactcccactgttcatttcaggatcgctttaagaaggaacagatggaacagcggaacagcagatggaacactgtcttgagagctgtgaaggccaagacacatcacttggaaccttag

SEQ ID NO: 138384 - DNA, 2280 bp, synthetic construct
  misc_feature 1..2280: note = Description of Artificial Sequence: Synthetic coding sequence
  source 1..2280: mol_type = other DNA
atgatggccgccctctatcccagcacagatctcagcggagcgagttcttcctctctgccttcaagcccgtctagttcatcccctaacgaagttatggccctgaaggatgtgagagaggtcaaggaggagaataccctcaatgaaaaacttttcctgctggcatgtgataaaggagactactacatggtgaagaaaattctcgaggaaaactcctctggagacctgaacatcaattgtgttgatgtgctgggccgcaacgctgtcaccatcaccatcgaaaacgaaaacctcgatatcttacaactgcttttggactacggatgccagaaactaatggagagaatacagaacccggaatattcaaccacaatggatgtcgcgccagtgattctagccgcccatagaaacaactatgaaattttgaccatgctgctgaaacaggacgtttcccttcccaagccacatgcggtgggctgtgaatgcacactatgtagcgctaaaaacaaaaaagattcactgcgccacagtcgctttaggctcgacatctatcggtgtctcgcctctcccgctttgattatgttgaccgaggaagatcccattctaagagcattcgagctttccgccgatctcaaggaactctccctggtggaggtcgagttccgcaacgattatgaagagttggcccgacaatgtaagatgtttgccaaggatcttctggctcaggcgcgaaatagccgggaactggaggttattctaaatcatacttcatctgacgagcctctggataaaagagggctcttggaggaacgtatgaacctttcccgacttaagctcgccattaagtacaaccagaaggagtttgtctcacagtctaactgtcaacagttcttgaatactgtgtggttcggccaaatgagcggctatcgcagaaagcccacgtgcaagaaaatcatgaccgttttgacggtgggcatcttttggccagtgctgagcttatgttatctgattgctcccaaaagtcagttcgggagaatcatccacaccccatttatgaagttcattatccacggtgcaagctattttactttcttgctacttctcaatctgtacagcctcgtgtacaatgaggacaagaaaaacacaatggggcctgcattagaacgtattgattatctgttaatcctgtggattattggcatgatttggagtgacattaaacgtctgtggtacgagggactagaagacttcctagaggagtcccggaaccaattatcctttgtcatgaactcactgtatctggcaactttcgccttgaaggtggttgcccacaacaagtttcatgacttcgccgaccggaaggactgggacgcttttcatcccacactggttgccgagggcctgtttgctttcgccaatgtgttatcctatttgaggctgtttttcatgtacacgacgtcctccatcctgggaccgctgcaaattagtatggggcagatgttacaagacttcggcaaattccttgggatgtttctgctggtgctttttagcttcactattgggctcacccagctgtacgacaagggctacacgagcaaagagcagaaggattgcgtcggcatcttttgtgaacaacagtctaacgacacattccattctttcatagggacctgcttcgcccttttttggtatatttttagcctcgctcatgtggccatttttgtcacacggttcagctatggagaggagctgcagagttttgtgggagccgtcatcgtcggaacttacaatgtagttgtggtgattgtgctcacaaagttgcttgttgctatgcttcacaagagcttccaattgatcgcaaatcacgaggataaagagtggaaatttgcaagagcaaagctttggctgtcttacttcgatgacaaatgcacactgccacccccgttcaacatcattcctagtccgaaaactatctgctacatgatttcaagcctctctaagtggatttgctcccatacctcaaagggcaaggtgaagcgccagaattccctgaaagaatggcggaacctgaagcagaagcgggacgaaaattaccagaaagtcatgtgttgcctggttcatcggtatctaacctcaatgagacagaagatgcaatccactgaccaggcaacggtggagaacttaaatgagctccgccaggatctgtcaaagttccggaatgagatccgggatctcttggggtttagaacatcgaagtatgctatgttctatccacggaactag

SEQ ID NO: 138385 - DNA, 435 bp, synthetic construct
  misc_feature 1..435: note = Description of Artificial Sequence: Synthetic coding sequence
  source 1..435: mol_type = other DNA
atgatctggagtgatattaaacgtctgtggtatgaggggctggaggactttctggaagagtcgaggaatcagctgagtttcgtgatgaattctctttacttagccacttttgccctgaaagttgtggcgcataataagatctcaatgggtcagatgctgcaagacttcggcaaattcctcggaatgttccttctggtgctctttagctttacgattggcctcacacagctgtatgataaggggtacacttccaaggagcaaaaggattgcgtgggaattttctgtgagcagcagagcaacgacacattccactcctttatcggaacctgtttcgctttattctggtatatctttagcctagctcacgtagccatcttcgtgaccaggttttcctacggcgaggaactgcaatcatttgtgggggctgtaatttag

SEQ ID NO: 138386 - DNA, 2382 bp, synthetic construct
  misc_feature 1..2382: note = Description of Artificial Sequence: Synthetic coding sequence
  source 1..2382: mol_type = other DNA
atgatggctgcgctgtatccctctaccgacttatcaggcgcttcttcgagctctttgccctcatcccccagcagtagttccccaaacgaagttatggctcttaaagatgtgagggaggtgaaagaagagaatacactcaacgagaaactctttctcctggcttgcgacaaaggcgattattatatggtaaagaaaatcctcgaagagaactcctccggtgacctgaatataaactgtgttgacgtgcttgggcgcaacgccgtcacaatcacgatcgaaaacgagaacctcgatattctgcagttactgttggattacggttgccagtctgctgacgcactgctcgtcgccattgactcagaggtggttggagctgttgatatcctgctgaatcaccggcccaagcgcagctccaggcccacaatcgtaaagctgatggagcggatacaaaaccctgagtacagtacgactatggacgtcgctcccgtgatcctggcggcacatcgcaacaattacgagattctcacaatgctgttgaagcaggacgtctctctgcctaagcctcatgcggtgggatgcgaatgtaccctctgttcggcaaagaacaaaaaagattctctgcgacattctaggttcaggctcgacatttaccgctgcctcgccagtcccgcactcattatgctgacagaggaggaccccattctgcgcgctttcgaattgagcgccgatctgaaagagctcagcctcgtcgaagtggagttccggaacgactacgaggaactcgctaggcagtgcaagatgttcgcaaaagatttattggcacaggcccggaatagtagggaactcgaggtgattctgaaccacacctcttccgatgagccgttggacaagagaggtctgctcgaggaaaggatgaatctgagcagattgaagcttgccatcaaatacaaccagaaagagttcgtgtcacaaagcaattgccagcaattcctgaatacggtgtggttcgggcagatgagtggttatcggaggaaacccacttgtaagaaaataatgaccgtgcttaccgttgggattttctggcccgtcttatcgctgtgttacctgatagctccgaagagccagtttggacgaatcatccacacaccctttatgaagtttataattcacggagccagttattttacctttctcttgcttctcaacctgtacagcctggtctacaacgaggacaaaaagaacacaatgggcccagcgctggaacggattgattatctgctcattctgtggataattggcatgatttggtctgatattaaacggctgtggtacgaaggcctggaagactttctggaggaaagtaggaaccagctgtctttcgtgatgaatagcctgtatctggctaccttcgccctaaaagtcgtggctcacaacaagtttcatgacttcgccgatagaaaagattgggatgctttccacccaacccttgtcgccgaaggcctgtttgcttttgcaaatgtactgagttatcttcggctgttcttcatgtacaccacctcaagtattctgggccccttacagataagtatgggacagatgctccaggatttcggcaagttccttgggatgttcttgctcgtgctgttttcgttcactattggactgacccagctttatgataagggctacaccagcaaagaacaaaaggattgtgttggtatattctgcgagcagcagtcgaacgacacttttcacagcttcatcggcacctgtttcgccttgttttggtacatcttctccctggcccatgttgccatatttgtgacccggttcagttacggagaggagctgcagagttttgtgggagcagttattgtaggtacttacaacgtcgtggtggtaatagtacttactaaattgctggtggccatgctccacaaaagctttcagctcatagcaaaccacgaagacaaagagtggaaatttgcgcgagccaagctgtggctgtcatactttgacgataaatgcacgttgcccccccccttcaatatcatcccatcaccaaagactatatgttacatgatctccagcctgtccaaatggatatgttcccacacaagcaaagggaaagtgaagcgacagaactcactgaaagagtggagaaacctgaaacaaaagcgtgatgagaactaccagaaagtcatgtgttgcctcgtacaccgctacttaacaagtatgcggcagaagatgcagtcgacagaccaggccactgtggagaacttgaacgagttgaggcaggacctgagcaaattccggaacgagattcgagacctcttgggctttcggactagcaagtacgccatgttttatccgcgaaattag

SEQ ID NO: 138387 - DNA, 2415 bp, synthetic construct
  misc_feature 1..2415: note = Description of Artificial Sequence: Synthetic coding sequence
  source 1..2415: mol_type = other DNA
atggcccagttttactataagaggaacgtcaatgccccctacagagacaggatccctcttagaattgtccgcgctgagtcagaactctcccccagcgagaaagcatatctgaatgccgtggagaaaggagattacgcctccgttaaaaagagcctcgaagaggctgaaatctactttaaaattaacattaactgtattgatcctctcgggcgcactgcactgttaatcgctatcgagaacgaaaatctcgaactgattgagcttctgctcagttttaacgtgtacgttggggacgccctgcttcatgccatacgaaaggaggtggtgggggctgtcgaactgctattgaatcataagaaaccttccggcgaaaagcagttcgtggcccagccaaactgccagcaactgctggccagccggtggtatgacgagtttccaggctggcgtaggaggcattgggcggtgaaaatggtaacatgcttcattattggactgctgttcccagtgtttagcgtgtgctatctcatagcccctaaatctccccttggattattcatccgtaagccatttattaaattcatctgtcatacagcctcttatctgacctttctcttccttcttctgcttgcctcacagcatatagacagaagcgatctgaaccgccagggccctcccccaactattgtggaatggatgatattaccctgggtgctgggcttcatatggggggagatcaaacagatgtgggacgggggattacaggactacattcacgattggtggaacctcatggactttgtgatgaatagcctgtacttggccacaattagcctgaagattgtggctttcgtgaagtattcagcacttaatccacgggagtcgtgggatatgtggcatcctactctggtggccgaagcgttgttcgctattgctaacattttcagcagtcttagactaatctctctatttactgcaaattcacacctgggtcctctccaaatcagtctgggacgaatgctgctggacattctaaagttcctctttatttactgccttgtgctgctcgcatttgctaatggattgaaccagttatatttttactatgaggaaaccaagggactgacctgtaagggaattaggtgtgagaagcaaaataatgcatttagtaccctgtttgagaccctccagtcactgttttggagcatcttcggcttgatcaatctttatgtcaccaacgtgaaagcccagcacgagtttactgagttcgtcggagcaacgatgttcggcacttacaacgtgatctcactggtggtgctcttgaatatgcttatcgctatgatgaataactcttaccagttaatcgccgatcacgcagacattgagtggaaattcgcacgtacaaagctgtggatgtcttactttgaggagggcggaaccctgcctactcctttcaatgtgattcccagccctaagagtttatggtatttgataaaatggatatggacacacctttgcaagaaaaagatgcgtcgaaaaccagagtcttttggaacaatcgggagacgggccgccgataacttgcgcagacaccatcagtatcaggaagtgatgcggaacttggtgaaaagatatgtggcagcgatgatccgtgacgctaagactgaggaggggctcaccgaagagaatttcaaagaactgaaacaagatatctcctcctttaggttcgaggtgctgggcctgctcaggggaagcaaactgagcaccatccagtccgcgaatgcttcaaaagagagctctaactcagccgacagcgatgaaaaatctgacagcgagggaaactctaaagataagaaaaagaacttttcgctgttcgacttgactaccctcatccaccccagaagcgctgccattgcaagtgaaagacacaacatttctaatgggtccgcacttgtggtccaagaaccccctcgagaaaagcagcggaaggttaacttcgtgacagatatcaagaactttggtcttttccatagaagaagcaaacagaacgctgctgaacagaatgcaaatcaaattttttccgtgagtgaagaggtggcccgtcagcaagctgccggtccattggaacggaatatccagcttgagtctagagggctcgctagccgtggtgatctgtccataccaggattgtccgagcagtgtgtcttagttgaccatcgagaacggaacaccgataccctgggcctgcaggtaggaaagagggtgtgcccgtttaaaagcgagaaagtggtagtggaagataccgtcccaattatcccaaaagaaaagcacgccaaagaggaagactcctcaattgattacgacctcaatctgcccgacacagtgactcacgaagactacgttaccacacggctctag

SEQ ID NO: 138388 - DNA, 2511 bp, synthetic construct
  misc_feature 1..2511: note = Description of Artificial Sequence: Synthetic coding sequence
  source 1..2511: mol_type = other DNA
atggcccagttctattacaaacgtaatgtcaacgccccatacagggacagaattccactgcgaatagtcagggctgagagcgagctatcgccatccgagaaagcttacttgaatgccgtggaaaagggggattatgcgagcgtcaagaagtctttggaggaggcagaaatctattttaaaataaacatcaactgcattgaccctctggggcgcaccgccctgctgatagccatcgagaacgagaaccttgagcttattgaactcctgcttagttttaatgtctatgtgggcgacgcattgttacacgccataaggaaggaagtggttggggccgtagagctgcttctgaaccacaaaaagccttctggtgagaagcaggtgcccccaatactgctagataaacaattcagcgagttcaccccggacataactcctatcattttagccgcccacaccaataactatgagatcataaaactccttgtgcaaaagggggtgtctgttcctagacctcatgaggtccgatgtaactgtgttgaatgcgtgagcagttctgatgtggattccctccgccattctcggagccgactcaacatctacaaagccctggcctctccttcgctaattgcgctgtcctcagaggacccttttttaactgcctttcagctcagctgggaactgcaggaactgtccaaggttgaaaatgagtttaagtctgagtacgaggagctgtcaaggcagtgcaaacagttcgccaaggatctgttggatcagactcggtctagccgcgagctggagatcattctgaattatcgcgatgacaacagcctgatagaggaacagtcaggaaatgacctcgctcgcttaaaactcgctatcaagtaccgtcagaaagagttcgtcgctcagcctaattgccagcagctgctcgcttccagatggtacgatgagttcccaggctggagaagaaggcactgggccgttaagatggtgacctgcttcatcataggccttctgttcccggtattcagtgtctgttaccttattgcccccaagtccccattgggacttttcatccggaagccgtttattaagttcatttgtcacacagcctcatatttgacttttctgttcctgctgcttctcgcctcacagcatatcgatcggagtgacctcaaccgtcagggcccgccacccaccatcgtggaatggatgatacttccctgggtgctgggatttatttggggcgagattaaacagatgtgggacggaggcctgcaggactatatccacgattggtggaatttgatggatttcgtgatgaactccttatatctggccactatttctttaaagatagttgcctttgtcaaatattcagcacttaacccccgtgaatcttgggacatgtggcatccaactctggtggcagaggcgctctttgcaatagcgaacatcttcagcagtcttaggttgattagcctgttcacagccaacagccatcttggtcctctgcaaatatcgttaggacggatgttattggatatccttaagttcctcttcatttactgtcttgtactgttagcctttgccaatggcctgaatcagttatacttttactacgaggagaccaagggcctgacctgcaagggtatccgttgcgaaaaacagaacaacgcgttttcgacacttttcgagacactccaatcgttgttctggtccattttcggcctgatcaacctgtacgttactaacgtgaaagcgcaacacgaattcacagagtttgtgggggctacaatgttcgggacatacaacgtcatttccttagtggtgctccttaatatgctgatagccatgatgaacaacagctaccagctgatcgccgaccacgcagatatagagtggaagttcgcccggacaaaattgtggatgtcctatttcgaagagggtggtacattgccaactccttttaacgtgataccaagcccaaagagcttgtggtatttgatcaagtggatatggacccatctctgcaaaaaaaagatgcgacgtaagcccgagtcttttggcaccatcggccgccgcgcagccgataacctccgcagacatcaccagtatcaagaagtgatgcgcaaccttgtcaagcgctatgtcgccgctatgatccgggatgctaaaacagaggaagtggccaggcagcaggctgccggccctcttgagaggaatatacaactcgagtccagggggctggcttccagaggcgatctgtccattcctggactctccgaacagtgtgtattggtggaccatcgggaacgcaacactgacacgctcggtctgcaggtgggaaagcgtgtttgtccattcaagtcagaaaaagtggtggtggaggatactgtgccaattatccccaaggaaaagcatgctaaagaggaggattcttccatcgattatgatctgaatctcccagacacggtgactcacgaggattacgttacgacaagactatag

SEQ ID NO: 138389 - DNA, 2682 bp, synthetic construct
  misc_feature 1..2682: note = Description of Artificial Sequence: Synthetic coding sequence
  source 1..2682: mol_type = other DNA
atggctcaattttattataagaggaatgtcaacgcaccctacagagacagaatccctctacggatagtccgggccgaatccgaactgtctccatccgagaaagcctacttgaacgccgtcgagaagggagactatgcgagcgtgaagaaatcattagaggaggctgagatctactttaagatcaacataaactgcatcgatccgctaggccgtaccgctctgctcatagcaatcgagaacgagaacttggaactcatagagttgctgctctcatttaacgtgtacgtgggggacgcgctgcttcatgcaattaggaaggaggtggtgggcgcggtggagctgctgttaaatcataagaaacctagtggcgaaaaacaggttcctccaatcttgctggataagcaattttcggaatttacccctgacattacacccatcatcctagccgctcacacaaacaactatgaaattatcaaactcctggtccagaaaggagtgtccgttccgcgtccccacgaggtcagatgcaattgtgtggaatgtgtatccagcagcgatgtcgacagcctgagacacagcagatcaagactcaatatttataaggctttggctagcccaagcctcatcgccttgagctctgaggacccattcctgaccgcattccagctgagctgggaactgcaggaactttccaaggtggaaaacgagttcaagtccgaatatgaggaactgtctcggcagtgcaagcagttcgctaaggacctcctcgaccaaactagaagctctcgcgaactggaaatcattctaaattaccgagatgacaactctctgatcgaagagcagtcgggaaacgacctggctaggctcaagttggcaattaagtatcgccagaaagagttcgtggctcagccgaactgtcagcagcttctggcatcaaggtggtacgatgagtttcctggctggaggcggcggcattgggctgtgaaaatggtgacctgttttatcattggccttctatttcctgtgttttcagtttgttacctgatcgcccctaaatcgccactgggactgtttatccgaaagccctttatcaaatttatttgtcatacagccagttacctcacctttctttttttgctgctgctggcttctcagcatattgatcggtctgatctgaacaggcagggacctccccccaccatagtggaatggatgatcctaccctgggtgctcggcttcatctggggtgagatcaagcaaatgtgggacggggggcttcaggattacattcacgactggtggaatctgatggacttcgtgatgaacagcttataccttgctacaatttctctcaaaatagttgcattcgtgaagtactcagccctgaaccccagggagtcctgggatatgtggcaccctaccctcgtggccgaggccctgttcgccatcgcgaacattttctcttctcttcggctcatttccctcttcaccgcaaacagccaccttgggcctctgcagattagtctcggaaggatgctactggatatattgaagtttctgttcatctactgcttggttctgttggccttcgccaacggtttgaatcagctttatttctattatgaagaaactaaagggctgacctgcaaagggattcgctgcgagaagcagaacaacgctttctctactctttttgagacactccagagcttattttggtccatcttcggactcataaacctctacgtgactaatgttaaggcacagcacgaattcactgaatttgttggtgccaccatgttcggcacgtacaacgtgatctccctcgttgtgctgctcaatatgttgatcgctatgatgaataactcgtaccagctcatcgccgaccatgcagatatcgagtggaaattcgcccgaactaagctgtggatgtcatacttcgaggaaggtggaaccttacccacacccttcaatgtgatcccgtccccaaagagcctatggtatctaattaagtggatctggactcacctgtgtaaaaagaagatgaggcggaagccggagtctttcggaactatcggaagacgggcggctgacaacttgcggcggcatcatcagtaccaggaagttatgaggaacctggtgaagagatacgtcgcggccatgatccgtgacgccaagaccgaagaaggactgactgaggagaactttaaagagctgaagcaggatatttcatccttccggttcgaggtgctcggactgctgaggggtagcaaattgagtaccattcagtccgccaatgcaagtaaagagtcttccaactcagctgatagcgatgagaagtccgattcagaggaggaggtggctaggcaacaagccgccggcccactcgagcgcaacattcagttggagtcccgaggacttgcctcccgcggggacctcagcattcctggcctcagcgaacaatgcgttctggtggaccatagagagcggaatacagacactttgggcctccaagttggcaagcgcgtctgtcccttcaaatccgagaaggttgtggtggaggacacggtacctatcatccctaaggaaaagcatgcaaaggaagaggatagcagtattgactatgacttaaatctgcctgatacagtgacacatgaagattacgtgaccacaaggctgtag

SEQ ID NO: 138390 - DNA, 2487 bp, synthetic construct
  misc_feature 1..2487: note = Description of Artificial Sequence: Synthetic coding sequence
  source 1..2487: mol_type = other DNA
atggctcagttttactacaaaagaaatgtcaacgctccttatcgggacagaatccctctacggatagtccgagctgaatccgagttgtctcctagcgaaaaagcctacttgaacgcagttgaaaagggcgactacgctagtgtgaagaaatccctggaagaagccgaaatttacttcaagattaacatcaactgtatcgatcccctcggacggactgcactgctgatcgccattgagaacgagaatcttgaactgatcgagttattgctgtccttcaacgtctatgttggcgatgcgcttcttcatgcgatcaggaaggaggttgttggggccgttgaactgcttctgaatcataaaaaaccctctggagagaagcaagttccccccatacttcttgacaagcaattttcagagtttacaccagacatcaccccaataatacttgctgctcatactaataattatgagatcatcaaattgctggtgcaaaaaggggtcagcgtgcccaggccccatgaggtaaggtgtaactgtgtcgaatgcgtgagctcctcagacgtcgattctctgagacatagtcgcagtcgcctcaacatctacaaggctctcgcctctccctccttaatcgccctgtcaagtgaagatccttttcttacagctttccaactttcctgggagctccaggagctctccaaggtcgagaacgagtttaagagtgaatacgaagagctgtcaaggcagtgcaaacaattcgcaaaggatttgctggatcagacaagaagttcacgggagctcgagattattttgaactatagagacgacaattccctgattgaggagcagtctgggaacgacttggcacggctcaagctcgccataaaatatcgccaaaaagaatttgttgcccagccaaactgtcagcagttgctcgctagccgctggtatgatgagttccccggctggcgtcgtcggcattgggcagtcaagatggtgacttgtttcattattggactactgttcccagtgttctcagtgtgttacctaatcgcccctaagtccccactcggactgttcattaggaaaccgttcattaagtttatttgccacactgcctcttatctgactttcctttttttattgctgctggcaagccaacacatcgacaggagtgacctgaacaggcaaggacccccaccaaccatagttgagtggatgatcctaccttgggttctgggatttatctggggagaaatcaaacagatgtgggacggcggactacaggattatatccatgactggtggaaccttatggatttcgttatgaattcactgtacctggcgaccatctccttgaaaatagtggcatttgtgaagtactccgccctgaaccctagggaaagctgggatatgtggcaccccaccctcgtggccgaagctctcttcgccattgccaatatttttagttctcttaggctcatttcactcttcacagccaacagtcacctgggacccctgcagatatcgttggggcgcatgctcctcgatattttgaagttcctcttcatatattgtctggtattgcttgctttcgccaatggtctcaaccaactgtatttttactacgaggaaactaagggtttgacctgcaaggggattcgctgcgaaaagcaaaataacgctttctcaaccctctttgagacactgcagagcctgttttggtcgatttttggtctgatcaatctatacgttaccaatgtgaaagcgcagcacgaattcacagaattcgttggcgcaacaatgttcggaacttacaacgttatcagtcttgtggtacttctcaatatgctcatcgctatgatgaataactcttatcagctcattgccagacgggccgccgacaatctgaggagacatcaccagtatcaggaggtaatgaggaacttagtcaaacggtacgtggctgcaatgatcagagacgctaagaccgaggaaggattaactgaggagaattttaaagaactgaagcaagacattagttctttccgctttgaagtactgggattgcttagaggttctaaactgtccaccatccagagcgccaacgcttctaaagagtcatcaaattctgctgatagcgacgagaagtcagatagcgaagaggaagttgcccgccagcaggctgcagggccgttggagcgaaatatccagctggagtctcgaggcctggcatcgcggggcgatctgtctatccccggcctcagcgagcaatgcgtactggtcgaccatagggagagaaacaccgacactcttggactgcaggtcgggaagcgcgtctgtccattcaagtcggagaaggttgtcgttgaggacaccgtgcctatcatccccaaagagaagcacgctaaagaggaagactcctctattgattacgaccttaacctgcccgacacagttacccacgaggattacgtcactacccgactatag

SEQ ID NO: 138391 - DNA, 2415 bp, synthetic construct
  misc_feature 1..2415: note = Description of Artificial Sequence: Synthetic coding sequence
  source 1..2415: mol_type = other DNA
atggcccaattctattacaagcgcaatgtgaacgccccctatagggaccgaattccactgcgcatagtgcgagctgagagcgaactatccccaagcgaaaaagcctacctgaacgccgtggagaaaggtgactacgcttccgtgaagaagagtttggaagaggctgaaatttatttcaaaatcaacattaactgtatcgatcccctggggagaactgcgctgttaatagccatcgagaatgaaaatctcgagttaatcgaactccttctcagctttaacgtctatgtaggtgacgctctcctgcatgctattagaaaggaagtggtgggcgcagtggaactgctgttaaatcacaagaagccttccggtgagaaacagttcgttgcccagccaaattgtcaacagctccttgccagtagatggtacgacgaattcccgggctggcgacggaggcattgggcagtgaaaatggtgacatgcttcatcattggccttctcttccctgtgttctccgtttgctatctgatagccccaaaatctcccctcggcttatttatcaggaaaccattcattaagtttatctgccatacagcatcatatctcacattcttattcctgcttcttctggcctcacaacacatagatagaagcgacctaaatagacagggccctcccccgacgattgtagaatggatgatactgccttgggtccttgggttcatatggggcgagattaagcaaatgtgggacggcgggctgcaggactacattcatgactggtggaacctgatggacttcgtgatgaattctttatacctggccactatctcgttgaaaatcgtcgcattcgttaagtactccgcccttaatccgagggaatcgtgggacatgtggcatccgactctggttgctgaagccctctttgcaattgcgaacatttttagttctctgcgcctgatatctttgttcaccgccaattcccatctgggacctcttcaaatctcactcggccgcatgctcctggacatcttgaagtttctctttatatactgcttagtactccttgccttcgccaatggactgaatcaactatacttctactatgaagaaacgaaggggctgacttgtaagggtattaggtgtgagaaacagaacaacgcgttctcgacattatttgagacgctccaatctcttttctggtcaatttttggactgatcaacctttacgtcactaacgtcaaggcccagcatgaattcactgagtttgtcggagcgactatgtttggcacttataacgttataagtttggtggtgttactgaacatgctgattgccatgatgaacaactcctaccagctgatcgccgatcacgcagacattgagtggaagttcgcaagaactaagctgtggatgtcatacttcgaagagggcggaacgctcccaactccgtttaacgttataccatcaccaaagtcactgtggtaccttatcaagtggatttggacccacttatgcaagaaaaagatgaggcggaagcccgagtcttttggtacaatcgggaggagggctgctgacaaccttcggcgacatcaccagtatcaggaggttatgcgaaatctggtcaagagatacgtcgcagccatgatccgcgatgccaaaacagaggaaggtctgacggaggagaatttcaaggagttgaagcaggatataagctcatttcgcttcgaggtgctgggactgctccgaggatctaagctctccaccatacaatccgcgaacgcgagcaaggagagcagtaacagtgcggacagcgacgaaaagtcagacagtgaaggtaactccaaagacaagaagaaaaacttctccctgtttgatctcacgaccctcatccatccccggtctgcagcgattgcaagcgagaggcataatattagcaatggttcagctttggtggtgcaagagccaccaagagaaaagcagcgcaaggtcaactttgtaaccgacattaaaaatttcgggctgttccaccgccgcagcaagcaaaatgcagccgagcaaaacgctaaccaaatctttagtgtctctgaagaagttgccaggcagcaggcagccggtccattggagagaaacatccagttggaatcacgaggcctggctagccggggggacctaagcatccctggactcagtgagcagtgcgtcctagtggaccatagggagcggaatacagatacacttggcttgcaggtcggaaagagggtctgtcccttcaagtccgagaaggtggttgtggaagatactgttccaatcatccctaaagagaagcatgccaaggaagaggatagctccatcgattacgaccttaacttaccggacacggtgactcatgaagactacgtgactacacgactgtag

SEQ ID NO: 138392 - DNA, 2949 bp, synthetic construct
  misc_feature 1..2949: note = Description of Artificial Sequence: Synthetic coding sequence
  source 1..2949: mol_type = other DNA
atggctcaattctactacaaaaggaacgtcaacgccccttacagggacagaatccccctcaggattgttagggccgagtccgagctgagcccctcagagaaagcttacctgaacgcagtggaaaagggcgattatgcttccgtaaaaaagtccctcgaagaagccgagatatatttcaagataaacatcaattgcatcgatccccttggtcggacagcacttttgattgccattgagaatgagaatctggagcttatagaattgttactttccttcaacgtctacgtaggagacgccttattacatgctatacggaaagaggtggtgggagctgttgagctattactcaaccataagaagcccagcggcgagaagcaagtaccgccaatcttgttggacaaacagttctcagaattcacaccagatatcaccccaattattctcgccgcccatacaaataattacgagatcattaagttactggtgcagaagggcgtgagcgtccctcggccgcacgaggtccgctgtaactgcgtagaatgcgtgtctagttctgatgttgattcattgcggcactcacgctcccggctgaatatctacaaagccttagcaagcccatctctgatcgctctgtccagtgaagacccattcctgacagccttccagctctcctgggagctgcaggaactgagtaaggttgaaaacgaattcaaaagcgagtatgaagagctttcacgtcaatgcaagcagttcgccaaggatctcttggatcagacacggtccagccgggaactagaaattattttaaattaccgtgacgacaattcacttatcgaggaacagtcgggcaatgatttggccaggcttaaactagccatcaaatatcggcagaaggaattcgtcgcccagccaaattgtcagcaactgctggccagccggtggtacgatgagttcccaggctggcggcgtaggcattgggccgtgaaaatggtgacatgctttattattgggctgctgttccctgtcttcagcgtctgctacttgatcgctcctaaaagtccgctgggactgttcatcagaaaacccttcattaaatttatatgtcatacagctagctaccttacctttctgtttctcctattgctcgctagtcaacatatagaccgatctgacttaaacagacagggaccaccgcccaccatagtggagtggatgatcctgccatgggtccttgggttcatttggggggagataaaacaaatgtgggatggcggactgcaggactacatccacgactggtggaacctgatggactttgttatgaacagcctctatctggccaccatttcactcaaaatcgttgcctttgttaaatattctgctttgaaccctcgtgagagttgggatatgtggcaccccacactcgtggcggaggcactgttcgcaatagcaaacattttttccagtctgcggctcatttctctcttcactgctaatagtcatctcggacctttgcagatctctctgggtcgtatgcttcttgacatactgaaattcctttttatatactgcctcgttctgctggcatttgctaacgggttgaaccagctctacttttactacgaagagaccaaggggttaacatgcaagggaatccggtgcgagaagcaaaacaacgccttctctaccttattcgagacgttgcagtcactcttttggtcaatcttcggccttatcaatctttacgtcaccaacgtaaaagcccagcatgagtttacagaattcgtgggggccaccatgttcggcacgtacaacgtgatcagcttggtggttttgctgaatatgctgattgctatgatgaacaattcatatcagctcatcgcagatcatgccgatatcgagtggaaatttgcacggaccaagctctggatgtcctactttgaggagggagggactcttcccactccttttaatgtcatcccatcaccaaagtccttgtggtaccttatcaaatggatctggacccacctttgcaagaagaaaatgaggagaaagcccgaatctttcgggactatcggggtgagaacccagcaccggagggccgcagacaacctccgccggcatcatcagtatcaggaagtgatgcgtaaccttgtgaagagatatgtggctgccatgatcagagacgcaaaaacggaggagggcctgactgaagaaaactttaaggagctgaaacaggatatttctagctttcgatttgaagtcctgggtcttctgcggggctcgaaactgagcacgattcaatccgccaacgcttctaaggagagttcaaacagcgccgattcggacgagaaaagtgatagcgaggggaattcaaaagacaaaaagaagaactttagtctcttcgatctgactacactcatccatcccaggtcagcagcaatagcctccgagagacacaacatttccaatggatctgcattggttgtgcaggagccaccacgagagaaacagagaaaagtgaactttgtgaccgatattaagaattttggattattccatcggagaagtaagcagaacgctgcagaacagaatgccaaccaaattttctctgtctcagaggaggtggcccggcaacaggcagccggcccgctggagagaaacatccaactggaatctaggggtctggccagtcgcggggacctttccatccctggcctctctgagcagtgcgtgcttgttgatcatagagagcggaataccgacacactgggcctccaggtgggaaaaagagtctgcccattcaagtcagaaaaagtggtggtggaggacaccgtccctatcatacccaaagaaaagcatgccaaggaagaggattcctctatagattatgacctcaaccttccggacaccgtcacacacgaagattatgttaccacgaggctgtag

SEQ ID NO: 138393 - DNA, 2934 bp, synthetic construct
  misc_feature 1..2934: note = Description of Artificial Sequence: Synthetic coding sequence
  source 1..2934: mol_type = other DNA
atggcccagttttactacaaacgaaacgtgaatgcaccgtaccgcgacagaatcccactgcggatagtgcgagccgagagtgagctctctcccagcgagaaggcatacctcaacgcggtggaaaaaggggattacgcctcagtaaagaagtcattagaggaggcagaaatttatttcaagattaacattaattgtatcgatccacttgggagaactgctctcctgatcgccattgagaacgagaacctggaactgattgaattactgctcagcttcaacgtgtatgtcggcgacgcactgctgcacgccattaggaaagaggttgttggagcggtggaactgcttctaaaccacaaaaaaccctcaggcgaaaagcaagtgccacctatcttgctggacaaacagttttctgagtttacccccgacatcactcccatcatccttgctgctcacacgaacaactacgaaataattaagttgctggtacagaaaggagtcagcgtgcctaggccccacgaggtgcgatgcaattgtgtggaatgcgtgagtagctcggatgtcgattcactccgccattcacgatccagactcaatatctacaaagccctagcatcaccatccctgatagcccttagctctgaagatcccttcctgaccgccttccaactctcatgggaactgcaggagctgagcaaagtcgagaacgagtttaagagcgaatacgaagaactctcaagacagtgtaaacagtttgccaaggaccttcttgaccagaccagatccagcagggagcttgagattatattgaattaccgggatgacaacagcctgattgaggaacagtctggtaatgatctggcccgtcttaaactagccatcaagtataggcagaaagagttcgttgcacagccgaattgccagcagctcctcgctagtcggtggtacgacgaatttccgggatggcggcgtcgccactgggctgttaagatggtaacctgcttcatcatagggctgctgttccctgtgtttagtgtatgttacctgattgctcctaagtccccccttggtctttttatcaggaagccttttattaaattcatttgtcacaccgcctcttatctaacgtttctctttttgcttctccttgcctcccagcacatagataggtctgaccttaacagacaggggccccctcccaccatcgtcgagtggatgattctgccctgggtgcttggatttatttggggggagatcaagcaaatgtgggacggagggttgcaagattatatccatgattggtggaacctcatggacttcgtgatgaactctctctacctcgctacaatatctcttaagatagtggcttttgttaagtattccgctctgaacccgcgagaatcttgggacatgtggcaccctacgcttgtggctgaagcccttttcgccatcgcaaacatcttctcctccctgcggctgatttctcttttcacagccaactcccacctgggacccctgcagatatctttagggcgaatgctgctggacatcttaaaattcctttttatatactgcctggttctgctcgcatttgctaatggactgaatcagctttacttttactatgaagagaccaaagggctgacttgtaagggaatccggtgtgaaaaacaaaacaatgctttttcaactctcttcgaaactctgcagtcactgttttggagcatttttggcttgatcaacctgtatgtaactaacgtcaaagcccagcacgagtttaccgagtttgtaggtgcaacaatgttcgggacctataacgtgatatctttggtggttctgttgaatatgttaattgccatgatgaacaattcctaccagctgatagccgaccacgccgacatcgaatggaaatttgctagaactaagctatggatgtcctacttcgaggaaggcggaacccttcctacccccttcaatgtgataccctcacccaagtctttgtggtatcttattaagtggatctggacccatctgtgtaagaagaaaatgcggaggaaacccgagtcatttgggactatagggaggagagctgcagacaatcttaggaggcaccaccagtatcaggaggtgatgaggaacctggtgaagagatatgtggctgcaatgatacgcgacgcgaaaacagaggagggcctcacagaggagaattttaaggagctgaaacaagacatatccagcttccggttcgaggtgctgggactcctccggggaagtaagctgagcacaattcagagcgctaatgcttctaaggaaagttcaaactccgcggactccgatgagaaatctgatagcgaggggaacagtaaggacaagaaaaagaattttagcctatttgatctcaccacactcattcaccctcgctctgctgcaatcgccagtgagaggcacaacatcagtaacgggtccgcacttgtcgtgcaggagcctccaagggaaaaacagcgaaaggtaaactttgtcaccgatatcaagaactttggactatttcatagacgatcaaaacaaaatgccgccgaacaaaatgccaaccaaatctttagcgtgtctgaggaagttgctaggcagcaggccgccggtcctctggagagaaacattcagctggaatccagagggctcgccagcaggggagacctgagcatacccggtctttcggaacagtgtgtccttgtggatcatcgggagcgcaacaccgacacactgggcttacaggtggggaaaagggtttgtccgtttaagagcgagaaagttgtcgtggaagacactgtcccaatcattcccaaagagaaacacgcaaaggaggaggattcttcgatcgattacgatctgaatttgcccgatactgttacccacgaggattacgtcaccacacgattgtag

SEQ ID NO: 138394 - DNA, 1383 bp, synthetic construct
  misc_feature 1..1383: note = Description of Artificial Sequence: Synthetic coding sequence
  source 1..1383: mol_type = other DNA
atggctcaattctactacaaaagaaacgtgaacgccccgtatagggacaggattcctttacgcatcgtgagggcagagtccgagttgagcccgtcagaaaaggcctatctgaatgccgtcgagaagggcgactacgcaagtgtcaaaaagtcgctggaggaagcggagatctatttcaaaatcaacatcaattgcattgacccactcggccggacagctctgttgattgccatagagaacgaaaacctggagctgatcgaactcttattgagctttaatgtttacgtgggtgacgcacttttgcacgctatcagaaaggaggtggtgggcgccgtggagctgctgctgaaccataaaaaacccagtggagaaaagcaggtccccccaatcttactggacaaacagttttccgagttcacaccagatataacgcctattattctggcggcacacacgaacaattacgagatcattaaactcctagtgcagaagggggtctccgtacctaggcctcacgaagtcaggtgtaactgcgtggaatgcgtctcctccagtgacgtagacagcctacggcattcccgcagtaggctcaatatctataaggcgttagcctccccctccctcatcgccttgtctagcgaagaccccttcctgactgccttccaactgagctgggaactgcaggagttatccaaggttgagaatgaatttaagagcgaatatgaggaactttctcgccagtgcaagcagtttgctaaggatctcctggaccagacaagatcctctcgggagctcgaaatcattttaaactacagggacgataatagtttgattgaggagcagtcagggaacgacttggccagactcaagctggccattaagtatagacaaaaggaatttgtagcacagcctaattgccaacagttgttagcatcaaggtggtacgacgagtttcctggctggagacgccgccactgggccgtgaagatggtcacttgtttcatcattggcctgttattccccgtattctctgtctgctatctgatagctcctaagagccccctagggctgttcataaggaaaccctttattaaattcatctgccacaccgcctcttatctgaccttcctgtttcttctactcctggcatctcagcacattgaccgatccgacctgaacagacagggaccaccgccaaccatcgtggagtggatgatccttccatgggtgctggggttcatttggggcgagatcaaacagatgtgggatggggggttgcaagattacatccatgactggtggaatcttatggactttgtaatgaatagcctgtatctcgcaaccattagtcttaagattgtggccttcgtgaaggtgatctag

SEQ ID NO: 138395 - DNA, 2511 bp, synthetic construct
  misc_feature 1..2511: note = Description of Artificial Sequence: Synthetic coding sequence
  source 1..2511: mol_type = other DNA
atggcacagttttattataagcgcaatgtgaatgccccgtatagggatcgcatacccctccggatcgtccgggccgagtctgagctgagtccctctgagaaggcttacctgaacgccgtagaaaagggggactatgcaagcgtcaagaagagcctggaagaagcagagatttatttcaagatcaatatcaattgcattgatccattgggcagaactgcccttttgatcgctatcgagaatgaaaacctggagttaattgaactgcttcttagtttcaatgtctacgtgggagacgccctcttgcacgcaattaggaaagaggtggttggggcggtcgaactgctcctcaatcacaagaagcccagcggtgagaaacaggtgcctccgatcttactagataagcagttctccgagtttactccggacatcacacccatcattttagccgcccatactaataactatgaaataattaagttgctggtacagaaaggggtttctgtcccgcggccccatgaagtcagatgtaattgcgtcgagtgcgtgtcctcatctgatgttgattccctaaggcactcccgtagtaggttgaatatctataaagccctggcaagccccagcctcatcgccctgtccagtgaggacccctttctaactgcattccagctgtcctgggaactccaagaactgtcaaaggtggaaaatgagttcaaatctgaatatgaggagctctctcgccaatgtaagcagtttgccaaagatcttctggatcaaacgagatcatcacgagagctggaaattattttaaactacagggacgataattccctgatcgaggaacaatcaggcaatgacttggcacgcctcaaactggccatcaaatatcgacagaaagagtttgtcgctcagccaaattgccagcagcttttggcttctagatggtatgatgagttccctggatggcgtcgcagacactgggcggtcaagatggtcacatgcttcatcattggcctgttattccccgttttttcagtctgctatctgatcgctcccaaatcccctctcgggttgtttatccgcaagccattcatcaaattcatttgtcacactgccagctatcttacttttttattcctgctgttgcttgcttcacaacacattgacaggtccgacttgaacaggcagggtccccctcctacaattgttgaatggatgatccttccctgggttctggggttcatctggggtgagatcaagcagatgtgggacgggggcttacaggattatatccatgattggtggaacctcatggattttgtcatgaattctctctatctggccaccataagccttaagattgttgcctttgttaagtatagcgctctgaaccctagagaaagctgggacatgtggcatccaacactggttgcagaggccctcttcgcaatcgccaacatcttctccagcttaagactgatcagtctgtttactgcgaatagtcacctggggcccctccaaataagtctggggaggatgctcttggacattctgaagtttctcttcatctactgtcttgtcttgctggccttcgccaacggattgaatcagctatacttctattacgaagaaaccaaggggctgacttgcaagggtatcaggtgcgaaaaacaaaacaatgccttcagcaccctgtttgaaacattgcagagtctcttctggagcattttcggactgatcaacctttacgttaccaacgttaaggcccagcacgaatttaccgagttcgtcggggccaccatgttcggtacgtacaatgtaatctctctggttgtgttactgaacatgctgatcgcaatgatgaacaactcctaccaactgatcgcggaccacgccgacatcgagtggaaattcgctaggactaaattgtggatgtcttatttcgaagagggcggcacattgcctacccccttcaacgtgattccatcccccaaatctctgtggtatctcattaaatggatatggacgcacctgtgcaagaagaaaatgagaagaaagccagagtcatttggcacaataggccgcagggccgccgataatctgaggcggcatcaccaataccaggaggttatgaggaatctggtgaaacgctacgtagccgccatgatccgtgacgcgaaaacggaggaggtggctcgccagcaagcagctggtcccctagagaggaatatccagttagagagcagaggcttggcttcacgtggcgaccttagcataccgggccttagcgaacaatgtgtcctcgtcgatcaccgcgagaggaataccgacacactaggactgcaggttgggaaacgggtttgccccttcaaatctgagaaggtcgtggtggaggacaccgtgccaatcattcctaaggagaagcacgcaaaggaagaagattctagcatagactacgatctgaatcttcctgacaccgtgacccatgaagattacgtaaccaccaggctgtag

SEQ ID NO: 138396 - DNA, 2394 bp, synthetic construct
  misc_feature 1..2394: note = Description of Artificial Sequence: Synthetic coding sequence
  source 1..2394: mol_type = other DNA
atggccgcagctcctgtcgccgccgggtctggagctggaagaggacggagatctgcagctacagtggccgcatggggcgggtgggggggccggccgcgtcctggcaatatattgttgcaactcaggcagggccaactcacaggccgcggcctggtgagagctgtccaatttaccgaaacctttctgaccgagagagataagcaatccaagtggtcaggtatcccacagctgcttctcaaattgcacacaacatctcacctgcacagtgacttcgtggagtgtcagaacatccttaaagaaatcagtccattgttgtcaatggaagcaatggctttcgtgaccgaagagagaaagctgacacaagagaccacttacccaaacacgtacatttttgacctgtttggaggagtcgacttgctggtggagatcttgatgcggcccacaatctctatccggggccagaagctcaaaatatctgatgaaatgagcaaggattgtctgtctattttgtacaacacctgcgtgtgcaccgagggggttacaaaaagacttgccgaaaagaacgatttcgtaatttttctgttcaccttgatgaccagcaagaaaaccttcctccaaactgctacgctgatcgaggacatcctgggtgtgaagaaagagatgattcgcctcgacgaggtgccaaacctgagcagtctggtgagtaactttgatcagcaacagctcgcaaacttctgtcggattctcgcagtaaccatctccgagatggacactggtaacgacgacaagcatactttattggccaaaaatgcgcagcaaaagaagagcctcagtttaggcccttccgccgccgagatcaaccaggctgcgctcctcagtatccctgggttcgtcgaacggttatgcaaactcgctacccggaaagtttccgaatcaacagggacggcttcgttcctacaggagctggaggagtggtacacgtggctggataacgcgctcgtactggacgcgctgatgagggtggccaatgaggaatctgagcacaatcaggctagtatcgtattccccccaccaggggcctctgaggaaaacggccttccccatacctcagcccggactcagctgccccaatcgatgaagattatgcacgagattatgtataaactggaggtgctttacgtgctgtgcgtgcttctgatgggtcggcaaagaaaccaggtccatcgaatgattgctgagtttaagcttatccctgggttaaacaacctcttcgataagcttatctggagaaagcacagcgcttccgcactggtcctgcacggacataaccaaaattgtgattgctcccccgatatcacgttgaaaattcagttcctccgcctcttacagagcttttccgatcaccacgaaaataagtatttgctgcttaacaaccaggaactgaatgaactcagtgcgatcagcctgaaggcaaacattcccgaagtcgaggcagttcttaacacagaccgaagtcttgtgtgtgacgggaagagaggccttctgacccgccttttacaagtgatgaagaaggaaccagccgaatcatcttttagattttggcaggcccgggctgttgaatcctttctcagagggacaacctcatatgccgaccagatgtttctgctgaagaggggtctactcgaacacattctgtactgcatcgttgattctgagtgtaagtctcgggatgtgctccaaagctacttcgaccttttgggagagctcatgaagttcaacgtagacgcatttaaaagatttaacaagtacatcaatactgatgcaaaatttcaggtctttctcaaacagattaattccagccttgtggactcaaacatgctcgtgcgctgcgtgaccctgagcctggaccgttttgagaaccaggtggatatgaaggtcgccgaggtcctttctgagtgcagactactagcatacatctctcaggtgcccacccagatgtcattcctgtttcgattaattaacattattcacgtccaaactctgacgcaggagaacgtcagttgccttaacacctcccttgtgatactgatgcttgctaggcgcaaggaacggctgcctctgtacctgcgcctcctgcagagaatggaacattctaagaagtaccccggcttccttctgaataacttccataacctgcttcgattttggcagcaacattacctccacaaagataaggattcaacctgtttagaaaatagttcttgcatctccttcagttattggaaggagacagtgtcaatattgttgaaccccgaccgccagagtcctagcgccctcgtgagctacatcgaggagccatatatggacattgatcgcgacttcacagaagagtag

SEQ ID NO: 138397 - DNA, 2277 bp, synthetic construct
  misc_feature 1..2277: note = Description of Artificial Sequence: Synthetic coding sequence
  source 1..2277: mol_type = other DNA
atggctgctgccccagtcgctgcaggaagcggcgccggaagaggccgaagatccgctgctactgtcgcagcctggggaggttggggcggccggcctcgtccaggcaacatcttactgcagctgcgccagggccagctaactggcaggggtctggttcgcgccgtccaattcaccgaaacattcctaaccgagcgcgataagcagtctaaatggtctgggataccacagctgctgctgaagttacacaccacttcccatctgcacagcgattttgtcgagtgccagaacatccttaaactcttggtggaaatcttgatgcgtccaacgatatcaatcagaggccagaaattgaagatttccgacgaaatgagtaaggattgcctgtccatactctacaatacctgcgtgtgcactgagggagtgactaaaaggctcgccgaaaagaacgatttcgttatcttcttatttacgctcatgacctctaagaaaacgtttctgcagaccgccaccttgatcgaagatattctcggggtgaaaaaggagatgattcgtctggacgaagtgccgaacctgagttccctggttagcaactttgaccagcagcagctggccaacttttgtcggattctggccgtgactatttccgagatggataccggcaatgatgataaacataccctcctggctaaaaacgcgcaacagaagaagagcctgtcgctgggcccttccgcggcagaaatcaaccaggccgccctcctgtccatccccgggtttgtcgagcgcctatgcaaacttgctacccgcaaagtgagcgaaagtaccgggacagcaagcttcctccaagagctggaggaatggtatacgtggctggacaacgctctggtcctcgatgccctcatgcgtgttgcgaatgaggagagtgaacacaaccaagcgagcatcgttttccctcccccgggggcctctgaggaaaatggtctgcctcacaccagcgccaggacccagctgccccaaagcatgaagattatgcatgagattatgtacaagctggaggtcttgtacgtgctttgcgtgctcctcatggggaggcaacgtaatcaagtgcatcgtatgattgccgagtttaaactgatccccgggctaaataacctgtttgacaagctgatttggcggaagcactccgcatctgccctggtgttacacggccataatcagaactgcgactgctcaccagacatcacgctaaagatccagttcctgcggttgcttcagtcttttagcgatcaccacgaaaacaagtatctgctactgaacaaccaagaactcaacgagctttccgccattagcctcaaggccaatatccctgaagtggaagcggtcctgaacaccgatcgttcgcttgtctgtgatgggaagagggggttgctgacacgactcctacaggtgatgaagaaggaaccggctgaatctagctttcgattctggcaggctagggcagtcgaatcctttctgcgcgggaccaccagctacgccgatcagatgttcctgctcaaacgggggttgctggaacacatcttatattgcattgtggattccgagtgcaaaagtcgggatgtgcttcaatcatatttcgatctgctgggagaactgatgaagtttaacgtcgacgcgtttaagcggtttaataaatacatcaacacggacgccaagtttcaagtgtttttgaagcaaataaactcgagccttgtggactctaacatgttggttaggtgtgtgaccctgtcacttgatcgattcgagaatcaggtggatatgaaggttgcagaggttctcagcgaatgccggctgctcgcatacatctctcaggtgccaacgcaaatgagttttctgtttaggctgataaacatcattcacgtgcagactctgacacaggaaaacgtcagttgcttgaacacttcccttgtgatcctgatgttggctaggagaaaggagcgattgccgctgtacctgcgccttctgcagagaatggaacactccaaaaagtacccagggtttctccttaataatttccataacctgctgcgattctggcagcaacattatttgcacaaagataaggactctacgtgtttggaaaactcaagctgcatatcgttttcatattggaaagaaacggtctctattctgctgaatcccgatcggcagtccccatccgcgctggttagctatatagaagaaccctacatggatatagaccgagatttcacagaggagtag

SEQ ID NO: 138398 - DNA, 2370 bp, synthetic construct
  misc_feature 1..2370: note = Description of Artificial Sequence: Synthetic coding sequence
  source 1..2370: mol_type = other DNA
atggcagcggctcccgtcgcagcagggtctggggccggccgtggccgacggtccgccgccactgtggcggcctgggggggatggggaggccgcccccggccgggaaacatacttttgcaactgaggcagggccagctgacaggccggggcctggttcgggcagttcagtttactgagacattccttactgagcgggacaagcagtcaaagtggtcaggaatcccccagcttctcctgaaattacacaccaccagtcatttacatagcgacttcgttgaatgccaaaatattcttaaagaaatatctccactgctgagcatggaagccatggccttcgtaactgaagaaagaaaattgacccaggagactacctaccctaacacttatatcttcgatctctttggaggagtggacctgctggttgagattttgatgcgtcctactatctccattaggggtcaaaagctaaagatatcagatgagatgtccaaagactgtttgtctatcctctataacacctgtgtctgtacagaaggggtgacaaagcgccttgcagagaagaacgacttcgtgattttcctcttcactttaatgacctccaagaaaacattcttacagaccgctacacttattgaagatattttaggagtaaagaaagagatgataaggctggacgaggtacctaatcttagctctctggtcagtaacttcgaccagcagcagttagccaacttttgtagaatcctagcagtcacaatcagcgagatggatacaggcaatgatgataaacacacattactggcaaagaacgcacagcaaaagaaatcgctcagtttgggcccaagtgcggcggagataaaccaggccgcgcttctctctatccccgggtttgtagaacggctctgtaaactggccacccggaaagtgagcgaatcgacagggacagctagttttctgcaagagctggaagagtggtacacatggctcgataatgcgcttgtcctcgacgcacttatgagggtagctaatgaagaaagcgagcacaatcagggtgcatctgaggagaacggcctgccgcatacaagcgcacgaacccaactaccgcagagtatgaagatcatgcacgaaattatgtataagctggaggtgctctatgtcttgtgcgtcctgttaatgggacggcaacgcaatcaagtgcaccggatgattgctgagttcaaactgattcctggcctcaacaatctgtttgacaaactgatctggcgaaaacactcggcaagcgcgctggtgcttcatgggcataatcagaattgtgactgttctccagatataactctgaaaatccaatttttgcgattgctgcagtctttctcggatcaccacgaaaataagtaccttctgctgaacaatcaggagcttaacgagttgtcagccatcagtctgaaggccaacatccctgaagtagaagccgtcttgaatacagatcgctccctggtttgtgacggaaagcgcggcctgctgacaagattgcttcaagtgatgaagaaagagcccgccgaaagttcttttcggttttggcaagccagagccgttgaaagcttccttcggggcactacttcatatgctgatcagatgttcttgcttaaaagggggttgctggaacatattctatattgcatcgttgattctgaatgtaaaagtcgcgacgtcctccagtcttattttgatttactcggcgaactgatgaagttcaatgtagacgcctttaaacggtttaataagtatatcaatacagacgccaaatttcaggtatttctgaaacagatcaactctagcctggtggacagtaatatgctggtcagatgcgtcaccctctcccttgacaggttcgagaatcaggtagacatgaaggtggctgaggtgctgtcagaatgccgcttactggcctatatttcacaggtaccgacccaaatgagttttcttttcaggctgataaacatcatacacgttcagaccctgactcaagagaacgtaagctgtcttaataccagtctcgtgatcctgatgttggctaggaggaaagaacgattgcccctgtatctccggctcttacagaggatggagcatagcaagaagtatcctgggtttctacttaacaacttccacaacctgcttcgcttctggcagcagcactatttacacaaagataaagactcgacctgccttgaaaactcgtcttgtatatccttcagctattggaaggaaaccgtctccatcctgctgaatcctgatcgccagtctccaagtgctctcgtcagctacattgaggagccatatatggatattgaccgcgacttcactgaagagtag

SEQ ID NO: 138399 - DNA, 1200 bp, synthetic construct
  misc_feature 1..1200: note = Description of Artificial Sequence: Synthetic coding sequence
  source 1..1200: mol_type = other DNA
atgcgtagccagtcaaccattaaggtacaccggatgatcgccgagttcaaacttatccctgggttaaataatctgtttgacaagctgatttggaggaagcactcggcatccgccttggtgctccatggccacaaccaaaattgtgactgctccccagacattactctcaaaatccagtttctaagactcctgcagagcttttctgatcaccacgaaaacaaatatctgctcctcaacaaccaggaactgaacgagctcagtgccatatcgctcaaagccaacattcccgaagtggaagccgtactcaacaccgataggagcttggtgtgcgatgggaagagaggtctgctgactaggctgctccaggtgatgaagaaggaacctgctgaatcctccttccggttttggcaggccagagcggtcgaaagcttcttgcgtggaactacctcctatgctgatcagatgttcctgcttaaaaggggcctgctggaacacatcctatattgcattgtggactcagagtgtaaatcccgagatgtcctgcagtcttactttgacttgctgggcgagctgatgaagttcaacgtggatgctttcaaacggttcaacaagtacatcaatactgatgcaaaattccaagtgttccttaaacagataaacagctcactggtcgacagtaacatgctggtcagatgtgtgaccctgagcctcgatcgctttgaaaatcaagtcgacatgaaagtggccgaggtactctcagagtgcagacttttggcctacatttcccaggtgccaacccagatgagtttccttttcagactgatcaacattatccacgtgcagactttgacccaggaaaatgtgtcgtgtctgaacacttccctcgtgatcctgatgctcgctagacgaaaagagaggctgcccctctacctgcgactcttgcagaggatggagcacagtaaaaaatatccgggtttcttgctgaacaatttccataacttattgaggttttggcaacagcattacctacataaggacaaggatagcacctgcttagagaatagttcttgtatatccttcagctactggaaggaaaccgtatccatcttactgaatccggacagacagtccccaagcgcgttagtgtcttacattgaggaaccctacatggacatcgatcgggattttaccgaagagtag

SEQ ID NO: 138400 - DNA, 2349 bp, synthetic construct
  misc_feature 1..2349: note = Description of Artificial Sequence: Synthetic coding sequence
  source 1..2349: mol_type = other DNA
atggcagcagcacctgtggccgccgggagcggtgctggaaggggccgaaggtcagccgcaacagttgccgcctggggaggatggggccagctcaccgggagagggctcgttagggccgttcaattcactgagactttccttactgaaagagacaagcagtccaaatggtctggcatacctcaacttttattaaagctgcacactacctcacacttgcacagcgactttgtcgaatgtcagaacattctcaaggagataagccccctactgagtatggaggcgatggccttcgtgaccgaagagcgcaaactcactcaggagactacatatccgaacacatacattttcgatctgtttggtggagtggatctgctcgtggaaatcctaatgcgacccaccatttccattcgtggacaaaaactgaagattagcgacgaaatgtctaaggactgtttgtctatcctgtacaacacatgcgtttgtaccgaaggagttacgaaacggcttgctgagaagaacgatttcgtaattttcttatttacccttatgacaagcaagaagacttttctgcaaacagcaaccctgatcgaagatatcctaggtgtgaaaaaagaaatgatacggttggatgaggtgcccaatctctctagcctggtgtcaaactttgaccagcagcagttggctaatttttgtagaatcctggccgtgacaatctccgaaatggataccgggaacgacgataagcatacactgctagctaagaacgcacagcagaagaaatcgctgtccctcggccccagcgctgccgaaatcaaccaggccgctctgttgtcgatccccggatttgtcgaaaggctctgtaagctcgctacgcgaaaggtgtcggaatctacagggactgcttcgttcttgcaagagctggaggagtggtacacgtggctggacaacgccctagtgttggacgctctcatgagagtagccaacgaggagtctgaacacaaccaagcaagcatcgtgttccctcctccgggagccagtgaggagaatgggctgccccatacctctgccagaactcagctgccgcagagcatgaaaatcatgcatgagattatgtataagctggaggtgctctatgtgctttgcgtcctcctgatggggaggcagcgaaatcaggtgcacaggatgatcgccgaatttaagctcatccctggtctgaacaatctgttcgacaagctcatatggcgaaagcactcagctagcgccctcgtcttgcacgggcacaaccaaaactgcgactgcagccctgatattacactgaagatccaatttctgagactgctccagagcttttcagatcaccatgagaataagtacctgctcctgaataaccaggaacttaacgagctgtccgctatctccctcaaggccaatataccagaggttgaggcggttctgaacactgaccgatcactggtctgtgatggcaaacgaggcctccttactcgcctgctgcaagtcatgaaaaaagagcctgcagagtcaagctttcggttctggcaagctagggcagtcgagagcttcctccggggaactaccagttatgccgatcagatgtttttgttgaagcgcggcttgctggagcacatcttatactgtattgtcgatagtgagtgtaagtcccgggacgtgttgcaatcctatttcgaccttctcggggaactcatgaagttcaatgtagatgccttcaagcgcttcaacaagtatataaatacagatgctaaattccaagtgtttctcaagcaaatcaatagtagtctggtggacagcaacatgctggtgcggtgtgtgacactgtccttagaccgtttcgaaaaccaggtagatatgaaggtggcagaagtattgagcgaatgtaggctgctggcctacatttctcaggtgcctacccagatgtcatttctttttcgcctgatcaacatcatccatgtgcagacactgacgcaagagaatgtgtcttgtctaaatacctccttggtgattctgatgctcgcgaggcgcaaagagcgactccctctgtatcttcggctgctgcaacggatggagcactcaaagaagtaccctggatttctcctgaacaacttccacaatctgctgcggttctggcagcaacactacctgcacaaagacaaagacagcacatgcttggagaattcctcctgcataagtttttcttattggaaggagaccgtgtcaattctgctcaatcctgacagacagagcccctcagcattagtttcttatatcgaggagccatacatggacatagatcgagatttcaccgaagagtag

SEQ ID NO: 138401 - DNA, 2922 bp, synthetic construct
  misc_feature 1..2922: note = Description of Artificial Sequence: Synthetic coding sequence
  source 1..2922: mol_type = other DNA
atggctcagctttattacaaaaaggtgaattactctccttaccgcgatcgcattcccctgcagatcgtgagagccgagaccgaactctcagcagaggaaaaagcctttctgaatgcggttgaaaagggggattacgccaccgtgaagcaagctttgcaagaggccgagatctactataacgtgaacatcaattgtatggatcccctgggcaggtccgctctgctgatagccatcgaaaacgagaacttagagattatggaactactgcttaaccactctgtctatgttggtgacgcgcttctctacgcaattcggaaggaggtggtgggagcagtggagctcttgctgtcatataggagaccttccggagaaaagcaagtcccaactctgatgatggatacccagttttcagagttcacacccgacatcacacccattatgctggcagcccacactaacaattatgagattattaagctgctggttcagaaaagagtaactattcctagaccgcatcagattcggtgcaactgcgtggaatgtgttagcagctcagaggtcgatagcttgcggcacagtcgctcgcgcctcaatatctataaggccctggcctcgcccagtttgatcgccctgtcttcagaggatccaatcttaaccgctttccgactcggttgggagttgaaagagctgtcaaaagtcgagaatgagtttaaagccgaatacgaggaactgtcccagcagtgcaagctgtttgctaaggaccttctcgaccaagcccggtcgtcacgcgagttagaaattattctgaatcaccgcgatgatcattcggaggagctggatcctcagaagtatcacgatctggctaaattaaaggtggcaatcaaataccatcagaaggagttcgtagctcagcccaattgtcaacagttgttggccacattatggtatgacgggtttcccggttggcgccgcaaacattgggtggtcaaactgctcacatgcatgaccattggctttctgtttcctatgctgtcaattgcctacctaataagcccacgtagcaacctaggcttgttcataaagaagccatttatcaagttcatctgccatactgcgtcatacttgaccttcttatttatgctacttctcgcatcacagcatatcgtgcggaccgacttacatgtccagggtcccccaccaactgtagtcgagtggatgatcctgccttgggtgctgggattcatctggggagaaataaaggagatgtgggatggtgggttcactgagtatatacatgattggtggaacttgatggacttcgctatgaactccctttacttggccaccattagtcttaagattgtggcttatgtgaagtataatggctctcggccccgggaagagtgggaaatgtggcatccaaccttgatcgctgaagctctgttcgcaatctctaacatactgagctccctccggctgatatccttgttcactgccaatagccatctcggacccctgcagatttctttggggaggatgctgttagatattttaaagttcttgtttatttactgtctggtgctgctggcctttgccaacgggctgaaccaattgtatttctactatgaaacccgcgctatcgatgaacccaataactgtaaaggtatccgttgtgagaagcagaacaatgctttctccaccctgttcgagacccttcaatctctcttttggagtgtgtttggtctcctgaatttgtatgtcacaaacgtcaaagctcgtcatgaatttactgagtttgtgggggccaccatgtttggcacgtacaatgttatctcgctggtcgtcctgcttaatatgttaatcgctatgatgaacaatagctaccaacttatagctgaccacgctgacatcgagtggaagtttgcgaggacaaaattatggatgagttatttcgacgagggcggcacgctgccgccgccgttcaacatcatacctagcccaaaatctttcttgtatctgggcaactggtttaacaacacattttgccctaagagggaccccgacggtcggcggaggcgtcgtaacctgcggagctttaccgagaggaatgcagacagcttaatccagaaccagcattatcaggaggtgattaggaatctggttaaacgctatgtggccgctatgatccgtaacagcaagacccacgagggcctcacagaggagaactttaaagagcttaagcaggatattagctcgtttaggtatgaagtgctggatctgctgggaaatcggaaacacccacgtagcttttctacttcatcgaccgagctttcacagcgggacgacaacaacgacggctccgggggcgccagagccaagagcaaatccgtgtccttcaatcttggatgcaagaaaaagacatgccacgggccgcccctgatccgaacaatgccacgctcatcgggcgcccaaggtaaatccaaggccgagagttccagtaagcgaagttttatgggaccctccttgaaaaagctgggtttgctgttcagtaaattcaatgggcacatgtctgaaccttcctccgagccaatgtacactatcagtgacggaatagtgcagcagcactgcatgtggcaggacatacgctactcacagatggagaaggggaaagctgaagcatgctcacagtcagaaatcaatcttagcgaggtggaattaggcgaggttcagggagcggcccagtcttccgagtgcccgttagcctgctcatcttccctgcattgtgctagtagcatctgctcctcaaattctaagctgttagattcttcggaagatgtttttgaaacgtggggagaggcatgcgacttactgatgcataaatggggtgacggacaggaggagcaggtaacaacccggctctag

SEQ ID NO: 138402 - DNA, 2796 bp, synthetic construct
  misc_feature 1..2796: note = Description of Artificial Sequence: Synthetic coding sequence
  source 1..2796: mol_type = other DNA
atgtcccaaagtcctgcttttggtcctagaagaggctctagcccccgcggagctgcgggtgccgccgcgcgtagaaatgagagccaagattacttgctgatggatagcgagctcggcgaagacggatgtccacaagcgcccctgccgtgctacggatattatccatgcttccgaggctcagataacagactggctcacaggcgacagaccgttttacgggagaaaggccggcggctagccaacaggggccctgcctatatgttttctgaccggtcaacatccttgtcgatcgaagaagagcgcttcctggatgccgccgagtacggaaacattccagtggtgcggaagatgctggaggaatgtcactcactcaatgtgaattgcgtagactatatgggacagaatgctctccagctggctgtagcgaatgaacacctggaaatcacagaattattgctaaaaaaagaaaatttatcccgggtaggggatgcgctgctcctggctatctccaagggttacgtgagaatagtggaggccattctgtcacacccagcgtttgcagaaggtaaaagactagcgacttctcccagtcagtctgagctgcaacaagacgatttttatgcctatgatgaggacgggaccaggttctcccacgacgtgacacccataattctggccgctcattgtcaggaatacgagattgttcatacactgttgaggaaaggtgccagaatcgagcgccctcacgactacttctgtaagtgtaacgattgtaatcaaaagcaaaaacatgatagctttagtcatagccggtcaagaatcaacgcgtataaaggactggcgagtcctgcttacctgagcctgtcttcagaagatcctgtaatgaccgcacttgaacttagcaatgaattagctgtcctcgccaatatcgaaaaggaattcaagaatgattacaagaagctcagtatgcagtgtaaggatttcgtggtaggactgctcgatctgtgccggaacacagaagaggttgaagcgattctgaacggcgacgtcgaaactctgcagtctggggaccatggaagacctaatctgtctcggctgaaactggcaataaagtacgaagtcaaaaaatttgtcgcacaccctaattgtcaacagcagctcctgtctatttggtatgaaaatctgagtgggctacgccaacagaccatggcagtgaagtttctggtggtattagcggtggctatcgggctcccattccttgcactgatctactggttcgccccatgttccaaaatgggaaagataatgaggggcccctttatgaaatttgtcgctcacgcggctagctttaccatattcctggggctattggtcatgaacgcggctgaccgattcgagggaaccaaactcctccctaacgaaaccagtaccgataacgcaaagcagctatttagaatgaagacttcgtgtttcagctggatggaaatgttaattatttcctgggtcataggaatgatttgggcagagtgtaaagagatctggacacaggggcctaaggagtacttgttcgaactgtggaacatgctggatttcgggatgctggccatctttgcagctagctttattgccagattcatggctttttggcatgcttcgaaagcccaaagcattatcgacgccaacgacacactaaaggatctgacaaaggtcacgctgggcgacaacgtcaaatattataaccttgcccgaatcaagtgggacccctctgacccccaaattatcagcgaagggctgtacgcaatcgccgtagtcctatcgttttctcgtatagcatatatcctgcccgccaatgaatcgttcggcccactgcagatctccctgggccgcactgtcaaagacatctttaagtttatggtgatttttatcatggtgttcgtggccttcatgatcggtatgttcaatctgtactcttattatattggggcaaaacaaaacgaagctttcacgaccgtcgaagaaagctttaaaactctgttctgggccatttttggactgtcggaagtcaagtctgttgtgatcaattacaaccataaattcatcgagaatataggctacgttctgtacggagtctacaacgttacaatggtgatagttctgctaaatatgctgatcgccatgatcaatagctcctttcaggagatcgaagatgacgctgatgtggagtggaagtttgcacgagccaaactttggttttcttattttgaagagggccgtacactgcctgtgccgttcaacctcgtacctagtcctaagagccttttttacttgctcctgaagttgaaaaagtggataagtgaactgtttcaggggcacaaaaaaggatttcaggaagatgctgagatgaataaaattaacgaggagaagaagctgggaattctgggttcccacgaagatttgtccaagctgtcccttgataagaagcaagtgggccataacaagcagcccagcataaggagttccgaggatttccatctcaacagtttcaataaccccccccggcagtatcaaaaaattatgaaacgtcttattaagcggtatgtcctgcaggctcagattgataaagaatccgacgaggttaacgaaggagagctgaaagagatcaaacaggatatttcatctttgaggtacgagctgctggaggaaaagagccaaaacaccgaagatttagctgagctgatccgcgagctcggggaaaagctaagcatggaaccgaatcaggaagagaccaatcggtag

SEQ ID NO: 138403 - DNA, 2448 bp, synthetic construct
  misc_feature 1..2448: note = Description of Artificial Sequence: Synthetic coding sequence
  source 1..2448: mol_type = other DNA
atgtctcagagccctgctttcggtccacgccgcggaagtagccctcggggcgcagccggtgctgcagcccggaggaacgagagccaggactaccttcttatggattctgagttgggagaggatggctgcccccaagccccactgccctgctatggctattatccatgcttccgtggctcagataacaggttggcccacagacgccagactgtcctcagggagaaggggagaaggttagccaacagaggacccgcctatatgttttctgatcgaagcacttcgttgtctattgaggaagaacggttcctggatgcggccgaatacgggaatataccagtggtgcgtaagatgctggaagaatgtcatagtctgaatgtgaattgcgttgactatatggggcagaacgccttacagttggcggtcgcgaacgaacacctggaaatcaccgaactgcttttaaagaaggaaaacctgagcagagtcggggacgccctgcttctggcaatctctaaaggctacgtaagaatcgtcgaggccattctctcccacccagcatttgccgagggcaagagactagccacctctccgagtcagagcgaactacagcaggacgacttttacgcatatgatgaggatgggacccgcttcagccatgacgtgacccccatcattctggcggcacattgccaggagtatgaaatcgtgcacacgctgctacgcaaaggagcccggattgagcggcctcacgactatttctgcaagtgcaacgattgtaatcaaaagcagaaacacgattctttttcccattcacgtagcagaataaacgcctacaagggactggcatcgcccgcctacctttccttaagctccgaagacccggtgatgacagccctggagttgtctaacgagctggcggttctggccaatatcgagaaggagtttaaaatgggtaagataatgcgcggaccatttatgaaatttgttgcccatgcggccagctttacgatattcctaggcctgctggtgatgaacgcagctgaccgttttgagggcactaaacttttgcccaacgaaacctccaccgacaacgccaaacaactctttagaatgaagactagttgcttctcctggatggaaatgctgattatctcttgggtgattggcatgatttgggctgagtgcaaggaaatttggacgcaagggcctaaggagtatctgttcgaactttggaacatgctcgacttcggcatgttggccatcttcgcagcctcatttatagcccgcttcatggccttttggcacgcttccaaagcccagtctattatagacgcaaatgacacccttaaggatcttacaaaggtcacactaggcgacaatgttaagtactataacctggcccgaataaaatgggatcctagtgacccgcaaataatctcagaggggctgtatgccatcgctgtcgtgctttcattttcgcgaatcgcatacattctcccggccaacgagtcctttggacctctccagatcagcctgggtagaactgtaaaggatatatttaaattcatggtgatctttattatggtattcgtggccttcatgattggtatgtttaatctctattcctactacatcggtgccaaacagaatgaagccttcaccactgtagaggaatcttttaaaactcttttctgggccatttttggattgagcgaggtcaagtcagtggtgatcaattacaaccataagtttatcgaaaacattgggtacgtgctgtacggcgtgtataacgtcactatggtgattgttctgttgaatatgctcattgccatgattaattcgtcatttcaggaaatagaggacgatgccgacgtagaatggaaattcgcccgtgccaaattatggttttcgtactttgaagaaggtcgaactctgcctgtgcccttcaacctagtaccatcgccaaaaagtcttttttaccttctgctcaagctcaaaaaatggatcagtgagctgtttcaagggcataagaagggcttccaggaagacgcagagatgaataagattaacgaggagaagaaattaggcatcctcggctcccacgaagatctgtctaagctaagcttggataagaagcaggtgggccataataagcaaccctctattcggtcctccgaagattttcatctcaactcctttaacaacccgcctaggcagtaccaaaagataatgaagcggcttattaaaaggtatgtattgcaggctcaaatcgataaggagagtgacgaggtgaatgagggagagctcaaggaaattaaacaggatatctcatccctgcggtacgaactgttggaagaaaagtctcagaatacagaagatctggctgagttaatccgggaactaggtgagaagttgagcatggagcccaaccaggaagaaacaaacagatag

SEQ ID NO: 138404 - DNA, 2631 bp, synthetic construct
  misc_feature 1..2631: note = Description of Artificial Sequence: Synthetic coding sequence
  source 1..2631: mol_type = other DNA
atgtcccagtcgcccgccttcggaccacgtcgaggatcctcccctaggggcgctgcaggggcggccgcacgccgcaacgaatcacaggactacctcctgatggattctgagttaggtgaagacggatgcccgcaggcacccctgccctgttatgggtattacccttgctttagagggagcgataaccgactcgcacacagacggcagactgttctaagagaaaagggaagaagactcgcaaacagagggcctgcctatatgttttcagacagaagtacctccctttccattgaagaggagagatttttggatgctgccgagtacggaaacatcccggtcgtgaggaagatgttggaggaatgtcatagcctgaacgttaattgtgttgactacatgggccagaatgctctgcagctggccgtcgcaaacgagcacttggagatcaccgaattactgctcaaaaaggagaatctgtcccgggtgggcgacgcgcttcttctcgccatttcaaagggctatgtgaggatcgttgaagcgatcttgagtcatccagcttttgctgagggaaaacgtctggccacgtcaccaagtcagagcgagttacagcaggacgatttctacgcgtatgacgaggatgggacccgcttctctcatgacgttacaccaataatcctggccgcacattgccaggagtacgaaatcgtccacactctgttgcgtaaaggtgcccgcatcgaacgcccgcacgattacttttgcaaatgcaacgattgtaaccaaaaacagaaacatgacagcttttcccacagtcggtccaggatcaatgcttacaagggattggctagccccgcctacctttcattgagtagtgaagatcctgtcatgaccgctctggaactttccaacgagttggcggttctcgcgaatatcgagaaggagtttaaaaacgactataagaagctgtctatgcagtgtaaagacttcgtcgtggggctgctggatctttgtagaaacaccgaggaagtggaggccatcctgaatggggacgtggagactctccagagcggtgaccacggacggcccaacctgtcacgacttaaactcgccattaagtatgaggtgaagaagatgggaaagataatgcgcgggccttttatgaaattcgtggcgcacgccgccagctttacgatttttctgggactcctggtaatgaatgctgctgacagattcgaggggaccaaactgcttcctaacgagacatccaccgataacgcgaagcagctctttcggatgaagacaagctgtttcagttggatggagatgctcatcatcagctgggtgataggcatgatttgggccgaatgtaaagaaatatggacgcaaggacccaaggagtaccttttcgagctttggaacatgttggatttcggaatgctggccatctttgctgcctcgttcatcgccaggttcatggccttttggcatgctagtaaggctcagagtattattgacgcgaacgacacattaaaggatctcacaaaagtgacacttggtgataatgtaaaatactataacctcgccaggatcaagtgggacccctccgatccccagatcatttctgagggactgtatgccattgctgtggtgttgagtttttcccggattgcatatatcctgcctgctaatgaatcttttggtccccttcagattagtctcggccggaccgtgaaagatatttttaaatttatggtgatctttataatggtattcgttgctttcatgattgggatgttcaacctttatagctactatataggagcgaagcagaacgaagcctttacgaccgtggaggaatcttttaagacactgttctgggcgatcttcgggctcagtgaagtaaagtccgtcgtcatcaactacaatcacaaattcatcgaaaacataggatacgtgctgtatggtgtgtataacgtgaccatggtcatagtattgctgaacatgttgattgctatgatcaatagtagcttccaggagattgaggacgacgcagacgtggaatggaaatttgcacgtgcaaagttgtggttttcttactttgaggaaggcaggaccctgcctgtgccattcaatctcgttccaagccccaaaagtcttttctatctcctgcttaagctgaagaagtggattagcgaactctttcaaggacacaaaaaggggtttcaggaagatgccgagatgaacaagattaacgaagagaaaaagctcggtattctgggatcacatgaggatctgagcaaactaagcctggacaagaaacaggtcggacacaacaaacagccctccatccggtcgtctgaggattttcaccttaactcctttaataatccgcccaggcagtaccagaagattatgaaacggctgatcaagaggtatgtcttacaggcccaaattgacaaagagtccgacgaagtaaacgaaggggaattaaaggagattaagcaggacatatcaagccttagatatgagctgttagaagaaaaatcgcagaatactgaagaccttgcagagctcattcgagagcttggcgaaaaattaagtatggaacctaaccaggaggagaccaatcggtag

SEQ ID NO: 138405 - DNA, 2406 bp, synthetic construct
  misc_feature 1..2406: note = Description of Artificial Sequence: Synthetic coding sequence
  source 1..2406: mol_type = other DNA
atgttgcgaaatagtacctttaaaaacatgcaaagaagacacaccaccctgcgggaaaaaggaagaagacaagctatacgcggcccagcgtacatgttcaacgagaaggggacttccctaacacccgaagaagaacggtttctagattcagctgagtatggaaatatcccggtcgtgagaaaaatgttagaggaaagtaaaaccctgaacttcaattgtgtagactacatgggccagaacgccttgcagcttgctgtcgggaatgagcacttggaagttaccgagctgcttcttaaaaaggaaaatcttgctcgcgtcggggacgcactgctgctggccatctcgaagggctacgttcgaattgtggaagcaattctgaatcaccctgcgtttgcacagggacagaggcttacgttgagccccctggaacaagagctgcgagacgacgatttttatgcatacgacgaggacggcacccgtttttcccacgacatcacacctatcattctggcagcgcattgccaggaatacgaaattgttcatatcctgctactcaaaggtgcacggatagagagaccccatgattatttctgcaagtgcaacgagtgtaccgaaaaacagcgcaaggactcctttagtcactcaaggagtcgtatgaacgcttacaaggggctcgcttctgccgcatatttatcactatcttccgaggaccctgtcctgactgctctggagctgtccaatgaactggcccggcttgctaatatcgagactgagttcaaattcgttgcccatcctaattgtcagcagcagttgttaactatgtggtacgaaaatctgtctggcctccgccagcagtccatcgcggtgaagtttctcgctgtttttggcgtgtccatcgggcttccttttctggcaattgcgtattggatcgctccatgttccaaactcggacgaaccctgcggagccccttcatgaagttcgtggcacatgcagtgtccttcacgatcttcttaggtttgctggtcgtcaacgcctccgatcgcttcgaaggggtgaagaccctgcccaacgagacatttacggattacccaaaacagatctttcgggttaagaccacgcagttttcgtggacagagatgcttattatgaagtgggtgctcgggatgatctggtcggaatgtaaagaaatttgggaagaggggccccgcgaatatgtcttacatctctggaatttgttggattttgggatgctaagcatttttgttgcctccttcacggcccgatttatggccttcctgaaggctaccgaagcacagctgtatgtggatcaacacgttcaagatgacactctgcacaacgtatctttgccgccagaggtggcttacttcacctatgctagggataagtggtggccctcagatccccagatcatcagcgaaggcctctatgcaatcgcagttgtactctcattctccaggatcgcttacattcttcccgccaacgaaagttttggccccctacaaattagcctggggcgtacggtaaaggacatcttcaagttcatggtaatattcatcatggtattcgtggcctttatgatcggaatgtttaatctgtactcttattacaggggggctaaatataatcctgcctttacaacagtcgaggagagttttaaaaccctgttctggagtatctttggactttcagaggtcatatctgttgtgctcaaatacgatcacaaattcatcgaaaacataggttacgtcttatacggtgtctataacgttacaatggtggtagtgctgctgaacatgctgatcgcgatgattaacaattcctaccaggagatcgaggaagacgccgatgttgaatggaagtttgctagggccaaactgtggctgtcatattttgacgaagggcgcacactgcctgctccattcaatctagtcccctcccccaagagtttctattacttgataatgcggatcaagatgtgccttattaaattgtgtaaatctaaagccaaatcatgcgaaaacgacctggaaatgggtatgctgaattcaaagtttaaaaagacacggtaccaggcggggatgagaaattccgaaaacctcacagctaacaacacactgagcaaacccactaggtaccagaaaatcatgaaacgactaatcaaaagatacgtcctcaaggctcaggtagatcgtgagaacgatgaggttaacgaaggggagctcaaagaaataaagcaggacattagtagcttaaggtatgaattgctggaagagaaatctcaggcaacaggagaactcgcagacttaatccagcagctgtccgagaagttcggcaaaaacctcaataaggatcacttacgggtgaataaggggaaggatatctag

SEQ ID NO: 138406 - DNA, 2241 bp, synthetic construct
  misc_feature 1..2241: note = Description of Artificial Sequence: Synthetic coding sequence
  source 1..2241: mol_type = other DNA
atgctacggaatagcacctttaagaacatgcagaggagacacactacattgagggagaaaggacgcagacaagcgattaggggacctgcatacatgttcaacgaaaagggcacgtccttaacccccgaagaggagaggttcctggacagcgccgagtacggtaacatccctgtggtgcgtaagatgcttgaggaaagtaagactctcaactttaattgtgtggactacatgggtcagaacgcactgcagctggcggttggtaacgagcacttggaggtgacagagctgttgctgaaaaaagagaatctggcacgagtcggcgatgccctgcttttagcaattagcaagggatatgtgaggattgtcgaggccatactgaatcatccggccttcgctcagggacaacgcctgactctttcgcctctcgaacaggaattgcgggacgatgatttctacgcttacgatgaggacggaactcgattttcacatgacatcactccaattattctcgccgctcactgtcaggagtatgagatagttcatattctgctcctgaaaggcgctagaatcgagagaccccatgactacttttgcaagtgtaatgagtgtacagaaaaacaaaggaaagatagcttttctcacagtcgctctcggatgaacgcctacaaaggtctggcgtctgccgcttatctgtcactgtcaagtgaggaccccgttttgaccgccctcgagctgagtaatgaattagcaagactcgctaacatcgagaccgaattcaagctggggcgcacgcttcggtccccttttatgaaattcgttgcccacgctgtgtctttcacaatattcttaggcttactggtcgtgaatgcatccgatcggttcgagggcgtgaaaacactgcctaatgagacttttaccgattaccccaagcagattttcagagtgaaaacaacacagttctcttggacagaaatgttgatcatgaagtgggtcctcggtatgatctggtcagaatgcaaagaaatatgggaggagggaccgagggagtacgtgctgcacctctggaacctgttggacttcggcatgttgtcaatattcgtggcttctttcacagcgcgcttcatggcctttttgaaggctacggaagcccaactctatgtggatcagcacgtccaggacgatacgctgcacaacgtgtccctgcctcctgaagtggcttacttcacatacgcgagagacaagtggtggccttccgacccacagatcattagcgagggcttatatgccatcgccgtcgtgctttcattctcccggattgcgtacattctccctgcaaacgagtctttcggccctctccaaatctcactgggacgtaccgtaaaggatatcttcaaatttatggtaatctttatcatggtgttcgtggcttttatgatcggaatgtttaacctatattcatactacaggggtgcaaaatataaccctgcatttaccaccgtcgaagagtcctttaagacccttttctggagcatttttggactgtccgaggtcatctccgtagtgctgaaatatgaccacaagtttatagaaaacataggatatgttctctatggggtgtacaacgtcactatggttgtcgtactgcttaacatgctgattgcaatgatcaacaactcttaccaggagatagaggaggatgccgatgtcgaatggaaattcgcacgggccaaactttggttgtcctatttcgacgagggtcggactctccctgctccattcaatctcgtgccatccccgaagagcttttactacctgattatgcgcattaagatgtgcctgatcaagctttgcaaatccaaagccaagagctgcgagaatgacctcgagatggggatgttaaatagtaaattcaaaaaaacccgatatcaggcagggatgagaaactccgagaacctgacggccaacaacacgctgagcaaacccacacgctaccagaagattatgaagcgcctgatcaagcgatatgtgctgaaagcacaagttgaccgggaaaatgatgaggtcaatgagggcgaactgaaagaaatcaagcaggatattagctccctcaggtatgaacttctggaagaaaagtcccaggccactggggagctcgccgatctgatacagcagctgagcgagaaattcggaaaaaacttgaacaaggatcatctgcgtgttaataaagggaaggacatttag

SEQ ID NO: 138407 - DNA, 2589 bp, synthetic construct
  misc_feature 1..2589: note = Description of Artificial Sequence: Synthetic coding sequence
  source 1..2589: mol_type = other DNA
atgctacgaaattctacatttaaaaatatgcagcggcgtcatacaactctcagagaaaaggggcgccggcaggctattcggggccccgcttacatgtttaatgagaaaggaacaagcttaaccccagaggaagaacgattcctggatagcgccgaatatggcaatattcccgtggtgagaaagatgctcgaggagagcaaaactttaaattttaattgcgtcgactacatgggccaaaacgcacttcagctggctgtggggaacgaacatctcgaggtgactgaactgttgctgaagaaggaaaacctcgctcgggtcggggatgcgcttctgttggccattagtaaaggctatgtccgaattgtggaggctattctaaatcacccggcttttgcacaaggacagcgcttgacgctgtctcctttggaacaggagctgagggacgatgacttctacgcgtatgacgaggatggcacacgattttcccacgacattacccccatcatcctcgctgctcactgtcaagaatatgaaattgtgcatattctgctactgaagggggctcgcattgagagaccccacgattacttttgcaagtgtaatgaatgcacggagaagcagagaaaggacagcttcagccactctcggtccagaatgaatgcctacaaaggcttggcgtcagcagcttacctctccctgtcctccgaggatccggtcttaactgcgcttgaactgagcaacgaactcgcacgccttgcaaacattgaaacggagtttaaaaatgattacaggaagctatccatgcaatgtaaagattttgtcgtcggggttttggacctctgtcgcgacacagaagaagtggaagcaatcctgaatggggatgtgaacttccaagtgtggtccgaccaccatcggccttcactgagccgcataaagttagcaatcaagtatgaagttaagaagtttgtagcccaccctaattgtcagcagcaacttctcaccatgtggtacgaaaacctgagtggactgcgccagcagagcattgcagtgaagttcctagccgtgtttggtgtatccattggcctgccatttctagccatcgcatattggattgcgccatgctccaaactcggaagaacattgcgctctcccttcatgaaatttgtggctcacgctgtgtccttcacaatatttctgggtttattggtcgttaacgcatcagaccggttcgaaggtgtgaagactctgccaaacgaaacttttacggactatccaaagcagatcttcagagttaaaactacgcaattctcatggactgagatgctgatcatgaagtgggtcctgggaatgatttggtcagagtgtaaggagatctgggaggaagggcctagggaatatgtactacatctttggaacctgctcgacttcggcatgctctcgatatttgtggcgtcttttaccgcccggttcatggctttcctcaaggcaactgaagctcagctgtatgtcgaccagcatgttcaggacgacacccttcacaatgtcagcctcccacccgaagtcgcatattttacatacgctagagataagtggtggccttctgaccctcagatcatctccgagggattatatgccatcgctgtggtactgtcgtttagtaggatcgcctacatccttccagccaacgaaagttttggtccccttcaaatctcccttggcagaactgtgaaggacatttttaaatttatggtgatttttatcatggtgtttgtggcatttatgatcggcatgttcaacttatattcatattatcggggcgcaaaatataaccccgcctttaccactgtggaagaatcttttaagactctcttctggtccattttcggactctcagaagtgattagcgtggtgttaaagtatgatcacaagttcattgagaatattgggtacgtgctttatggagtgtacaacgtgactatggtggtggtgctcctcaacatgctcatcgcaatgattaataacagctatcaggaaattgaggaagatgccgacgtggaatggaaatttgccagagccaagctatggctgtcctacttcgacgaagggcgcactttaccagcgccctttaatctcgtgccttccccgaagtctttctactacttgataatgcggattaaaatgtgtttgataaaactctgtaagagcaaagcaaagagctgtgagaacgacttagagatgggcatgcttaactccaagttcaagaaaaccaggtatcaggccgggatgcggaactccgaaaatcttaccgcgaacaacactctttctaagcctaccaggtaccagaaaattatgaagcggttgattaagagatacgtcctgaaggcccaagttgacagggaaaatgacgaggtgaacgagggcgagcttaaagaaattaaacaagacatttcttccctgagatatgagctgttggaggaaaagtcgcaggccactggcgaattggccgacctgatccagcagctttccgagaaattcggaaagaacctgaacaaggaccacctgcgggtgaacaaagggaaggacatctag

SEQ ID NO: 138408 - DNA, 4350 bp, synthetic construct
  misc_feature 1..4350: note = Description of Artificial Sequence: Synthetic coding sequence
  source 1..4350: mol_type = other DNA
atggaacctagcgccctgcgaaaggccggatccgagcaagaagagggatttgagggcctccctagacgcgtaacagatctgggaatggtcagcaatctccgaagatcaaactctagcttatttaagtcctggagacttcagtgccccttcggcaacaatgacaagcaggaaagtttatcaagttggatcccagaaaatattaagaagaaggagtgtgtatatttcgttgaatccagtaagctctcagatgcaggtaaggtggtttgtcaatgtgggtacactcacgaacagcacctagaagaggccacaaaaccacacacgttccaggggactcagtgggatcccaaaaagcacgttcaagagatgccgaccgatgcattcggggatatcgtgtttacaggcctgtcccaaaaagtgaagaaatacgtgcgggtaagccaagacaccccttcgagcgtaatttatcacctgatgacgcagcactggggactggatgtgccaaacctgctgatttctgtcacgggaggcgccaagaactttaacatgaaacccagactgaagtctattttcaggaggggcctggtgaaagtcgcacaaaccacgggagcgtggattatcacgggggggtcccacaccggagtgatgaagcaagtgggcgaagcagtgcgggactttagtctgagttcatcctacaaggaaggggagctgattaccattggggttgcaacgtggggaacagtgcacaggagagagggcctcatccacccaacagggtcctttcccgccgaatatattttggatgaggacggtcagggcaaccttacttgcctggatagtaatcactctcattttatactggtggatgacggaacgcacggccagtacggagttgagatccccctgaggactaggttggaaaagttcataagcgaacagactaaggaaagggggggagtggctattaagattccaattgtctgtgttgtgcttgaaggcggcccaggaacccttcatacgatcgacaacgccaccacaaacggcaccccatgcgtcgttgtcgagggctcagggagagtggctgatgtcattgcacaagttgcaaatctgcctgtcagcgacattactatctcactgattcagcagaagttgtctgttttttttcaagaaatgttcgagacatttactgagagcaggatcgtagaatggactaagaaaatacaagacatcgtgcggcggaggcaacttctgaccgtatttcgggaaggtaaggacggacagcaagacgttgacgtagctatcctgcaagcactattaaaagctagcaggtcccaggatcacttcggccacgaaaattgggaccatcagctcaaactggctgttgcatggaacagagtcgatattgcccgaagcgaaatttttatggatgagtggcaatggaagcccagcgaccttcatcctacgatgacagcagcactgattagcaacaaaccagaatttgttaagttgtttctggagaacggcgtccagctcaaggaattcgttacatgggacacattactgtatctatacgagaatttggacccatcctgtctgtttcacagcaaactgcaaatgcaccacgtggcccaggtgctccgggaacttttaggggattttacccagcctctgtacccgcgtcctaggcataacgaccggctgcgcctgctcctcccggtgccccacgtgaagctgaacgtacagggtgtgtcactacgaagtctctacaagcggagctctggccatgtgacttttaccatggatccaattcgtgacctgcttatctgggcaattgtccagaatcgtagggagctggcgggtattatttgggctcagagccaggactgcattgccgccgcgttggcctgtagcaaaatcctgaaggagcttagcaaagaggaggaagataccgattcctctgaggagatgcttgcattagcggaagagtatgagcatcgggctattggagttttcaccgagtgttaccgaaaggacgaggagcgcgcccagaaactcctcacgcgcgtctctgaagcctgggggaagacaacttgcctgcagttagctctcgaggccaaagatatgaagttcgtgagtcatggcggcatccaggcattcctgacaaaggtgtggtggggacagttaagtgtggataacggcctctggagggtaaccctgtgcatgctggcatttcctctgctgctgaccggcctaattagctttcgcgagaagagactgcaggacgtgggaactcctgccgccagggctagggccttttttaccgcaccggtcgtcgtgttccacctcaacatactctcatactttgcgttcctgtgcctcttcgcttacgtcctgatggtggacttccagcccgtcccatcttggtgtgagtgcgctatttacttatggctcttctctctggtttgcgaggagatgcggcaacttttttatgatcccgatgagtgcggccttatgaagaaagccgccctgtacttcagcgatttctggaacaaacttgacgtgggggctatccttctattcgtggcaggactgacgtgtcgactgattcctgcgaccttatatccaggccgcgtgatcctttcgctggactttatactgttctgcctgcgtctcatgcacatcttcacaatctctaaaaccctcggtccaaagatcattatagtgaagcgcatgatgaaggacgtcttcttttttcttttcctgttggccgtgtgggtcgtgtccttcggtgtcgccaaacaagccatacttatacataacgaacgcagagtcgactggctctttagaggggccgtctatcattcttatctgaccatcttcggacagatccctggatacattgacggagtgaacttcaatcccgagcactgttcaccgaatggaacagacccctataaaccaaaatgtccagagagtgatgctacccagcagaggcccgctttccccgagtggttgactgtcctattgctttgcctctacctgctgtttacaaacatattgctgttgaatttactgatcgccatgttcaactatactttccagcaagttcaagagcatacagaccagatatggaaatttcagagacacgacctaattgaagagtaccatggaagacccgctgcgccccccccttttattctcctgagtcacctccaattatttatcaagcgggtcgtcttgaaaacaccagcaaaacgccacaagcagctgaagaacaagctggagaaaaacgaggaggccgccttgctgtcttgggaaatatatcttaaagaaaattatcttcagaacagacagtttcagcaaaagcaacggcccgagcagaaaatcgaagatatctccaataaggtggacgctatggtagatttgttagatttagatcccctgaagcggtccgggtctatggaacagcgattggcctccctggaggagcaggtggcacaaacagcacaggcccttcactggattgtaaggacactgagagctagcgggttttcatccgaagccgacgtgccgactctggccagccagaaagccgccgaagaacccgatgccgagcctggcggaaggaaaaaaaccgaagagcccggtgatagctatcacgtgaacgccagacatctcctttatcccaactgtcccgtgaccaggtttcctgtgcctaatgaaaaagtaccatgggagaccgagtttctgatttacgacccgccattctacacagctgaacggaaagatgctgccgcaatggaccctatgggcgagaatcctatgggaagaacgggattacggggtagagggtctctcagttgttttggtccaaaccataccctgtatcccatggtgacccgctggaggcggaacgaagatggcgcaatctgcaggaaatctattaagaagatgctggaggtgctggtggtgaaactccctttaagcgagcactgggctctcccaggcggcagtagagagccaggagagatgctgcccagaaagctgaagaggatcttgcgccaagagcactggcccagcttcgaaaacctgctgaagtgtggtatggaggtttataagggctacatggacgacccccggaacaccgacaatgcatggatagaaacagtggctgtgagcgtccactttcaggatcagaacgatgtggagctgaacagattaaattcaaatctgcatgcttgcgactctggggcatccatccggtggcaggtggtggacaggcgcatacctctgtatgctaaccataaaacgcttttgcagaaagcagccgccgaatttggtgcccactattag

SEQ ID NO: 138409 - DNA, 4512 bp, synthetic construct
  misc_feature 1..4512: note = Description of Artificial Sequence: Synthetic coding sequence
  source 1..4512: mol_type = other DNA
atggagccttcagccctccggaaggcaggatctgaacaggaagaggggtttgagggtctccctagacgggtcactgatctgggcatggtctctaacttgcggcgcagcaactcttccttatttaagtcctggagattacagtgtcccttcggaaacaatgacaaacaggagagcctttcatcctggattcccgagaacattaagaagaaagaatgcgtgtactttgtggagagcagcaagttgtccgatgcaggtaaagtggtatgtcagtgcggatacacgcatgaacaacatttagaggaagccactaaaccccacaccttccaaggtacccagtgggatccaaaaaaacacgttcaggaaatgcctacggacgcctttggagatattgtgttcactgggctgagtcagaaagtgaagaagtacgtgagggtgtctcaggatactcccagtagcgtaatctaccacctcatgacacagcactggggattggacgtgcccaatctactgatttccgtcaccgggggggcaaaaaattttaatatgaagcctaggttaaagtctatcttccgacgcggacttgtgaaggtggctcaaaccacaggagcttggatcatcacaggcggttcgcatacgggtgtgatgaaacaagtgggggaagccgttcgggatttctccctctcgagcagttacaaagagggggagctgattactatcggggtggccacttggggcacagtgcatagacgtgagggtttaatccatcctacaggtagcttccctgcagagtacatcctcgacgaggatgggcagggcaatctcacctgcttggattcaaaccactctcactttatcctagtcgatgatggcacccacggccagtatggcgttgaaatcccgctgcggacacgcttagagaagttcatttctgagcaaacaaaagaaaggggcggagtggcgataaagatccctatcgtatgcgtagtcctggagggtggaccgggaaccctgcacacgatcgacaatgccactacaaacggaacaccctgcgttgtcgtggaaggctcaggcagggttgctgatgtcatcgcccaggtggccaatctacccgtgtccgatattactatctctctgattcaacaaaagttgtcagtctttttccaagaaatgttcgagaccttcaccgaaagccgtattgtggaatggaccaagaaaatacaggacattgtgcgccggcggcagctgttaacagtgtttagggagggaaaagacggtcaacaggacgtggatgtggcaatcctgcaggccctcctaaaggctagccgttcccaggaccactttggccatgagaactgggatcaccagctgaagttggctgttgcttggaaccgagtcgatatcgcgcgtagcgagatcttcatggacgagtggcaatggaagcctagcgatctgcatcctacaatgactgcagcgctgatcagcaacaagccggaatttgtgaagttgtttcttgaaaacggtgtccaactaaaagagttcgttacttgggatacattactgtacttatatgaaaacttggacccatcctgtctgtttcacagcaaacttcagaaggtgctcgtcgaggaccccgaacgacccgcttgtgccccagccgccccaaggctgcagatgcatcatgtcgcccaggtactgcgagaacttctgggggatttcactcagccactgtacccgcgacctcgccataacgatagactcaggttactactgcccgtgccacacgtgaagcttaacgtgcaaggcgttagcctacgatctctttacaaacgctctagtggccacgtcacattcacaatggatcctatcagagacctgctgatctgggctatagtacagaacaggagagaactggcagggatcatctgggctcagagtcaggactgcattgcagcagccctcgcctgcagtaaaatccttaaagagctaagcaaagaggaagaggataccgattcgtctgaagaaatgctcgccttggccgaagagtatgaacaccgggccattggtgtgtttactgaatgttaccgcaaggacgaagagagagcacagaagcttctgacgagagttagtgaggcctggggaaagacaacatgcctgcaattggctctcgaggcgaaagacatgaagttcgtttcccatggaggcattcaagcattcctcaccaaggtatggtgggggcagttgtctgtcgataacgggctctggagagtcactctgtgcatgttagccttccctctgctgctgactgggcttatctcttttcgtgagaagaggcttcaggacgtcggtaccccagcggctcgagcaagagcgttcttcaccgcacccgtggtggtttttcacttaaacattcttagttactttgcgttcctctgccttttcgcctacgtactcatggtcgattttcaacccgtgccctcctggtgcgaatgcgccatttacctgtggctgttttctttagtatgtgaggaaatgaggcaattgttctatgaccccgacgagtgcggactgatgaagaaagcagctctttacttttccgacttctggaacaaacttgacgtgggcgccattctgctttttgtggccggtttgacctgccggctgatccctgcaacgctatacccaggcagagtgatattatcactcgatttcattctgttctgcttgcggctcatgcacatctttaccatcagcaagaccctcgggcctaagattatcatcgtaaaacggatgatgaaggacgtttttttcttcctgttcctcttggccgtgtgggtagtctcctttggtgtggccaagcaagccatcctgatccacaacgagcggcgggtggactggttattcagaggggctgtgtaccactcctatttgacaatcttcggccagattccgggctatattgatggcgttaattttaacccggaacattgctcgcctaatggtacagatccatacaaaccaaaatgtccagagtctgacgccacccaacaacgccctgcttttccagagtggttgacagtcttactattatgcctgtatctcctgtttaccaatattctgcttttgaatctgttgatcgcaatgtttaattacaccttccagcaagtgcaagagcacaccgaccagatctggaaattccaaaggcatgatttgatcgaggagtatcatggccgcccagcagcccccccacccttcatacttcttagccatctgcagctttttataaagagggtggttctgaaaacaccagctaagcggcacaagcagctaaagaataagctggaaaagaatgaagaggccgcccttttgtcctgggagatctacttgaaggagaactacctacagaaccggcagttccaacagaaacagcgacccgagcagaaaattgaggatatcagtaacaaagtggatgctatggtcgatctgttggatttggacccattgaagagaagtggcagcatggaacagcgcctcgcttcactggaggagcaggtggcgcagacagctcaggcgctgcactggatcgtccggactctgcgcgctagcgggttttccagcgaagcagatgtgcccaccctggcttcgcaaaaggccgccgaggaacccgacgctgagcctgggggacgtaaaaagacagaagagcccggggactcttatcacgtgaacgctcgtcacctgctataccctaactgtcccgtgacccgatttccagtgcccaatgagaaggtaccgtgggaaaccgagtttcttatatacgatcctccattctataccgccgaacgcaaggacgccgctgccatggatcctatgggcgacacgctcgaaccgctttcaactattcagtacaacgttgtcgatggtttgcgagaccgccgctcatttcatggaccgtatactgtgcaggccggcttgccattaaaccctatgggacgaaccggtcttagaggcagaggatccctgagctgctttggccccaatcataccttgtaccctatggtgactcgctggcgaagaaacgaagacggtgcgatctgcaggaaaagtatcaagaaaatgctggaggtcttggtcgtgaaactcccactgtccgaacattgggcgttgccgggaggctcccgggagccaggagagatgctgccacgaaagttgaagaggatcctccgccaggaacactggcccagttttgaaaatttgctgaagtgcggaatggaagtttataagggctacatggatgatcctcgtaataccgataacgcctggatcgagacagtggccgtgagcgtgcattttcaggatcaaaacgatgttgaactgaacaggctcaatagtaatcttcacgcttgtgattccggcgcgtctattaggtggcaggtggttgacaggcggatcccactgtacgccaatcataagaccctgttgcagaaggctgcagcagaattcggtgctcactactag

SEQ ID NO: 138410 - DNA, 4512 bp, synthetic construct
  misc_feature 1..4512: note = Description of Artificial Sequence: Synthetic coding sequence
  source 1..4512: mol_type = other DNA
atggagccttccgctctgcgcaaagctggctccgagcaagaagagggatttgagggcttgccgagacgcgtgactgacctggggatggtgagcaacctgcggcggtctaactcgtctcttttcaagtcgtggaggttgcagtgtccctttggcaacaacgacaagcaggagagtctgtcgtcctggatccctgaaaacattaaaaagaaagagtgtgtttactttgtcgaatcctctaagctgtctgacgccggtaaggttgtgtgccagtgcggttacacccacgagcagcacctggaggaggccacaaaaccacacacctttcagggcactcaatgggatccgaagaagcatgttcaagagatgcccactgacgcatttggagacatcgtcttcacagggctgtcacaaaaggtgaagaagtacgtgagagtgtcccaggacaccccttcctcagtcatatatcatctgatgacccagcattggggactggatgttccaaacctactgataagcgtcaccggcggcgcaaaaaacttcaacatgaagccacggctgaagtccattttccggcggggtctggtcaaggtcgcacagactacgggagcgtggatcatcactggaggtagccatacaggcgtgatgaaacaggtaggagaagccgtgagggatttctctctttcgagctcatataaggagggggagctcattaccattggcgtggccacatggggtacagttcacaggagagagggcctgatccaccccaccggatcgtttcctgccgagtatatccttgatgaggacgggcaaggaaacctcacatgcctcgactccaaccattcacacttcatactggtcgatgacggcactcatggccaatacggcgtggaaatccccttgagaacaaggctcgaaaagttcatctccgaacaaacaaaggaaaggggaggagtagcgataaaaatccctatagtgtgtgtggtgctggagggtggtcccggcactctccacactattgataatgccacaaccaacgggacgccttgcgtagtcgttgagggatctgggagagtagccgacgtgatcgcccaggtggcaaacttgcccgtctcagacatcactattagtctgattcagcagaaactgtcagtgttctttcaagagatgttcgagacatttaccgagtctaggattgtggagtggaccaagaagattcaggacatagtgaggagaagacagctgcttaccgtgttccgggaaggtaaagacgggcaacaagacgtagatgttgcaattctgcaggcattgctgaaggccagcagaagtcaggaccacttcggccacgagaactgggaccatcagttgaagctggcagtggcatggaaccgcgtcgacatcgccaggagcgagatttttatggacgagtggcagtggaagcctagcgacctccacccaaccatgactgcggctcttatatctaataagccggaatttgtgaagttatttctggagaacggagtccagctcaaagaattcgtcacatgggataccctattatacctatatgagaatttagatccttcctgtctcttccatagtaagctgcaaaaagtattggtggaggatccggagcggcccgcatgtgcccctgcagcccccaggctgcagatgcaccacgttgcacaagtcctgagggagcttctcggcgacttcacccagcccctgtacccccgtcccaggcacaacgaccgcctccgactgctactacctgtgcctcacgttaagctgaatgtccagggggtatccttgcgatctctatacaaaaggtcctccggtcacgttactttcaccatggatcctattcgcgacttacttatttgggccatcgtacagaaccgccgggagctcgccggcattatttgggcacagagccaggactgtattgctgccgccctcgcctgttctaaaatactgaaagagttgagcaaggaagaagaagatacagattcctctgaggagatgctggcactggctgaagagtacgagcacagggcaatcggtgtcttcactgagtgttataggaaagatgaagaaagggcacagaaactgctgactcgggtttctgaggcttggggcaaaacaacctgtcttcagctggcactggaagctaaggatatgaagttcgtttcccatgggggcatccaggccttcctgaccaaagtctggtggggacagctgtcagtggacaatggtctgtggcgagtgaccttgtgcatgctggcttttccgctcctgcttactggcttaatctcctttcgggagaaacgtctgcaggacgtggggacaccagcagccagggcccgggcattctttaccgcccctgtagtggtgttccacttgaacattcttagctactttgcttttctttgtctctttgcatacgtactgatggtggatttccaaccagtaccgagctggtgcgagtgcgcaatatacctctggctgtttagcctggtgtgtgaggaaatgagacagttgttctatgaccccgacgagtgcgggctgatgaaaaaagccgctctctacttctctgacttctggaacaagctggacgtcggcgccattttactattcgttgccggactgacgtgtagactgatacccgctactctgtatcccggtcgtgtgatcctgtccttagatttcatcctgttttgccttcgcctgatgcacattttcacaatatccaaaaccttgggcccaaaaattatcatcgtgaaaagaatgatgaaggacgtcttctttttcctctttttactggctgtgtgggttgtgagctttggtgtggccaaacaggcgatcctgatccacaacgagagacgcgtcgactggttgtttagaggagccgtctatcacagctatctgaccatttttggtcagattcccgggtacatcgatggagtgaactttaatccagagcactgcagccccaacggcaccgatccgtataagccaaagtgtcctgagagtgatgccactcagcagcgacctgcgtttcctgagtggcttaccgtcttgctactttgtttgtacctgctgttcaccaatatcctccttctgaatcttctcatcgccatgttcaactatacattccagcaggtccaggagcacaccgatcagatctggaaatttcagcggcatgacctcatcgaggagtaccatggccgacccgcagccccaccgcccttcatcctgctgtcccaccttcagcttttcatcaagcgggttgtcctcaagacccctgccaagcgacacaagcagctcaagaacaagctcgagaagaatgaggaagccgcactgctaagttgggagatatacttgaaggagaattacctgcagaatcgtcaattccaacaaaaacagagaccagaacagaagattgaagacattagcaataaagtggacgccatggtggatttattagatctggatcctcttaagaggtctggaagtatggaacagcggctggcctccctcgaagagcaggtagctcaaacggcccaggcgctgcactggattgttcggacgttacgggcttccggttttagttcagaggccgatgtgccaacgctcgcgtcacagaaggcagcggaggagcctgatgctgaacctggcggtaggaaaaagacagaggaaccgggcgatagctatcatgtcaacgcccgccatctgctgtaccctaattgccccgtcacgcgattccccgtgccaaacgagaaggtcccttgggagaccgagtttttgatttacgatccaccattctatactgcagagcgcaaagacgccgccgcgatggatccaatgggagacaccctggagccattatctactattcagtataatgtggtcgacgggctccgcgatcgccgctcctttcacgggccgtacacagtgcaggcgggactgccactgaatcctatgggccgcactggactcagaggtcgaggaagtctgagctgttttggaccaaaccatacgctgtacccaatggttaccaggtggagacgcaacgaagacggagcgatctgtcggaagtcaatcaagaagatgctggaagtgttggtcgtgaagttaccgctgtccgaacattgggccctgccagggggcagccgggaaccaggtgaaatgctccctcggaaattgaaaagaattctacgccaggaacactggccttcctttgagaacctgctgaagtgtgggatggaagtgtataaaggatacatggacgatccccgtaacacagataatgcttggatcgagaccgtggccgtcagtgtccatttccaggatcagaacgacgtggagctcaaccgcctgaattccaacctccacgcctgcgattctggcgccagcataagatggcaggtcgtcgacagacgaatccctctgtacgccaaccataagacccttctgcagaaggcggcggccgagttcggagcccattactag

SEQ ID NO: 138411 - DNA, 435 bp, synthetic construct
  misc_feature 1..435: note = Description of Artificial Sequence: Synthetic coding sequence
  source 1..435: mol_type = other DNA
atggagccatcagcattacggaaggctggaagtgagcaggaagaagggtttgaaggtctgccaagacgagtgacggatctgggaatggtttcgaatctcaggcggtcaaacagtagtctttttaaaagctggcgcctacagtgtccgtttggcaataatgacaagcaggagtcactcagcagttggattccagaaaatattaaaaagaaggagtgtgtgtacttcgtcgaatcttctaagttgtcagacgccggcaaggtagtgtgtcaatgtggatacacccacgaacagcacttagaggaggccacaaagccgcacacattccagggcactcaatgggatccgaaaaaacacgttcaggagatgcccacagacgcctttggcgatatcgtgtttaccggcctttcccagaaggtcaagaaatacgtcagatag

SEQ ID NO: 138412 - DNA, 744 bp, synthetic construct
  misc_feature 1..744: note = Description of Artificial Sequence: Synthetic coding sequence
  source 1..744: mol_type = other DNA
atgttgtccagggaacaggaagaggatggaggcgcagggaggcagtaccacgtaaacgctagacacctcttatacccaaactgccctgtcaccaggttccccgtcccaaacgagaaggtgccctgggagactgaattcctgatttatgacccaccattctatacagctgagcggaaagatgcggccgccatggaccccatgggtgagaatcctatggggcgcaccgggcttcgcggcaggggaagcctgtcctgtttcggtccaaatcacacgctgtatcccatggtcacacggtggagacgcaatgaggatggggccatttgtaggaaaagcatcaagaaaatgttggaagtgctggtcgtgaagctgccactgtccgagcactgggctttaccaggcggaagtagagaaccaggagagatgcttccacgcaaacttaagaggatactcagacaggagcattggccttcattcgagaatttgctgaagtgtggcatggaagtgtataagggctacatggatgaccctaggaataccgacaacgcttggatcgaaaccgttgcagtcagcgtgcatttccaggatcagaacgatgtcgagttgaaccgcttgaactctaatctgcatgcttgtgatagcggcgcctccatcagatggcaggtggtagacaggaggattcccctatacgctaatcacaaaaccctgctgcagaaggcagcggctgaattcggcgcccattattag

SEQ ID NO: 138413 - DNA, 5136 bp, synthetic construct
  misc_feature 1..5136: note = Description of Artificial Sequence: Synthetic coding sequence
  source 1..5136: mol_type = other DNA
atgggaaagaagtggcgcgacgccgctgaaatggagcgagggtgcagtgatcgggaggataatgccgagtcaaggcggagatctcggtctgcttcccgtggacgtttcgctgagagttggaagcgcctgagctcaaagcaaggcagtactaaacggtcaggtctgccttctcagcaaactcctgcccagaagtcctggatagagcgggcattctacaagcgtgaatgcgtccacattattccctccacaaaggacccgcatagatgctgttgcggacgccttataggccaacatgtgggcctgacaccctccattagcgttcttcagaacgagaagaacgagtccagactgtcaagaaatgatattcagtctgaaaagtggtctatttccaaacacacacaactctctccaactgatgccttcggaactatcgaattccagggcggtggccactcaaacaaagccatgtacgtccgcgtgtcgtttgacacaaagcccgatctgctgcttcatcttatgaccaaagagtggcagctggagctcccaaaattgttgatcagcgttcacggcgggctacagaattttgaactccaacctaaacttaagcaggtatttgggaaggggctcatcaaggccgctatgacaacgggcgcctggatcttcacaggtggggtgaatacgggtgtgatcagacatgtcggcgatgcactgaaagaccatgcttcgaaaagcaggggaaaaatctgtactataggtatcgccccctggggaatcgtcgaaaaccaggaagatctcatagggagggacgtggttaggccataccagaccatgagcaatccaatgtctaaactgacagtccttaacagtatgcatagtcattttatcttagctgacaacggtacaaccggaaaatacggagctgaggtaaagctgaggagacagttggaaaaacacatctctttgcaaaaaattaatacgcgtatcggtcagggagtccccgtggtggctctgatagtcgaggggggccccaatgtgatctctatagtgcttgagtatttaagagatacacctcccgttcccgtggtggtttgcgacgggtctgggagagcatcggatattttagcatttggacacaaatattccgaggagggcggtctcatcaacgagtctctcagagatcagctgctagtcacaattcagaagactttcacatataccaggacccaggcacaacacctgtttatcattttgatggagtgcatgaaaaagaaggagctgattaccgtgtttagaatgggaagcgaggggcaccaggacatagacctggctattctgaccgccctcctgaagggcgctaatgccagtgccccagatcaactgtcacttgccctcgcgtggaatagagtcgatatcgccaggtcacagatctttatctacgggcagcagtggcctgtcggttcgcttgaacaggccatgcttgacgctctggttttggaccgcgtggacttcgtaaagcttctgatagagaacggtgtcagcatgcaccgttttctgacaatttctcgcttagaggagttatacaacactcggcacgggcccagcaacactctgtaccatcttgttagggacgtgaaaaaaagggaatatcctggattcgggtggatctacttcaagggcaatttgccacccgattaccgtatttctctcatcgatatcggattagtcattgaatatctgatgggtggcgcatataggtgcaactatacacgcaaaagattccggaccctataccacaacctatttgggcccaagagagatgacatccccctgagaagagggcgaaagaccactaagaaaagagaagaggaggttgacattgacctggacgatccggagataaatcatttcccgtttccattccacgaattgatggtgtgggctgtgctgatgaaacgccagaagatggctcttttcttttggcaacatggggaagaggctatggcaaaggctctcgtagcatgtaagctgtgtaaagcaatggctcacgaagcctccgaaaacgacatggtggacgatatttcacaggagcttaatcacaattcgcgggactttggccagcttgccgtggaactgttggatcagtcctacaaacaggatgagcagttagccatgaagctgcttacttatgagctgaaaaactggtctaatgctacctgtttgcagctggcagttgctgccaaacacagggactttatcgcccacacctgttcccagatgctgctgacagatatgtggatgggtcgactaagaatgcgaaagaattccgggttaaaggtgattctgggtatcctgctccccccttccattctgtcattagagttcaagaataaagatgacatgccttatatgagtcaggcccaggagattcatctgcaggagaaagaggccgaggaacctgagaaacccaccaaagaaaaggaggaagaggacatggaactgacagccatgctcggccgcaacaacggcgaatctagccggaagaaagacgaggaggaggtgcagtccaagcaccgcctgatcccacttggcaggaagatctatgagttttataatgcccccattgtaaaattctggttctatacgttggcttacatcggatacctcatgttattcaactatatcgtgttggttaaaatggagcggtggccgagtactcaggaatggatcgtgattagctacatattcactctgggcattgaaaagatgagagagatcctcatgagtgaacccggcaaactgttgcagaaggtgaaggtgtggctccaggagtactggaatgtcacagacctgattgctatcttgctgttctctgtgggtatgattttacggcttcaggaccagccatttaggtccgacggccgcgttatttactgtgttaacatcatctattggtacatccgattactcgatatttttggcgtcaacaagtatttgggtccatatgtcatgatgatagggaagatgatgattgacatgatgtatttcgtgattatcatgttagtagtgctgatgtcttttggggtggctcgacaggcaatcttgttccccaacgaagaaccttcttggaaactggccaaaaatattttctacatgccgtattggatgatctacggggaagtgtttgcagaccaaatcgatcctccttgtggccaaaatgagacacgggaagacgggaagattatccaactgcctccctgtaagactggagcttggattgtgccagccatcatggcctgctaccttctggtagccaatatacttttggtaaacttactgattgctgtatttaataatacgttcttcgaagttaagagtatcagtaaccaggtatggaagttccagcggtatcaacttatcatgaccttccatgaacgccccgtgttgccccctccgcttatcatcttctctcatatgacaatgatttttcaacacctctgttgccgatggagaaaacacgagtcagaccccgatgaaagagattatggactaaaactctttatcactgacgacgagcttaaaaaagtacacgatttcgaagagcagtgcatcgaggaatatttccgggaaaaggatgatcggttcaacagcagcaacgatgaacgaattcgtgtgacatctgagagagtggagaacatgtccatgagattagaggaagtcaacgaacgcgaacactcaatgaaggcctccctgcagaccgtagatatcagactagcacagctggaggacttgatcgggagaatggccaccgcactcgaaaggttaacgggcctggagcgggctgagtctaacaagatccgttctcgcacatcgagcgactgtacggacgctgcctacattgtcaggcagtctagttttaattcacaggaaggaaacacatttaaactgcaagaatcaattgaccccgctggagaggagactatgtccccgacttctccgacactcatgcctcgcatgagaagccacagcttttacagcgttaatatgaaggacaaaggaggaatcgagaaacttgagtccatttttaaagagcgttcattgtcacttcatcgagcgactagctctcattctgtcgccaaagagcctaaagccccggctgcgcccgccaacactctcgcgatcgtacccgatagtaggcgtcccagctcctgtatagatatttacgtttccgctatggacgaactccattgtgacatcgatcccctcgataattccgttaacatactgggactcggcgagccttctttttctacccccgtgcccagcacggcgccttccagtagtgcctacgcaacactggctcccacagatcgtccccctagtagatccatagactttgaagacattacctccatggatactcgaagtttttcatctgattacacccacctccccgagtgccagaatccctgggatagcgagcccccaatgtatcacacaatcgagaggtccaagagcagtaggtaccttgctactaccccgtttcttcttgaggaggcaccaatagtcaaaagtcacagcttcatgttttctccatccaggtcctattacgctaatttcggcgttccagtcaagacggccgaatacacaagcatcaccgactgcatagacacccggtgcgtgaatgctccacaggccatcgccgaccgcgcagcctttccaggcggtttgggcgataaagtggaagacctcacctgctgccacccggaaagggaagcagaactcagccatccctcatcagatagtgaggagaacgaagccaagggtcgtcgggcaactattgctatttcgagtcaggagggcgataactcggagcgcaccctctctaacaatattaccgtccccaagatcgaacgggcaaatagctattccgccgaagaaccctccgctccttacgctcatactagaaaaagcttctccatttcagacaagttggatcgtcagcgtaataccgcgagtcttagaaacccctttcagaggtccaaatccagtaagcccgaagggagaggcgacagcctctccatgaggagactctctagaacatccgctttccagtcattcgaatccaagcacaactag

SEQ ID NO: 138414 - DNA, 4710 bp, synthetic construct
  misc_feature 1..4710: note = Description of Artificial Sequence: Synthetic coding sequence
  source 1..4710: mol_type = other DNA
atgtatgttcgcgtgtccttcgacacgaaacccgacttgctgctgcaccttatgaccaaagagtggcagctggagctgcctaagcttctgatatctgtgcacggcggattgcagaattttgagctgcagcctaagctgaagcaggtcttcggaaagggcttgatcaaggcagccatgactaccggtgcctggatctttaccgggggggtcaacactggagttatccgccacgtcggcgatgctctgaaggaccacgctagcaaaagtagaggaaaaatctgcactatcggaatcgctccatgggggattgttgaaaaccaggaggatctgatcggtcgagatgtcgtcaggccttaccaaaccatgagtaatccaatgtccaaactgacagtgctcaattctatgcatagccatttcatccttgctgataatggaacaaccggaaaatacggcgcagaggtaaagctccggagacagctggagaaacacatcagcctgcagaagataaacaccagatgtcttcctttcttcagtctcgactcaagactcttctactctttctggggcagctgtcagctggacagcgtaggcatcggccagggagtgccagtggtcgccttgatcgtggaaggaggacctaacgtgatctccattgtgctcgagtatttgcgagataccccacccgtgcccgtcgttgtctgcgatggctccggtagagcgtctgacatcctggcttttggccataaatatagcgaggaagggggactgatcaatgagagcctgagagatcaactgttggtgactattcagaaaactttcacctatacgcggactcaggcccagcatttgtttattattctgatggaatgtatgaagaaaaaggaactgatcaccgtgtttaggatgggatctgaaggacaccaggatatcgacttagccattttaactgcattgctgaaaggggctaacgccagtgcgccggaccaactctcccttgccctcgcctggaacagggtggacattgctcgcagtcagattttcatatatggtcagcagtggcccgtcggctctctcgaacaggctatgctggacgcattggtgctggaccgggtggactttgtgaagctgctgatcgaaaatggcgtatctatgcacaggttcttgacgattagcaggctggaagagctgtataatacaagacacggacccagtaacactctttaccatctggtgagagatgtgaaaaaagggaatctccctccggattaccgcatatcattgattgatattggccttgttatcgaatacctgatggggggcgcctaccggtgtaactatacaagaaaacgttttagaacactataccacaatctcttcggacccaaacgcgatgatatcccactgagacgaggtcgcaagacaacaaaaaaaagagaggaagaggtggacattgaccttgacgacccagaaatcaaccactttccttttccgtttcacgagcttatggtctgggctgtattgatgaagaggcagaagatggcacttttcttctggcagcatggcgaagaggctatggcgaaggcccttgtggcctgtaagctgtgcaaagctatggctcatgaggccagcgagaacgatatggtggatgatatctctcaggaattaaaccacaattccagggactttggccagctggccgtcgaactgctggaccaatcttataagcaggatgagcaattggccatgaagctcctcacgtatgagctcaaaaattggtccaatgcaacctgtctgcagctcgctgttgcggccaaacatcgggactttattgctcatacatgctctcaaatgcttctcaccgatatgtggatgggcaggctgaggatgcgcaagaactcagggctgaaggtaatcctcggaatcctgctgcctccctccattctcagtctcgaattcaaaaacaaggacgacatgccatacatgtcacaagcccaagaaatacacctgcaagagaaggaagccgaagaaccagaaaaacccaccaaggagaaggaggaagaagatatggagctgaccgcgatgctcggtcggaataatggtgaaagctccaggaaaaaggatgaggaggaagtccaatcgaagcacagattgatccctttgggaagaaagatctacgagttctacaatgccccgatagtcaagttctggttctacaccctcgcatacattggttaccttatgttgtttaactacattgtgctggttaagatggagcggtggcctagcacccaggaatggatcgtgatatcatacatctttactctggggattgagaagatgcgggagatcttaatgtctgagccaggcaagctccttcaaaaggtcaaggtgtggctacaggagtactggaacgttactgacctaatcgccattctcctcttttccgtagggatgattctccggcttcaagatcagcctttccgatccgacggcagggtgatttattgtgtgaatataatttattggtacatcaggctgttggatatcttcggagtgaacaagtatttagggccatacgtgatgatgatcggaaagatgatgatcgatatgatgtactttgtgatcatcatgctcgttgtgctgatgtcttttggggtcgcgaggcaggcgattctgttccccaacgaggagccgagctggaagctcgccaaaaatatcttctacatgccatattggatgatttacggggaggtgttcgccgaccagattgacccaccatgtggccagaacgaaaccagggaggacgggaagatcattcagctgcctccctgcaagactggagcgtggattgtgcctgccatcatggcttgctatctgctcgtcgccaatatccttctggtgaacctgctgattgccgtgttcaataatacattttttgaagttaagagcatctccaatcaggtgtggaaatttcagagatatcaactcatcatgacatttcacgagagacctgtgcttccccctccgcttattatttttagccatatgaccatgatattccagcacctgtgctgtcgctggcgcaagcatgagtccgaccccgacgagcgcgattacggactgaagctttttatcacggacgacgaactgaaaaaagtgcacgacttcgaggagcaatgcatagaagagtactttcgagaaaaggacgatcggtttaattcctctaatgacgaacggatcagagttactagcgagcgggtggagaatatgagtatgcgcctggaggaggtcaacgagcgcgagcactcaatgaaagcaagcctgcagacggtggacattcgcttggcacagctggaagacctgatcggccgaatggcaacagcacttgagcgcctaactgggttggaaagagccgagtcgaataagatcaggtcgcgtacttcctctgattgcacagatgcagcctatatagtgaggcaaagttccttcaatagccaggagggaaacactttcaagctccaggaaagcattgatcccgccggggaggaaactatgtcaccgacctcccccactctaatgccacgcatgcgatcgcattccttctatagcgtgaacatgaaggataagggtggaattgagaagttggagagcattttcaaagagcggtcgctgtccctgcaccgggcaactagctcccacagcgtggcgaaggagcccaaggcccctgcagctcctgcaaatacacttgcgattgtcccagacagccgcaggccttcctcctgtatagatatctacgtgtccgcaatggacgagctccactgtgacatcgatccactggataattcagtgaacatcctgggcctgggtgagccgagcttctcaactcccgtcccttctaccgccccaagctcttccgcttacgccactctggctccgaccgatcgtccccccagccgatcaatagacttcgaggatataacttccatggacaccaggtccttttctagcgattacactcaccttcctgaatgtcagaacccctgggattcagaaccaccaatgtatcacactatagaacgctctaaaagctcccgctatttagctacaacccctttcttactcgaagaagctcccattgtaaagtctcattccttcatgttctcccccagtaggagctactacgcaaacttcggagtgcctgtgaaaactgccgagtacaccagcattactgactgcattgacacccgctgcgtaaatgcgccacaggctatcgcggaccgtgctgccttccctggtggcctcggggacaaggtggaagacctgacttgttgccatccagaacgggaggccgaactctcacacccttcttccgatagcgaagaaaatgaagcaaagggaagaagagccactatcgcaatctccagccaggagggcgacaattcggagcgaacgctgtcgaataatataactgtccccaaaatcgagcgtgcgaactcctattctgctgaggaaccatcagctccgtacgctcatactcggaagtcattcagcatcagcgacaaactcgaccgccaaagaaatacagcatccctgcggaatcccttccagcggtctaaaagctcaaagcccgaaggaaggggggatagtctctccatgcggagactgtctcgaacttccgctttccagagtttcgaatccaaacataactag

SEQ ID NO: 138415 - DNA, 4710 bp, synthetic construct
  misc_feature 1..4710: note = Description of Artificial Sequence: Synthetic coding sequence
  source 1..4710: mol_type = other DNA
atgtacgtccgagtgagcttcgacacgaagcccgatctgctgcttcaccttatgaccaaagagtggcaacttgagctgcccaagctgcttatttctgttcatggcggacttcaaaactttgagctgcagccaaagctgaaacaggtctttgggaaggggctgataaaggctgccatgacaaccggggcctggatattcactggtggggtaaacacgggagttattcgacacgtgggagacgccctgaaagatcatgctagtaaatctagaggtaagatctgtacgatcggaatcgctccatgggggatagtggagaatcaagaagatttaatcgggcgagacgtcgttcggccctatcaaactatgagcaatcccatgtcaaagctgaccgtgctgaattcaatgcacagccattttatcttggctgataacggaaccactggtaaatacggcgctgaagtcaagctgcgtcgacagctagagaaacacatttcactccagaaaataaatactcgctgtctgccgttcttttctctcgacagtcgtctgttttactctttctggggaagctgccagctggatagcgtcggaatcggccagggagtacctgtggtcgccttgatcgtagaaggcggccctaatgtcatttcgattgtgctagagtacctaagagacacaccaccagtgccagttgtcgtctgcgacggttcaggtcgggcgtctgacatattggctttcggacacaaatactctgaggagggcggcttgatcaacgaatcgttacgtgaccagctgctggttacaatccagaagacctttacttacaccaggactcaggcacagcatctgtttattattctgatggagtgtatgaagaagaaggagcttattactgtctttcgcatgggcagtgaggggcatcaggacatagacctggccattctcacagctttgttgaagggagccaacgcttccgctccggaccagctttccttggcattggcatggaaccgcgtggatattgcccgctcccagatttttatttacggccagcaatggcccgttggaagcctagaacaagcaatgctcgacgctttagtgcttgaccgagttgatttcgtcaagctcctgatcgagaacggagtttctatgcataggttcctcaccatctcgcgcctcgaggagctttacaacactcgccacggtccgtctaatacactataccacctggtgagagatgtcaagaaagggaatctccctccagactatagaatatcactgattgatatagggctggtgatcgaatatctgatggggggggcataccgctgtaactatactaggaagcgatttcgcaccctataccacaatctctttggtcctaaaagagacgatatcccgctgcgtcgcggaaggaagacaacaaagaaaagagaagaagaggtcgacatcgatctcgacgaccctgagattaaccacttccccttcccattccacgaactgatggtttgggccgtgctgatgaaacgccagaaaatggctctgtttttctggcagcatggagaggaggccatggccaaggcattggtcgcatgtaagctctgcaaggctatggcccacgaagccagtgagaatgatatggtcgacgatatctcccaggaactgaaccacaactctcgggacttcggacaacttgctgtggagctactggaccagtcctataagcaggacgagcaactggccatgaagctgctgacctacgaactgaagaactggagcaacgcgacctgcctccagctggccgttgccgctaagcatcgcgatttcatcgctcacacttgtagccaaatgctcttgacagatatgtggatgggccgactaaggatgcgaaaaaactcgggcctgaaggtcatattaggcatcctgctccctccgagtatcctgtctctggaattcaaaaataaagatgatatgccctacatgtcccaagcccaggagattcacttgcaggaaaaggaggctgaagagccagagaagccgaccaaggaaaaggaggaggaggatatggaattaactgcgatgcttggaagaaacaatggggaaagctcacgcaaaaaggacgaagaggaagttcagtctaaacatagactgattccgcttggccggaaaatctacgagttctataatgcccctattgttaagttctggttctacactctggcctacatcgggtatctgatgctttttaactatattgtgcttgtgaaaatggagagatggccatccacacaggagtggatcgtgatatcctatattttcacccttggaatcgagaaaatgcgcgagattttaatgtccgagccaggcaagctcttgcagaaagtcaaggtgtggctccaggaatattggaatgtgactgatttaattgccatcctgctgttctctgtaggcatgatactcagactgcaggatcaaccttttcgttccgatgggagagtaatctattgcgtgaatatcatctactggtatattaggctcctggacattttcggagtcaataagtacctgggtccctacgtcatgatgattgggaagatgatgatcgacatgatgtatttcgttatcatcatgttggtagtgctgatgtccttcggagtcgcccgacaagccatccttttccctaacgaggagcctagctggaaattggcaaagaatatcttctatatgccttattggatgatctacggcgaagtgtttgcggatcagatagaccctccttgtggacagaacgagactcgagaagatgggaagattatacagctgcccccctgcaagacgggcgcctggatagtaccagccatcatggcctgttacctgctcgtggccaatatactgctcgtaaatcttctgatagccgtttttaacaacaccttcttcgaagttaagagtatctcgaatcaggtttggaaattccagcgttaccagctgataatgaccttccatgagcgccccgttttgccccctcccttaattattttttctcacatgaccatgatcttccaacatctgtgttgcagatggcgtaagcacgaatctgatccggacgaacgagactacggactaaagctgttcattaccgatgacgagctgaaaaaggtgcacgatttcgaggagcagtgtatcgaggagtacttcagggaaaaagatgatcggtttaactcaagcaacgacgagaggatacgcgttacgtcggaaagggtagaaaacatgagtatgcggctggaggaggtgaatgaaagggagcacagtatgaaggcctccctccaaactgttgacattcgactcgctcagctggaggatctcatcggtagaatggcaacagccctcgaacgccttactgggctcgagagggctgaatcaaacaagattaggtccagaacgagcagcgattgcaccgatgccgcatatatcgttaggcaaagctcattcaacagccaggagggcaataccttcaaactgcaggaaagtattgaccccgcaggcgaagaaacgatgagcccgacttcccctactctaatgccgaggatgagatcacacagcttctacagcgttaacatgaaagacaaaggtgggatcgagaaactggagagtatcttcaaagagaggtcactgtctctgcatagggctactagctcgcactctgttgcaaaggagccgaaagcccccgctgcgccggcaaacactctcgcaattgtgcctgattcacggagaccttcgtcttgcatcgatatatatgtgtctgcgatggacgagctccattgcgacattgatccactggataactccgtcaacatcctgggactcggggaaccgagcttctcgacccctgtgcctagtactgccccctccagcagcgcatatgccaccctggcgcctaccgatagacctccatctaggagcatagactttgaggatatcacatccatggataccagatctttctcttctgactacacccatctccccgagtgccaaaacccctgggattctgaacccccaatgtatcacactatcgaacgaagtaaatcgagccgttacctcgccactaccccctttcttcttgaagaggctccgattgtgaagtctcatagctttatgttttctccgagtaggtcatattatgctaactttggggtgcccgtaaagactgccgagtacacgagcattacagattgcattgacactagatgtgtgaacgcaccccaggcaattgccgaccgtgccgccttcccgggagggctgggagataaagtcgaggatttgacctgctgccatcccgagagagaagcagagctgtcacatccatcatctgactccgaggaaaatgaggccaaggggagacgcgcgacgattgcgatatcctcacaggagggagacaacagcgagagaacactgtctaataatattacggtgcctaagatagaacgggccaacagctattccgccgaggagccatcagctccatacgctcacactaggaagtccttcagtatttccgataagctggatcggcaaagaaatactgctagcctgaggaatccttttcagaggtctaagagtagcaagcctgaagggaggggggactctctatcaatgcggcgcctttcgaggacatctgcattccagagctttgaatccaaacacaactag

SEQ ID NO: 138416 - DNA, 4701 bp, synthetic construct
  misc_feature 1..4701: note = Description of Artificial Sequence: Synthetic coding sequence
  source 1..4701: mol_type = other DNA
atgtacgtaagagtcagtttcgacaccaagcctgaccttctgcttcacctcatgaccaaggagtggcagctcgaattgcctaagctgctaatcagtgtccacggtggattgcaaaattttgagctgcagccaaagctgaagcaagtttttggaaaaggcctgatcaaggcagctatgactacaggcgcttggatcttcaccggaggcgtgaacaccggggtcattagacacgtcggtgacgccttgaaagaccatgcgtcaaagtccaggggcaagatttgcaccattggtatagccccttggggcattgttgagaatcaagaagaccttatcggtagggacgttgtcaggccataccagacgatgtccaaccccatgtccaaacttaccgtcctgaactccatgcatagtcacttcattctagccgataacggaactacgggaaaatatggggcagaagtaaaactgcggcgtcaattggagaagcatattagtctccagaaaataaatacccgtattgggcagggcgtcccagttgtagctttaatagtggagggcggtcccaacgtgatttcaattgtgctggaatacttgcgcgacactccaccagtccccgtggtcgtttgtgacggttcggggcgggcatcagatattctcgcctttggccacaagtactctgaggagggcggactcattaatgagtccctccgggaccagttgctcgtaacgatccaaaagacgttcacatatacacgcactcaggcccagcacttgtttattatcctcatggagtgcatgaaaaaaaaggagctaatcacagtttttcgcatggggagtgaaggccatcaggacatcgacctggctattctgacagctcttctgaaaggggcaaacgcctcagccccagatcaattgagcctggctctggcctggaatcgggtggatatagcacggtcgcagattttcatatatgggcagcaatggcctgtaggatccctggaacaggccatgctcgacgccttagtgttagatagggtggactttgtcaaactgctgatcgagaatggcgtgtctatgcaccgtttcctcacgattagtcggctagaggagctttacaataccaggcatggccccagcaatacgctgtatcacctcgtgcgagacgtcaagaagagagagtaccctggtttcggctggatctactttaagggcaatctcccccctgattaccgaatctccctgatcgacatcggcttggtcattgaatatcttatgggcggggcttacagatgcaattacacaaggaagcgtttcaggacactgtatcacaatttgtttggccccaaacgtcctaaggcactcaagctgctaggaatggaagacgatattccgctgaggcggggtagaaagactaccaagaagcgcgaggaagaagtggacatcgatcttgatgaccctgagatcaatcactttcctttccctttccacgaactgatggtctgggcggtgctcatgaagagacagaaaatggcactgttcttttggcagcatggggaggaggccatggccaaggctctggtggcttgcaagctgtgcaaggctatggcccacgaggcctcagagaacgacatggtggacgatatctcccaggaattaaaccacaattcccgggacttcggccagctggctgtggaattgctcgaccagtcatataagcaagacgaacagctcgcgatgaagctgcttacttacgaactgaagaactggagcaatgcaacatgcctgcaactggccgttgccgcaaaacaccgggatttcattgctcacacgtgcagtcagatgttacttactgacatgtggatggggcgcttgaggatgaggaaaaactccggccttaaagtcatcttgggaatcctcctccctccttctatactctccttggaattcaagaacaaggacgacatgccgtacatgtcacaggctcaggagatccacctgcaggaaaaggaagccgaggagcccgagaagcccactaaggaaaaggaggaagaggacatggaactgacggcaatgctgggaaggaacaatggcgagtctagcagaaaaaaggatgaggaggaagtgcagagcaaacaccggctcatccctctaggcagaaagatctacgaattttacaacgcccctattgtgaaattctggttttacacactcgcttatatcggctacttgatgctgttcaattatatcgtgctggtgaagatggaacgatggcccagcacccaggagtggatagtgatctcatatatatttacgcttggtattgaaaagatgcgggagattctcatgagcgagcccggcaagctcttgcaaaaagtgaaagtctggctccaggaatactggaatgtgactgacctgatagcaatcctccttttcagcgtcgggatgattctacgtcttcaggatcagccgtttcgctccgatggtagagtcatctattgcgtgaacattatttattggtacatcagactgctggatatattcggtgtgaacaaatacctggggccctatgtgatgatgattggcaagatgatgatcgatatgatgtattttgtgataatcatgctggtggtgcttatgtcattcggtgtggcacgtcaggccattctgtttcccaacgaagagccttcatggaagctcgccaagaacatcttttatatgccatactggatgatttacggtgaggttttcgctgaccagattgatcctccatgcgggcagaacgaaacgagagaagacgggaagatcatacaactccccccctgcaaaacaggagcctggatcgtgcctgcaatcatggcgtgctacctgctggtggcaaacattctcctagttaaccttcttatagccgtgttcaacaacactttctttgaagtgaaatctatttcaaatcaggtatggaaatttcagcgttatcaactcataatgacattccacgaacgccccgtcctgccaccaccattgattatattcagccatatgaccatgattttccagcacttatgctgcaggtggcgaaagcacgaatctgaccctgacgagagggactacggcttaaagctcttcatcacagatgatgaactcaagaaggtccacgactttgaggagcagtgcattgaagagtacttcagagaaaaggatgacagatttaactcttccaacgatgagcggatccgtgtgacatctgaacgagtcgaaaatatgtcgatgcggcttgaggaggtgaacgagagagagcacagcatgaaggccagcttgcagactgtggatatcagactagcccaactggaagatcttatcggcagaatggcaaccgcattagaacgcctgacgggactcgaaagagccgagtccaacaaaatccggtcacggacctctagcgactgcacagatgcagcctatattgtgcgtcagtcctccttcaacagtcaggaaggtaacacatttaagctgcaggaaagtattgatccagctggcgaagaaaccatgagccctaccagtccaaccctcatgcctaggatgagaagccactccttctacagcgtcaatatgaaagataaaggaggcatcgagaaattggagagcatctttaaagaacggtcactgtctcttcatagagcaacttcctcgcacagcgtagctaaagagcctaaagcaccagccgctcctgctaatacactggctattgtcccggactctcgaagaccttccagctgcatcgacatttatgtaagtgccatggacgagctccactgcgacatcgaccccctggacaattcagttaatatcctcggattaggggagccttccttcagcacccccgtcccttcaactgccccctcgagtagtgcatacgctactctagcacccaccgaccggcccccctctaggtctattgacttcgaagatataactagcatggacacaagatcgtttagctccgattacacacacctgccagagtgtcaaaacccttgggattctgaaccacccatgtatcacacgatagaaagatccaagtcctcgaggtacctggcaacgacgccatttctcctggaggaggcaccaatcgtcaagagtcattccttcatgttctccccaagcagatcctactacgccaatttcggagtacctgtcaaaactgccgagtacacttccatcacagattgcatcgatacacggtgcgtgaacgccccccaagcgattgccgatcgggcggcattccccggtgggctgggcgacaaggtcgaagatttgacatgttgccaccctgagagggaagctgaactgtctcatccatctagtgactcagaggaaaacgaggctaaaggcaggcgcgcgacgattgcaatcagctcgcaggagggcgataactccgagaggacactgagcaataacatcaccgtgccgaaaatagagcgcgcaaatagttacagtgcagaggagcccagcgcaccatacgcacatacaaggaagagcttttctatctcagacaagttagaccgacaacgtaatactgccagcttaagaaacccatttcaaaggtcaaagagctcaaagccagagggtagaggagatagcctatcgatgcgccgattaagtaggacctcagcttttcagagcttcgagagcaagcataactag

SEQ ID NO: 138417 - DNA, 4740 bp, synthetic construct
  misc_feature 1..4740: note = Description of Artificial Sequence: Synthetic coding sequence
  source 1..4740: mol_type = other DNA
atgtatgtccgcgtgtccttcgataccaagccagacctgctgcttcatctgatgacaaaagagtggcaactggagcttcccaagttgctgatcagtgtgcacggtggtcttcagaatttcgagctgcagcctaagttaaagcaagtgttcggcaagggactcatcaaggccgcgatgacaaccggggcctggatcttcacgggtggagtgaacacgggcgtcattcggcacgtgggtgatgctctgaaagatcacgcatcaaagagtcgtgggaagatttgcaccatcggtattgccccatggggtatcgtagaaaaccaagaagatctgataggcagagacgtggtgcggccctatcaaactatgagcaaccccatgtctaagttaactgtacttaactctatgcactctcactttatccttgcggacaacggcactaccggaaaatatggcgccgaggtcaagctcagacgacagcttgagaagcacatcagcctgcagaagataaacaccaggtgccttcccttcttctcccttgactcacgactcttttattcattttggggctcttgtcaactagatagcgtcggcataggtcagggggtgccggttgtggctctcatcgtagaaggagggcccaacgtgatttcaattgtgctggagtatttgagggacactcctcctgttcctgtcgtcgtctgtgatgggtctgggagagccagcgacattctcgctttcggacacaagtactccgaggagggggggctgatcaatgaatcgctgcgcgaccaactgcttgtcacaatccagaaaacatttacgtacacccggacacaggcacagcacctgtttatcatcttgatggaatgcatgaagaaaaaagagctgatcaccgtgtttcggatgggctccgaaggtcaccaggacatcgacttggccatcctcaccgctctgttaaaaggggccaacgcaagtgcccccgaccagttgtcgttagctctggcttggaatagagtagacattgctagatcgcagatttttatctacggacagcagtggcctgttggctctttggaacaagcgatgctcgatgcccttgttctggatagggtggatttcgtcaaactgctgatcgaaaatggggtgtccatgcaccgattcctcacaattagtcggctcgaggaactgtacaataccagacacggtccctctaatacactgtatcatctggtacgcgacgtgaagaagggaaatctcccccccgactatcggatctctcttatcgacattggtcttgtgatcgagtatctaatggggggagcatacaggtgcaattatacccgaaaacgatttcgcacactgtaccacaacttgttcggaccgaaacgtccaaaagctctgaaactgttgggcatggaagacgatataccactgaggcggggacgcaaaactactaaaaagagggaagaggaggtggacatcgaccttgatgatccagagatcaaccacttcccttttccattccatgaactgatggtgtgggcagtgcttatgaaacgtcagaagatggcgttattcttttggcagcatggcgaagaggcaatggccaaagccttagtcgcatgcaaactctgcaaggccatggcccatgaggcctccgagaatgatatggtcgacgacatttcccaagagctgaaccataattctcgcgatttcggtcagcttgctgtggagctgctcgatcagtcctacaaacaggatgaacaactcgcgatgaagctgctgacatatgagctgaaaaactggagtaatgccacatgtcttcagttggccgtggctgctaagcaccgtgactttatcgcccatacatgcagtcaaatgctgctgacagatatgtggatgggtagactccgcatgcgtaaaaactccggactgaaggtgatactaggaatactacttcctccatctatactcagcctcgaattcaagaacaaagatgacatgccatacatgtcacaggcacaggagatccacctacaagaaaaggaggcggaggagccagagaagccaaccaaagaaaaggaggaggaagacatggaactgaccgcaatgcttggtcggaataatggcgagagctctaggaagaaggacgaggaagaagtgcagagcaaacatcggttaatcccgctcggaagaaaaatatacgagttctataacgcgcctattgttaagttttggttctatacactggcctatatcggctaccttatgctttttaattacatcgtcctggtcaaaatggagcggtggccaagtacgcaggaatggatagttatctcttatatctttacactgggaatcgagaagatgagggaaattctcatgagcgagccaggaaaactcctacaaaaagtcaaagtgtggctgcaggagtactggaacgtgactgaccttatcgccattctgttattttcagtgggcatgattctgcggctgcaggaccagccatttcgtagcgacggacgcgttatatactgcgtcaacatcatttactggtacatcaggttgctcgatatctttggcgttaataaatatttgggaccctacgtgatgatgatcggcaagatgatgatcgatatgatgtactttgtgattattatgctggtagtgctaatgagcttcggcgtggcccggcaggccattctgttccccaatgaagagccgagctggaaacttgcaaagaacattttttacatgccgtactggatgatctacggagaagtgttcgccgaccagattgatcctccttgtgggcagaacgaaacaagggaagatggtaaaatcatccagttgcccccctgtaaaacaggcgcatggatcgtaccagcgatcatggcctgttatctgttggtcgctaatatcctgctggtgaacctacttatcgctgtcttcaacaatactttctttgaagtaaagtccatcagtaatcaagtctggaagttccagcgttaccaactgatcatgacattccatgagcgccccgtgctgccccccccgctcatcattttctcacacatgacaatgatattccagcatttatgctgccggtggcgtaagcatgagagcgatcccgatgagagagactacggtctgaagctgttcatcacagacgacgagcttaaaaaagttcacgactttgaagagcaatgcattgaagaatattttcgcgagaaagatgaccggtttaattctagcaatgatgagcgcatccgtgtgacaagcgagagagtcgagaatatgtctatgcgcttagaagaggtgaacgagagggaacattccatgaaagcttccctacagaccgtggacatcaggctagcccagcttgaggatctgatcgggagaatggccaccgcactcgagcgactgactggtctcgagcgcgccgaatcgaacaagatccgctctcgcaccagcagtgactgtacagacgccgcctatatcgttagacagagctcattcaatagccaagagggaaatactttcaaactgcaggagagcatagatccggcgggcgaggaaacgatgtcccccacttcgcccacattgatgcctcgaatgcggtcacacagtttttacagtgtaaatatgaaggataagggaggcatcgagaagctggaatcaatctttaaagaaaggagcctgtccttgcaccgggctacatcgagccattccgttgccaaagaacctaaggcccccgccgctcccgccaacaccctggcaatcgttcccgactcccggaggccgagcagttgtattgacatctatgtgtccgctatggacgagctgcattgcgacatcgaccctttggacaactccgttaatatccttggacttggggaaccctcattctcaaccccagtgcctagtacagcgccctcttcatcagcatatgccacacttgcaccgacagaccgtccaccaagccgatccattgactttgaggacatcacaagtatggacacccggtcgttttctagcgattatacacatcttcccgagtgccagaatccctgggattccgagcctcctatgtatcacaccattgagagatccaagtcatctcggtacttggcaaccaccccgtttctgctggaagaggcaccaatagtcaagagccatagtttcatgtttagtcctagtcgatcgtactacgctaattttggcgtcccagtgaaaacagcggaatataccagtattaccgattgtatcgatactagatgtgtcaacgcacctcaggccatcgctgaccgtgcagccttccccggtggactcggtgacaaggtggaagatctcacttgttgtcatcccgaaagggaggcagaactctcgcacccatcctctgattcggaggagaacgaggcaaaaggtcggcgagctactattgctatctcctcacaggagggggacaacagcgaacgtacgctgtccaacaacatcactgtgcccaagatcgaaagggctaactcgtactcagccgaggaacccagcgctccctacgctcacactcgcaaatcatttagcatcagcgacaagctggataggcagaggaacactgccagcctgcgtaacccttttcagcggtcaaagtcatccaagcccgaaggcagaggcgatagcctgtctatgcgtcgcctaagccgcaccagcgccttccagagctttgagtcgaagcacaactag

SEQ ID NO: 138418 - DNA, 5124 bp, synthetic construct
  misc_feature 1..5124: note = Description of Artificial Sequence: Synthetic coding sequence
  source 1..5124: mol_type = other DNA
atgccagagccatgggggactgtctatttccttgggatcgctcaagtcttctcgttcctgttttcctggtggaacttggaaggtgttatgaatcaagccgacgcccctagaccacttaattggactatccgcaagctatgtcacgcggccttcctgccgtctgtgcgcctcctgaaggctcagaaatcctggattgaacgggctttctataagagggagtgtgtgcacatcatcccgagcacgaaggatccacaccggtgctgttgcggacggctgatcggacagcacgtcgggttgactccgtccatctccgtgctgcaaaacgagaaaaatgaatcccgcctgagtcggaatgatattcagagtgagaaatggtccatctcaaagcacactcaactgagcccaactgatgcatttggtaccatcgaattccaggggggaggccattctaataaagcaatgtacgtgagagtatctttcgacacaaagcccgacctgctcctgcacctgatgaccaaggaatggcagctggagcttcccaagctgctcattagtgtccacggaggtctgcagaatttcgagctgcagcctaagttgaagcaggtatttggcaagggactgatcaaggccgcaatgacgactggcgcctggatatttactgggggagtgaacacaggagtgatcagacacgttggggatgccctcaaagatcacgctagtaagtctcgcggcaagatttgtacgattggaattgctccttgggggatcgtggaaaatcaagaagatcttattggcagggatgtagtgcggccataccagaccatgagcaatcctatgtccaagttgacggtgctgaacagcatgcatagtcatttcattttggccgacaatggcaccaccgggaagtacggtgcagaagtcaagcttagacgccagttggagaagcacatcagccttcagaagatcaacactcgaatcggccagggggtgccggtcgttgcactgatcgtagagggcggccccaatgttatcagcatagtgctggagtacttgcgcgatactccgcctgtgcctgtggtcgtttgtgacgggagcggtcgggctagtgacattttagcattcggccacaagtatagcgaagaaggagggttgatcaatgaatccctccgagaccagctactggtgactattcagaaaacttttacctacactagaacccaggctcagcatctgttcatcatcctaatggagtgtatgaaaaaaaaggaactgatcaccgtgttcagaatgggctcagaaggccaccaggatattgatctcgccattctcactgctttattaaaaggcgctaatgcctcggccccagatcagttgtctctggcgctggcctggaacagagtggacattgctcgtagccagatttttatctacggacaacaatggcccgtggggtccctagaacaggcaatgctcgacgcgcttgttctggaccgtgttgactttgtcaagctcctaatcgagaacggcgtgtcaatgcataggtttttgaccatctccaggctcgaagagctttataataccagacacggaccctcgaacaccctttaccacttggtgcgggatgtcaagaagggcaatctgcctcctgactaccggatctcattgatcgacatcggtctagtgatcgagtacctaatggggggggcctatcggtgcaactatacaagaaaacgatttcgcacgctataccacaacctctttggcccgaagagacctaaggcccttaagcttctgggcatggaagatgacatcccattacggcggggccgaaagacaacaaagaaaagagaagaagaagtcgacattgacctcgatgatccggagattaaccacttccccttcccatttcatgagctgatggtgtgggccgtcctcatgaaacgccagaaaatggccctttttttctggcaacatggcgaagaagccatggccaaagccttggtggcctgcaaactgtgcaaggctatggctcacgaggccagcgagaacgatatggttgatgatataagccaggagcttaatcataacagccgcgactttggtcagttggccgtcgagttgcttgaccagtcatacaagcaggacgaacagctggccatgaaactcctgacttatgaactgaaaaactggtcaaatgccacatgtctacagctggccgtcgctgccaagcaccgggactttatcgcgcacacatgctcacagatgctgctgactgacatgtggatgggacggctccgcatgcgcaagaactccgggctaaaagtgatactcggaattctgctaccaccgtcaatcctgtccctggagttcaagaacaaggacgatatgccgtacatgtcacaggcgcaggaaattcatcttcaggaaaaagaggcagaggagccagaaaagcccacaaaagaaaaagaagaagaggacatggagctaactgcgatgctcggccggaataacggagagtcgtccagaaagaaagacgaggaggaagtgcaatcgaagcaccgcctgatccccttaggacggaagatttacgagttttataacgctcctatcgtcaagttttggttttacaccctggcctatatcggctacctcatgctgttcaattacattgtcttggtaaaaatggagagatggccctctactcaggaatggattgtgattagctatatcttcactcttggtatcgaaaagatgagagagattttgatgtctgaaccgggtaagctgctccaaaaggtgaaggtgtggctacaggagtactggaacgtcactgacctcatagccatactcctcttcagcgtgggaatgattttaaggcttcaagatcaacctttccgctccgacgggagagtgatttactgtgtcaatattatttactggtacattcggctcctggacatctttggtgtgaataaatacctgggcccctacgtaatgatgattggaaagatgatgatagatatgatgtattttgtgattataatgttagtggtcctgatgagcttcggggtggctcgacaagctatactgttcccaaacgaagaaccgtcttggaagctggctaagaatatcttctacatgccgtactggatgatttacggagaagtctttgctgaccagatagaccccccttgcggccagaacgagacacgagaggatgggaagattatccagttgcctccatgcaaaaccggcgcctggatcgtgccagctatcatggcatgttacctgctggttgccaacatccttctcgtaaatctgctcatagccgtctttaacaacacattcttcgaagtaaagtccatcagcaatcaagtctggaagttccagcggtatcaattgatcatgactttccacgaacggcctgtactccctcccccattaatcatattctctcatatgaccatgatatttcagcacctttgttgtcggtggcgcaaacacgagtctgatcctgacgagcgcgactacgggctcaaacttttcattacggatgatgaattgaaaaaggtgcacgatttcgaagaacagtgcattgaggagtactttcgcgaaaaggacgatagatttaactcttctaacgatgagagaatacgggtgacatctgagagagtcgagaacatgtccatgagactggaggaagtgaacgaacgggagcattcaatgaaagcatcccttcagacagtcgacatcagactggcccagctagaggatctaattggacggatggcaacagcgctcgaacgcctcaccggcctcgagagagccgagtccaataagatacgtagccgcacatcgtcggattgcacagatgctgcctacatcgtgcgccagtcaagctttaatagccaggagggtaacaccttcaagctgcaggaaagcatcgaccctgccggggaagaaaccatgagtcccacaagtcccactttgatgcccagaatgagaagtcattccttctattccgtcaacatgaaagataagggcggcatagaaaagctcgagtcaatctttaaagagaggagcctttcactccatcgtgctactagcagccattctgtcgccaaggagcccaaggctccagctgcacccgctaatactcttgcaatcgtacccgactctaggcgcccttcttcatgtattgacatttacgtttcagctatggatgaactgcattgtgatatcgatccccttgataactctgtgaatatactcggactgggcgaaccaagcttctctacaccagttccctcaaccgcgccatcctctagtgcgtacgctactttagcccccacggaccgccccccttcacgcagcatagatttcgaggacatcacctcgatggatactcgatccttcagctcagactacacgcatctcccagagtgccagaacccctgggactcagagcctcctatgtatcacacaattgagcggagcaagtcttcccgctaccttgctaccacgccgttcctgctagaggaagcccctattgttaaaagccattcgtttatgttcagcccatcccgctcctattatgctaattttggagtgcctgtgaaaaccgcagagtacacaagcattactgactgcattgacacacggtgtgtgaatgcccctcaggccatcgccgaccgagccgcattcccaggaggcctcggggacaaagtggaagatttaacctgctgtcaccctgagcgcgaggccgaactgtctcaccccagctctgatagtgaagagaacgaggcaaaggggcgccgcgctaccatcgccatttccagtcaggaaggtgacaacagcgagcgcactctgtctaataatataaccgtgccaaagattgagagagcaaacagttactccgctgaagaacccagtgctccctacgcccacacgagaaaatcattcagcattagtgacaaactcgacaggcaaaggaacaccgccagtttgcgcaatcctttccagagatcaaagagttctaagcctgaaggtcgaggggattccttatctatgagacggctgtcgcggacatctgcctttcaatcttttgagtctaaacataactag

SEQ ID NO: 138419 - DNA, 3978 bp, synthetic construct
  misc_feature 1..3978: note = Description of Artificial Sequence: Synthetic coding sequence
  source 1..3978: mol_type = other DNA
atgcccgagccctgggggaccgtttacttcttgggaattgctcaggttttttccttcttgttcagctggtggaacctggagggagttatgaatcaggccgatgcgcctagacctttgaactggaccattcgcaagctgtgtcacgcggcctttttgcccagcgtgcgtctattgaaagctcaaaaaagttggatagaacgggctttttacaagagagagtgcgtccacattatccccagcacgaaggacccccaccgttgctgctgcggacggctgattggccagcatgtcggcctcacccccagcattagcgtactccagaacgagaaaaacgagagcagactctcccggaatgacattcagagtgaaaagtggagtatctctaagcacacccaactgtctcccacagatgccttcggcacaattgaatttcaaggcgggggacatagtaacaaggcaatgtatgtgagagtgtctttcgacacaaaaccagatttacttctccatctaatgacaaaggagtggcaacttgagttgcctaaactgctgatttctgtgcatggaggtcttcagaatttcgagctccagcccaaactcaaacaggtcttcggcaagggtctgatcaaggcggctatgaccaccggagcttggattttcactggaggagtcaataccggcgtcatcaggcacgtcggggacgcactcaaggatcacgcaagcaagagtcggggaaaaatttgtacaattgggattgccccctggggcatagtagagaaccaggaagatctcattggtcgggatgtggtgaggccctaccagaccatgtccaacccaatgagtaagctgactgttttaaattccatgcactcacattttatcctggccgacaacggcactacggggaaatatggtgcggaggtcaaattgcgacggcagctcgagaaacacatttcactccaaaagattaacacgaggatcgggcaaggcgtgccagttgtggcccttattgtcgaggggggaccaaacgtgatatccatcgtgctcgagtatctgcgggatacacccccagtcccagtggttgtgtgcgatggctccggtagagcctccgatatcctggcttttggacacaaatacagcgaggaggggggtcttataaacgaaagtctccgggaccagctcctagtcacgattcaaaagaccttcacatacacacggacccaagcccagcatctgttcattatccttatggagtgcatgaagaaaaaggaactcatcacagtgtttcgtatgggctccgaaggacaccaggatatagatctggccattctgactgcccttctcaaaggcgctaacgcgtccgcccctgatcaactgtcgctggcattggcttggaatcgcgttgatatagcgagaagccagatctttatttatggccagcaatggcccgtgggcagcctcgagcaggcgatgctcgatgctttagttctggatcgtgtggacttcgtgaagttgctaatagagaatggtgtttccatgcaccgattcctaacgatcagccggttggaggagctctacaacacgcggcacggaccctctaacaccttgtatcatctggtgcgggatgtgaagaagggcaatctgccacctgattaccgcatttcactgattgatatcgggctggtgattgaatatctgatgggcggtgcctatagatgtaattacactcggaagcggtttcgcacactttaccacaatttattcggacctaaaaggccaaaagctttaaagctgctcgggatggaggacgacattcccctgcggcgagggcggaaaactacaaagaaaagagaggaggaagtcgatatcgacctcgatgaccccgagatcaaccacttccccttcccctttcacgagctgatggtgtgggccgtactgatgaaacgacagaagatggcactcttcttctggcaacatggagaggaggctatggctaaagccctggttgcctgcaagctctgcaaggccatggcccacgaggcatccgagaacgatatggtcgatgatatctctcaggagcttaatcataacagcagagattttggacagctggctgtggaattattagaccaatcgtacaaacaggatgagcagctggccatgaagctactgacatatgagctgaagaattggtcaaatgccacatgtctccagctagccgtggctgcgaaacatcgagatttcatagcccacacgtgcagtcaaatgctgctgacagacatgtggatgggacgactgaggatgagaaaaaactctggcctgaaggtgattctcggcattttactgccccccagcatcctctcacttgagtttaagaataaagacgatatgccttacatgagccaagcccaggagatccacctccaggagaaggaggcggaggagcccgagaagccaactaaggagaaagaggaggaggacatggagctgactgctatgctgggcaggaacaatggcgagagctcccgcaagaaggacgaggaagaagtccagtccaaacatagactcataccactggggagaaagatctatgagttctacaatgcccctatagtcaagttctggttctacactctggcatatattggttatctcatgctcttcaactatatagtcctggttaagatggaacgctggccttccactcaggagtggatagtcatttcctacatctttaccctggggatagaaaagatgcgtgagatcctgatgagcgagcctggcaagctcctccagaaggttaaagtttggctgcaggagtactggaacgtgacagacctgatcgccattctgctgttctcggtgggcatgatcctccggctgcaagaccagccctttcggtccgacggaagggtgatttattgcgtaaacatcatatactggtacattaggttacttgatatttttggcgtgaacaagtatctggggccgtacgtgatgatgatcgggaagatgatgatagacatgatgtacttcgtgatcataatgcttgtggtactcatgtcgttcggcgtggctaggcaggccatactgtttcccaatgaggagcccagttggaaattagcaaaaaatattttttacatgccatattggatgatttatggagaagtgttcgctgaccagatcgatcctccttgtggacagaacgagactcgagaagacggtaagatcattcaactccccccttgtaagacaggcgcatggatcgtgccagccataatggcatgctaccttttggtcgcaaacatcttgctggttaacctcctcattgctgtgttcaacaatactttttttgaagtgaagtccatcagtaaccaggtgtggaaatttcagcggtatcagctgattatgacctttcatgagcgcccagtgctacccccccctctgatcatcttcagccacatgactatgatcttccaacatctttgctgccgctggcgaaagcatgagtccgaccccgacgagagggattatggactaaaattattcatcacggacgacgagcttaaaaaggtgcacgattttgaggaacagtgcatcgaggaatacttcagggaaaaggatgataggtttaatagcagtaacgatgagcgcattcgagtaactagcgagcgcgtagagaacatgtccatgcggctcgaggaggtgaacgaaagagagcatagcatgaaagcatcactgcaaacggtggacattcgcctcgcccagctcgaagacctcattggccggatggcaactgcgctcgaaagactgaccggcctcgaaagagctgaatcaaataagattcgctctcgcaccagctccgactgcacggatgccgcctatatcgtcaggcagagcagctttaacagtcaggagggcaataccttcaagctccaggaaagcattgatcctgccgaacaccccttatactcagtatag

SEQ ID NO: 138420 - DNA, 4671 bp, synthetic construct
  misc_feature 1..4671: note = Description of Artificial Sequence: Synthetic coding sequence
  source 1..4671: mol_type = other DNA
taatacgtgcgcgtcagctttgacactaaacccgatcttctcctccacctgatgaccaaggagtggcaactggagctgcctaagttgctgatctctgtgcacggcggactacagaacttcgagctgcagccaaagctgaaacaggtgttcggaaaggggttaatcaaggcagccatgactacaggagcttggatatttacaggcggcgtcaacacaggcgtcattcgacatgttggcgatgctctaaaggaccacgcctccaagtctagagggaagatttgcacaattggaattgccccctggggtattgtcgaaaaccaggaagaccttatcggcagggatgtagtgcggccttatcaaaccatgtcaaatccaatgtctaagctgactgtgctcaattcaatgcactctcactttatcctggctgataatgggaccaccgggaagtacggggccgaagttaagctgcggcgacagttagaaaagcacatcagtttacagaagattaacactcgtataggccagggggtccccgtggttgccctgatcgttgagggcgggcctaatgtgataagcattgttttggagtacctcagagatacacctcctgtccccgtagtggtttgtgatggatctggacgagcctccgacatccttgctttcggacacaaatactccgaagagggcggattgataaatgaatctctgcgggaccagttactggtgaccattcaaaagacatttacatatacccgaacacaagcgcagcacttgttcatcattctgatggaatgtatgaagaaaaaggagctgatcactgtgtttagaatgggttcggaaggacatcaggacatcgacctcgcaattctgaccgcgttgcttaaaggagccaacgccagtgcccccgaccaactgagcctcgctctcgcctggaatcgcgtcgatattgctcggtcccagatcttcatatacggtcagcagtggcccgtgggctccctcgagcaagcgatgctggacgctctggtcctcgaccgagtggactttgtaaagttgctgatcgagaatggcgtttctatgcaccgtttccttaccatttcaaggttggaggagctgtataatactcggcacggccctagtaacaccctgtaccacctggtccgcgacgtgaaaaaaagggaatatccagggtttggatggatctacttcaaagggaacctcccccctgactacaggatttcgctgattgatataggattagtgatcgaatacttaatgggcggcgcataccgttgtaactacacaagaaaacggttccgcactctctaccacaacctgttcggtcctaagcgggatgacatccccttgcgaagaggaaggaagaccaccaagaaacgggaagaggaggtggacatcgacctggacgatcctgaaataaaccattttcctttcccgttccacgagttgatggtgtgggccgtgctgatgaagcgacagaaaatggcactgttcttctggcaacatggagaggaggcaatggccaaggcccttgtggcttgcaaattatgcaaggccatggcacatgaagcttctgaaaatgatatggttgacgacatttcgcaggagcttaatcacaattctcgagattttggacaactcgctgtggagctcctggatcagtcctataagcaggacgagcagctcgccatgaagttgctgacatatgaattgaagaactggagcaatgctacttgcctgcagctcgccgtggccgctaagcatagagactttatcgcacatacatgttctcagatgctgttaacagatatgtggatgggccggttgcgcatgaggaagaacagcgggctgaaagtcatcttaggcatcctgctacctcctagcatcctcagcttggaattcaagaacaaagacgatatgccttatatgtcgcaggcacaggagatccatcttcaggagaaagaggcggaagagcctgaaaagccaaccaaagaaaaggaagaggaagacatggaactgaccgcaatgctcggacggaataatggggagagtagtagaaaaaaagacgaggaagaggttcagagtaagcatcgactgattccactcggtagaaagatctacgagttttataacgcccctatcgttaaattctggttctataccctggcctatattgggtatcttatgctgttcaattacatcgtgctggtgaaaatggaacgctggccctccactcaagagtggatcgtgatcagctacatcttcacgctgggcattgaaaaaatgagggagatactgatgagtgagcccggcaagttgctgcagaaggtgaaagtgtggcttcaggagtactggaatgtgaccgacctgatagctattttactcttcagcgtggggatgatcctccggttgcaggatcagccattcaggtcagacggacgcgtgatttactgtgtcaatataatttattggtacattaggctgttagacatctttggagtgaataaatacctcggcccttacgttatgatgattggcaagatgatgattgacatgatgtattttgtgattatcatgcttgtcgttttgatgagctttggcgtcgctagacaagccatcctcttccccaacgaggagccatcctggaagttagcaaagaacattttttacatgccttactggatgatatatggggaagtcttcgcagatcagatcgaccccccttgtgggcaaaatgaaacaagggaagacggaaaaattattcagttacccccctgtaagactggcgcctggatagttcctgccattatggcttgctacctacttgtggccaacattctgttggttaacctccttattgctgtgttcaacaatacctttttcgaggttaaatcaatatcgaatcaggtttggaagtttcaaaggtatcagcttattatgacattccatgagcgccccgtactgccccccccactgatcattttctctcatatgactatgatttttcagcatctgtgttgtagatggcgcaagcatgagtccgaccccgacgagagggactatgggctgaagttgttcattacagacgatgaattgaagaaggtccatgacttcgaagagcagtgcatcgaggaatattttcgagagaaagacgataggtttaatagctctaatgacgagcgcattcgagtaacgagcgagcgggtcgaaaatatgagcatgagattagaggaggtgaatgagagagagcactctatgaaggccagcctacagaccgtggacatacgcttagctcaactggaggacctcattggtcgaatggccactgcgctggagagactgacaggattggaaagagccgagtctaataaaatcagaagcagaacaagcagcgactgcaccgatgctgcttatattgtgcgccagtcctctttcaattcccaggaagggaacacatttaagctccaggaatccatcgaccccgcgggcgaggagaccatgtctccaaccagtccgactctgatgccaaggatgagatctcactctttctacagcgttaacatgaaggacaaaggcggtatcgagaaactcgaaagcattttcaaagagcgatcactctctttacaccgtgccacaagtagccacagcgtggccaaagagccaaaagcccctgccgccccggccaatacactggccattgttcccgattctcggcgaccaagcagttgtattgatatctacgtgagcgcaatggacgagctccactgtgacatagacccactggataattcagtgaatatcctaggtctgggcgagcccagcttctcaactccggtgccttccactgctccaagctcatcagcgtatgccaccctcgccccaactgataggcctccatctcgcagcatcgacttcgaagatattacgtcaatggacacccgcagtttttcgtctgactacacccatcttcccgaatgtcagaacccatgggatagtgagccaccaatgtatcacacaattgaaagaagcaaaagttcccgatacctagccacaacgcctttcttactcgaagaagcgcccatcgtcaagtcccattccttcatgtttagcccctcccggagctactacgccaactttggagtaccagtgaagaccgcggaatacacgtcaataacagattgtatcgatacccggtgcgtgaacgcaccgcaagctatagccgacagagccgccttcccagggggtttaggcgacaaggtcgaggacctgacatgctgtcaccctgagagagaggcagagctgtctcacccctccagtgacagcgaagaaaatgaggcaaaggggagacgagctacaattgccatctcctctcaggaaggcgataactcagagcggacactgtcaaacaacataactgtgcctaagattgagcgggccaattcatatagcgctgaggagcccagcgcaccatatgcacatacccgcaaaagtttctccattagtgacaagctggacaggcaaagaaacacagcctcccttagaaatccttttcaacgcagcaagtcttctaagcctgagggacgcggagactcactctccatgagacgcctgtccagaaccagtgcttttcagtcctttgaatccaagcataactag

SEQ ID NO: 138421 - DNA, 4701 bp, synthetic construct
  misc_feature 1..4701: note = Description of Artificial Sequence: Synthetic coding sequence
  source 1..4701: mol_type = other DNA
atgtatgttagagtctctttcgacacgaagccggaccttttactccatcttatgactaaagaatggcaactggagctcccaaagcttctgatcagcgtccacgggggcctgcagaattttgagctgcaaccaaagctgaagcaggtgtttgggaaaggactgataaaagctgctatgactaccggcgcgtggatcttcacaggaggcgtgaatactggtgtcatacggcacgtcggagatgcactgaaagaccatgcctctaaatcccgcgggaaaatttgcaccatcggaatcgccccatggggcatagttgagaaccaagaagatcttatcggcagggatgttgtcaggccctaccaaactatgagcaatcccatgagcaagctaacagtgctgaatagtatgcattctcactttatcctcgccgacaatgggaccactgggaagtacggcgccgaggtcaaactgagacgccagttggagaagcatataagccttcagaagatcaatacacgaattggacagggggtgcccgtggttgcgctgatcgtagaagggggccccaatgtgattagcatcgtgttagaatatttgcgcgacactccaccagtcccagtagtggtctgtgatgggagcggtagagcctctgatattttggctttcggccataaatacagtgaagaaggtggtctgataaacgagagtctcagagatcagttgctcgttactattcaaaagacattcacttacacacggactcaggctcaacacctgtttattatcctcatggagtgtatgaagaagaaagaactcattacagtcttccggatgggctcagagggccaccaggatatagatctggctatcttgactgccctactgaagggagctaacgcttccgcacccgaccagctgtccctggcgctggcttggaatcgcgttgacatagcaagaagtcaaatcttcatatacgggcaacaatggcctgtcggttcactcgagcaggccatgctcgatgctctggtcttagatagggtagatttcgttaagctgttgatcgagaatggcgtctcaatgcatcgattcctaacaattagtaggctcgaggagctgtataacacccgccatggcccatccaatactctgtaccaccttgtccgagatgtgaagaagggtaacctgccgcccgactaccggattagtctgattgacattgggctagtaatcgaatacctgatgggtggggcctacaggtgtaactatacgaggaaaagatttaggacactgtaccacaatctgttcggtcccaaaaggcctaaagcactcaagttgctcggtatggaggatgacatacctctgagaaggggcagaaaaaccacaaaaaagcgagaagaggaggttgacatagatctagacgaccccgagatcaaccacttcccgttcccttttcacgagctcatggtctgggctgtcctcatgaagagacagaaaatggctctgtttttttggcagcatggcgaagaggccatggctaaggcacttgtggcttgtaaactctgtaaagccatggcccatgaggcctctgaaaatgacatggtcgacgatatcagccaggaactgaaccacaattctcgggactttgggcaactcgctgtggagctgttggaccagagctacaaacaggacgaacaactcgcaatgaagctactcacttatgaactcaagaactggagcaatgccacatgtttacagctcgctgtagccgctaagcatagggacttcatagctcatacctgcagccagatgctgctgacagatatgtggatgggcaggctgcggatgagaaaaaactccggcctcaaggttatactcggtatattgctgcccccctcaatattatcactggaatttaagaataaggatgacatgccctacatgtcccaagcccaggagattcatttacaagagaaagaggcagaagagccagaaaagcccacaaaggaaaaggaagaggaagatatggagctgactgccatgttagggagaaataatggcgagagttcacggaaaaaagatgaggaagaggtccaatcaaaacacagactgattcctctggggaggaagatttacgagttttataacgcaccaatcgtaaaattttggttttacactctagcttatattgggtatctaatgctgtttaactacatcgtgctggtgaagatggagcgatggccctctacacaggagtggattgtgatttcttacatttttacgctgggcattgaaaagatgagagaaatactgatgtcagaacccgggaaacttctgcagaaagttaaagtctggctccaagaatattggaacgtgaccgacctgatagcaattttgctgttttccgtcggtatgatcctccgccttcaggaccagccatttcggtccgacggacgcgtaatttactgtgttaatatcatctactggtatatacggctcctggatattttcggcgtaaataagtacctggggccgtatgtcatgatgatcggtaaaatgatgattgatatgatgtacttcgtcatcattatgcttgtggttctgatgagcttcggcgttgcacgtcaggctattctgtttccaaatgaggaacctagttggaagcttgccaaaaatattttttatatgccctactggatgatttatggagaggtctttgctgaccagatcgataggaagcaagtctatgacagccacacacctaagagtgcaccttgcgggcagaacgagaccagagaggacgggaagatcattcagcttcccccttgtaagaccggagcctggattgtgcccgctatcatggcctgctacttgctagtcgcgaatatactgctggtcaacttgctgatagccgtgttcaataataccttcttcgaggtgaagtccatctcgaatcaggtatggaaatttcaacgctaccagctaattatgacctttcacgaaaggccggtgctgccgcccccacttattattttttcacacatgaccatgatattccagcacctgtgttgccgatggcgtaaacatgagtctgaccctgatgaacgcgactatggcttaaagctctttatcaccgacgatgaattgaagaaagtgcacgattttgaggagcaatgcatcgaggagtactttagggaaaaggacgatcggtttaacagtagcaatgatgagaggatccgcgtgactagcgaacgcgtagagaatatgtctatgcggctggaagaagtgaacgaaagggagcactctatgaaagccagcctgcaaaccgtggacataagactcgcgcaactcgaggatctgattgggaggatggcaacagcccttgaaagactgaccgggttggaaagggccgaaagtaacaagatccgctctcggacttcctctgactgtaccgatgctgcctatatcgttagacagtcaagcttcaactctcaagagggcaatacatttaaacttcaggagagcatcgaccctgccggggaggaaaccatgagtcccactagcccaaccctaatgcccagaatgaggtcccattctttttattcggtgaatatgaaagataaggggggtatcgagaaactcgagagcatctttaaggaaaggtccctgtctctgcaccgggcaacgtctagccacagcgtggctaaggaacccaaagcccccgctgctcccgcaaatactctggcaatcgtcccagacagccggcgcccgagcagctgtattgacatatacgtgagcgcaatggacgaactccattgtgacattgatcctcttgacaatagtgtcaacattctggggctgggtgagccatctttctccactccagtaccgtcaaccgctccatcttcctctgcttacgccaccctggccccaacagaccggcctccatccagatctatcgactttgaggacattacttctatggacacgaggtcgtttagtagcgattacacacacctccccgagtgtcagaatccctgggattctgagccgccgatgtaccatacaatcgagcgtagtaagagctcccggtatttagctaccaccccatttctactcgaagaggcccctattgtcaaatcccacagcttcatgttctcaccttcgcggagctattacgcgaacttcggcgtccctgtgaaaacagccgaatatacctccattacagattgcatcgatactcgctgcgtaaatgcaccacaggccatcgcggatcgagctgccttccctggggggctgggggacaaggttgaggatctcacttgctgccaccccgaaagagaagcagagcttagccatccttccagcgactccgaagagaatgaggccaaaggaagaagagcaaccatcgcaatctctagccaggaaggtgacaactctgagaggacgctgtcgaataatatcacagtacccaaaattgagcgcgctaattcttattcggccgaggaaccctctgcgccctacgcccacacacgaaagagcttttcaatctccgacaagctcgataggcaacggaatacggcatcactaaggaatccgttccaacggtccaagtcatccaaacctgaagggaggggggattccctatccatgagacgtctcagtcgcacctccgcctttcagtcattcgagagcaagcacaactag

SEQ ID NO: 138422 - DNA, 4740 bp, synthetic construct
  misc_feature 1..4740: note = Description of Artificial Sequence: Synthetic coding sequence
  source 1..4740: mol_type = other DNA
atgtacgtacgcgtgtctttcgataccaagccagatctgcttttgcacttgatgaccaaagaatggcagctggaactccccaagctgctgatctctgttcacgggggccttcaaaattttgaattacagcctaagctgaagcaagtgttcggcaaggggctgattaaggccgctatgacgactggggcctggatctttaccggtggtgtcaacacaggtgtgatcaggcacgtgggcgatgcactgaaggatcacgcatccaagagcaggggcaagatctgcacgatcggtatagccccatggggaattgtggaaaaccaggaagaccttatcgggagagacgttgtgaggccctatcagaccatgagtaacccgatgagcaagcttaccgtccttaacagtatgcactcacatttcatactggctgataatggcactaccggcaagtatggtgccgaggtgaagctcaggcgccagttggagaaacacatttccctgcaaaagatcaatacacgatgtttaccgttctttagccttgacagcaggctattttactctttctggggcagctgccagctagattcagttggaataggacagggggtgccagtagtcgcacttattgtggaaggtgggccaaatgtgatctctatcgtcctggagtacctgagggacactccccccgtgccggtcgtggtctgcgacggaagcgggagggcaagtgacatattagcgttcggtcataagtattcagaagaaggggggctcatcaacgaaagtttgcgggaccagctgctggtgaccattcagaagacctttacatatactaggacccaagctcagcatctgttcatcattctgatggaatgtatgaaaaagaaggaactgataaccgtgttccggatgggttccgaaggccatcaggatattgacctcgcaatcctcactgcattattaaagggtgctaacgcctctgctcctgaccagctaagcctggcactggcatggaaccgcgtggacatcgcacggtctcagatcttcatttacggccagcaatggccagtcggatcgctagaacaggcgatgctagatgcattagtcctcgacagagtagattttgtcaaactgcttatcgagaatggggtctccatgcatcgattcttgacaatttctcgcttagaggagctgtacaatacaaggcacggtccatcgaataccctctaccacctggtgagggatgttaagaagggcaatctgcctcctgactacagaatttctctgatagatatcggtttggtgattgaatatcttatgggcggggcctatcggtgcaattacacccgcaagaggtttaggaccctgtaccataacctctttggtcctaagagaccaaaggctctgaagctcttaggaatggaggacgacatccctttgcgcaggggccgaaaaactacaaagaagagggaagaagaggtggacattgatttggacgatcctgagatcaatcatttcccttttccctttcatgaactcatggtatgggcggtcctgatgaagcgccagaagatggccctctttttctggcagcacggcgaagaggcgatggcaaaggcactggttgcatgtaaattgtgcaaggccatggcccacgaggcatcagaaaatgatatggtcgacgatatttcccaggagcttaaccataacagtagggacttcggccaattggctgttgaactcctcgatcagagctataagcaagacgagcagctcgccatgaaactgctgacatacgagctgaaaaactggtctaatgccacttgtctgcagctcgctgtcgccgctaagcacagagatttcattgcacacacttgttcccagatgctgctgaccgacatgtggatgggcagactgcgcatgcgcaagaactctggacttaaggtgattctggggatcctcctacctcctagtatcctcagcttggagttcaagaataaagatgacatgccttatatgagtcaagctcaggagatacacctacaggagaaagaagctgaagaaccagagaaacctacgaaagaaaaggaagaggaagacatggagctgacagccatgcttggtagaaacaacggggagtccagcaggaaaaaggatgaagaggaagtccaatccaagcacaggctgatacctttgggacgcaagatatacgagttctataacgctccaatcgtcaagttctggttttacaccctcgcgtacattggatatctgatgttattcaactatatcgtcctcgtaaagatggaaagatggccaagcactcaggagtggatagttatttcctacatcttcacactgggcatcgaaaaaatgagggagatccttatgtctgagcctggtaagctccttcagaaggtcaaggtgtggctgcaggaatactggaacgtgaccgacctaattgctatcttgctgttctcagtaggcatgattttgcggctccaggatcaaccgttcaggagtgacggcagagtgatttactgtgtcaatatcatatattggtacatacgcctgctcgatattttcggcgttaataaatacttgggtccctacgtcatgatgattggaaagatgatgatagacatgatgtatttcgtaattatcatgctggtagttttgatgagcttcggagtcgcgcggcaggccatactcttccccaatgaagagccttcatggaagctggctaaaaatatattttacatgccgtattggatgatttatggggaagtgttcgcagatcaaatcgacccaccatgcggtcagaatgagactcgggaagacggtaagatcatccagcttcccccctgtaagacgggcgcttggatagtcccagccatcatggcttgttatctgctcgtcgctaatattttgttggtgaacctccttatagctgtttttaacaacacgttcttcgaagttaaatctatctcaaatcaggtgtggaaatttcagcgttatcagctcataatgacattccatgagcggcccgtgctgcccccacccctgattatcttctcacacatgacaatgatcttccagcatctttgctgtcgctggcggaagcacgagtctgaccccgatgagcgggattatgggctgaaactcttcatcaccgatgatgagttgaagaaggtgcacgactttgaagaacagtgcattgaggaatactttagggaaaaagatgaccggttcaacagttcaaacgacgagagaatcagggtgacctctgaaagagtggaaaatatgagtatgcgattggaagaagtgaatgagagagaacacagcatgaaggctagccttcaaacggtggacattaggttagcgcaacttgaggatctgatcgggcgcatggccaccgcactcgaacggctgaccgggctcgaacgcgccgagtccaataaaattaggtctaggacgagtagtgattgtaccgatgccgcatacattgttagacaatcatctttcaatagtcaggaaggcaacacgtttaagctgcaggagagcatcgaccccgctggcgaggaaaccatgagccccactagccccactctcatgccaaggatgaggagtcatagtttttatagcgttaacatgaaagataagggtggtatcgaaaagctggaatccattttcaaagagagatccttgagtctacacagagctacgtcttctcactccgttgccaaagaacctaaggctcctgccgcaccagccaacaccttggcaatagtgccagatagtcggcgtccaagtagctgcatcgatatctatgtgagcgccatggacgaactgcactgtgacatagatccactggataattccgttaatatcctgggcctcggggagccaagcttctcgacacccgttccttccactgcccctagtagtagtgcttacgcaactctggcccctaccgacagaccaccaagtcgatccatcgattttgaggatatcactagcatggatacgagaagcttttcatctgattacacacatctaccggaatgccaaaacccatgggactctgaaccgcctatgtaccacactatagagcgctctaaaagctctcggtatctggctacgacccctttccttctggaagaagcacctatcgtgaagtcccactccttcatgttcagcccttcccgctcctattatgccaacttcggtgtgcctgtgaagacagccgaatacacctccattaccgactgcatcgacacacggtgtgtaaatgcccctcaagccattgctgatcgagccgctttccccggcggtctgggcgacaaggtggaagatctgacatgctgccacccagaaagggaagcagagctctcccatccaagctcggattctgaagagaatgaagccaagggtcgacgggcaactattgccatctcatcacaagagggtgacaacagtgaacggactctgagtaacaacatcactgttccaaaaattgagagagctaactcctactcggctgaggaaccttccgctccgtacgcccatacccgcaaatcttttagcatctccgataaactggaccggcagagaaacacagccagcttacgcaaccccttccagcgctcaaagtcatcgaaaccagagggcaggggggacagtctgagtatgagacgcctcagcagaacctcagcatttcagagtttcgaaagtaagcataactag

SEQ ID NO: 138423 - DNA, 4701 bp, synthetic construct
  misc_feature 1..4701: note = Description of Artificial Sequence: Synthetic coding sequence
  source 1..4701: mol_type = other DNA
atgtacgtgcgagtcagctttgacactaaacctgatctgctcctacatctcatgaccaaggagtggcaactggaactaccgaagctgttgatttccgtccacggcggcctgcaaaacttcgaactccaacctaagttgaagcaggtgtttggcaaagggctgataaaagcagccatgaccacaggcgcttggatcttcaccggtggtgtgaacactggggtgatcaggcacgtcggtgacgctctgaaagaccatgcctcgaagagtcgaggaaaaatttgcactattggcattgcaccatgggggatagtcgagaaccaggaggacctgattggacgggacgtcgtaaggccataccagacaatgagcaatcctatgtctaagctgactgtgctgaactcgatgcacagccatttcatcctagctgataatggaaccacaggtaagtacggggccgaggtgaagctccggaggcaactagaaaagcacattagcctgcaaaaaattaatacacggatcggtcagggagtgccggtggtggctctgatcgtggagggcggcccaaacgttatttctatcgtattggagtatctgagggatactcccccggtccctgttgtcgtgtgcgatggatcgggacgagcatcagacatcctggcctttggacataagtactctgaagagggcggattgatcaatgaaagcttaagagatcaattgctagtgaccatccaaaagaccttcacctacacaaggactcaggcccagcatttgttcatcatcctgatggaatgtatgaagaagaaagagctaattacagtgttccgcatggggagcgagggacaccaagatatcgacctggccatcctgactgcattactgaagggcgctaacgcctctgccccagaccagctcagtctggcccttgcatggaacagggtagatatagcaagaagccagatttttatttatgggcaacaatggccagtaggcagtctggaacaggccatgctcgacgctctcgtgttagatagagtcgacttcgtgaaactgctaatcgaaaacggcgtctcaatgcaccgtttcctgacgataagccggctcgaggaactctataacacccggcacggcccaagcaataccctctatcacctcgtgagggacgtcaagaagcgtgagtatcccggctttgggtggatctacttcaagggaaatcttccgccagattatcggattagccttatagatatcggtctagtaatcgaatatctcatgggcggtgcctatagatgtaactacacccggaaacgcttcagaacactctaccataaccttttcggtccaaagaggcccaaggctctgaagctgctggggatggaggacgacattccattgcggcgcggaaggaagaccaccaaaaaaagggaggaggaggtggatattgaccttgatgatccagagattaatcactttccctttccgtttcatgagctcatggtttgggccgtgctcatgaaacggcagaagatggctctattcttttggcagcatggcgaagaggccatggcaaaagcgctagttgcttgcaaactctgcaaggctatggcgcacgaagccagtgagaatgatatggtagacgacatttcgcaggagctgaatcacaattctcgcgatttcggccaactggcagtggaactgttggaccagtcttacaaacaggacgagcagttggcaatgaaactgctgacatacgagttgaagaactggtcaaatgctacatgtctccagctggccgtggctgcaaagcaccgggacttcattgctcacacttgctcccaaatgctcctcaccgatatgtggatgggccggctgagaatgagaaaaaactccggattaaaagtgatcctcggaattctactgccaccatccatcctgtccctggagtttaagaataaggacgatatgccttatatgtctcaggcccaagagatccacctgcaggagaaggaggccgaagagcccgaaaaacccactaaagaaaaagaggaagaagatatggaactcacagcgatgctaggacgaaacaacggagagtctagtcggaagaaggatgaagaagaggtacagtctaaacaccgactaatcccactggggagaaaaatttatgagttttataatgcgccaatcgttaaattctggttttacaccttagcatatatcggatacctcatgctgtttaattacattgtgcttgttaaaatggagcgttggccgtccacccaagagtggatcgtaatttcttacatattcaccctgggaattgagaaaatgcgcgaaattcttatgtccgaaccggggaagttgttacagaaggtgaaggtgtggcttcaggaatattggaatgtaaccgacttgatcgccatcctcctattctcagtagggatgattttaagattacaagaccagccattccggagtgatggacgagtgatctattgtgtgaacataatatattggtatatccgcctgctggatattttcggggtgaacaaatacctgggcccttatgtgatgatgattgggaagatgatgatagacatgatgtacttcgttatcatcatgctggtggtgttgatgtccttcggcgtggcaaggcaagctatcctgtttccgaacgaggagccaagttggaagcttgccaaaaatatcttttacatgccttattggatgatttacggggaagtcttcgccgaccaaattgatcccccctgcggccagaatgagactagagaagatggcaagattatccagttgccgccttgtaagacgggcgcttggatcgtacccgccattatggcctgctacctcctagttgccaatattctccttgtgaaccttctgatcgctgtgtttaataatacgttttttgaagtgaagtccatctccaatcaagtatggaaattccagagatatcagctgatcatgacatttcacgagagacccgtcctgcctccacctctgatcatcttctcccatatgacaatgattttccagcacctctgctgtcgctggaggaaacatgagtctgatccggacgaaagggattatgggctgaagttattcattacggacgacgaattgaaaaaagttcacgacttcgaagagcagtgtattgaagaatatttcagggagaaggacgaccggttcaatagttccaacgacgagaggatccgagtcaccagcgaaagggttgagaatatgtcaatgaggcttgaagaagtgaatgaaagggagcactcgatgaaggcgtccctgcaaaccgtggatatacgcctggcccagctggaggacttgattggccgaatggcaaccgccttggagaggctgactggcttggaacgtgccgagagcaacaagatccgaagtcgcactagcagtgattgtacagacgccgcttacatcgttcggcagtcctctttcaattcgcaggagggtaacacctttaagcttcaggagagtatcgacccggctggagaagagacgatgtctccaactagccccactttgatgccccggatgaggagccactccttttattcagtgaatatgaaggataaaggggggattgagaaactggagagcatcttcaaagaacgctccctgtcgctccacagggctacaagcagccatagtgttgctaaggaaccaaaggcaccagctgcacctgcaaacactctcgctatcgtgcccgattcacggagaccctcttcgtgcatcgatatctatgtgtctgcaatggatgaactacactgcgacatagatccgttggataacagtgttaacatactcggtctgggagaaccaagcttcagcactcccgtgccaagcaccgctccttcgtcctctgcttatgctactctggcgccaactgatagacccccctcccggagtattgactttgaggacattaccagcatggatacacgcagcttcagctcagattatacccacttgcctgaatgccagaatccctgggacagtgaacctccaatgtatcacacaattgagcggtcaaagagttcacggtaccttgccactaccccgttcctgcttgaagaggcgccaattgttaagagccactctttcatgttctctccgtccaggtcctactacgcaaattttggcgtccctgtgaaaaccgcggaatacactagcattactgactgtattgacacccggtgcgtgaatgccccacaggccatcgccgaccgagccgccttccctggtggacttggagacaaggtcgaagatttaacttgttgccacccagaacgggaggctgaactgtctcacccttctagcgactctgaggaaaatgaggccaagggtagaagggccaccattgccatctcaagccaggaaggggacaatagcgagcggacactgtctaataacataacggtccccaaaattgagcgcgccaattcctacagcgccgaagagccaagcgctccttatgctcacactcgcaagtcttttagcatttctgataaactggacagacaacgcaacaccgccagtttaaggaatccctttcagcggagtaagagcagtaaaccagaggggcgcggcgattcactatcaatgagacggttgtcccgaaccagcgcctttcaatcctttgagtctaaacacaattag

SEQ ID NO: 138424 - DNA, 5205 bp, synthetic construct
  misc_feature 1..5205: note = Description of Artificial Sequence: Synthetic coding sequence
  source 1..5205: mol_type = other DNA
atgggtaaaaaatggcgggacgccgcggagatggaacgcgggtgttccgaccgagaggataacgccgagtcacgcagaagaagcaggagcgccagtaggggtcggttcgcagagtcctggaaacgtctcagttctaagcagggctcaaccaaacgttctgggcttcctagtcagcagactcctgctcaaaaaagttggatcgagcgcgccttctacaaaagggagtgcgtgcacataattcctagcaccaaagacccccatcgatgttgttgtggccgactgatcgggcagcacgtcggactcaccccctccatcagcgtcctccaaaacgagaagaacgagagccgcttgtctaggaacgacatccagtcggaaaagtggtccattagtaaacatacccagctgagccctactgacgccttcggaaccattgagttccaaggggggggccactccaacaaggcaatgtacgttcgggtctcttttgacaccaaacccgacctgttactacacctgatgacaaaggaatggcagctggaactccctaagctcttgatctcggttcatggcggtcttcagaatttcgagcttcagcctaagttgaagcaagttttcggcaaggggcttatcaaagccgccatgacaactggcgcctggatcttcacggggggagtgaatacaggggtaataagacatgtgggtgacgctctgaaagatcatgctagcaagtctcggggaaaaatttgtacaatcggcatcgccccctggggtatagttgaaaaccaggaagacctgatcgggcgggacgtggtgcgcccctatcagaccatgagcaacccaatgtctaaactgactgttctgaactctatgcacagtcactttatcctagctgacaacggcaccaccggcaagtatggagccgaagtgaaactcagacggcagctagagaagcatataagtctccaaaagattaacacaaggtgccttcctttctttagtttagacagccggctcttctacagcttttggggaagctgccagctggattcagttggcattggtcaaggcgtgcctgtcgtggccctgatcgtggagggaggccccaacgtaatcagcatcgtgctggagtacctgcgagacacgccccctgttccagtggtggtttgcgacgggtctgggagggcgtcagacatcctggcctttggacacaagtactcagaagaaggaggcttaataaacgaatccttgcgggatcagcttctcgttacaatccaaaaaacatttacctatacccgcactcaggctcagcacctgttcatcatcctgatggagtgtatgaaaaagaaggaactgattactgtgttccggatgggtagcgaaggccaccaggacatagatctggccatcctaactgccctcctaaagggcgctaatgccagcgcgccagaccagttgtccctggcgctggcttggaacagagtcgacatcgcccgctctcagatcttcatctacggccaacaatggcctgtgggtagcctggagcaggccatgcttgatgccctggtgctggatagggtagatttcgtcaagctcctgatcgagaatggtgttagcatgcaccgattcctgaccatttctcgactcgaagagctatacaatacacgccacggccccagcaacacgctgtaccatctggtgagagacgttaaaaaaggcaacttgccccctgattatcgcatcagcttaattgacatcggcttagttatcgagtatctgatgggtggtgcctataggtgtaattacacaaggaagagatttcgaaccctctatcacaacctgtttggcccaaagcgtccaaaggcgctgaagctgctcggaatggaagatgatattccactgagacgggggaggaagacgaccaaaaagagggaggaggaggtagatattgacctcgacgaccccgaaattaatcactttccctttcctttccacgagctgatggtgtgggccgttctcatgaagcgccagaagatggccctgtttttttggcagcatggggaagaggccatggcgaaggccctggtcgcatgtaagctgtgcaaagcaatggcccacgaggcctctgagaatgatatggttgacgacatttcacaggaattgaaccacaacagtcgggactttggccagctggctgtcgagcttctggaccagtcatataagcaagacgagcagctggcaatgaaactcctcacctatgaactgaagaactggtcaaacgccacctgtctccaactggccgtcgccgcgaagcacagggactttattgcccacacttgcagtcagatgctgctcactgatatgtggatggggcggctgcggatgcggaaaaactcaggactgaaagtcatccttggcatccttctccctccttctatcctcagtctggaatttaaaaacaaggatgacatgccttacatgtcccaggctcaggaaatccatcttcaggagaaagaggcggaagagcccgaaaaaccaacaaaagaaaaggaagaggaggacatggaattgaccgccatgctaggaagaaacaatggtgagtcaagccgtaagaaggacgaggaggaagtccagtccaaacatcggttaatcccactcggaagaaagatctatgagttctataacgcacccatcgtgaaattttggttctatactctggcctatatcggctatttgatgctttttaattacattgtgcttgttaaaatggaaagatggccaagcacgcaagagtggattgttatctcttacatcttcaccctgggaatcgaaaagatgcgagagatcctgatgagtgagcccggaaaactcctgcaaaaagtgaaggtatggctgcaggagtactggaacgtgaccgatttgatagcaatcctgctgttcagcgtgggcatgatcctgcgactccaggatcaaccttttcgttcagacgggcgggtgatttactgtgtgaacatcatttactggtatattaggttgttggatattttcggtgtcaacaaatacctgggcccctacgtgatgatgatcgggaaaatgatgatcgatatgatgtacttcgtcatcattatgctcgtggtcctcatgagctttggggtcgcaaggcaagctatactgtttccgaatgaggagccatcctggaaattagccaaaaacattttctacatgccctattggatgatctatggagaagtttttgcggaccaaatagatccaccctgcggtcagaacgaaaccagggaagatggcaagattatccaactgccaccctgcaaaactggtgcctggattgtgccagcaatcatggcgtgctatctactggtggccaatatactgttggtcaatttgctgattgctgttttcaataataccttttttgaggtgaagtctatctcaaaccaggtttggaaattccagcgatatcagctgatcatgacatttcacgagcgtcccgtgcttcctcctccactgatcattttctcccatatgactatgatattccaacacctgtgttgtcgctggcggaaacacgaaagcgatccagacgagcgcgactatggtctaaagttgttcatcacggacgacgaactcaaaaaagtccatgattttgaagagcagtgcattgaggagtactttcgagaaaaggatgaccgattcaactctagtaacgacgagcggattcgggtcacatccgaaagggttgagaacatgagcatgagactcgaagaagttaacgagagggaacattcgatgaaagcctccctgcagactgtcgatatcagactggcccaactggaagaccttattggtcgtatggcgacggcgctggagaggctgactggccttgagagggcggaatctaataagatccgaagcaggacttcaagcgattgtacagatgctgcttacatcgtccgtcagagttccttcaacagccaagaaggcaatactttcaagttacaagagtcaatcgatcctgctggggaggagaccatgtccccaacatctccaaccctaatgccaaggatgcggtcacactccttctattccgtgaacatgaaagacaaaggaggcattgagaagctagaatctatcttcaaggagaggtctctctcgctgcaccgcgccacatcctcacactcggtggccaaagagcctaaggctcccgctgcgcccgccaacacccttgccattgttcccgattcccggcgaccgagctcatgcatcgatatctacgttagtgctatggatgaactgcactgtgatatcgaccctctggataacagcgtgaacattcttgggttgggtgagcccagcttttcaacgcccgttccttccactgcgccttccagcagtgcatacgccacactagcccctacagacaggcccccatcgagatccatagacttcgaagacattacatctatggatactcggtccttttcttcagattatacacacctgccagagtgccagaatccatgggactctgagccaccaatgtatcatactatagagagatcgaagtcgtccagatatttggctaccaccccatttttattggaagaggcaccgattgttaaaagccacagctttatgttttccccgtcgcggtcctattatgctaattttggcgtgcctgtgaagaccgccgagtataccagcattactgattgcattgatacacggtgtgttaacgcaccacaggctatcgcagacagggccgccttccctggtggccttggcgataaagtcgaggatctaacctgttgccatcctgaaagagaggcagagctgagccaccctagctctgatagcgaggagaatgaggccaaaggcaggagagccactatcgccatttcatcacaggaaggcgacaattcggagcgtaccctgtccaacaacatcaccgtccctaagattgagcgtgcgaattcctatagtgccgaggagccctcggccccctatgcccacacgcgtaagtccttttcgataagcgataaattggatcgacagcggaatacagcatcactcaggaatccatttcagaggtctaaaagtagtaaacccgagggtcgaggcgacagccttagcatgaggagactcagtcgcacctcggccttccagtcatttgagtcaaagcacaattag

SEQ ID NO: 138425 - DNA, 645 bp, synthetic construct
  misc_feature 1..645: note = Description of Artificial Sequence: Synthetic coding sequence
  source 1..645: mol_type = other DNA
atgtatgtgcgggtctctttcgatactaagccagatctgctgcttcatcttatgacaaaggagtggcagttagagttacctaagttgttaatatccgtccatggaggactccaaaacttcgaactgcagcccaaactaaaacaggtatttgggaagggactcatcaaggccgccatgactaccggagcgtggattttcacaggtggggtgaacactggtgtcatcaggcacgtcggagacgccctgaaggatcacgctagtaagagcagggggaagatctgtactattggtatcgcaccctggggaatcgttgagaaccaggaggacctgataggtagggacgttgtcaggccctatcaaaccatgagtaaccctatgtccaagttgactgtgctgaattcaatgcactcacattttatactggcggataacggcactaccggcaagtatggcgccgaagtcaaactgcgcagacaattggaaaagcacatatcactgcagaagataaacacatcgttccattcctacaagaccgcccatgttgacttacaggataagcggcaggtaaaaaccgccctggaacaggctgagtggcagcccggacggggcatgtttgatcacgacaacctgatgcagagcacctag

SEQ ID NO: 138426 - DNA, 3645 bp, synthetic construct
  misc_feature 1..3645: note = Description of Artificial Sequence: Synthetic coding sequence
  source 1..3645: mol_type = other DNA
atggtggttccagaaaaggagcagtcttggataccaaagatcttcaagaagaagacttgtacaacgtttatcgtcgattcaaccgaccctggcggcactttatgccagtgtgggcggccacgaacagcccaccccgccgttgcaatggaggatgcattcggggctgccgtggtcaccgtatgggatagcgacgcgcacactacagaaaaaccaacggatgcctatggggagttagacttcaccggtgccggcaggaaacactccaatttcctgaggctcagcgataggaccgatccagccgcggtgtattcgcttgtgacgcggacatggggcttcagagctcccaacctagtggtgtcagtgctcggcggatctggcggcccagtgctccagacctggctccaagacctcctgcgccgaggcctggtgagagctgcacagtctacaggggcgtggatcgttaccggcggtctgcacaccggaattgggcggcatgtgggcgttgccgtgagggatcaccaaatggcgagcaccggagggaccaaagttgtggcaatgggcgtcgctccgtggggagtggtcagaaatagagatacgctgattaacccaaagggatcctttccagctaggtacagatggcgaggggatccggaagacggagtgcaattccctttggactacaactactcagctttctttctcgtggatgatggcacacatggctgcctggggggggagaaccgcttccgacttcggttggagtcatatatcagtcaacagaagaccggcgtcggtggcactggaattgacatcccggtgctactcctgctgatcgatggggatgagaaaatgttaacgaggatagagaatgctacacaagcccagcttccctgcctgctggttgccgggtctggcggggccgccgattgtctggcagaaacactggaggacactttagctcctggcagcggcggggcaaggcagggcgaagcccgggatcggattcgcaggtttttcccgaaaggcgatctggaggtgttacaggcccaggtcgaacggattatgacccgaaaggagctcctgacagtgtactcttcggaggacggcagcgaggaatttgaaacgatcgtcctcaaggccctcgtcaaggcatgtggtagcagtgaagccagcgcatacctcgatgaattgagactggccgtggcatggaatcgggtggatattgcgcagtctgagcttttccgtggggacatccaatggcgcagctttcacctcgaggcttctctcatggatgcactcctgaatgatcgccctgaattcgtgaggctgcttatatcgcacggcttatctcttgggcacttcctgacgccgatgcgccttgcgcagctctacagtgccgcaccaagtaacagcctgatcaggaatcttctagaccaagcgagccattcagcaggaactaaggctcctgcattaaagggcggagctgcagagctaaggccgccagacgttgggcatgtgcttcgaatgctccttggcaagatgtgtgctcctagatatccatccggcggtgcttgggatccgcatccaggacaagggtttggggagtctatgtatctgctgtccgacaaggctacctcacctctctccctcgacgcaggcttgggtcaggctccctggtccgatctactcttgtgggcactcttattgaatagggcgcagatggccatgtacttctgggaaatgggatctaatgcagtgagctccgccctgggcgcctgtctcctgttaagggtgatggcacggctggaaccagacgctgaggaagcagcgcggcggaaagacctggcattcaaatttgaaggtatgggtgttgatctgttcggggagtgctatcgcagtagcgaagtgagagccgctcgactcttgcttagacgctgtccattgtggggtgacgctacctgtttgcagcttgcgatgcaggctgacgcgcgagctttcttcgcgcaagatggcgttcagagcctgcttactcagaaatggtggggcgacatggctagtactacccctatttgggccctcgttctagccttcttctgcccccccttgatttatactcggctaattaccttccgtaaatcagaggaagaaccaacaagggaggaactcgaatttgatatggactccgtgatcaatggagaggggcctgtcggaacagcagacccggccgaaaaaacaccactcggcgtgcctcggcagagtgggagaccgggatgctgcggtggaagatgtggggggaggagatgtttacggagatggttccatttctggggggcgcctgtgactatttttatggggaacgtggttagctatcttttatttttacttctgttcagcagagttctgttagtcgattttcagccagcgcctcctgggagcttagaactattgctttacttttgggcattcactctgctgtgcgaggaactgaggcaggggctgtctggaggcggaggctcattagcatcaggtggtcctgggccaggccacgcctctctgtctcagaggttgagattgtaccttgctgattcctggaaccaatgcgaccttgtggcattaacctgttttttactgggtgtgggttgtcgcctaactcccggcctgtatcacctcgggcgaacagtactatgtatcgacttcatggtgtttaccgtccggcttctgcacatcttcaccgtgaacaaacagttggggccgaaaatcgtcatagttagtaagatgatgaaggacgtgttcttcttcctcttttttctgggtgtgtggttagtcgcttatggggttgcaaccgaggggctcctcagacctagggacagcgacttcccttccatccttcgtcgggtgttttatcgaccctaccttcagatttttggacagataccgcaagaggacatggacgtggctcttatggagcactctaattgctcctcagaacccggattctgggcccacccccccggggcgcaggctgggacctgtgtttcccaatacgctaattggctggtggttttgctgctcgtaatcttcctcctggttgccaatatcctgttagttaacctactgatcgccatgttcagctatacattcggaaaggtgcaaggcaactctgatctgtactggaaggcccagagatataggctgattagggagtttcatagcaggccggccctagccccccccttcattgttataagtcacctgagattgctactcagacagttgtgtcgacggccccggtcacctcagccatcttcaccggccctcgaacactttcgcgtctacctgtcaaaagaagctgagagaaaactactgacctgggaatccgttcacaaagaaaactttctgctggccagggcaagggataaacgagaatccgacagtgagagacttaaacggacctctcaaaaagtggacctggctctgaaacagttaggacacatccgagagtacgagcagaggctcaaggtgcttgagcgcgaagtccaacagtgttcaagagttttaggatgggtcgcagaggcactcagtcgcagcgcactgctgcctcccggcggaccacccccaccagatctccccggcagcaaggactag

SEQ ID NO: 138427 - DNA, 2583 bp, synthetic construct
  misc_feature 1..2583: note = Description of Artificial Sequence: Synthetic coding sequence
  source 1..2583: mol_type = other DNA
atgctgactagaattgaaaacgctacacaggcccaactgccatgcttgctcgtcgcggggagtggaggggcagcagactgcctcgctgagactttggaagatactctcgcccctggtagtggaggagcacgccagggtgaggcgcgggaccgcattcgaaggttttttcccaagggggatttggaggtactacaggcccagtccttccacctggaggcttctttaatggacgcccttttgaacgataggcctgaatttgtgcgacttctgatatcgcatggcttgtcactgggtcattttctgacccctatgagactggcccagctgtattcagccgcaccaagcaatagtctcattcggaacctgttggatcaagccagtcatagcgctgggacgaaggccccagctctcaagggaggcgccgccgaactgcgcccaccagatgtgggacacgtgctccgaatgctcctcggcaaaatgtgtgcacctaggtatccctccggaggggcatgggaccctcatccgggacagggatttggtgagtcaatgtacctgctgtccgacaaagcaactagtccgctctccctagacgccggcttgggacaggctccttggtctgatcttctgctctgggctcttctcctgaacagagcccaaatggctatgtatttttgggagatgggtagcaatgcggtttcctcagccctgggggcgtgtctacttctacgtgtcatggcgcgcctcgaacctgatgctgaagaagccgcccgtcgcaaagatctcgccttcaagtttgaagggatgggtgttgatctgttcggagaatgctatcgcagctccgaggtccgtgcagcacgactcctgcttcgaaggtgccccctgtggggcgatgcaacctgcctgcagcttgctatgcaagccgatgctagggccttttttgcccaagacggagtgcaatcactgctcacacaaaaatggtggggagacatggcttcgacaaccccaatttgggcactcgtgttagctttcttctgcccacctttgatctacacacggctgatcactttcaggaaaagcgaagaggagccaacgcgagaggaactggagtttgatatggattctgtcattaacggggaggggcctgtaggcacggctgatccagctgagaaaaccccattgggcgtgccacggcagtcaggccgcccagggtgttgcggcggccgatgtggagggagaaggtgtctgcgtaggtggttccacttctggggggctcctgttaccatctttatggggaacgtagtgtcctatttgctgtttttactcttgttttcacgtgtgctgctggtcgatttccaacccgcgcctccgggtagtttagagctcctactatacttttgggcttttactctactgtgcgaggagctacggcaaggcctgtctggtggaggtggctcactcgcctctggtggcccgggccccggccacgcaagccttagccagcggctgcgcttgtacctggccgactcttggaatcagtgcgatctagtagctctgacttgcttcctgctcggggtgggatgtaggctcacacctgggctctaccacctgggaagaaccgtgctgtgcatcgactttatggtgttcaccgtgcggcttttacacatatttaccgtaaataaacagctgggtcccaagatcgttatcgtgagtaaaatgatgaaagatgtgttcttcttcctattcttcctgggcgtgtggttggtggcttacggggtggccacagaagggctgctccgaccccgcgatagcgactttccttcaattctgagacgcgttttctatcgcccttacctgcagatttttggtcagattcctcaggaagacatggatgtggcattgatggagcactcaaactgttcttctgagcctgggttctgggcccaccctcccggagctcaagccggcacctgcgtctcccagtacgctaattggctcgtggttttacttttggtgattttcctcctcgtggctaacatcttgctagtgaatttgttgatcgccatgtttagctacaccttcggtaaggtacagggcaactctgacctctactggaaagcccaaagatatcggctaatccgggagttccacagcagaccggcgctcgctccaccattcatcgtgatcagtcacctgagactgcttctgaggcagctgtgtcggcgcccccgctctccccagccctcctcacccgcgcttgagcacttccgagtgtatctttctaaggaggcagagcgaaagttgctgacctgggagtctgtgcacaaagagaactttcttcttgcccgtgcgagggataagagggaatctgacagcgagcggctgaaaagaacatcccaaaaggtcgacctggctctgaaacaactgggccacatacgcgagtatgagcagagactcaaggtgctggaaagagaggtgcagcaatgctccagggttttgggttgggttgccgaagctctgagtcgtagcgccctgttgcccccaggtggcccccctcccccagacctgcccggcagtaaagactag

SEQ ID NO: 138428 - DNA, 3210 bp, synthetic construct
  misc_feature 1..3210: note = Description of Artificial Sequence: Synthetic coding sequence
  source 1..3210: mol_type = other DNA
atggttgtgcccgagaaggagcagagttggattcccaaaatttttaagaagaaaacctgcacgacctttatagtcgacagcaccgatcctggcggtacattgtgccagtgcggacgaccgcgtactgcgcacccggccgtggccatggaggacgcctttggcgctgccgtagtcaccgtgtgggatagcgacgcgcatacaaccgaaaagccaactgacgcatacggcgagcttgactttacgggagccggccggaagcattcgaatttcctgcgcctttctgatcgtactgacccagccgcagtctattctctggtgactcgaacctgggggttccgtgccccaaatctggttgtctccgtcttaggcggctctggtggccccgtcctgcagacttggttacaggatctcctgaggcggggactggtccgggctgctcagtcaacgggggcctggattgtgacagggggacttcacactggtattggccggcatgtgggagtcgccgtgagggatcaccaaatggcttctacaggcgggaccaaggtagtggctatgggagtggccccgtggggggtggttcggaatcgtgacactctgattaaccctaagggttcgttccctgcccggtatagatggcgcggcgatccagaggacggggtccaatttcccctcgattacaactacagtgcttttttcctcgtcgacgacggcacgcatggctgtctgggaggggagaacagattccgcctgcgcctcgaatcttatatttcacagcagaagacaggagtaggcgggacaggaatagacatacctgtgctgcttctcctaattgatggagacgagaaaatgctcacacgcatcgagaacgccacacaggcacagctgccttgcctgctggtcgccgggtcgggcggcgccgcagactgtctggctgaaactctggaagataccttggcaccggggagtggtggagctcgtcaaggcgaggctcgcgaccgtattaggcggttctttcccaagggggacctggaggttctgcaggctcaggtcgaacgcatcatgacaaggaaggaattactaaccgtttattcctcagaagacggcagtgaggagttcgagacaatagtgctgaaagcgcttgtgaaggcctgcggctcatctgaggcaagtgcctatcttgacgaattgaggctggctgtagcctggaacagagtagacatcgcacaaagcgaactctttcgcggtgacatccagtggaggtcattccacctcgaagcatcacttatggatgcgctcctgaacgaccgcccggagttcgtgaggcttttaatatctcatggactttcccttgggcactttttgacacccatgcggctcgcccaactctattccgctgcccctagtaattccctaattcgcaatctgctggaccaagccagccattccgctggtacaaaagcccctgctttgaaaggtggtgccgccgagctgcggcccccagatgtgggacacgtactgagaatgttgctaggaaagatgtgtgctccaaggtacccatccggcggcgcttgggaccctcacccaggtcagggtttcggagaatcaatgtacttactgtcagataaagccacctcaccactgtcactggacgctgggctggggcaagccccttggagcgacctcctcttgtgggctctcctccttaacagggctcagatggcaatgtacttctgggagatgggctctaatgctgtgtcatcagccctgggagcctgtctgctgctgagggtgatggcccgcctcgaacctgacgctgaggaggctgcaagacggaaggacctggcctttaagttcgaaggaatgggagtggatctgttcggtgaatgttaccgatcctcggaggtgagagcagccagacttctgctccgacgctgtcccctgtggggtgacgcaacctgcctacaactcgcaatgcaggctgacgccagagctttttttgcgcaagatggcgtgcagagtctgctgacgcaaaagtggtggggagatatggccagcacaacccccatctgggctctggtgctcgcttttttctgtccccccctgatatacaccaggctgatcacatttaggaaaagtgaggaagaacctacccgggaggagctggaatttgacatggattccgtgatcaatggggagggccctgtgggattgacccctggcctttaccatttgggaagaaccgtgttatgtattgatttcatggtgtttacggtccgcctccttcatatcttcacggtgaataagcaattgggccctaagatcgtgatcgtttctaaaatgatgaaagacgtgtttttcttcctctttttcctaggagtgtggctcgttgcatacggggtggccaccgaaggcctcctgcgcccacgggactcggattttccttctattcttagaagagtcttttatcgaccatatctgcaaatatttggccagatcccacaggaggatatggacgtggccctgatggaacacagcaactgcagcagcgaacccgggttttgggcgcacccccctggagcgcaggccggcacatgtgtttctcaatatgctaattggcttgtggttctgttgctcgtcatctttttattggttgccaacatcctgttggttaatcttctgattgccatgttcagctataccttcggaaaagtccagggtaattcagatctctactggaaagcccagaggtataggctgatccgggagttccacagtaggccggccctggcacctcctttcatcgttatcagtcacctgcgcctcctgttgagacaactatgtcggaggccaagatccccacagcctagctcacccgctctggaacatttcagggtgtacctgagtaaggaggctgagaggaaactgctcacttgggagtccgtccacaaggagaactttctacttgctcgtgccagggacaaacgtgaatccgacagcgagcggctgaagcgaacaagtcagaaagtggatctggcccttaagcaattgggacatattagggaatacgagcagaggttaaaagtgctcgaacgtgaggtccagcaatgtagccgcgtattgggatgggtggcggaggcgctgtcacgaagtgccctgctcccacccggtggccctccacccccagatctgccaggaagtaaggattag

SEQ ID NO: 138429 - DNA, 3498 bp, synthetic construct
  misc_feature 1..3498: note = Description of Artificial Sequence: Synthetic coding sequence
  source 1..3498: mol_type = other DNA
atgcaggacgtgcaaggccctaggccggggtctcccggcgatgctgaggacaggcgcgaactcggattacaccgcggagaggtgaattttggaggctccggcaaaaagcgcgggaaatttgtccgggtgccctccggcgtggctcccagcgtgctgttcgacctcctgctggccgaatggcacctgccagccccgaacttggtagtcagcttggttggagaggagcagccattcgctatgaagtcgtggctgcgagatgtgctccgcaagggtcttgttaaggctgcccagtcaactggggcctggattctgaccagcgcattgagggtcggactcgcgcgacatgtgggacaggcggtgagggatcactctctcgccagtacctccactaaggtgcgcgtggtggccgtgggcatggcctccttggggcgagtgctccaccggcgaatactggaggaggcacaggaagacttcccggtccactacccagaagacgatggcggctcacaggggccattgtgctccctggactccaacctgagccactttatcctggtggagccaggcccacccgggaaaggggatggtttaactgaattgcgcctgcggctggagaaacacatttcagaacagagagcagggtacggggggacaggttcaatagaaatcccggttctgtgcctacttgtgaatggcgatcccaatacacttgagagaatctctcgggctgtggaacaggctgctccttggctgatccttgtggggagcggcggcattgctgacgtgctagccgcactcgtcaaccagccccacctgctggtgcccaaggttgcggaaaagcagttcaaagaaaagttccccagcaagcatttctcatgggaagatatagtccgctggactaagctacttcagaacatcacctcccatcagcatctcctcactgtgtacgatttcgaacaggaagggagcgaagagctcgatacagtgatccttaaagcattggtgaaggcctgcaaatctcactctcaggagccccaagattaccttgacgagttgaagcttgcagtcgcgtgggatagggttgatatcgccaagtccgagatctttaatggagacgtcgaatggaaatcttgtgatcttgaggaagtcatggtggacgccctggtctctaataaacccgagtttgttagactgttcgtggataacggcgctgatgtggccgattttctcacttatgggagattgcaggagctgtatagatcagttagccggaagtctttgctctttgacttgctgcaaagaaagcaggaggaggccaggctgacactggcaggcttgggaacacaacaagccagggaacctccagccgggccccctgcatttagcctccatgaggtgtcaagggttctcaaagacttccttcaggatgcctgccgagggttttaccaagacggaagaccgggagatcgaagaagggctgaaaaaggaccagctaaaagaccaaccggtcaaaaatggcttttagatcttaaccagaaatcagaaaatccctggagagatctcttcctgtgggccgtgctgcagaataggcatgagatggcaacatacttttgggcaatgggccaggagggtgtggctgcggccctagctgcctgtaaaatcctgaaagagatgagccaccttgagaccgaggctgaggccgcccgagccacacgtgaggcaaagtacgaaaggctcgctctcgatctgttctctgaatgttactctaattcagaggcgagagccttcgcacttcttgttagacgaaaccggtgctggtcaaagactacatgcctgcacctagccactgaagccgacgccaaggcattttttgctcatgatggagtgcaagcctttcttacacgtatttggtggggggatatggcagccggcacgccaatcctgcgtttactgggcgcctttctctgccccgccctggtgtataccaacctgattaccttctccgaagaggcacccctgcgcacgggcttggaagatctgcaggacttagacagtttggataccgagaaatccccgctttatggtctccagtccagggtcgaggaactagttgaagcaccacgggctcaaggcgaccggggtcccagagctgtattcttgctcacgaggtggcggaaattttggggagccccagtgaccgtgttcctcggcaatgtcgttatgtatttcgcattcctgtttctgttcacatacgtccttctggtcgatttccggccgccaccacaagggcccagcggcccagaggtgacgctgtacttttgggtgttcacactggttctggaagagatcagacagggtttttttaccgatgaggacactcatctggttaaaaagttcaccctgtacgtgggagataactggaacaagtgtgatatggtggcgatattcctttttatagtgggagtcacgtgccggatgttacccagcgcgttcgaagccggaagaaccgttctggctatggacttcatggtgttcaccttacgacttattcacatctttgctatccataaacagcttggacccaagattatagtggtggagcggatgatgaaggacgtattcttctttctgttcttcttgtccgtctggctcgtggcctatggggtgactactcaggcattgttgcaccctcacgacggacgcctggaatggatcttcagacgggtgctgtaccgtccctatctgcagatttttggtcagataccgctcgatgagatagacgaagctcgtgtcaattgctccacccatccgctgttgctggaggatagtcccagctgtcctagcttgtatgccaactggctggtgattctcctcctagtgaccttcctgctcgtgactaatgtgctgctgatgaacctgctgatcgccatgttctcctatacatttcaggtagttcaggggaacgccgacatgttctggaaattccagagatacaatttaatcgtggaatatcacgaaagacccgcgctggccccgccttttatcttgctgagccacctgtcactaaccctgaggagagtctttaagaaggaggctgaacataaacgggagcacctggaacgcgacctacctgatccgctcgaccaaaaggtggtgacttgggagacagtgcaaaaggagaactttcttagcaagatggaaaagcgccgcagggacagtgaaggcgaggtgctgcgaaaaactgcccatcgggttgacttcatcgccaagtacctgggaggacttagagagcaggaaaagcggattaaatgcttggagtcacagataaattactgtagcgtgctcgtatcttctgtcgcagacgtattagcccaggggggggggccccggagcagccaacattgcggtgagggcagccagctagtcgctgcggatcacaggggaggattggacggatgggagcagcccggcgccgggcagccaccatcggatacctag

SEQ ID NO: 138430 - DNA, 2619 bp, synthetic construct
  misc_feature 1..2619: note = Description of Artificial Sequence: Synthetic coding sequence
  source 1..2619: mol_type = other DNA
atgcaagacgttcaaggacctaggccaggctcccccggagacgctgaagaccgtagggaactcggcctgcatcggggcgaggtaaacttcgggggcagcggcaaaaagagagggaaatttgtgagggtgccaagcggcgtggccccttctgtgttgttcgatctgctgctcgccgagtggcacttgcccgctccaaacctcgtcgtatcacttgtgggtgaggaacagcctttcgccatgaaatcttggctgcgagacgtcctaagaaaaggcctagtgaaggccgcccaatctacgggcgcctggatcttgacatcagcattgcgggttggattagctaggcacgtgggccaggcggtgcgcgatcatagcctggccagcaccagcaccaaagttagagttgtcgctgtgggaatggccagtctgggcagggtgcttcatcggcggattttggaggaggcccaggaggactttccagtccattacccagaagatgatggaggctctcagggccccctctgctcccttgattccaacttgagtcattttatcttggtggagcccggccctccgggaaagggtgatgggctgacagagttgcggctgcggctggaaaagcacattagcgagcaacgggcaggctacggcgggactggcagcatcgagatccccgtcctgtgcctgcttgtaaatggggatccgaacacattggagaggataagccgggctgtggaacaggcagccccttggcttatcctcgtaggctccggagggattgctgacgtccttgcagctctggtgaaccagccccatctcttggtgcccaaggttgctgagaaacagttcaaggaaaaattcccttcgaaacatttctcatgggaggatattgtgcggtggaccaagttactgcaaaatatcacaagtcatcagcacttactcaccgtctacgacttcgaacaggaagggtcggaggagctcgatactgtgatcctgaaggcccttgtgaaagcctgtaagagtcactctcaggaaccccaagattacctggacgaactgaagctggccgttgcctgggatcgtgtcgacatcgccaaatcggaaatttttaatggagatgtggaatggaagtcttgcgacttggaggaagtaatggtggacgcactggtaagcaataagccagaatttgtgcggttgttcgtggacaacggagctgatgtagctgactttctgacatatggccggctgcaagagctctaccggtccgtatctagaaagagcctcctgtttgatctgctgcagcggaagcaggaagaggctcgtctgactcttgccggccttggcactcagcaggcccgggaaccaccagccggaccacctgctttttctctgcacgaggtctcccgtgttctgaaagattttcttcaggatgcctgccgcggattctaccaggacggaaggcccggagataggcgtcgtgcagaaaagggtcccgctaaacgaccaactgggcaaaaatggctgctggacttaaatcagaaatccgagaatccgtggcgtgacctgtttctgtgggccgtgttgcaaaacagacatgagatggccacatatttctgggctatgggccaagaaggcgtggcggctgccctggccgcctgcaagatcttgaaggaaatgtcccatctcgaaacagaggcagaggccgcccgtgctaccagagaggccaagtatgaacggctggcgcttgacctcttttccgagtgttactccaactcagaggcgagggctttcgctctcttggttcggagaaacagatgttggagcaaaacgacatgtctgcatctggcaactgaggcagacgctaaagccttcttcgctcacgacggagtacaagcttttctgaccagaatctggtggggcgacatggcagctggaactcctatcctcaggctgctgggagccttcctgtgccccgctctggtgtatacaaacctgatcacattctcggaggaagcacccctccgtaccggactcgaggatttgcaggatctcgactctctggataccgagaagtctccactgtacggcttgcagagcagagtggaagagcttgtggaggcccctagagcgcagggtgatcgagggccccgcgctgtcttcctattgacgagatggaggaagttttggggggcccccgtaaccgtattccttgggaatgtagtcatgtactttgctttcctgttcctgttcacatacgtgttgttggtcgacttcagaccaccaccacagggaccaagtgggcctgaagttactttgtatttttgggtctttaccctggtcttagaagagataaggcaaggttttttcacggatgaagacactcatctggttaagaaatttacgctgtacgtgggagacaattggaacaaatgtgacatggtcgctatttttctcttcattgtcggggtgacatgccgcatgttacccagcgctttcgaagcaggacggacagtcctcgcgatggattttatggtattcacacttcgattaatacacatcttcgctattcataagcagctggggcctaagattatcgtagtggaacgcatgaagcctgtgtag

SEQ ID NO: 138431 - DNA, 3504 bp, synthetic construct
  misc_feature 1..3504: note = Description of Artificial Sequence: Synthetic coding sequence
  source 1..3504: mol_type = other DNA
atgcaggacgtgcagggaccacggcctggtagtcccggagacgctgaggaccggagagagctggggctccaccgcggtgaggtgaatttcggcggctctggaaagaagagagggaaatttgtccgcgttccctccggggtggcgccatctgtccttttcgatctcctgctggcagagtggcacctgcctgcacctaacctcgtggtgagcctggttggcgaagagcagcctttcgctatgaagtcttggctgagggacgtcctccggaagggcctggttaaagcagcccagagtacgggtgcatggattctgacgtctgccctgagggtaggcctagccaggcacgttggccaggcagtgcgggatcattcgttagcttccacttctacgaaagttagagttgttgccgtgggcatggcctccttaggcagggtcctgcacagacggattctcgaagaagctcaggtgcatgaggacttcccagtgcactaccccgaggatgacggcggatctcagggccctctctgctcactcgactcaaacttgagccattttatcctcgtggaaccgggaccgcctggcaagggcgatggtctgacggaactcagactgagactcgaaaaacacattagcgaacagagagccggctacggtgggaccggaagtatagaaatccccgtactctgcctcctggtgaatggagatcccaatacactggagcggattagtagggcggtcgaacaggcggctccatggctgatcctcgtaggaagcggtggaatcgctgatgtcttagctgcactcgtgaatcagccacatcttctggtcccaaaggtggccgagaagcagttcaaagaaaagttcccctcaaagcacttcagctgggaggatatagtgcgctggacaaaactccttcaaaatatcacaagccatcagcacctgctgaccgtctacgacttcgagcaggagggatcagaagagctggatacggttatcttgaaagctctggttaaggcttgtaagtctcactctcaagagcctcaggactacttagacgaactgaagctagccgtggcctgggaccgtgtcgatatagcaaagagcgagatcttcaacggagacgtggaatggaaatcttgcgacttagaggaggtgatggtggatgccctggtcagtaataaacccgaattcgtgcgcttgttcgtggacaacggggcagacgtggccgatttccttacctacgggcggttgcaggagttatataggtcagtctctcgcaaatcactcctgtttgatctgctgcagagaaaacaggaagaggcccggctcaccctggctggacttggcacccagcaggctagggaaccacccgccggcccacccgcattttcattacacgaggtgagtagggtgctgaaagatttcctccaggacgcatgcaggggcttctaccaagacggcaggccaggtgaccgaagaagggccgaaaaaggcccagccaagcgtcccactggccaaaagtggctgctcgatctcaaccaaaaaagtgagaatccttggagggacctgttcctgtgggcggtgctccaaaaccgccatgaaatggccacttacttttgggctatgggccaggagggggtggccgcggctctggccgcgtgtaaaatcctaaaggagatgagccacctggagactgaggcagaagcagccagagcaacccgagaagctaagtatgagaggttggcactcgatctttttagcgagtgttactcaaactcagaggctcgggcattcgccttattagtcaggcggaacagatgttggagcaagacaacttgcctgcaccttgccactgaagccgatgctaaagctttttttgcacacgacggggtgcaggcgtttttgacccgtatctggtggggggacatggcagctggtactccaatcctccgactccttggcgcttttctttgcccagcccttgtgtacacaaatctgatcaccttctcagaagaggctcctctgaggacagggctggaagacctgcaagatctggactccctggataccgagaagtcccctctgtacgggttgcaatcccgggtggaggaactggtggaagcgccccgcgctcagggggaccggggcccgagggccgttttcttactgaccaggtggcggaagttctggggagcgcctgtcacggtgtttcttggcaacgtcgtgatgtattttgcgtttctgttcttgttcacctacgtactgttggtggatttccgtccccccccacagggcccctctggccccgaggtcacattgtacttttgggtgtttaccctagtattagaggaaatccggcaaggatttttcacagacgaagacacacacctggtgaaaaagttcactctgtacgtgggtgacaactggaacaaatgcgacatggttgccatattcttgttcattgtcggtgtcacctgccgcatgctgcccagtgcctttgaagccggcagaaccgtactggctatggattttatggtgttcactctgaggttgatccacatctttgcaatacacaagcagttggggccgaaaatcattgttgtggaacgcatgatgaaggatgtattcttcttcctgttcttcctcagcgtgtggctcgtggcctatggggttacaacccaggcactcctccacccacatgacgggcggcttgagtggatcttcaggagagtcctctatcggccctatctccaaatctttggacaaattcctctggatgagattgacgaggctagggtgaactgctcaactcaccccttgctactagaggactcgccctcgtgtccttctctctacgcaaactggcttgtgattctactgttggtcacgtttctcctggtgacgaacgtactcctgatgaatctgttgattgcaatgttctcctacacatttcaggttgtgcagggtaacgccgatatgttttggaagttccagcgttacaacctcattgtggagtatcatgagcggcccgccttggcgcctccttttatactcctgtcccacctcagcctcacccttcgacgagtgtttaaaaaagaagcagagcacaagagggagcatctggagcgagacctcccagacccgttggatcagaaggttgtaacatgggagactgttcagaaggagaacttcctcagcaagatggaaaagagaaggcgggatagtgaaggtgaagtactcagaaagaccgcccaccgagttgacttcatagccaaatatctcggcggtctccgggagcaggagaagcgaatcaaatgtctcgagagccagattaattactgttctgtattggtaagctccgtcgccgacgtcttggcccaaggaggaggtcccagaagctcacagcattgtggagagggaagtcagcttgtagctgctgaccaccgaggtggtctggatggatgggagcagcccggggcaggtcaaccaccgtcggatacatag

SEQ ID NO: 138432 - DNA, 3480 bp, synthetic construct
  misc_feature 1..3480: note = Description of Artificial Sequence: Synthetic coding sequence
  source 1..3480: mol_type = other DNA
cctgggtcccccggcgatgctgaggatcgccgcgagttaggcctgcaccgcggggaggtgaactttgggggctctgggaagaaaaggggaaaatttgtgcgggtgccatccggcgtcgcgccaagtgtgctgttcgaccttctactcgcagagtggcacttacctgcccctaacctggtggtctctctggtgggggaagagcagccttttgcgatgaaaagttggctcagagacgttcttcgaaaggggctggttaaggcggcccaaagcaccggtgcatggatcctgacatcggctctgagagttggtctggctcggcatgtcggccaggccgtcagagatcactcactggcatcaacatctaccaaggttagggtcgtggcggtgggcatggcgtctctgggccgagtcctccaccgccggatactggaagaagctcaggtgcatgaggacttcccagtgcattaccccgaagacgacggggggagccaagggcctttatgttctttggattcaaacctgtcccattttattttagtagagcccgggccaccaggcaagggcgacggcttgaccgagttgcggttgcggcttgagaagcatatctcggagcagagagccggctatggaggaacagggtcaatcgagatacccgtgctttgtctgctggttaacggggaccctaataccttagagcgcattagcagagccgtggaacaagccgcaccgtggctcatcctcgtgggatccggcggtatagccgacgtgttggccgcgctggtcaatcagcctcacttgcttgtccctaaagtggccgagaaacagttcaaggagaagtttcctagtaagcatttctcttgggaggatatagtgcggtggaccaaacttctccaaaacatcacatctcaccagcacctgcttacagtgtatgactttgagcaggagggatccgaagaactggatacggttatactgaaggcgctggtgaaggcttgcaagtcccattctcaggagccccaggactacttagatgagctgaaactggccgtggcgtgggatagagtggacatcgcaaaaagcgagatttttaacggagacgtggagtggaaatcttgcgacctcgaggaggtgatggtagacgctctcgtgtccaacaagcccgaatttgttaggctattcgtggataatggtgccgacgtagcagatttcctgacctatggccggctccaggagctttacagaagtgtgtctcgaaagtctctcctctttgacttgctccagagaaagcaggaggaggcgcggttgactttggcagggttgggaactcagcaagctcgagagcctcccgccggccctcctgctttctctctgcatgaggtaagcagagttctgaaggacttcctgcaagacgcctgcaggggattttatcaagatggccggccaggggataggcggcgggccgagaagggcccggctaagaggcccacaggacagaaatggctgctggacctaaatcaaaagtccgagaatccctggcgcgatttattcctctgggctgttctacagaatagacatgagatggctacctacttctgggccatgggccaggaaggggtggcggctgcgctcgccgcctgcaagattctcaaggagatgtcccatctcgagactgaagccgaggccgcaagggccacgcgtgaggccaagtatgagcgtctggcactggacctgttctctgaatgctattcgaatagtgaggccagggcctttgcgcttttggtacgacgtaatcgatgctggagcaaaaccacttgcctgcatcttgctacagaggccgatgccaaggcattttttgctcacgacggggtgcaggcctttctgacacgtatctggtggggggacatggccgcagggacccccatcttgagactcctgggagcgttcctctgcccagccttagtgtacactaacctgatcacctttagcgaggaggcacccctcaggactggcctcgaggatctgcaggatctcgatagcctggatacagaaaaatctcccttatacggactccagtctagggtggaagaactggtcgaagcccctcgagcccaaggggacagagggccaagagccgtgttcttgctgaccagatggcggaagttttggggggctccagtcacggtttttctgggtaacgtagtcatgtacttcgcttttctcttcttattcacttatgtgctcttagtggatttccggcccccgccacagggaccaagtggaccagaggtgaccctgtacttctgggttttcaccctggtgctggaagaaatcagacagggctttttcaccgatgaggacacgcacctggtgaagaaatttactctctatgttggagacaattggaataagtgcgatatggtggcaatcttcctatttatagtcggagtcacctgcaggatgctccctagtgccttcgaagctggccgtacggtcctggccatggatttcatggtttttactctgagactgatccatatctttgctattcataaacaactggggccaaagatcatcgtggtggagcggatgatgaaggacgtattcttctttctttttttcctgagcgtgtggctagtcgcgtatggggtgaccacccaggcccttctgcatcctcacgacggaagactggagtggatattccggcgagtgctgtacaggccatacctgcagatctttgggcagataccattagatgagattgacgaagcacgtgtcaactgcagcacccatccgctgctgctcgaagactctcctagttgcccatcactctacgctaactggttggtgatcctgctgttagtaacctttctgcttgtgactaatgtcttattaatgaacctgttaatagcaatgttctcatatacatttcaggtggtccaggggaacgccgacatgttctggaaatttcaacgatacaatctgatcgtggagtaccatgaaaggcccgccctcgcccctccgtttatcctgctttcacacctgtctctgactctcaggcgagtgtttaaaaaagaggcggaacataagagggaacacctggagcgggatctgcctgaccctctagatcagaaggtcgtgacctgggagaccgtccagaaggaaaactttttgagcaagatggaaaagcgccgccgcgattccgagggcgaagtcctgcgaaaaacagcacaccgcgtcgattttatcgctaaatacctcggtggcctgcgggagcaggagaagcgtatcaaatgcctcgagtcccagattaactactgctccgtactcgtatctagcgttgctgatgtactggcccagggaggcgggcccaggtcctctcagcactgcggagaggggtcccagctcgtggccgcggaccaccgaggagggcttgacggatgggaacagcccggagccggtcagcctccatcagatacatag

SEQ ID NO: 138433 - DNA, 3402 bp, synthetic construct
  misc_feature 1..3402: note = Description of Artificial Sequence: Synthetic coding sequence
  source 1..3402: mol_type = other DNA
atgctccgtccacaggtcaaggaggagatcatctgcatgattcaaaacaccttcaacttctctctgaaacagagcaaacatttgtttcagatcctgatggaatgtatggtccatcgggattgcattacaatatttgacgcagattccgaagaacagcaggatctggatctggctattctgacagccctgttaaaaggcacaaacctctctgctagcgagcaactcaatcttgccatggcatgggaccgtgtggatattgccaagaagcatattttaatttacgagcaacattggaagcctgacgccttggagcaggctatgagtgacgccctggtgatggaccgagtggatttcgtaaagctgctgatcgagtacggcgtaaacctccatcggttcctgactatacctcggctggaagaactctataatactaagcagggccccactaatacactcctgcatcacctcgtacaggatgtcaaacagcacacacttcttagcgggtaccgaatcacactgatcgatattggactggtggtggagtatttgatcggtcgcgcttacaggagcaattatactcgaaagcactttagagcactgtacaataatctgtataggaagtacaaacaccaaaggcactcaagcggcaacaggaacgagagcgccgagagtacgttgcactcacagttcattaggactgctcagccgtataaattcaaagaaaaatctatcgttttgcataagagcaggaaaaagtccaaagaacagaacgtctcggatgatccagaaagcacaggattcctttatccttataatgacctgctggtgtgggccgtgctcatgaagcggcaaaagatggctatgtttttttggcagcacggcgaggaagcaactgtgaaagcagtgatcgcctgtatactgtatagagctatggcacacgaagccaaggagagtcacatggttgatgacgcttctgaggagttgaaaaattactctaagcagtttggccagctggccctagacttgctggagaaggctttcaagcagaatgaacgaatggcaatgactctattaacttacgagcttaggaactggagcaattcaacatgcctgaaattggccgtgtccggtggcctcaggccatttgtgagtcacacctgcacccagatgctgttgaccgacatgtggatgggcagattgaaaatgcgcaaaaattcttggctcaagattatcatcagcatcatcctgcctccaaccatccttactctcgaattcaagagcaaggcagaaatgtcccacgttccccaaagccaggacttccaatttatgtggtattattccgatcagaatgcctctagctcgaaggagtccgcttccgtgaaagaatatgacctggagcgggggcacgacgaaaagctggacgagaatcaacattttggcctcgaatcaggccaccagcaccttccatggacccgcaaagtgtacgagttctacagcgcacctatcgttaaattttggttctataccatggcatatctggcattcttaatgttgttcacctatacagtgctggtagagatgcagccacaaccatccgtgcaggaatggctagtgtccatttacatatttacaaatgcgatcgaggtcgtccgggagatttgcatatctgagcccgggaaatttacacagaaggtaaaagtgtggatatccgaatactggaatttgactgagactgtcgccatcggtctgtttagcgcaggatttgtgctgaggtggggggatccgccctttcacacagcaggacgcctgatttactgtattgacatcatcttttggttttcgcgactgctagatttcttcgccgtgaatcagcacgcggggccctacgtaacgatgatcgccaagatgactgccaatatgttctatatcgtgatcataatggcgatcgttctcttgtcattcggggttgctaggaaggccatcctatccccaaaggaaccaccttcctggagtctggcccgtgacatcgtgtttgaaccctactggatgatatatggcgaagtctatgcaggagagattgacgtctgctcctcacaaccttcctgccctccaggatccttccttactccatttctccaggcggtgtacctatttgtccagtacataattatggtaaatttgctgatcgctttctttaacaacgtgtacctggatatggagtccatctccaacaatttatggaagtacaatagataccgctacattatgacataccacgagaaaccatggttgcccccccctctcattcttctttcacacgtaggcctgctactccgaagactatgctgtcatagagccccacacgatcaggaagagggggatgtcggcttgaaactgtatctgagtaaggaagatctcaagaaattacatgacttcgaagaacaatgcgtagagaaatactttcacgaaaaaatggaagacgtgaattgtagttgtgaggagcggatcagggtgactagcgagcgggttacagaaatgtactttcagctcaaggaaatgaatgaaaaggtatccttcattaaggactctttattgagcctggactcacaggttgggcatctgcaggacctttcggccctaacagttgacaccctcaaggtcctgtcagccgtggataccctgcaagaggatgaagctctgctggctaaacgtaagcattcaacctgtaagaagttgccacatagctggtctaacgtgatctgcgctgaagtcctgggtagcatggaaatcgcaggcgaaaagaagtaccagtattactcgatgccgtcatccttgctgcgctcactggctgggggacgtcatccgccaagagtgcaaagaggtgcactgctggagattaccaacagcaagcgcgaagcaacaaacgtccgcaacgaccaggagcgtcaggaaactcagagctccatcgtcgtgagtggcgtatcccccaaccgtcaggcccactccaagtatggccagttcctcctcgtccccagtaatctcaaaagagttccgttttccgccgagactgttttgccactctccaggccatccgttcctgatgtcctggctacagagcaggatatccaaaccgaagttctggtgcatctgactgggcagacacccgtcgtcagtgactgggcgagtgtcgatgaaccaaaggagaaacacgagccgattgcccacctcctcgacggccaggataaagccgaacaggtgcttcccaccctgtcctgcactccagagcctatgaccatgtcttctccactgcgccgctacaggcctttcgcccgctctcacagttttagattccacaaggaggagaaactcatgaaaatctgcaagattaagagtaaagagtag

SEQ ID NO: 138434 - DNA, 912 bp, synthetic construct
  misc_feature 1..912: note = Description of Artificial Sequence: Synthetic coding sequence
  source 1..912: mol_type = other DNA
atgaaagaacagccagttttggagagactgcagtctcagaagagttggattaaaggtgtgttcgacaaaagggagtgttctactattattccctcgtctaaaaatcctcatagatgtacaccagtatgccaggtctgccagaacctcattcgttgctactgcggccggctaattggcgaccacgccggcatagactacagttggacaatcagcgccgccaagggtaaagagagcgaacagtggtccgttgagaaacacacgaccaaaagtcccaccgatacattcgggacaattaatttccaggatggagaacacacccatcacgctaaatacatccgaacgagctatgacactaaactcgaccatctgttacatctgatgcttaaagagtggaagatggaacttccgaaactggtgatttcagtccacggaggcattcagaattttactatgcccagcaagttcaaagaaattttttctcagggacttgtgaaggcggccgagacaacgggcgcctggattatcaccgaaggcatcaatactggggtttctaaacacgtcggagacgcactgaagagccacagctcccactccctgaggaagatctggacagtagggatcccaccttggggcgtgatcgagaaccaaagggatcttatcggtaaagatgtggtatgcctctaccagacactggacaatcctctctcgaaactgaccactttgaattccatgcacagtcatttcattctgtctgatgacggcaccgtggggaaatatggcaatgagatgaagctccggagaaatctcgagaaatatttgagcctgcagaaaatacactgccgggaataccaccgaggctcagtcactcaaagcggttgtcggccagcagaggtctttcacgggttgccctag

SEQ ID NO: 138435 - DNA, 6069 bp, synthetic construct
  misc_feature 1..6069: note = Description of Artificial Sequence: Synthetic coding sequence
  source 1..6069: mol_type = other DNA
atgaaggaacagccagtgctggaacgattgcagagccagaagagttggattaaaggcgttttcgataaaagggagtgctccacaatcatcccttccagcaaaaacccccacaggtgcactccagtgtgccaggtttgccagaatttgattcgctgctattgcggtaggctgattggcgaccacgccggcatcgattattcttggacaatttccgcggctaaaggtaaggagagtgagcagtggagcgttgaaaagcacactacgaaatcacctaccgatacttttggaaccattaactttcaggatggggaacatacccaccacgcgaagtatatccgaacgtcttatgacacaaagttagatcacctactgcacctcatgcttaaagagtggaagatggaattacctaagcttgtgatcagcgtgcacgggggcatccagaattttaccatgccctccaagttcaaagagatcttttcccagggactggtgaaagctgcagaaaccaccggcgcctggattataaccgagggcattaacacaggcgtttccaaacacgttggagacgccctgaaatcccactcaagtcattccctacgcaagatttggaccgtaggaatccctccctggggtgttatcgagaatcagagggacctcataggcaaggacgtagtgtgtctgtatcagaccctggataacccactctctaaactgactacactgaactctatgcatagccatttcattttgtcagacgacggcaccgtcggcaagtacgggaacgagatgaaacttcgcaggaatctcgaaaagtacctaagtttgcagaaaattcactgccggtctcgccagggcgttcccgtcgttgggctagtggtagagggcgggccaaacgtcattctgtcagtctgggagacggtaaaagacaaggatcccgttgtggtgtgcgaggggacaggacgggctgcagatcttctggcattcactcataaacaccttgcggacgaggggatgcttaggcctcaggtgaaggaagagataatttgtatgattcagaatacattcaacttttcccttaagcagtccaagcatctcttccagatccttatggaatgcatggtccatagagattgcattacgatctttgatgcggacagcgaagaacagcaggatcttgatcttgccattctgactgctttactcaagggtaccaacctgtccgccagcgagcagttaaacctggcaatggcgtgggatagggtagacatcgcgaagaagcacattttgatctacgagcagcattggaaacctgatgccttagagcaggcgatgagtgacgctcttgtgatggatcgggttgatttcgtgaagctgctgattgagtatggtgtgaacctacaccggtttctgacaattcccagactggaggagctgtataatacaaaacagggtcctaccaacaccctgttgcatcatctggtgcaggacgtgaagcaacataccctcctgtcaggctacaggatcaccctgatcgacatagggctggttgtggaatacctgataggacgcgcgtatcgcagcaattataccaggaagcactttcgggcactgtacaataacttgtatcgaaaatataaacatcagaggcatagcagcggtaatcgaaacgaaagtgccgaaagcaccctgcatagccagtttatccgtactgcccaaccatacaagttcaaagagaagtctattgtccttcataagtctaggaaaaaatctaaagaacagaacgttagcgatgacccggagtccaccggattcctctatccctacaatgatctgctggtgtgggcggtcttgatgaaaagacagaagatggccatgttcttctggcagcacggcgaagaagctactgtcaaagctgtgattgcttgtattttatacagggcaatggcccacgaagctaaagagtctcacatggttgacgacgcctcagaggaactcaagaattactctaagcagttcggccaattggccctggatctgttggagaaggcgttcaaacagaatgagagaatggcaatgactttactcacttacgagttgaggaattggagcaattcaacctgcctcaaactggctgtgtctggtggcttgaggccattcgtgtcacatacctgcacacagatgctgctgactgatatgtggatgggtagactcaagatgcgcaagaactcttggctgaagatcataatcagcatcattctacctcccacgatcctgaccctcgaattcaaaagcaaggcagaaatgagtcacgtcccccagtctcaggacttccaatttatgtggtattacagtgatcagaatgcaagctcaagcaaggagtctgcgtctgtcaaggaatatgacctggaacgcggtcatgacgagaagttggatgaaaaccagcactttgggttggaatccggacatcagcacctgccctggacacggaaagtgtacgagttctactccgctcccatagtcaagttctggttctataccatggcctacctggcattcctcatgctgttcacatacaccgttctggtggaaatgcaaccacagccatccgtccaggagtggttggtctctatctatatcttcactaacgcgatcgaggtcgtgagagaaatctgcatcagtgaacctggcaaatttacgcagaaggtgaaggtgtggataagcgaatactggaatttaaccgagaccgtggctatcggcttgttttccgctggctttgtgctgaggtggggggatccaccttttcatactgctggccgattaatttattgcatcgatatcatcttctggttttccaggctcctggacttcttcgctgtcaatcagcatgctggcccatacgtaactatgatcgctaagatgaccgctaacatgttctacatcgtgatcattatggcaatcgtgctgctcagtttcggagtcgcccgcaaggctattctgagcccaaaggaacctccctcatggagcctcgcgcgggatattgtgtttgagccctattggatgatttacggagaggtctacgcgggcgagatcgacgtctgctcctctcagcccagctgcccgccaggatctttcctgactccttttctgcaggccgtctatctctttgtgcagtatattatcatggtaaatctcttgatcgcctttttcaacaatgtctacttggatatggagagcattagcaacaatctttggaaatacaacagatataggtatataatgacatatcacgagaagccttggctgcccccacctctcattctcctctcccatgtgggattactcttaaggagattgtgttgtcaccgtgctccccatgatcaggaagaaggcgacgttggcttaaagctgtatctttccaaggaagacctgaagaaacttcatgacttcgaagagcaatgcgtcgagaagtacttccacgaaaagatggaggatgtgaattgtagttgtgaggagaggattcgggtgacctcagaacgagtgacggaaatgtacttccagttaaaggagatgaatgaaaaagtgagcttcattaaagattctcttctctccctcgatagtcaagtggggcaccttcaggacctcagcgctctcaccgtcgataccctgaaagttctgtcagccgtagatactttgcaggaagatgaggccctattggcaaagaggaaacactccacctgcaagaagctcccccattcctggtctaacgtaatctgcgctgaggtacttggctcgatggagatcgccggggaaaagaaataccaatactattccatgccctctagtttactgaggtccctggctggaggacggcaccctccacgtgtgcaacgcggcgctctgctggaaattacaaactccaaacgagaggcaaccaacgtgcggaacgatcaagaacgccaagagacacagagctcaatagttgtctctggagtgtctcccaacagacaggcacactccaagtatggacagtttttgctcgttccctccaatctgaagcgagttccatttagcgcagaaacagtgctcccactgtcacggccttctgtgcccgatgtgttagccacagaacaggatattcagaccgaagtcctggtgcacctgacggggcaaacgccggttgtttccgactgggcctctgtggatgaaccaaaagaaaaacacgagcctattgctcatcttctggacggacaggataaagcggagcaggtcctgccaactctctcttgcaccccagaaccgatgactatgtctagcccactctcacaggctaagatcatgcagacaggcggagggtacgtgaattgggccttctccgagggtgatgaaacaggggtgttctccatcaagaagaagtggcagacatgtttgcctagcacatgtgatagcgactcttctcgcagcgagcagcaccagaaacaggcccaggattcgtcactgagtgataactcgaccagatcagcccagtcctctgaatgcagcgaggtgggtccatggctacagcctaatacaagtttctggattaatcccctgaggcgatatcggcctttcgctcggagccacagtttccggttccacaaagaggaaaagcttatgaaaatttgcaagataaagaacctgtctggttcgagcgagataggtcaaggcgcctgggtaaaggctaaaatgctcaccaaggataggaggctgtcaaaaaagaaaaagaatacccaggggctgcaggtacctataatcactgttaacgcgtgttcacagagcgaccagctgaatccagagccaggggagaatagtatttccgaggaggaatatagtaaaaactggttcactgtaagtaaattctcacacaccggcgtggaaccgtacatccaccagaagatgaaaactaaggagataggacaatgcgccattcagattagtgactacctgaaacagtcccaggaggacctgagtaaaaactccctgtggaacagccggtctactaatcttaaccgaaacagtctgcttaagagtagtataggcgtggacaagatttctgcatcactgaaaagcccccaggagccccaccaccattatagtgccatagagaggaacaacctgatgcggctatcgcagactattcccttcacccccgtccagctattcgccggcgaggaaatcactgtctaccgcctggaggaatcctcaccactgaacctggataagtccatgtcctcatggtcgcagaggggccgagctgcgatgatacaggtgctgtcaagggaagaaatggacggcggcctccgtaaagctatgcgcgtagtgtccacatggagcgaagatgatatcttaaagccagggcaggtgttcatagtcaagagctttctgcctgaagtcgttcgcacttggcacaagattttccaagagagtacggtgctgcacctgtgcctgcgggaaatacagcagcagcgggcggcacaaaaactcatttatacattcaaccaagtaaaaccacagacaattccctacactcctaggtttctggaggtatttttgatctattgtcattcagccaatcagtggcttaccatcgaaaaatatatgacgggggaattcagaaagtataataacaataatggggatgaaataacgcccaccaacacactcgaggagctcatgttggccttttcacactggacttatgaatacactcgaggggagttacttgtgttggacctgcagggcgtcggcgagaacctgactgacccgagcgtgatcaagccagaggtgaagcaatctaggggaatggtcttcggccctgccaatctcggagaagacgcaatccgaaattttatcgccaaacatcactgtaattcctgttgtcggaaattgaaactgccagacctgaaacgtaacgactattcacctgagagaattaacagtacatttggcttggaaataaaaattgagtccgctgaggaacctccagcccgggagaccggaaggaactcgcccgaggacgacatgcagttatag

SEQ ID NO: 138436 - DNA, 6054 bp, synthetic construct
  misc_feature 1..6054: note = Description of Artificial Sequence: Synthetic coding sequence
  source 1..6054: mol_type = other DNA
atgacggctccagtgacaagccagaaatcttggatcaagggtgtcttcgataagcgcgagtgttccaccattatcccctcatctaagaaccctcatagatgcactccagtgtgccaagtgtgtcagaatctcatacgttgttattgcggtcgcctcatcggcgatcacgccggcattgattattcctggaccattagcgccgctaagggaaaggagtccgagcagtggtcagttgaaaagcacacgaccaaatccccaactgacaccttcgggactatcaactttcaagacggagaacacacccaccacgcaaaatatatcagaaccagctacgacactaagctggatcaccttctgcatctgatgctgaaggagtggaaaatggagctgcccaaactcgttatcagtgttcacggtggaatccaaaactttacaatgccctccaagtttaaagaaatctttagccaaggtctagtgaaagccgccgaaacaacaggtgcatggataattactgagggaataaacactggggtgagcaagcacgttggagacgcgctgaagtctcactcttcacacagccttaggaagatttggacagtcggaatcccaccctggggtgtaatcgagaatcagcgggacttgatagggaaggatgttgtttgtctctaccagacgcttgacaatcctctttctaaactgacaacactcaacagtatgcattctcacttcattctcagcgacgacgggacagtgggcaagtatggcaatgaaatgaagctgaggcgcaatctggagaaatatctcagcctgcaaaagatccattgccggtctaggcagggcgtaccagtggtgggcctcgttgtggagggaggccccaatgtgatcctaagcgtgtgggaaaccgtgaaggacaaggatccagtcgtcgtctgcgaggggacgggcagagccgcagacctcctcgcattcacacataaacatctagccgacgaggggatgctgcggcctcaagtcaaagaggaaatcatttgcatgatacagaacaccttcaattttagccttaagcagagcaagcatctgttccagatcctgatggaatgtatggtgcatcgcgattgcataacaatcttcgacgccgacagcgaggagcagcaagacctggaccttgccatcttaacagccttgctgaaaggtacaaacctttccgccagcgagcagctcaatctcgccatggcctgggaccgggtagatatcgcaaaaaaacatatcttgatctatgaacagcattggaagccagacgcgttggagcaggctatgagtgacgccctggttatggaccgagtcgactttgtgaaactgttgatcgaatacggagtgaacctgcaccggttcttaacaattcccagattagaagagctatacaatactaagcagggacctaccaacaccttgctgcaccacctcgtgcaagacgtcaagcaacacaccctgctcagcggatatagaattactctcatcgacattggcctggtcgtggagtatctgattggccgcgcctatcgaagcaattacactcgcaagcacttccgcgccctgtacaataatctgtaccgcaagtacaagcatcagcggcacagctctggcaatcgaaatgagtcagctgagagcaccctacactcacagttcattcgaaccgcccagccttacaagtttaaggaaaagagtatcgtcctccataagagccgcaagaaatctaaggaacagaacgtctccgacgatccggagtctaccgggtttctgtatccatacaatgacctgctggtctgggccgtgcttatgaagaggcagaaaatggccatgtttttctggcagcacggcgaagaggctaccgtgaaggctgtcatcgcttgtatcctctaccgcgcaatggcccacgaggcaaaggagagccatatggtggatgatgcatcagaagaattgaaaaattattctaaacagttcgggcagctcgccctcgacctgctcgaaaaagcctttaagcagaacgagaggatggctatgacactgctgacctatgagctcagaaattggtccaacagcacttgcctgaagctggctgtttccggtggcctgcgaccattcgtctcccatacctgtacacagatgctcctaaccgatatgtggatgggccggctcaaaatgagaaaaaactcttggctgaaaattatcatcagtattatcttgccaccaacgattctaactctagagttcaagtctaaggcagagatgtctcatgtcccgcagtcccaagactttcagtttatgtggtattatagcgatcaaaacgccagtagctcaaaggaaagtgcctccgtgaaggaatacgatctggagcgcggccatgacgagaagttagatgagaaccagcacttcgggttggagtccggccatcagcacctcccttggacaaggaaggtttatgaattttactcagcccctatcgtgaagttctggttttacacaatggcttacctggcctttctgatgctattcacatatacagtgctggtcgagatgcagccacagccatctgttcaggagtggctggtgtctatatatatcttcacaaacgctattgaggtcgtgcgcgagatctgcatcagcgagcccggcaagtttacacaaaaggtgaaggtttggattagtgaatattggaacctcactgaaactgtggctataggtttattcagcgctgggttcgttctccggtggggcgaccctcccttccacacggcggggagactgatctattgtatagacataattttttggttctctcgcctgctggattttttcgcggtcaatcagcatgcagggccatatgtgactatgatcgcgaaaatgactgctaatatgttctacattgtgattatcatggcgatcgtgctgctttcattcggggtggctagaaaggcaattttatcccccaaagaacccccctcttggagtcttgcccgagacatcgtgttcgaaccgtactggatgatttacggagaggtgtatgccggcgagatcgatgtgtgttccagccagcccagttgtccaccagggagcttcctgacaccgtttctgcaggccgtgtatctgtttgtccagtatatcatcatggttaacctgctgatagccttcttcaacaacgtgtatttggatatggaatcaatctcaaacaacctttggaaatataacagataccggtacataatgacctaccacgaaaagccttggttaccgcctcctttaattctattaagtcatgtcggtctgttgttaaggagactgtgctgtcaccgggcgccccacgaccaagaagaaggggatgttggcctaaagctgtatttatccaaagaggaccttaagaagttgcatgatttcgaagagcagtgcgtggagaaatattttcacgagaagatggaagatgtgaattgttcatgtgaagaacggatccgggttacaagcgagcgggtgaccgagatgtatttccaattgaaggaaatgaacgaaaaggtgtccttcataaaggactctcttctgtctttggacagccaggtgggccatctccaggacctctctgctctgactgtcgacacattaaaggtcttaagtgccgtggatacattgcaggaagatgaagctctccttgctaaacgaaagcatagcacatgtaagaaactcccacatagttggtcaaacgttatctgcgccgaggtgctagggagcatggaaatcgctggtgaaaagaagtatcagtactatagcatgccgagctccttactcaggagccttgctggcggccggcacccacctagggtccagcgtggcgctctgctggagattaccaattctaagcgcgaggctacaaatgtgaggaacgatcaggagcgacaggagacccagagttctatcgtagtatctggtgtgtctcccaacaggcaggctcatagcaaatacggccagtttctactcgtcccctcaaacttaaaaagagtcccattttctgcagagactgtgctgccactgtcgcggcccagtgtgccggatgtcctggccaccgagcaggatatccagacggaggttcttgtacatctgaccggacagacccctgtcgtgagcgactgggctagcgtggacgagccgaaggagaaacacgagcccatcgcgcatttgctagatggtcaggataaagctgagcaggtgctgcccaccttaagctgcactccagagcccatgacaatgtcctcacccctgtcacaagcaaagattatgcaaaccggggggggatatgtgaactgggcctttagcgagggagatgaaacaggcgtttttagcatcaagaaaaaatggcagacttgcttaccaagcacctgtgactcagattcttcccgctcagaacagcatcagaagcaggcccaggacagcagcttaagcgataactcgacccgctccgcgcagtcatctgaatgctctgaagtgggaccctggcttcaacccaatacctctttctggattaatcctctgagacggtaccgcccatttgcgaggtctcactctttcagatttcataaggaagagaagttaatgaaaatctgtaaaatcaagaacctgagcggatcttcagaaattggtcagggagcttgggtgaaagctaagatgcttactaaggatagacgcctgagcaaaaagaagaaaaatacacagggactgcaggtacccatcattacggtaaacgcctgtagtcagagcgaccagttaaacccagagcccggagagaattcaataagtgaagaagagtactctaaaaactggttcacggtgtccaagttctcgcacacaggcgttgagccctacattcaccagaagatgaaaacaaaggaaattgggcaatgcgccatccagatctctgattatctgaaacaatcacaggaagacctttcaaagaacagcctgtggaatagtcggtcaacaaacctgaaccgcaatagcctgctgaaatccagtatcggtgtggacaagatcagcgcatcccttaaatcccctcaagagccgcaccaccattacagcgccatcgagcgtaacaatctgatgaggctgtcacagacaatcccgtttacccccgtccagttattcgccggcgaagaaattaccgtgtatcgtctggaggaaagcagtcccctcaatttagataaatctatgtccagttggtcccagcgaggaagggccgccatgattcaggttctgtctagagaggagatggacgggggcctgcggaaggctatgcgagtggtgtctacttggtcggaggacgatatcctaaagcccgggcaagtgttcatagtgaagtcctttttgccagaagttgtgagaacatggcacaaaattttccaggagtcaaccgtgttgcatctgtgtttaagggagatccagcaacaacgagcagcacaaaaactgatctacacttttaaccaggtgaagcctcagactatcccgtacaccccaaggtttctagaagtgttcttgatctactgccactctgcaaaccagtggctgacgatcgagaaatacatgaccggtgagttccgaaagtacaataataacaatggcgatgagattaccccgactaacacgctggaagagcttatgctggccttctcacattggacttatgagtatacccgcggggaactcctggtgctggatctacaaggtgtgggagaaaacctgaccgatcctagcgttatcaaacccgaagtgaaacagagcaggggtatggtttttggaccggctaatctaggagaggacgctatcaggaactttatagcgaagcaccattgcaattcttgttgtcgcaagctcaagttaccagatctgaaacggaacgactacagcccggaacggatcaattccaccttcggcttggaaataaaaatcgaaagtgcggaggaacccccggcccgggagaccgggcgcaatagccctgaggatgacatgcaactgtag

SEQ ID NO: 138437 - DNA, 5844 bp, synthetic construct
  misc_feature 1..5844: note = Description of Artificial Sequence: Synthetic coding sequence
  source 1..5844: mol_type = other DNA
atgaaggagcaacctgtgctggagcgtctgcagagtcagaagagctggatcaaaggagtcttcgataagcgcgagtgcagcactatcatcccgagtagcaagaacccacataggtgtaccccggtgtgccaggtgtgtcagaacctgataaggtgttattgtggtagactcattggtgaccatgccgggatagactatagctggactatctcagccgctaaaggcaaggagtccgagcaatggtctgtggagaaacacacaactaagtcacctacagatacatttggaaccattaattttcaagacggggagcacacgcaccatgctaaatatattagaacctcatacgatactaagctggatcatctcctccacttgatgctgaaggagtggaaaatggaactgcccaagttagtaatctccgtccacggcggcatacagaactttactatgccttctaaattcaaagagattttcagccagggtctagtcaaggctgctgaaacaaccggcgcttggataattacagaggggattaacaccggagtgagcaaacacgtgggagatgccctgaaaagccatagctcgcacagtctaaggaaaatatggactgtgggaattcctccatggggggtgattgagaatcagagagacctgattggaaaggatgtggtgtgcctgtaccaaacacttgataacccgttaagcaagctgacaacactgaacagcatgcatagccatttcattctgtctgatgacggcacagtggggaagtacgggaacgagatgaagctaagacggaacctcgaaaagtatctgagtctccaaaaaatacattgccgaagtaggcagggagttcctgtcgtaggtctggtcgttgaaggtgggcccaatgttatcctgagtgtctgggagacagtgaaagacaaggaccccgttgtggtttgcgagggaaccgggagagcagctgacctgctggccttcacacacaaacaccttgccgatgaggggatgcttcggccccaggttaaggaggaaatcatttgtatgattcagaacacctttaatttcagcctgaagcagagcaagcatctttttcagatactcatggagtgtatggtccacagggactgtatcacaatctttgacgccgactctgaagagcagcaggacctggacctggctatcctgacagcgttgcttaaagggacgaatctgagtgcttctgaacagctgaacctagccatggcttgggacagagtggacattgccaagaaacacattttgatttatgaacaacattggaaacccgatgccctcgagcaggctatgtccgatgctctggtgatggatcgcgtggacttcgtgaagctgttgattgagtatggagtcaatctgcatagattcctgaccattcccaggctcgaggagctgtataataccaagcaaggtccgaccaacactctattgcatcacctcgtacaggacgtgaaacaacacacactcctctccgggtaccggataaccctcatagacatcggactggttgtggagtacctgattgggcgagcttaccgcagcaattatacaaggaagcactttcgcgccctctacaacaatctgtatcgcaaatataagcaccagcgacatagtagtggaaatcgaaatgagagtgccgagtcaactctccacagtcagttcattcgtaccgctcaaccatacaagttcaaggaaaagagtatcgtgctccataagtcacggaaaaagtcaaaggaacaaaacgtgtctgatgaccctgaatctaccggtttcttatacccctacaatgatctgctggtatgggcagtactaatgaagaggcagaaaatggccatgtttttttggcagcacggggaagaagccacagttaaggccgtcatcgcttgtatcctgtacagagctatggcacatgaggctaaggagagccatatggtagatgatgcttcagaagagttaaagaactattctaagcagttcggtcagttggcactcgacctcttagagaaggcttttaaacagaatgagcgcatggccatgaccttactgacttacgagctgcggaattggtcaaacagcacttgtctgaaactggccgttagtggaggtctgagaccattcgtgtcccacacatgtacgcagatgctgctgactgatatgtggatgggacggctaaaaatgcgcaaaaactcctggctgaagattatcattagtatcattcttcccccaacaatcttgactctagaattcaagtctaaggccgaaatgagccacgtcccccagagccaggattttcaattcatgtggtactatagcgaccagaacgcaagcagcagcaaggagagcgcctcagtgaaagagtacgacttggagagagggcacgacgaaaaacttgacgaaaaccagcattttggtctggaatctgggcatcagcacctcccttggacaaggaaagtttacgagttttatagcgctcctatcgtcaaattttggttctatactatggcctacttggcattcctcatgctgtttacttacaccgttctggtcgaaatgcaacctcagcctagtgttcaagagtggttggtgtctatttacatcttcacaaacgctatcgaagtggtacgggaaatttgtatcagtgagccggggaaatttacacagaaagtaaaggtgtggatcagtgaatactggaatctgactgagacagtcgctattggcctctttagcgctgggtttgtcctgcgctggggagaccccccatttcacactgccgggcgtttgatttactgcatagacattattttctggtttagcagactgttggattttttcgcagtaaatcagcatgcaggaccatacgttacgatgattgccaagatgaccgccaatatgttctatattgtcattattatggccatcgtgctcctgtcgtttggcgtggcgcgcaaggccatcttaagccccaaagaaccaccctcttggtcactggcgagagacatagtgttcgagccttattggatgatctatggcgaggtgtacgcaggggagatcgacgtgtgtagctcacagccaagctgtcccccaggaagctttttgacgccattccttcaagccgtatatctgttcgtgcagtacattatcatggtgaatcttttgattgcttttttcaataacgtgtacctcgacatggagtctattagcaacaatttatggaagtacaataggtatcggtacatcatgacataccacgagaagccgtggctccctccgccattgattctcttgtcccacgtggggctgctcctaagacggctttgctgccaccgcgctcctcacgaccaggaagaaggagacgtcgggttaaagctgtacctaagcaaagaggatttgaaaaagctgcatgattttgaagagcagtgtgttgagaaatacttccatgagaagatggaggatgtcaattgtagttgcgaagagcggattcgtgtgacctctgagcgtgtgactgaaatgtacttccagctgaaggagatgaacgaaaaagtgtccttcatcaaagactccctgttgagcctggacagtcaagtcggccatttgcaagacttaagcgctctcactgtagatacactcaaagttctctctgctgtcgatacattgcaagaagatgaagcactcctggcaaaaagaaagcacagtacctgcaagaagttaccgcacagctggagcaatgtgatctgcgctgaggttcttggatcaatggagattgccggcgagaaaaagtaccagtattatagcatgccctcttcgcttctccggagtctggctggcggccgccacccacctcgcgtgcagcgaggcgctctcttggagatcactaactccaaacgggaggccactaatgttcgaaacgatcaagagcgtcaggagactcagtcttccatcgtggtgtcaggggtgagcccgaatcgccaggctcacagcaaatacgggcaattccttctggttcctagcaatcttaaacgcgtccctttcagcgcggaaaccgtcctacccctgtctcggcccagtgtgccagatgtcctggctaccgagcaggatattcagactgaggttctagtccacctgaccggccaaacgcctgtggtctctgactgggcatctgtggacgaacctaaagagaagcatgagccgattgcacacctgttagacggccaggataaagccgagcaggtgctgcctacactttcgtgtactcccgaacctatgacaatgagttcgcccctctcacaagccaaaataatgcagactggagggggttacgtgaactgggcctttagtgagggggacgaaacaggagtgttttcaattaaaaaaaagtggcaaacgtgcttaccctcaacctgcgacagtgattcatcacgtagcgagcaacaccagaaacaggcgcaggactcctccttatcagataacagcacgcggtctgcccagagcagcgagtgctcagaggtgggaccctggctgcagcccaacacttcattttggatcaatcctctgagacgttatagaccctttgccagatcacactctttcaggtttcacaaggaggagaagctgatgaaaatctgcaaaattaagaacctctcgggcagctctgagattgggcagggcgcctgggttaaagctaagatgctgacgaaggacagacgactctccaagaaaaagaagaacacgcagggtctacaggtgccaatcatcactgtgaatgcctgctcacagtctgaccagctcaacccagagcctggcgagaacagcatcagtgaggaggagtacagcaagaattggtttaccgtttcaaagttcagccatacgggggtggagccatatatacaccaaaagatgaagactaaggagatcggccagtgtgccatccagatctccgactatctcaagcaatcccaagaagatctgagcaagaacagtctgtggaatagcaggagcaccaatcttaacagaaacagtctgcatgtgattaagatgccaatctccagccttatctctgaaatctctgccagtcttaaatcgccccaggaaccgcaccaccattatagtgcaattgagaggaacaacttaatgcggctgtcacaaaccattcccttcacgcccgtgcaactgttcgccggcgaagaaataaccgtgtaccgcttggaagagtcctcacctttaaatctcgataagagcatgtcttcctggagccagcgggggcgcgccgcaatgattcaggtgctatcaagagaagagatggacggcgggctgaggaaagccatgcgggtggtgagtacctggtccgaggacgacattctgaaaccgggccaggtgtttatcgtaaaatccttcttgcctgaagtggtaagaacatggcacaaaatattccaggaatcaaccgtccttcatctctgcctgcgagaaatccaacaacagagagcagcacagaagctcatatacacatttaatcaagtaaaaccccagaccattccgtatactcctcgattcctggaggtgtttctaatctactgtcattccgccaaccagtggctgaccattgagaagtacatgacaggagaatttaggaagtacaataataataatggagatgagattactcccacaaataccctggaggaactaatgctggccttctcgcactggacgtatgaatatactcggggggaactgctggtgttagatctccaggcactttggttctgggatagcatgctcaaggcacgcctcggagggtggaggatgtag

SEQ ID NO: 138438 - DNA, 1707 bp, synthetic construct
  misc_feature 1..1707: note = Description of Artificial Sequence: Synthetic coding sequence
  source 1..1707: mol_type = other DNA
agagagtctccccaccctgccctgctccagtctcagaaaagctggattaagggcgtctttgacaaaagggaatgttctacaattataccgagttccaagaatccgcacaggtgcactccggtgtgccaggtctgccagaaccttatccgctgttattgcggaagattgatcggagatcacgccgggattgactatagctggaccatttctgcagccaagggcaaggagtccgaacagtggtcagtcgagaaacatacaacaaagtcgccaactgacacattcggtaccatcaatttccaagacggggagcacacacaccacgctaaatacattcggacatcctacgacacaaaattggatcacctgttacatctcatgcttaaagaatggaagatggaactccctaaactggttatatccgtacacggaggtatccagaattttacaatgccttccaaattcaaggagatttttagccagggactggtgaaagccgccgagacaacaggcgcatggattattactgaagggataaacacgggcgtgagtaaacacgtcggggatgcgctgaagtcccacagttcccattcactgcgtaagatttggactgtgggaatcccaccctggggggtaattgaaaatcaacgcgacctaatcggcaaggacgtggtgtgcctgtaccagaccctggacaacccgctgagcaaactgactaccctcaattctatgcatagtcactttattctctccgacgatggaacggtcggaaaatacggcaacgagatgaagctgagaaggaatctggagaagtacttaagtcttcaaaaaatccactgccccggcgaggaaatcactgtctatagacttgaagaaagctctccacttaatttagacaaatcaatgtcttcatggtcccagcgaggcagggccgccatgatacaggtactgagccgggaggaaatggacggaggtcttaggaaagctatgcgggtggtgtctacatggtccgaagacgacatcttaaagcctgggcaagtcttcatcgtgaaatcgtttctcccagaagtcgtaagaacgtggcataaaattttccaggagagcacagtgcttcatttatgtctgagagagattcagcaacagcgggccgcgcaaaagctcatctatacatttaaccaagtcaaaccccagaccatcccttatacacccagatttctggaggtgttcctgatctactgccacagtgcgaaccaatggctcaccatcgagaaatacatgaccggcgagtttagaaaatataataacaataacggggacgaaatcaccccaactaacaccctcgaggaattaatgttagcctttagccattggacatatgagtatactcgtggggaactactggtgttagatttgcagggggtaggcgagaacttgaccgacccaagtgtgataaaacctgaagtgaaacagagtcgcggcatggtgtttggccctgccaacctcggcgaggacgctatccggaactttattgctaagcaccattgcaactcatgttgcaggaaattgaaactgcctgatctgaaaagaaacgactattcacctgaaagaatcaactccacatttgggctcgaaatcaagatcgaatcggccgaagagccaccagctcgcgagacaggtcggaactctccagaagatgacatgcagttgtag

SEQ ID NO: 138439 - DNA, 2580 bp, synthetic construct
  misc_feature 1..2580: note = Description of Artificial Sequence: Synthetic coding sequence
  source 1..2580: mol_type = other DNA
atgaaagaacagcccgtattggaacgactccagtcacagaagagttggatcaagggggtgttcgataagcgagaatgtagcaccattatccctagctcgaagaaccctcacaggtgcaccccagtgtgtcaagtgtgccagaacctgattaggtgttattgcggccggctgattggagatcacgcgggaattgattactcctggaccatcagtgctgccaaggggaaagaatccgagcagtggagtgtcgagaagcatactacgaagagtcccacggatacatttggcactataaacttccaggacggcgagcatacgcaccatgccaaatatatccgcacttcttacgatacgaagctggaccatttgctccacctgatgctgaaggaatggaaaatggagcttccaaagctcgttatttctgtgcacgggggaatccagaactttacaatgccttcgaagttcaaggaaatctttagtcagggcctggttaaagccgccgaaaccacgggagcgtggataatcacagagggcatcaacacaggcgtttccaaacatgtcggcgacgctctgaaatcccactcctcacattcactgagaaagatctggacagtagggataccaccatggggggtgattgagaatcagagagacctcatcggaaaggatgtggtctgtctgtaccagaccctggacaaccccctttccaagcttacaacgttaaattccatgcactcccatttcatcctgagcgatgatgggacggtcgggaagtatgggaatgagatgaaactgcgacgtaatcttgagaaatatctgtcccttcagaagatccattgccgctcccggcaaggtgtgccggtcgtgggcctggtggtcgagggtggccccaacgtgattttgtctgtgtgggaaaccgttaaggacaaggaccctgttgtcgtctgtgagggtactggtcgggccgcagatctgctcgcctttacccacaagcacttggcggatgaaggtatgctccgacctcaggtgaaggaggagatcatctgcatgatccagaacacatttaactttagcctgaagcagtcaaagcacttgttccagatccttatggaatgcatggttcacagggattgtataactatcttcgatgctgattccgaggagcagcaggatctagacctggcaatcctgactgccctgcttaaaggtacgaatctctccgcttccgaacaacttaaccttgctatggcctgggaccgtgttgacatcgccaagaaacacatcttgatatacgagcaacattggaagccagatgccctcgagcaggccatgtctgatgccctagtgatggatagggtcgatttcgtcaagttgctgattgagtacggtgtgaacctccaccgtttcttaactattccgcggcttgaggaactctataacaccaaacaggggcccactaatacactgcttcaccacctcgtccaggacgtgaagcaagatttgagtaaaaacagcctttggaattcccggagtaccaatcttaacagaaactctttacacgtgataaaaatgccaatcagtagcctgataagcgagatttcagcttccctcaaatcaccgcaggaaccccaccaccattactcagctatcgaaagaaataatctcatgcgcttatctcagacaatccctttcactcccgtccaactcttcgccggcgaagaaatcacagtctaccggcttgaagagagttcccccctcaacctggataagtcaatgagcagctggagtcagcgcggccgtgctgctatgattcaggtcttgagcagggaggagatggatggcggcctcagaaaagctatgagagttgtcagcacgtggagtgaggacgatattctgaaacctggtcaggtctttattgtgaagtcttttttgccagaggtggtgagaacatggcataagatctttcaggaaagcaccgtgcttcatctatgtctccgggaaattcagcagcagagagcagcccagaagctgatctataccttcaatcaggttaagcctcaaacaatcccttacaccccacggtttctcgaagtttttctcatctattgccactctgcaaaccagtggttgaccatagaaaaatatatgacgggcgaattcaggaaatataacaataacaatggagatgaaattacccctacgaacacccttgaagaactgatgttagcattttcccattggacttatgaatacactagaggcgagttgcttgttctggacctgcagggagtcggcgaaaatttgaccgatccaagtgtgatcaagccggaagtgaaacaaagcagagggatggtgttcggtcctgccaatctgggggaagatgcaattaggaactttatagccaagcaccactgtaactcgtgctgtaggaaactcaagcttcccgacctgaaaaggaacgactattcccccgagcgcatcaacagcactttcggtctggaaattaagattgaaagcgcggaggagcccccagccagggagactggaagaaactctcctgaggatgatatgcagctctag

SEQ ID NO: 138440 - DNA, 2934 bp, synthetic construct
  misc_feature 1..2934: note = Description of Artificial Sequence: Synthetic coding sequence
  source 1..2934: mol_type = other DNA
atgaaggagcaacctgtcctggaaagactgcagtctcagaagagctggattaagggggtctttgacaagagagaatgctctaccatcattccatcaagcaagaatccccacaggtgcactcctgtctgccaggtgtgtcagaacttaatcagatgttactgtggccgtctcattggagaccacgccgggatcgactatagctggaccattagcgcagccaaaggaaaggagtccgaacagtggtccgttgagaaacataccactaagagccccaccgatacgttcgggaccatcaacttccaggacggggagcatacacaccatgctaaatacattcgcacttcttacgatacaaaactggaccacttgctgcatctgatgttgaaggaatggaagatggaattgccaaagttggtgatttccgtgcacggtggcatccagaatttcactatgcctagtaaattcaaagaaattttcagccagggtctcgtgaaggcagcagaaactaccggagcctggatcataactgaggggatcaataccggggtctctaaacacgtcggcgatgcattgaagagccactcctctcactccttgcggaaaatctggaccgtgggaatacccccatggggcgtgatcgagaatcagcgcgatctcatcggtaaggacgttgtctgcctgtaccagaccctggacaaccctctgtctaagcttaccacgctgaacagcatgcattctcacttcatacttagcgacgacgggacggttggcaaatacggcaatgagatgaagcttcgtcgaaatcttgaaaaatatctttcactgcagaagatccactgtcggagcagacagggtgttcccgtggtgggcctggtggtggaagggggacctaatgtgatcctatccgtgtgggagaccgtcaaggataaggaccctgtagtagtctgtgagggtacaggccgggcagccgacctcctggcatttactcacaaacacctcgccgacgagggcatgctgaggccccaggtcaaagaagagatcatctgtatgatccagaacacttttaacttttctctgaagcaatctaaacacttattccaaattttgatggagtgcatggtccacagggactgtattaccattttcgatgccgattctgaggagcaacaagacttggacttggcgattctgactgcattgctgaagggcaccaatttgtccgcctcagaacagctaaaccttgctatggcctgggaccgtgtggacattgctaagaagcatattttaatctacgagcaacactggaagcccgatgctttggagcaggctatgtccgacgccctggttatggaccgggtggatttcgtcaagttgctaattgaatacggagtgaacctgcatagatttttaactattccccgcctggaggagttatataacacaaagcagggtccaacaaatactctcctacaccatttagtgcaggatgtgaagcaacataccctgctatctgggtaccgtatcacactgatcgacattggtctggtggtagagtacctgattggcagggcgtatagaagcaactacacgcgcaagcactttcgcgcgctttacaacaatttataccgcaagtacaagatcatcaccgtcaatgcctgtagccagtcggatcagctcaatcctgagccaggagagaattctatctccgaagaggagtacagcaagaactggtttacagtgtctaaattctcacataccggcgttgagccatacattcaccaaaaaatgaaaaccaaagagatcggtcaatgcgcgatccagatctcagactatttgaagcagtcacaagaggatctgagtaagaactctctgtggaactcaaggtccaccaatctcaatcgcaacagtttgcatgtgattaagatgcccatttcttccctgatcagcgaaatctctgcttctttaaaatctccccaagaaccacaccaccattattcagctattgagagaaataacctcatgcgtctgagccagaccatcccattcacgccggtgcagctcttcgctggagaggagattacagtgtaccggttagaggagtcaagccctcttaacttagacaagtcgatgtcaagctggagccagcgggggcgggcagcaatgatccaggtgttgagccgtgaggagatggatggcgggctcaggaaagctatgcgtgtcgtgagcacctggagtgaagacgatatccttaagccagggcaggtatttatagttaaaagttttcttccagaggttgtgcgtacttggcacaagatcttccaagagtccacggttctgcacctgtgtctcagggagatccagcagcagagagccgcccagaagcttatttatacgtttaatcaggtgaaaccgcagacgatcccttatactcctagattcctggaggttttcctcatctactgccactctgccaaccagtggcttactattgagaagtatatgaccggcgagttccgcaaatataacaataataacggtgatgagataacacccaccaataccctcgaggaattgatgttggccttctcacactggacctacgaatatactaggggggaactcctggttcttgaccttcagggggtgggggaaaatctcactgacccctctgtaatcaagcccgaagttaaacaatcccggggcatggtgttcggcccagccaacctgggggaggatgccattcggaactttattgctaagcaccactgtaacagctgctgtcgtaagctgaaattgcccgatctgaagcggaacgattacagtcccgagcgcatcaatagcactttcgggctggaaataaagattgaatcagcggaggagcccccagctcgtgagactgggcgaaattctccggaagatgacatgcagctgtag

SEQ ID NO: 138441 - DNA, 3402 bp, synthetic construct
  misc_feature 1..3402: note = Description of Artificial Sequence: Synthetic coding sequence
  source 1..3402: mol_type = other DNA
atgttgcggcctcaggtgaaggaagagattatctgcatgatccagaatacatttaatttctcactcaagcagtctaagcacctgttccaaattttgatggagtgtatggtacaccgcgactgtatcacaatctttgacgctgattctgaagaacagcaggacctcgatctagccattctcactgctttgctgaaaggaaccaacctttccgcaagcgaacagctcaacctggctatggcctgggatcgggtggatatcgctaagaagcatatcctcatctacgagcagcactggaagccggatgccttggaacaggcaatgtccgacgctctcgttatggatcgtgtagacttcgtcaagcttctaattgaatacggtgtaaacctccacagattcctgaccatcccaagactcgaagaattatacaataccaagcagggcccgaccaacacccttctgcaccatctggtacaagacgtcaaacagcataccctcctcagcgggtatcgtatcaccctgatagacatcggtctggtggtggaatacctcattggtcgagcctatcgatctaactatacccgcaagcactttagagcgctttacaacaacctctatcggaagtataaacaccagcggcactcaagtggcaatcgcaatgagtcagccgaaagtactttgcatagccagttcattcgcactgctcagccctacaagtttaaggagaaaagcatcgtactgcacaagtcacgcaaaaagtctaaggagcagaatgtttccgatgacccagaaagcaccggattcctctacccctataacgacttgctggtgtgggcagtgctcatgaagagacagaagatggccatgttcttttggcagcacggagaagaggcaactgtcaaagccgtgatcgcgtgtattttgtaccgagctatggcacatgaggcgaaagagtcccacatggtggacgacgcttctgaggaactgaagaactattctaaacagttcggccagctggctctggatctgttggagaaagccttcaaacagaacgagcggatggccatgaccctgctaacctacgagctgcggaattggtctaactccacgtgcctgaaacttgccgtgtcaggagggcttagaccattcgtgagccatacctgcacccaaatgctcctgaccgatatgtggatgggcagactgaagatgcggaaaaattcgtggttaaaaattatcatttctatcatcctgccacccacaatcctgacattagagttcaagtcaaaagccgagatgagccatgtgccccagagccaggattttcagtttatgtggtactactcagatcagaacgcaagtagctccaaagaaagcgctagcgtcaaggaatatgacctcgagagggggcacgatgagaagctggacgagaatcaacattttggacttgagtcaggccaccaacatctgccctggacccgcaaagtgtatgagttttactccgccccaatcgtgaagttttggttttatacaatggcatacctggctttcttgatgctttttacctacacagttttggtggaaatgcaacctcagccctcagtacaagaatggttggtctccatatatatcttcactaacgcaattgaagtggtgagagagatttgcatcagcgagccaggaaagttcacccagaaggtgaaagtgtggatctccgaatactggaacctgacagagacagtggccatcgggctgttctcagctggatttgtcctgagatggggggatcccccatttcacaccgctgggcggctgatttactgtatcgatattattttttggtttagccgtttgttagatttctttgcagttaaccagcacgctggcccctatgtgacgatgattgccaaaatgactgcaaacatgttctacatagtgataataatggcgatcgtactgctatcattcggagttgcgcgtaaagcaattctgtctccgaaggaaccacccagctggtcgctggctagagacatcgtgtttgaaccttattggatgatctacggggaggtgtacgccggggagattgatgtgtgttcaagtcagccgagttgcccaccaggaagcttcctgactcctttcctgcaggcggtgtatctcttcgtgcagtacatcatcatggttaacttgcttatagccttttttaataatgtttacctagacatggagtctatatccaataacctctggaaatataacagatatagatacattatgacctatcacgagaagccttggttgccccctcccctgatattgctaagtcacgtggggcttctgctacgacggctgtgctgccatagagcacctcatgaccaggaagagggcgacgtcggcctgaagctatacttgtcaaaagaagatctcaagaagctccacgacttcgaggagcagtgcgttgagaaatactttcacgaaaagatggaagatgtgaattgttcttgcgaagaaaggatccgtgtgacctctgaaagggtgacggagatgtattttcagctgaaggagatgaatgagaaagtgtccttcatcaaagactctttgctttcattagatagtcaggttggtcacctacaggatctctctgccttgactgtcgatactctgaaggtgctgtccgcagtagatactctgcaagaggacgaggccctgctcgcaaaaaggaagcatagcacttgcaagaaactcccacactcctggtccaacgtcatttgtgctgaagttctgggatccatggagatcgctggcgaaaaaaaataccagtactattccatgccaagctctcttctgcggagcttagccggcggaaggcaccccccaagggtgcagaggggggcactgttagagatcacaaactccaaacgtgaggcaacgaacgtacgcaatgaccaggaaaggcaggagacccagtcgagcatcgtggtttcaggggtcagccctaatagacaagcccacagcaagtacggccaatttttattggtgccttctaacctgaaacgggtgcccttctctgctgaaaccgtactgcccttgtctagaccatccgtgccggacgtcctggcgacggagcaggatatccagacagaagtgcttgtccacctgacaggacagactcccgtggtctctgactgggctagcgtggatgagcctaaagagaagcacgagccaatcgcacatctgctagacgggcaggacaaagctgagcaggtgcttcccaccctgagctgtacgccagagccgatgaccatgtcctctcccctgtcccggtacaggccattcgctaggtcccacagcttcagatttcacaaagaagaaaagctgatgaagatttgtaaaataaagtccaaagagtag

SEQ ID NO: 138442 - DNA, 6054 bp, synthetic construct
  misc_feature 1..6054: note = Description of Artificial Sequence: Synthetic coding sequence
  source 1..6054: mol_type = other DNA
atgattatcctcagcaagagtcagaaaagctggatcaagggcgtattcgataagagagagtgctctacaatcatacccagtagcaaaaacccccacaggtgtaccccagtgtgtcaggtctgccaaaaccttattcgctgttactgtgggcgcctgatcggcgatcacgccggcatcgattattcttggactatatccgcagccaaaggcaaagaatccgagcagtggagcgtggaaaaacatactactaagtcccctacagatacatttggtaccatcaatttccaggacggcgagcatacccaccacgcgaagtacatcagaacaagctacgacaccaagcttgaccatctccttcacctaatgctaaaggagtggaagatggagctgccgaagttagttatcagcgttcacggggggattcaaaatttcacaatgccatcaaagttcaaggagatcttctctcaggggctagtgaaagcggcagagacgacgggtgcctggatcatcacggaggggatcaacacgggggtcagcaagcatgtgggggacgccctgaaatcacacagtagccatagcctgaggaaaatttggacagtgggcatcccaccatggggggtcattgaaaaccagcgggatctgatcggcaaagatgtggtgtgcttgtaccagaccctggataaccctctgagcaaacttactacccttaattccatgcattctcatttcatcctgagtgatgacggaacagtaggaaaatatggcaatgagatgaagctgcggcggaatctggagaaatacctgtctcttcagaagattcattgcaggagccgccaaggcgtacccgtggtcggactcgtggttgagggtgggccaaacgttattctgtctgtgtgggagaccgtgaaagacaaagatcctgtggtcgtctgtgagggcaccgggagagcggccgacctgttagctttcacccacaaacacctggctgacgaaggaatgcttagaccacaggtcaaggaagagatcatctgtatgatacaaaatacttttaacttttctttgaaacaatccaaacatctatttcagatcttaatggaatgtatggtacacagagactgtattacaatttttgacgccgactccgaagagcagcaggatttggatttagccattctcaccgcactgcttaagggcacaaatttatccgcatcagagcagctgaatctcgcgatggcgtgggatcgagtggacattgcaaagaaacacatcctaatctatgaacagcattggaagcctgatgcactggagcaggcaatgtctgatgcactggtgatggatagggtggatttcgtcaaactgttaattgagtacggcgtgaatttgcatagatttctgacaatccccagactcgaagagctctacaataccaagcaagggcctaccaatactctgttacatcacctggtgcaggacgtcaaacagcataccctcctctccggctataggattaccctgatcgatatcggccttgtcgtggagtacctgattgggcgtgcctacagaagtaactacaccagaaaacactttagagccctgtataataacttgtataggaagtacaagcatcagcgacacagctcaggtaaccgcaatgaaagcgctgaatctacacttcactctcagtttatccgtactgcccaaccttataagtttaaagagaaaagtatcgtgttgcataaaagtagaaagaagtctaaggagcagaacgtgtccgacgaccccgagtcgaccgggttcctgtatccatataatgaccttctggtgtgggccgtgcttatgaaacggcagaaaatggccatgtttttctggcagcatggcgaggaagccacagtcaaagcagtgatagcatgtatcctctaccgcgcaatggcacacgaagccaaagagtcacatatggtagacgacgcaagtgaagagttaaaaaactactcaaaacaatttgggcaattggccttggacctgctggagaaagcttttaaacagaacgagcgaatggcgatgactctgctgacctacgagctgaggaattggtcaaattccacgtgtctaaagttggccgtgtccggcggacttagaccatttgtgagccatacatgtacccagatgttgctaaccgacatgtggatggggcggcttaagatgagaaagaacagctggcttaaaatcattatctcaattatcctgcctcccactatactaacactggagtttaagtcaaaggccgagatgtctcacgtgccacagagccaggacttccagttcatgtggtactatagtgatcagaatgcctcatccagtaaagaatctgcctccgtgaaggagtacgatctggaacgcggccatgacgagaagctggatgaaaatcagcacttcggactggaatcaggacatcagcacctgccatggactcgtaaagtatacgagttttactctgcccctatcgtgaaattttggttctataccatggcctatttggcctttttgatgctgtttacatatacagtactagtggaaatgcaaccccaaccatcagtgcaggagtggctggtgagcatttacatctttaccaacgccattgaggtggtccgggagatctgcattagtgaacccggcaagtttactcagaaagtgaaagtctggatcagtgaatactggaaccttaccgagaccgtggcaattggtctgttctccgcgggatttgtgttgcgctggggagatcccccgttccacacagctggcaggcttatatactgtatcgatatcattttttggttctcccggctgctagacttctttgcggtgaatcaacacgctgggccatacgtgaccatgatcgcaaaaatgacggccaatatgttctatatcgtgatcattatggcaattgtcctgctgtcctttggtgtggcacgcaaagccatactgtctcctaaggaaccaccctcctggagcctggcacgggacatcgtgtttgagccatattggatgatctacggcgaagtgtacgcgggggaaatcgacgtgtgtagcagtcaaccttcctgcccaccgggatcctttttgactccatttctgcaggctgtgtaccttttcgtgcagtatatcatcatggtcaatctcctcattgccttttttaacaacgtgtatctggatatggaatccatctctaacaatctttggaaatacaatagatacagatatattatgacatatcatgaaaagccatggctcccacccccactgatcttgctctctcatgtggggttgctcttgcgtaggctatgctgccaccgggccccccatgaccaggaggagggtgatgtcggactaaagctgtacctgtctaaggaagatctcaagaagctgcatgactttgaggagcaatgcgttgaaaaatacttccacgagaaaatggaggatgtgaactgttcatgtgaagagcggatcagagtgacctctgagcgggtgaccgaaatgtactttcagctcaaggagatgaacgagaaagtgagtttcataaaggattccctcctgtcactcgattcgcaggtcggacaccttcaggatctttcagcccttactgtggatactttgaaagtcctgtccgccgtcgacacgttacaggaggacgaggctctccttgccaaaagaaagcattccacgtgcaagaagctgcctcacagctggtccaacgtgatctgcgctgaggtcctcggaagcatggagatcgcgggcgagaaaaaataccaatattactctatgccctcctctctcctacgcagcttggcgggcggacgtcaccccccccgagttcagagaggtgcgctgcttgagatcacaaactccaagcgggaggccacaaatgtgagaaacgatcaggagagacaagagacacagtcgagtatagttgtgtccggagtgtcaccaaacaggcaagcccacagcaagtacggtcagttcttgctcgtaccctccaacctgaagcgtgtgccattcagcgccgagacagtgcttccacttagcagaccttcggtgcccgacgtgcttgccacagaacaagatatccaaaccgaagtgttggtgcacctgactggtcagacacccgtagtgtcagactgggcgtccgtggacgagcccaaagaaaagcatgaaccaatagcgcacctgctagacggccaggacaaggcagagcaggtattgcccacgctatcctgcacccccgaacctatgaccatgtcatctcctctgtcgcaggcaaaaatcatgcaaactggcggcgggtatgtaaattgggcgtttagtgaaggtgacgagacgggcgtttttagtatcaaaaagaaatggcagacgtgccttccttcgacttgcgactccgactccagtaggtctgaacaacatcaaaagcaggcccaagactcatcactcagcgacaacagtacacggagcgctcagtcaagcgaatgctctgaggtgggcccgtggctccagcccaatactagcttttggatcaatcctttacgccggtacaggccctttgcacggtcacacagttttcgcttccataaggaggagaaactgatgaagatctgcaaaattaagaatttgtccggaagtagcgagattgggcagggagcctgggtcaaggcaaaaatgttgaccaaagataggcggttatcaaaaaagaaaaagaatacccaggggctgcaggttccaattataacggtcaacgcgtgctcccagtcagatcagttgaaccccgagcctggtgagaattcgatatcagaagaagagtactctaaaaattggttcacagtcagtaaatttagccatactggcgtcgagccttacattcaccagaaaatgaagactaaggagatcggacaatgtgcaatccaaatatcagactaccttaagcaaagtcaggaggacctcagcaagaacagcctgtggaatagtcgctcaaccaatttgaacagaaacagtttgcttaaatcctccattggggtggataaaatcagcgcatcactgaagtctccacaggagcctcaccaccattactctgctattgagagaaacaatctcatgcgactgtcgcagacgatcccatttacacctgttcaactgttcgctggtgaagagattacagtatatcgcctggaagagagcagtcctctgaacttggataagtctatgagctcgtggagccagagagggcgggcagccatgattcaagttctgtctagggaagaaatggacggcggattaaggaaagccatgagggtggtgtctacatggtcggaagacgacatcctcaagcccggccaggtgttcatagtcaaatcttttctccctgaagtggtcaggacctggcacaaaattttccaagaatccaccgtactgcacctttgtctgcgcgagatacagcagcagcgggctgcacagaagttgatttataccttcaaccaggtgaagcctcagactattccatatactcctcgatttctggaagtattccttatttactgccatagtgccaatcagtggttaacaatagagaagtacatgacaggtgaattccgaaagtataacaacaataacggagatgagataactcccactaatacccttgaagagctgatgctggcgttttcacactggacctatgagtacacaaggggcgaactgcttgtgctggatttacagggcgtgggagagaatctcacagacccttccgtgataaagcctgaagttaagcaaagcaggggcatggtgttcggccctgccaatttgggagaagatgcaatcagaaacttcattgctaaacaccattgtaactcttgttgccgcaagctaaaactccctgaccttaagcgcaacgactacagcccggaaagaatcaactcaacctttgggctcgagattaagatcgaaagcgccgaggagccacccgctagggaaaccgggcggaacagccctgaagacgacatgcagctctag

SEQ ID NO: 138443 - DNA, 6081 bp, synthetic construct
  misc_feature 1..6081: note = Description of Artificial Sequence: Synthetic coding sequence
  source 1..6081: mol_type = other DNA
atgaaggagcagccagtgttggaacgcctgcagtctcagaaaagttggataaagggagtgtttgataagcgggaatgttcaacgattatcccatctagtaagaatccacacaggtgcacacccgtgtgtcaggtgtgtcagaatctcatcagatgctactgtgggaggctaattggggatcacgcgggtatagactacagctggaccattagtgccgctaaagggaaagagtcagagcagtggagcgtggaaaaacacacaaccaaaagccctacagataccttcggcaccattaattttcaggatggagagcacactcatcatgccaagtatattcggacctcctacgatacgaagcttgaccatttgctgcacttaatgcttaaggagtggaagatggaactgcctaagttggtcatttcggttcacggcggcattcagaattttactatgccctctaagtttaaagagatcttctctcagggcctggtaaaggccgccgagacaacgggggcgtggatcattaccgaaggcatcaatacaggtgtctctaaacacgtgggtgatgctctgaagagccatagcagccatagtctgcgcaagatctggaccgtggggatcccaccctggggcgtcatcgaaaaccagagagacctgatcggtaaggacgtcgtttgtctctaccagactctggataatcccctgtctaagctgacaaccctcaattccatgcactcgcatttcatactgagcgatgatgggacagtgggcaagtatgggaatgagatgaaactccggaggaatctcgaaaagtacctgtcgctacagaaaatacactgtaggtcaaggcagggggtgcccgtcgtgggcctcgtggtggaaggtggccccaacgtgatcctgtctgtctgggagactgtgaaggataaggatcctgtagtggtttgcgaaggaacaggtagagcagccgatctcctggccttcactcataaacacctcgctgatgagggcatgctcagaccacaagttaaagaggagattatctgcatgatccagaatacctttaacttttccctgaaacagagtaagcatctgtttcagatcctcatggaatgtatggtccaccgggactgtatcactatcttcgatgcagacagcgaggagcagcaagacctggatctggccatcctcacagctctgctgaaaggcacaaacctaagcgcctcagagcaactgaatctggcgatggcatgggacagagtggacatagcgaagaagcacattttgatctatgaacagcactggaagcccgatgctttggagcaagcaatgtcggacgcgctggtgatggacagagtcgactttgttaaactgctgatcgagtacggggtcaacctgcaccggttcctaacaatcccacgacttgaggagttatacaacaccaagcaggggccaacgaacacgctgctccaccatcttgtccaagatgttaagcaacacacactgctttctggctaccggatcacacttatcgatattgggttggttgtggagtacctaatcggccgcgcatatcgtagcaactatacccgtaaacatttcagagccctatataataatctgtatagaaaatataagcaccagcgacacagctcaggtaataggaacgaatctgccgagagcactttgcatagtcagttcatccgtaccgcccagccatacaagttcaaggaaaagagcattgtcctgcacaagtcccgaaagaagtctaaagagcaaaacgtcagtgacgacccagagtccaccgggttcttatacccttacaatgacctactggtgtgggcagtactaatgaagcgtcagaagatggccatgtttttttggcagcacggtgaggaggccactgtcaaagcagtgattgcgtgtattctctatcgcgcaatggcacacgaggctaaagagagccatatggtcgacgatgcctctgaggaattaaaaaactactccaagcagttcggccaactggctctagatctactggagaaggctttcaaacaaaacgagagaatggctatgacgctactgacttacgaactgaggaactggtctaactccacctgtctaaagctagccgtgtcaggaggtttacgaccttttgtatcacatacctgtacccaaatgttattgaccgatatgtggatgggaaggttgaaaatgaggaagaacagttggttaaaaataattatcagtatcatactgcctccaaccatccttacactagaattcaagtccaaggccgagatgtcacacgttccccaatcccaggactttcagtttatgtggtattattctgaccagaacgcctcctcaagcaaagagagcgcttcggttaaggagtatgacttagagcgaggccatgacgagaaactggacgagaatcagcattttggcctagagagcggacatcagcacttaccgtggacacgaaaggtgtatgagttttatagcgcacctattgtcaagttctggttttacacaatggcatacctggcatttctcatgctgttcacttacacggtgttagtggagatgcagcctcagccatccgtgcaggagtggctggtatcaatttatatattcaccaatgcaattgaggttgtccgcgaaatttgcatttctgagccaggtaaattcacacagaaggttaaggtctggattagcgagtactggaacctcacggaaacagttgcgataggccttttttccgctggctttgtgctgcggtggggagatcctcctttccatacagcgggtaggctgatctactgcatcgacatcatcttttggttctctcggctgctggactttttcgccgtcaaccagcacgcgggtccatatgtgaccatgattgcaaagatgacagctaatatgttctacatcgtgataatcatggcgattgtcttactgagctttggtgtggcaagaaaggccatcttatctccaaaagagcccccaagctggtccctggctagagatatcgtttttgagccttattggatgatttacggggaggtctatgccggcgaaatcgacgtatgttcctctcagccttcatgtccaccgggaagcttccttaccccattcctccaggccgtgtatttgttcgtacagtatataattatggtcaaccttcttattgccttcttcaataatgtttatctggatatggagagtatcagcaacaacctgtggaagtacaatcgctacagatatatcatgacctatcacgaaaaaccatggctcccaccacctctgatccttctgagccacgttggactcctgctgcgtaggctctgctgccatcgtgcaccacatgaccaggaggaaggagatgtaggcctgaaactttatctgtccaaagaggacctgaaaaaactgcacgattttgaggagcaatgtgtggagaagtatttccacgaaaagatggaagacgtgaattgttcatgtgaagagagaatacgagtcactagtgaacgagtgaccgagatgtacttccagctaaaagagatgaacgagaaggtatcctttattaaggattcccttttgtccctggactcacaggtagggcatctccaagatctgagcgcgttgactgtagacactctcaaggtgctctcggccgtagacacactccaggaagacgaggcgctgttggctaaacggaagcattccacatgtaaaaagttgccgcattcctggagtaacgtcatctgcgcggaggtgctcggctcaatggagattgccggcgagaagaaatatcagtattactcaatgccctcctccctgcttagaagccttgccggcggcaggcatccgccgagggtccaaagaggagcactccttgagataaccaactccaagagggaggctaccaatgtgcgaaatgatcaggaacgccaagagacacaatcctcaattgttgtgtcaggcgtgtctcccaataggcaggcacactccaagtatggccaattcttactcgtcccaagcaacctgaagagagtacctttctcagcagagacggtcctgccgctgagcagacctagcgtgcctgacgttcttgcaactgagcaggatatccagacagaggtactagtccacctcaccgggcaaacacccgtcgtctcggactgggcttcggttgatgagcctaaagagaagcacgagcctatagcgcaccttctcgacgggcaggacaaggctgagcaggtgcttcctaccctgtcgtgcacgcccgagcccatgacgatgtcctctccccttagtcaggctaaaattatgcagaccggcggtggttacgtgaactgggctttcagtgagggtgatgaaaccggggtcttctccattaagaaaaagtggcagacatgtcttccttccacttgcgatagcgactctagtcgctcagaacagcaccagaaacaagcacaggattcttctttgagtgacaactccacccgtagcgcccagagcagcgaatgttcagaggtcggcccgtggctgcaacccaacacctccttctggatcaaccctttgaggcgttacagaccctttgcgagatcacacagttttagatttcacaaagaggaaaaacttatgaaaatctgtaagatcaagaatctctccggcagcagtgagatcggtcagggcgcttgggtcaaggcaaagatgctgaccaaagaccgccgcctgagcaaaaagaaaaagaatactcaaggtctgcaggtcccaataatcactgtcaacgcctgtagccaaagtgaccagttgaaccctgagcccggtgaaaattccatctcagaggaggagtactccaagaattggttcactgttagtaaattctcccacacgggcgtcgagccctatatccaccagaagatgaagacaaaagagatcggacagtgtgccatccagatctctgactacctgaagcagtcgcaggaagatctcagcaaaaatagcctgtggaacagccggagtactaatctcaacagaaactcattacatgtgatcaaaatgccaatttccagcctgatttctgaaatatctgccagtctgaaaagcccgcaggaaccccaccaccattatagcgcgattgaaaggaataatctgatgcgtctgtctcagactatccccttcacgcctgttcaactgttcgctggtgaagaaatcaccgtttaccgcctggaggagagcagccccctgaatctagataaatctatgtcctcgtggagccagcggggaagggcggctatgatacaggtgctgtctagggaagaaatggacggcggattaagaaaggcaatgagagtggtttccacttggagcgaagatgatattctgaagccaggacaagtttttattgtgaaaagttttcttccagaagtcgtgagaacctggcataagatctttcaggaatcaaccgtgttacacttatgtttaagggagatccagcagcaacgcgctgcccaaaagctgatctatacgtttaatcaagttaagcctcagacaattccttatacgccgcgctttctggaggtgtttctcatctactgtcattcagcgaatcagtggcttacgatcgaaaaatatatgaccggcgaattccgtaaatataataacaacaatggggacgagatcacacctaccaatacactagaagaactcatgctggctttcagtcactggacctacgagtatacacgcggcgagctgctcgtgctggacctacagggtgtgggtgagaatctcactgatcccagcgttataaagcccgaagtcaagcaaagtagagggatggttttcggacccgctaacctgggcgaggatgcaattcggaatttcatagccaaacatcattgcaacagttgttgtcgaaagctgaaattgcccgatctgaagcgaaacgattactcccccgaaagaattaatagcacctttggtctagagatcaagatagaaagtgctgaggaaccccctgctcgcgaaacaggccgcaatagccccgaagatgacatgcagctttag

SEQ ID NO: 138444 - DNA, 5598 bp, synthetic construct
  misc_feature 1..5598: note = Description of Artificial Sequence: Synthetic coding sequence
  source 1..5598: mol_type = other DNA
atgtcccagaaaagttggattgagagtaccctgactaaacgcgaatgcgtgtacatcatcccgagctccaaggatccccatcgctgtctgcccggttgccagatttgccagcagctcgttcgctgcttctgtggacgacttgttaaacagcatgcttgctttacagcctccctggcaatgaaatactctgatgttaagcttggcgaccactttaatcaggcaattgaagaatggagcgtcgaaaaacacactgagcagtcgccaaccgacgcatatggtgtgatcaacttccaagggggaagccattcctatcgcgctaagtacgtgcggctctcatacgatactaagcccgaggtgattctgcaactgcttctcaaagaatggcagatggagctgcccaaactggtgatctccgtccatggagggatgcagaaattcgagctgcatcccagaatcaaacagcttttaggcaaagggctcatcaaagccgccgtgacaaccggagcctggattcttaccggtggagtgaatacaggggttgccaaacacgtcggggacgctttaaaggagcacgcttcacgctcttcacgcaagatctgtactataggtatcgccccatggggagttatcgaaaatagaaacgatctggttgggagggatgttgtggccccataccagacgttgctgaaccccctctcaaaactgaacgtgttaaataatttacacagccactttattctggtggatgatggaacagtcggtaagtacggggcagaggttagactgcgccgggagcttgaaaagacaattaaccagcagcggattcatgcaagaatcggacaaggcgtgccagtcgtcgcactaattttcgagggaggcccgaacgtcatcctgactgtcctggagtatctccaagaatctccccccgtgccagtagtggtgtgtgaggggacagggagggccgccgacctgctcgcctatatccacaaacaaaccgaggagggcggaaatctgcctgacgccgccgagccggatataattagcaccattaaaaaaacttttaattttggtcagaacgaagctttgcacctgttccagacactgatggagtgcatgaagagaaaggagcttataacagtctttcatatcggaagcgatgaacatcaagatattgatgtcgccattctcacggcccttttgaaagggacaaacgcttccgcctttgatcagctcatcctgacattagcttgggacagggtggacatcgctaagaaccatgtgttcgtgtacggccagcagtggctcgtgggcagtctcgagcaggctatgcttgacgctctcgtaatggacagggtggctttcgtgaagttgctgatagagaatggagtctcaatgcataagttcctaactatcccccgtctggaggagctgtacaatacaaaacaaggacctacaaacccgatgttatttcatctcgttagggacgtgaagcagggcaacttaccgcccggctacaagatcaccctcatcgatatcgggctcgtgattgagtacctgatggggggcacttatcgttgtacgtacacacgcaaacgctttcgcctgatttacaacagcctggggggcaataaccggagaagcgggcgcaacacctccagcagcactccacaacttagaaagagtcacgagtccttcgggaatagagctgacaaaaaggagaaaatgaggcataaccactttataaagactgctcaaccctatcgccccaaaatcgataccgtgatggaggagggcaagaagaaacgcaccaaggatgaaatcgtggatatagatgaccccgagacgaagaggtttccctacccattaaatgagctcctgatctgggcatgccttatgaaaagacaggtcatggcgcgcttcttatggcagcacggtgaagaatctatggccaaggccctagtggcctgtaagatttacagaagtatggcatatgaagccaaacagagtgacctggtagatgacactagcgaggaactcaaacagtactctaatgacttcggccagctggctgtggaactactagaacagagtttccgccaagatgagaccatggccatgaagctgctgacgtacgagctgaaaaactggtccaatagcacttgccttaaacttgcagtctcttctcgtctgcgaccctttgtggcacacacgtgtacacagatgcttctgagtgacatgtggatggggcgtttgaatatgcgtaagaactcttggtataaagtaattttatccatactagttcctcccgcaattctgttactggaatacaaaactaaagccgagatgagccacatcccacagagccaagacgcccaccagatgaccatggatgacagcgaaaacaattttcaaaacatcacagaagaaattcccatggaagtgttcaaggaggtccgaatccttgacagcaatgaagggaagaatgagatggaaatccagatgaagtccaagaaattacccatcacaagaaagttctatgccttctaccacgctcccattgtaaagttctggttcaacacactggcctacctgggattcctgatgctttacacatttgtcgtgctggtccagatggagcaattgcccagcgtccaggagtggatagtgatcgcctatatttttacctacgcgatcgagaaggtcagagagattttcatgagcgaggccgggaaagtgaaccagaaaatcaaagtttggttctccgattactttaatatttccgacactatcgcaataatcagtttctttataggatttggcctccggttcggagcgaagtggaattttgctaacgcttacgataatcacgtgttcgtggccggccgattgatctactgcctgaatattatattctggtatgtgagactgctggactttttagctgtcaatcagcaggccggaccatacgtaatgatgattggcaaaatggtggcaaacatgttctatatcgtcgtgattatggccctcgtccttttgagtttcggagtccccaggaaagctatcctgtaccctcacgaggccccgagttggaccctcgccaaagacatcgtgttccacccttactggatgatcttcggtgaagtgtacgcgtacgaaatcgatgtgtgtgcaaacgattctgttatccctcagatttgtgggccaggcacatggctgacaccttttctgcaagctgtctacctgttcgtgcagtacatcataatggtgaatctgctgatcgccttttttaacaacgtgtacctgcaagtgaaagctattagcaacatcgtgtggaaatatcagaggtaccatttcattatggcttaccacgaaaaacctgtcctgcccccacccctgatcatcctgtcccatattgtcagtttgttctgttgtatttgcaagcgtcggaagaaagacaagacatctgatgggccaaaactgtttctaacagaggaggaccagaagaagcttcacgactttgaggaacagtgcgtggagatgtatttcaacgagaaggatgacaagtttcacagcggaagtgaggagagaatacgggtaacctttgagcgggtagagcagatgtgtatccagatcaaggaggtgggcgaccgagtgaactacataaagaggagcctccagagtctggactcgcagataggccacctccaggatctctcagctctgactgttgacaccctcaaaaccctgacggcccagaaggcgtccgaggcttcaaaggtgcataatgaaattactagggagctatctataagcaaacacttggctcagaatctgattgacgacgggcctgttcgccctagcgtctggaaaaagcacggagtagtgaataccctatcaagtagcctcccccagggagatttggagtcaaacaaccccttccactgcaacattttgatgaaggacgacaaagatcctcagtgcaatatcttcggccaggaccttcctgcggtcccccagcgaaaggaatttaattttcccgaggcaggctcttcaagcggggctctgtttccatccgcggtgtcccctcccgaactccgtcagagactccacggagtggaactactgaaaatttttaacaaaaatcagaagctggggtcctcaagcacatccattccgcacctgtcctcacctcctaccaagttttttgtgtccacgccatcacagccaagctgtaagagccacctcgaaaccggaacgaaggatcaggaaactgtgtgctcgaaggccacagagggggacaacactgagttcggagccttcgtcgggcacagagactcaatggaccttcaacgtttcaaagaaacaagtaataagatcaaaatcttaagcaacaacaacacatcagaaaacactctcaagagggtgtcatcactggctggatttaccgattgtcatagaacgagtattcctgtgcactctaaacaggccgaaaagatcagccgccggccttctactgaagacactcatgaggttgattctaaagcagccctgatcccagattggctgcaagatcggccatcaaaccgcgagatgccaagcgaggagggcaccctcaatgggcttacgagcccatttaaaccagccatggatactaattattattatagtgctgttgagcggaacaacctgatgcgcctgtctcaaagcatcccattcactccagtgccgccgaggggtgagcccgtcaccgtatataggctcgaggagtcatcaccaaacattctcaacaacagcatgagttcctggagtcagttgggcttgtgcgccaaaatcgagtttctgagcaaagaggagatgggcggcggtctgaggagagctgtgaaggtacagtgtacttggagcgagcatgacattctaaaaagtggccatctatatatcataaagtctttcttaccagaagtggtgaacacctggtcctcaatctacaaagaggacacagtcctgcacctatgtctgagagaaatccagcaacagcgggctgctcaaaaactcacgttcgcatttaaccagatgaagccgaaaagcattccatattccccacgattcctggaggtgtttctgctctactgccactcggccgggcagtggtttgctgttgaggagtgcatgaccggggaattccggaagtataacaacaataatggcgacgaaatcatcccaaccaacacgctcgaagaaatcatgctggccttttctcactggacatacgaatacacgagaggggaactgctggtgctagaccttcagggggtaggagagaatcttaccgatcctagtgtcatcaaagctgaggagaaacgtagctgtgacatggtctttgggcctgctaatctgggcgaagacgcaataaagaacttccgggctaaacaccactgcaacagctgctgccgcaagctgaaactgccggaccttaaaaggaatgattacactcccgataaaatcattttcccccaggatgaacctagcgatctgaacctgcagccgggaaattctaccaaagaatcagaaagcacaaacagcgtgaggctgatgctgtag

SEQ ID NO: 138445 - DNA, 3315 bp, synthetic construct
  misc_feature 1..3315: note = Description of Artificial Sequence: Synthetic coding sequence
  source 1..3315: mol_type = other DNA
atgtctttcagagcggcacgactgtccatgaggaatcgcaggaacgacaccctggactctactcgcaccctctacagctcggcctcacgctccacagatctgtcttatagtgagtcagatctggttaattttatccaggccaacttcaagaaaagagaatgcgtgttttttaccaaagactctaaagctaccgaaaatgtgtgtaaatgcggctatgcgcagagtcagcatatggaaggtactcagattaaccagtctgaaaaatggaattataagaaacataccaaggaattcccaactgacgctttcggagatatccagttcgaaacactggggaaaaaggggaagtacatccgcctgagttgtgataccgacgctgagatcctgtacgagctgttgacacagcattggcacctgaaaacccccaacctagtcatttcagtgacaggcggggcaaagaattttgctctgaagccacgcatgcggaaaattttttcccgcctcatttacatcgcccagtctaaaggagcctggatcctgaccggaggaacccactacggcctgatgaagtatataggcgaggttgttcgagacaacaccatatcacgctccagcgaagagaatatcgtggccatcggaatagcggcgtggggcatggtgtcaaacagggacactctgattaggaactgcgatgccgagggctactttctggctcagtacctgatggacgactttacaagggaccccctgtatattctggataacaaccacacccacctgttgctggttgacaatggctgccatggccatccaaccgtggaggcaaagctgcggaaccagctggagaaatatatctccgaaagaacaatacaggatagcaattacgggggaaagattccgattgtgtgcttcgcccaagggggtggtaaggagactctcaaagcaattaacacaagtatcaagaacaaaatcccctgtgtcgtagtggaaggcagtggccagattgcggacgtgatcgccagcttggtggaggttgaggatgcacttacttcaagcgccgttaaggaaaaactcgtgcgatttttgccccggactgttagtcgactgcctgaggaagagaccgaatcctggataaagtggctgaaggaaattctagagtgcagtcaccttctgactgtaattaagatggaagaagccggtgatgagatcgtttccaatgcaatctcctacgcattgtacaaggcattctctacctccgagcaggataaagacaattggaacggacagttaaaactgctgttagaatggaatcaattggacttggccaacgatgaaatcttcacaaacgacaggaggtgggaaagcgccgaccttcaagaagtgatgttcactgctctgatcaaggataggcccaagttcgtgcgactctttctcgagaacggacttaatctgcgtaagtttctgacacacgacgttctgacagagctcttttccaaccacttctcaaccctagtctacagaaatctccaaatcgcgaaaaatagttacaatgacgccctgctgactttcgtgtggaagctagtggctaacttccgaaggggctttaggaaggaggatcgcaatggccgggacgaaatggacatagagctgcatgatgtttcgcccattacacggcatccccttcaagccctcttcatctgggccatcctgcaaaacaaaaaggagctgtctaaggtgatttgggaacagacaagaggctgtacacttgctgcactcggcgcatctaagctgctaaagaccttagctaaagtgaaaaatgacattaatgcggccggcgagtctgaagagctagcaaatgagtatgagacgagagctgtggagctgttcacagaatgctactcctctgatgaagacttagccgagcaactcctggtgtatagctgtgaagcctggggtggaagcaattgcctcgaacttgctgtcgaggctaccgatcagcactttatagcccagccaggcgtgcagaacttcctttctaagcaatggtatggagaaatctcccgcgacactaagaattggaagattatcctgtgcctgttcatcataccccttgtgggctgtggcttcgtgagcttcaggaagaaacccgtggataagcataagaagctgctgtggtactatgtcgcgttctttacgtccccattcgtggttttcagctggaacgtcgtgttctacatcgcatttcttcttctcttcgcttatgttctgctcatggatttccatagcgttccccatcctcccgaattggtgctttatagcctggttttcgttctgttctgcgacgaggtgaggcagtggtatgtcaatggtgtaaattattttaccgacttatggaacgtaatggacacgctgggcctcttctattttatagctggtatcgtgttccggctgcatagcagcaacaaaagtagtctctacagcggccgggtgatcttttgcctcgattatatcatctttaccctgcgcctgattcatatctttaccgtgtctaggaatcttgggcccaagatcataatgctgcagagaatgctgatagacgtcttcttcttcctgtttctcttcgcagtctggatggttgccttcggcgtggctcgtcaggggatccttcgacagaatgagcagcggtggcgttggatttttagatcagttatctatgaaccttacttagcaatgtttggacaggtgcctagcgatgttgatggaacaacatacgatttcgctcactgtacctttaccggcaacgagtcaaaacctctctgtgtcgaactggatgagcacaatcttccacggtttccagagtggattacaatcccattggtgtgtatctatatgctgtccaccaacattctgttggtaaatttgcttgtggcgatgttcgggtatacggtcgggacggtgcaggagaacaatgaccaggtttggaagttccagagatatttcttggtgcaggaatactgcagcaggctcaatatcccctttcctttcatcgtttttgcatacttttacatggtcgtcaagaaatgcttcaaatgttgctgtaaggagaaaaatatggagtcatcggtgtgctgcttcaagaatgaggacaatgaaactctggcatgggagggggtgatgaaggagaattacctggtgaaaatcaatacaaaagctaacgacactagcgaagagatgcggcatcgtttccgtcagcttgacactaaattgaatgacctaaaagggctcctaaaagagattgcaaacaagatcaagtag

SEQ ID NO: 138446 - DNA, 579 bp, synthetic construct
  misc_feature 1..579: note = Description of Artificial Sequence: Synthetic coding sequence
  source 1..579: mol_type = other DNA
atgaagagcttcttgcctgtgcacactattgtccttatccgcgagaacgtgtgcaagtgtgggtatgctcagtcccagcacatggaaggaacacagatcaaccagagcgagaaatggaactacaaaaagcacacaaaagagtttcccaccgatgcctttggggacatccagttcgagacactgggcaagaaaggtaagtatatcagactgagttgcgacaccgatgccgagatcctttacgagctgctgacccagcattggcacctgaaaacccccaatctggtgatcagtgtgacaggcggcgctaagaactttgcccttaagccaaggatgaggaaaatctttagcaggctcatctatatagcccaatccaagggggcctggatattgaccggggggacccactatgggctgatgaaatatatcggcgaggtggtgcgagataatactatttcccggagttctgaggagaacatcgtcgctataggaatagcggcctggggcatggtttcgaatcgagataccctaatcagaaactgcgatgcagaagttcccgtggggcaggaggaggtgtgttag

SEQ ID NO: 138447 - DNA, 498 bp, synthetic construct
  misc_feature 1..498: note = Description of Artificial Sequence: Synthetic coding sequence
  source 1..498: mol_type = other DNA
atggaaggaacgcagatcaaccagtcagaaaaatggaactacaagaagcacactaaggagtttcccacagacgcctttggagatattcagtttgagacattaggtaagaaggggaaatacatcagactcagttgtgatacggacgctgaaattctgtatgagctgctaacacagcactggcacctgaaaaccccaaatttagtaatcagcgtgaccggtggggctaaaaacttcgctctcaaaccaagaatgcggaagattttcagtagacttatctatatcgcacagtctaaaggggcttggattctcaccggcggaacacactacggcctcatgaagtatataggggaggtcgtgcgcgacaacaccatcagtagatcctccgaggaaaacattgtggctatcgggatcgcggcttgggggatggtatccaatagggataccttgatcaggaactgcgacgctgaagtcccagtggggcaggaagaagtctgctag

SEQ ID NO: 138448 - DNA, 2049 bp, synthetic construct
  misc_feature 1..2049: note = Description of Artificial Sequence: Synthetic coding sequence
  source 1..2049: mol_type = other DNA
atgcaggccatcaatacctccattaagaataaaattccatgtgttgttgtggagggttccggacagatcgccgatgtgatcgcttctttggtggaggttgaagatgctctgacttccagtgccgttaaagaaaagttggttcggttcctgccgcggactgtgtcgcggctaccggaggaggagactgaatcatggatcaagtggctgaaagagattctggaatgtagtcacctactgactgtcatcaagatggaggaggcgggcgatgagattgtcagcaacgcaattagctacgccttgtacaaagctttcagcactagtgaacaggataaggataattggaacggacagttaaagctgctgctagagtggaatcaactcgacttagctaatgacgagatctttaccaatgatagaagatgggagtccgccgacctccaggaggtaatgttcacggcactgattaaagatcggcccaagttcgttcggctattcctggaaaatggtctcaaccttagaaaattcctgacacacgacgtcctgaccgagttgtttagtaatcacttctctacgttagtgtaccgaaacctccagattgccaagaattcctacaatgatgctcttctgaccttcgtatggaaattggtggccaacttccgcagaggatttcggaaagaggatagaaatgggagagacgaaatggacatcgagctgcatgatgtgagtccaattacgaggcaccccttgcaggccctgtttatctgggcaatactgcagaacaaaaaagaactgtcgaaagtaatttgggaacagactcgcggttgcaccctagcagctctcggagccagcaagttacttaaaacactcgcaaaagttaagaacgatatcaacgctgccggcgagtccgaggaactcgctaatgaatacgagacccgggccgtagaactcttcactgaatgctattcctccgacgaggacttggcggagcagttgttagtgtacagctgtgaggcctggggcggctcgaattgcctggagttggcggtggaagcaacagaccagcacttcattgcgcaacctggcgtccagtggtacgtcaatggagtgaactattttaccgacttgtggaatgtaatggacacgttaggcctgttttacttcatcgctggaatcgtcttccgcctccactcatcgaataagagtagcctgtactctggaagagttatcttctgcctcgactatattatctttacactgagattaatccacatctttaccgtaagtcggaatttgggaccaaaaatcattatgctgcaaaggatgctgatcgacgtctttttcttcctgtttcttttcgctgtctggatggttgcttttggggtcgcacggcagggcattctcagacaaaacgaacagaggtggcgctggatcttcagaagtgtcatctatgagccttacttggcgatgtttggccaggtaccgtcagacgtggatggaacaacctacgacttcgctcactgcacctttacggggaacgaatccaagccgctctgtgtagaactggatgagcataatctcccccgtttccccgaatggatcacaatacccctggtgtgtatttatatgctgtctaccaacattctgctagtgaacctgctcgtggccatgttcggctacacagttggaacagtacaggaaaataacgaccaggtatggaaattccagcggtactttttggtgcaggaatattgcagtcgccttaatatcccctttcccttcatcgtgttcgcttatttctacatggttgtcaaaaagtgttttaagtgctgctgcaaagagaagaacatggagtccagcgtatgttgttttaagaacgaagacaatgaaacattagcctgggagggcgtcatgaaagaaaattacctggttaagataaacactaaggccaacgatacttcggaggagatgcgccacaggttccgacagctggacactaagctgaatgaccttaaagggctcttaaaggagatcgcaaacaagatcaagtag

SEQ ID NO: 138449 - DNA, 2514 bp, synthetic construct
  misc_feature 1..2514: note = Description of Artificial Sequence: Synthetic coding sequence
  source 1..2514: mol_type = other DNA
atggagactctgacccccggtcacctacagccttcccccagttctcccagacctagggcggcccctggcagtttagggcgagtcacgcggcgacgcctatctaggtggattgctctgacccggaaagtctcctggacacccgcacgcccctcccagtctgccctcctgtccccttctagagggcaggaaacagcccctcctgtccccggctgctgccctcggaccctgtccccacctgctccacgtcgcccatcaggatcaatgatcgcgggcgtcagccttaaaccactgttgcgaattacagcccgcatatggagggcctgctgctcctcatgccggagggccaggagcactagtcagacaactagttccaaggtggcccccgccttaggaagtggcagggcccccgcccttgcatgcccagatccacctttgtgcctgtcggaccctgagacagggaagacctgcctcttaaaagctatgctcaacctgcatgatggacagaataccacaatccctctgctgctcgagatcgctaggcagacggacagcctcaaggaactcgtcaacgcaagctacaccgattcctattacaagggtcagactgccctccacattgcaatagagaggcgaaatatggcactggttacgctgctcgtggagaacggagcggacgtccaggctgctgcacacggagacttctttaagaagaccaagggacgccccggcttttacttcggcgagctccccctgagcctcgctgcctgcaccaatcaactgggtattgtgaagtttctgctgcaaaatagctggcaaacggccgacatctccgcacgggactctgtaggcaacaccgtattgcatgcactggtggaagtagcagacaatactgccgataacactaagtttgtgactagcatgtataacgagatcctgatgctcggggccaaactccaccctactcttaaactcgaggaactaactaacaaaaagggcatgactcctctcgccctggccgccggcactggcaaaattggcgttttagcatatatcttgcaacgagaaattcaggaacctgagtgtcggcatctgtcacggaaatttaccgaatgggcctacggccctgttcactcctctttatatgacctgtcttgtatcgatacctgtgagaaaaattcggtgctagaggttatcgcctactcttcttctgagactccaaatcgacacgacatgcttcttgtggagcccttgaaccggctactgcaggataaatgggatcggttcgtcaagaggattttctacttcaacttcctggtttattgtctctatatgattatcttcacaatggctgcctactatcggcccgtggacggccttcccccgttcaaaatggaaaaaaccggcgattacttccgggtgaccggggagattctgtctgtcctgggaggtgtatactttttcttccggggaatccagtattttctgcagcgccggcccagtatgaaaaccctctttgtcgattcatactctgagatgcttttttttctgcaatcgttattcatgcttgccacagtggtgctttacttctcacacctgaaagaatacgtggcgtctatggtgttctccctggccctcggatggaccaacatgctgtactacacccgcggctttcagcagatggggatctacgccgttatgatcgaaaagatgattctgagggatctgtgccgctttatgttcgtctacattgtttttctgtttggattttccacggcggtggtgactttgatagaggatggcaagaacgatagtctccctagcgagagcacttcccacaggtggaggggtccggcatgtaggccaccagatagtagctataacagcctctatagcacttgtttggaactgtttaagtttacaataggtatgggggacctggaatttacggagaactacgatttcaaagctgtgtttattatcctgcttttagcttatgtaatacttacatatattcttcttctgaacatgctgatcgcgctaatgggcgaaacagtgaacaagattgctcaggagagcaaaaacatttggaagttgcagagagccatcacaatcctcgatacagaaaagagcttcctgaagtgtatgaggaaggccttccgctctggcaagttactgcaagttggatacactccggacgggaaggacgactacaggtggtgtttccgggttgacgaggtgaattggactacatggaatacaaacgtcggcattatcaatgaggatccagggaattgtgagggcgttaaacgtaccttaagcttcagcctacgatcctcccgcgtgtctggccgtcactggaagaattttgccctggtccctttactcagggaggccagtgccagggacaggcagagcgcgcagcccgaggaagtgtatctccggcagttctctggttctctaaaaccagaagacgcagaggtgtttaagagccccgcagcctccggagagaagtag

SEQ ID NO: 138450 - DNA, 2340 bp, synthetic construct
  misc_feature 1..2340: note = Description of Artificial Sequence: Synthetic coding sequence
  source 1..2340: mol_type = other DNA
atgaaaaaatggtcttccacggaccttggggccgctgctgatcctcttcagaaggatacctgtccagacccactggacggggaccccaatagccggccacctccagccaaaccccagctaagtaccgctaaatccaggacgcgcctctttggaaagggcgattccgaggaagcctttcctgtcgattgcccccacgaagaaggggaactcgatagttgtccaaccatcactgtctccccagtaatcacaattcagaggcctggagatggccctaccggagctagacttttatctcaagattctgtggctgcctccaccgagaagaccctgaggctttacgatcgccgctccatcttcgaagctgttgctcagaacaattgtcaggacctggagtcactgcttttgttcctgcagaagtccaagaaacacctgaccgacaatgaattcaaggaccccgaaaccggaaagacatgtctcctgaaggccatgttgaaccttcacgatggacagaatacgaccatcccgctgttactggagattgctcgtcagacagactctcttaaggagcttgtgaacgcatcctataccgattcatattataaaggacaaaccgcactacatatcgctatagaaagacgaaatatggctctggttacgctgctggtcgagaatggagcggacgtgcaagccgctgcccacggagatttcttcaaaaaaacgaaaggccgcccgggcttttacttcggcgagctcccgctttcactcgccgcatgtacgaatcagctgggcatcgtgaaattcttgctgcagaattcttggcagaccgcagatatcagcgcccgtgacagcgtcggaaatacagttctccacgccctggtcgaggtggcagacaataccgccgacaacactaaatttgtgacctctatgtataatgaaattcttatgctcggggccaagctgcaccccaccttgaagctcgaagaactgacaaacaagaagggcatgaccccactggctttggctgcagggactggtaaaatcggcaaccgccacgatatgctcttagtggaacccctgaatagactcctgcaagacaaatgggaccggttcgttaaaagaatattctattttaatttcctggtgtattgtctgtacatgataattttcacgatggccgcttactatcggcctgtggacggcctcccgcctttcaagatggagaagactggggattacttccgtgttaccggagagatacttagtgtgctgggcggcgtgtatttctttttccgcggcatccagtactttttacagcgcagaccctctatgaagaccctatttgtcgactcatacagcgaaatgctcttcttcctacagtccctcttcatgctcgcgaccgttgtcctgtatttctcgcacctgaaagaatacgtggcaagtatggttttctctttggctctgggctggacaaacatgctctactacacacgagggtttcaacagatgggcatctacgcggttatgatagagaagatgatcctacgggatctgtgtcgtttcatgtttgtgtacatcgtgttcctgttcgggttcagcacggcagtagtgacattaattgaggacgggaaaaatgacagtcttccaagcgagtcaacatcacacagatggcgcgggcccgcatgtcggccacccgactcttcttacaatagcctctattccacctgcctcgagctgttcaagttcacaatcggcatgggggatcttgaatttacagagaactatgacttcaaagccgtttttattatcctgctgctagcatacgtcatattgacttatatactcctgctgaacatgctcatagccctcatgggtgagacagtcaataaaatcgctcaggaatcgaagaatatttggaagcttcagcgcgccatcactattctggacactgagaaatctttccttaagtgtatgcgaaaggcttttcgcagcgggaaactcttgcaggttggctatacccccgacgggaaagacgactatagatggtgctttcgggtggatgaggttaactggactacctggaatacaaatgttggaattattaatgaggatccaggaaattgtgaaggagtgaagcggacactgagtttctccctccgcagctcaagagtgagcgggcggcattggaaaaactttgctctggtgccacttcttagagaagcctcagctcgcgacaggcaatctgctcagcctgaggaggtctacctacgtcagttcagtggcagcctaaagcccgaggacgccgaagtgtttaagtcgcccgctgctagtggtgaaaaatag

SEQ ID NO: 138451 - DNA, 2520 bp, synthetic construct
  misc_feature 1..2520: note = Description of Artificial Sequence: Synthetic coding sequence
  source 1..2520: mol_type = other DNA
atgaagaaatggtcaagcaccgacctgggcgcagccgctgatcccctgcagaaggatacttgccctgacccgctggatggggaccccaatagtcggccaccacctgccaagccgcaactgtctacggccaagagtcgtactcggctgtttggcaaaggagactccgaggaagctttccccgttgattgccctcacgaggaaggcgaactggattcctgcccaactatcaccgtgagcccagtaatcaccattcaacgtcctggcgacggaccaactggagcccgactcctgagtcaggatagcgtggcggcgagcactgagaaaactctaaggttgtacgaccgtagaagtatctttgaggcagttgcccagaacaattgtcaggaccttgagtctctgctcctgttcctgcagaagtcgaagaaacacctaacggataacgagtttaaggaccccgagacaggcaagacctgtctgctcaaagctatgttaaacctccacgatgggcaaaatacaacaatccctctgctactagagatagctcggcaaactgattccttaaaggagctggtcaacgcctcctacacagattcctactacaaggggcaaacagccttacacatcgcgattgagagaagaaatatggctctcgtgacactgctcgtagaaaatggggccgacgtgcaggctgccgcacatggcgacttttttaaaaagactaaaggtcgccccggcttctattttggcgagctcccattgagcctggccgcgtgtactaaccagctgggcatcgtaaaattcttactgcagaattcttggcagactgccgacatcagcgcaagagatagcgtagggaacaccgtgctacatgcccttgtcgaggtggcggacaacactgctgacaatacaaaattcgtgaccagtatgtacaatgaaatactcatgcttggcgccaagctgcatcccacactgaaactggaggagttgacgaacaagaaaggcatgaccccactcgcattggcagctggcaccggaaaaatcggggtgttggcctatatactgcaaagggaaatccaagagccagaatgtaggcatctgtccaggaaattcaccgagtgggcctacggtccagtgcactcctctctctacgacctctcttgcattgacacgtgcgagaagaactcggtactagaggtgatcgcctacagtagcagcgaaaccccgaatcggcacgacatgctattagtggaaccattgaaccggcttctccaggacaagtgggaccgctttgtcaagcgaattttttacttcaacttcctcgtgtattgtctctatatgattattttcacaatggccgcatactatcgccccgtcgatggtcttccacctttcaagatggagaagaccggagactacttccgagtgactggcgagattttatccgtcctggggggcgtctatttcttttttagaggcatccagtactttctccagcgaagaccatcaatgaagaccctcttcgtggacagctactccgagatgctgttttttcttcaatctctgtttatgctcgcgaccgtggtgctgtacttttcccatctgaaggaatacgtggcatccatggtgttctctttggcactgggctggaccaacatgctgtactacactagaggatttcagcaaatgggcatatacgccgtgatgatagaaaagatgatactgcgcgatctctgccggttcatgtttgtgtatatcgtttttctatttggcttcagcacagctgtcgtgacactcatagaggacggcaaaaacgattcattgccttccgaatctacctcacacagatggagaggacctgcctgcaggccaccagattctagttacaattccctgtatagtacttgtctcgagctgtttaaatttactatcgggatgggcgacctcgaatttaccgagaactacgatttcaaggccgtattcatcattctgctgctggcatacgtcatcctgacatatattctgctgctaaacatgttgatagctctcatgggggaaactgtcaacaaaattgcacaggagtcaaagaacatctggaagctgcaacgggcaattactatcctagacaccgaaaagagtttcttaaaatgtatgcggaaagcctttcgttctggaaagctgctccaggttggttacaccccagatggcaaagacgattaccgctggtgcttccgagttgacgaagtgaactggacaacttggaacacaaatgtggggattattaatgaggaccccggcaactgcgagggagtcaaaagaactctatccttcagcttaaggtcatcaagggtttcaggccggcattggaagaattttgccctagtgccgctcctgagggaggcctccgcgcgcgaccggcaaagcgcccagcccgaagaagtttacttgaggcagttctccggaagcctcaagcccgaggacgctgaagtgttcaagagcccagcggcaagtggggagaaatag

SEQ ID NO: 138452 - DNA, 2520 bp, synthetic construct
  misc_feature 1..2520: note = Description of Artificial Sequence: Synthetic coding sequence
  source 1..2520: mol_type = other DNA
atgaaaaagtggagtagcaccgatctgggtgccgctgccgatcccttgcagaaagacacttgtcccgaccccctggacggcgatccaaactctcggccaccccctgctaagccacagctttcaacagccaaatcacgcacccgcctgtttggaaaaggggatagcgaggaggctttccccgtggactgtccccacgaagaaggcgaacttgacagctgccccacgatcacagtcagccccgtcatcaccattcagaggccaggcgatgggcctaccggggcacgcctgctttcacaggattccgtggccgcaagtactgagaagacgctcaggctgtacgaccggagatctatctttgaagcggtggctcaaaataactgtcaggacctcgaaagcctcttacttttcctgcagaaaagcaaaaagcaccttactgacaatgagtttaaagaccctgaaacaggcaaaacctgtcttttaaaagcaatgctgaacttacacgatggccagaacactaccattcctttattgcttgaaattgccaggcaaacagatagcttgaaggagctcgttaacgcgtcctacactgattcatactataagggtcagacagcattgcatatcgccattgagagacggaatatggcgctggtgactttgctggtggagaatggcgccgacgtccaagcagccgcccatggggacttcttcaaaaaaaccaaggggcggcctggtttctatttcggcgaactgccactctcactcgctgcctgtacaaatcagctgggtatcgtgaaattccttctgcaaaacagttggcagacggccgatattagtgcccgcgacagtgtgggcaatacggtgctgcacgccctggtggaagtggcagataacactgctgataacacgaagttcgtgacaagtatgtacaatgaaatcctgatgctgggagcaaagctccatccgaccctaaaactggaagaattgaccaacaaaaaaggcatgacgcctctcgccctggcagccggaacagggaagatcggcgtgttagcatacatcctgcagagagaaatccaggagcctgagtgtaggcatctgtcaaggaaatttaccgaatgggcatatggaccagtgcactcgagtctgtacgatcttagttgtattgatacatgcgaaaagaattctgttcttgaggtgatcgcctacagttcttcagaaactccaaatcgacacgacatgcttttggtagagccgctgaatcgacttttacaagacaagtgggacaggttcgttaagcggattttctactttaactttctggtctattgtctgtatatgatcatattcaccatggcagcttactatcgtcctgttgacggcctgcctccctttaagatggagaagacaggggactatttccgagtcaccggggagattcttagtgtcctcgggggggtatattttttcttccgcggcatccagtactttctgcaacgcagacctagtatgaagaccctgtttgttgattcttatagtgagatgctgttttttcttcagagtttgtttatgttggccactgtggtgctatatttttcccatctcaaggaatacgtggcatctatggtcttcagcctggcacttggctggactaatatgctgtattatacccggggattccagcaaatgggcatttatgccgtgatgattgaaaagatgattctgcgagacctgtgtcggttcatgttcgtttatatcgtgttcctgtttggtttttcaacggcagttgtgaccctgattgaagacggaaaaaatgattccctgccttctgaatcgactagccaccgctggagggggcctgcatgccgaccgcccgactcaagctacaattccctgtattctacatgcctggagctgttcaaatttacaatcggaatgggggacctcgagttcaccgaaaattacgactttaaagctgtatttataatcttgttgctagcctacgttattctgacctacattctgttattaaatatgctcatcgcactgatgggcgagactgttaataagatcgcccaagagagcaaaaatatatggaagcttcagcgtgccatcaccatcttagacacagaaaagtcttttctgaaatgcatgagaaaagcctttcgatctgggaaattgttgcaagtggggtacacacctgacggaaaagacgattaccgctggtgtttcagggtggatgaggtcaattggacaacatggaacaccaatgtcgggattatcaacgaggatccaggaaattgcgagggagtgaaacgcaccctgtccttctcgctgcgaagctctcgggtgtccggccggcattggaaaaactttgccctagttcctttgctccgggaagcctcagctagggatcgccaatcagcacagcctgaagaagtgtatttgagacagttcagtggatccctgaaacctgaagacgccgaggtctttaagtcccctgcagctagtggcgaaaaatag

SEQ ID NO: 138453 - DNA, 2553 bp, synthetic construct
  misc_feature 1..2553: note = Description of Artificial Sequence: Synthetic coding sequence
  source 1..2553: mol_type = other DNA
atgaagaaatggtccagtactgacctgggtgcggccgccgatcctctacaaaaggatacatgtccagacccactcgatggcgaccccaatagccgccccccgccggccaagccccaactaagtacggccaagagcagaactcgcctgtttggcaaaggtgacagcgaggaggcctttcccgtggactgcccccatgaggagggcgagttagattcctgccccactataactgtttctcccgtgattactatccagaggccgggggatggtcccacaggcgccaggctcttgagccaggacagtgtggccgccagcactgaaaagaccctgaggctatatgatcggcgcagcatatttgaagccgtggcacaaaacaactgccaggacctggagtcgctcttactgttcttacagaaatccaaaaaacacctgaccgacaatgaatttaaggaccctgagactgggaagacctgcttactgaaggccatgctgaacctgcatgacgggcagaacaccacaatccccctcctgctcgagattgctcgccagaccgacagtctaaaggagttggtcaatgccagttacactgactcctactataaggggcagacggccctgcatatagccattgagaggaggaatatggcccttgtcaccctcttggttgaaaacggcgccgatgttcaagctgccgcgcatggggactttttcaagaaaacaaaaggcagacccggtttctactttggcgagctgcctttgtcactcgctgcctgtacaaaccagctgggtatagtaaaatttctcctgcagaattcctggcagacggccgatatctccgccagagattcagtggggaatactgtcctccacgccctggtggaggtcgcagacaatactgctgacaatacaaagttcgtgaccagcatgtataacgaaattctgatgctgggagccaaacttcatcccacgttaaagttggaggagcttacaaacaagaaagggatgacacccttggccctggccgctgggacggggaagatcggggtcatcgaaaacggccctcccctctctttcatggtcctggcatatatccttcagagagagatccaagagcctgaatgcagacatctttcccgtaagttcactgagtgggcgtacggtcctgtgcattcgagcctatacgacttgagctgcattgatacatgcgaaaagaactcggtactggaagtaatcgcttactcctcatccgagacccccaataggcacgatatgcttctggtggagccgctgaacaggttactccaggataagtgggacagattcgtgaagagaatcttttatttcaacttccttgtttattgtctttacatgatcatattcacaatggccgcttactaccgtcctgtcgacgggctccctccttttaaaatggaaaaaacaggcgactatttccgcgtcaccggcgaaatcctttccgtgcttggaggcgtctactttttctttcgcggcatccagtatttccttcaacgccgtccaagcatgaagacgctcttcgtggacagttacagcgaaatgctcttcttccttcagagcttgttcatgctggctacggttgtcttgtatttttcccacttaaaggagtacgttgcctctatggtgtttagtctcgcactgggctggacaaacatgctgtattatacccgcggcttccaacagatgggaatctatgccgtgatgatcgaaaagatgatcctccgcgatttatgccggttcatgttcgtttacatcgtgtttctcttcggtttttcaacagcagtagtgacgctgatcgaagatggtaagaacgacagcctgccgtccgaatcaacatcccacaggtggcgtggccctgcctgtcgcccacctgattctagctacaatagcctttactccacttgccttgagcttttcaaattcacaattggtatgggtgatctggaattcacagaaaattacgatttcaaagcggtcttcatcatcctactgcttgcttacgtgatcctcacctatatcttactcctgaatatgctaattgcactgatgggtgaaacggtgaacaaaattgcgcaggagagtaagaatatctggaaattacagagagcaattacgatcctggatacagagaaatctttcttgaaatgcatgcggaaagccttccggtcgggaaaacttctgcaggtgggatacacgccggatgggaaagacgactatcgctggtgctttagggtcgacgaagttaattggacaacgtggaataccaacgttgggattattaatgaggatccaggcaattgcgaaggggtcaagcgtactctatccttcagccttaggtcctccagagtgagtggacgccactggaagaatttcgctctggttccactcctgagagaggcgtccgctcgtgaccgtcagtctgcccagccagaggaagtgtaccttcggcaattcagcgggagtctcaaacctgaggacgccgaagtgtttaagagcccagccgcttcaggggagaagtag

SEQ ID NO: 138454 - DNA, 2295 bp, synthetic construct
  misc_feature 1..2295: note = Description of Artificial Sequence: Synthetic coding sequence
  source 1..2295: mol_type = other DNA
atgacaagtccgagtagctcccccgtgtttcggctcgagacactagatggaggccaggaagacggatctgaagcggaccgcggtaagttggatttcggctctggactgcctcctatggagtctcagttccagggcgaggaccgtaagtttgctccccagatcagggttaacctgaattacagaaagggcactggggcaagccagcctgacccgaacagatttgaccgggataggctctttaatgccgtctcaagaggcgtcccagaagacctggccggcttgcctgaatacttgagtaaaactagcaaatacctgacagattctgaatacaccgaggggagcacaggcaagacctgcctcatgaaagcagtccttaatctgaaggacggggttaatgcttgtatccttcccctcctgcaaatcgatcgtgactcagggaacccgcaacccttagtcaacgctcagtgtacggatgactattatagaggtcactccgccttgcacatagctattgagaaacgttctctacagtgtgtgaagctgctggtcgagaatggtgctaatgtccacgccagagcttgtggtcggttttttcagaaggggcagggcacctgcttctatttcggtgagctccctctgtctctcgcggcctgtacgaagcaatgggacgtcgtctcatacttgctggagaacccccaccaacctgcctcactgcaggctacagatagccaggggaataccgtcctgcatgccctggttatgatcagcgacaactccgccgagaacattgcacttgtgacatccatgtacgatggcctgctccaagcaggcgcccgtctgtgcccaaccgtccagctggaagatatccgcaatttacaggacctgacgccactgaagcttgcggcgaaagaagggaagatagagattttcagacacatccttcagagggagttcagcggtctttcccacctatcgcggaagtttaccgagtggtgctatggaccagtccgtgtttccctttacgatctagccagcgtggatagctgcgaggaaaactctgtgctcgagatcattgcctttcactgcaaatctcctcaccggcatcggatggtagtcctggagcccctgaacaagctgctgcaggcaaaatgggatttgttaataccgaaattctttttgaactttctctgcaatctgatctatatgtttatcttcactgccgtcgcctatcaccaaccaaccctgaagaaacaagcagcaccgcacctgaaggccgaagtggggaattcaatgctgctcacaggtcatattctgatcctactgggcggaatttacctgttggtggggcagctgtggtatttttggcgcagacacgttttcatttggattagctttatagattcttactttgaaatccttttccttttccaagctctgcttacagtggtgtcacaggtgctctgtttcctggcgatcgaatggtacctaccccttctggtgtccgctctggtccttggctggttgaatcttttgtactacaccaggggatttcaacacaccggcatctactcggtcatgatccagaaggttatcctgcgcgacctgctcagattcctgctgatttatctggtgttcctgttcgggtttgccgtggctctcgtcagcttgtcccaggaggcttggcgtcctgaagcccctactggaccaaacgctaccgagtccgtacagcctatggagggacaggaggacgaggggaacggggcgcaataccgcggaattttagaagcgtccttagagctgttcaaattcaccattggtatgggggaattggcattccaagagcagctgcacttccggggcatggtcctcctgctgttgctggcttacgtgctgcttacatacatcctgctgctaaacatgctaatcgctctcatgtcagaaacggtgaacagcgttgcaactgacagttggtccatctggaagcttcagaaagcaatctcggttctggaaatggaaaacgggtactggtggtgtcggaagaaacagcgcgccggcgttatgctcaccgtgggaaccaaaccagacggatcccctgatgagcgctggtgctttcgtgttgaggaagtcaattgggcgtcctgggaacagacactccccaccctgtgtgaggatccaagcggtgccggggtgcctagaacactggaaaatccagtcttagcctcgcccccgaaggaggacgaagacggcgcatcggaggagaactatgttcccgtgcaattgctccagtcaaattag

SEQ ID NO: 138455 - DNA, 801 bp, synthetic construct
  misc_feature 1..801: note = Description of Artificial Sequence: Synthetic coding sequence
  source 1..801: mol_type = other DNA
taagatttttccctgggagttccatcctggtggtgcctcatctgtttcaatatcggaccgtccgtcggcccttcccagcctgaccctaatcgctttgaccgggaccgtctctttaacgcagtgtcccgaggtgttcctgaggatctggccggtcttccagaatacttgtctaagacctccaagtatctgacagactctgaatacacagagggctcaaccggaaagacatgtctgatgaaggccgtcctcaatctcaaagacggcgtcaacgcgtgtattctacctctgttacagatcgatagagatagcggcaatccacagcctcttgtcaatgcccaatgtactgatgattattacaggggacattccgccctccacatcgctatagaaaagcgcagcttgcaatgtgtcaaactactcgtggagaacggcgctaatgtgcacgctagggcttgcgggaggttcttccagaaaggccagggcacttgtttttattttggcgagctccctctcagcctagcagcatgtacaaaacagtgggatgtggtgtcttacctcttagaaaatccgcaccagcccgcgtccctgcaggccactgattcgcagggcaacaccgtccttcacgcgctcgtgatgatctccgacaactccgctgagaatatagctctcgtaacctcgatgtacgatgggctccttcaagcaggcgcgcgcctgtgcccgacggtgcagctggaagacattcgcaatctgcaggatctgacgcctctgaagctcgctgcaaaggagggcaaaatcgagtag

SEQ ID NO: 138456 - DNA, 2373 bp, synthetic construct
  misc_feature 1..2373: note = Description of Artificial Sequence: Synthetic coding sequence
  source 1..2373: mol_type = other DNA
atgaaggcacatcccaaagagatggtgccactaatggggaagagagtagccgctcccagcggcaacccggcaatacttccagagaaacgcccggccgaaataactcctacaaaaaagtccgctcatttcttccttgagatcgaggggtttgagcccaaccctacagtggctaagacaagccccccggtgttcagtaaacctatggacagtaatatccgccagtgtatttccggaaactgtgacgatatggattcaccccagtctccccaggatgatgtgacagaaacccctagcaatcccaattcaccttctgctcagctcgctaaagaggagcaacggagaaaaaagcggcgattgaagaaacgtatttttgcggctgttagtgagggttgcgtggaagagctcgtggaactgctggtggaactgcaggaattgtgtaggcggagacacgacgaggatgtgcccgatttccttatgcacaagctgacagccagcgacactgggaagacttgcctgatgaaggcactgctgaatatcaacccgaatactaaggagattgtgcgcattctgctggcctttgccgaggagaatgacatccttggccgcttcattaatgccgagtatacggaggaagcctatgagggccagactgccctgaacatagcaatcgaaagacgacagggcgatattgccgccctgttgatcgcagctggggcagacgtcaacgcccacgccaaaggagctttcttcaatcccaaataccaacatgagggcttttacttcggagaaacacccctggcgctggctgcctgtactaatcagccagagatcgtgcaactgctaatggagcacgagcaaacagatatcaccagtagggacagtcggggaaacaatattctccatgccctggttactgttgctgaagactttaaaacccagaatgatttcgtcaagagaatgtacgatatgatactgctgcggagtggtaattgggagctagagactacaaggaacaatgacggtctgacccctttgcagttggcggctaagatgggcaaggcagagattctcaaatacatcctgtctagggagatcaaagaaaaacggctgcggtcattaagtcgcaaatttaccgattgggcttacgggcccgtctcgtcctccctatacgatctgacgaacgtcgacacgacaaccgataactccgtcctggagatcacagtgtacaacactaatatcgataacaggcacgaaatgctaactctggagccacttcataccctactgcatatgaagtggaaaaagtttgcaaagcatatgttcttcttgtctttctgtttctacttcttctacaacatcacactcaccctcgtgagctactaccggccgagggaagaggaggccatcccacatccgctggctctgacacacaagatggggtggctccagctgctgggtcgaatgtttgttctcatatgggctatgtgcatttcagtaaaagagggtatagccattttcctactgcgccctagcgatctgcaatcgattctgtctgacgcctggtttcatttcgtgttcttcattcaggcagtgctagtgatactaagcgttttcctgtacctctttgcctacaaggaatatctggcatgcttagttctggccatggccttggggtgggccaacatgctctattataccagaggctttcagtccatggggatgtactccgtaatgattcagaaggtaattctacatgatgttctcaagttcttgttcgtgtatatcgtctttctcctgggctttggagtagctctcgcgtctctaatcgaaaagtgtcctaaagataacaaggattgtagctcttacggatccttttcagacgcagtactggagcttttcaagctcacgatcgggttgggggacttaaacatccagcagaactccaaataccccattctgtttctcttcctcctcatcacatatgttatacttacctttgtgcttctcctcaacatgctaatcgctctgatgggtgagacagtcgagaacgtgagtaaagaatcagagcgcatttggcggctgcagagggcccgcactatcctagagtttgagaagatgctgcctgaatggctccgcagtcggtttaggatgggcgagctgtgtaaggtcgctgaggacgactttcgcctgtgcttgaggattaacgaagttaaatggactgagtggaaaacgcacgtgtctttcctgaatgaagaccctggaccagtgagacgcactgattttaataaaattcaggacagctctagaaataacagtaagacaacattaaacgctttcgaggaggtagaggaattccctgagacaagcgtttag

SEQ ID NO: 138457 - DNA, 2376 bp, synthetic construct
  misc_feature 1..2376: note = Description of Artificial Sequence: Synthetic coding sequence
  source 1..2376: mol_type = other DNA
atgaaggcacatccaaaggagatggtgcctctgatggggaagagggtagctgccccgtcaggcaaccctgccatcttgccagagaagcgccctgctgaaatcacacccaccaagaagtctgcacacttctttctggagatcgaaggcttcgaacccaaccctactgtcgctaagacaagcccccccgtgttcagcaagccaatggactccaacatacggcaatgcatttcaggtaattgcgacgacatggacagtcctcaatctccacaggacgatgtgaccgaaaccccgtcaaatcctaattctccgtctgcccagctcgcgaaggaggaacagagaagaaagaagcgacggttgaagaaacgtattttcgccgcggtgagtgagggatgtgtggaggagctggttgaattactagtggagttgcaggaactgtgtaggagaaggcacgacgaggatgtgccagacttccttatgcacaagctcacagcttcagacacagggaagacatgcctcatgaaggccttgctgaacatcaacccaaacaccaaagaaatcgtacggattctactggccttcgctgaagaaaacgatatcctgggcagattcataaatgccgagtataccgaggaagcttacgaagggcagacagctctgaacattgctatcgaacgacgccagggcgacatagccgccctgctgatagccgcgggtgccgacgtgaacgcccatgccaagggggcctttttcaacccaaaatatcagcacgaggggttctacttcggggaaacaccactagccttggcagcatgtacgaaccagcctgagatcgtacagctgcttatggaacatgagcagacagatatcacatcgagagacagccgtgggaataacattctgcacgctttggttaccgtggcggaggacttcaaaacacaaaacgatttcgtcaagcggatgtacgacatgatcctgcttcggtcggggaattgggaactggaaactacccgcaacaacgacggcctcactcccttgcagctggcagccaagatggggaaggcagaaattctcaaatacatactatcaagggagatcaaggaaaaacgcttgagaagcttgtctcggaaattcacagattgggcctacggccctgtgtcttccagtctgtacgatctgaccaatgtcgatactactaccgacaactccgttctggaaatcactgtgtataacacaaacatcgataaccggcatgagatgctgactctggaacctttacatacgctgctgcacatgaagtggaaaaagttcgccaagcacatgttttttctgtctttctgcttttactttttttacaacattaccctgaccctcgtgtcttactatagacctcgcgaggaggaagctattccccaccctctggccttgactcacaaaatgggatggctacaacttctaggtaggatgtttgttctgatctgggccatgtgcattagtgtgaaggagggcatagctatcttcttgctgaggcccagcgatctgcagtccattttgtcagacgcctggtttcacttcgtgttctttatccaggccgtgttagtaatcctatctgtttttttatacctttttgcgtacaaagagtatctcgcgtgtctcgtgcttgcaatggccctcggctgggctaatatgttgtattacacacgcggcttccagtcgatgggaatgtactccgtaatgatccagaaggtgatacttcacgatgtgcttaagtttcttttcgtatatattgtctttctcctgggctttggagtggctttggcatccctcattgagaaatgtccaaaggataacaaggactgctctagctatggctccttctctgacgctgtgctggagctatttaagctgactataggcttgggagatctcaacatccagcagaactctaagtatcccatactgtttctctttctcctgatcacttacgttatcctgaccttcgtgctgttgcttaatatgctcatagccctgatgggagagaccgtggaaaatgtcagcaaggagtccgaaaggatttggcgcctgcagcgtgcaaggaccatcctcgagtttgagaagatgcttcccgagtggttaagatcccgcttcagaatgggcgaactctgcaaagtcgccgaggatgactttcgactgtgtttgagaattaacgaggtaaagtggaccgagtggaagacacacgtttctttcttgaatgaggaccctggcccagtccgaagaacggctgacttcaataaaatccaagattcttcaagaaataatagcaaaacaaccttgaatgcgtttgaggaagtggaagaatttcctgaaacaagtgtgtag

SEQ ID NO: 138458 - DNA, 2328 bp, synthetic construct
  misc_feature 1..2328: note = Description of Artificial Sequence: Synthetic coding sequence
  source 1..2328: mol_type = other DNA
atgagccatcacacttggcccagcccagctctgaatcttgacttcgcaacgtacctgttgagagaccttggtgcacacttcttcttagaaattgagggctttgaaccaaatccgacggtcgcaaagacgtcccccccagtttttagcaaaccaatggactcaaacattcggcagtgtatctctggaaattgtgacgatatggatagcccacagtctccccaggatgacgtgaccgagacgccctctaatccgaactctccatcagctcaactggctaaggaggaacagagaagaaagaagcggcggcttaagaaacgaatctttgcagcagtgagcgagggatgcgtcgaggagctcgttgaactgctagtcgagctgcaggagttgtgtcgaaggagacatgacgaagacgtacccgattttctgatgcacaagctgaccgcttcggataccgggaagacatgccttatgaaggctctactgaacattaatcccaatactaaggaaattgtgagaatactcctcgcctttgctgaagagaatgatatcctggggagattcatcaacgccgaatacaccgaggaagcgtatgagggacagacagctctgaacatcgcaatagaaaggcgccagggtgacattgctgctctacttattgctgcaggcgcagatgttaatgcccatgcgaaaggggccttcttcaatccaaagtatcaacatgagggtttttattttggcgagacccccctcgcccttgcagcttgcacaaatcaacctgagattgtgcaactgttaatggagcacgagcagaccgatatcacgtcccgggactcgcggggcaataacatcctgcatgctcttgtgactgtcgctgaagattttaagacccagaacgatttcgtgaagcgtatgtacgacatgatcctccttcggtccggcaactgggagctggaaactacccggaacaacgatggacttactcctctacagctggcggcaaagatgggaaaggctgaaattctgaaatacatccttagccgcgagataaaggagaaacggctgagaagcctgagccgcaaatttactgattgggcatacggacctgtgagcagtagtctatatgatctaacaaatgtggacacaactactgataacagcgtactggagatcacggtgtacaataccaacattgacaacagacatgaaatgctgactcttgaaccattacacaccctgttgcacatgaaatggaagaagtttgcaaagcacatgttctttctgagcttttgcttctactttttctacaacattaccctgacactggtcagttattaccggcctagagaagaggaagcaatcccacatcccctggctttaacacataagatgggctggctgcaactgctggggcggatgtttgtgctgatatgggcgatgtgcatctctgtgaaagagggtattgccatctttcttctgcgaccttctgaccttcagtcaatcctcagcgacgcttggtttcacttcgtcttcttcatccaagccgtactggtgatcctgagcgtgtttctgtatctgttcgcctataaggagtatctggcctgtctggtgctcgccatggctcttgggtgggcaaacatgctgtattatactaggggcttccagtctatgggcatgtattccgtgatgatacagaaagtgattctccatgatgtattaaagtttctttttgtgtacatcgtgtttctgctcgggttcggtgtcgccctggcatcccttatcgaaaaatgtcccaaggacaataaggactgtagcagctatggaagttttagtgatgctgtgctggagttgttcaagctgacgatcgggcttggggatctgaacatccaacagaacagcaaatatccaattctgttccttttcctcctgatcacgtacgtgatcctcactttcgttctgttattaaacatgctaatcgccctcatgggggagaccgttgaaaacgtttccaaagagagtgagaggatctggcgtctgcagagagcgcgcaccatcttggagttcgagaaaatgctgccagagtggctgcgatccaggtttcgcatgggcgagctgtgcaaggtggccgaggacgatttccgactttgccttcgcatcaacgaagtcaaatggactgagtggaaaacacacgtgtcctttcttaatgaagacccggggcccgtgcggcgcacagctgattttaacaaaattcaggacagctcacgaaacaactcaaagaccacattgaacgctttcgaagaagtagaggagtttcctgaaacctcggtttag

SEQ ID NO: 138459 - DNA, 2616 bp, synthetic construct
  misc_feature 1..2616: note = Description of Artificial Sequence: Synthetic coding sequence
  source 1..2616: mol_type = other DNA
atggctgatagctctgaggggccgcgggccggccccggcgaagtggccgaattgcccggggatgagagcggcacccctggaggagaagccttcccgttaagttcacttgcgaatctgtttgaaggagaagacggctctttgagtccctcacctgccgatgcctcgcgacccgcggggcctggtgatggtagacctaacctgcgtatgaagtttcagggggccttccggaaaggagttcctaaccctatagatttgctggaatccacactatacgagagtagcgtggtccccggaccaaagaaggcaccaatggattcactgtttgattatgggacttacagacatcactccagcgacaacaaacgatggcgtaaaaaaatcattgagaaacagccgcaaagtcctaaggctccagctccccagcccccacccatcctcaaagtctttaataggcccatcctgttcgatatcgtgagtcgcgggtctaccgccgatctggacgggttattgccatttctccttacacataaaaaaaggctcacagacgaagagttcagagagccctcgacagggaagacatgtttgcctaaagccctgctcaatctcagtaatggaaggaatgataccatacctgtgttgctggatatagcagagcgaaccggaaacatgagggaattcattaacagccccttccgagacatatactaccggggacagactgcactgcacatagcgattgagcgaagatgtaagcactacgttgagctgctagttgctcagggagccgacgtgcatgcccaggcaaggggtcgttttttccagccgaaagatgaggggggttatttctatttcggtgaactccctctgagtcttgccgcttgtacaaatcagccacatattgtgaactatctcactgagaatccccataaaaaagctgacatgaggaggcaggactctcgcgggaacacagttcttcatgccctggttgctatcgctgacaacactagggaaaataccaagtttgtgaccaaaatgtacgatttgctgctgttgaaatgcgcaagactattcccagattccaacctggaagctgtcttgaataacgatgggctgagtccactcatgatggctgcaaagacaggcaagatcggcatctttcagcacattattcgcagggaggtgaccgatgaagacacaagacacctgtcacgaaagttcaaagattgggcctatggacctgtgtattcctcgctttacgatctttctagtttagacacctgcggagaggaagcatccgtcctggagatcctcgtttacaattcaaagatagaaaaccggcatgagatgttggctgtggagccaattaacgagctgctgagagacaaatggcgtaaattcggagccgtgtcgttttatatcaatgtggtgagctatctgtgcgcaatggtcatcttcactctaacagcttattaccagcctctcgagggaactcctccatacccctacagaaccactgttgactacctgagactggcaggggaggtaatcacacttttcacgggcgtgctttttttttttactaacattaaggatctgtttatgaagaaatgtcccggggtgaattctctgttcattgacggatcctttcagttgctctacttcatctattccgttctggttatagtttccgctgctctctacttggccggcattgaggcatacttggcagtgatggtgtttgcgctggtactgggctggatgaatgcattgtattttactagggggctgaagctgactgggacatactccattatgatccagaagatcttattcaaggatctgtttcgctttcttctcgtgtatctcctgtttatgataggttatgccagcgctctggtgtcactgttgaacccatgcgccaacatgaaggtctgcaatgaagatcaaactaattgtacagtccctacctatcctagctgtcgggattccgaaacattctccacttttctgctggacctgtttaaacttacgataggtatgggcgatctggagatgcttagctccacaaagtatcccgtcgtcttcataattctgctggtgacatacattatcctcaccttcgttctactactcaatatgctcatcgccttaatgggagagacagttggccaagtgtcaaaggagagcaaacacatttggaagctacagtgggccacaaccatcttggacatcgagcggagctttccagttttcctgaggaaggcctttcgttctggagagatggtcactgttggaaagagctcagatgggaccccagaccggcgctggtgctttcgcgtagatgaggtgaactggagtcattggaaccagaacctggggattattaatgaagatccagggaaaaacgagacctatcaatactacgggttttcacatactgtcggacggcttaggagagatcgttggtctagcgtggtgcctagggtcgtggagctgaacaaaaactcaaacccagatgaggtcgttgtcccacttgactccatggggaacccccgttgcgatgggcaccagcaagggtatcctcgcaaatggcgaaccgacgacgctccactttag

SEQ ID NO: 138460 - DNA, 2436 bp, synthetic construct
  misc_feature 1..2436: note = Description of Artificial Sequence: Synthetic coding sequence
  source 1..2436: mol_type = other DNA
atggccgactcatctgaagggcccagggctgggccaggtgaagtggccgaactgcccggtgatgagtctggtacaccgggcggggaagctttccctctgtcgagcctggccaatcttttcgagggagaagatggctccctgtcaccatctcctgccgacgcttccaggcctgcaggaccaggagatgggcggcctaacctgcgaatgaaatttcagggggccttccggaagggggtcccgaaccctatcgacctgcttgaatctaccctgtacgagtcttcggtcgtgcccggccccaaaaaggctcccatggacagcctctttgactatggcacataccgtcaccattcttctgacaacaaacgctggcgaaaaaaaattattgaaaagcaaccccagagtcctaaggcccccgcacctcagccacccccaatcctaaaagtgtttaatcggcctattctttttgatatcgtgagtcgcggatctaccgcggatctggatggcctgcttccatttctgctgactcataagaaaaggcttaccgatgaggagttccgagaaccaagcacaggtaaaacctgtttacctaaagccctgctgaatctgtccaacggcagaaacgatacaattcccgttctcctggacattgctgaaagaactggcaacatgagagagtttatcaattctccgtttcgggacatctattacagggggcagacagccctgcacatcgcaatcgaaagaaggtgtaagcactacgtcgaactgctcgtggcccagggcgccgacgttcacgcccaggccagaggcaggttcttccagccgaaagatgagggcggctatttttatttcggcgaattgcccctgagtctggccgcctgtacaaaccaaccgcatatcgtgaactacctgactgagaatcctcataagaaagccgatatgcgccgacaggacagcagaggcaatactgttcttcatgcgcttgtggccattgccgacaatacccgggaaaatactaagttcgtaacaaaaatgtacgatcttcttctcttgaaatgcgcgcgattgttcccggactcgaatttagaggctgtgctgaataacgatggtctctccccccttatgatggctgctaaaacaggcaagatcggtaatcgacacgagatgttggccgtggaaccgatcaatgagctcctgcgggacaagtggagaaagtttggggctgtgtccttctacatcaacgtggtcagctacctgtgcgccatggttatctttacactgactgcctattaccagcccttggaagggaccccgccatatccctatcgcaccacggtcgactaccttcgactggccggtgaagtgataaccctgttcacaggcgttctgttctttttcaccaacataaaggacctgttcatgaagaagtgccctggggtaaactcactctttatcgatgggtccttccagcttctgtactttatttattccgtgctggtgatcgtgtctgctgccctgtatctggctggaatcgaagcctacttggcggtaatggtattcgccctggttcttggatggatgaatgctctgtatttcaccagagggctgaaattgactggaacgtacagcattatgattcagaaaatcttgtttaaagatttgtttaggtttcttttagtctatttattattcatgatcggctatgccagtgccttggtttctctactcaacccttgtgctaatatgaaggtgtgtaatgaagatcagaccaactgcacggttccaacctatccctcctgcagagatagtgaaaccttttcgactttcctgctcgacctgttcaagctcacgattgggatgggcgatctggaaatgctatccagcacgaagtaccccgtagtctttattattcttctggtgacgtacattatattgacctttgtcctgttgttaaatatgctcatcgctcttatgggagagactgttggccaggtctccaaggagagcaagcacatttggaagcttcagtgggctaccactattctcgatatagaaaggagttttcccgtgttcctaaggaaagcgtttaggtctggggagatggtaaccgtgggcaagagcagtgatgggacaccggatcgacggtggtgcttcagagttgatgaggtgaattggtcgcactggaatcagaacctggggataatcaacgaggaccctgggaaaaatgagacctatcagtattatggttttagccatacagtcggccggctgaggcgagacagatggtcctccgtcgtgccaagggttgtggagttgaacaaaaactccaaccctgatgaagtggtggtgcccttagattcaatggggaaccccaggtgcgacggccatcaacaggggtacccaaggaaatggagaaccgatgatgcaccgctgtag

SEQ ID NO: 138461 - DNA, 2475 bp, synthetic construct
  misc_feature 1..2475: note = Description of Artificial Sequence: Synthetic coding sequence
  source 1..2475: mol_type = other DNA
atggccgattccagcgaagggccgagagccggccctggcgaggttgcagagctgcccggggacgagtccggaacaccgggtggggaggcctttccgctttcaagcctggccaatctttttgagggcgaggatggcagcctgagtccttctccagcagatgcctcccgcccagccggccctggtgatggcaggcctaatctccgcatgaaattccagggagcctttaggaagggggtccctaatccgatcgatctgttagagagcactctctacgagtcctctgtcgttcccgggcctaagaaggctcccatggacagcctgtttgactacgggacctacagacatcatagcagtgataataagcggtggagaaaaaagattatcgaaaaacagcctcagtctcccaaggcccctgcaccacaaccgccacctatcttaaaggtgttcaacaggccgatacttttcgacattgtctcaagaggatccactgctgatctggacggacttctgcccttcctcctgacccataagaagcggctgactgacgaagagttcagggagccttcaactggcaagacatgtctccccaaggctcttctgaatctatccaacggaaggaatgacacaatcccggtgctgctcgacatagctgaaagaacagggaatatgcgagagttcatcaactcccctttccgcgacatttactaccgaggcgagctgccactgagccttgcagcctgcaccaaccagcctcacattgtgaattatcttaccgaaaatcctcataagaaagccgacatgcgacgccaggattcacgaggtaataccgtccttcatgccctggtggccattgccgacaacacgagggaaaataccaagttcgtgaccaaaatgtacgatcttcttttgctgaaatgcgctcgcctttttcccgactcaaacctcgaagccgtcctaaataatgacggcctgtctcccctcatgatggctgctaagacaggaaagattggaattttccagcacatcattaggagagaggtgacagacgaggacacaagacatctgtcaaggaaattcaaggactgggcctacggtccagtttatagctctctgtacgacctctcgagtcttgatacgtgtggtgaagaagcgtcagtgctggagattctggtgtacaactcaaaaatcgaaaaccgccatgaaatgttggctgttgagccgattaatgaacttctgcgagacaaatggaggaagttcggtgccgtttcattctacatcaatgtcgtgagttacctctgtgccatggttatctttactttgactgcttactaccagccgctggagggaaccccaccatatccttatcgaaccactgtggactacttaagacttgctggagaagtgattactctgtttacgggagttctgtttttcttcacgaatatcaaggatctctttatgaaaaaatgtccgggagtgaacagcctctttatcgatgggagctttcagctgctgtatttcatttattccgttctggtgatagtgtcagcagccctctacctggctggtattgaggcctacctggccgttatggtgttcgcactcgttcttgggtggatgaacgctctctactttacccgtgggctgaagctcacagggacttatagcattatgatccagaagatactctttaaagaccttttcaggtttcttctcgtgtacctgttgtttatgatcggttatgcctctgcgctcgtctcacttttaaacccgtgcgccaacatgaaagtgtgtaatgaggatcagacaaactgtacagtgcctacctatccgtcctgccgagatagcgaaacgttttccacgtttttactggacctcttcaagctgacaatcggcatgggggaccttgagatgctgagcagcaccaaataccccgtcgtattcatcatattgctagtaacatacatcatcctgacattcgtactacttctgaatatgctcattgcccttatgggcgaaactgtggggcaagtgtctaaggaatctaagcacatttggaagctgcagtgggctactaccatcttggacatagaaaggtcattcccggtatttttgaggaaagccttccgctcgggcgaaatggtgacagtcggaaagagttctgatggaaccccagatagaagatggtgcttcagagtggacgaagtgaactggtctcattggaatcagaacctgggcattataaacgaggacccagggaagaatgagacataccagtactatgggttctctcataccgtaggaaggctacggcgagatcggtggagctctgttgtgccaagggtagtggaactgaacaagaactcgaatcctgacgaagttgttgttcccctggattcaatgggtaatcctcggtgcgacggacaccagcagggatacccccggaagtggagaacagatgatgcaccactgtag

SEQ ID NO: 138462 - DNA, 2616 bp, synthetic construct
  misc_feature 1..2616: note = Description of Artificial Sequence: Synthetic coding sequence
  source 1..2616: mol_type = other DNA
atggctgactcttctgagggcccccgcgcgggacccggagaggtggccgagttgccgggagatgaaagtggcacaccgggcggagaggcatttcctcttagtagtcttgcgaatctgtttgaaggggaggacggcagtttaagtcctagtccagccgatgcatcccggccagccggcccgggagatggaagacctaatttacgcatgaagttccagggggcgttccggaaaggcgttcctaaccctatcgacctgctggagtccaccttgtacgaatcgtccgtggtgccgggccctaaaaaagcccccatggattctctgtttgactacggcacatacagacaccacagctccgataacaagcgctggaggaaaaaaatcattgagaagcagccgcagtctcccaaagcacctgccccacaacctccaccaattttgaaggtcttcaatcgtcctatcttattcgatattgtctcccgtgggtctacagccgacttggacgggttgctcccatttctgctcacccataagaaaagacttactgacgaagagtttcgcgaaccaagtaccggaaagacgtgcctacccaaggcgctgctcaatttgagcaacggccgcaacgacaccattccggttcttctggatatagcagaacggacaggcaatatgcgggaattcatcaattctccattccgggacatctactatcggggccagacagctttgcatatcgccatagaaagacgatgcaaacattatgtcgagctgctggtagcccagggggccgacgtgcacgctcaggcccgaggccggttctttcagcccaaggacgaaggtggttatttttatttcggcgagctgcccctctcgctggctgcttgtacaaatcaaccccacatcgttaattacctcactgaaaatccacataagaaggccgacatgcgcaggcaggatagccggggcaacaccgttcttcacgcactcgtagcaatcgctgacaacacccgggaaaacacaaagttcgtgaccaaaatgtatgacttgttgctcctgaaatgcgcccggctgtttccagattcgaacctggaagctgtgcttaacaacgatggcctgtccccgctgatgatggcagctaaaacgggtaagatcggtatttttcaacatataatccgtagagaggttaccgatgaggacacgcggcaccttagccgaaaattcaaggattgggcatatggccccgtctactcctctctgtatgatctatcctccttagatacttgtggggaagaggcttctgttctggaaatcctggtgtataattcaaagatcgaaaatcggcatgagatgcttgccgtcgagccaataaatgagctcttgagggataaatggcgcaagttcggcgccgttagcttctatatcaacgtggtatcatatctgtgcgccatggtgatcttcactctgaccgcttactatcagccactggaggggacgcctccctacccatacaggaccaccgtggactacctgagactggccggggaggtgataaccctctttaccggtgtgttatttttctttaccaacattaaggacttgttcatgaaaaagtgtcccggtgtgaacagccttttcatcgacggcagctttcagcttctctactttatctactcagtgttagtgattgtttcagcagctctctacctcgcaggtatagaagcatatctcgcggtgatggtcttcgctctggttctggggtggatgaatgctctttactttaccaggggactcaagctgacaggtacctactccattatgatccagaaaattctttttaaggacctattcaggttccttctggtgtaccttcttttcatgataggatacgcctcagcacttgtgagtctgctgaacccctgcgctaatatgaaggtgtgtaacgaggaccagactaactgtactgtgccgacgtaccccagctgccgagatagtgaaactttttcaacattcctgctggatctgttcaagctgactatcggaatgggggacttagagatgcttagcagtacaaaatatccagtcgtgttcataattctgttagtaacatacattattttgaccttcgtgttattgctgaatatgctcatcgcccttatgggcgagacagtcggacaggtttcgaaagagagcaaacatatctggaaactgcagtgggctacgactatactggatattgaacgctccttccccgtcttcctcaggaaagcctttaggtcgggcgagatggtcacagttggcaagtcgtcagatggcactcccgataggcgatggtgcttccgagtggatgaggtgaattggagtcattggaaccaaaacctaggtatcatcaacgaggaccctgggaagaatgaaacctaccaatactatgggttcagccacactgtcgggaggctgcggcgtgacaggtggtccagtgtggttccaagagtggtcgagctgaataagaatagtaatcctgatgaggtggtggtgccgttggactctatgggcaacccccgctgtgacggtcatcagcaaggatacccgcgcaaatggcggacagatgacgccccactgtag

SEQ ID NO: 138463 - DNA, 2514 bp, synthetic construct
  misc_feature 1..2514: note = Description of Artificial Sequence: Synthetic coding sequence
  source 1..2514: mol_type = other DNA
atggctgatagctcagagggacctcgcgcgggtccaggcgaggtggcagaactaccaggggacgagagcggtacccccggcgacggccgcccaaatctgcgcatgaagttccaaggtgccttccggaagggagtaccaaacccaatcgatttactggagagcactttgtatgaaagctcggtggtgcctgggcctaaaaaggccccgatggactcgctgtttgactatgggacctacaggcatcacagttctgataacaaacggtggagaaaaaaaattattgaaaaacagcctcaatctcccaaggccccagctcctcagcctccccctattctgaaagttttcaacagacccattctgtttgatattgtatctcgtggttccactgcagacctcgacggccttctgcctttcctgctgacacataagaaacggctaacagatgaggaattcagggagcccagcacaggcaagacgtgcctgcccaaagcgttgctcaacctatcaaatgggcgaaacgacaccatccccgtgttattagatatcgccgaaagaacaggtaacatgcgcgagttcattaactcaccctttagggatatttattataggggccagacagccttgcacatagccattgagcggcgctgcaagcattacgtggaattacttgtggcacagggcgctgatgttcacgctcaagcccgcggcaggtttttccagcccaaggatgaaggcggttacttttactttggcgagttacccctttctctggcagcatgcacgaaccaaccccatattgttaactatcttactgagaacccgcataagaaagcagacatgcgcagacaggactcgcgaggcaacaccgtgctccatgctctcgtggcaatcgcggacaacacccgggagaacaccaaatttgtgactaaaatgtacgatctgctgctgcttaaatgcgcccgattgttccctgattcaaacctagaagcagttcttaacaacgacggtctgtcccccttgatgatggctgcaaaaacaggaaagatcgggatcttccagcatattatcaggcgggaggttactgatgaggataccaggcatctttccaggaaatttaaagactgggcttacggcccggtttactcaagtctctacgatctgtcaagtctggatacatgtggagaagaagctagcgtgcttgagatcctggtgtataattccaaaatcgaaaatcggcacgaaatgctcgctgtcgagccaataaacgagctcttgcgggacaagtggagaaagtttggggcagtgagcttctatataaacgtcgtgagctacctttgcgctatggtgatcttcactctgacagcttactaccagccactggaaggcacccctccctatccctacagaacgaccgtagactacctgagacttgcaggagaagttataactctgttcacaggcgtcctcttttttttcactaatattaaagatctttttatgaaaaagtgtcctggggttaatagtctttttatcgacgggtcatttcagttactgtatttcatttattcagtactcgtcatcgtctcagcagctctctatctggctggcattgaggcctatctggctgtgatggtgtttgccttggtgctggggtggatgaatgcactgtactttacacggggcctgaagttgacaggaacttattccataatgatccaaaaaatcctgtttaaggacttgtttcggtttcttttggtgtacctcttattcatgatcggatatgctagcgctttagtatctctgttgaacccatgtgcaaatatgaaagtttgtaacgaggatcaaacaaactgcactgtaccaacctatccatcctgtagagacagtgaaacctttagcacattcctcctggacctgtttaaattaacaattggtatgggcgatctggaaatgctgtccagcactaagtacccagtcgtcttcatcattctcctggtgacatatattatattgacgtttgttcttttactcaatatgttaatcgccctaatgggtgagacggttggccaggtcagtaaagaatccaagcacatttggaagctccagtgggccacgacaatccttgatattgaacggtcatttcccgtgttcttgcgtaaagctttccggagcggcgagatggtgaccgtgggcaagagctctgacggcacaccagacaggcgttggtgctttagggtggacgaggtcaactggtctcactggaaccagaatctgggaatcatcaatgaggaccctggaaagaacgaaacttaccaatattacggattctcccatacggtggggagactgcggagggaccgatggtccagtgtggtcccgcgggtggtcgaactgaacaagaactctaacccggacgaggtagtagtgccgctggactccatgggaaatccccgttgtgacggccaccagcaagggtatccgcggaaatggagaactgatgacgcaccactctag

SEQ ID NO: 138464 - DNA, 2436 bp, synthetic construct
  misc_feature 1..2436: note = Description of Artificial Sequence: Synthetic coding sequence
  source 1..2436: mol_type = other DNA
atggccgactcgtccgaaggacctcgggccggaccgggcgaggttgcagagctgccaggcgacgaatccgggacacctgggggcgaagccttccctctctcaagcttggccaacctgttcgaaggggaggacgggagcttaagccctagtcccgccgatgcttccaggccagctggaccaggcgacggtaggcccaacctgcgaatgaagttccaaggagcttttagaaaaggcgtcccaaatccgatcgacctcctagagtctaccctttacgagtcatctgtggttcccgggccaaagaaagcccccatggattctctctttgattacggaacctatagacatcactcctcggataacaaacggtggaggaagaagatcatcgaaaaacaacctcagagtccgaaggcgcccgctccccagccacctccaattctaaaggtcttcaataggcccattctgttcgatatcgtttctagaggttccaccgctgacctggacgggttactgccgttcttgctcactcacaaaaagagactgaccgatgaggaatttagggagcccagcaccggtaaaacctgtctacccaaagccttgctgaacctgtccaatggccgtaatgacaccattcctgttctgctggatatcgcagagagaacaggcaacatgagggagttcattaatagtccctttcgggacatatattacaggggccaaaccgctcttcacatcgctattgagcggagatgcaagcactacgttgaattgctagttgcccagggcgctgatgtgcacgcacaagctagggggaggtttttccagcctaaagacgaagggggttacttttactttggtgagctaccactgagcttggccgcctgtacgaatcagccccacatcgtaaactatcttacggagaatccgcacaaaaaagccgatatgcgcaggcaggattcgcgcggcaataccgttcttcatgctctagttgccatcgccgataacacacgagagaataccaagtttgtgactaaaatgtacgacctcctccttctgaaatgcgcacggctgttcccagactcaaacctggaagccgtcctcaataacgacgggctctcacctcttatgatggcagcaaagacgggaaagatcggcaaccgtcacgaaatgctcgcagtggagccgatcaacgaactgctccgcgataagtggcgtaagtttggagctgtctctttttacattaacgtggtatcctatctctgtgccatggtcattttcactctgactgcatattatcagcccttggagggaacgcccccgtatccctatcggactaccgtggactatctgcgtcttgctggtgaggtgatcaccctcttcactggcgttctgttttttttcacgaatattaaggatctctttatgaagaaatgcccaggcgtgaactccttgtttatcgacggtagctttcagctgttgtactttatctatagtgtgctggtaatcgtgagtgcagccctgtatctggcgggaatcgaggcttacttggccgtgatggtgttcgctctcgtgttggggtggatgaacgccttgtactttactcgtggtctgaaattgaccggtacatacagcatcatgattcagaaaatcctctttaaagacctctttagatttttgctggtatatctgttgtttatgatcggttacgcctctgccctggtatccctgctgaatccatgcgccaacatgaaagtgtgtaacgaggaccaaacgaactgcacagtaccaacataccctagttgccgggattcagaaaccttttcgaccttcctgttagatctttttaagctcactattggaatgggcgatttagagatgctctcttctaccaaatatcctgtcgtgttcatcattctgctggtgacttacatcatccttacattcgtcttacttctgaatatgttaattgccctgatgggggaaactgtgggacaggtgtcaaaggaatctaagcacatctggaaactccagtgggcgaccacaatcctggatattgagcggagttttccagtgttcctgaggaaagccttcagatctggggagatggtgaccgtggggaaatcctccgatggaaccccagaccgccggtggtgttttagagtcgatgaggtcaactggagccattggaatcagaacttggggattatcaatgaggatcctggtaaaaacgaaacttaccagtattacggattctcccacactgtcgggcgactccggagagataggtggtcaagtgtcgtaccaagagtagtcgaactgaacaagaattctaatccggacgaggtggtggttcccctcgactcaatgggcaatcccagatgtgatggacatcagcagggatacccacgcaagtggcgcacagacgatgctcccctgtag

SEQ ID NO: 138465 - DNA, 2475 bp, synthetic construct
  misc_feature 1..2475: note = Description of Artificial Sequence: Synthetic coding sequence
  source 1..2475: mol_type = other DNA
atggctgactcttctgaggggccgagggccggacccggcgaggtggcagagctccctggcgatgaaagtgggacgcccgggggggaagcttttcccttgtcatctctggctaatttgttcgaaggagaagatggctccctgtcacccagccccgcagatgcatcccgaccggctggcccaggggatggtcgacctaacctgaggatgaagtttcagggcgcttttcgtaagggggtgcctaatccaattgacctgctcgaatcgacattatatgaatctagcgttgtcccagggcctaagaaagcacccatggacagtctgtttgactacggcacatacaggcaccactcttcagataataagcgctggcggaaaaagataatcgagaaacaacctcaatcccctaaggcccccgcaccacagccgccaccaatcctcaaagtattcaacagacctatcttgttcgacattgtatctaggggcagcaccgcggaccttgatggtctcttaccattcctcctcacccacaagaagcgacttaccgacgaggagttcagggaacccagcaccggcaagacgtgtctgccaaaagctcttttaaatctgtcaaatggacgcaacgacaccatacccgttcttctcgacattgcagaaaggaccgggaacatgcgagagttcatcaacagcccctttcgcgatatttattaccggggagagctgccgttaagcctggcagcgtgtactaaccagccgcacatcgtgaactatctgactgagaatccacacaagaaagccgacatgcgaagacaagatagcaggggaaacaccgttctccacgcgctggtggccatcgccgacaacacccgggaaaataccaaatttgttacaaaaatgtacgacctcctgctgcttaagtgtgctcggctcttccctgactcgaatctagaagctgtgcttaataacgatggtctgagtcccctgatgatggccgcaaaaacagggaagatcggcatatttcagcacatcattcgacgggaagtgactgacgaggacacaagacaccttagcagaaagtttaaggattgggcttacggccctgtctactcctcactatacgacttgagcagcctggacacgtgtggagaggaggcgtccgttctggagattttagtgtataactccaaaatcgagaaccgccatgagatgctcgcggttgagccaattaatgagctgctgcgagacaagtggagaaagttcggagccgtttccttctatattaacgtggtgagctacttgtgtgctatggtgatctttaccctgacggcgtactaccaaccactcgagggcacacccccttacccctacagaactaccgtggactatctgagactcgccggagaggtcatcactctgtttactggggtgttattcttcttcaccaacataaaagatctgttcatgaaaaagtgccctggcgtgaattccctttttatcgacggatcgttccagctcctctactttatctattctgtgttggtgattgtatcggctgcattgtacctggctggaatcgaagcctacctcgccgtcatggtgtttgccctagtactgggctggatgaatgcgctgtatttcacgcgtggtctcaaacttactggcacatactcgataatgatacagaagattctcttcaaagacttattccgatttttactggtttatctgttgttcatgatcggctacgcaagcgcactggtgtccctcctgaatccatgcgctaacatgaaagtgtgtaatgaagatcaaacaaactgtactgtcccaacctacccatcttgtcgcgattctgagacattcagcacctttcttcttgatttgttcaagttgacaatcggcatgggcgaccttgagatgctgtcgagcaccaagtatcctgtggtctttatcattctgctggtcacctacattatccttactttcgttttgttgcttaacatgctgatcgccctgatgggtgaaaccgtgggccaggtcagcaaggagagcaagcacatttggaagttgcagtgggcgacaaccattctggacattgagcgctctttcccagtgtttctcagaaaagcatttcggtctggcgaaatggtgacagtcggtaagagctcggatggtacaccagaccgtcgatggtgcttccgggtagacgaggtaaattggtcccattggaatcagaatctgggcatcatcaatgaagatcctgggaagaatgagacctaccagtattatgggttttctcacacagttgggcggcttagaagggaccgttggagcagtgtcgttccgagggtggtcgagctgaataaaaacagtaacccagacgaagtggtggtgccattggatagtatgggcaaccctcggtgtgacgggcaccagcagggctatccaaggaaatggagaaccgatgatgcacctctctag

SEQ ID NO: 138466 - DNA, 2295 bp, synthetic construct
  misc_feature 1..2295: note = Description of Artificial Sequence: Synthetic coding sequence
  source 1..2295: mol_type = other DNA
atggctgactccagcgagggtccccgcgcagggcctggagaggttgctgaactcccaggtgacgaaagcggcaccccgggcggggaggcttttccactgtcttccctagccaacctctttgagggggaggatggctcattgagtcccagtccggcagatgcatcacggccagccggaccaggtgacgggcgcccaaaccttagaatgaaatttcagggggcattccgtaaaggcgtgcccaaccccattgacctgctggagagcacactgtacgagagtagcgtcgttcccgggcctaagaaagcacctatggatagcctgtttgactatgggacatacaggcatcatagctctgacaacaagcgatggaggaagaagatcatcgagaaacagccccagagccccaaggccccagcccctcaaccaccacctatactcaaggtgtttaacagacccattttattcgatatcgtgagccgcggatccacagccgacctagacgggctcttgccatttctcctcacgcataaaaagcgcctgactgacgaggaattcagggaaccttctaccggcaagacatgcctgccaaaggcactgctgaacctgtccaatggacggaacgataccatcccagtcttactggacattgccgaacgaaccggtaatatgcgggaatttatcaattccccgttccgggatatctattacaggggggagcttcctttatcactggcagcctgtacaaaccagcctcacatcgtcaattacttgaccgagaacccacacaaaaaggccgatatgcgtaggcaggacagccgaggaaataccgttctgcacgcgcttgtcgctatcgcagataacaccagggaaaacacaaaatttgtcacaaagatgtacgatctcctgctgctgaagtgcgcacgcctgtttcctgatagtaatttggaagccgtgctcaacaatgacggcttatccccgcttatgatggcagcgaaaactggtaaaatcgggaatcggcacgagatgctggccgtggaacctattaacgaattattacgggacaagtggagaaagttcggcgcagtttctttttatataaacgtggtaagttacttgtgtgccatggttatcttcaccctgacagcttactaccagcccctggaaggcacaccaccttacccctatagaacaactgtcgactatctgcgcctcgccggcgaggtcatcaccctttttacaggcgtcctttttttcttcaccaatattaaagatctcttcatgaaaaaatgcccgggcgtgaatagcctcttcatcgacggcagttttcaattactctatttcatctactcagtactcgttatcgtatcagccgccctctacctcgcaggtattgaagcatacctggctgtgatggtcttcgctcttgtgcttgggtggatgaacgctctatattttactagaggcctcaaactgactggcacttatagcattatgattcagaagatcttatttaaagatctctttcggttcctcctagtgtacttattgtttatgatcggatacgcctccgccctggtgagcttgttaaacccttgtgccaatatgaaggtctgcaatgaggatcagaccaattgtaccgttccgacataccccagctgtcgggattccgaaaccttttccacttttctgttagatctgttcaagctcaccattggcatgggtgatttggagatgctgagttccacaaaatatcctgtggtctttatcattctactcgtgacctacatcatcctgactttcgttttgctcttaaacatgctgatcgcgctcatgggcgagacagtaggtcaggtgagcaaggagtctaaacacatctggaagctgcagtgggcaactaccatcctggacattgaacggtcatttccagtcttcctgaggaaggccttcagaagtggtgagatggtcactgtcgggaagtcgtctgacgggacgcccgatcgcaggtggtgttttagagtggatgaggtgaactggtcacactggaatcagaacctgggcataatcaatgaggaccctggcaaaaatgagacctatcagtactatggattttctcacacggtcggtagactgaggcgggataggtggagctccgtggtgcccagggtcgtcgagctcaacaaaaatagtaacccagatgaagtggtggtccccctggatagtatggggaatcccagatgcgacggtcaccagcaaggctatccccggaaatggagaacggacgacgccccgttatag

SEQ ID NO: 138467 - DNA, 2190 bp, synthetic construct
  misc_feature 1..2190: note = Description of Artificial Sequence: Synthetic coding sequence
  source 1..2190: mol_type = other DNA
atggggggctttctacccaaggccgaaggtcctgggagccagttgcagaagctcctcccttcattcctggttagggagcaggattgggaccagcacctagacaaattgcatatgctgcagcagaaaagaatcctagaatctccgctgctgagggcatctaaggagaatgatttgagcgtgcttcgccaattgcttttagattgcacttgcgacgtgagacaaaggggtgccttgggcgagacagctctccacattgccgcactgtacgacaacctggaggccgcccttgtcttgatggaggcggctcccgaattagtgttcgagccaacaacctgcgaggcttttgccggtcagacagctctgcacatcgcagtcgtcaatcagaacgtgaatctagttcgagcattgttgacccgccgggctagcgtatctgcgcgcgcgactggaactgcctttcggaggtctccacgaaatcttatctattttggcgagcatccattatcgttcgcagcctgcgtgaacagcgaggaaattgtgcgactgttgattgagcacggagcggacatccgggcacaagattccttaggcaacactgtccttcacatcctgatcttgcagccaaacaagactttcgcctgccagatgtacaaccttcttctctcatatgacggacatggggatcatcttcagcctctggaccttgttccaaatcatcaggggctgactccttttaagctggctggtgtggaaggaaatactgttatgtttcagcatttaatgcagaagagaaggcacatccagtggacttacgggccccttaccagcattctctatgatctgaccgagatcgactcctggggcgaagaactgagcttcctggaacttgttgtgtccagtgataaaagggaagcaagacagattctggaacaaactcctgtgaaagagttagtttccttcaagtggaataagtacggtcggccttacttttgtatcctggcagctctataccttctctacatgatttgcttcacaacctgctgcgtttaccgccccctgaaattcaggggcggaaaccgcacacactctcgtgatatcaccattctccaacagaagctcttgcaggaggcctacgagacaagggaggacattattcggctggtaggtgagcttgtcagcattgttggagccgtgatcattcttctgctcgaaatcccggatatattccgagtgggtgccagccgctacttcggcaaaactattttggggggaccgttccatgtgatcattatcacctacgcttccctcgtgctcgtaacaatggtcatgaggctgacgaatacgaatggggaggtggttccaatgtctttcgctctcgtccttggctggtgttcagtgatgtacttcacgcgcggatttcagatgctgggaccttttaccatcatgattcagaagatgatatttggggatcttatgcggttctgttggcttatggccgtcgtgattctggggttcgcttctgcattctacattattttccagacggaagatccaacttctctcggccagttctacgactacccaatggcattgttcactacttttgagctgttcctgaccgtcatcgacgctccagccaattatgatgtcgacttgccttttatgttttccatagtcaatttcgcattcgctatcatcgccaccctgctgatgttgaatctatttattgccatgatgggtgatacgcactggcgtgtggctcaggaaagggatgaactgtggagggcacaggtcgtggccactacggtgatgctggagcggaaactccctaggtgtctgtggcctcgaagtggtatctgtgggtgtgaatttgggcttggtgatagatggttcctccgcgtggaaaatcacaatgatcagaatcccctccgtgttctcaggtacgtagaggtcttcaaaaatagcgacaaggaggacgaccaggagcacccttccgagaagcagccgtcgggggccgagtctggtaccctggctagggcgagtcttgccctgcccaccagcagcctgtctagaacagccagccagagctcttcccatcggggctgggaaattcttcggcagaacactctcggtcacctcaatctgggcctgaacctgtccgagggtgacggagaagaagtctatcacttttag

SEQ ID NO: 138468 - DNA, 1146 bp, synthetic construct
  misc_feature 1..1146: note = Description of Artificial Sequence: Synthetic coding sequence
  source 1..1146: mol_type = other DNA
atgggcggttttctaccaaaggctgagggtccagggagccagctgcagaaactcctgccctcgtttttggtcagagagcaggattgggatcagcaccttgacaagctgcacatgcttcagcagaaacgcattcttgaaagccctttattgagggcctcaaaagaaaacgatctcagcgtgttgaggcagctccttctcgactgtacgtgcgacgtgcgacagcggggggctttgggcgagactgcactgcatattgccgcactctatgataatttggaggctgccctggttttgatggaagctgcccccgagctggtctttgagcccaccacatgcgaggcttttgcagggcagaccgcgcttcacattgcagtggttaatcagaacgtgaacttggttcgagcgcttctgacccgccgggcctcagtctccgccagagctacgggtacagcctttagaaggagcccacggaatcttatctacttcggggaacatcctctctccttcgctgcttgtgtcaattccgaggaaattgtccgcctgctaatcgagcatggcgccgacataagagcccaggacagcctggggaatacagtcctccacattctcattctacagcctaacaagaccttcgcctgccagatgtacaacctgctgctgtcatatgatggccacggtgaccacctgcagccgctggatctcgtaccgaatcaccaaggcctgactccctttaagttagccggcgtggaagggaatacagtgatgttccaacaccttatgcagaagcgacgacatatccagtggacctacggccccctcacctcgatcctctatgacctcactgagatcgattcgtggggagaggagctcagttttcttgagctggtcgtgtctagtgataagcgtgaagctcgccaaatactggaacagacaccagttaaagaactcgtgtccttcaagtggaataagtacggtaggccctacttctgcatcctggcggccctgtacttgctgtatatgatttgtttcacgacatgctgtgtgtaccgcccactcaaatttagaggggggaaccgcacacactccagagatatcacaatactccagcagaagttactgcaggttatcctcttacgcaggggatag

SEQ ID NO: 138469 - DNA, 1674 bp, synthetic construct
  misc_feature 1..1674: note = Description of Artificial Sequence: Synthetic coding sequence
  source 1..1674: mol_type = other DNA
atgggcttgtctctgccaaaagagaagggacttatcctgtgtctctggtccaaattctgtcgatggtttcaggatagcctggggaacaccgtgctccacatattgattctgcaacctaacaagactttcgcatgccagatgtacaacctactactgagctatgacaggcatggggaccacctacagccactggacttggtgcctaaccaccaggggctcaccccgttcaagctggcgggtgtagagggcaataccgttatgttccagcatctcatgcagaaaaggaagcacacccagtggacatatgggcccctcacatcaacactctacgatctgacagagatcgatagctccggcgatgagcagtcgctcttagaactgataatcactacaaagaagagggaggctcgacagatcctggatcagaccccagtgaaagagttggtgtccctgaaatggaagcgctatgggagaccctacttttgcatgctgggtgctatttatttactgtacataatttgttttacaatgtgctgcatctataggcctcttaaaccccgtaccaataacagaacaagcccccgggacaacacccttctccagcaaaagctcctccaggaggcctacatgactcctaaggatgacatacgactggtgggggagttagttaccgtgatcggagcaatcattatattgttggtcgaagtgccagacatctttaggatgggcgtgacccggtttttcgggcagactatcctaggtggacctttccatgtcctgatcatcacatatgctttcatggtgcttgtgacaatggtgatgaggctgataagcgcaagtggtgaggttgtacctatgtccttcgccctggttctcgggtggtgtaatgtcatgtatttcgcgcgtgggtttcagatgctgggccccttcaccattatgatccagaaaatgatttttggagacctaatgcgcttctgttggctgatggcagtggtgatcctaggcttcgcttccgcattttacattatctttcagacagaggatcccgaggagctgggtcacttctacgactacccaatggccctgttctccacatttgagctgttcctgacaatcatcgatggcccggccaattataacgtcgacttgcctttcatgtactccatcacttacgcagccttcgctattattgctacactactgatgttaaatctgctcatagccatgatgggagacactcactggagagtagcacatgaacgagatgagctgtggagggctcagattgtggcgaccaccgtcatgctggagagaaagctgcccaggtgtctctggccccgcagcggcatttgcggcagggagtacggccttggggaccggtggttcctgcgcgtggaagaccggcaggatctcaaccgacagcgtattcagagatatgctcaggcctttcacactaggggatctgaagatctggacaaagacagcgtggaaaagctggaacttgggtgtccgttcagcccacacctttctctcccgatgccaagtgtcagccgatctacttccagaagctcagccaactgggaacgcctgaggcagggcaccctgagaagggacctaagaggaatcatcaacagaggtctcgaggatggcgagagttgggagtatcagatttag

SEQ ID NO: 138470 - DNA, 2178 bp, synthetic construct
  misc_feature 1..2178: note = Description of Artificial Sequence: Synthetic coding sequence
  source 1..2178: mol_type = other DNA
atgggactgagccttcctaaagagaagggacttattctttgcttatggtccaaattctgtcgatggtttcagaggagagagagctgggcccagtcccgggacgagcagaacctgttacagcagaaaaggatctgggaatctcctctactgctggctgccaaggacaatgacgtccaggctttgaataagttgctcaagtacgaagactgtaaggttcatcaacgaggtgccatgggtgagacagctctgcacattgccgccctgtatgacaatctggaggccgctatggtcctgatggaagccgccccagagttagtatttgaacctatgacctccgagctgtacgagggccagaccgcactccacatagccgtggttaaccagaatatgaacttggtgcgcgcactgttggctcgccgtgcaagcgtctccgcccgtgctacaggtacagccttcaggcgatctccttgcaatctgatttactttggtgagcatccgttatcatttgctgcatgcgtaaacagcgaggagatagtgcggcttctgatagaacatggggccgatatacgcgcccaggacagtctgggcaacactgtgttgcacatcctgatcctccagccaaacaagacgttcgcttgtcagatgtacaacctgcttctttcctacgataggcatggcgaccatctgcaacccctagatttggtccccaaccatcaggggttgacaccctttaagctggccggggtcgagggcaacactgtgatgttccagcatctgatgcagaaaaggaagcacacccagtggacatacggacctctgacttctacattgtacgacttgactgaaatcgactcaagcggcgacgaacagagcctgctggagctgatcattaccactaagaaacgtgaagcccgccagatcctcgaccagacacccgtgaaagaattggtcagtctgaagtggaagcgctacggtcgcccatatttttgtatgctcggtgctatctatctgctttacatcatctgttttaccatgtgttgcatctataggcctctcaagcctagaaccaataacaggacatccccccgagacaatactcttctgcagcagaaattgctgcaggaagcatatatgacaccaaaggacgacatccggttagtgggagagctcgtcacagtgattggggccataattatccttcttgtggaggtgcccgatatctttagaatgggggtaacccgattctttggccagacgatcctgggggggccatttcatgttctgattattacctatgccttcatggtcctggtgacaatggtgatgcgtcttatatcagcatccggcgaggttgtgccaatgagctttgccctggtcctggggtggtgcaacgtaatgtactttgcaagaggcttccagatgctgggaccctttactatcatgatccagaagatgatctttggagaccttatgagattctgctggttgatggctgtcgtaattctcggatttgcaagcgccttctatattatatttcagacagaagatccagaagagcttggccatttttacgactatcccatggcactgtttagcacctttgaactgttcctcactatcatcgatgggccagctaattacaacgtggacctgccatttatgtatagtatcacgtacgcggcgtttgcaatcattgcaactctgctcatgctgaatttactcattgctatgatgggtgatacccattggagagtcgcccatgaaagggacgagctttggcgcgctcaaatcgtggcaactactgtgatgttggagaggaagctgccccggtgtctctggccccgcagcggcatctgcgggagggaatacggcctaggggacaggtggtttctgcgcgtcgaagatcgacaggacctcaaccgtcaacgtattcagagatacgcacaggcctttcatactaggggaagtgaggacctcgacaaggatagcgtggagaagctcgaactaggctgccctttcagcccacacctatcgctgcccatgccctccgttagtagatctacatctcggagctccgccaactgggagaggcttcgtcaggggacacttcgaagagatctgcgcggcatcataaaccgcgggctggaagacggcgaaagctgggagtatcagatctag

SEQ ID NO: 138471 - DNA, 168 bp, synthetic construct
  misc_feature 1..168: note = Description of Artificial Sequence: Synthetic coding sequence
  source 1..168: mol_type = other DNA
atgtccacaagtaggaagcttaaatctcacggaatgaggcggtcgaagtctagatcaccacataagggcgtaaagcgcggagggtctaaacggaagtacagaaaaggaaatttaaaatctcggaagcggggggatgatgcaaacagaaattatcggtcccatctttag

SEQ ID NO: 138472 - DNA, 417 bp, synthetic construct
  misc_feature 1..417: note = Description of Artificial Sequence: Synthetic coding sequence
  source 1..417: mol_type = other DNA
atggacacacagacgcacagccttcccattacacatacccagttacactctaatagccagccacaatcaagaacatgtacacgtcactgccaaaccttctcacaaagctgccgccagagccacagaggcagtagaagccagagttcatcacagagtcccgcctcacatagaaatcctacgggggcacattcctcaagcggccaccagtcgcaaagccccaacacatcgccccctcccaagagacataaaaagactatgaactctcaccactcccccatgaggccaacaatccttcactgtcgatgtccaaagaatcgcaagaacctggaaggaaagctaaagaaaaagaaaatggccaagaggattcagcaggtttacaaaaccaaaactagatccagtggttggaagagtaattag

SEQ ID NO: 138473 - DNA, 1731 bp, synthetic construct
  misc_feature 1..1731: note = Description of Artificial Sequence: Synthetic coding sequence
  source 1..1731: mol_type = other DNA
atggccgtgcttttctttcacaccatgcgctacaagagccaagatccgcggaaccctcataacgacagattcgtcctgagtaaagggcacgctgcccctattttgtacgctgtctgggcagaggctggatttttggccgaggctgagctccttaacctcaggaagattagctctgacttagatggacatcctgtacctaaacaggcattcactgacgtagcgacggggtccctaggccagggcctgggtgcggcatgcggaatggcttacacaggcaaatatttcgacaaagcatcatacagggtgtactgtctgcttggcgacggagagttgtcggaagggagcgtctgggaagccatggccttcgcatccatctacaaacttgacaatctcgtcgccatcctggatatcaatcgactcgggcagtctgacccagcacctctccagcaccagatggacatttaccagaaaagatgtgaagctttcggctggcacgccatcattgtcgatggacacagcgttgaggagctctgtaaagccttcggccaggctaaacaccagcccaccgccattattgctaaaactttcaagggccggggaatcactggggtcgaagataaggaatcctggcatggaaagcctctcccgaaaaatatggccgaacagattattcaggaaatctacagtcagatccaatcaaagaagaagatcctcgcaacgccccctcaggaggatgctccatcagtggatatcgcgaacattcgcatgccctccctgccgagctataaggtgggcgataagattgcaacaaggaaggcatatggccaggcattggccaaactgggccatgcctctgaccggattattgccctggacggtgacacgaagaattcaacatttagcgaaatatttaagaaagagcaccccgaccgattcatcgaatgctacatcgcagagcagaacatggtgtctattgcagtaggttgcgccacacgaaaccgaacggtgccgttttgctccaccttcgcagcctttttcaccagagctttcgaccaaatcaggatggccgccatcagtgaatccaatattaatttatgtgggagccactgcggcgtctctatcggagaagatggcccctcacaaatggccttagaagatcttgccatgttcaggagcgttcccacctctaccgttttttaccctagcgatggcgtggccacggaaaaagcggttgaactcgctgctaacaccaagggcatctgttttatccggacaagtagacctgagaatgctatcatttacaacaataatgaggacttccaggtagggcaggccaaagtagtcctgaaaagtaaagatgatcaagttaccgtcatcggcgctggggtgacacttcacgaagcactcgcagccgcagagttgctcaagaaagagaaaatcaatataagagttctggatccattcactatcaagcccctggacagaaagctcattctggactccgctcgggccacgaaagggcggatattgactgtggaagaccactattacgagggcgggatcggtgaggcagtaagctctgccgtggtcggggagcctggcataactgttacacacctggccgtgaacagggtcccccgctccgggaaaccggctgagctgctaaagatgtttggaatcgatcgtgatgcaatcgcccaggccgtgcgtggactcataacaaaggcctag

SEQ ID NO: 138474 - DNA, 1374 bp, synthetic construct
  misc_feature 1..1374: note = Description of Artificial Sequence: Synthetic coding sequence
  source 1..1374: mol_type = other DNA
atggcttttgccagcatctacaagctcgacaacctcgtggccatcctggatattaataggctgggccaatcagaccccgcccctctccagcaccagatggacatctaccagaaaaggtgcgaagcctttgggtggcacgcaatcatcgtcgacggtcactccgtggaagagttgtgtaaggcttttggccaggccaaacaccagcctaccgctattattgccaagacctttaaaggcaggggtattacgggcgtcgaggataaggaaagctggcacggcaagcccctgccgaaaaatatggctgaacagataatccaagagatttactcccagattcagtccaaaaagaagatacttgccacgcctcctcaagaagacgctccctcagtagatattgctaacatcaggatgccctcactgccgtcatacaaggtgggcgataaaattgctacacgaaaggcctacggccaagcacttgccaaactcggccacgctagtgatcggattattgcactcgatggtgacacaaagaattctaccttcagtgagatctttaagaaagagcaccctgatcgctttatcgaatgctatattgccgagcaaaacatggtgagcatcgccgtcggatgtgcgaccaggaaccggacagtaccgttttgctcaacttttgctgcgttcttcacccgcgccttcgaccagatcaggatggcagccattagcgagtccaatataaatttatgcggctctcactgtggagtctccattggcgaagacggaccctcacagatggcactcgaggatctcgcaatgtttcgatcggttcccacaagcacggtgttttaccccagtgatggcgtggccacagagaaggctgtagaactcgccgccaacacaaagggcatatgctttattaggacctccaggcctgaaaacgccataatctataacaataacgaggacttccaagtggggcaggctaaagtggtgttgaagagcaaagatgatcaggttactgtgatcggtgctggagtaaccctccacgaagccctcgccgccgccgagttgttgaaaaaggaaaaaattaatattagggtcctggacccattcaccatcaagccgctggataggaagctcatacttgattccgcaagagctacaaagggccgaattctgacggtcgaggaccattactacgagggaggcattggcgaggccgtgtcctctgctgtggtcggggaaccaggaataacagtgacccatctggctgtgaatagagttcctcggtcaggtaagcctgctgaactgctcaaaatgttcggcatcgatcgggatgctattgcgcaggcggtgcgtggactgattacaaaagcctag

SEQ ID NO: 138475 - DNA, 1872 bp, synthetic construct
  misc_feature 1..1872: note = Description of Artificial Sequence: Synthetic coding sequence
  source 1..1872: mol_type = other DNA
atggagagctaccataaacccgatcagcagaagctccaggccctcaaagacaccgcgaaccgactccgcatttcatcaattcaagctaccaccgccgcagggtcaggacacccgacctcctgctgttcagccgccgaaattatggccgtgctcttctttcataccatgcgatacaagagtcaggacccaagaaaccctcacaacgaccggtttgtactgagtaagggacatgccgcccccattttgtacgccgtctgggccgaagccggctttctggcagaagcagaactccttaacctgcgcaagatttccagcgacctagacggtcatcctgtgcccaagcaggcatttacagacgtggccaccggcagcctgggacagggactgggggccgcgtgtgggatggcctatacaggcaagtacttcgacaaagcgagctaccgcgtctattgcctcctgggcgatggagagctctctgagggctcggtttgggaggccatggccttcgcttccatttacaaactagataatcttgtcgcgattctcgatatcaacaggctgggccagtccgaccccgcccctcttcagcaccaaatggacatctatcaaaaaagatgcgaagctttcggttggcatgccatcattgtggacggacatagcgtggaagaattatgtaaggctttcggacaagccaagcaccagcccaccgcgattatagccaaaacattcaaaggaagaggaattacaggagtcgaagacaaggagagctggcacggaaaaccactccccaaaaacatggcggaacagatcatccaagagatctatagccagattcagtctaagaaaaagattctggcaactccacctcaggaagatgcccccagcgtagatattgcaaacatcaggatgcccagcctcccctcttacaaggtaggagacaaaattgctacaagaaaggcatatggacaggcccttgctaagctgggccatgctagtgatcggattattgccttggacggcgacaccaagaactctaccttttccgaaattttcaagaaagaacaccctgaccggtttatcgagtgctatatcgctgagcagaacatggtgtctatcgcggtgggatgcgcaacgcgaaaccggaccgtacctttctgttctacttttgctgcttttttcacccgagccttcgatcagattcgcatggccgctatttctgaaagtaatattaacctctgcggcagccactgtggggtgagcattggagaagatggccccagccagatggctctggaggaccttgccatgtttaggagtgttccaactagcaccgtgttctacccgtccgacggcgtagctacggaaaaggccgtggagcttgccgcaaatacgaagggcatttgcttcattcgtacatctcggcctgagaatgcgatcatttacaacaataatgaggattttcaagttggccaggccaaagttgtgctcaagagtaaagacgaccaggtgacagttattggggcaggggtgactctccacgaggctttagcagccgcagagctcctgaagaaggaaaagatcaatatacgtgtgctcgatccatttaccatcaagcccctcgaccgaaagctgattctggatagcgcacgcgccaccaaaggcaggattctgacggttgaggatcactactatgagggaggaattggtgaagccgtttctagcgccgtggttggggaacctggcataaccgttacacacttggcagtcaatagagtgccgagatctggtaaacccgccgaattgctgaagatgtttggcattgaccgcgacgctatcgcgcaggcagtgcgcggactcattaccaaagcatag

SEQ ID NO: 138476 - DNA, 1872 bp, synthetic construct
  misc_feature 1..1872: note = Description of Artificial Sequence: Synthetic coding sequence
  source 1..1872: mol_type = other DNA
atggaaagttaccataaaccagaccaacaaaagcttcaagccctgaaggacaccgccaaccggttgcggatatcatcaatccaggctacaacagctgccggcagcggtcatcctacaagctgttgttcggcggcagaaatcatggcagttctattttttcacacaatgaggtacaagtcacaggaccctcgtaatcctcacaatgacagattcgtgctgagcaagggccacgccgcgcccattctgtacgcagtatgggccgaagcaggcttcttggccgaagccgagctacttaacctacgaaagatttcctccgatctcgatgggcaccccgttcccaaacaggcatttacagacgtggccacagggagcctcgggcaagggctcggggccgcctgcgggatggcttacaccggaaagtacttcgacaaggccagctatagagtttactgcctgttgggagacggcgaactgagtgaggggtccgtgtgggaggccatggcctttgcctccatttacaagctagataatctggtagctatcttagacatcaatcgcttgggacagtccgacccagcacccttgcagcaccagatggacatctatcagaagcgctgcgaggccttcgggtggcatgccattatcgttgacggccacagcgtcgaagagctctgcaaagcctttgggcaggcaaagcaccagcccactgccattatcgcaaagacttttaaaggacgtgggattacgggtgtggaggacaaggagtcttggcacggaaagccactgccaaaaaacatggcagagcagattatccaggagatttactctcagatacagtcaaagaaaaagatcctcgcgactccaccacaggaagatgcaccaagcgtggatatcgctaacatcagaatgcccagcctgcctagctacaaagtgggtgacaagatcgccacccggaaggcttacgggcaggctctggccaagctaggacacgcctcagaccggataatcgcccttgacggcgatactaaaaattctaccttctcggaaatcttcaaaaaggaacatcccgacagattcatcgagtgctatattgccgaacagaacatggtgtcaattgccgtgggctgtgcaacacggaaccgtacagtgccattttgcagcacttttgccgcctttttcaccagggccttcgaccagatccgaatggcagccatctcagagtctaacattaatttgtgcggcagccactgtggagtttcaattggcgaagacgggcccagccagatggcgctggaagatctggcaatgttcaggtccgtccccacctcaacggtcttttacccctcagacggcgttgctaccgaaaaggccgtggaactggccgccaatacaaaaggtatctgttttatccgtacctcacgccccgagaacgcaatcatctataataacaacgaagatttccaggttgggcaagccaaggtggtattaaaatcaaaggacgaccaggttactgtgattggggctggcgtgacattgcacgaagcgttggccgccgccgaactgttgaagaaggagaaaatcaacattcgggtgcttgatccattcactataaagccactggataggaaactgattcttgacagtgcacgcgccaccaaaggaagaatcctcaccgttgaggaccactactacgaaggcgggatcggggaggcggtatctagcgccgtagtaggtgagccaggaatcacagtgactcaccttgcggtcaacagagtgccccggagcggaaagcctgccgagctgttgaaaatgtttggcattgaccgggatgccatcgcacaggccgttcgcggactgattaccaaggcatag

SEQ ID NO: 138477 - DNA, 1896 bp, synthetic construct
  misc_feature 1..1896: note = Description of Artificial Sequence: Synthetic coding sequence
  source 1..1896: mol_type = other DNA
atggagtcctatcataagcctgaccagcaaaaactccaagccttaaaagacaccgccaaccggttgcgcattagctcaattcaggcaaccactgccgccgggtctggccatcccaccagctgttgttccgctgcggaaattatggctgtattattcttccataccatgaggtacaagagtcaggaccccagaaacccacacaacgatagattcgtcttgagcaaaggacacgctgcacctatactgtatgctgtttgggcagaggcaggcttcttggcagaagccgaactccttaacctgagaaaaatttctagtgacctcgatggtcatccagtgccaaaacaggccttcacagacgttgccactgggagtttagggcaggggctgggcgccgcatgtggtatggcatatacgggtaagtatttcgataaggcctccttaccctccagttgggactattcttacagagtgtattgtctgcttggcgacggcgagttgagcgaggggtccgtttgggaggctatggcctttgctagcatctataaacttgacaacctggtggcaattctcgatatcaataggctgggtcaatcagatccagcccccttacagcaccagatggacatttaccaaaaaaggtgcgaggcgttcgggtggcatgccatcatagttgatggtcattcagttgaggaattatgtaaagccttcgggcaggccaaacaccaaccaaccgccatcatcgcaaagacctttaagggaagaggcataaccggagtcgaagataaggagtcttggcacggtaagcctctacccaagaatatggcggagcagatcattcaggaaatctatagccaaatccagtcaaaaaagaagatcctagccaccccaccccaggaggacgcaccttcagtagacattgctaatatacggatgcctagcttgccttcctataaggtgggcgataagatagccacaaggaaggcttacggccaggctctcgccaagctcggccacgcctccgaccgtattatagccttagatggggatacaaaaaattctacattttctgagatttttaagaaggaacacccggatcgtttcatagagtgctatatcgctgagcagaacatggtttctatcgctgtaggttgcgcaacgcggaaccgcacagtgccattttgctcgacattcgctgctttttttaccagggcgttcgaccagattcgtatggctgcgatcagcgagtccaacatcaacctctgcggatctcattgcggtgtttcgattggagaagacggacccagtcaaatggcgcttgaagacctggcgatgtttcgctccgtccccacgagcactgtgttctacccctccgacggcgtagcgacagagaaagctgtggaactggccgctaacacaaaggggatctgtttcattcgtacaagtcggcccgaaaacgcaattatatacaacaataacgaagacttccaggtgggacaggctaaggttgtgctgaagagcaaagatgaccaggtcactgtaatcggagctggcgttactttgcatgaggcccttgccgccgccgaattactgaagaaagagaagattaatatccgggtgctcgacccattcacaattaagcctctggatcgtaagctgatcctggatagcgccagagccaccaaaggcagaatcctcaccgtagaggatcattattacgaggggggcatcggggaagccgtcagttccgcagtcgtgggggaaccgggaattacagtgacccacctcgcggtcaatcgagtaccacgctctggaaaacccgctgagttgttgaagatgtttggcattgacagagacgccattgctcaggctgttcgcggcctgataaccaaagcctag

SEQ ID NO: 138478 - DNA, 1182 bp, synthetic construct
  misc_feature 1..1182: note = Description of Artificial Sequence: Synthetic coding sequence
  source 1..1182: mol_type = other DNA
atggcactgaaggtagccactgtagcaggctcggcagccaaagctgtgctcgggccagccctgctgtgtcggccttgggaagtattaggagctcacgaagtaccctcacgtaatatctttagtgagcaaaccatccccccaagcgcaaaatatggcgggaggcatacagtcaccatgatccctggggacggaattggccctgaattgatgctgcacgtcaagtctgtgtttcggcacgcttgcgtgccagtcgattttgaagaggttcatgtttcttccaatgctgatgaagaagatattcgtaacgctatcatggctatccgcagaaatcgggtggccctgaagggtaacatagagaccaaccataacctccctccatcgcacaagagtcggaataatattctgcgtacttctctggacctctacgccaatgtcatccactgcaagtcactgcccggagtggttacccggcacaaggatattgatatccttattgtgcgcgagaacactgagggcgaatattcctccctggaacacgaatccgtagcaggagttgtggagagcttaaagatcataacaaaagccaagtcactgaggattgcggagtacgcattcaagctggcccaggagagtggcagaaagaaggtgactgcagttcacaaggcaaatataatgaagcttggcgacggcctctttctgcagtgttgccgggaggtggccgctcgctacccgcagatcacctttgagaatatgatcgtggacaacaccactatgcagctggtgagtcgcccacagcagttcgacgttatggtgatgcctaatctctacgggaatatcgtgaacaacgtgtgcgccggcctggtaggtggaccaggcctcgtagcaggcgcgaattacgggcacgtctacgcagtgtttgaaaccgccacacgcaatacaggaaaaagcattgccaacaagaacattgctaatcccactgccactctccttgcttcctgcatgatgctcgatcaccttaaattgcattcatatgcaacttccatacgcaaagctgtgctagcgtctatggataacgagaacatgcacacacccgacatcggagggcagggaacaacatctgaggctatccaggatgtgattaggcacatccgtgtgatcaatggtagggctgttgaggcctag

SEQ ID NO: 138479 - DNA, 1791 bp, synthetic construct
  misc_feature 1..1791: note = Description of Artificial Sequence: Synthetic coding sequence
  source 1..1791: mol_type = other DNA
atggccgatgcagaggccagggccgagtttcccgaggaggccagacctgaccgtggaaccttacaggtgctgcaggacatggcgtctagactcaggattcatagtattagggcgacgtgctctacttcatcaggtcacccaacctcctgttcatctagtagtgagattatgagcgttctgtttttctatattatgagatacaagcaaagcgaccctgagaaccctgacaacgaccggtttgtgttagctaagcgtctatccttcgttgatgtcgccacaggatggttggggcaagggcttggggtggcatgcggcatggcctatacagggaaatattttgaccgcgctagctatcgagttttctgtctgatgagtgacggagaatcaagcgaagggtccgtctgggaggctatggcgttcgccagctactacagtctggacaatctggtggctattttcgacgtgaataggctagggcactcaggggccttgccagccgaacactgtattaacatctaccagcggcgctgcgaggcctttggttggaatacttatgtcgtcgacggcagagatgttgaagctctatgccaggttttctggcaggcttctcaggtgaaacacaagccaactgctgtggtagcgaagacctttaaaggacgcggaaccccgagtatcgaggatgccgaatcctggcatgccaagcctatgcctcgagagagggctgacgcaatcatcaaattgattgagtcgcaaattcaaacgagtcggaaccttgacccccagccgcccatcgaggacagtcccgaggtaaacataaccgacgttcgtatgacctccccccccgattacagagtgggggataaaattgcgacaaggaaagcttgtggcctcgcactagcgaagctcggttacgctaataatcgtgtcgtggtgttggatggcgacacgcgttactcaacattttctgaaatctttaacaaggagtaccctgagagatttatagagtgctttatggccgagcagaatatggtcagcgtcgccttggggtgcgcttccagaggccgcaccatcgcattcgcatccacttttgctgcgtttttgacaagggcttttgaccatatccgcattggaggtttggcagaatccaacatcaatattattggatcacattgtggcgtgagtgtcggcgacgatggggctagccagatggctttggaggacattgctatgttccgcacaatacctaagtgcactatcttctaccctactgatgcggtcagcactgaacatgcagtggcactcgccgcgaatgcaaagggaatgtgtttcataagaaccactcggccagaaacgatggtgatttatacaccccaggagcggttcgaaatcgggcaagctaaagtgctccggcactgcgttagcgacaaggtgaccgtgattggagctggcatcacggtgtacgaggcactggccgccgcggacgagctttccaagcaggatatctttattagagttatcgatctgtttaccatcaaaccacttgacgttgccactatcgtgtcaagcgctaaagcaacagagggacggatcattacggtcgaggatcattatccccagggaggcattggcgaagccgtctgcgcagcagtgtccatggacccagatatccaagtccattcgctggctgtgtcaggcgttccccagagcgggaagtctgaggaacttctagacatgtatgggatctcggcgagacatattatcgttgcggtgaagtgcatgctgctaaactag

SEQ ID NO: 138480 - DNA, 1674 bp, synthetic construct
  misc_feature 1..1674: note = Description of Artificial Sequence: Synthetic coding sequence
  source 1..1674: mol_type = other DNA
atgtccgtgcttttcttctatatcatgagatataagcagtccgaccctgaaaaccctgacaacgatagatttgttctggccaaaaggctctcgttcgtggacgttgcaacaggctggctgggccagggactgggcgtggcatgcggcatggcttatacagggaagtactttgatcgagcttcataccgcgtgttttgcctaatgagcgacggtgagtcatccgaggggtcagtttgggaggccatggccttcgcttcttactatagcttggacaacctggtggctatctttgacgtgaatcggctgggccacagtggcgccttacctgccgagcactgtatcaatatctaccagcggagatgcgaggcttttggatggaacacctacgttgtagacgggagagacgtggaagctctttgtcaggtcttctggcaggctagccaggttaagcacaagcctaccgccgtggtggccaagactttcaagggtagaggaacaccttctatcgaggacgccgaaagttggcacgccaagcccatgccacgagaacgggctgacgccattatcaagctaattgaaagtcagatacagacctctcggaacctggacccacagccgcccatcgaggatagtcccgaagttaatatcacagacgtgagaatgacttcaccccctgactatagagttggcgataaaatagctactaggaaggcttgcggattggccctggccaagctgggctacgccaataatcgcgtggtcgtcttagatggagatactagatacagtaccttctcagagatctttaataaagagtaccctgagaggttcatcgagtgtttcatggccgagcaaaacatggtgagcgtagcacttgggtgcgcttcccggggtcgcaccatcgcattcgcgtctacctttgctgctttcctcacgcgcgcctttgaccatatccgcataggggggctggccgaatccaatattaacattataggaagccattgcggggttagtgtaggggacgacggcgcctcccagatggccctggaagacatcgccatgttcaggactattccgaaatgcaccattttctatcctaccgatgcagtatcaaccgaacacgccgtggccttagccgctaatgcaaaggggatgtgttttatacgaactacccgacctgaaactatggtcatctataccccgcaggagaggttcgagatcggtcaggctaagggtgtgtcaatgctccaggacagctggtcaagcgtaatttcctaccagaaagtgctcaggcactgtgtgtctgataaagtgactgtcatcggagcaggcattacagtctacgaagctttagctgcagccgacgaattgtctaaacaagacatctttatacgagttatcgatctgttcacaattaaacctctggacgtcgccaccatcgtgtcctccgccaaggccactgaggggcgtattatcaccgtggaggatcactacccccaaggggggatcggagaagcagtgtgcgcagctgtgtctatggacccagacatccaggtgcatagtctcgctgtctctggtgttccacaaagtggcaaaagcgaggagctgctagatatgtatggtatttccgcacggcacatcatagtggcggtgaagtgtatgctccttaattag

SEQ ID NO: 138481 - DNA, 1623 bp, synthetic construct
  misc_feature 1..1623: note = Description of Artificial Sequence: Synthetic coding sequence
  source 1..1623: mol_type = other DNA
atgtccgttctgtttttttacattatgaggtataagcagtccgatccggaaaacccagacaatgatcgtttcgtcttggcgaagcgcctttccttcgttgatgtggcgaccggctggttagggcaggggctcggtgtcgcctgtggtatggcttatacgggtaagtattttgatagagctagctaccgagtgttctgtttaatgagcgacggcgagagctctgagggctccgtgtgggaggccatggccttcgccagttactactcactggacaacctcgttgcgatctttgacgtcaaccgtttagggcattctggcgcattgcctgcggagcactgcatcaatatctaccagcgcaggtgcgaggcattcggctggaacacatacgttgtggacggaagagatgttgaggctctgtgccaagtgttctggcaggcaagccaggtgaagcacaagcccacggccgttgtagcaaaaacgtttaaagggcgaggcacaccatcaatcgaggacgccgagagctggcatgctaagccgatgccacgggagcgggctgacgcgattatcaagctgattgagtcccaaatccaaactagtaggaatctagatccacaaccacctattgaggactctcccgaggttaatattacagatgtgaggatgacgtcgccacccgactacagggtgggggataaaattgcaactcgtaaggcttgtggccttgccctagctaagctggggtacgctaacaaccgcgtggttgtccttgacggtgatactcggtatagcaccttttctgaaatattcaataaggagtatccagagcgtttcatcgagtgtttcatggcggagcagaacatggtgtctgtagccttgggatgcgcatccagaggcaggaccatagccttcgcctctacctttgcagcctttttgacacgcgctttcgaccatattaggattggcggtctggctgagtccaacatcaacataatcgggagtcactgtggtgtttcagttggagatgacggcgcaagtcagatggccctagaagatattgcaatgtttaggactatccccaaatgcacgattttctacccgacagacgctgtgtcgactgaacatgcggttgccctggccgcaaatgctaaggggatgtgttttatccggaccacacggcctgaaacgatggtgatctatacaccccaagaaagatttgagattggccaggctaaggttcttaggcactgcgtctccgacaaagtaaccgtgataggagcgggaatcaccgtgtacgaggctttagccgctgcggatgagctgagcaagcaggatattttcatccgagtgatagatctgttcaccattaagcctctggatgtggccaccatcgtgagtagcgcaaaagccacagagggccgtattattaccgtggaagaccattaccctcagggaggaatcggggaggccgtgtgcgctgcagtctctatggacccagatattcaggtgcactcacttgcagtgagcggagtgccccagtccgggaaatccgaagagctgctcgacatgtatgggataagtgcccgacatattatcgtggccgttaagtgcatgctcctcaactag

SEQ ID NO: 138482 - DNA, 894 bp, synthetic construct
  misc_feature 1..894: note = Description of Artificial Sequence: Synthetic coding sequence
  source 1..894: mol_type = other DNA
atgtcagcttgggccgcagcctccttatcacgggccgccgcccgctgtctcctcgccagaggccccggtgtgcgagcagctcctccccgtgatcctaggccgtcacatccagagccacggggatgtggcgccgccccaggccgcacactccactttactgcagccgtaccagctggtcataacaaatggagcaaggtcagacacataaagggccccaaggatgttgagcgctccagaatcttttcaaagttatgcctaaacattaggctcgccgtgaaggaaggagggcctaacccagagcataactccaatttggcgaatatcctggaggtgtgccggagtaaacacatgccgaagtccaccatagagacagctctcaaaatggagaagtctaaagacacgtaccttctatatgagggcaggggaccaggcggctcatcactcctgatcgaagccctgagcaacagctctcataaatgccaggccgacatcagacacattctgaataaaaacggtggcgtaatggcggtgggcgcgcgacacagcttcgacaagaagggcgtcatcgtggtcgaagtcgaggacagggagaaaaaggccgtgaacttggagcgggcactcgaaatggcgatcgaggccggggccgaagatgtcaaagaaacagaggacgaggaggaaagaaatgtttttaaattcatctgtgatgccagttccctccaccaggtacgcaagaagctggatagtctgggactgtgcagtgtgagttgtgcactcgaatttattcctaattccaaagtccagttggctgaaccagacctcgaacaggctgcgcatctgatacaggccctgtctaaccacgaggatgtaattcatgtctacgacaacatcgagtag

SEQ ID NO: 138483 - DNA, 687 bp, synthetic construct
  misc_feature 1..687: note = Description of Artificial Sequence: Synthetic coding sequence
  source 1..687: mol_type = other DNA
atgtcagtctctgaaatcttcgtcgagctgcaggggttcttggccgccgagcaggatatccgggaggagattcggaaggtggtccagtccctggagcagacagcccgagaaattttaactctgctgcagggcgtccaccagggggccggttttcaggacatcccaaaaagatgcttgaaggcccgcgaacactttggaactgtgaaaacacatctgacctcccttaaaaccaaatttcccgcagaacaatattaccggttccacgaacattggcgattcgtgctccagcgtctggtgttcttggccgctttcgtagtctatctggaaaccgagacgttagtaacaagggaagccgtcacagagattcttgggattgagccagatagggagaaaggattccatcttgacgtcgaggattatttaagcggtgtgctcatccttgcctccgagctctctaggctctctgtcaattcagtaacggccggggactactcacgtccgctccatattagcacattcataaacgaattagactcgggctttcgactcctgaacctgaagaatgacagcctccggaaaaggtacgatggcctgaagtatgacgtgaagaaagtggaagaggtcgtttatgacttatcaatacgcggttttaataaggaaacggctgctgcctgtgtggagaagtag

SEQ ID NO: 138484 - DNA, 585 bp, synthetic construct
  misc_feature 1..585: note = Description of Artificial Sequence: Synthetic coding sequence
  source 1..585: mol_type = other DNA
atgagcgtgtccgaaatcttcgtggagctgcagggcttcttggcagccgagcaggatatccctaagagatgtcttaaagcaagggaacatttcggcaccgtgaaaacccacctgacctccctgaaaacaaaattccccgccgaacagtactataggtttcacgagcattggcggttcgtgctgcagaggctggttttcctcgccgcttttgttgtgtacctcgaaacggagacactcgtgaccagggaggctgtgaccgagatcctaggaattgaacccgatagagagaagggcttccacttggatgtcgaggattatttatccggtgtgctaatattggcaagcgagctgtcaaggctcagtgttaactcagtgactgcgggggactactctcggccactgcacatctcaacctttatcaacgagctcgacagtgggttcaggctgctgaatttgaaaaatgattctctccgcaaaagatacgatggacttaagtacgatgttaaaaaggtcgaagaagttgtttacgacctcagtatccgtgggtttaacaaggagaccgcggccgcctgtgtggaaaagtag

SEQ ID NO: 138485 - DNA, 447 bp, synthetic construct
  misc_feature 1..447: note = Description of Artificial Sequence: Synthetic coding sequence
  source 1..447: mol_type = other DNA
atgtcggtgtcggagatcttcgttgagctacagggatttcttgctgccgaacaggatatccgggaagagattagaaaggtggtgcaatccttggaacagacggcaagagagattctcaccctcctgcagggggttcaccaaggggccggctttcaggacatccctaaacgatgcttgaaggcccgggaacatttcggaaccgttaagacacacctcacatcgctgaaaacaaagtttcccgccgagcaatactatcgattccatgaacactggaggtttgtcctgcagcgactggtgttcttggctgcttttgtggtgtatttggagactgagaccctggtaacacgcgaagccgtcaccgagatactaggtattgaggcggtgtgtcaacagagagattgttggcggttgctacctactccgcctcatctccacctgcatcagtag

SEQ ID NO: 138486 - DNA, 873 bp, synthetic construct
  misc_feature 1..873: note = Description of Artificial Sequence: Synthetic coding sequence
  source 1..873: mol_type = other DNA
atgagcaacaaggagggatcaggagggttcaggaaaagaaagcatgacaatttcccacacaatcagcggcgggagggaaaggatgttaactcgagcagcccagtgatgctcgcattcaagtcctttcagcaggagttagacgctagacacgacaagtatgaacgcctggtaaagttgagcagagacatcactgtggagtcaaagcggacgatcttcttgttgcatcgcattaccagcgccccggatatggaagatatcctgactgagtccgaaatcaaactggatggggttcggcagaaaatcttccaggtggctcaggagctatctggtgaagacatgcaccagttccacagagccattacgaccggcctgcaggaatatgtcgaggcagtgtcatttcaacatttcatcaaaactcgctccctcatctccatggacgagattaataaacagctcatcttcacaactgaggataacggaaaggaaaacaagacccccagctctgatgctcaagataagcagtttggaacatggcgtctgcgggtaacaccagtcgattacttgctgggtgtagctgacctcaccggagagctcatgcgaatgtgcatcaattcagttggcaatggggatattgacactccctttgaggttagtcagttcctgcggcaggtgtatgacgggttttcgttcatcggcaacaccggcccatacgaagtaagcaaaaagctctatacactgaagcagagtttggcaaaggtggagaatgcttgctacgcactgaaggtcagggggtctgaaattcctaagcatatgctcgcagacgtgttctctgtcaagactgagatgatcgaccaggaagaggggataagttag

SEQ ID NO: 138487 - DNA, 492 bp, synthetic construct
  misc_feature 1..492: note = Description of Artificial Sequence: Synthetic coding sequence
  source 1..492: mol_type = other DNA
atgtctaataaggaggggtcgggaggattcaggaagcgcaaacatgataacttccctcataatcagagacgagaggggaaggacgttaattcatccagcccagtgatgctggctttcaagtcctttcaacaggagctcgacgcacgccatgataaatacgaacggctggtaaagctctctcgcgatataacggtggaaagcaagaggacaatttttcttctccaccgtatcacgagtagccagtatctggatcattcagctcctgacatggaggacattctgaccgaaagtgaaattaagcttgatggcgttcgccagaagattttccaggttgcccaggaattgagcggtgaggatatgcaccaatttcatcgcgcaattacaaccggcttacaggagtacgtggaggcagtgtcgttccagcatttcattaagacgaggagcctcataagcatggacgagatcaataagcagttgatctttacaacctag

SEQ ID NO: 138488 - DNA, 273 bp, synthetic construct
  misc_feature 1..273: note = Description of Artificial Sequence: Synthetic coding sequence
  source 1..273: mol_type = other DNA
atggaccctctgagagcccagcagctcgccgccgagttagaggtcgaaatgatggctgatatgtacaaccgaatgacctccgcctgccacaggaagtgtgtacctccccactacaaggaagctgaactgtccaaaggcgagagcgtttgcctggatcggtgtgtgtccaagtacctcgacatacacgagaggatgggaaagaaacttaccgaactttccatgcaagatgaagaattgatgaaaagggtgcagcagtctagtggccctgcttag

SEQ ID NO: 138489 - DNA, 273 bp, synthetic construct
  misc_feature 1..273: note = Description of Artificial Sequence: Synthetic coding sequence
  source 1..273: mol_type = other DNA
atggaccccctgcgcgcccagcaactcgcggccgagctggaggtcgaaatgatggctgacatgtataaccgaatgaccagcgcatgtcaccgtaagtgcgtgcccccccactataaggaggcggagctgagtaaaggggaatccgtatgtttggacaggtgcgtgagcaagtatttggacatccatgaaaggatggggaaaaagctcacagaattgtccatgcaggatgaggagctgatgaagcgcgttcaacaatctagcggccccgcgtag

SEQ ID NO: 138490 - DNA, 273 bp, synthetic construct
  misc_feature 1..273: note = Description of Artificial Sequence: Synthetic coding sequence
  source 1..273: mol_type = other DNA
atggatcctttgagagcgcagcaattggccgcagaactggaggtggagatgatggctgatatgtacaatcgtatgacttcagcttgtcatcgcaagtgcgtgcctccccactacaaagaggccgagctgagcaagggagagagtgtgtgtttggatagatgcgtgtcaaagtatctcgatatccatgagcggatgggaaaaaaactcaccgaattgagtatgcaggatgaggaactgatgaagagagtccaacagtcatccgggcccgcctag

SEQ ID NO: 138491 - DNA, 927 bp, synthetic construct
  misc_feature 1..927: note = Description of Artificial Sequence: Synthetic coding sequence
  source 1..927: mol_type = other DNA
atgaagcattatgaagtcgaaatactcgacgccaaaacacgggagaaactctgctttctcgacaaagtcgaaccgcatgccaccattgccgagattaagaacctgttcactaagacacacccacaatggtatccagcacgacagtctttgagattggaccccaaaggcaaaagccttaaagatgaagatgtgctgcagaagcttccggtgggcactactgcaaccctctattttcgcgacttgggagcccagatcagttgggtcaccgtgttcctaacagaatacgcgggtccactgttcatctacctgctgttctatttccgcgtgcccttcatatacgggcataagtatgatttcacttcatcacgccataccgtggtccatctggcgtgcatttgtcattcgttccactacattaaaagactgctggaaacgctgtttgtccaccgcttctctcacggcaccatgccgctgagaaatattttcaagaactgcacgtattactggggcttcgctgcttggatggcttattacatcaatcatcctctttatacccctccaacgtacggggcccaacaagtaaaacttgctttggcaatttttgtaatctgtcagcttggcaacttcagtattcatatggctctgcgagatctgcgcccagctggttccaaaactcgcaagatcccttatcccaccaagaatccatttacctggcttttcctgctagtaagttgccccaattacacctacgaagtgggaagttggatcggcttcgcaatcatgactcagtgtctgcctgtggcactcttcagcttggtggggttcacgcaaatgaccatttgggcaaaaggcaaacatagaagctacctgaaggagttcagagactaccctcccctcaggatgcctattatacctttcctactatag

SEQ ID NO: 138492 - DNA, 516 bp, synthetic construct
  misc_feature 1..516: note = Description of Artificial Sequence: Synthetic coding sequence
  source 1..516: mol_type = other DNA
atggaagaatacgccagagaaccatgcccgtggagaatagtggatgactgtggcggtgctttcacaatgggtaccattggcggcggaatctttcaggccataaagggctttcgaaactccccagtcggggtgaaccacaggttgcgcggaagtctaacagccatcaagacacgggccccgcagctcggaggatcttttgcagtgtggggcggactgtttagtatgattgactgcagcatggtccaggtacgagggaaagaggacccatggaatagcataacctctggcgcccttacaggcgcaatattggctgcccgtaacggccccgtggccatggtgggcagtgcagctatgggcggcatcctgctggccctcatagagggtgctggcattctgcttactaggttcgcctccgcacagttcccaaacggtcctcagttcgcagaggaccctagtcaattgcccagtacccagctgccctcctctcctttcggtgactatagacagtaccaatag

SEQ ID NO: 138493 - DNA, 519 bp, synthetic construct
  misc_feature 1..519: note = Description of Artificial Sequence: Synthetic coding sequence
  source 1..519: mol_type = other DNA
atggaagaatacgcccgcgagccgtgtccatggcgaattgtagatgactgcggtggagcatttaccatgggtgtaatcgggggaggcgtctttcaggctataaagggctttagaaacgcaccggtcggcatcaggcacagactgaggggctcagccaatgctgtgcggattagggcacctcagatcgggggatcattcgccgtgtgggggggcttgttttcaacaattgactgtggcttggtgcggctcagggggaaggaggatccgtggaacagtataacgagtggggctctgacaggggctgtcctggccgcacggagtggccccctcgccatggtcggatccgcaatgatgggcggaatcctgctggccctgattgagggcgtgggtattctgctgacacggtatacagcccagcagttccggaacgccccaccattcctggaggacccaagccaactgcctcctaaagacggtacccccgccccaggctatccatcctaccagcagtaccattag

SEQ ID NO: 138494 - DNA, 669 bp, synthetic construct
  misc_feature 1..669: note = Description of Artificial Sequence: Synthetic coding sequence
  source 1..669: mol_type = other DNA
atggaagaatacgctcgcgaaccctgtccatggaggatcgtcgacgactgcggaggagcctttacgatgggagttattggggggggggtgttccaggcaatcaagggtttccggaacgcaccggtgtgtagactgctgtcagaagcccccctctttatctattcatgctctcgctcagtgtctcctaccgtcaatgtgagcagtgaaagggccgaaagtagacccacactattcatggccgtcagcctgcacatggcatggtgcctggcccacatcggtatcaggcatcgcctaagaggctccgcgaacgcagttaggattcgagccccccagataggcggcagcttcgctgtctggggcgggctgttctctacgatagactgcggcctggtgcgcctgcgcggcaaggaggatccatggaacagtatcacaagcggcgccctgaccggcgccgtgctcgccgcaaggtctggccccctggctatggtggggtccgctatgatgggcggtattcttctagcgctcatagagggggtcgggatcctgctaaccagatacaccgcacagcagtttaggaacgcccctccgttccttgaagacccttctcagctccccccgaaagatggcacacccgcccccggttatcccagttaccagcagtaccactag

SEQ ID NO: 138495 - DNA, 585 bp, synthetic construct
  misc_feature 1..585: note = Description of Artificial Sequence: Synthetic coding sequence
  source 1..585: mol_type = other DNA
atggccgccgcagctcctaacgctgggggaagtgcgccagaaaccgcaggatccgcagaggcaccgctgcagtactctttactcctgcagtatctcgtgggggacaaaagacagccacggctcctggagcccggctctctgggcggcattccttcccccgccaagtcagaggagcagaaaatgattgagaaggcaatggaaagctgcgccttcaaggccgccttggcctgcgtgggtggcttcgtgctgggaggggcatttggggtgtttacagctggtatcgacaccaatgtgggtttcgatcccaaagatccttataggaccccaacagccaaggaggtgctgaaggatatggggcagcgcggaatgagttatgctaaaaactttgctatcgtgggagccatgttttcttgcacagagtgcctgattgaatcctacagaggcacctctgattggaagaattccgtaattagtgggtgtatcacagggggcgccatcgggttcagagctggactgaaggccggggcgattgggtgcggggggttcgctgctttctcagcggcaatcgactattatcttcgctag

SEQ ID NO: 138496 - DNA, 630 bp, synthetic construct
  misc_feature 1..630: note = Description of Artificial Sequence: Synthetic coding sequence
  source 1..630: mol_type = other DNA
atggaaggcggtggcggcagcggcaataagactactgggggccttgccgggttctttggtgccggcggagctggctattctcacgcagacttagctggcgtgccactgaccggcatgaatccactttcgccctacttgaatgtagacccgagatatctggtccaggacacagatgaattcatcctgcctacaggcgccaacaaaacccgcggtcgctttgagctggccttttttaccattggcggatgctgcatgaccggagcagcctttggggctatgaacggtctgcggctggggctcaaggagacccagaatatggcctggtcaaagccacggaacgtccagattctcaatatggtcactcggcagggcgcgctctgggccaacactttgggttccttggcgcttctgtactcagcttttggtgtgatcattgagaagacacggggcgccgaagacgatttaaacacggtggcggcgggaacaatgacagggatgctatataaatgcacaggcggattgcggggcatcgcaagaggtggcctgacagggctgaccctcaccagcctgtacgccctctacaacaattgggagcacatgaaaggtagcctgctccagcagagcctatag

SEQ ID NO: 138497 - DNA, 486 bp, synthetic construct
  misc_feature 1..486: note = Description of Artificial Sequence: Synthetic coding sequence
  source 1..486: mol_type = other DNA
atggaaggtggcggcggtagcgggaataagaccaccggcggtctggcgggctttttcggagctggaggagccggatattcacatgccgacctcgctggtgtgcccttgaccgggatgaacccactcagcccttatctgaacgtggatcctaggtacctggtccaggataccgacgagtttatcctcccgacaggcgccaacaagacccgcggtaggttcgagcttgcgtttttcaccatcggaggatgctgcatgactgccctcttgtattctgcttttggcgtgatcattgaaaaaacccgcggggccgaggatgacctgaatacagtcgccgctggaacgatgaccggcatgttgtacaaatgtacaggcggtttaagaggtatcgccagggggggcctgacggggctgactctcacctcactgtatgctctctacaataactgggaacacatgaagggcagcctgctgcagcagagcctgtag

SEQ ID NO: 138498 - DNA, 519 bp, synthetic construct
  misc_feature 1..519: note = Description of Artificial Sequence: Synthetic coding sequence
  source 1..519: mol_type = other DNA
atggaaggcggagggggaagcggcaataaaacaactggtggtctcgccggcttctttggagccggtggtgcgggatattcccacgctgatctcgctggggtgcctcttaccggcatgaaccccttaagtccttatctcaatgtggatcctcggtacctggttcaagatacagatgagttcatcttgccaaccggagccaacaagaccagagggaggtttgaacttgcatttttcacaatcggggggtgttgcatgaccggggccctgtgggctaacaccttgggctcattagcactcctatacagcgcattcggcgtgatcatagaaaagacccgaggcgcagaagacgatctgaatacagttgccgctgggaccatgaccggcatgctgtacaaatgtactgggggattgagaggaatagcgcgaggcggactgactggcctgaccctaacgagcctctatgcgctgtataataattgggagcatatgaagggcagcctcttacagcagtctctctag

SEQ ID NO: 138499 - DNA, 381 bp, synthetic construct
  misc_feature 1..381: note = Description of Artificial Sequence: Synthetic coding sequence
  source 1..381: mol_type = other DNA
atgacgggagccgcattcggcgccatgaacggcttacgcttgggcctgaaagagacacagaacatggcctggagcaaacctagaaatgtgcaaatcctgaatatggtgacgcggcagggagctctctgggcaaatacactcggcagccttgccctcctctattcagcattcggcgtgatcatagaaaaaaccaggggagcagaggacgatctcaataccgtcgccgcgggaacaatgaccggaatgctgtacaaatgtaccgcaagtgccagtcagtccgccaggatagccgacggcctgatttttaccgagttttgtagcgtcgcgaggctgcagggttccgggactattcttgcccattacaatctacatctcccgtag

SEQ ID NO: 138500 - DNA, 324 bp, synthetic construct
  misc_feature 1..324: note = Description of Artificial Sequence: Synthetic coding sequence
  source 1..324: mol_type = other DNA
taaggaggtagtgggaataagacaacaggtggcctggccggatttttcggagctggtggagccggatatagccacgctgatctggcgggcgtgccccctctgctgtactcagctttcggtgtcattatcgagaaaacccggggggcagaggatgatctgaacaccgtagccgctggaactatgacgggcatgttatataagtgtacaggcggattgagagggatcgccagaggcggactcaccggcctaacattgaccagcctgtacgctctgtataacaactgggaacacatgaaaggaagtttactgcagcagtcgctctag

SEQ ID NO: 138501 - DNA, 1359 bp, synthetic construct
  misc_feature 1..1359: note = Description of Artificial Sequence: Synthetic coding sequence
  source 1..1359: mol_type = other DNA
atggccgccgccgcattgcgcagcggttggtgcagatgtcctcgccggtgcctgggaagcggcatccagtttttgtcatcccataatttgccacatgggagtacgtaccagatgcgcagacccgggggcgagctgccgctttcaaagtcttactcaagcggaaaccgcaaggggttcctctctggtctgttggataacgttaagcaggagctggccaagaacaaggaaatgaaagaatcaattaagaagttcagagacgaagctcgtcgcctggaagagtctgatgtactccaggaggcccgcagaaagtacaaaactattgaatcagaaaccgtgcgcaccagcgaggttttgcggaagaagcttggggagttgactggcacggtgaaggagtcattacacgaggtttccaagtcagatctgggaagaaaaattaaggaaggggttgaggaagcagcaaagaccgccaagcaaagcgcagaatctgtgtccaagggcggcgaaaagcttggccgcacagcggccttccgagcactgtctcaaggcgttgagagcgtcaaaaaagagattgatgactccgtgctcgggcagaccggcccatatcgacgcccacagagattgagaaagcggactgagtttgcgggcgataaatttaaggaggaaaaagtgttcgaaccgaacgaggaagcccttggggttgtcctccacaaggactcaaagtggtaccagcaatggaaggatttcaaggagaacaacgtcgtgttcaacagattctttgagatgaaaatgaagtatgacgaatctgataatgctttcatccgcgcttcaagggcgttaacggataaagtgacggatttactcggtggtctcttcagtaaaaccgagatgtccgaggtgctgactgaaatcctgcgggtggaccccgcgtttgacaaggacagatttctgaaacagtgcgaaaatgacattatccccaacgtgctcgaggccatgatcagcggagaactggacatactgaaggactggtgttacgaggccacatattcccagctagcccatcctatccagcaggctaaggctctgggactgcagtttcatagcagaatcctcgacattgataatgtggacctggctatgggcaagatgatggagcaggggcctgtgttaatcatcacctttcaagctcagctagtcatggtggttcgtaatcccaaaggcgaagtggtggaaggagatccagacaaagtgttgagaatgctatacgtgtgggcactctgccgcgaccaagacgaacttaatccgtatgcagcatggcggctgctggatatatctgctagctccacagaacagatactctag

SEQ ID NO: 138502 - DNA, 294 bp, synthetic construct
  misc_feature 1..294: note = Description of Artificial Sequence: Synthetic coding sequence
  source 1..294: mol_type = other DNA
atggacagctcctccagtagttctgcggccgggctgggagcagttgacccccagctgcagcactttatcgaggtagagactcagaagcagcggtttcagcagttagttcatcagatgaccgaattgtgttgggagaagtgtatggataagcctggccctaagctcgatagtagagcggaggcctgctttgtcaattgcgtcgaaaggttcatagatacgtcacagttcatactgaatagactggaacagacccaaaaatctaagcccgtattctctgagtctctaagtgattag

SEQ ID NO: 138503 - DNA, 270 bp, synthetic construct
  misc_feature 1..270: note = Description of Artificial Sequence: Synthetic coding sequence
  source 1..270: mol_type = other DNA
atggcggcacagatcccagagtctgatcagatcaagcaattcaaggaatttttaggaacctacaacaagctgacggagacttgttttctggattgcgtgaaggacttcacaactcgggaagtcaaacccgaggagaccacatgcagcgagcactgtctccagaaatacctgaagatgacacaacgtatttctatgcgattccaagagtaccatattcagcagaatgaggctctagccgccaaggctggtcttctgggccagccccgctag

SEQ ID NO: 138504 - DNA, 270 bp, synthetic construct
  misc_feature 1..270: note = Description of Artificial Sequence: Synthetic coding sequence
  source 1..270: mol_type = other DNA
atggcagcccagattcccgaatctgaccagatcaaacagttcaaggagttcctcgggacctacaataagttgactgaaacctgttttctggattgtgtaaaagacttcactacaagagaagtgaagcccgaggaaacaacttgctctgaacactgtctgcagaagtacttgaagatgacccaaagaataagtatgaggtttcaggagtatcatatccagcagaatgaagcgttggctgctaaagccggcctcctcggccaaccaagatag

SEQ ID NO: 138505 - DNA, 135 bp, synthetic construct
  misc_feature 1..135: note = Description of Artificial Sequence: Synthetic coding sequence
  source 1..135: mol_type = other DNA
atggccgcccagatacccgaatcggaccaaataaagcagttcaaggagttcctgggaacttataacaagctgaccgaaacatgttttctggactgcgtcaaagacttcactacccgcgaagttaagcctgaatag

SEQ ID NO: 138506 - DNA, 270 bp, synthetic construct
  misc_feature 1..270: note = Description of Artificial Sequence: Synthetic coding sequence
  source 1..270: mol_type = other DNA
atggcagcccagattcccgagtcggatcagataaagcagttcaaggaattcctgggcacttacaacaaacttaccgagacatgctttctagactgcgtcaaagacttcacgactagagaggtcaaacctgaagagaccacgtgctctgaacactgcctgcagaaatatctgaaaatgacacagcgtatcagcatgaggtttcaggaataccacattcaacagaatgaagccctggctgctaaagccggcttgctcgggcagccgcggtag

SEQ ID NO: 138507 - DNA, 270 bp, synthetic construct
  misc_feature 1..270: note = Description of Artificial Sequence: Synthetic coding sequence
  source 1..270: mol_type = other DNA
atggcggcccagatacccgaaagcgaccagattaagcagtttaaggagtttctcggtacatacaacaaacttacagagacgtgttttctggactgtgtcaaggacttcacgacgagggaagtgaagcctgaggaaacaacctgctcagagcactgcttgcagaagtacttaaagatgactcaacggatcagcatgaggtttcaggagtaccatatacaacaaaatgaggcactggccgccaaagccggcctcttggggcagcctcgctag

SEQ ID NO: 138508 - DNA, 381 bp, synthetic construct
  misc_feature 1..381: note = Description of Artificial Sequence: Synthetic coding sequence
  source 1..381: mol_type = other DNA
atgcctttctttggaaacacattctcgcccaagaagacgccaccacggaaaagcgcgtctctgtctaatcttcattcgttggatagatcaaccagggaggtagaattgggcctcgagtatggcagtcccacaatgaatctggccgggcaatccctcaagttcgagaacggtcagtggatcgctgagaccggggtttccgggggagtagatcggagagaagtgcaacggcttcggcggcgcaatcaacagttggaggaagaaaacaatctgcttcgcctgaaggttgacattctgctcgacatgctgtctgaatccaccgccgagtctcatttaatggaaaaagaactagacgaactaaggatttcccgaaagagaaaatag

SEQ ID NO: 138509 - DNA, 1086 bp, synthetic construct
  misc_feature 1..1086: note = Description of Artificial Sequence: Synthetic coding sequence
  source 1..1086: mol_type = other DNA
atggggaacgtgttagccgcatcatctccacccgccggaccgccgcccccacccgcgcccgcgttggtaggcctgccaccaccgcctccgtccccccctggctttacactcccgccactggggggctctctgggtgccggcacctctacctcccggtcatccgaacgcacgcctggcgccgctacagcttcagcgtctggagccgccgaagatggcgcttgcggttgcctgcctaatcccggaacattcgaagagtgccaccgcaagtgcaaggagctgttccccattcagatggagggagtgaagctgactgtgaataaagggttaagtaaccactttcaggtgaatcacactgtggccctcagcacgataggagaaagtaactatcattttggagtcacctatgttggcaccaaacagctcagcccaacggaagccttccccgtgcttgtgggggatatggataattctgggtctctcaatgcgcaggtcatccaccagctcggccctggcctaagaagcaaaatggccatccagacccagcagtccaagttcgtgaattggcaggtagatggtgagtaccggggttccgactttaccgccgccgtcactctggggaacccagacgtcctcgtcggatctggcatcttggttgctcactatctgcagtcaataaccccttgcctggctcttgggggtgagctggtatatcaccggaggccaggtgaagagggaaccgtaatgagtctggccggcaaatacactctcaacaactggcttgccaccgtgacactaggacaagcagggatgcacgccacctactatcacaaagcaagtgaccagctccaggtcggggtcgagttcgaggcctcgacccggatgcaggacacatcagtgtcatttggatatcagctcgatctacctaaggctaatctgttatttaaaggaagcgttgacagcaactggatcgtcggagccactttagaaaagaaactaccacctcttcccctgaccctggcactaggagcatttctaaaccatagaaagaacaagttccagtgcgggttcgggctcacaatcggatag

SEQ ID NO: 138510 - DNA, 1086 bp, synthetic construct
  misc_feature 1..1086: note = Description of Artificial Sequence: Synthetic coding sequence
  source 1..1086: mol_type = other DNA
atggggaacgttcttgcggcatcttccccaccagccggccctccacctcccccagccccagctcttgtgggcttaccacccccccctccctcccccccgggtttcacgctaccgcctctgggcggcagtctgggcgctggcacttccacttcgcgaagttctgaaagaacacccggggctgccacagccagtgccagtggcgcagctgaagatggtgcatgcggttgcctccccaacccgggaacctttgaagagtgccacaggaaatgcaaagagttattccccattcagatggaaggggttaagttgacagtcaacaaggggctgagtaatcattttcaggtcaaccacactgtagccttgtctacaataggcgaatctaactaccactttggtgtgacatacgttggcacaaagcagctgagtccaacggaggcctttcctgtgctcgtgggagacatggacaactccgggagtctgaatgcccaggtgatccaccagctcggtcctgggttacggagcaaaatggccatccaaacccagcagtccaaattcgtcaattggcaggtggacggggaatatagaggttccgacttcacagccgctgtcactttaggaaacccagacgtgcttgtcggcagcggcattctggttgctcattatctacagtctatcacaccttgccttgcgctgggcggtgaactggtataccacagaagacccggtgaggaaggtacagtcatgtccctagcagggaagtacactctaaacaactggctggctactgtgaccctcggacaagctggaatgcatgctacatattaccataaggcgtccgaccagctgcaagtaggcgtggaattcgaagccagtactaggatgcaggacactagtgtgtcatttggttaccagctggatctcccaaaggccaatctgttatttaagggcagcgtagactccaactggattgtgggagctaccctggaaaagaagttgcccccacttccgctgacccttgctctgggcgctttcctcaaccacaggaagaacaagtttcagtgcgggttcggtttaaccatcggatag

SEQ ID NO: 138511 - DNA, 1086 bp, synthetic construct
  misc_feature 1..1086: note = Description of Artificial Sequence: Synthetic coding sequence
  source 1..1086: mol_type = other DNA
atgggaaatgtgctggcggcctcgtccccccccgcgggcccaccaccccccccagcgccagcgttggttggactccctccaccacccccctcaccacccgggttcaccctgccacctttgggcggaagcttgggggctggtacctcgacatccagatcttcagagcgcacccctggggccgctacagcctccgcctctggcgccgcagaggacggcgcctgtgggtgtctgccaaaccctgggactttcgaggaatgtcatcggaagtgcaaagagcttttccccatccagatggaaggcgtaaagcttaccgtcaataagggcctctctaatcacttccaagttaatcacacagtggcactcagcacaatcggggaatcaaactaccacttcggtgtgacttatgttggcactaagcagcttagtcccacagaggcgtttccagtcctcgtcggagatatggataattccggctccctcaacgcccaggtgatccatcagctgggaccaggactgaggtctaagatggcaattcagacacagcagtccaaattcgtgaattggcaggtggacggggagtacagagggagcgatttcacggcagccgttacgttggggaaccccgacgtcttggtgggttccgggatcctggtcgcccactacctgcagtcaattaccccctgcttggctctcggcggggagctggtttatcatcgcaggccaggcgaggaagggaccgtcatgagtttggctggcaaatacacccttaacaactggttggctaccgttacactggggcaagctgggatgcatgcaacgtattaccataaggctagcgaccaacttcaggtcggggtggagttcgaagccagtactcgcatgcaggatacctcagtatctttcggctaccagctggatttgcctaaggctaacctgctgttcaaaggtagcgtggacagtaattggatcgtaggggctactctagagaagaagctgcctcccctgcccctgactctcgccctcggcgcatttctcaatcatcggaaaaacaaatttcagtgtgggttcggactaacaatcgggtag

SEQ ID NO: 138512 - DNA, 453 bp, synthetic construct
  misc_feature 1..453: note = Description of Artificial Sequence: Synthetic coding sequence
  source 1..453: mol_type = other DNA
atgccttcatcgggatcagtatcccggagtcgccagcgaggccggagcatggcctctcggggattcgatggtagtcggaggggatcactcagaagagccggagcgcgagaaccaccatcggaggtgattgaggctgccgctcaggccagcggatcgtgttggagtagtcccttctttagtgcatctactccctctgcagccgctacaggggtcccaggcccaactgacatggcagccgtcctacagcaagtgctcgaacgaaccgagctgaataaactaccgaaatctgtacaaaacaagcttgagaaatttctggccgatcagcaaagtgaaatcgatgggctgaagggccgtcatgaaaaatttaaagtggagagcgaacagcagtatttcgagattgagaagcgattatcccactcccaggagagattggttaatgagacccgcgaatag

SEQ ID NO: 138513 - DNA, 7092 bp, synthetic construct
  misc_feature 1..7092: note = Description of Artificial Sequence: Synthetic coding sequence
  source 1..7092: mol_type = other DNA
atggccgctgtcttgcaacaggtattagaacggaccgaactgaacaaactgcctaaatccgttcagaataaactggaaaagttccttgccgatcagcagtccgagatcgacgggctgaagggccggcatgaaaagttcaaggttgagtccgagcagcaatactttgagatagaaaagagactgagccacagccaggaacgcctggtcaatgagaccagggaatgccaatcactgagactagagctcgagaagctgaacaatcaattgaaagcactgaccgagaagaacaaagaactggagatagcccaggacaggaacattgccatccagtcccagtttacaagaacaaaggaggagttggaagcagaaaaacgggacttgattaggacaaatgagcggctgtcccaagaactagaatacctcactgaagatgtgaagcgccttaatgagaagctcaaggagtctaacaccactaaaggcgagctgcaactgaagttagatgagttgcaggcctccgatgtgtctgtgaaataccgcgagaaaaggctcgagcaagagaaagagctgctgcactcacagaatacatggctcaataccgaactgaaaaccaagactgacgaactgctggccctagggcgggaaaaaggaaacgaaatactcgaactgaagtgcaaccttgagaacaagaaggaggaagtttctagactggaagagcagatgaacggccttaagacctcaaacgagcacctccaaaaacacgtggaggaccttttaactaaactgaaggaggccaaggagcagcaggcatcaatggaagagaagtttcataatgaactcaatgcacatatcaagctgtctaacttgtataaaagcgccgcagatgactcggaggcgaagtctaacgagctcactcgcgccgtcgaggaactccataaactgctgaaggaagccggggaagcaaacaaagccatccaagaccacttactggaagttgaacaatcaaaggaccagatggaaaaggaaatgctcgaaaagatcggtcggctggagaaggagctagaaaacgcaaacgacctgttgagcgcaactaagcgtaaaggggcaatcctctctgaggaggaattggctgccatgagccccacagccgcggccgtagcgaagatcgttaaacccggtatgaagcttaccgagttgtataacgcttacgtagagacccaagatcagctgctgttggagaagttagaaaataaaagaattaataagtacttggacgagatcgttaaggaggtggaggcaaaagccccaatcctgaagcgccagcgagaagagtatgaacgcgcacaaaaagccgtggccagcctgagcgttaagcttgagcaggcgatgaaggagatacagagattgcaggaagacacagataaggcaaataaacagagttctgtcctggaaagggataaccggagaatggagattcaggtgaaggatctgtcccaacagatacgagtgcttttaatggagctcgaggaggcccggggcaaccacgttattagggacgaggaggtgagtagtgccgatatctcttcctcatctgaggtaatttctcagcatctggtctcctaccggaacatcgaggagctgcagcagcagaatcaacgcctgctagtcgccctcagggaactcggagaaacccgggagcgggaagagcaggagaccacgtcctccaaaataaccgagcttcagctgaagctggagtcagcactgactgaacttgaacagctgcggaagtctcgacaacatcaaatgcagcttgtggatagtatcgtgcgccagagggacatgtacagaatcctgctgagtcaaacaactggggttgcaatcccacttcatgcatccagcctggatgatgtcagcctcgcaagcaccccaaagcggcctagtacttcacagacagtgagcacacctgcccctgtgccagtgatcgagagtaccgaggctatcgaagccaaggccgcactcaaacagcttcaggaaatatttgagaattataaaaaagagaaggctgagaatgagaaaatccaaaacgaacaattggagaaattgcaggaacaggtcacagatctccgctcccagaatacaaagattagcacccagctggacttcgcatcgaaaagatacgagatgttgcaggataacgttgagggttatagaagggagatcacatcactccacgaacggaatcagaaattgaccgccacaactcagaagcaggagcagataatcaacaccatgacacaggatctacgcggagcaaatgagaagctggcagtagccgaggtgcgagcagagaacctgaagaaggagaaggaaatgctcaagctgagtgaggttaggctatcccaacagagggagtctttgctggccgagcagcgtggccagaacctgcttctgacaaatctgcaaacaatccagggaatactcgagaggtctgagacggagaccaagcagaggctttccagccagattgagaagctggaacacgagattagccacctgaaaaagaagctggagaatgaagtggaacagagacacaccctaactagaaacttggacgttcagctgcttgacaccaaaagacagctggacaccgagaccaacctgcatcttaataccaaggaactgctcaagaatgcccagaaggagatcgcaactctgaaacagcacttaagcaatatggaagtgcaggtcgcgtctcaaagttctcagcgcaccggcaagggccagccatccaataaggaagatgtggatgatcttgtatcacagctgagacagacggaggagcaagtcaatgacctgaaggaacgattaaagacctcaacatctaacgtggagcagtatcaggctatggtcaccagcctcgaagagtcattaaacaaggagaaacaggtgactgaagaagtgagaaagaacatagaagtaagactgaaagagtcagccgagtttcaaacccagttagagaagaagctgatggaggtcgagaaggaaaagcaggaactccaagacgacaaaagaagagctatagagtccatggaacaacaactgtccgagctcaaaaagacactttccagcgtccagaatgaagtccaagaagcccttcagagggcatccaccgccctgtccaacgagcagcaggctcgcagagattgccaagaacaagcaaagatcgccgtggaggcccagaataagtatgagagggagctgatgcttcacgccgcagacgtcgaggcattgcaggctgctaaggagcaggtgagcaagatggcatcggtgcggcagcacctggaggagactacacaaaaggcagaatcacaactgctcgagtgcaaagcctcgtgggaggagcgtgaacggatgttaaaggatgaggtaagtaagtgtgtgtgtcgttgcgaggatcttgagaaacagaacagattactgcacgatcaaatcgagaagctgtcagataaagttgtggcctctgtcaaagaaggcgtccagggaccccttaacgtgtcactctctgaagaggggaagagccaggagcaaatcctcgaaatccttagattcattaggcgggaaaaggaaatcgcggagaccaggtttgaggtggctcaagttgaaagcctaaggtataggcaacgcgtggagctgctcgagagggagttgcaagaactgcaggacagcctaaacgccgagcgtgaaaaagttcaggtcacagcgaagaccatggcccaacacgaagagctcatgaagaaaacagaaacaatgaatgtggtaatggaaaccaataaaatgttgcgggaagagaaggagaggctggagcaggatctccagcagatgcaggccaaagtaaggaaactcgaactggatatactaccacttcaggaagccaacgccgagctgtctgagaaaagtgggatgctacaggccgaaaagaagctgcttgaagaggacgtcaagcgatggaaggctcgcaatcagcatttggtaagccagcaaaaagatcccgacactgaggaatatagaaagctgttatctgagaaggaagttcataccaagcgcattcagcaactcaccgaggagatcggccggctgaaggctgaaatcgcgaggtccaacgctagcctcaccaataatcagaacctgattcaatccctaaaggaggatctaaataaagtgaggaccgagaaagagacgattcaaaaagatctggatgccaaaattattgatattcaagagaaggtgaagactattacacaggtcaaaaaaattggtaggagatacaaaacacagtatgaggaactaaaggcgcaacaggacaaagtgatggagacgagtgcccagtctagtggcgatcaccaggagcaacacgtgtccgtgcaggagatgcaggagctcaaggagacccttaatcaggccgaaaccaaatcaaaatcccttgaatcacaggttgaaaacttgcaaaaaaccttgagcgagaaagaaaccgaggctagaaaccttcaggagcagacagtccagttacagtccgaattgagtagactgagacaggacctgcaggaccgcaccacacaggaagagcagttaagacagcaaatcacggaaaaagaggaaaaaactaggaaggcaatagtagcggctaaatcaaaaattgctcacctcgctggagtgaaggatcagctcacgaaagagaacgaggagttaaagcagaggaacggggccttggatcagcagaaggatgaactggatgttagaatcaccgcgctaaaatcacaatacgagggcagaatcagtcggctggagcgagagctgcgcgaacaccaggaaagacacttggaacagcgcgatgaacctcaggagcccagcaataaagtgcctgaacagcagcggcagattaccctaaagacaacgcccgcctcaggagagcgtggaatcgccagcaccagcgatccccctactgcaaacatcaaaccaactcctgtagtgagtacaccctcaaaagtaactgctgctgcaatggcaggcaacaagagcactccccgagccagtatcaggcccatggttacacccgctaccgtgaccaaccccaccactacacctacagcgacagtcatgccaactacacaggtggagtcccaagaggctatgcaatccgagggtcctgtcgaacacgtccccgttttcggcagtaccagtggttctgtaagatctacttcacccaacgtgcaaccctctattagccaaccaatcctcaccgtgcagcagcagacccaagccactgccttcgttcagcccacccagcaatctcatccccagattgaaccggcaaatcaggagttgtcctctaacattgtcgaagttgttcagtcatctcctgtggaaaggccaagcacgtccacagccgtcttcggaaccgttagtgctactccctcttcatctttgcctaagaggacaagagaggaggaggaggacagcaccatcgaagctagcgatcaggtcagcgatgacacagtcgagatgccattgcctaagaagctaaagtcggtaacccccgtgggaacagaggaggaggttatggcggaagagtccaccgacggagaagtagagactcaggtctataaccaggatagtcaggacagtatcggagaaggagttactcagggggattatacccccatggaggactccgaggagaccagccagagcctgcagatcgacctcgggcccttgcagtctgaccaacagaccactacatccagccaggatggacaggggaaaggggatgacgtcatcgtgattgacagtgatgacgaggaagaggacgatgatgagaacgacggggagcacgaagactacgaagaggatgaagaggacgatgacgatgatgaggacgacacgggcatgggggacgaaggagaggacagcaacgagggcacaggcagtgctgacggcaatgacggctacgaagctgatgacgcagaggggggcgacggtaccgatccaggtacagaaaccgaggaaagcatgggaggtggggagggcaatcatcgggctgccgattctcagaactccggagaaggcaacaccggggcagcggagtcatcgttttcccaggaagtctcccgggagcagcagcctagctctgcctctgagaggcaggcaccacgggcccctcagagtcccagacggccccctcaccccttgcctcctcgtttgacaatccatgcacctccgcaggagttgggaccacccgtccaaaggatccaaatgacccggcgacagtccgtgggccgcggcctgcagttgacacctggcatcggcggaatgcagcagcatttttttgacgatgaggaccggaccgtgccgtctactcccacactggtcgtgccccatcgaacagacggtttcgctgaagcgatccacagcccacaagtcgctggtgttccccggttcaggttcggaccgcccgaggatatgcctcaaacatcatcctctcactccgatctcggccagctcgcatcccagggcgggcttggtatgtacgagacaccactattcctcgcccacgaagaagagagtggcggccggtccgtccccacgacccctttgcaggtggctgcgccagtgaccgtttttactgagtcgaccactagtgacgccagcgaacatgccagccagagcgtccctatggtcaccactagtacgggaaccctcagcacaaccaatgaaaccgcgactggcgatgacggcgacgaggttttcgtcgaggctgaaagtgagggtataagtagcgaagctggactggaaatcgactcccagcaggaagaagaaccagtgcaagctagcgatgaatccgatcttccgagcacaagccaggatcctccttcttcctcatctgtcgatacaagctccagccagccaaagccctttcgacgggtcagactgcaaactacactgcgccaaggcgttcgcggaaggcagttcaaccgtcagagaggagtcagtcatgcaatgggtggccgtggtgggatcaaccggggcaatatcaactag

SEQ ID NO: 138514 - DNA, 453 bp, synthetic construct
  misc_feature 1..453: note = Description of Artificial Sequence: Synthetic coding sequence
  source 1..453: mol_type = other DNA
atgccctcatctggctcagtgtctcgctctcgccaacggggcaggagcatggcatcccggggcttcgacgggtccagaagaggctctctgaggcgggctggggccagagaaccaccctccgaagtaatcgaagccgcggctcaggcctctggttcatgttggagcagcccatttttcagtgcctccacccccagcgcggccgcgactggcgtgcctggacccaccgacatggccgcagtgctccaacaggtgctggaacgaaccgagctgaacaaactgccgaagtcagtacagaacaaactcgaaaagttcctggctgatcaacaaagtgagattgatggacttaagggaagacacgagaaattcaaggtagagtctgagcagcagtacttcgagattgagaagcggttatctcacagtcaggagagattggtcaatgagactcgagaatag

SEQ ID NO: 138515 - DNA, 510 bp, synthetic construct
  misc_feature 1..510: note = Description of Artificial Sequence: Synthetic coding sequence
  source 1..510: mol_type = other DNA
atggcccctccgtgggtgcctgccatgggattcactctggccccatcactgggatgcttcgtaggctcccgttttgtgcatggcgaaggattacgatggtacgctggactgcaaaaaccgtcatggcacccacctcactgggtgttgggccctgtttggggaacgctttactctgcgatgggctacgggtcctatcttgtctggaaggaactcggggggttcacagagaaggcagtggtgcccctgggactgtataccggtcagctggctctgaattgggcttggccgcctatcttttttggagctcgccagatgggctgggcccttgtagatctgcttctggtgagcggcgctgctgccgctaccaccgtcgcttggtaccaggtcagcccactggctgcacgcttgttgtatccatacctggcatggctagcctttaccaccactctgaattattgcgtgtggcgggacaaccacggatggcgtggtggcaggcggttgccagaatag

SEQ ID NO: 138516 - DNA, 510 bp, synthetic construct
  misc_feature 1..510: note = Description of Artificial Sequence: Synthetic coding sequence
  source 1..510: mol_type = other DNA
atggcaccaccttgggtacccgctatgggtttcacccttgcgccttccttgggctgcttcgtggggtcccggtttgtacacggagaaggcctgcgatggtatgccggccttcagaagccatcctggcacccccctcactgggtcctcgggccggtttgggggactctctacagcgccatgggatatggatcgtatctcgtgtggaaggagctcggcgggttcactgagaaggccgtggttccgcttggcctctacaccggccaactcgccctgaattgggcgtggcctcccattttctttggggcaaggcagatgggctgggccctggtagacctgctacttgtgagtggcgccgcagcagccactactgtagcttggtatcaagtgtctccactggcggcaaggctgctatacccctatctcgcatggctggcctttacgactactctaaattattgcgtctggagggacaatcatggctggcgcgggggccggcggctgccggagtag

SEQ ID NO: 138517 - DNA, 309 bp, synthetic construct
  misc_feature 1..309: note = Description of Artificial Sequence: Synthetic coding sequence
  source 1..309: mol_type = other DNA
atggctccccacctactctggtgtcccacgaatgggctggggcttggcggttctccagccggccagtggggcggcgggagccattacagaggcctggtccctggcgagcccgctggtaggccacccgccttaccattgcccggcctggcgggcctgcacgaccatactcagctcctccgcatggctggtcagccctggctggcatggggaactgcagccgcccgcgtgtctgcccgcccaaccagagattgtagttgcacgtcgcgttgccaccatgcctgtgacgtggtggcagtgaccctgagctag

SEQ ID NO: 138518 - DNA, 324 bp, synthetic construct
  misc_feature 1..324: note = Description of Artificial Sequence: Synthetic coding sequence
  source 1..324: mol_type = other DNA
atggccccaccctgggtgcccgccatgggctttactctcgcccctagcctgggctgttttgtgggaagccgttttgtgcacggcgagggcctccggtggtatgcgggccttcagaaaccctcatggcatccaccccactgggtgcttgggcctgtatggggcactctgtactcagctatgggatacggtagttacctcgtatggaaggaactgggtggcttcacagagaaggcagtggtcccattaggactgtacacaggccagctcgccctgaactgggcttggcctccgatcttcttcggcgctcggcagatgggctggtag

SEQ ID NO: 138519 - DNA, 609 bp, synthetic construct
  misc_feature 1..609: note = Description of Artificial Sequence: Synthetic coding sequence
  source 1..609: mol_type = other DNA
atgtgctatggaaagtgcgcacggtgcattggacactcgctagttggcctggccctgctgtgcattgcagcaaacatcctgttgtatttcccaaatggggaaactaagtatgcatcggaaaaccatctgtctcgttttgtgtggttttttagtggaatcgtcggtggaggtctcctgatgttgctgcctgcattcgtcttcattgggctcgagcaggatgactgttgtgggtgctgtggacacgagaattgcgggaaaaggtgcgccatgctctcgagcgtcttggccgcccttattgggatcgcgggctccggctattgcgtcattgtggccgccctcggtctggctgagggtcccttatgtttggactctctcggacagtggaattacacctttgccagtacagaagggcaataccttctggacacttctacctggtccgagtgcactgagcctaagcacatcgtagagtggaacgtgtctctgttcagcatactactggccctcgggggcatcgagtttatcctctgccttatacaggtgatcaatggagtgttaggcgggatatgcggtttttgttgctctcatcagcaacagtatgactgctag

SEQ ID NO: 138520 - DNA, 699 bp, synthetic construct
  misc_feature 1..699: note = Description of Artificial Sequence: Synthetic coding sequence
  source 1..699: mol_type = other DNA
atgtgttatgggaaatgtgccaggtgcataggacattcactggtaggcctggcactgctctgtatcgccgccaacattcttctttatttccccaatggagagaccaagtatgcctccgaaaatcatctctccaggttcgtctggttctttagtggcatcgtgggcggcggattgctgatgctgctaccagcatttgtcttcattggactcgagcaggacgattgctgcggctgttgcggccatgaaaactgcggcaagagatgcgctatgctgtccagcgttctggctgcattaattgggatcgcggggtcgggatattgtgtgattgtcgcagcccttggtctcgccgaagggcccctgtgcctcgactcattaggccagtggaactacacctttgccagtacagaaggtcagtacctcctcgatacgtcaacttggagcgagtgtacggagcccaaacacatcgtcgaatggaatgtgtcgttatttagcattctgttagctctgggcggtatagagttcattctgtgtctcatccaggttattaatggtgtactgggcggaatttgcgggttctgttgctcgcaccagcagcaaatgacagcaaagcggaccaacccaggacaatcccacaacctgcccctatttcattgcaatctgtatataagtctcgtgttcatttgtaagacattgtattag

SEQ ID NO: 138521 - DNA, 609 bp, synthetic construct
  misc_feature 1..609: note = Description of Artificial Sequence: Synthetic coding sequence
  source 1..609: mol_type = other DNA
atgtgtacaggcgggtgtgcacggtgcttgggagggacactcatccccctcgcttttttcggattcctggctaatattttgctgtttttccccggaggaaaagtgatcgatgataatgaccacttaagccaggagatttggttttttgggggcatactgggatcaggggtgttaatgatttttcccgcccttgtgttcctggggctgaaaaataatgattgttgtggctgttgtggtaatgaggggtgtggcaagagatttgcgatgttcacctctaccatctttgccgtcgtgggctttctgggcgccggatacagttttatcatcagcgcgatctccataaataaaggtccgaagtgcctgatggccaattcgacttgggggtatccatttcacgacggcgattacttgaatgacgaagccctttggaacaaatgcagagagcccctcaacgtcgtgccctggaatctcactctattctcaattttgctcgttgttggaggcatccagatggtcctgtgcgcaattcaagtggttaatggcctgctcgggaccctgtgtggtgattgtcagtgttgtggctgctgtgggggcgacggtcccgtgtag

SEQ ID NO: 138522 - DNA, 594 bp, synthetic construct
  misc_feature 1..594: note = Description of Artificial Sequence: Synthetic coding sequence
  source 1..594: mol_type = other DNA
atgtgtaccggaaagtgcgcaaggtgcgtgggcctgagcctgataacgctgtgtctcgtttgtatcgtggcgaatgcactgctgttggtcccaaacggagaaacctcttggaccaacaccaaccacctgagcctgcaagtttggctgatgggcgggttcataggcggaggtttgatggtgctgtgtccagggatagcagccgttcgtgctggcgggaagggctgttgtggagcaggttgctgtggaaacaggtgcaggatgcttcgttccgtgttttcgagtgcctttggggttcttggcgctatttactgcttgagcgtctctggcgcggggctgcgtaatggtcccaggtgtctgatgaacggagagtggggctaccacttcgaagacacagcaggtgcatacctgctcaatagaaccctgtgggatcggtgcgaagccccaccccgagtcgttccttggaatgttactttgttttccttgcttgtggcggctagctgcctggaaattgtgctttgcggcattcagcttgtcaacgcgacaattggggtgttctgcggtgattgcaggaaaaaacaggacaccccacactag

SEQ ID NO: 138523 - DNA, 438 bp, synthetic construct
  misc_feature 1..438: note = Description of Artificial Sequence: Synthetic coding sequence
  source 1..438: mol_type = other DNA
atgtcagcaagcgcagctaccggggtgttcgttctcagcctctccgctatccctgtcacctacgtctttaaccatcttgcggcacagcacgactcctggaccatcgtcggggtggcagccctgattctatttctagtggctcttttggctcgggttttggtaaagcgaaagccacctagggatccgctcttctatgtctatgcagtgttcgggttcacaagcgtggtaaacctgatcatagggctcgagcaggacggaataattgatggatttatgactcactatcttcgggagggagagccctatctgaacaccgcttacggccatatgatctgctattgggatggaagcgctcactaccttatgtacctggtcatggtggccgctatcgcatgggagtgctggcacatttgttctattctgttcctgaccctctag

SEQ ID NO: 138524 - DNA, 1113 bp, synthetic construct
  misc_feature 1..1113: note = Description of Artificial Sequence: Synthetic coding sequence
  source 1..1113: mol_type = other DNA
atgtctgcatcagcggcaaccggggtgtttgttttatctctgtccgctattccagtgacctacgtttttaatcacttggcagctcagcacgatagctggactattgttggtgttgcagcactcattctttttctggttgccctgctggcccgggtgctcgtcaagagaaaaccacctcgggatccactgttctatgtgtacgcggtgtttggcttcaccagcgtagtcaatctcatcataggcctggagcaggatgggattatcgacggattcatgactcactatttgcgggaaggtgagccatacctaaatacggcatatggacatatgatctgttactgggacggatctgcccactatcttatgtatctcgtgatggtggcagccatcgcctgggaggagacctaccgaacaattggactctactgggttggcagtatcataatgagtgtggtggtgtttgttcccggcaacatagttgggaagtacggcacccgaatttgccctgcattcttcttgtctattccatatacgtgtctccctgtgtgggccggctttagaatctacaatcaacctagcgagaactataactacccaagcaaggtgatccaggaggcccaggccaaggacctgctgcggcgtcctttcgacctgatgctcgtcgtctgcctattgttggcaactggattttgcctcttccggggactcatagcacttgattgcccctccgagctctgtcggttgtatacgcagtttcaagaaccttacctcaaggaccctgccgcctatcccaagatccagatgctcgcctacatgttctacagtgtgccgtacttcgtcaccgccctgtacggtctagtcgtccctggatgctcttggatgcccgacatcactcttattcacgcaggaggtcttgcccaggctcaattctcccatataggcgcatccctgcacgcaagaacagcctacgtctaccgggtgcctgaggaagcgaagattctgttcttagcactaaacattgcatacggggtcttaccgcagttgctagcctacaggtgcatctataaaccggagttttttatcaagaccaaggccgaagaaaaggttgaatag

SEQ ID NO: 138525 - DNA, 1020 bp, synthetic construct
  misc_feature 1..1020: note = Description of Artificial Sequence: Synthetic coding sequence
  source 1..1020: mol_type = other DNA
atgagtgctagcgcggctacgggggtgttcgtattgagcctgtctgcaatcccggtcacctacgttttcaatcacctggccgctcagcatgacagctggaccatcgtaggagtagcggcacttatcctctttttggtagccttgctggccagagtgctggttaagaggaagccccccagagaccctttattctacgtgtacgccgtgtttggtttcacctctgtggttaacctgatcataggactggagcaagacgggattatcgatgggttcatgactcattatctgcgcgagggggaaccttacctgaataccgcctatggacacatgatttgttactgggacggttccgcccattacttaatgtatctggttatggtcgctgccatcgcctgggaggaaacgtataggacaatcggactgtattgggtgggatcgattattatgagcgtcgtggtcttcgtccccgggaacattgtcggcaaatatgggacgcgtatttgtcccgccttttttctttccattccctacacctgtttgcccgtctgggcagggtttagaatttacaaccagccctccgaaaactacaactacccaagtaaggtcatccaggaggcccaggcaaaggatctcctcaggcgcccttttgatctgatgttggtcgtatgtctgctgctggccactggcttctgcttgttccgaggcctcatgctggcctatatgttttacagtgtcccctattttgtgacggccctgtatggattagtagttcctggttgttcctggatgcctgacatcactttaatacacgctggaggcctcgcccaggcccagttctcgcacatcggcgcatccctacatgctcgtacagcttatgtgtacagggtgccagaggaagcaaaaatcctttttcttgcactcaacatcgcatacggcgtcctgccacagttgttggcctacagatgtatctacaaaccagagtttttcattaagactaaggccgaagagaaagtcgaatag

SEQ ID NO: 138526 - DNA, 1122 bp, synthetic construct
  misc_feature 1..1122: note = Description of Artificial Sequence: Synthetic coding sequence
  source 1..1122: mol_type = other DNA
atgagcgcctctgccgcaactggggtctttgttctgtcactgtccgccatccctgtgacatacgtcttcaaccatctagctgcacagcacgactcctggaccatcgtgggagtcgctgccttaattctttttttggtcgcacttctcgcacgagtgctcgttaaacggaaaccaccaagggaccccctgttttatgtctatgcagtcttcggctttacctcagtggtcaacttaataattggtcttgaacaggacgggatcatcgatggattcatgacacattatctgcgagagggcgagccctatctcaatacagcttacggccacatgatttgctactgggacggctccgcccactaccttatgtacctggtgatggtggcagctatcgcctgggattgctatagggaaacctacagaacaattgggctgtactgggtcgggagcattataatgagtgtggtcgtcttcgttcccgggaacatcatagggaaatatggcacgaggatttgtccggcattttttctttcaatcccttatacttgtttgcccgtctgggctgggttcagaatttacaatcagcctagtgagaactacaactatccctccaaggtgatccaggaggctcaggccaaagatctgctccgtcgcccattcgacctcatgctggtcgtttgtcttctgctggccaccggtttctgcctttttcgggggcttatcgccttggactgcccgtctgaactgtgtaggctgtacacacagttccaagagccctacctgaaggatccggccgcttatcctaagatccaaatgctggcctatatgttttactctgtgccatattttgtgacagcgctttacggccttgttgtccccggttgttcatggatgcctgatatcacactcatccacgccgggggcttggcacaggcccaatttagccacatcggagcaagcctgcacgcaagaaccgcatatgtgtacagagtcccggaggaggctaagattctgttccttgctctgaacattgcttatggtgtactgcctcagctcttggcttacaggtgcatttacaaaccagaattcttcataaaaacaaaggcagaggaaaaagtagagtag

SEQ ID NO: 138527 - DNA, 567 bp, synthetic construct
  misc_feature 1..567: note = Description of Artificial Sequence: Synthetic coding sequence
  source 1..567: mol_type = other DNA
atgagcgcctctgccgctaccggggtctttgtcttgtcactgtctgccatacccgtgacttacgtctttaatcaccttgctgcacagcacgatagttggacgattgtgggcgttgctgcactcatcctttttctggtcgccctgctggcacgcgtactggtaaagcggaagccccctagggatccgctgttttatgtatacgcagtcttcgggtttaccagcgtggttaacctgataatcggcctcgagcaggacggcattatagacggtttcatgactcactacctccgagagggggaaccttatctcaatactgcatacggccatatgatatgctattgggatggttccgcgcattacctgatgtacctggtgatggttgccgctatcgcgtgggaggagacatatagaaccataggcctttactgggtcggctcaataatcatgagcgtcgtcgtttttgtgccaggcaatattgtcgatgcaggcatttatgtgttgttctgctctttactctgcgactgcaccgtctggctgtccggcagctggatgtttcttgatgcttag

SEQ ID NO: 138528 - DNA, 1020 bp, synthetic construct
  misc_feature 1..1020: note = Description of Artificial Sequence: Synthetic coding sequence
  source 1..1020: mol_type = other DNA
atgagcgcatctgccgccactggggtgttcgtcttaagccttagtgccattcccgtgacatacgttttcaatcacctggctgcacagcacgatagctggaccattgtcggcgttgccgctttgatcttgtttttagtagcccttttagctagagtcctggtgaagcgcaagcccccgcgtgacccactcttctatgtgtatgctgtctttggatttacttctgtagtgaatctaatcatcggactggaacaggatgggattatcgatgggtttatgacccattacctacgcgagggggagccataccttaatacagcttacggccatatgatatgctactgggacggaagcgcccattacctgatgtacctcgtgatggttgctgccattgcatgggaggaaacatataggactattggcttgtattgggtggggtcaattatcatgagcgtggtggtgttcgtccccggcaacatcgtgggcaagtacggaaccaggatctgcccagccttttttctcagtattccttatacctgtctgcctgtttgggcggggtttcgaatttacaaccaaccgagcgagaactataactacccgagcaaagttatccaagaggctcaggccaaagatctcctgcgcaggccatttgatttgatgctggtagtgtgtcttctcttagccaccggattttgccttttcagaggtctaatgctagcttatatgttctactcagtgccatactttgtcactgccttatacggccttgttgttcctgggtgctcttggatgccagatatcaccctcatccacgcgggggggctcgctcaggcccagttctcccacatcggcgcctctctgcacgctcgcacagcttacgtatatcgggtgccagaggaggccaagatcctctttctggccctcaatatagcttatggggttctgcctcagctactggcctatagatgtatctataaaccggagttctttatcaagaccaaggctgaagaaaaggtggaatag

SEQ ID NO: 138529 - DNA, 1056 bp, synthetic construct
  misc_feature 1..1056: note = Description of Artificial Sequence: Synthetic coding sequence
  source 1..1056: mol_type = other DNA
atggacataccccccctagccgggaaaattgcggcccttagcttgagcgccctccccgtctcgtatgcactcaaccacgtcagtgcactttcccatcccttgtgggtcgccctgatgagcgctcttattttgggcttactttttgtggccgtgtacagtctgtctcacggggaggtatcctatgatcccctgtacgccgtgtttgcggtgttcgccttcacgtcagtggtggatctcatcattgctctccaagaagattcctacgtagtgggctttatggaattttacacaaaggaaggcgaaccctacctgagaaccgcccatggggtctttatttgctactgggacggaactgtccactacctgctctaccttgcaatggcgggagccatctgccgccgcaaaagataccgaaacttcgggctgtattggctgggatcttttgcaatgtccattctcgtatttctgaccggcaacatcctagggaaatacagtagcgaaatccggcccgctttcttcctgaccattccctacctgctggtgccttgttgggcaggaatgaaagtgttttcccagccacgtgccctgaccagatgtacagccaatatggtacaggaagagcagcggaaaggtctgttgcagagaccagccgatttggccctggtcatctatctgatacttgctggcttctttaccctattcagaggtttggtggtccttgactgcccaaccgacgcttgcttcgtctacatataccaatacgagccatacctgcgcgatcccgtggcatatcccaaagtccaaatgctaatgtatatgttctacgtattacctttctgtggactggctgcctacgccctcacgttccccggctgcagttggctgccagattgggcactggttttcgcaggaggtataggacaggctcagttttcgcatatgggtgcctctatgcatctgcgtactcccttcacctaccgctgtctgcagtggcccgccttctttcaccagcccccccctagtgatccactggcactccacaaaaagcagcactag

SEQ ID NO: 138530 - DNA, 1134 bp, synthetic construct
  misc_feature 1..1134: note = Description of Artificial Sequence: Synthetic coding sequence
  source 1..1134: mol_type = other DNA
atggacatcccgcccctcgcaggtaaaatcgctgccctgtcactgtctgctctgcccgtgtcttatgctttgaaccatgtgtcagcattgtcacacccgctctgggtcgcgcttatgagcgctctgatccttggtttgttatttgtggccgtgtattccttgtctcacggagaggtgtcgtatgacccactatacgccgtattcgcagtattcgcatttacatcagtagtggatcttataatcgcccttcaggaggactcctacgtcgtgggatttatggagttttataccaaagaaggggaaccatacctgcgcaccgcccacggagtgttcatttgctattgggacggaacagtgcattatctgctctatcttgccatggctggtgcaatatgtcgtagaaaaagatacaggaacttcgggctgtattggttaggcagtttcgccatgagcatattggtgttcctgaccgggaacatactcggaaagtacagttcagagatcagaccggccttttttctcactatcccctacctcctcgttccttgttgggccgggatgaaggtgttttcccagccccgggcactgacaaggtgtacagctaacatggtgcaggaagaacaacggaaaggcctattgcagcgcccagctgatctcgccttggtgatctatcttatcttggccggattcttcaccttgttccgtggtctggtggtgctggattgccctactgacgcttgttttgtgtacatctatcagtacgaaccttacctcagggacccagttgcttacccgaaagtccagatgttgatgtatatgttttatgtgctgccattctgtggcctggcagcctacgcattgacatttcctggatgcagttggcttcccgattgggctcttgtttttgccggaggaatcggccaggcccagttctcccatatgggtgcatccatgcacttacgcacacctttcacttatagggtgcctgaggacacttgggggtgtttcttcgtgtgcaacctcctctatgcgcttggaccccacttgctcgcttaccggtgtctccagtggcctgccttctttcatcaacctccaccatcggatccgctggctctccataaaaagcaacactag

SEQ ID NO: 138531 - DNA, 642 bp, synthetic construct
  misc_feature 1..642: note = Description of Artificial Sequence: Synthetic coding sequence
  source 1..642: mol_type = other DNA
atggatatcccccccctggcaggaaagatcgcagccctgagcttgagtgccctcccagtttcatacgctcttaaccacgtgtctgctctgtcacacccactttgggtggccttgatgtctgctctcattttgggcttgctatttgttgctgtctactctctcagtcatggcgaggtctcttacgacccgctgtacgcggtgtttgcagtttttgcgttcacaagcgtggtagacttgataattgcccttcaagaggacagttatgttgtagggtttatggaattctataccaaggaagtgctggggggtaggccagggtctcctcttccgcactgcccatccgagtctccgacctgtcctcacagggaatcacacacctgtgcccagcggaccgagagctctagtgccaccgggatggccttgttcaccaccagttcgacctggccttggcctgccccttcggccgagggcgccggggggcgggagcgggtggcccctgaccctggcagggaggtcgcgtcatctgacggtgtccccggccaagggggagcccgaagcgtatgcagacgcaaccaggacgcatctctggggctgcaaccaggagtggcccggcgtcgttttcaggggacctcacaggtttag

SEQ ID NO: 138532 - DNA, 1257 bp, synthetic construct
  misc_feature 1..1257: note = Description of Artificial Sequence: Synthetic coding sequence
  source 1..1257: mol_type = other DNA
atggcccccacccaaggcccgcgggcccctcttgaatttggcggtcccctgggcgccgctgccctgctgcttctcttaccggccactatgtttcacctcctgcttgccgcccggtcgggacctgcaagattattagggcctcccgcatcccttcccggcctagaggtgctgtggtcccctagagctctgctcttgtggctggcttggttgggcctacaggctgcactttatctgttacccgcaagaaaagtggctgagggccaagaactaaaagacaaatctaggttgcggtatcccatcaacggctttcaggccctggtactgactgccttgttagtgggccttggaatgagcgcgggcctacctttgggggcacttcccgagatgcttctccccctcgctttcgtggctacactgaccgcattcatcttcagcctgttcctctatatgaaagcccaagttgctcctgtgtctgcgctagcaccaggcggaaactctggaaaccctatatatgatttcttccttgggcgggaactgaatcctagaatatgcttcttcgacttcaagtatttctgtgagcttcgccccggactgattggctgggtactgattaatctggctctgcttatgaaggaagccgagcttcggggcagtccctctctcgctatgtggctggtcaacggttttcagctcctatatgtcggagacgcattatggcatgaagaggccgtgttaaccacaatggatatcacacacgacggattcggctttatgctggctttcggcgatatggcctgggttccttttacgtacagcctccaggcccaattcctgctccatcacccccagcctcttgggctcccaatggcatccgtcatctgccttattaacgctacaggttactacatctttcgaggcgcaaatagtcagaagaataccttcagaaagaacccctccgatccaagagtagcgggactcgaaactatctctaccgccacaggaaggaaactgctggtgtctggatggtggggaatggtgagacacccaaactatttgggcgacctgatcatggcgctggcgtggtccctcccgtgtggcgtctctcatttgttgccttacttttatctgctctacttcactgccctactagtccacagggaagctagggatgaacgccagtgtctgcagaagtatgggctggcctggcaggaatactgccgtcgggtcccttatagaattatgccttatatctattag

SEQ ID NO: 138533 - DNA, 1176 bp, synthetic construct
  misc_feature 1..1176: note = Description of Artificial Sequence: Synthetic coding sequence
  source 1..1176: mol_type = other DNA
atggccccaactcagggaccaagggccccgctggagttcggcggtcctctcggcgcggccgcccttctccttctgttacctgccactatgtttcacctcctcttggccgctagaagcgggccagcccgcttgctgggtccccccgcaagcctccctggattggaggtgctgtggtcaccgcgcgcgctcctgctgtggctggcctggctgggcctgcaagccgccctgtatctactgcctgcccgaaaggtcgccgaaggccaggagttgaaagataaatcccggctgaggtatcccataaatggcttccaagccctggtgttgaccgccctgttggtgggcctgggtatgtctgctggcctcccacttggggcgctgcccgaaatgctgctccccttggccttcgtcgccaccctcaccgctttcatcttctccctcttcctctacatgaaggcacaggtagcccctgtgtcagcgctggcccccgggggcaattccgggaaccctatctacgactttttcctcgggcgcgagctcaatcccagaatctgcttcttcgatttcaagtatttttgcgagctcagacctggcctaattggctgggtgctgataaacctagctctactgatgaaggaggctgagctgcgaggcagcccctccctggccatgtggctcgttaacgggttccaactgctctacgtgggggatgcactgtggcacgaagaagccgtcctgactacaatggatatcactcacgatggcttcggtttcatgctggcctttggagacatggcttgggtgcctttcacctactcactccaggctcaatttcttctgcatcaccctcagccccttggccttcctatggcctccgtaatctgtcttattaatgggttggagacaatctctaccgccacgggtcgcaagcttctggtgtcaggttggtggggaatggtgagacaccccaattacttaggtgatctgattatggctcttgcgtggtccttaccatgcggtgtttctcacctcctcccatacttttatttgctgtactttactgccctgctcgtgcacagagaagccagagatgaacgccagtgtttgcaaaaatatgggcttgcatggcaggaatattgtaggagggtgccatacaggatcatgccatacatctattag

SEQ ID NO: 138534 - DNA, 909 bp, synthetic construct
  misc_feature 1..909: note = Description of Artificial Sequence: Synthetic coding sequence
  source 1..909: mol_type = other DNA
atgtcggctgggctgcccctgggtgcactgcccgagatgctgctgccactcgcgtttgttgctactttaacggcttttatcttttccctgttcctgtatatgaaggcccaggtagcgcccgtctcggccctggcgccagggggcaactctggcaaccctatttatgacttctttctcggaagagagctgaacccacgtatttgcttcttcgacttcaagtacttttgcgaactcagacccggtcttatcggctgggtactgataaatttggccctgttaatgaaagaggctgagctccgcggctccccaagtttggccatgtggcttgtgaatggcttccagctcttatatgtgggcgacgctttgtggcacgaggaagccgtgctcacaacgatggacatcacgcacgacggcttcggcttcatgctcgcctttggggacatggcctgggtgccattcacttacagcttgcaggcccagttcctcctgcaccacccccagccactggggctgccgatggccagcgtgatttgtctgatcaatgctaccggctactacatttttaggggagcaaacagccagaagaatactttccggaaaaaccccagtgatcctcgtgtggccggtctcgagacaatctctacagctaccgggcggaaacttctggtgagcggatggtggggaatggtcaggcaccccaattacctgggtgatttgataatggccctggcctggagccttccctgcggagtgagccatctgttgccatacttttatttgctgtacttcaccgcactattggtacacagggaagcaagagatgagaggcagtgtctgcagaaatatggtttagcctggcaagaatattgcagaagggttccgtatcgtatcatgccgtatatatactag

SEQ ID NO: 138535 - DNA, 1713 bp, synthetic construct
  misc_feature 1..1713: note = Description of Artificial Sequence: Synthetic coding sequence
  source 1..1713: mol_type = other DNA
atgggctttctacagctgctggtggtggcagtgctggccagtgaacacagagtcgcaggtgccgcagaagtctttgggaactcatctgagggcctgattgagttctccgtcggaaaattccgctacttcgaactgaatagaccctttcctgaagaggccatcctgcacgatatatcctccaatgtaacgtttctaatttttcagatacatagccaatatcagaatactactgtcagtttctccccaaccctcttgagcaacagttcggagacagggaccgccagtggccttgtgttcattctgcgaccagaacagtccacatgtacttggtacctgggtacatcaggaatccaacctgtgcaaaacatggccatactgttgtcatattcagaacgggatccagttccagggggctgcaacctggagtttgatcttgatatagaccccaacatctatctagagtacaattttttcgaaacaactatcaaatttgcaccggctaacttggggtacgccaggggcgtggaccctcctccttgcgatgccggaactgaccaggactcgcgatggaggctgcaatacgacgtgtatcaatatttcctgcctgaaaatgacttaaccgaagagatgctgctgaaacacctgcaacggatggtttccgtgccgcaggtgaaggctagcgctcttaaggtggtcaccttaaccgcaaacgataaaacctccgtcagcttctcttccttacctggacaaggggttatttataacgtgatcgtatgggacccgttcttaaatactagcgctgcttatatcccagcacacacgtatgcatgttcatttgaagctggcgagggatcatgtgcctccctaggccgagtgtctagcaaggtatttttcaccctttttgccctcctcgggttttttatctgtttttttgggcatcggttctggaagaccgagctgttcttcatcggatttatcataatgggattttttttttacatcctgatcacaaggctgaccccgataaagtacgacgtgaaccttatactcacagcggtaaccggatcagtcggcggcatgttcctcgtggccgtgtggtggcgctttgggatcctgtccatttgcatgttgtgcgtagggctggtacttggatttctgatttctagtgtgacttttttcacaccactgggcaatctgaaaatcttccatgacgacggcgtgttctgggtgaccttctcctgcatcgctattttgatcccagtggtgttcatgggctgtttgagaatcctcaacatcttgacatgcggggtcattgggagctacagcgtggtcttggccatcgactcttattggagcacatccctctcctatattacgctgaatgtccttaaaagggcactcaataaggactttcatagggcatttaccaatgttccgttccagaccaacgactttatcatactggcggtctggggcatgctggctgtctccggtatcacacttcagattcggagggaacgcggacggcctttttttccacctcacccgtataagctgtggaagcaagagcgcgaaagacgcgtcacaaacatactggacccaagctaccacataccacccctcagggagcgactgtatggtcggctcacccagattaaagggctcttccagaaagaacagccagccggtgagcggactcccctgctactttag

SEQ ID NO: 138536 - DNA, 351 bp, synthetic construct
  misc_feature 1..351: note = Description of Artificial Sequence: Synthetic coding sequence
  source 1..351: mol_type = other DNA
atgggattcctgcagctcctggtcgtggctgtgttggcctccgaacaccgggtagctggggccgcagaagtctttgggaattcttctgaggtgtacctggtggtggggctgattgagttctctgtgggaaagtttcgatacttcgagttgaatagacccttccctgaggaagccatcttacatgatatctcttccaacgtcacttttctgatcttccagatccatagccagtaccaaaacaccaccgtttcattttctcccaccctactctcaaattcctctgaaactggtaccgccagcggacttgtgtttatactgagacccgagcagagtacctgtacatggtactag

SEQ ID NO: 138537 - DNA, 1413 bp, synthetic construct
  misc_feature 1..1413: note = Description of Artificial Sequence: Synthetic coding sequence
  source 1..1413: mol_type = other DNA
atgggcatatggactagcgggacggatatattcctgagcctttgggagatctacgtgtccccccggagccctggatggatggattttattcagcatctcggtgtttgctgtctggtggcactgatcagcgtaggtctgctatccgtggccgcgtgctggtttttgccttcaataatagccgctgccgcctcatggattataacatgtgtgcttctttgttgctcaaagcacgctagatgctttatattactcgtttttctcagttgcggactgcgggaaggacggaatgctttgatcgctgcagggacgggaatcgtgatcctgggccacgtcgagaatatctttcataacttcaaagggcttctcgatggcatgacatgtaatctgcgcgctaagagcttctctattcacttccccttactgaaaaagtatattgaggcgattcagtggatttatgggctggctacccctctcagcgtatttgacgacttggtttcctggaaccagacactggcagtgtcactgttctcacccagtcacgtgctagaggcccagctaaacgattccaagggcgaagtcctgagcgtactgtatcagatggccaccacaactgaggtgcttagctcactgggacaaaagctccttgcctttgccgggctgtcactggtgctccttgggaccgggttgtttatgaaaaggttcttgggtccttgcgggtggaaatacgagaacatttatatcacccgccaatttgttcaattcgacgagcgggagcgacaccagcagaggccttgcgtgctccccctgaataaggaggagcggcggaaatacgtcattattcccaccttctggcctacacctaaggagagaaagaacctcggattgttctttctacctattctgatccacctgtgtatatgggtgctctttgcagccgtagattacctgctgtatcggctgatcttcagcgtttccaagcaattccagagcctaccaggattcgaggtccacctgaagcttcatggtgaaaaacagggcacacaggatattatccatgacagctcgttcaatatctcggtgttcgagccgaactgcattccaaagcccaaattcttgctgtcggaaacctgggtgccactcagcgtcattctgctgattctggtcatgctgggcctgctatcaagcatcctaatgcagctgaagattttggtgtcagccagtttttacccatctgtcgaacgtaagcgtatccagtatctccatgcaaaattgttaaagaagaggagcaaacagccacttggggaggtaaagcgtagattgagcctttatcttacgaagattcacttctggttacctgtgctgaagatgatcaggaaaaaacaaatggacatggcctcagccgataaatcttag

SEQ ID NO: 138538 - DNA, 567 bp, synthetic construct
  misc_feature 1..567: note = Description of Artificial Sequence: Synthetic coding sequence
  source 1..567: mol_type = other DNA
atgtccacaatgttcgcagacaccctgctgatcgtctttatctcagtgtgtaccgcgctgctcgccgagggaataacctgggtgctggtgtatcggacagataagtacaagaggctgaaagccgaagttgagaagcagagcaaaaagctggagaaaaagaaggagaccattacagaaagcgcaggcaggcagcagaaaaagaaaatagagagacaagaagaaaaactgaaaaataataatcgagatttgagcatggtgcgcatgaagtcaatgttcgccattggtttctgtttcacggctctcatgggaatgttcaactctatctttgacggacgagtagtcgccaaactcccattcacccccctatcctacatccagggactgagccataggaacttgctgggcgacgacaccaccgattgctcatttatcttcctgtacattttgtgcacgatgagcattaggcaaaacatccagaaaattctcggcctggcccccagcagagctgccactaagcaggcgggagggtttctgggtccacctcccccgtctggtaagttttcctag

SEQ ID NO: 138539 - DNA, 510 bp, synthetic construct
  misc_feature 1..510: note = Description of Artificial Sequence: Synthetic coding sequence
  source 1..510: mol_type = other DNA
atgtcaactatgttcgctgatacactgctcatagtatttatctccgtttgcacagccctgctggccgagggaatcacttgggttctggtgtaccgcacagacaagtataaaaggcttaaagcagaggttgaaaagcagagtaaaaagctggaaaagaaaaaggagactatcactgaatccgctggccggcaacagaaagtgagaatgaagtcaatgttcgctataggtttctgttttactgcccttatgggcatgtttaattccatttttgacggtcgggtagttgccaaacttccattcacgcctctaagctacatacagggtctgagtcaccggaatttgctgggagacgacaccaccgactgcagcttcatctttctgtatatcttgtgcactatgtcgatcaggcagaacatacaaaagattctcgggttggcccccagcagggccgcaacaaagcaggctggcggctttcttggcccgcccccaccttctgggaagttttcatag

SEQ ID NO: 138540 - DNA, 603 bp, synthetic construct
  misc_feature 1..603: note = Description of Artificial Sequence: Synthetic coding sequence
  source 1..603: mol_type = other DNA
atgatgcactatgttgactactctatgatgtatcacctgatccggggacagagtgtgatcaaactctatatcatatacaacatgctagaagttgccgatagattgtttagctcttttggccaagatattctcgacgccctctattggactgctacagagcctaaagagaggaaacgcgcccatatcggatttgtcgagatcaagggcagcgttttcaagaagttcgaaaaaaataacctgtttcaaatgtccaatagcgacatcaaggagagatttacgaattatgtgctgctgctgattgtctgtctgaggaatatggagcagtttagctggaacccagatcacctttgggtgctgttcccggatgtctgcatggtgattgcttcagagatagccgtggatattgtcaagcatgcatttataacaaaattcaacgatattaccgctgacgtgtactcagagtacagggcttcccttgcgtttgacctcgtgtcttcacggcaaaaaaatgcatacactgactattctgactctgtggccagacggatggggtttattcctctccctttagcagtcctggtcgacatccccgaatccacgtag

SEQ ID NO: 138541 - DNA, 1371 bp, synthetic construct
  misc_feature 1..1371: note = Description of Artificial Sequence: Synthetic coding sequence
  source 1..1371: mol_type = other DNA
atggtgttcggaatcttcttgtgcctcgacgcctttctgtacgtgtttacactgctgcctctgagggtgtttctcgccctgtttcgcctgttgaccctaccttgctacggactgcgcgaccggagactgctgcagccagcccaagtgtgtgacattctcaagggtgtaatcttggtcatttgctatttcatgatgcactatgtggactattctatgatgtatcatctgattcgagggcagtcggtgataaaattatacattatatacaatatgttagaggttgccgatagactcttctcgtcatttggtcaagatattctggacgctttgtactggaccgccaccgagccgaaggagagaaagagagcccatattggggttatcccacatttctttatggctgtcttgtacgttttcctgcatgcaattctgatcatggtgcaagcgacaaccctgaatgtggccttcaactcccacaataagagcttactcacgataatgatgagtaacaactttgtcgaaatcaagggatcagtgttcaaaaaattcgaaaagaataatctgtttcagatgagcaattcggacattaaggaaaggttcaccaattacgttctgctcttgatcgtttgcctgagaaatatggagcagttctcatggaatcccgaccatctttgggtgctgttcccggatgtgtgcatggttattgcgtccgaaatagcggtggacattgtaaaacacgcgttcattactaagttcaatgatatcactgctgatgtctactctgagtaccgggcgagcttggctttcgatcttgtttcttcaaggcagaaaaacgcctacactgactacagcgattcggtggcacgccggatgggattcattccattgccacttgcagtgctgctgatacgagtggtaacttcttccattaaggtgcaggggattcttagttatgcatgtgtgatcctgttttactttggtctgatttcactgaaggttctaaactccatcgtcctattagggaaatcttgccagtatgttaaagaagcaaagatggaagaaaaactgagtaatcctcctgccacatgcactcctggaaaaccatcctctaagagccagaataagtgcaagcccagccaaggcctcagtaccgaggagaacctctcagcaagcatcactaaacagcccatacatcagaaggaaaacattatccctttactcgtgactagcaactctgatcagttcctaactaccccagacggtgatgagaaggatatcacccaggataactcagagctgaagcaccgctccagcaagaaggacttgctcgaaatcgatcgtttcacaatctgtggtaatcgcatagactag

SEQ ID NO: 138542 - DNA, 1704 bp, synthetic construct
  misc_feature 1..1704: note = Description of Artificial Sequence: Synthetic coding sequence
  source 1..1704: mol_type = other DNA
atggctggcgttggggatgcagcagcaccgggagagggcggtggcggtggcgtggacggcccacaacgggacggacgaggcgaggcagaacaacccggtgggagcggcggacagggacccccacctgccccccagctgacagagacgttaggtttttatgagtccgacagaaggcgggagcgtcgtcggggccgcacagaactgtctctgttgagatttctctcagctgagctcacacgcggatattttctcgaacataacgaagctaaatataccgagcgccgggagcgagtttacacatgccttcgcatacctcgggagctcgaaaagttgatggtttttggcatatttctctgtcttgacgcctttctgtacgtgttcaccctcttgccactgcgcgtattccttgcattgttccgcctcttaaccctgccgtgctacggcctgcgggaccgacggttacttcagcccgcacaggtctgcgacattttaaaaggcgttatcttggtcatttgttattttatgatgcactacgtcgactacagcatgatgtaccatcttatcagagggcagtccgtcattaagctgtatatcatctataatatgctcgaggtggcagatcgcctattctcatctttcggtcaagacatactggatgccttatattggactgccactgaacccaaggagaggaagcgggcccatattggcgtgatcccccatttttttatggctgttctctatgtcttcttgcatgctatcctcatcatggtgcaggcgaccaccttgaatgtggcgttcaattcccataataaaagtttactgacgataatgatgagcaacaacttcgtggagatcaaggggagcgtctttaagaaattcgagaagaacaacctttttcagatgtctaattcagatatcaaggaaaggttcactaattacgtcctgctgctgatcgtgtgtctcagaaacatggaacagttctcatggaatcctgaccacctttgggtgctgtttcctgatgtatgtatggtaatcgcttctgagatcgcagtagacatcgtgaaacatgcttttattaccaagttcaatgatatcacagcggatgtttatagcgaataccgggctagcctagcctttgatctggtcagctctcggcagaagaacgcgtacacagactactccgacagcgtcgcccgcagaatgggctttatcccgctgccattggccgtgctcttaatccgcgtggtgacgtcttctattaaggtgcagggaattctttcatatgcatgtgttatcctcttctactttggcctgatcagcctaaaggttctcaactccatcgtgctgctgggtaagtcctgccagtacgtgaaagaagccaaaatggaggaaaaattgagcaatcctcccgcaacatgcacaccaggaaaaccatctagtaagtcccaaaacaagtgtaagcctagtcagggcttgtcaacagaagaaaatttgtccgcctccatcactaaacagccaatccatcaaaaggaaaatatcatcccactgttggtaacctcaaattctgatcagtttctaacaacacccgacggagacgaaaaagacattactcaggacaacagcgagttgaaacatcgctcatccaaaaaagatctgctggaaatcgatagattcaccatttgcggaaacaggatcgattag

SEQ ID NO: 138543 - DNA, 1689 bp, synthetic construct
  misc_feature 1..1689: note = Description of Artificial Sequence: Synthetic coding sequence
  source 1..1689: mol_type = other DNA
atggcgggagtgggcgatgcagctgccccgggtgaaggtggcggaggcggagtggacgggccccagcgggatggccgcggagaagctgagcaacccgggggctctgggggtcagggtccccctcccgcgccccagctgaccgagacactggggttctacgaatccgacaggcgccgagagcggcgccgtggccgcactgagctgtccttactgcggtttctatcagcagagctgacaaggggatacttcctggagcacaacgaagccaagtacacagagaggcgggagagagtttatacatgcctgcggattcctcgggaactcgagaagttgatggtattcgggattttcttgtgcttagatgcgttcctctacgtgtttaccttactgccgctccgagtcttcctcgcgctcttcaggcttctgaccctgccgtgttacgggctgagagatcggcggttgctgcagccagctcaggtttgcgacatcctcaagggcgtcattctggtcatatgctatttcatgatgcattacgttgactattcaatgatgtaccacttgattcgcggccagtcagtcatcaaactttacattatttataacatgctggaggtagcagatcggctgttcagttcatttggtcaggacattcttgatgcactctactggactgccacagaaccgaaagagcgaaaacgcgctcacattggtgtgataccccacttcttcatggccgtgttgtacgtgtttttacacgctatccttatcatggtccaggctaccacccttaatgtggccttcaactcacataataagtcattactgactataatgatgtctaacaactttgtggagattaaagggagtgtgtttaaaaagtttgaaaagaacaacttatttcaaatgagcaatagcgacattaaggagagattcaccaattatgtgctccttctgattgtctgtctgcggaatatggagcagttttcttggaacccagaccacttgtgggttctgtttcctgacgtttgcatggttattgcgtccgagattgccgtggacattgtcaaacacgccttcatcaccaagttcaatgacattacagccgatgtgtattctgagtatcgggctagccttgcctttgacttggtctccagtcggcaaaagaatgcatacacagattacagcgactcagttgcgcgccgtatggggttcatcccactgccccttgctgtcttgttaattagggtagtcacctcttccatcaaggtgcaggggatcctgtcttacgcttgtgtaatcctgttctacttcggacttatttctctaaaggtgctcaattccatcgtgctgttaggcaaatcctgccagtatgtgaaggaggctaagatggaagaaaaactatcaaatccccccgccacctgcacacccggcaaaccctcgagcaagtcccagaacaagtgcaagccttcacaggggctcagcaccgaggagaaccttagcgcctctattaccaaacaaccaattcaccagaaggagaatataatccccctactggttacatctaactcagaccaatttttaaccactcccgacggggatgagaaagacattacacaggataactcagaattaaaacatagaagcagcaagagcgtcctgttgtgccagagcggcctccccgagtgctag

SEQ ID NO: 138544 - DNA, 2283 bp, synthetic construct
  misc_feature 1..2283: note = Description of Artificial Sequence: Synthetic coding sequence
  source 1..2283: mol_type = other DNA
atgtccccaaaaaaggtgcagatcaaggtggaggaaaaagaggatgagactgaagaatcaagcagcgaggaggaggaggaggtcgaagacaagctcccacggcgggaaagcctgcgtccgaaaagaaagcgaacaagagacgtgattaacgaagacgatcccgaacctgaacctgaggatgaggagacacgcaaggccagagagaaggagcgtaggcggcgacttaagagaggggctgaggaagaagaaatcgatgaagaggagctggagagacttaaagcggaactagatgagaaaagacagattatcgcgaccgttaaatgcaagccgtggaagatggagaagaaaatagaagttctcaaagaggcaaagaaattcgttagcgagaacgagggggccttaggcaaaggaaagggaaaacggtggttcgccttcaagatgatgatggccaagaaatgggctaaatttctcagggatttcgaaaattttaaagccgcttgtgttccctgggaaaacaaaataaaggctattgaaagccagttcggaagcagtgtggcctcttattttttattcctgcgatggatgtatggcgtcaacatggtgctgtttatactgactttttccctcatcatgctgccagagtatctttgggggctaccttatggttctctcccccgcaagaccgtgccgcgcgctgaggaagcaagtgccgcgaatttcggagtgctgtacgactttaatggtctggcgcagtactctgttttattttatggctactacgacaataaacgtacaattggatggatgaatttccggctgcccttgtcttactttttggtgggtatcatgtgtatcggctactcatttttggttgtgctgaaggcaatgaccaagaacatcggagatgatggtggaggcgatgacaacacctttaatttttcttggaaagtgtttactagctgggactacctgatcggaaatcccgagaccgcggacaacaaattcaatagcatcaccatgaatttcaaagaagcaataaccgaagaaaaagccgcacaggttgaagaaaatgtgcacttgatacgctttctcagatttttggccaacttctttgtcttcctgacacttggaggatccggctacttgattttctgggccgtgaaacggtcacaagagtttgctcaacaggaccctgacacattaggatggtgggaaaagaatgaaatgaacatggtgatgagcctgctcggaatgttctgccccaccctctttgatctgtttgccgaacttgaagactatcatccgctcattgctttgaaatggttactagggcgcatttttgccttgctgctcggcaacctttacgtgttcatcctggcactgatggacgaaatcaataataaaatagaggaggaaaagctggtcaaagctaatatcactttatgggaggctaacatgatcaaggcatacaacgctagtttctcggagaactcaaccggcccaccttttttcgtgcatcccgccgatgtgccccgagggccttgctgggagacaatggttgggcaggaattcgtgcgccttactgtttcagacgttctcactacatatgttacgatactgatcggtgatttccttagagcttgctttgtgcggttttgcaactactgctggtgttgggatttggagtacggatatccaagttacacagaattcgatatcagtgggaacgtgctcgccttgatcttcaaccagggaatgatctggatgggaagcttcttcgcccccagcctgcccgggataaacattttgagacttcatacaagcatgtatttccagtgctgggctgtaatgtgttgcaacgtgcctgaggctagggtcttcaaagcctcacggtctaacaatttctatcttggaatgcttctacttatcctgttcctgtccacgatgcccgtgctatatatgattgtctcactgccccctagctttgactgcggccctttcagtggaaagaatcggatgtttgaggttatcggcgaaaccttagagcacgacttccccagctggatggccaaaattctgcggcagttgtccaaccccggactggtgattgccgttattctggtgatggtcctcgctatctactatttgaatgcgaccgcgaaagggcagaaggcagcgaacctggatttaaagaaaaaaatgaaaatgcaggcactcgagaacaagatgagaaataaaaagatggcagcagccagagctgccgccgcagccggcaggcagtag

SEQ ID NO: 138545 - DNA, 2283 bp, synthetic construct
  misc_feature 1..2283: note = Description of Artificial Sequence: Synthetic coding sequence
  source 1..2283: mol_type = other DNA
atgtctcccaaaaaggtgcaaattaaagtcgaggagaaggaggacgagacggaggaatcctctagtgaagaggaagaagaagtcgaagataaactgcctaggagggaatccctgaggcctaagaggaagcgaacgcgagacgtgatcaacgaggatgatcctgaacccgaacccgaggacgaggagactcgcaaggccagggaaaaagaacgaagaaggaggcttaaaaggggggcagaagaggaggaaatcgatgaggaggaactggagaggctcaaggcagagctcgatgaaaagagacagataatcgccactgtcaagtgtaagccttggaaaatggaaaagaaaatagaagtgctgaaagaagcgaagaagttcgtgtccgagaatgaaggggccctcggaaaagggaagggcaaaagatggttcgccttcaaaatgatgatggcaaagaagtgggccaagtttctccgagattttgaaaacttcaaagctgcgtgtgttccatgggaaaataagatcaaagccatcgagtcacaatttggctcaagcgtcgcttcttatttcctcttcctgaggtggatgtacggtgttaacatggtgctctttatcctgaccttcagcctgattatgctgcccgagtacctgtggggattgccgtacggatccctgccccggaaaaccgttcctagggctgaggaggcctctgcggctaattttggagttctctacgacttcaatggtctagcacaatactctgttttgttctacggatactatgataataagaggacaattggctggatgaatttcaggttgcccttgagttacttcttggtggggatcatgtgcatcggctactccttcctcgttgtgctgaaggcgatgactaaaaatatcggagacgacgggggaggggacgacaacacatttaatttcagttggaaagtctttacttcctgggactatctgattggcaacccggaaactgccgataataaatttaactccatcaccatgaattttaaggaggccataaccgaagagaaagccgctcaggtcgaagagaatgtacacctgatccggtttcttcgctttctggccaatttctttgtgtttctgacactgggggggtctggatacctcatcttttgggcagttaaacgtagtcaggagttcgcacagcaagaccccgatactctaggctggtgggagaagaacgagatgaatatggtgatgtcactgcttggtatgttctgtcctacgttatttgatcttttcgccgagctcgaggattatcacccgttaattgcactcaagtggctgctgggcagaatcttcgcgttgctgctcggcaatctgtacgtattcatactggcgctgatggacgaaattaataataaaattgaggaggagaaactggttaaagccaacattaccctctgggaggccaacatgatcaaggcgtataatgcatcattcagcgagaactctaccggcccccccttctttgtgcaccctgcagacgtccccaggggcccctgttgggagaccatggtcggtcaggaatttgtaaggctgactgttagcgatgtgctcaccacctatgtgactattctgattggcgattttcttcgagcatgttttgtccgattctgcaactattgttggtgttgggatctggaatatggttacccctcctacacagaatttgatataagtggaaacgtcttggccctgatcttcaaccagggcatgatctggatgggaagcttttttgctcctagcctgcccggtattaacatcttgaggcttcatacgtctatgtatttccagtgttgggcggttatgtgctgcaacgtgccggaggcccgcgtgttcaaggccagccgttccaacaatttctatctcggtatgcttctgctgatcctatttctctccaccatgccagtcctgtatatgatcgttagtctgccacccagctttgattgtggtcccttctcagggaagaatagaatgtttgaagtcataggagagactttagagcatgacttcccaagttggatggccaagattctacggcagcttagtaatccaggcctggttatcgctgtgatactcgttatggtgctcgccatttattacctcaatgccactgcaaagggacaaaaggctgcgaatttggatctgaagaagaagatgaagatgcaggccctggaaaataagatgcggaataaaaaaatggcagcggccagagcagctgctgcagcagggcgacaatag

SEQ ID NO: 138546 - DNA, 2223 bp, synthetic construct
  misc_feature 1..2223: note = Description of Artificial Sequence: Synthetic coding sequence
  source 1..2223: mol_type = other DNA
gtagagtggtctggcgagtgtttaagaagctgtcgacgcgaggttcagatcaaagtcgaggaaaaggaagatgaaaccgaggagagctcttccgaggaggaagaggaggttgaggataagttaccacgacgagagagcctaagaccgaaaaggaagagaacgagagacgttattaacgaggacgatccggagcccgagcccgaagacgaggaaacgagaaaggcccgggagaaagagcggcggaggcgcctcaagcgaggcgcagaagccaagaaattcgtttccgagaatgagggggctctcggcaaagggaaaggtaagagatggttcgctttcaagatgatgatggcaaaaaagtgggcaaaattcctgagggactttgagaacttcaaagccgcatgtgtcccctgggaaaacaaaattaaagctatcgagagccagttcggtagttccgtagcctcttacttcctcttccttaggtggatgtatggtgtaaacatggttctcttcatcctcaccttctcactgatcatgctgccggagtacttgtggggcctgccctacgggagtctgccaaggaaaacagtcccgcgagcagaggaagcatcggcagccaacttcggagtcctgtacgattttaacggcttggcccagtactctgtgctgttctacggctattacgataataaacggacaatcggatggatgaactttagacttcctctgtcgtatttcctggtcgggatcatgtgcatcggatattcctttctggtggttttgaaggccatgactaaaaacatcggagatgatggaggcggcgacgataatacctttaatttcagctggaaagttttcacatcatgggattacctgatcggtaatcccgagacggccgataataaatttaatagcattactatgaacttcaaagaggcaatcaccgaagagaaggccgctcaggttgaggagaatgtccatctcatccggtttctacggttcctggctaacttcttcgtgtttctgaccctcggtggttctgggtatctgatcttttgggccgttaagaggtcccaagaatttgctcaacaagacccagacacactaggatggtgggaaaaaaatgaaatgaatatggtgatgtctcttctaggcatgttttgtcccaccttgtttgacctcttcgcagagctggaagactatcatcccctgatagcgctaaagtggctgctggggcggattttcgccctgctgttggggaacctgtatgtcttcatactggccctaatggatgagatcaataacaagattgaggaggagaagctcgtgaaggccaacattaccttatgggaggcgaatatgataaaagcatacaatgcctcgtttagcgaaaatagcacagggccgccttttttcgttcaccccgctgacgttcccagggggccatgctgggagacaatggtaggtcaagagttcgtccggctgacagtgagcgatgtgctgacgacgtacgtgaccatcctcattggggatttcctgagagcctgtttcgtccgtttctgcaattactgttggtgttgggatctcgaatacggttacccatcttacaccgaattcgatatctctggtaatgtgctggcactgatctttaaccaggggatgatctggatggggtcatttttcgctccttcactgcccggaattaacattctgcggctgcacacttccatgtacttccagtgttgggccgttatgtgttgcaacgttcctgaagcccgggtatttaaggctagcagatctaataatttctacttagggatgctgttacttatcttatttttatccaccatgcctgtcctttacatgattgtttcactcccgccttcgtttgattgcggacctttcagcggaaagaaccgaatgtttgaggtaataggcgaaacccttgagcacgactttccctcctggatggccaaaattctgaggcagctgagtaacccggggctcgttatagctgtgatcttagttatggtcctcgcaatatactatctcaacgcaacagccaaagggcaaaaggccgcgaaccttgatcttaagaagaaaatgaagatgctgcagctgctggtcgctagcaataaataccctgagagtccggaaaaggttcacttcgcactgctgtttaagtcaaacgcaatctgtgagcggcccgagaacaaacactgctag

SEQ ID NO: 138547 - DNA, 2283 bp, synthetic construct
  misc_feature 1..2283: note = Description of Artificial Sequence: Synthetic coding sequence
  source 1..2283: mol_type = other DNA
atgagccccaaaaaggtacagatcaaggtcgaggagaaagaggatgaaacagaagaaagctcaagtgaagaggaggaggaagttgaggataagctgcccagaagagagtcattgagaccaaaacgaaagaggacacgggacgtaatcaacgaggacgaccccgaacctgaacccgaggacgaagagacaagaaaagcaagagagaaggaacggcggagaagattaaaaaggggagccgaagaagaggagattgacgaggaagagcttgagaggctcaaagcagagctcgacgagaagcggcagatcatcgctactgtcaagtgtaagccatggaagatggagaagaaaatcgaagtgctgaaggaagctaagaagtttgttagtgagaatgaaggggcactggggaagggaaaaggcaagcggtggtttgcttttaagatgatgatggcaaagaaatgggcaaagttccttcgcgatttcgaaaatttcaaggccgcgtgcgtcccatgggaaaataaaatcaaggccatcgagtcacagttcggctcctccgtagcctcctattttctattcctccggtggatgtacggggtcaacatggttcttttcatattaacgtttagtctcatcatgcttcccgaatacctgtggggcttgccctatggaagtcttcctcggaaaaccgttcctcgcgccgaagaggcttctgcagcgaacttcggcgttctgtacgactttaacggattggcacagtactctgtcttattttacggctattacgataataagaggaccattggttggatgaactttaggctgcccttgagctattttttagtcgggatcatgtgtattggttactcttttctggttgtacttaaggccatgacgaagaatataggagacgatggcggcggagacgacaacacctttaatttctcctggaaagtgttcaccagttgggattacctaatcggaaaccccgaaaccgccgacaacaagttcaattcaattacaatgaatttcaaagaggcaattactgaggaaaaagcggcgcaggtggaagagaatgtgcatctgataaggttccttaggttcttggcaaactttttcgtgtttctaaccttaggcggctccggttatctaatattctgggctgtgaaacgaagtcaggagttcgcacagcaggatcctgacaccctgggctggtgggagaagaacgagatgaatatggtcatgtcccttctcggaatgttctgtcctacactgttcgatttgtttgctgagttggaggattaccacccccttattgcactcaagtggttgctaggacgaatcttcgccttactgctgggcaatctatatgtcttcatcctggcgctgatggacgaaattaataataagatcgaagaagagaagctagtgaaagctaatattactctctgggaagctaatatgatcaaagcctacaacgcttcgtttagcgagaacagcacgggtccacccttttttgtgcatccagcagatgtcccacggggaccatgctgggaaacaatggtcggccaagagttcgtcaggctgaccgtttccgacgtactaactacatatgtcaccattctcataggcgatttcctgagggcgtgctttgtgcgcttctgtaactactgctggtgctgggacttggagtacgggtatccgagctacacggagtttgacatctccggaaacgttctagctctaatattcaaccagggaatgatctggatgggaagtttctttgcccccagtttgccaggaattaatatcctaaggcttcacacttccatgtacttccaatgctgggccgtgatgtgctgtaatgtgccagaggctagagtattcaaggctagcagatccaacaacttttacttgggaatgctgttattaatcctcttcctatccaccatgcctgtactctacatgattgtgtcccttcctccttccttcgactgtggccccttctcggggaaaaacagaatgttcgaagttattggtgagacgttggagcatgactttccaagctggatggccaagatactcagacagctcagcaacccaggactggtaattgctgtcatcttggtcatggtgttggctatctactacctgaacgctacggccaagggtcaaaaagcagccaacctggaccttaagaaaaagatgaagatgcaagccctagagaataagatgagaaacaagaaaatggctgcagcacgagccgcagcagccgccggacgacaatag

SEQ ID NO: 138548 - DNA, 2184 bp, synthetic construct
  misc_feature 1..2184: note = Description of Artificial Sequence: Synthetic coding sequence
  source 1..2184: mol_type = other DNA
gtggaatggtctggggagtgcctgcgatcgtgcagaagagaagtgcagatcaaagtggaagaaaaggaggatgaaactgaggaatcctcaagcgaagaggaggaggaagttgaggataaactgcctaggagggaatcgctgagaccaaaacgcaagcgcacgcgggatgtcatcaatgaagatgatcccgaacccgagccagaagacgaagagacaaggaaagccagagagaaggagagaagacgacgtttaaaaaggggggccgaagctaaaaaatttgtatctgaaaatgagggggccctcgggaaaggcaaaggaaaaaggtggtttgccttcaagatgatgatggccaaaaagtgggcaaaattccttagagactttgagaatttcaaagccgcctgcgtgccatgggaaaataagattaaagcaatcgaatcacagttcggaagctctgtggcctcttatttcctgttcctgcggtggatgtacggagttaacatggtactctttattctgactttctcgttgatcatgctgccggagtacctgtgggggctaccatacgggtctctgccccgcaagacggttccgagggctgaggaggcgagcgcggccaacttcggagtgctgtatgacttcaatggtctcgcgcagtactcagtactgttttatggatattacgataataaaaggacaattgggtggatgaacttcaggcttcctttgtcgtacttcttggttggtatcatgtgtatcggatatagcttcctagtagtactgaaggccatgactaaaaacattggagacgatggaggtggggatgacaataccttcaatttttcttggaaggtcttcacttcctgggattaccttattgggaaccctgaaacagctgataacaagttcaacagcatcaccatgaattttaaagaggccattaccgaagagaaggccgcccaggttgaggagaacgtgcatttgattcgcttccttagatttctggcaaatttctttgtgttcttaaccctggggggatccgggtacctgatcttctgggccgtgaaaaggagtcaggagtttgcccagcaggacccggatacacttggttggtgggaaaaaaacgagatgaacatggtcatgtcactcttgggcatgttctgtcccactctgtttgacctgttcgccgagctggaggactaccacccgcttatcgccttgaagtggcttctcggcaggattttcgccctgctgctcggcaacctctatgtgttcatcctagcactgatggatgagattaataataagatagaagaggaaaagttagtgaaagctaacatcacgctttgggaggcgaacatgattaaagcatacaatgccagtttctccgagaacagcaccggcccaccgttttttgtacatcccgccgatgtgccacgaggcccgtgttgggagacaatggtgggacaggaatttgtccggctgacagtttccgacgttctgaccacgtacgtgaccatcctgattggggatttcctacgcgcctgctttgtcaggttctgtaactactgctggtgctgggacttggaatacggatacccgtcttatacagagtttgacatcagtggtaacgtgctcgcactcatttttaatcagggtatgatctggatgggttctttcttcgcacccagtttgcctggcattaatatcctgagactccatacatctatgtacttccaatgctgggcggtcatgtgctgtaatgtcccagaagcccgagtgttcaaggcgtctcgctcaaacaacttctatctcggcatgctgcttctcatcctcttcctttctacaatgcctgtcctttatatgatagtgagcctgcctccctccttcgattgcggtcctttttcagggaagaacagaatgtttgaagtaatcggcgagacacttgagcacgactttccttcttggatggccaagatccttcggcaactgtccaaccccgggttagtgatagctgtcattctggttatggtgctggccatttattaccttaacgcgacagcgaaaggccaaaaagccgctaacctggatttaaagaagaagatgaaaatgcaggccctggagaacaagatgagaaacaagaaaatggccgcggctagggccgccgcagctgcaggccggcagtag

SEQ ID NO: 138549 - DNA, 1665 bp, synthetic construct
  misc_feature 1..1665: note = Description of Artificial Sequence: Synthetic coding sequence
  source 1..1665: mol_type = other DNA
gttgaatggagcggagagtgcctacgcagctgtcgacgcgaggttcagattaaagtggaagagaaggaggacgagactgaggaatcctcatccgaggaagaagaagaagtcgaggacaaactgcccaggcgggaaagcctcagaccgaaaagaaagcggactagagacgtgatcaatgaagacgaccccgaaccggagccagaggacgaggaaacacgcaaggctcgtgaaaaagagagaaggcggaggcttaagaggggcgctgaggctaaaaagttcgtgtctgagaacgagggcgccctgggcaaggggaagggcaaaaggtggttcgcttttaagatgatgatggctaaaaagtgggctaagtttctcagggacttcgagaactttaaggcagcgtgcgtgccgtgggaaaacaagattaaggctatcgagagtcaattcggttcctccgtagcctcttacttcctcttcctacggtggatgtatggtgtaaacatggtgctgttcatattgactttttctctgataatgctgccagagtacttatggggtctcccttatggctccctgccaagaaagacagtgcctcgggcagaggaggcttccgccgcgaactttggggtgctgtacgatttcaatggattagctcagtactctgtgctcttctacgggtactacgacaataagcgtacgatagggtggatgaactttcgactgccactcagttactttctggtgggtataatgtgtattggctatagtttcttggtagtgctcaaagccatgacaaaaaatatcggcgatgatggtggcggtgatgacaacacctttaacttcagctggaaggtgttcaccagctgggattacctgataggaaacccagaaacagccgacaacaagtttaactcgatcaccatgaattttaaagaggccataaccgaagagaaagctgctcaggtggaagagaacgtccacctgatccgctttttgcgcttcctagctaatttttttgtctttctaactctgggcggttcaggctatttgatcttttgggccgtgaaacgctctcaggagtttgctcagcaagaccctgacaccttgggctggtgggagaaaaacgagatgaacatggttatgagcctccttgggatgttttgtcccacactgttcgatctatttgccgaattggaagactaccacccccttatagccttgaaatggcttttggggagaatctttgcactcctgcttggaaatttatacgtatttatcctggcattgatggatgagataaataataagattgaggaagagaagctagtgaaagctaacatcacgctgtgggaggccaacatgatcaaggcctacaacgcctccttctcagaaaattctacaggaccccccttcttcgtgcacccagccgacgtccccagggggccctgttgggaaaccatggtggggcaggaattcgtgcgattaacagtgtcggacgtacttactacctatgtgaccatcctcatcggggattttcttcgcgcttgttttgtgcgtttttgcaactattgctggtgttgggacttagagtacggatacccctcttacacagaatttgatatttcagggaacgtactggccctaatcttcaaccagggaatgatctag

SEQ ID NO: 138550 - DNA, 2265 bp, synthetic construct
  misc_feature 1..2265: note = Description of Artificial Sequence: Synthetic coding sequence
  source 1..2265: mol_type = other DNA
caaattaaggtggaggagaaggaagacgagactgaagaatcatcgtccgaagaggaggaggaagttgaggataaactgcccaggcgggagtctctcaggccgaaaaggaagcgcacccgcgacgtgatcaatgaagatgatcctgaacccgaacccgaggatgaggaaacaaggaaagcaagggagaaagagagacgaagacgcttgaaacgaggagcagaggaggaagagatcgacgaggaggagctcgagaggttaaaggcagaactggatgaaaagcgtcagattattgccaccgtgaaatgtaagccatggaaaatggaaaagaaaatagaggttctgaaagaagccaagaagttcgtgtctgagaatgagggggccctcggtaagggcaagggcaagcggtggtttgcgttcaaaatgatgatggccaagaagtgggccaagtttctccgagacttcgagaacttcaaagcagcctgtgtgccatgggagaacaaaattaaagccatcgagtcacaattcggctcgagcgttgcatcctacttcctgtttctgaggtggatgtacggtgttaatatggtgctatttatactcaccttttctttaataatgctgccagagtatctttggggtttaccctatggctcactgccaagaaagacggttccgcgagcagaagaggccagcgctgctaatttcggtgtcctgtacgatttcaacggccttgcgcagtactccgtcctgttctatggctattatgacaacaaacggacaatcggttggatgaacttccggctgccattgagttacttcctcgtgggcataatgtgcatcgggtactcttttctagtagtgcttaaggcaatgaccaagaatattggagacgacggtggaggtgacgataacacttttaactttagctggaaggtttttacatcatgggattacttaattgggaatcccgaaactgctgacaataagttcaatagtatcaccatgaacttcaaggaggccattacggaagaaaaggctgcgcaggtggaagagaatgtccatcttatcaggtttctccgcttcctggcaaatttttttgttttcctgaccctgggggggtcaggttaccttatcttttgggctgtcaagagatcacaggagttcgcacagcaggaccctgacactctcgggtggtgggaaaaaaatgaaatgaacatggtcatgagcctgcttggaatgttttgcccgactttattcgacttgttcgccgaacttgaagattaccaccccctgatcgccttaaagtggcttttgggccgcatcttcgcacttctgcttggtaatctctatgtgttcatcctggctcttatggatgagataaataataagattgaggaagaaaagctggtgaaggcaaacattactctttgggaagccaatatgatcaaggcttacaatgcaagtttttctgaaaacagcacgggacctcctttcttcgtgcaccctgcggacgtcccccgggggccttgctgggaaacaatggtcggacaagagtttgtgaggctgacagtgtctgacgtcttgacgacatacgtgaccatcctgatcggtgatttcctcagggcctgcttcgtgaggttttgtaattattgttggtgctgggatctcgagtatggctaccccagctacaccgaattcgacatcagcggaaacgtccttgctctgattttcaatcagggcatgatctggatgggtagctttttcgccccttccctccctggcatcaacattcttaggctgcacacttctatgtactttcagtgctgggccgtgatgtgctgcaatgtgccagaggccagagtgtttaaggcatcgaggagcaacaatttttatcttggtatgctgctgttgatcctatttttgagcactatgccagtcctgtacatgatcgtgagtctgccccctagcttcgattgcggtcccttcagcggaaagaaccgcatgttcgaggtaataggcgaaaccttagagcacgacttcccctcctggatggctaagatattgaggcagttgagtaaccctggattagtaatcgctgtcattttggttatggtgctcgccatctactaccttaatgctacagctaaggggcagaaagcagctaatctggatttgaagaaaaagatgaaaatgcaggcactcgagaacaagatgcgcaacaagaaaatggcagctgccagagctgacggggctgccggccgagcttag

SEQ ID NO: 138551 - DNA, 2721 bp, synthetic construct
  misc_feature 1..2721: note = Description of Artificial Sequence: Synthetic coding sequence
  source 1..2721: mol_type = other DNA
atgagtcaccaggtgaaggggttaaaagaagaggctcggggaggggtgaaggggagagtgaagagcggttcaccgcacaccggcgacagactgggccgccggagtagctctaagagagcactaaaagcagaaggcactccagggcgcagaggcgcccaacgatcccagaaggagcgcgcgggtgggagtccaagtcctggctctccgcggcgcaagcagacaggtaggcggagacaccgggaagagctgggagagcaggagagaggagaagccgagcgcacctgcgagggtcgccggaagagggacgagagggcaagcttccaagagaggaccgccgcccccaagagagagaaggaaatcccccgtcgcgaagaaaaatctaagcggcaaaaaaaaccccgatcctctagcttggcctcctctgcttcagggggggagagcctctcagaggaagagcttgcccagatactggagcaggtggaagagaaaaagaaactcattgcaacaatgcggagcaaaccctggcctatggccaagaagctcacggaactgcgggaggcccaggaattcgtcgaaaagtacgagggagccctaggcaagggcaagggtaaacaactgtatgcttacaagatgcttatggctaaaaaatgggtcaagtttaagagggactttgacaactttaaaacacagtgcatcccttgggaaatgaagatcaaggatatcgagagccacttcggaagctcagtggccagctactttatcttcctgagatggatgtatggcgtcaatctggtcctgttcggattgattttcggactcgtcattatccctgaagtgttgatggggatgccctacggttctataccaaggaaaactgtgccccgcgcagaggaggagaaagctatggacttcagcgtactttgggactttgaaggctatattaaatatagtgctttattttatggctattacaacaaccagcgaaccattggctggctgcggtaccgactgcccatggcgtactttatggtcggcgtaagcgtattcggctatagcctgatcattgtaattcgatccatggcaagtaatacgcaggggtccacaggggagggggaatctgacaactttaccttcagttttaaaatgttcacttcttgggactatctcattggaaattccgaaaccgccgacaacaaatacgcgagcattacgacgtcgttcaaggagagtatcgtggatgaacaagaatcaaataaggaggagaacatccacctaacgagatttcttcgtgtccttgctaactttctgattatctgctgcctgtgtggcagtgggtacttgatttatttcgtggtgaagcgcagccaacaattctctaaaatgcagaacgtgtcatggtacgaaagaaacgaggtggaaattgtaatgtcattgctggggatgttctgtcccccactgttcgaaaccattgcggcactggagaattaccacccccggacaggactgaagtggcagctcggtcgcatcttcgctctattcctgggaaatctatatacatttctgttggccttgatggacgatgtacacctcaagctggcaaacgaggagaccattaagaacatcacccattggactctctttaattactataattctagcgggtggaatgagtccgtcccccgcccaccccttcatcccgctgatgtgccccgggggtcatgttgggagacggcagtcggaatcgaattcatgcggcttactgtgtctgacatgctcgtgacttatattaccatcctgctgggggacttcttgcgcgcctgttttgtgcgatttatgaactactgctggtgctgggacttggaagctggctttccgtcatacgctgagtttgacatcagcggaaacgtcttagggctgatatttaatcaggggatgatttggatgggctccttttacgctcctgggctggttgggatcaacgtgctacgactgctgaccagcatgtacttccagtgctgggccgtgatgtccagtaatgttccgcatgagagagtttttaaagcaagccgtagtaataacttttatatgggtctgttgcttctggtcttgtttttgtccctccttcccgtggcttacaccattatgagcctgccgccctcatttgattgcgggcctttctctgggaagaaccgtatgtacgacgtgcttcaggagaccattgaaaacgactttccgacctttctggggaagatctttgcttttttggccaacccgggattaattatcccggccattttgctcatgttcctcgccatatattatctgaacagcgtttcgaaatccctttcaagggccaacgcacagctgcgcaaaaagatccaggtgctgcgcgaagttgagaagtcccacaagtcggtgaaaggaaaggctacagcccgggattcagaagacacgcccaaaagttccagcaagaatgctacccagctgcaattgaccaaagaggaaaccacccctccttccgcaagccagagccaggccatggataagaaggcccagggcccaggcaccagcaattcggcgtcacgaactacgctgcctgcttcgggacacctgcctatctctcgcccgcccggcatcggtcctgacagtggccacgccccgtcccaaacccatccatggagaagcgctagtggcaagtccgctcagagaccccctcactag

SEQ ID NO: 138552 - DNA, 1365 bp, synthetic construct
  misc_feature 1..1365: note = Description of Artificial Sequence: Synthetic coding sequence
  source 1..1365: mol_type = other DNA
atggcacagcccctcgctttcatcctcgatgtgcccgaaactcctggcgatcagggccaggggccttctccttatgatgagagtgaagtccacgactctttccagcaactgatacaggagcagtctcagtgcactgctcaggagggacttgagctgcagcagcgggagcgggaggtaacaggcagctcacagcaaactttgtggcgccccgaaggaacccagagcactgccacgcttcgcatcttggctagcatgccatcaagaacgatcgggcggtcgcggggcgcaatcatctctcaatattacaacagaacggtgcagcttcgctgccgatcttccaggcctttacttggcaatttcgttaggagcgcctggccttctctcagattgtatgatctcgaacttgatccgacagcactcgaggaagaagagaaacagagtctcctggttaaggagcttcagtccctggcagtcgcacagcgcgaccacatgctgcgaggaatgcctctttcactggcggagaagcgttcactcagagagaagagccggactccacgtgggaagtggagaggacaacccggatctggaggtgtgtgcagctgttgtggccggttgaggtatgcctgtgtgctggcactacactctctgggtctggctcttctcagcgctctccaagctcttatgccatggagatacgcgctaaaaagaattggcggccagttcgggtcttccgtcctctcatactttcttttcttaaaaacactgctagccttcaacgctttgttattactcctcctggtggcgtttatcatggggccccaggtggctttcccaccggcacttccaggacctgcacccgtttgcaccggactggagctgttaactggagccggttgcttcacacatacagtgatgtattacgggcactacagcaatgccacactgaatcaaccttgtggctcacctttagatggctcacagtgtactcctagagtgggtggcctgccctacaatatgcccttggcctatctgtctaccgtcggggtatccttctttatcacatgtatcacactggtgtacagcatggcacactccttcggcgagtcttatagagtcggctccacctccggcattcacgccattacagtgttttgctcatgggactacaaggtgacccagaaacgcgcttctaggctgcagcaggacaacatccggactcggttgaaaggggaggataagatctttcttattaataaactccactccatttacgagcgtaaagagcgagaggagcgctctagagtgggcacaaccgaggaggcggcggcacctcctgctttactgactgacgaacaagatgcctag

SEQ ID NO: 138553 - DNA, 2418 bp, synthetic construct
  misc_feature 1..2418: note = Description of Artificial Sequence: Synthetic coding sequence
  source 1..2418: mol_type = other DNA
atggcgcagcccctagcctttatattggacgttccagagacaccaggagaccagggccagggaccctcaccatacgacgagagcgaagtgcacgattcctttcagcagttaatccaagaacagagtcagtgtacagcacaggaagggctggagctacagcagcgagaaagagaagtcacaggctctagccagcaaaccctctggcgtccggagggaacacaatccacagccactctcagaatactggctagcatgccttccaggaccattggcaggtcacgaggtgctatcatttcacagtattacaacagaacagtgcagctgaggtgtaggtcttcacgaccactgttgggcaatttcgtgcggtcagcctggccttcactgaggctgtacgatctggaactggaccctaccgctttagaagaggaggagaaacaatccctgctcgtcaaggagctacagtctctggcagttgctcagagagatcacatgctacgcggcatgcctttaagtttggcagagaagaggagcctcagggagaagagtcggacaccccgtgggaagtggaggggccaacctggctctggcggggtctgctcctgctgtggacggcttcggtatgcatgtgttttggccctgcattccctgggattggcactgctgtcggctctgcaagcactgatgccatggcgatatgccttgaaacggattggtgggcagttcggcagcagtgtcctcagttacttcttatttctgaagactctacttgctttcaacgcgctcctgttgttgctattggtggcttttatcatgggccctcaagtagcctttccacctgccctacccgggccggcacctgtgtgtaccggtttggaactgctgaccggcgcaggatgcttcacccataccgtaatgtactacgggcattattctaatgctaccctcaatcagccctgtggctctcccctggacggttcccagtgcactcccagagtgggcggtctgccatataatatgccactcgcctatttgagtaccgtgggagtgtctttttttatcacctgcattactttagtctacagcatggcacattcttttggagaaagctatcgcgtgggctccacgtccggcatccatgccataaccgtattttgctcatgggactataaggttactcaaaagagagcatctaggctccagcaggataatatccgaaccagattaaaggaactgttggccgagtggcagctgagacactctcccagatccgtctgtgggaggctgcggcaggctgccgtgctcggactcgtctggcttctgtgtctcggaacggccctcggatgcgccgtcgccgtgcatgtctttagtgaattcatgatccagtcacctgaagcggctgggcaagaagccgtccttctggtcctcccactggtggtgggcctgctgaaccttggggccccatatttgtgcagagtgctggccgccctggagcctcacgacagccccgtgctcgaggtttatgtagctatctgccggaatctgatcctgaagttggctatcctgggaaccttgtgttaccattggctgggcagacgcgtgggcgtccttcaggggcagtgttgggaagacttcgtggggcaggaactttacaggtttctggtgatggattttgtgctaatgctgctagatactttatttggcgaattggtgtggagaatcatcagtgaaaaaaaacttaagcgacgccggaagccagaatttgatatcgcgaggaacgtgctggagttaatttatggacagactctgacttggctcggggtcctattcagccccctgctgcctgccgtccagatcatcaaactgttgcttgtcttctacgtcaagaagacttctctccttgcaaactgccaggccccacggcgcccttggctggcctcccacatgtccaccgttttcctgaccctcctgtgctttccagcctttctgggggccgctgtatttctctgctatgccgtctggcaggttaagcctagttcaacctgcggtccattccgaactctggacactatgtatgaggcagggcgcgtgtgggtgagacatctggaagccgcaggcccgcgggtgagctggctgccctgggtccatcgctatttaatggagaacacctttttcgtctttctggtgagcgccctgctgttggcagtgatctatctgaatattcaggtggtgcgtggccagcgaaaggtcatatgcctgctaaaggagcagatcagtaacgagggagaggataagattttcctcattaacaagctgcatagtatttatgagcgtaaggagcgggaggagagatccagagtaggcactaccgaggaggccgccgcaccgccagcattactgaccgacgagcaggacgcctag

SEQ ID NO: 138554 - DNA, 1155 bp, synthetic construct
  misc_feature 1..1155: note = Description of Artificial Sequence: Synthetic coding sequence
  source 1..1155: mol_type = other DNA
atggcgcattcattcggcgaatcttacagagtgggttcgacctcaggcattcatgcgattaccgttttctgctcatgggactataaggtgactcaaaaacgagctagtcggctccagcaggataacattagaactcggctgaaggagctgctcgccgaatggcagttgaggcattcccctaggagtgtatgtgggcgactgcgccaggccgcggtgctggggctagtttggctcctgtgcttgggaacggcactcggatgcgctgtggcggtgcatgtgttttcagaattcatgatccaatcccccgaggcggcaggtcaggaagcggtgttgctcgtcctcccattggtagttgggctgttaaatctgggagcaccctatttgtgtagagtccttgcagctctggagcctcacgacagtcccgtcttagaagtgtatgtggcgatctgtaggatcatcagcgagaagaagttaaagcggaggagaaaacctgagttcgatatcgccaggaacgtgttggagctgatatatggacagactctgacctggcttggggttctgttttctcctctcctgccagcggtacagattatcaagcttctcctggttttctacgtaaagaagacatcactcttggcaaattgccaggccccacgacgtccgtggttggcttcccacatgagcactgttttccttacactcctgtgctttcccgccttcttgggagctgccgtctttctctgttacgctgtctggcaggtgaaaccgagctccacatgtggtcccttcaggacgctggatacgatgtatgaggctggcagggtgtgggtgcggcacctggaggctgcggggcccagagtctcatggctgccttgggtgcaccggtacctgatggagaatactttcttcgtttttctggtgagcgccctgctgctggccgtgatttatctgaatatccaagttgttcgcgggcagaggaaagttatatgcctccttaaggagcagattagtaatgaaggcgaagataaaatctttttgataaataagctgcattcaatttatgaacgtaaggagcgagaagagaggagtcgagtggggaccaccgaggaagctgcggcccccccggccctgctcactgatgagcaagatgcctag

SEQ ID NO: 138555 - DNA, 417 bp, synthetic construct
  misc_feature 1..417: note = Description of Artificial Sequence: Synthetic coding sequence
  source 1..417: mol_type = other DNA
caatgttgggaggatttcgtaggccaggaattgtatcgcttcctggtgatggacttcgtgctgatgctgctcgatactcttttcggcgagctcgagaatcgttttcagagcgacgttttctcaagccggatatgggcttggtggagaaaaccggagtttgatattgccagaaatgtgctcgagctgatctatggacaaacacttacctggctgggtgtgcttttttctccactgctacctgctgttcagattataaaactgctgctcgtcttctacgtgaagaaaacaagcctcctcgccaattgccaggcaccccgccgtccatggctcgcttcccatatgtcaactgtgttcctcacacttctgtgttttcctgcctttctgggcgctgctgtgttcttgtgctacgctgtatag

SEQ ID NO: 138556 - DNA, 2418 bp, synthetic construct
  misc_feature 1..2418: note = Description of Artificial Sequence: Synthetic coding sequence
  source 1..2418: mol_type = other DNA
atggcccagcctttagcattcatcctagacgtaccggagaccccaggagatcagggccaggggccctcaccctatgacgagtctgaggtgcacgacagtttccagcagttaatccaagaacagagccagtgtacagcccaggagggcttagagctgcaacagcgggagcgcgaggtgactgggagctcccaacagacactatggaggccagaagggacccagtctaccgccacactccgcatactggcctccatgcctagcaggaccattggacggtccagaggagcaataatctcccagtactataataggaccgtgcaactccgttgccgttcatctcgaccccttttgggaaacttcgtccgctctgcatggccatctcttcggttatacgatttagaattagacccaaccgcgttagaggaggaagaaaagcagtcgctgctggtcaaggaactccaatccctggcagtggctcaacgtgatcacatgttgcggggtatgccgttgtctctcgccgaaaagagatctctccgggagaaaagtcgaacacccagaggaaaatggcgaggccaaccggggtccgggggggtgtgttcgtgctgcggaagactccgttatgcatgtgtcctagccctgcattcactgggcctcgcattgctgagcgctcttcaggccctgatgccttggcgatacgccttgaaaaggatcggaggacagttcggaagctcggtactttcatatttcctgtttctgaaaaccctgctggcttttaatgccttgctgctgcttctgctggtggctttcattatggggccccaagtagccttcccccccgccttgccggggcctgcccccgtatgtactgggctggagctactcacaggcgccggctgctttacacacactgtgatgtattacgggcactactcaaacgccacattgaatcaaccttgtggttcccccctggacggcagtcaatgtacccctagggttggcgggctgccctataacatgccactcgcctacctttctacggttggcgtgagctttttcattacatgtattactctggtgtatagcatggctcactcttttggggagtcttatcgcgtaggaagtactagtggcattcatgccattaccgtattctgcagctgggattataaggtgacacagaagcgggcttctaggctacagcaggataatatcaggacccgactgaaagaattacttgcggagtggcagttgagacactcccctaggtctgtctgtggtagattgagacaggccgccgttcttgggttagtgtggctgttgtgccttggaacagccttgggctgcgccgttgccgtgcacgtctttagcgagtttatgatccagagcccagaagcagcaggacaggaggctgtactgcttgtgctgcctttggtagtcggtttgctgaacctgggagccccctatttgtgcagggtcttggccgcgctggaacctcatgattcacccgtactggaagtctatgttgccatatgcaggaacttgatcctgaagttggccatcctgggcaccctgtgttaccactggttggggcgaagggtgggtgtgttgcaaggtcaatgttgggaggactttgtcggccaggagctatataggtttcttgtgatggactttgtgcttatgttgctggacacactctttggcgagctagtgtggcgaatcatctccgaaaagaaattgaagcggagaagaaaacctgagttcgatattgctcgaaatgtgttggagctgatttacggacagaccctgacgtggctgggggtgttatttagcccacttctgcccgccgtccagattattaagctcttgctcgtattctacgtgaagaagaccagtcttctcgcaaactgccaagcccctcgaaggccatggctggcctctcacatgagtacggtgttcctcacactcctttgtttccctgcatttctaggcgcggccgtcttcctgtgttatgcagtgtggcaggttaaaccatctagtacctgtggaccatttagaaccctagacacaatgtacgaggctggaagggtctgggtccgtcaccttgaagcagccggaccccgcgtgagctggctcccctgggtgcaccgctatttgatggagaacacctttttcgtgtttctcgtgagcgcactgctgcttgccgtgatctacctgaacatccaagtagtacgcggccaacgtaaggtgatttgcttactgaaagaacagatatctaacgagggcgaagacaagatctttttaatcaataagcttcatagtatctatgagaggaaggaacgtgaggaacggagccgcgtcggaacaacagaggaagctgcagcacctccagccctgctaaccgatgaacaggacgcttag

SEQ ID NO: 138557 - DNA, 1098 bp, synthetic construct
  misc_feature 1..1098: note = Description of Artificial Sequence: Synthetic coding sequence
  source 1..1098: mol_type = other DNA
atgaatataatggattttaacgtgaagaaactcgcagccgatgctggtacattcctcagccgtgccgtgcagtttacagaagagaaacttgggcaggctgagaagactgagttggatgcccacttagagaacctgttgtcaaaagcagagtgcacaaaaatctggactgagaagataatgaaacagaccgaagtcctcttgcaacctaatccaaatgcccgtattgaggaatttgtttacgagaaactcgaccgaaaggccccctctcggattaataaccccgaactattgggccagtacatgatcgatgccggcacagagttcggtcccggaaccgcctacggtaacgccctgataaagtgtggcgaaacgcagaagcggatcggtaccgctgaccgcgaacttatccagacttccgcattaaatttcctgaccccactgaggaactttatcgagggggactataagacaatagccaaagagcgtaaactcctgcagaacaaacggctcgatttggatgctgcaaagactcgcctgaagaaagcgaaggcggctgagacccggaactccagcgagcaagaacttcgtataacccagtccgaatttgatagacaggctgaaataacacgtctcttgttggagggtattagcagtacccatgctcaccatctaagatgcctcaacgacttcgtggaagcccagatgacttactatgcgcagtgttatcagtacatgctcgacttacaaaaacagctggggagttttcccagtaactacctgtcaaataacaaccagacatctgtgactccagtgccaagcgtacttcccaacgctattggctctagtgccatggcatcaaccagcggactggtgattaccagtccaagcaacttatccgacttaaaagagtgctcaggaagtcgaaaagcccgggttttgtatgattatgacgcagccaatagcactgaactcagtttattggcagacgaagttatcactgtgttcagtgtggttggaatggactctgattggcttatgggggagcggggcaaccagaagggcaaggttccaatcacatatctagaactgctgaactag

SEQ ID NO: 138558 - DNA, 636 bp, synthetic construct
  misc_feature 1..636: note = Description of Artificial Sequence: Synthetic coding sequence
  source 1..636: mol_type = other DNA
atggccggagtgggtgctgggccacttcgggcaatggggagacaagctctcctccttctggcattatgtgctactggcgctcagggactgtactttcacatcggcgaaaccgaaaaacgttgctttatcgaagaaatacccgatgaaacaatggtcatcggaaactacagaacccaagggatgcacgtagaagtcaaggacccagatggcaaggtcgtgctttccaggcagtatggatccgagggtcgattcacgttcactagccataccccaggagaccaccaaatctgtttgcactccaactctacaaggatggccctttttgccggaggtaagcttagggtccatctggacattcaggtgggtgagcatgcaaacaactaccccgagatagcggctaaagacaaactcacggaattgcagttgcgtgcccgtcagcttctagaccaggtagagcagattcaaaaggagcaggactatcagcggtatcgtgaagagagatttcgtctcacatctgaatcaaccaaccagagggtcctctggtggtcgatcgcacagacggtgatccttatcttgacaggaatttggcagatgcgccacctcaaaagtttctttgaggccaaaaaactcgtgtag

SEQ ID NO: 138559 - DNA, 684 bp, synthetic construct
  misc_feature 1..684: note = Description of Artificial Sequence: Synthetic coding sequence
  source 1..684: mol_type = other DNA
atggctggagtgggtgcaggccctcttcgtgctatgggacgccaggctcttctgctgctggctctctgcgctacaggagcacagggtctgtattttcatatcggagagaccgagaaaaggtgtttcattgaagagatcccagacgaaactatggttataggcaattacaggacccagatgtgggataagcagaaagaagtgttcctgccctccaccccaggtcttggcatgcacgttgaagtgaaagatccggacggtaaagtcgtgctgagccgccagtatgggtcggaagggaggtttacttttaccagtcacacaccaggcgatcatcagatttgcctccactcgaatagtaccaggatggctctgttcgccggcggtaaactcagagtgcacttggacatacaggtgggtgagcacgcgaataattatcctgaaatcgctgcaaaggacaaacttacagagttacagctgcgggctcgccagctcctggaccaggtggagcagattcagaaagagcaggactatcagcggtaccgagaggagcgttttagactgacaagcgagagcacgaaccagcgggtgctgtggtggtcaatcgctcaaaccgtcatattgatcctgaccgggatatggcagatgcggcacttgaaaagcttctttgaggccaaaaagctcgtgtag

SEQ ID NO: 138560 - DNA, 660 bp, synthetic construct
  misc_feature 1..660: note = Description of Artificial Sequence: Synthetic coding sequence
  source 1..660: mol_type = other DNA
atgtcaggactcagtggtccaccagccaggcgaggaccattcccactcgccctgctgctcttatttctgctgggccctcgcctcgtgctagccatatcctttcatctccccatcaactctagaaagtgcctccgcgaggaaatccataaggaccttctcgtgaccggcgcttatgagattagcgatcagagcgggggtgccggtggattacgcagtcatctgaagatcacagatagcgccggccatatcctttatagcaaagaggatgccactaagggaaagttcgccttcaccaccgaggactatgatatgtttgaggtatgttttgagtctaaagggaccggacgcattccggaccaactggtcattctggatatgaaacacggagtggaagcaaagaactacgaagagatcgccaaagttgaaaaactaaagccgctggaagttgagttaagaaggctcgaggacctgtctgagtcgatcgtgaacgatttcgcctacatgaagaagagagaagaagagatgagagacaccaatgaaagcacaaacacccgtgtgctgtacttttccatctttagtatgttctgtcttataggcctggcgacctggcaggttttctatttgcgcagatttttcaaggccaagaaactaatcgaatag

SEQ ID NO: 138561 - DNA, 471 bp, synthetic construct
  misc_feature 1..471: note = Description of Artificial Sequence: Synthetic coding sequence
  source 1..471: mol_type = other DNA
atggctggctggcctggggcaggtcccctgtgtgttctcgggggagccgcgcttggtgtttgcctcgcgggagtcgcggggcagcttgtggagccaagcaccgcccctccaaaaccgaagccccccccactaactaaagagacagtagtcttttgggatatgagactctggcatgtggtaggcatcttctccctttttgtcctatctattatcatcactttgtgctgcgtgttcaattgcagagttcctcgcacccgcaaggagattgaagcccgctacctgcagaggaaggcagccaaaatgtacactgataagctggaaacagtaccacccctgaacgagttaactgaagttcctggagaagacaaaaagaaaaaaaagaagaagaagaaagactcggtagatacggtggccatcaaagtggaggaggatgaaaagaacgaagctaagaaaaagaaaggcgagaaatag

SEQ ID NO: 138562 - DNA, 1602 bp, synthetic construct
  misc_feature 1..1602: note = Description of Artificial Sequence: Synthetic coding sequence
  source 1..1602: mol_type = other DNA
atgaatgaatcccctgaccccactgacctggctggggtgattattgagctcggtcccaatgattcccctcaaacttcagagttcaaaggagctaccgaggaagctcctgccaaagaatcagtacttgcacgcctgtctaaattcgaggtggaggatgcggagaatgtggccagctatgattctaagatcaagaaaattgtgcatagcattgtctcttccttcgccttcggtctgtttggcgttttcttggtgctgttggatgttaccctcatcctggcggatctgatcttcaccgactccaagctctacattcccctcgaatatcgctcaatttctctggccattgctctgtttttcctgatggacgttttgttgcgtgtgtttgtggagcgacggcagcagtatttcagcgatctcttcaatatacttgataccgccatcatcgtaatccttctgctcgttgacgttgtttacatattcttcgacatcaagctgctgaggaacattccgcggtggactcatctgctgagacttctccgacttatcatactcctgcggatcttccacctgtttcatcaaaaacgacaactggaaaaactcattcggcgccgtgtctcagaaaataagcgcagatatacccgggacggctttgatctggaccttacttacgttacagagcggattatcgcaatgagcttcccgagcagcggccgtcagtctttttacaggaatcctatcaaagaagttgttcggtttctggataaaaagcatcggaaccactaccgcgtatacaatctctgctccgagcgcgcatatgaccctaagcactttcataaccgcgtggtacgcatcatgatagatgaccacaacgttcctaccctacatcagatggtggtgtttacgaaggaagtgaacgaatggatggcccaggacttagagaacatcgttgcaatacactgcaagggtggcactgaccggacagggacgatggtgtgtgctttcctgatcgccagcgagatttgctctacagcgaaagagtccctctattatttcggagaaaggagaaccgataaaacgcatagcgaaaagtttcagggagttaagaccccctctcagaagcggtatgtggcctactttgctcaggtgaaacacctgtataattggaacctcccgccccgcagaattctgtttataaagcacttcatcatctacagtattccacgctatgtgagggatctgaaaatacagatcgagatggaaaagaaagtcgtcttctccactatcagcctggggaagtgctctgtcctggacaatataactaccgataaaatcttgatcgacgtctttgacgggcttcccctctacgatgatgtaaaggtacagtttttctatagcaacctgccgacctactacgataactgctccttctacttttggcttcatacgagcttcattgaaaacaaccggctttacctgccaaagaacgaactggataacttgcataaacaaaaggcgagaagaatctacccgagcgacttcgctgtcgagattttatttggcgagaagatgacttcaagcgatgtcgtggccgggagtgattag

SEQ ID NO: 138563 - DNA, 1542 bp, synthetic construct
  misc_feature 1..1542: note = Description of Artificial Sequence: Synthetic coding sequence
  source 1..1542: mol_type = other DNA
atgaacgaaagccccgaccccaccgatcttgccggcgtcattattgaactgggaccaaacgactcaccccagacgtctgagttcaaaggggctacggaggaagccccagcaaaagaaagctcaaaaataaaaaagatcgtgcattctatcgtttccagtttcgccttcggcttattcggtgtctttctcgtgctcttggatgttacactcattctggcggacttgatttttacggactcaaagctgtacattcccctggagtaccgctctattagtctcgctattgccctgttctttttgatggatgtgctcctccgggtctttgtagagaggcggcaacagtatttttctgaccttttcaacatcctcgacactgctattatagtgatcctactgctggtcgatgttgtttatatcttctttgacatcaagttactgcgaaacattccccgctggactcacctgcttcgtcttcttagactgatcatcctgttacggattttccacctcttccatcaaaagaggcaactggagaagctgatccgccgcagggtgtcagagaacaaaaggcgctatactcgggatggatttgacctggatctgacttatgtcaccgaacggataatcgcaatgtccttcccatcatccggtaggcaaagcttctatcgcaaccctattaaagaggtcgttcgcttccttgataaaaagcataggaaccattaccgggtttacaatctgtgttcagaaagagcctacgacccgaaacactttcacaatcgtgtggtgagaatcatgattgatgaccataatgttcccacgctgcaccagatggttgtcttcactaaggaggtgaatgaatggatggcgcaggacttggaaaatatcgtcgccatacactgcaaaggaggtacagaccggacaggaaccatggtttgcgcttttcttatcgcttctgaaatttgttcaactgccaaggagagcctgtactattttggcgagcgccgcactgacaaaactcacagtgagaagttccaaggggtcaagactccttcgcagaagcgctatgttgcctattttgcacaggtgaagcatctgtataactggaacctgccaccaagaaggatcctttttattaaacacttcattatttacagcattcctcgctacgtgcgcgacttaaaaatccagattgagatggaaaagaaggtggtgttctcaaccatctcactggggaaatgcagtgtcctggacaacattactacggacaaaattcttatagatgtgtttgacggtctccccctgtacgacgacgtcaaggtgcagtttttctattcaaacttgcctacctattacgataattgctcattctatttttggttacacacaagcttcatcgaaaataaccgcctttacctgcctaagaacgagctagataacctgcacaaacagaaagcacggcgaatctatccaagcgacttcgccgttgagatcctctttggggaaaagatgaccagttcagacgtggtagcaggttccgactag

SEQ ID NO: 138564 - DNA, 1656 bp, synthetic construct
  misc_feature 1..1656: note = Description of Artificial Sequence: Synthetic coding sequence
  source 1..1656: mol_type = other DNA
atgaatgagtcccccgacccaactgatctggctggcgtgattatcgagctgggaccaaatgatagccctcagacaagcgaatttaagggtgcaactgaagaagctccagccaaggagagtccacacacatccgagtttaaaggtgcagcaagagtgtcccctatttcagagtccgttctcgccagactgtccaagtttgaggtggaagatgccgaaaatgtggcttcgtacgactccaagataaaaaagattgtgcacagtatagtgtccagctttgcttttggcctgtttggcgtgtttctagttctcctggacgtgacactgatcttggctgacctcattttcaccgactctaaactgtacatacctctggaatacagatctatcagtttagccatcgcgctgttctttcttatggatgttctgctcagggtctttgtggagcgcaggcaacagtatttctcggacttatttaacatactggatactgctatcatagtgatactgctgcttgtggacgtggtgtatatatttttcgatattaagttactgagaaatattccaaggtggacacatctgctgaggctgctgcgcttaatcatcctccttcggatttttcatctattccatcagaaaagacagctcgaaaaattgatacgtcgacgcgtgtcagagaacaagaggagatacacaagagatggatttgatttggatctgacctacgtaacagagagaattatagctatgagctttccttcgtcggggcgacagtccttttatcgaaacccaataaaagaggtggttcgctttcttgacaagaaacatcgcaaccactacagggtgtacaatctgtgttccgaaagggcttacgatcctaagcattttcacaaccgggtggtgcgcattatgatagacgaccataatgtgccgactctccaccagatggtggtcttcactaaggaagtgaatgaatggatggctcaggacctggaaaacatcgtggccattcactgtaagggtggaactgacagaaccggaactatggtgtgcgccttcctgatcgcttccgaaatctgcagcacagccaaagaatctctgtattatttcggggagcgaaggacggacaaaacacacagcgagaaattccaaggtgttaagaccccttctcagaaacgatatgtggcctacttcgcccaagtcaaacacctgtacaattggaacttacctccccgtcggattcttttcatcaagcatttcatcatctacagcataccacggtatgtgcgggatcttaaaattcagatcgagatggagaagaaagtggtgttcagtacaattagtctcgggaagtgtagtgtgcttgataacattacaacagataaaatcctgatcgatgtctttgatggactaccgttgtatgacgacgtgaaagtacaattcttttattccaatttgccaacctattacgacaactgctccttctacttctggttacacactagctttattgaaaataatcggttgtatctccccaagaatgagttagataatctgcacaaacaaaaagctcgccgtatctacccatcagactttgccgtggagatcctattcggcgaaaagatgacctcttctgacgtggtggctgggtccgactag

SEQ ID NO: 138565 - DNA, 1692 bp, synthetic construct
  misc_feature 1..1692: note = Description of Artificial Sequence: Synthetic coding sequence
  source 1..1692: mol_type = other DNA
atggagagggatagtcacgggaacgcttccccagcgaggacaccatctgcgggagctagccctgcacaggccagcccagccggcacgccccctggaagggccagcccggcccaggcttcccctgcccaggcgagtccggcgggtacaccgcctgggagagcgtcgccggctcaggcgtctcccgcaggcacacctcccgggagagcatcccctggacgggcctcacctgcacaggctagccccgctcaggcaagtcccgccagagcctcgccagccttagccagcttgagccgcagttccagcggtcggtcttcctctgccagaagcgctagcgtgactacatcacctactagggtctacctcgtccgcgctacaccagtgggagccgtgcccatccgatcgagccctgctaggtccgcgccagcgactagggcaactcgcgagtctcccggaacctctttgcctaagtttacttggcgagagggccaaaaacaactacccctgattggttgtgtgctcttgctgatcgccctcgtagttagtctgattatcctcttccagttttggcagggccacaccggtataagatataaagagcagcgggagagctgcccaaagcacgcagtgcggtgtgatggggtggtcgactgtaagctgaagtctgacgagctagggtgtgtgcgattcgactgggacaagtcgcttcttaaaatttattccggctcctcccatcaatggctccctatttgctcttctaattggaatgactcttattctgaaaaaacatgccaacagctcggcttcgaatccgcacaccgcactacagaggtggcgcatcgcgactttgccaactccttctctatcctaagatacaactcaaccatacaggagtctctccataggagtgaatgtccttcgcaaagatatatcagcctgcagtgttcgcactgtggcctcagggcgatgactggacggattgttggtggggcactagcctccgatagcaagtggccgtggcaggtctctctgcacttcggcacaacacacatatgcggtggcacgcttatcgatgctcaatgggtactcacagccgcacattgcttctttgttacgagagagaaggtgcttgagggctggaaagtgtatgcaggaaccagcaacctgcaccagctgcctgaggccgcttctatcgctgaaataataattaattcaaattacacagacgaggaagacgattacgacatagcactgatgagactatcaaagccactgacactcagcgcccatatccatcccgcctgtctgcccatgcatggccaaacgttttctcttaacgagacctgctggattacaggctttggaaagacacgggaaacagatgacaaaacaagcccctttctgagagaggtgcaggttaatctcatcgacttcaaaaagtgtaacgattatctcgtttatgattcttaccttacaccgcggatgatgtgcgccggagacctccgcgggggacgtgatagttgtcagggagacagcggcgggcctttggtctgcgagcagaacaacagatggtacttggccggcgtaacatcttggggcacgggttgcggacaaagaaacaaaccaggtgtgtacacaaaggtgactgaggtgctgccctggatttattctaagatggagtcttcagcagggtag

SEQ ID NO: 138566 - DNA, 1194 bp, synthetic construct
  misc_feature 1..1194: note = Description of Artificial Sequence: Synthetic coding sequence
  source 1..1194: mol_type = other DNA
atggaccctgattcagaccagccacttaattcactcgtgaaggtgatattggataagtattactttctatgtggccagcccttacatttcattccccggaaacagctgtgcgatggcgagctggactgtcccctcggcgaggatgaggagcactgcgtgaaaagctttccagaaggacccgccgtcgcagtgcggctgtccaaggatcggagcacgcttcaggtcctggatagcgcaaccgggaactggttctcagcttgttttgataactttactgaggctcttgctgagacagcatgtcggcaaatgggctactctagcaaaccgaccttccgagccgtcgagatcggcccagatcaggaccttgacgtggtagagattacggaaaacagtcaggagctgcgtatgaggaacagcagcggaccttgtttaagtggcagtctcgtgtcacttcactgcctggcctgtggcaaatccctgaaaacgccccgcgtggtgggggtcgaggaggcctcagtagacagctggccgtggcaagtttccatccagtatgacaaacagcacgtttgcgggggaagtattctggatccacattgggtgctcacagccgcccactgctttcggaaacataccgatgtctttaattggaaggtccgcgccggctcagataaactcggatccttcccaagcctggccgtggccaaaatcataatcatcgaattcaatcctatgtaccctaaggacaacgacatcgccttaatgaagctgcagttccccttgaccttcagcgggaccgtacgccctatctgccttccattcttcgatgaggagcttacacccgcaaccccgctgtggatcatcgggtggggattcaccaaacaaaatggtggtaaaatgtcggatatactgctacaggctagcgttcaagttattgactcgaccaggtgcaatgctgacgatgcctaccagggtgaggttaccgagaagatgatgtgtgcaggcattcctgagggaggcgtggatacatgtcagggtgacagtggcgggcctctgatgtaccagagtgatcagtggcacgtcgtcggcattgtctcttggggatacggatgcggggggccttccactcctggtgtatataccaaagtgtccgcctaccttaactggatctataatgtttggaaagccgagctgtag

SEQ ID NO: 138567 - DNA, 1266 bp, synthetic construct
  misc_feature 1..1266: note = Description of Artificial Sequence: Synthetic coding sequence
  source 1..1266: mol_type = other DNA
atgatgtaccggactgtgggattcgggacgagatctagaaacctcaagccttggatgatagctgtacttatcgtgctttcactgaccgtcgtagccgtgaccattggattgttggtgcacttcctcgtgtttgaccagaagaaggagtattatcacgggtcctttaaaattttggatccacaaatcaataataacttcgggcagtccaacacatatcagctcaaagacctccgagagactactgagaacctcgtgagccaggttgatgaaatcttcatcgattcagcttggaagaaaaattatattaagaaccaggtggttagattgacacctgaggaggacggtgtcaaggtcgatgtgattatggtgttccagtttcccagcacagagcagcgcgctgtcagggagaaaaagattcaatcaattttgaatcaaaagattcggaatctaagagccctccctatcaatgccagctccgttcaagtgaacgctatgtcgtccagtacgggagagctcaccgtccaggcctcctgtgggaaaagggtggtaccactaaatgtcaaccggatcgccagcggtgtgatcgcacctaaggctgcctggccttggcaggctagcctccagtacgataatatacaccagtgcggagcaacacttattagcaacacgtggcttgtcactgcagcccactgtttccaaaaatacaagaatccccaccagtggaccgttagcttcggcaccaaaattaatcccccattaatgaaaaggaatgtacggcgcttcatcatccacgagaaatatagaagtgccgctagggagtacgatatcgcagtagtacaagtcagctcccgggttaccttctcagatgacatccgccagatttgcctcccggaagcaagcgcgtctttccagcctaacctgactgtccacatcaccggcttcggcgcactgtattatggtggagagagccagaacgatcttagagaggcaagagtcaagatcatttctgatgatgtgtgtaagcagccacaagtgtacggaaatgatattaaacctggaatgttctgtgcgggctatatggagggcatctacgatgcttgcagaggcgacagcggaggaccattggtaactcgggacctgaaagatacatggtatctcatcggaattgtatcctggggggataactgcggacagaaggataaaccaggagtgtacacccaagtgacctactatagaaattggattgcgtcaaaaaccggcatctag

SEQ ID NO: 138568 - DNA, 1257 bp, synthetic construct
  misc_feature 1..1257: note = Description of Artificial Sequence: Synthetic coding sequence
  source 1..1257: mol_type = other DNA
atgatgtaccggacggtgggattcggcacacggtcccgaaatttgaaaccttggatgatcgctgttctcatagtgctgagtctcacagtagtcgccgtcaccatcggactgttggtgcatttccttgtttttgatcagaagaaagaatattaccacggaagttttaagatactggatccccagattaacaataattttggtcaatcaaacacctaccagctaaaagatcttagagagaccacggagaacctggttgatgagatatttatcgacagcgcatggaaaaagaactatatcaaaaatcaggtcgtgcggctgacccccgaggaagatggagtaaaggtggatgtgatcatggtgttccagttcccgtccactgaacagagggccgtacgcgaaaaaaaaatacagtcgatcctcaaccagaagatacggaacctcagagcgttgcctatcaacgcaagctcagtgcaagtaaacgccatgtcttcatccacgggagagctgaccgtgcaggctagctgcgggaagcgcgtggtacccctcaacgtgaaccgcatcgccagtggggttattgcaccaaaagccgcttggccctggcaggcttccttgcagtacgacaacattcatcagtgcggcgctactctgatctccaacacgtggctcgttaccgctgctcactgctttcagaaatacaagaatccacaccaatggacagtcagttttggcacaaaaatcaatcccccattaatgaagcgaaatgtaaggaggttcatcattcacgagaagtacaggtctgctgcccgcgaatatgacatcgcagtggtgcaagtgtcaagcagagttacgttctcagatgatattcgccagatatgcttaccagaggctagcgcttcttttcagccgaatctcactgtgcatattaccggattcggggccctgtactacgggggagagagccagaatgatctgcgggaggctagggtcaaaattatatccgacgatgtatgcaaacagccccaggtttacggaaacgatattaaacctggtatgttttgcgcgggttacatggaaggaatctatgatgcctgtaggggtgattcaggcgggcccctggtgacccgcgacctgaaggatacatggtacttgataggtatagtgtcctggggagacaactgtggccagaaagataagccaggcgtgtacactcaggtgacctactaccggaattggattgcttccaagacaggaatctag

SEQ ID NO: 138569 - DNA, 1254 bp, synthetic construct
  misc_feature 1..1254: note = Description of Artificial Sequence: Synthetic coding sequence
  source 1..1254: mol_type = other DNA
atgtacaggaccgttggctttgggacccgctcaagaaacttgaaaccatggatgatcgcggtgttgatcgtgttgagtctcaccgtcgtcgccgttactattggtcttctcgtacactttctggtgtttgatcagaagaaggagtattaccacgggtccttcaagattctggacccccagattaataataattttggccagtcaaacacttatcagctgaaggacttaagggagactaccgagaacttagtagacgagatctttatcgatagtgcctggaagaaaaattacataaagaaccaggtcgtcagacttacccctgaggaagacggggtaaaagtggatgtaattatggtgtttcaatttccctcgactgagcagagagcagtgagagaaaagaagatccaatcgatcctcaaccagaaaattcggaacctacgggccctgccaattaacgcctcttcagtgcaggttaacgctatgagctcatccactggtgagcttacagttcaagcgtcctgtggcaagagggtcgtgcctctcaatgttaatcggattgcgagcggggtaatcgcccccaaagccgcctggccctggcaggccagtttgcagtatgacaacatccaccagtgtggagcaaccctaatctctaatacttggttagtgacagccgcccactgctttcaaaagtataagaacccccatcaatggacggtttctttcggaaccaaaatcaaccccccacttatgaagcgtaacgtgcgaagattcatcatccatgaaaaatatcgatccgctgcccgggaatacgatattgccgtggttcaggtgtcctcgagagtcaccttcagtgacgacatccgccagatttgcctccccgaagcctctgcatctttccagcctaacttaactgtacacataactggatttggagccctgtattacggaggtgaatcacagaatgacctgcgggaagcacgggttaaaattattagcgatgatgtgtgcaaacagccacaggtctacggaaacgacatcaagcccggtatgttctgtgccggatatatggaaggcatttatgacgcttgccgaggcgacagtggtggcccactagtgacacgcgacctaaaagacacttggtacttgatcggaattgtctcatggggcgacaactgcggacagaaggacaaaccaggagtgtatacacaggtgacgtattataggaattggatcgcatctaagactggcatttag

SEQ ID NO: 138570 - DNA, 1689 bp, synthetic construct
  misc_feature 1..1689: note = Description of Artificial Sequence: Synthetic coding sequence
  source 1..1689: mol_type = other DNA
atggagcgggattctcacgggaacgcctcacctgccagaaccccaagtgccggagctagtccagcccaggccagccctgccggcacccctccaggaagggcatcccccgcccaggctagcccggcccaggcctccccagcagggacccccccaggtcgcgcatctccagcacaagcgtcacccgctggcacccctccaggcagagcctcccccggcagggctagcccccttcaagccagtccagcccgcgcgagccctgccttggcttcactttcccgaagctcttccggtcgcagtagttcagcaaggagcgcatcagtcacaacttcccctactcgggtttacctggtgcgggccacaccagttggggccgtccccattagatccagtcctgcacggagcgctcccgctacaagggcaacacgggagtctcctggcaccagtctccctaagttcacatggagggaaggtcagaaacagctgccactgatcggatgtgtgcttttactgatcgccttggtcgtgtcactgatcattctcttccaattctggcagggccataccggaataaggtataaagagcagagagaatcatgccccaagcatgcggtgcggtgtgacggcgttgttgattgtaaactgaagagcgatgaactcgggtgtgtgcggtttgattgggacaagtccctgctgaagatctattcaggatccagccaccagtggttgcctatatgtagttctaattggaacgattcttactcagaaaagacgtgccaacagctgggctttgaaagtgcacataggactaccgaagtagcacacagggacttcgcaaacagtttttctattctgaggtacaacagtaccatccaggaatcgttgcaccgatccgaatgcccgtcccagcgctacatttcactgcagtgctcacactgcgggcttcgggcaatgacaggtaggatcgtcgggggcgcactggctagtgacagtaagtggccatggcaggtgagtctgcacttcgggactacgcacatctgcggcggaacacttatcgatgcgcagtgggtgttgaccgcggctcattgtttctttgtgacacgggagaaagtgctcgaaggttggaaagtgtacgccggaactagtaatctccaccagttgccagaggctgcctccatagcagaaataattattaacagtaactacaccgatgaggaagatgattacgatatcgctcttatgcgcctgtccaagcctctgaccctgagcgcccacattcaccctgcatgtctgcctatgcacggacagaccttttcactgaacgagacctgttggataactggcttcggaaaaaccagagaaacggacgataagacaagcccttttctgcgcgaggtgcaggtaaatctgatcgatttcaaaaagtgtaatgattacttagtctatgattcatacctgacacccagaatgatgtgcgccggtgaccttagaggtggcagagattcctgtcagggagactccggagggcctctcgtgtgcgagcagaataaccgctggtacctcgccggagtgacatcgtggggaaccgggtgcggccagagaaataaaccaggcgtgtataccaaagttaccgaggtcctgccatggatctactcgaaaatggaatccgaagtgcgatttcggaaatcttag

SEQ ID NO: 138571 - DNA, 1761 bp, synthetic construct
  misc_feature 1..1761: note = Description of Artificial Sequence: Synthetic coding sequence
  source 1..1761: mol_type = other DNA
atggagcgtgactctcatggaaatgcgtcccccgcgcgaactccctccgcgggagcttcacctgcacaggccagtccagcagggaccccacctggcagagcctctccagcacaggcttccccggcacaggcaagcccagcaggaacccctccaggtagggcttctccagcgcaggccagtccggctgggacaccaccggggcgtgccagcccgggacgggcgtctcctgctcaggcgtcgccagctcaggcctctcccgcccgtgctagcccagcccttgcttccctgtcccggtcatcttcagggcggagcagcagcgccaggtctgcatcagtaaccacttcccccaccagagtgtatcttgttcgggcaacaccagtgggcgcggtccctattcggtcctcgccagcgaggtccgctccagccactcgagcgacaagggaaagccccggcacctctctccccaagtttacttggcgagagggtcagaaacaactgccgttgattgggtgcgtcctcctgttaatcgcactggtggtttcactcatcatattgtttcagttctggcagggccacaccggcattagatacaaagagcagcgggagtcctgtcctaaacacgctgtgaggtgtgatggagttgttgattgtaaattgaagagtgacgagctcggatgtgtgcgcttcgattgggataagagtctgcttaaaatttactccgggtcctctcaccaatggctacctatctgctcaagtaattggaatgactcgtatagtgagaagacatgtcagcagcttggattcgagtctgctcatcgaaccacagaggtcgcacaccgggatttcgccaatagcttcagtattcttagatataatagcactattcaggagagtctacaccggagcgagtgcccatctcaacgatatatttccctccagtgctctcactgtggcctgcgtgctatgaccgggagaatagtgggaggtgcgctggccagtgactctaaatggccatggcaagtaagtctacacttcggaacgacgcacatatgcgggggaacgttgattgacgctcaatgggtcttgacagcagcccactgcttttttgtgactagggaaaaagtgctcgaggggtggaaggtctatgcaggcacttctaatctgcatcagcttccggaagccgcatctatcgccgaaatcattattaattccaattataccgacgaggaggatgactatgatatcgcgctgatgcggctctccaagcctttgaccctgtccgcacatatccacccagcttgcctacctatgcatggccagacattctctcttaatgaaacctgctggattacaggcttcggtaagacgcgggaaacggatgataaaacatcgcccttccttcgcgaagtgcaagtcaatctcatagattttaagaagtgcaacgattacctagtctacgacagttacttgaccccgaggatgatgtgcgccggagacctaaggggagggcgcgattcttgtcagggagattctggcggcccattggtctgtgagcagaacaaccggtggtatcttgcgggtgtcactagctggggcactggatgcggacagaggaacaaacctggagtgtacactaaggtgacggaagtgctgccgtggatctacagtaaaatggaagtcaggagtctgcagcaggacaccgccccctcaaggttgggaaccagctcggggggggaccctgggggcgccccaagactgtag

SEQ ID NO: 138572 - DNA, 1704 bp, synthetic construct
  misc_feature 1..1704: note = Description of Artificial Sequence: Synthetic coding sequence
  source 1..1704: mol_type = other DNA
atggaacgcgattctcatggtaatgcatctccagcaaggaccccttctgccggcgctagcccagcgcaggctagtcctgctggtaccccaccaggtagagcgtcccctgctcaagccagtccagcccaggccagccccgccggcacaccccccggcagagcttcccccgcacaagctagccctgcgggaacaccgccaggccgtgcttcccctgggagggcctcccccgcacaggcatctcctgctcaagcctctcccgcgcgcgcttcaccagctttagcatctctgagtcggtccagctcggggaggagtagctctgcaagatctgcctccgtaaccacctctccaactagagtttatctagtccgcgccacccccgtgggggccgtccctatcaggtccagtcccgcaaggtccgcccccgccacccgcgcaaccagagagtcacctggcacttcattacctaagtttacctggcgcgagggccagaagcagctgcccttgattgggtgcgtgctgctgctgatcgctttagtggtcagcctcatcatcctgttccaattttggcagggccacaccggcatcagatataaagagcagcgggaatcatgtcccaaacacgcggtgcgatgtgatggtgtagtcgattgcaaactcaagagtgatgaactggggtgcgtgcgattcgattgggataagtccctgttgaaaatctactctggcagttctcatcagtggctgcctatctgttcttccaactggaacgattcttactccgaaaaaacatgtcagcagcttggcttcgagagcgctcatagaactactgaggtggcacatagggacttcgccaactctttttccattttacgctataatagcacaattcaagagtccctgcatcgtagtgagtgtcctagccaacgatatatctccctccagtgttcgcattgcgggctgcgcgctatgactggacgaatcgttggtggggcactggcatctgattccaaatggccttggcaagtatcccttcactttggaaccacccatatctgtggtggaactttgatcgacgcacagtgggtactgacagctgcccattgtttttttgtcaccagggaaaaggtgctcgagggctggaaggtgtacgcaggaaccagcaatctgcaccagctgccagaagccgcctctatcgccgagatcattatcaatagcaactatacggacgaggaggatgattacgatatagcactcatgaggttgagcaaacccttaacattgtctgctcatatccatccggcttgtctgcccatgcatggccagaccttctcactgaatgagacatgctggattacaggtttcgggaaaacaagggaaaccgacgacaagacctccccctttctgcgcgaggtgcaggttaacttgatcgactttaaaaaatgcaacgattaccttgtgtacgacagctatttgaccccgaggatgatgtgtgccggagatctgcggggaggccgggacagttgccaaggcgattcaggtgggccactggtctgtgagcagaataaccgatggtatctggccggagttaccagctggggcaccgggtgtggtcagaggaacaagcccggcgtttacacaaaggtgacagaagtcttgccttggatctactcaaagatggaaagtgaggtgcgctttaggaagagttag

SEQ ID NO: 138573 - DNA, 1476 bp, synthetic construct
  misc_feature 1..1476: note = Description of Artificial Sequence: Synthetic coding sequence
  source 1..1476: mol_type = other DNA
atggagcgtgactcccacgggaatgcatcacctgcccgcacgccttccgctggtgcttctcccgcccaggcatccccagctgggacccccccgggccgggccagcccagcccaggctagtcctgcccaagcttcgcccgctggcaccccgccaggtagagcctcccctgcgcaggctagccctgccggaactcctcccggtcgagctagccccgggcgggccagtcccgctcaagcgtcgccggctcaagcctcacctgctcgcgctagcccggccctggcttccttgagtagatcctcgagcggaagatcttcctccgcacggtccgcttcagtgaccacaagtccaacccgcgtgtatcttgtgcgggccaccccggtgggagcagttccgattcgaagctccccagcccggagcgcaccagccacccgagctacccgggagtcacctggaaccagtcttccgaagtttacttggcgagaagggcaaaaacaattacctctgatcggctgtgtcctgttgctaatagctctcgtagtgagcctgatcatcctcttccaattctggcagggacacaccgggatccgctacaaagaacagcgggaaagctgcccgaaacacgccgtgcgttgcgacggcgtggtggattgtaagttaaagtcagacgagcttggctgcgtgcgcttcgattgggataaatcactgctgaagatctattcaggcagttcacatcagtggctccccatttgttcgtctaactggaatgattcctattcagagaaaacttgccagcagctgggatttgaatcagctcaccggacgaccgaagtggcgcacagagattttgccaattcgttcagcatcctcaggtacaactctaccattcaggaaagcttacatcggtccgagtgtccctcacaacgctacatttctctgcagtgcagtcattgtggactccgggctatgactgggcgcatagtcggtggagcactggcctctgattctaaatggccctggcaagtttccctgcacttcgggacaacacacatctgtggcggtaccttaatagacgcacagtgggtccttacagccgcacactgtttttttgttacccgcgagaaggttttggagggatggaaggtgtacgcgggtactagcaatttgcatcagctgcctgaagccgctagtatcgctgagataatcatcaactcaaactatactgacgaagaggacgactacgacatcgcactgatgagactcagcaaacccctaaccctgagtggcgaaggtatttgtacacccagatctcccgctccccagccccagcatccccttcaaccttcacacctcagtgcctctgtcaatagctatcctggcccaaaagcctctgccggtcagaagtctaagacactgaaggacccctatatggaacacttttgcttcattatacgagagaccgaagcccagggactttag

SEQ ID NO: 138574 - DNA, 1599 bp, synthetic construct
  misc_feature 1..1599: note = Description of Artificial Sequence: Synthetic coding sequence
  source 1..1599: mol_type = other DNA
atggaacgggacagtcatggcaatgcaagccccgcccggactccatccgccggagcatctccagctcaggcgtcacccgcgggcacaccgccgggacgagcgtcccccgcacaggccagcccagcccaggctagccccgctgggactcctcctgggcgggcgtccccagcccaagcgtccccggcaggcactcctcctgggcgcgcaagtcctggcagagcctcccccgcccaagcttctccggcgcaagcttctccggcacgcgcatctcctgctctcgctagtctctcgagatccagtagtggcaggtcctccagcgcccgatctgcctctgttaccacatctccgacacgcgtgtatctcgtgagagccacaccagtgggagccgtccccattcgcagctcacctgcgcgctccgccccggcaaccagagcaacccgggagtctcccgtacagttctggcaaggacacaccgggatccgctataaggagcagagagagtcctgtcccaagcatgccgttcggtgtgatggtgtagtagactgtaagctcaagtcggatgaactgggttgtgtcagattcgactgggataagtccctgttgaagatctatagcggctcgagccaccagtggctcccaatttgcagctccaattggaacgatagttactctgagaaaacttgccagcagctggggttcgaatcggctcatcgaacgactgaagtcgcccatcgcgactttgccaactctttctctattcttaggtacaacagtactattcaggaatccctgcaccgcagcgagtgcccctcccagcgctacatcagtctgcagtgctcccactgcggcctgcgcgctatgacagggagaatcgtaggtggcgctctagcatccgacagtaagtggccatggcaggtgagtcttcattttggcacaacccacatctgcggaggcacgctgatagatgcacaatgggtgttaaccgccgctcactgcttcttcgttacaagagagaaagttctagaaggttggaaggtctacgccggaacctcaaacctccaccagctgcctgaagcagcctccatcgctgaaataatcatcaattcgaattacaccgacgaggaggatgactacgacattgcattgatgagactgtcgaaacccctgactctttccgcccatattcatcctgcatgcttacccatgcatggacagaccttcagcctgaatgagacctgttggatcaccggctttggaaagactagagagactgacgacaaaacgagtccattcctcagagaagttcaagtcaacttaattgacttcaagaaatgtaacgattatttggtctacgacagttatcttaccccgagaatgatgtgtgcaggggacctccgcggcggacgcgatagttgccagggcgacagcggcggcccgttggtctgtgagcagaataataggtggtacctagcaggtgtaacatcctggggcacagggtgcggccagcgcaacaagcccggtgtatacacaaaggttacagaggtgctcccatggatttattcaaagatggagtcagaggtaaggttccgcaagtcttag

SEQ ID NO: 138575 - DNA, 1365 bp, synthetic construct
  misc_feature 1..1365: note = Description of Artificial Sequence: Synthetic coding sequence
  source 1..1365: mol_type = other DNA
atgggcgagaatgatcccccagctgttgaagctcccttcagcttcagaagcctgtttggcttagacgatttgaagatttcccctgtggcccccgatgctgatgcagttgcagcccagatattgagccttctgcccctgaaattcttcccgattatcgtaatcggaatcattgctttgatcctcgcactagccataggtctgggtattcacttcgattgttccggaaaatatcgttgccgcagctcctttaaatgtatcgagctaattgcaaggtgcgacggggtgtctgattgtaaggatggggaagacgaataccgttgcgttcgcgtcggtggccagaacgcagtactgcaggtttttaccgccgcgtcctggaaaactatgtgtagcgacgactggaaagggcactatgcgaatgtcgcctgtgcccaactgggttttccatcatacgtatcctctgataatctgcgggtcagtagtctggagggccaattccgggaggaattcgtttccatcgatcatctcctcccagacgacaaggttaccgccttgcaccattccgtttacgtccgtgaggggtgtgcatcaggacacgttgtgaccttgcagtgtactgcttgcggtcacaggaggggctacagctctcgcatcgtgggtgggaacatgtccttactgtcgcagtggccctggcaggcctctctgcagttccaaggttaccacctgtgcggcggatcagtcattacacctctgtggatcattactgctgcccactgtgtgtacgatctgtaccttcccaagtcatggactattcaggttggcttggtgagcctgctggataacccagcacctagtcaccttgttgagaagattgtgtaccatagcaagtacaaaccaaagcgattaggaaatgatattgcgctcatgaagttagctggcccgctcacttttaatgaaatgatccagccagtctgtttgcccaatagtgaggagaattttcctgacgggaaggtgtgctggacaagcggctggggagctacagaagatggtgccggagatgccagccctgtgctaaatcatgctgcagtgccactgatatccaacaagatctgcaatcatagggatgtgtatggtggcattatcagtcctagtatgctgtgtgccggatatttaacagggggagtggactcatgccagggggactcggggggacctctggtatgtcaggagcgcaggttgtggaaactcgtgggagccacctctttcgggatcgggtgtgctgaggtcaacaagccaggcgtttacacccgagttacctctttcttggattggattcacgaacagatggaaagagacctgaaaacgtag

SEQ ID NO: 138576 - DNA, 1617 bp, synthetic construct
  misc_feature 1..1617: note = Description of Artificial Sequence: Synthetic coding sequence
  source 1..1617: mol_type = other DNA
atgcaggcagtggggccgaagccactgcccacccttctctgcggcggaaggacagggcacagaaccgctcgtgtgctctccttcctcatccggtcctgcccctgcgaacccgggaaaggctgtgtctacggcaagccggtcaccctgtggcccactatctccagtgtggtaccgtcgacttttcttggtctgggaaactacgaagtggaggttgaggcagaacctgacgtaaggggtcccgagatcgtgacaatgggcgagaacgatccccctgctgtagaggcccctttcagcttccggtccctctttggcctggacgatctgaagatcagtcccgtggcccctgatgctgacgcagtggctgcacaaatcctgtctcttctgcctctgaagttctttcctataattgtcatcggtatcatagcccttatacttgccctcgcaataggactggggattcacttcgattgctctggaaaatatagatgtcgctcatcctttaaatgtatcgaactgatagctcgatgcgacggcgtgtccgattgcaaagacggcgaggatgagtatcgatgtgtcagagtcggtggccagaatgccgtcctgcaagtatttaccgccgccagctggaaaactatgtgctctgacgattggaaggggcattatgctaacgtcgcttgcgcccagctgggttttccgtcatacgttagcagcgacaacctaagagtgagttctttagagggtcaatttagagaggagttcgtaagtattgaccacctgttacccgacgataaagttacagccttgcaccactcagtgtatgtgagagagggttgtgcctcaggccacgttgtgaccctgcaatgcaccgcttgcgggcataggcggggctacagcagccgaatagtgggtggaaatatgtccctattaagccagtggccttggcaggcctctttgcagtttcagggataccatctatgtggcggatcagtcatcacaccactgtggatcattacagccgcccattgtgtgtacgatttgtatttgccgaaaagctggaccatccaggtcggcctcgtgagccttctcgacaaccccgccccatctcacctcgttgaaaagattgtctatcacagcaagtacaagcccaagcgcctgggtaatgatattgctttaatgaagttggccgggcctctcacctttaacgagatgattcagcctgtgtgccttcctaacagtgaggaaaacttcccagacggaaaagtatgctggactagtggctggggtgccaccgaggatggggccggtgacgccagtccagtgctaaatcatgccgctgtgccgctcatctccaacaagatctgcaatcatcgggacgtgtacggggggattattagcccatctatgttgtgcgcggggtacctgactgggggggtggactcctgccagggggactccggggggccattggtctgccaggagcggaggctttggaagcttgtgggcgctacctcgttcggcattgggtgtgcagaggtgaataagccaggagtatatacaagagttacgtcctttttggattggattcatgaacagatggagcgcgacctgaagacttag

SEQ ID NO: 138577 - DNA, 1035 bp, synthetic construct
  misc_feature 1..1035: note = Description of Artificial Sequence: Synthetic coding sequence
  source 1..1035: mol_type = other DNA
atgggcgagaatgatccccctgctgtcgaagcacctttctcattccgctcgctcttcgggctcgacgatttaaaaatatctccagtcgctcccgatgcagatgcagttgcagcccaaatactaagtctgctgccactcaagttttttccaatcattgtgatcggaatcatcgcactgatcctggccctggcaattggcttgggcatacacttcgattgttctggaaagtatcggtgccgttcatcattcaaatgtatagaacttatcgccagatgcgacggtgtaagtgactgtaaggacggcgaggacgagtaccgctgtgtgagggtcggcgggcagaacgccgtgctacaggtgttcacagctgcctcttggaagaccatgtgttccgacgattggaaaggccattacgccaacgttgcatgcgctcagcttggcttcccttcatatgtttccagtgacaatctgagagtgtccagcctcgaggggcagttccgtgaggagttcgtgtcaattgatcatctcctgcccgatgacaaggtgacagccttgcaccactccgtttacgtaagagaagggtgtgcttcagggcacgtcgtaacgcttcagtgtacggcctgtgggcaccgaaggggatacagtagccggatagttgggggtaatatgagccttttgagccagtggccctggcaagcctccttgcagttccagggctatcacttatgcgggggcagtgtgattacccccctctggattattacagccgcccactgtgtttacgacctttatctgcctaagtcctggacaattcaagtgggcctggtgtcattgctagacaatcccgccccaagccatctggtagaaaagatcgtgtaccatagtaagtacaagcccaaaaggctgggcaacgatatcgctctgatgaaactcgctgggccattgactttcaatggcacctctgggagcctgtgcgggagcgctgccctacccttgtttcaagaggacttgcagttactgatcgaggccttcctttag

SEQ ID NO: 138578 - DNA, 1362 bp, synthetic construct
  misc_feature 1..1362: note = Description of Artificial Sequence: Synthetic coding sequence
  source 1..1362: mol_type = other DNA
atgggagaaaacgatccgcctgccgtggaggctccttttagctttagatccttattcggacttgatgatctcaaaatatctcccgtggcccctgacgccgacgctgttgccgcccagatcctctcgctcctacctctgaaattcttcccaatcatcgtaatcggcatcatcgccctgatactcgctctcgccatcggcctgggcattcacttcgactgctcggggaagtatagatgcagatcatcctttaaatgcattgagctcatcgctcgctgtgatggcgtgtccgactgtaaagatggcgaagatgagtacagatgtgtgcgggtgggggggcagaatgctgttctccaagtctttaccgctgcttcctggaagacaatgtgctctgatgactggaaagggcactacgccaacgtggcgtgtgcacaactcggattcccatcatatgtgtctagcgacaacttgcgggtgtccagtttagaggggcaattcagggaggaatttgtatctattgaccacctgctgcctgatgataaagtgaccgctctgcatcactcagtgtatgtgcgcgaaggttgtgccagtggtcacgtggtgacactccaatgcaccgcctgtggccatagacgcgggtacagcagcagaattgtgggaggcaacatgtcccttctatcgcagtggccctggcaggcatcactgcagtttcagggctaccatctgtgcggcggaagcgtgatcacacccctatggattatcactgctgcccactgtgtatatgatctgtacctccccaaaagttggacaattcaggtggggttggtaagcttactggacaaccctgccccctcccacctggtggagaagatcgtgtaccattccaagtataagcccaagcgcttggggaacgacatcgccctcatgaagctggcagggccccttacatttaacgaaatgatacaaccagtatgcctgccaaatagcgaggagaattttcctgacgggaaggtgtgttggacatctggctggggggctaccgaggacgggggcgatgcgtctccagttctgaatcacgctgccgttcccctcatcagcaataagatatgcaatcaccgggacgtctatggcgggataatttctccatcaatgctgtgcgcaggataccttaccgggggagttgactcttgccaaggtgactcaggaggacccttggtgtgccaggagcgcagactgtggaaactggtgggggctacatcgttcggcattggttgtgccgaagtgaacaagcctggtgtgtacacacgggtcacaagttttcttgactggatccatgagcagatggagcgggacttaaaaacttag

SEQ ID NO: 138579 - DNA, 1314 bp, synthetic construct
  misc_feature 1..1314: note = Description of Artificial Sequence: Synthetic coding sequence
  source 1..1314: mol_type = other DNA
atgctgcaggatcctgactctgaccaaccactgaactctctggatgtcaagcccttacggaagcctcggatccccatggagacgtttagaaaagtgggaatacctattatcatcgcgttattgagtcttgcatccataatcattgtggttgtgctgattaaggtcatcctggacaagtactatttcctctgtgggcaaccgctgcacttcatcccaaggaagcagctgtgtgacggtgagctcgactgcccccttggagaggatgaggaacactgtgtgaaatcctttccagagggccccgcggtggcagtgcgactttccaaggacagatccaccctgcaagtgctggactccgcaactggcaattggttctccgcctgcttcgacaatttcacagaggcactggcagagaccgcctgtcggcagatgggctactcttctaaaccaacgtttcgtgctgtggagatcggaccggatcaggacctcgacgttgtagaaataactgagaattcacaggagctccgcatgcgaaactcatcaggtccctgcttatctggcagcctcgtgtccttgcactgtttggcctgtggcaagtcactgaaaaccccccgagtggtgggagtggaggaggcttctgttgactcgtggccatggcaagtcagtattcagtacgataaacaacatgtgtgcggggggagcattctggaccctcactgggtgttaaccgccgcacactgcttcagaaaacacaccgatgtattcaactggaaggtgagagccggctcagataagctcggatcttttcctagtttggcggtggctaagatcatcatcatagaattcaatccaatgtatcctaaagataatgatattgcactgatgaagcttcagtttccactgactttcagcgggacggtcaggccaatctgtttaccattctttgacgaggagttgacccccgcgactcctctgtggatcatcggctgggggttcaccaagcagaatggaggaaaaatgagcgatatccttttgcaagcttccgtgcaggtgattgacagcacaaggtgtaacgccgacgacgcttaccagggggaagtgaccgaaaaaatgatgtgtgccggcattcctgagggcggtgtcgatacatgtcaaggggactcaggcgggcctctcatgtaccagtcagaccagtggcacgtggtcggtattgtaagctggggctatgggtgtggaggacccagtaccccaggggtctacacgaaggtctccgcctacctgaattggatatacaatgtatggaaagccgagctgtag

SEQ ID NO: 138580 - DNA, 1299 bp, synthetic construct
  misc_feature 1..1299: note = Description of Artificial Sequence: Synthetic coding sequence
  source 1..1299: mol_type = other DNA
atgctgcaggacccagattctgaccagccactgaatagcctcgatgtgaagccccttagaaaaccacggatcccaatggagacattcagaaaggttggaatacccattataattgcactgctcagcctggccagtattatcatagtcgtggttttgattaaagttattctggataagtactatttcctgtgcggacagccccttcacttcatccctcgcaaacagctttgcgatggtgagctggactgccctttgggcgaggacgaagaacattgcgtgaaaagcttcccagaaggacctgccgttgctgtcagactatccaaggatcgctccacactccaagtcttggattccgcaactggcaactggttcagtgcatgcttcgacaactttaccgaagccttagccgagaccgcctgtcgccagatgggctactcccgggctgtcgagatagggcccgatcaggacctagacgtcgtggaaattactgagaacagccaggagctgcgcatgcggaattcgagtggcccttgtctctcaggatctctcgtgagtctgcactgcctggcatgcggcaagtccctaaagacacccagggtggtcggagtggaagaagcctccgtagactcctggccatggcaggtctctattcaatatgacaaacagcacgtctgcgggggatcaatcttggatccacattgggtgctgaccgccgctcactgcttcaggaagcatactgacgtattcaattggaaggtccgagccggaagtgacaaactcgggagtttccccagtctggctgtagcaaaaattatcatcattgagtttaacccaatgtaccctaaagacaatgacatcgctttgatgaagttgcagttcccactcactttttccggaacagtgcgaccaatttgcctgcctttctttgatgaagaactgacgccagcaacgccgctctggatcatcggatggggattcacaaagcagaacggcggtaaaatgtctgacattctgctacaggcttccgttcaggtgatagattctactcgctgcaacgcggacgatgcttaccagggggaagtcacggagaagatgatgtgtgctggaatcccagaagggggggtcgacacctgccagggcgactcggggggccccttaatgtaccagtctgaccagtggcatgtcgtgggtatcgtgtcatgggggtacgggtgcggaggacccagcactcctggcgtgtatacaaaggtgtcggcatatttgaattggatctacaacgtgtggaaggccgagctttag

SEQ ID NO: 138581 - DNA, 1308 bp, synthetic construct
  misc_feature 1..1308: note = Description of Artificial Sequence: Synthetic coding sequence
  source 1..1308: mol_type = other DNA
atggaccctgattccgatcaaccactgaatagcctggatgtgaaaccccttcggaagccccgtatccctatggagacattccgcaaagtcggaatccccatcattatcgctttactatccctagctagcattattatagtggtggtactgataaaggtaatcctcgataaatactactttctttgtggacagccccttcactttatcccccgtaagcagctgtgcgacggggagttagactgtccactaggggaggatgaagagcactgcgtaaagagtttccccgaggggcctgccgtggcggttcggttgtcaaaagatcggagcaccctccaagtgctggactccgcgacaggcaattggtttagcgcctgttttgacaacttcactgaagccctggccgagacggcctgccgccagatgggctatagctctaaacctactttccgggctgtcgagattggccctgaccaggacctggatgttgtggagattaccgaaaactcccaggagctcaggatgaggaactcatctgggccatgcctgagcggcagcctggtatctctccactgtctggcatgtggcaagtcccttaagacccccagggtcgtaggtgtggaggaagccagtgtcgattcctggccgtggcaagttagtatccagtatgataagcagcacgtatgcggggggagcattcttgacccacactgggtcctgactgccgcccactgctttcgcaagcataccgatgtgtttaactggaaggtccgcgcagggagcgacaaattgggttcgtttccgagcctcgcagttgctaagattatcattatcgagttcaacccaatgtaccccaaggacaacgacatcgcacttatgaaactacagtttcctctgacctttagtggcactgtccggcccatatgtctgcccttttttgacgaggaactcacccctgccaccccgctgtggatcataggctgggggttcactaagcaaaacggcggcaaaatgagtgacattttactccaggctagcgttcaggtcattgacagcacccgctgcaacgctgatgacgcatatcagggagaagttaccgaaaagatgatgtgtgccggaatccccgaaggtggagttgatacctgtcagggggacagtggaggaccactgatgtatcaatccgaccagtggcacgtcgttgggattgttagctggggctatggttgtgggggtccttccaccccgggagtatacactaaagtctccgcctatcttaattggatatataacgtatggaaagcagagctgtag

SEQ ID NO: 138582 - DNA, 1374 bp, synthetic construct
  misc_feature 1..1374: note = Description of Artificial Sequence: Synthetic coding sequence
  source 1..1374: mol_type = other DNA
atgagtttgatgctggacgatcagcctcctatggaagctcagtacgccgaagaaggacccggacccggaatcttccgggccgaacccggtgatcagcagcacccgatctcacaggccgtctgttggcgcagtatgcgtaggggctgtgccgtgctgggcgctttaggccttctggccggggccggagtcgggtcttggctgctggtgctgtacttgtgtcctgctgcatcacagccgatcagtggaactttgcaggatgaggagatcacactgagctgttctgaggcgagtgccgaagaggccctgttaccagcgcttccaaagacagtcagcttcaggataaactctgaggacttcctcctagaagcccaggtgcgcgatcagcccagatggctattagtttgccacgaggggtggtccccagccctgggactgcaaatctgctggtccctcgggcatcttagactcactcatcataagggcgtgaatttaactgatattaagctaaactcttcccaggagtttgcacagctgtcaccacggttgggcggtttcctggaagaggcctggcaaccaagaaacaattgtacaagcggccaagtggtgtccctgcgatgctccgagtgcggagcaagaccccttgcgtcacgcatcgtcggtggtcagagcgttgcccccgggaggtggccatggcaggctagcgttgctctaggattcaggcacacgtgtggcggctccgtactggctccacgatgggtcgttaccgcagcccactgcatgcattcatttcgcctggccagactgtcttcatggcgcgtgcacgcggggcttgtttctcacagtgcagtgcgtccgcatcagggtgctctagttgagagaatcattccacacccgctgtactctgctcaaaaccacgactacgatgtggctctcttgcgccttcagaccgccctgaatttttcagacaccgtgggtgccgtgtgcctgccagctaaagaacagcactttcccaaaggctccaggtgctgggtctcaggttggggccatacacatccctcccacacatatagctcagatatgctgcaggataccgtggtgccactgttcagtacgcaactgtgcaacagcagctgtgtttattccggggccttgacccctcgtatgctctgcgcaggatacctggacggccgcgcagacgcgtgccagggggactctggtggtcccctagtttgcccagacggggacacgtggcggctcgtgggagtggtgtcatggggaaggggatgtgccgaaccgaatcacccgggcgtgtacgccaaagtagccgagttcctcgattggatccacgacacggcacaggactccctgctgtag

SEQ ID NO: 138583 - DNA, 2436 bp, synthetic construct
  misc_feature 1..2436: note = Description of Artificial Sequence: Synthetic coding sequence
  source 1..2436: mol_type = other DNA
atgctgctgctctttcattccaagaggatgcctgtcgccgaggcgccacaggtggccggtggccagggtgacggtggtgacggggaggaagccgagcccgaaggaatgtttaaggcctgcgaggattccaagaggaaagctcggggctatttacgattggtgccactctttgttctcctcgcactcttagtgttagcatcggctggggtgttgctgtggtatttcctaggttataaagcggaggtcatggtgtcacaggtatactcaggtagccttcgagttctgaaccgccactttagccaggatctgaccaggcgcgaaagttccgcgttcagaagtgaaaccgcaaaggcgcagaagatgcttaaggagctgatcacttccactcggctgggcacctactacaatagcagctcagtctattcatttggagaagggcccctgacatgctttttttggttcatactgcagattcccgagcaccggaggctcatgctgagtcctgaagtagttcaggccttgctcgtggaagaactcctgtccacagtcaacagcagcgccgccgtgccatacagggccgagtacgaggtcgatcctgaaggcctggtgatcttggaagcctccgtgaaagacatcgccgcactcaacagtactctggggtgttacaggtactcttatgtgggacaggggcaggtgctccgactgaaaggcccagatcaccttgcaagctcctgtttatggcacctacagggacctaaggatctgatgctcaagctcaggctcgaatggacacttgctgaatgtagggatagactggccatgtacgacgtcgcaggccctttggagaagcgcctgattacctcagtgtacgggtgttcgcgccaggaaccagtggtggaggtgcttgcatccggcgccattatggcagtggtttggaaaaagggcttacatagctattatgaccctttcgtgctctctgtacaaccagtggtcttccaggcttgcgaggttaacctgacactggacaaccggctggattcgcagggggtactgagcacgccttactttccaagctactactcacctcagacgcactgtagctggcacttaaccgtaccgtcattggactatggcctggccttatggttcgatgcatacgccttgcggagacagaaatacgaccttccttgcacccagggccagtggaccatccagaatcggagactttgcggcctgagaatacttcagccatacgcagagcgcatcccagtcgtcgccacagctggcattaccattaattttaccagtcagatttccctgacaggacctggagtccgcgtccactacggtttgtataaccaatccgacccgtgtccgggtgagttcctgtgttccgtgaatgggctttgcgtacctgcctgcgatggggtgaaagactgcccgaatggcctagatgagcgtaactgcgtgtgccgcgccactttccagtgtaaggaggattcaacttgcatctccctacctaaagtctgtgatggtcagccagactgcctgaacgggtctgatgaggaacagtgtcaggaaggcgtgccatgcggcacttttacattccaatgtgaggacagatcttgcgttaagaaaccaaatccccaatgcgatggacgtcctgattgccgcgacggtagcgacgaggaacattgtgactgtgggctacagggacctagctcaaggatcgtcggtggtgccgtgtctagcgaaggtgaatggccatggcaggcgtctctccaggttagaggccggcacatttgcggcggtgcactcatcgccgatcgttgggtcataacggctgcacactgcttccaagaggattccatggcctcaacagtcctgtggaccgtgttcttggggaaggtgtggcagaattcaagatggcccggtgaagttagcttcaaagtttctcgattgttactccacccttatcatgaggaggatagccacgattacgatgtggcgctcttgcagttggaccatcccgtggtccgctcagcggccgtcagacctgtgtgcctgcccgctcgaagccatttcttcgagcccggtttgcactgttggataaccgggtggggcgccctgcgggaaggaggacccattagcaatgcccttcaaaaggttgacgtgcagcttatacctcaggacttgtgttctgaggtgtatcgataccaagttactcccagaatgttatgcgctgggtacagaaaaggaaagaaagatgcctgtcagggggacagcggggggccgcttgtttgtaaagccctctcagggcggtggtttcttgctgggcttgtgtcttgggggctgggctgcgggaggccaaactatttcggcgtttacaccagaatcaccggtgtcatttcatggatacagcaggttgtgacctag

SEQ ID NO: 138584 - DNA, 2475 bp, synthetic construct
  misc_feature 1..2475: note = Description of Artificial Sequence: Synthetic coding sequence
  source 1..2475: mol_type = other DNA
atgcccgtagccgaggcgccacaagtcgccggagggcagggcgatggcggcgatggagaggaagccgagcctgagggtatgttcaaggcttgtgaggactcgaagcgcaaggcccgcggatatttgcgtttggttcccttgttcgttcttctggcgcttttggtgctggctagtgctggagttcttctctggtatttcctgggttataaagccgaagtcatggtctcgcaggtgtatagcggaagcctgcgcgtgttgaaccggcactttagccaggatcttactaggagggagagttcggcatttcgctctgaaacggccaaagctcagaaaatgctaaaggaactgatcacttctacacgactcggcacctactacaactccagctcagtgtactctttcggagaggggccactcacttgtttcttttggttcattctgcagatccccgaacacaggcgccttatgctctcaccagaggtggtgcaagcactccttgtggaagagctcttgtctacagtgaatagttccgctgcagttccatatcgggccgagtacgaggtggaccccgaggggttggtaatcctcgaggcttctgtgaaagatattgccgccctgaactcaacactggggtgctacagatacagttatgtcggacaggggcaggtgctgcgactgaagggccccgaccaccttgccagctcttgtttatggcatctgcaaggtcctaaggatctcatgctgaagctccgcttggagtggactttagcggagtgtagagaccggctcgcaatgtacgacgtagccggacccttggagaaacgtctcataaccagcgtgtacggatgtagtcgacaggaaccggtggtagaggtgctggcttccggtgcgatcatggcagtggtctggaaaaaaggcttgcattcatattacgacccatttgtgctgagcgtgcagccagtagtattccaggcatgtgaggttaatctgacacttgataacaggttggatagtcagggggtcctgagcacgccttatttcccaagctactattcaccacagacgcactgtagttggcacctgaccgtcccgagtctggactatgggctggccctctggtttgacgcttatgctctccggcgccaaaaatatgatctgccgtgtactcagggccagtggacaatccagaataggcggttgtgcggcctacgaatactccagccatatgcagagcggatcccagtcgtcgctacagccggcattaccataaatttcaccagccagatctccctaaccggccccggtgtcagagtacactacggactgtataaccaatccgatccgtgcccaggagagttcttgtgctcggtgaacggcctctgtgtccctgcctgcgacggagtgaaggactgtccgaatgggctggatgaacgcaattgcgtgtgccgcgcgacattccagtgcaaagaggattcaacctgcattagcctgccaaaagtgtgtgacgggcagccggactgcctgaatgggagtgatgaggagcagtgtcaggagggagtaccttgtgggacattcaccttccagtgcgaagacaggtcgtgcgtaaaaaaacccaacccacaatgtgacggtcgccccgactgtcgggacgggtcagacgaggagcattgcgactgtggactgcagggtccttcatcacgtatcgtgggaggggccgtttcatccgagggcgagtggccttggcaggcaagcctgcaggtgagaggacgtcacatttgtggaggtgcactcatcgcagatcgatgggtaataaccgcggctcactgctttcaggaggattcaatggccagtacagttctgtggaccgtatttctcggcaaagtgtggcaaaattcccggtggccaggtgaggtatcttttaaggtgtctcgattactgctccacccctaccacgaggaggactctcatgattatgatgttgctctcctccagttagaccacccagttgtgcgctcagctgccgtcagacctgtttgtctgcctgctcggagtcacttctttgaacccgggctccactgttggataacaggttggggagccctacgcgagggtgccctgagagctgacgcagtggccctcttctacgggtggaggaaccagggatctgagacttgctgctgtcccatctccaatgccttgcagaaagttgacgttcagctaatccctcaagatttgtgctccgaggtgtataggtatcaagttacacccagaatgctgtgcgccggttatcgcaaggggaaaaaggacgcgtgccagggagactccggtggccctcttgtgtgtaaggcattgtccggacgttggttcctggcaggtcttgtgtcatggggcctggggtgtggcagaccaaactatttcggggtatacactcggatcaccggagtcatttcgtggatacagcaggtggtaacgtag

SEQ ID NO: 138585 - DNA, 2409 bp, synthetic construct
  misc_feature 1..2409: note = Description of Artificial Sequence: Synthetic coding sequence
  source 1..2409: mol_type = other DNA
atgcctgtggctgaggccccccaggttgcaggagggcagggagatggaggtgatggcgaggaagccgaaccagaaggcatgttcaaggcctgtgaagacagcaagcgaaaggctaggggatacctccgactggttcccttattcgttcttctggctctactcgtgctagcgtctgcaggcgtcctgctttggtactttttagggtataaagctgaggtgatggtgagtcaggtgtactctgggagtttgagagtgttgaataggcacttttcgcaagatctcacacggcgcgaatcctcagcttttagatccgaaaccgcgaaggcccagaagatgctcaaggaattgatcaccagcacccggctgggcacctattataactcttcatccgtctattcatttggcgaggggcccctcacctgtttcttctggttcattctgcagattccagagcatcgacggctcatgctttcgccggaagttgtgcaggccttgcttgttgaggagttattaagcaccgtaaacagttccgcagcggtgccttaccgggccgagtacgaggtcgacccagaaggactcgtcatcttggaagcctctgtcaaggacattgcagccctgaactccacgctgggatgttatcggtactcttacgtgggacaaggccaggtgctgaggctaaagggtccagatcatctggctagctcctgtctttggcacttgcagggacccaaggaccttatgctgaagctgcgcctggagtggacgcttgcagagtgccgggatagactggctatgtacgacgtcgctggtcctctagagaagaggctgatcacctcagtgtacggatgtagtagacaggagcctgtcgtggaggtgctggcatccggcgcaattatggcagttgtgtggaaaaaaggactgcatagctattatgatccatttgtgctgtccgtccagcccgtagtgttccaggcttgtgaagtcaatctgacattggataatcgcctggacagccagggcgtgctgtctaccccatatttcccttcttattactccccacaaactcactgctcctggcacctcacagtaccttccttagattatggtttggcactgtggttcgatgcttatgccttaagacgacaaaagtacgacttgccatgcacacagggacaatggaccatccagaacaggcgattgtgcggcctccggatcctgcagccatatgccgaacgtatcccggtggttgcaaccgctgggatcaccattaattttacttcgcagatctccttgacgggacccggagtgagggtccattacgggctctataatcagtccgacccttgtcctggagagttcctctgttcagtgaacggtttgtgcgtgccggcatgtgatggcgtgaaggattgtcccaacggactggatgaacgcaactgtgtctgtagagccactttccagtgcaaggaagacagcacttgcatcagtctgccaaaagtgtgtgacgggcagcctgattgcctgaatgggtcagacgaggagcaatgccaggaaggcgtgccctgtggtaccttcaccttccagtgtgaggatagatcctgcgtgaagaagcccaacccccaatgtgacgggcgtcccgactgcagggatggatcggatgaggagcattgtgattgcgggctacaggggcctagttcccgcatcgttgggggcgcggtctcttcggaaggggagtggccttggcaggcaagcctccaagttcgcggacggcacatttgcggcggcgcactcattgcagacaggtgggtcataacagcggcccactgttttcaggaggatagtatggcttccactgtgctgtggaccgtgtttctgggtaaagtgtggcaaaactccaggtggcccggcgaggtttcattcaaggtatctaggctgctcctgcatccgtatcatgaagaggattcccatgactacgatgtggccctgctgcagttggaccatccagtggtgagaagcgctgctgtaagaccagtctgtctgcctgcacggtctcattttttcgagcccggactgcattgctggattacgggatggggagccctgcgcgaaggggggccgattagcaacgcactccaaaaggtagacgtgcagcttatcccccaagatttatgctccgaagtgtatcggtatcaagtgacccctcgcatgctgtgcgctggctatcggaaaggcaaaaaggatgcttgtcagggcgattcgggggggccactcgtgtgtaaggctttgtctggcaggtggttcttggccggtctcgtgagctgggggcttggctgtggacggccaaactattttggtgtttatactcgaatcacaggcgtgatatcgtggatccagcaggtggtgacctag

SEQ ID NO: 138586 - DNA, 2475 bp, synthetic construct
  misc_feature 1..2475: note = Description of Artificial Sequence: Synthetic coding sequence
  source 1..2475: mol_type = other DNA
atgcctgtggccgaggcaccacaggttgcaggcggccagggggacgggggggacggggaagaggccgaaccggaaggtatgtttaaagcctgcgaagattcaaaacgaaaggcccgcggctatttacgcctcgtacctctgttcgttctgttggctctacttgtcctggcaagtgccggcgtcttactgtggtacttcctgggttataaagccgaggtgatggtgagccaggtgtacagtggctctctccgcgtgctgaatcgacacttcagccaagacctaaccaggagggagtctagtgcatttcgctccgagacagccaaagctcagaagatgctgaaggagctgatcaccagcacacggctcggtacgtactacaactcgagttctgtatatagcttcggagagggaccgttgacctgttttttctggttcatcctccagattccagaacatcggcggcttatgctcagcccggaagtagtccaggccctgctggtggaggaactgctgtcaacggtgaatagttcggcagctgtgccatatcgagcggagtatgaagttgatcccgagggtttggtgattctcgaggcctccgttaaagatatcgcagccctgaactctactctgggatgctatagatacagttacgtgggacaaggccaggtgttacgcttgaaagggcccgaccatctggcatcgagttgtctttggcatctgcaagggcccaaagacttgatgctgaaattacgattggaatggactctcgctgaatgccgcgatcgcctcgccatgtacgacgtagcaggtcctttagagaagagattgatcacatccgtgtacgggtgtagccgccaggagccagtggtggaggttttagccagcggcgctatcatggcagtggtgtggaaaaaaggcctgcactcttactacgatccgtttgttttatccgtgcagcctgttgtttttcaggcttgcgaggttaatctcaccctagataaccggctggattcccagggcgtattgtctaccccttattttccgagctattatagtccacagactcattgctcctggcacctcaccgtgccctccctggattatggcttagccttatggtttgatgcatatgcactgcggaggcaaaaatacgaccttccctgcacacaaggtcaatggaccatccaaaataggagattgtgcggtctgcgcatccttcagccatacgccgaacgaattccggtggtcgcaacagcaggtattaccatcaatttcacatcccagatatcgctgaccggacctggcgtgagagttcattacggactgtacaatcagtcagatccatgccctggtgaattcctgtgttccgtgaacggtctgtgtgtgccggcttgtgatggcgtaaaagactgccccaatggcctggacgaaaggaactgcgtctgccgggcaaccttccagtgtaaagaggatagcacctgtattagcctcccgaaagtctgtgatggacaacccgactgtctcaatggatcagacgaggaacaatgtcaggaaggagtgccctgcggaactttcacgtttcagtgtgaagatagaagctgtgtcaagaaaccaaatcctcaatgtgacggaaggccggattgccgggatggatcagacgaagagcattgtgactgcggcctccaaggccccagcagccgaatcgtcggcggcgccgtatccagcgaaggggagtggccttggcaagcctccctgcaagtcagaggccggcacatctgcggtggcgctctgatcgcagaccgatgggttatcacagccgctcactgtttccaagaagactctatggcctcaaccgtcctttggactgtgtttctggggaaagtctggcaaaatagccggtggcccggggaagtgagctttaaggtttccagactcctcctgcatccttatcatgaggaggatagccacgactacgacgtagcactgctacagctggatcatcccgtggtgcggagtgccgccgtgcggccagtgtgcctgcccgcacggagtcatttctttgagcccggactgcactgctggattacagggtggggcgcactgagagagggagccttgagagctgacgccgtggccctcttctatgggtggcgcaaccaaggatccgagacatgctgctgtcctatcagcaatgctttgcagaaagttgatgtccagctcatccctcaggacctctgctccgaagtctataggtaccaagtcaccccaaggatgctttgtgcagggtacaggaagggaaaaaaggatgcctgccagggtgacagcgggggccctttagtctgtaaagccttgtccggccgttggttccttgccggattggtaagttgggggctcgggtgcgggcggccaaactattttggagtctatacccgcatcaccggggtcatcagctggatccagcaggttgtgacatag

SEQ ID NO: 138587 - DNA, 426 bp, synthetic construct
  misc_feature 1..426: note = Description of Artificial Sequence: Synthetic coding sequence
  source 1..426: mol_type = other DNA
atgccagtagccgaagcaccacaggtggctggagggcagggcgatggaggtgatggcgaggaggcagaacccgaaggcatgtttaaggcgtgtgaggattccaagcgaaaggctagaggctaccttaggctcgttccccttttcgtgctgttggctcttcttgtacttgcgtccgccggagtccttctgtggtacttcctcggttataaggctgaggttatggtgtcacaggtttactccggttcactgagggttctgaaccggcacttttcacaagatctgacacggcgggaatcatccgcctttagaagcgaaactgccaaggcccagaagatgctcaaggagttgataacctccacacgcctggggacctactacaacagtagtagtgtgtattcgttcggcgaggggcccctgacttgttag

SEQ ID NO: 138588 - DNA, 1386 bp, synthetic construct
  misc_feature 1..1386: note = Description of Artificial Sequence: Synthetic coding sequence
  source 1..1386: mol_type = other DNA
atgctcctgctgttccacagcaaaagaatgccggtggctgaagccccacaggtcgccggtgggcagggtgacgggggcgatggcgaggaggcagagcccgagggcatgttcaaggcgtgcgaggactccaagcgcaaagcaaggggttatctcaggctggttccactgttcgtgttactcgccctattggtgctggcatcagcaggagtgcttctctggtattttttgggttataaggccgaggtcatggtttcccaggtctatagcggcagtctgcgagtcctgaacaggcatttctcgcaggacttgacacgtcgcgagtcctccgcctttagaagcgagacagctaaagctcagaaaatgctgaaggaattgatcacttcgaccagactcggcacttattataattcgagctccgtgtactcgttcggtgaaggccctcttacttgttttttttggttcatattacagatcccagagcatcgacggctgatgctatcacctgaagtggtgcaagccctgttagtggaagagttgctatctacagttaattcctcggcagccgtaccgtaccgcgctgaatatgaggttgatcccgaaggcctggtgattttagaggcttcagtcaaagacatagctgccctaaactccactctaggctgttatagatacagctacgtaggtcaagggcaagtgctaagactcaaaggtcctgaccacctggctagctcgtgcctctggcacttgcagggtccaaaggatctgatgttgaagctgagactggagtggaccttagccgagtgcagggacagattagcgatgtacgatgtggctgggcccctcgagaagagattaatcacatcagtctacggatgcagcaggcaggagccagtggtggaagtccttgcatcaggggcgattatggcagtggtgtggaaaaaggggttgcattcgtattacgatccttttgtcctgtcagtgcaacctgtggtgtttcaggcttgcgaagttaatctgactcttgacaatcgtttagattcacagggagtactcagcaccccgtattttccttcatattactctccacagactcattgctcctggcatcttaccgtgccttcccttgactacggcctcgctctgtggttcgacgcgtacgctttgaggaggcagaagtacgacctgccctgtactcaggggcagtggactattcagaatcgccggtaccactttcttagcagtctttggttacccttccttcccccaccgccttcgcttccctcaagcatcgtgactccgtcactcgaggcacaggttccaaatctccggggggctgctcgtggcgcctctagaggctggggttggtgtcaggcttgctgcccatag

SEQ ID NO: 138589 - DNA, 1527 bp, synthetic construct
  misc_feature 1..1527: note = Description of Artificial Sequence: Synthetic coding sequence
  source 1..1527: mol_type = other DNA
atggccagtgcggtgtggggttccgcgccttggtggggcccaccgccaccggccccggctagacctctgaccgacattgatttttgctctggagcccagctgcaagaattgacccagttaatacaggaactgggcgtgcaggagagctggagcgatggcccaaaaccaggcgctgacctgctgcgcgccaaagacttcgtgttctccctgttgggcctagttcacagaagggatccgaggttcccccctcaagctgagctgctgttgctaagggggggtatccgggagggatctctggacttgggtcacgcaccccttggaccttacgcccgggggccacattatgacgcaggctttaccttgttagtccccatgttttcactcgacgggaccgagctccagctggacctagagtcttgttacgcccaagtttgtttacccgaaatggtgtgcgggaccccaatcagggagatgtggcaggattgtctgggtccaccagtccccggggccagagattccattcatagaactgagagcgaggagtcctcaaaggactggcaatcgtctgttgatcagcctcactcttatgttactgaacacgaggcacctgtgtcccttgagaagagcccgagcgacgtttcagcctccgaatctccccaacatgacgtggttgacctggggtcgaccgcgccgctaaaaactatgtcaagtgacgtgacgaaggccgctgtcgagtccccggtcccaaaaccaagcgaggccagggaagcatggcccacattatgcagtgctcaggttgcagcttggttttttgcaaccctggcggctgtggcagagtcacttatccctgtgcccggggcccccagacttgtccatgccgcacgccatgccggctttaccactgtactgcttgccacaccagagccaccacgccgactactgctttttgatctaatccccgtcgtgagcgtggccgggtggccagagggggctcgttctcattcttgggctggacctctagcatctgagtccgcctccttttatctggtccctggagggggaacagagagaccatgcgccagtgcttggcagctgtgctttgcccgtcaggaactcgccttgaaggctagaatccccgctcctctcctgcaggcacacgctgccgcacaggctctccttaggcctctcgtcgcagggactagagccgccgctccttatctgcttagaacgttgctgtactgggcgtgcgagcgattgcctgccttgtatcttgcccggcctgagaatgccggagcttgttgcctgggtttactggatgagctggggcgcgtactcgaagccgggaccttgccccattattttctgaacggccgacagctccggactggagatgactctgccgctcttttaggcgaactggcacggctgagaggggatccagcacgggctctccgggctgctgtggaggaggcaaaagtcgcccggaagggagggggacttgccggggttggcgggggagcacactag

SEQ ID NO: 138590 - DNA, 1527 bp, synthetic construct
  misc_feature 1..1527: note = Description of Artificial Sequence: Synthetic coding sequence
  source 1..1527: mol_type = other DNA
atggcaagtgcggtgtggggatcagctccatggtggggaccccctccccctgctcctgcaaggccactgacagacatcgacttttgctcaggcgcccagctgcaagagctcacccaactgattcaggaattgggcgtgcaagaatcctggagtgatgggcctaagcctggggctgatctactgcgagccaaagattttgtgttttccctgctcggcctggttcatcgacgcgacccgcgctttccgccacaagcagaactcctgcttctcagaggaggtattcgggagggctctctcgatctcgggcatgccccactgggcccttatgctaggggtccacactacgatgccggcttcaccctcctggtacctatgttctcactcgacggcactgaactgcagctggacctggagagttgctacgcgcaggtatgcctgcccgagatggtttgtggcacacccataagggagatgtggcaggactgtttggggcctcctgtgccaggagcccgggatagtatacaccgtaccgagtccgaagagtcttctaaagactggcagagctctgttgatcagcctcatagttatgtgactgaacacgaagccccagtgagtctggagaaaagcccatccgatgtcagcgcaagtgaatctccgcagcacgacgtggtggacctaggctctacggccccactgaagacaatgtcaagtgatgtcacgaaagctgccgtggagagtcccgtgccaaaacccagcgaggcgagagaagcctggccaaccctttgtagcgcccaggttgctgcttggtttttcgccacactggccgccgtcgctgaatccctgattcccgtcccaggggcgcctcggctggttcacgcagcccgacacgctggatttaccaccgtgctgttagcaacacccgaacctcccagacggctcttactcttcgatctcatacctgttgtctccgtcgccggttggcccgaaggagcccggtctcacagctgggccggacccctagcatctgaaagcgcaagcttctatctcgtgcccggtgggggaacagaacggccatgtgcgtcagcctggcagctatgctttgctcggcaggagctggccctgaaggccagaattccggcccccctattgcaagcccacgctgccgctcaggccctgctaaggccactcgtggcaggaaccagggctgcagcaccttatctactgcgcactctgttatattgggcttgtgaaaggcttccggccctgtatctagctcgccccgagaatgcaggagcgtgctgcttggggctgctcgatgagttaggaagagtgctagaggccggcacactgcctcactattttctcaatgggcgccagctgagaaccggcgacgacagtgcagcactgctgggtgagctcgccaggctacgtggagaccctgctagagctttacgcgcagccgtggaggaagccaaagttgctcggaaagggggcggcctggccggggtgggaggtggcgcacattag

SEQ ID NO: 138591 - DNA, 825 bp, synthetic construct
  misc_feature 1..825: note = Description of Artificial Sequence: Synthetic coding sequence
  source 1..825: mol_type = other DNA
atgggaaaatcactgtcccatctgcctctgcattcctccaaggaagatgcatatgacggcgtgacctccgagaacatgaggaatggcctcgtgaattctgaggtccacaacgaggatggacgaaatggcgatgtttctcagtttccttacgtggagttcacaggccgcgactctgtgacttgccctacgtgtcaaggtacaggcagaatcccacgcggccaggagaatcagcttgtggcactgattccgtactcagaccagagactgcggccccggcgcactaagctatatgtgatggctagcgttttcgtttgtctattgctcagcggtcttgcagtcttttttctcttcccacggagtattgatgtgaagtatatcggcgtgaaatccgcatatgtcagctatgacgttcagaagcggacaatctacctgaatattactaacactctgaacattacaaacaataactattacagtgttgaagtggagaatatcactgcacaagttcagttcagcaagaccgtgatcggaaaggcccggttaaataatatcacgataataggccctctggatatgaagcagattgattatacggtgcccacagttattgcagaggaaatgtcctacatgtatgacttctgtactctcatctcgatcaaagtccacaatatcgtcctgatgatgcaggtcacagtcaccaccacatacttcggacactcagagcagatcagtcaggaacgttaccaatacgtggactgcgggcgcaatacaacatatcaactaggacaaagcgaatatctgaatgtgctccagccgcagcaatag

SEQ ID NO: 138592 - DNA, 825 bp, synthetic construct
  misc_feature 1..825: note = Description of Artificial Sequence: Synthetic coding sequence
  source 1..825: mol_type = other DNA
atgggcaagagcctgagtcatctgccactgcattcttctaaagaagacgcctatgatggagtgacttctgagaatatgaggaacggcctggtgaacagtgaggttcacaatgaggacggcaggaacggagatgtcagccagtttccctacgtggagttcactggtcgcgatagcgtgacatgccctacatgccaggggaccggcagaatcccccggggtcaggagaaccaattggtagccctgataccgtacagcgatcaaaggctacggccacgaaggaccaaactgtatgttatggcatctgtgttcgtgtgtctgcttctcagcggcctggctgtcttctttctgttccctcgaagcatcgatgtgaaatacatcggcgtgaagagcgcctatgtttcttacgatgtgcagaaaagaaccatttacttgaatattacaaacacactgaacataaccaataataattattactcagtggaggtggagaacatcactgcacaggtgcagttcagtaagacagtaattggcaaagctcgcctcaacaatatcacgatcattggcccccttgatatgaaacaaattgactacacagtccctactgtcatagctgaagagatgtcgtatatgtacgacttttgcactttgattagtatcaaagtgcacaacattgttctcatgatgcaagtcactgtcactacgacttactttggacatagcgagcaaatcagtcaggagagatatcagtatgtggattgtggccggaacaccacataccagctgggacaaagcgagtacttgaatgtccttcaaccccagcagtag

SEQ ID NO: 138593 - DNA, 78 bp, synthetic construct
  misc_feature 1..78: note = Description of Artificial Sequence: Synthetic coding sequence
  source 1..78: mol_type = other DNA
atggggaagagcctcagtcatttgcctttgcattccagtaaggaagacgcatatgatggagtcacaagtgagaactag

SEQ ID NO: 138594 - DNA, 333 bp, synthetic construct
  misc_feature 1..333: note = Description of Artificial Sequence: Synthetic coding sequence
  source 1..333: mol_type = other DNA
atgggaaagagcttgtcccatctcccattgcacagctctaaagaagacgcctatgatggcgtgacctccgagaatatgcgcaatggcttagtgaatagcgaagtccataacgaagatggtaggaacggcgacgtgagccagtttccgtacgttgagtttacggggcgcgattctgtcacttgccctacgtgccagggaacaggcagaataccccggggacaggagaaccaactggttgcccttataccctacagcgaccagagattgagacctaggcgtactaaactttacgtgatggccagtgtgttcgtgtgcttgctgctgtccgggtag

SEQ ID NO: 138595 - DNA, 369 bp, synthetic construct
  misc_feature 1..369: note = Description of Artificial Sequence: Synthetic coding sequence
  source 1..369: mol_type = other DNA
atgcacgggaccttcgtgatattactcccgctgtcactgattctgatggtcttcggaggcatgacaggattcctgtcattccttctgcaagcttacctccttcttttgctgacaggcattctgttcttattcggcgcaatggttaccctggcgggaatatctgtatacatagcttactcagcagccgcctttcgggaggccctatgtctgttggaagagaaagccttactggaccaagtggacatctcttttggatggtccctggccctgggatggatcagctttattgccgagctgttaacgggggctgccttcctggctgccgcacgggaactcagcttacggaggcgccaggaccaggcaatctag

SEQ ID NO: 138596 - DNA, 570 bp, synthetic construct
  misc_feature 1..570: note = Description of Artificial Sequence: Synthetic coding sequence
  source 1..570: mol_type = other DNA
atgggccttggagcgaggggcgcctgggctgcgttgctgctgggcacgctccaggtgctggcactgctaggtgctgcccatgagagtgccgcaatggccgaaaccttgcagcatgtcccgtcagaccacaccaacgagaccagcaatagtacagtgaagcccccaacctctgtagcctcagactcttccaacactacagtgaccacaatgaagccaaccgcagccagcaacacaaccacacccgggatggtttccactaatatgacaagcactacactcaaatctacccccaagactacctccgtcagccaaaacacttcacaaatcagtacgagcacaatgaccgtcactcacaatagtagtgttacttcggccgccagtagcgtcaccattaccacaactatgcacagtgaggccaagaaaggcagtaagttcgacaccggatcattcgttgggggcatcgtcctgacacttggtgtcctgtctattctgtatatcggctgcaagatgtattacagcagaagaggcatccggtatcggacgatcgacgaacacgatgctataatctag

SEQ ID NO: 138597 - DNA, 627 bp, synthetic construct
  misc_feature 1..627: note = Description of Artificial Sequence: Synthetic coding sequence
  source 1..627: mol_type = other DNA
atgggcttgggggctaggggagcctgggcagctctcctgctaggcaccctccaggttctggcgctgctcggggctgcacacgagagtgctgccatggccgcctccgcgaacatagagaacagcgggcttccccacaattcctctgctaactctactgagacattacagcatgtgccctctgatcataccaatgagacttccaactcaaccgttaagcctccgacatctgtcgcgagtgattcgagcaacaccacggtaaccactatgaagcccacggccgccagcaataccactactcccggcatggtcagcaccaacatgacaagcactactcttaaaagcaccccaaagacaacttcggtgtcccaaaacacttcacagataagcacctctactatgactgtgacccataactcttctgtaacttctgccgcctcctcagttacgatcaccacaactatgcactcagaggcaaaaaagggttccaagtttgacaccggttcttttgtcggcggaatcgtcctcacgttaggagtcctcagcatcttgtatatcgggtgtaagatgtattatagtcgccgggggatcaggtataggacaatcgacgagcatgacgccatcatttag

SEQ ID NO: 138598 - DNA, 588 bp, synthetic construct
  misc_feature 1..588: note = Description of Artificial Sequence: Synthetic coding sequence
  source 1..588: mol_type = other DNA
atggaaaatcataagagtaacaataaagaaaatatcaccattgttgatatcagtaggaaaattaatcagctgcccgaggccgaacgcaacctgctcgaaaacggatcggtgtacgtgggactgaatgctgctctttgcggtctcatagccaacagtttattccgcaggatactgaacgtcacaaaggctcgtatcgctgctgggcttcccatggctggcatccccttccttactacagaccttacctacaggtgcttcgtgtctttcccccttaacacgggcgacttagactgtgagacctgcacgatcactagatctggactcacaggcctcgtgatcggagggctgtaccccgtctttctagcgattccagtgaacggagggctggcagcccgctatcagtccgctttactccctcataagggcaatatccttagctactggatcaggacctcaaagcctgtatttcggaagatgctgttccccatcttgctgcaaaccatgtttagcgcctatttaggttccgagcagtataagttgctgataaaagcgctgcagttatctgagccagggaaagagattcactag

SEQ ID NO: 138599 - DNA, 378 bp, synthetic construct
  misc_feature 1..378: note = Description of Artificial Sequence: Synthetic coding sequence
  source 1..378: mol_type = other DNA
atggccgggattcctttcttaactacagacttgacatacaggtgttttgtgagctttccactcaacacaggtgatctggattgtgagacctgcacgatcaccagatctgggctgaccgggctggttattgggggcctgtatccagtcttccttgccatccccgttaacgggggcctcgcagcccggtaccagtccgccctgctgccacacaagggtaacattcttagctactggattaggacttccaaacctgttttccgaaagatgttgttccctatcttgctacaaaccatgttctcagcgtatctcgggagcgagcaatacaagctgctgattaaagcgcttcagctgtccgagccaggcaaggaaatccactag

SEQ ID NO: 138600 - DNA, 489 bp, synthetic construct
  misc_feature 1..489: note = Description of Artificial Sequence: Synthetic coding sequence
  source 1..489: mol_type = other DNA
atgctgcagacctctaattattctctagtcctctctctgcagtttctcctgctgtcctacgatctctttgttaattccttttccgaactgctgcagaaaactcctgtgatccagcttgtactcttcatcattcaagacattgccgtgctgttcaacattattatcatatttctgatgtttttcaatacgttcgtgttccaggctggcctcgtgaatctcctctttcataaattcaaagggacgatcatcctaaccgctgtgtacttcgctctaagcataagcctgcacgtttgggttatgaacttgcgctggaagaatagcaattctttcatatggaccgacggacttcagatgctgttcgtgtttcagcggctggcagctgttctgtattgctacttttacaaaagaaccgctgtccgcttaggtgatccccacttctatcaggactcgctgtggctacgcaaagagttcatgcaggtgagaaggtag

SEQ ID NO: 138601 - DNA, 318 bp, synthetic construct
  misc_feature 1..318: note = Description of Artificial Sequence: Synthetic coding sequence
  source 1..318: mol_type = other DNA
atgctgcaaacgtctaactactctctcgtcctgagcctccagtttttgttactgagttatgatctgtttgtgaattcctttagcgagttactccaaaaaactccagtgattcagctggtgctcttcatcatacaagacatcgctgtgttgttcaatatcattatcatcttcttgatgttctttaatacctttgtgtttcaagccggtctggttaatctgctgtttcacaagttcaaaggtacaattattctcacagcagtttattttgctctttcaatttcactgcatgtatgggtgatggtgagagtagctgtatag

SEQ ID NO: 138602 - DNA, 1140 bp, synthetic construct
  misc_feature 1..1140: note = Description of Artificial Sequence: Synthetic coding sequence
  source 1..1140: mol_type = other DNA
atgccgcacagctccctgcatccatcaattccgtgcccaagaggacacggcgcccaaaaggctgcactagtattgctttccgcatgtctggttaccctatgggggctgggcgagccacccgaacacacgctgagatatctggttttacacctggcttccctgcagctggggctgctgcttaatggagtatgctcattggcagaggaactgcgccatattcatagcagatatcgcgggtcctactggaggacagtccgcgcgtgtcttgggtgtccgctgaggcgtggagctttactgcttctctccatttatttttattactcattgcccaacgccgtggggccaccctttacctggatgctggccctcctggggctcagccaggcactgaacatcctactgggtctcaagggcctggccccggccgagattagtgccgtgtgcgaaaagggaaattttaatgtggcacacgggctagcctggagctattatattggatacttgcgactgatcctcccagagctgcaagcccggatcagaacctacaatcagcattacaacaatttgctgagaggggccgtttcccagagattgtacatccttctcccactagactgtggagtcccagataacctgagcatggcagatccaaacatccggttcttagataagctgccccagcaaaccggcgaccacgctggtatcaaggatcgggtctatagtaactctatctatgagctgctggagaacggccagcgggccggtacttgtgtcctggaatatgcgacacccctccagaccttgtttgccatgagccagtatagccaagcaggattctctagggaagacagactggaacaggctaagctgttttgccgcaccctggaagatatacttgccgatgccccagaaagccagaacaattgtagattaatagcttaccaggaacccgcagacgatagttcattctcgttgtcccaagaagttctccggcaccttcggcaggaagaaaaagaagaagttaccgtggggagccttaagacatccgctgtgccaagcactagtaccatgtcccaggagccggagcttctgatcagcggcatggagaagccactcccactgagaaccgacttcagctag

SEQ ID NO: 138603 - DNA, 762 bp, synthetic construct
  misc_feature 1..762: note = Description of Artificial Sequence: Synthetic coding sequence
  source 1..762: mol_type = other DNA
atgccccactcttccttgcacccttcaatcccttgccctagggggcacggcgcacagaaggccgccctggtcttgttaagcgcatgtctggtgacactttggggattgggcgagccacccgagcacactctgagatatttggttctccacctggcctcactccaactgggccttctgctcaatggggtatgcagcctcgcagaggaactcaggcacattcactcgcggtacaggggatcctactggagaactgtacgcgcatgcctggggtgccccctccggaggggagccctgctcctcctgagcatatacttttattattcgcttcccaatgcagtgggcccaccttttacatggatgctggccttactggggctgtcacaagccctcaacattctcctaggactaaaggggttggctccagccgagatttccgccgtttgcgagaaaggcaattttaatgtggcccacggtctggcctggtcttattacattgggtacctgagactaatcctccccgagctccaggctcggatcagaacttacaaccaacactacaacaatctgcttcggggcgccgtctcccagcggctgtatatactcctgccgctggattgtggggtgccagacaatctgtctatggccgaccccaacatccggttcctggacaagctcccccagcagaccggcgaccatgcaggcatcaaggatcgggtgtacagtaactcaatttatgaactgctggagaatggacagcggtag

SEQ ID NO: 138604 - DNA, 423 bp, synthetic construct
  misc_feature 1..423: note = Description of Artificial Sequence: Synthetic coding sequence
  source 1..423: mol_type = other DNA
atgccctccgctttctctgtctctagcttccctgtgtctatccctgctgtgctgactcaaaccgattggacagagccctggctaatgggcctcgctacttttcacgccctgtgcgtgctgcttacatgtttatccagtagatcttaccggctgcagatcggacactttctgtgcctggtcatcctggtttattgcgcagaatatatcaatgaagccgccgcaatgaattggagattgttttccaaataccagtatttcgattcaagaggcatgttcatctccatcgtgttcagtgccccattactcgtcaacgcaatgatcatcgtcgtgatgtgggtctggaagaccctaaatgttatgacagacttgaaaaatgcgcaagagcggcggaaggagaagaaacggcgtcggaaggaggactag

SEQ ID NO: 138605 - DNA, 384 bp, synthetic construct
  misc_feature 1..384: note = Description of Artificial Sequence: Synthetic coding sequence
  source 1..384: mol_type = other DNA
atgctgtcagggtatctacaaaccgattggaccgaaccatggctcatgggcctggctacatttcacgccctctgcgtgctgctcacatgcttatcttctaggagctataggctacagatcgggcatttcctgtgcttggtgatcctggtgtattgcgccgagtatattaacgaggcagcggccatgaactggcgcttgttttcaaaataccagtactttgattccaggggcatgtttatatccattgtgttttctgcccccctgctggtcaacgctatgattattgtggtcatgtgggtatggaagactctcaacgtcatgactgatctgaaaaatgcccaggagcgccgcaaagagaagaaacggcgccggaaagaggactag

SEQ ID NO: 138606 - DNA, 1560 bp, synthetic construct
  misc_feature 1..1560: note = Description of Artificial Sequence: Synthetic coding sequence
  source 1..1560: mol_type = other DNA
ggacccgctcaacgtgcatcttcccccattccatctgcaggacggcgagagggggctcaggccgctacccagagggtagagcggcgggacagagatccgggaggctgtgccgcctggactccatccactttgccactctctccaagatcagcagcctcatccagcacttgtgcagggggctgcggcaagcgcacggcctcatctagaaggacaagccggccatccagaatgactgccacaaccgggcctaaggtgatccagacaagcgctgcaaatttcagcctcaataactctaagaagctgaagcccatccagatactatccaatccattgtcgacatataatcagcagctgtggctgacgtgtgtagttgagcttgaccagtcaaaagaaacttcaataaaaacaagcttccctatgacggttaaggttgacggagtggcccaagatggcaccacaatgtacatccacaataaagtccacaaccgcacaaggacactaacctgtgccggcaaatgcgcagaaattattgtggcacacttagggtatctgaattatacccaatataccgtgatcgtcggcttcgaacacctcaagctgcccatcaagggcatgaacttcacatggaagacatataatccagcattttcacgcctggaaatctggttccgctttttcttcgttgtattgactttcattgtgacctgtctattcgcccactctttgaggaagttcagcatgagagactgggggattgaacaaaagtggatgtcggttctgctgcctctgctgctactgtacaacgatcccttcttccctttgagcttcctggttaatagttggctccctggcatgcttgatgatcttttccagtctatgttcctgtgcgccctgttgctgttctggctatgtgtctatcacggcatccgagtgcagggagagcgcaagtgtctaacgttttacctgcccaagttctttatcgtcggattattgtggctggcttcggtgaccctgggcatttggcaaactgtaaatgagcttcatgaccctatgtatcagtatcgggtagatacagggaattttcagggcatgaaagtcttttttatggtggtcgccgccgtgtacattttgtatctgctatttctcatcgtgagggcctgctccgaactccgtcacatgccttatgtggacctgcggctgaagttcctaaccgctttgacgtttgttgtgcttgtgatcagtatcgccatcctgtacctccgcttcggggcccaagtgcttcaggacaatttcgttgcagagctgagcacccactaccaaaaacccgccgagtttcttagcttctacggcctgctaaatttctacttgtacacccttgcttttgtgtactcgccctcaaaaaacgcgctgtatgaaagccaactgaaagataatcccgcgttctctatgctgaatgatagcgacgacgacgtaatctacggttcagactatgaggagatgccactccaaaatggtcaggcaattcgcgccaaatacaaggaagagtctgatagtgattag

SEQ ID NO: 138607 - DNA, 1839 bp, synthetic construct
  misc_feature 1..1839: note = Description of Artificial Sequence: Synthetic coding sequence
  source 1..1839: mol_type = other DNA
atgggagccgcaccgagtcccacgcaggcttcttctcgcggggggggtcctggacccccagctcccacccgcgctgtaagttcaagttctcgcgcccggggcggagcattgtctgcattgggccccagtcccgcgcgccctctcaccacttcacctgctcccgcccccccccccagatctaggcccgctcggcaacaacctgatccccagtgctgggagaaacggggaggcgccggcggtgataccaaggggggtgccgccgggccggggcccggtcgcctccgagggatggatgccgagtatccagccttcgagccacctttatgctcagaattgaaacatctctgtcggagattgagagaggcctacagggagcttaaagaagacttgactccctttaaagacgatcgatattatcgtttggcccctatgaggctgtacacactgagtaaacgacactttgtgctagtattcgtcgtcttctttatctgtttcgggctgaccatcttcgtcggaattcggggtcctaaggtgatacagaccagcgctgccaatttctctcttaacaattctaagaagctgaaaccgattcagatcctttcaaaccctttgagcacgtacaatcagcaactatggctgacgtgcgtggtcgagctggatcagtcaaaagaaacttccatcaaaacttcctttcctatgaccgtaaaggtggacggtgtagcccaggacggcactaccatgtatattcataacaaggtgcataatcgtactcggactcttacttgtgccggcaaatgcgccgagattattgtcgcccatcttgggtatctgaattacactcagtacaccgtgatcgtaggctttgagcatctaaaactgcccatcaaaggaatgaactttacttggaaaacctacaatcccgcgttcagccggttagagatatggttcagattcttcttcgttgtgttaacattcattgttacatgtctgtttgcccactccctgcgcaagttcagcatgcgggattggggcatcgagcagaaatggatgtccgtcctgcttccactgctactcctgtataacgaccccttttttcccttgtcctttctagtcaatagttggttgcccggcatgctcgatgacctgtttcagtcaatgtttctttgcgccctcctacttttctggctgtgtgtctatcatggcatcagagtgcagggcgagaggaagtgtctcacattttacttaccaaaattctttatcgtcggcttgctatggctggcttcagttaccctggggatctggcagactgttaacgaactgcatgaccccatgtaccaatatcgggtggatactggcaacttccaaggcatgaaggtgttcttcatggtggtggctgcagtatacatcctgtatctgctgttcctgatcgttcgggcctgcagcgaattgcgccacatgccctacgtcgatttgagactcaaatttctgaccgcccttacctttgtagtgttagttattagtatcgctatcctctacttgaggttcggagcccaggtgttgcaggataactttgtcgccgagctcagcacacactaccagaactcagctgaatttctgtcattctacgggttgttgaatttttacttatataccttggctttcgtgtactccccaagcaaaaatgcgctgtatgaatcccagctgaaagacaaccccgctttctctatgctgaatgactccgatgacgacgtgatttacggaagtgactatgaggaaatgcctctgcagaatggccaggcaatcagggcaaagtacaaagaggagagcgattctgattag

SEQ ID NO: 138608 - DNA, 1317 bp, synthetic construct
  misc_feature 1..1317: note = Description of Artificial Sequence: Synthetic coding sequence
  source 1..1317: mol_type = other DNA
atgccctgtacctgcacttggcgcaactggcgccagtggatacggcctcttgtggcagtgatctatttggtgtccatcgtggtggccgtgccgctctgtgtgtgggagctccaaaaactggaggtgggcattcataccaaggcatggttcatcgcaggcattttcttgctgttgaccatccccatctcactgtgggtgatcctccaacacctggttcattatacacaacctgaactccaaaagcctatcatcaggatactctggatggtgccaatctactctttagattcatggattgcgttaaaatacccggggattgctatctatgtggacacttgtcgagaatgctacgaggcttatgttatttacaatttcatgggcttcctcaccaactacctgaccaacaggtacccaaacctggtcctcatcctggaggccaaggatcagcagaagcactttccccccttgtgctgctgccctccatgggccatgggcgaagtgctgctgttcagatgcaaactgggggtgcttcaatataccgtggtgcggcccttcacaacaatagtggctctaatctgcgagctgctgggtatctatgacgagggcaacttctcattctcgaacgcctggacatatctggtgattataaataacatgagccagttatttgccatgtactgtctgttactgttctataaagtactgaaggaggagctctctccaatccaaccagtggggaaatttctgtgtgttaagctagtcgtcttcgttagcttttggcaggcagtggtcatcgcactgctggtgaaagtgggtgtcattagcgagaagcatacgtgggagtggcagactgtggaggctgtggcgacaggactgcaagattttattatctgcatagagatgttcttagctgcaatcgctcaccactatacttttagctataagccctacgtgcaggaggctgaggagggttcgtgttttgattcctttctagccatgtgggacgtgtccgatatcagggatgacatcagtgagcaggtccggcatgtggggcgaaccgtgcgcggacatccccggaagaaactgtttcctgaggaccaggatcagaatgaacatacttcgctactcagctcctctagccaggacgcgatttctattgcttcctctatgcctccttcacctatggggcattaccagggcttcggacacactgttacaccccagacaacgcctacgaccgccaaaatttctgatgagatcctaagcgataccatcggtgagaagaaagagccatcagataagagcgtcgacagctag

SEQ ID NO: 138609 - DNA, 4152 bp, synthetic construct
  misc_feature 1..4152: note = Description of Artificial Sequence: Synthetic coding sequence
  source 1..4152: mol_type = other DNA
atgtatgccacggatagccggggacactcaccagcctttttgcagccacaaaatgggaatagtagacatcccagcggttacgtaccaggcaaagtggtgcctttacgaccaccacctcctcccaaatcacaggcctccgcaaagttcacatcaattcgccgggaagacagggcaactttcgcattctccccggaggagcagcaggcccagagggagtctcagaagcagaagaggcacaagaacacatttatttgtttcgctatcacatcattcagcttctttatcgcactggccattatcctgggcatctcctctaagtacgctcccgacgaaaattgtcccgaccagaatccaagactgcgtaattgggaccctggccaggatagtgcaaaacaggtggtgattaaagaaggggatatgttgcggctgacttctgatgccacggtgcattctatagtgattcaagacgggggtctgttagtgttcggcgacaacaaggatggaagtcggaatatcactctgaggacgcattacatactgattcaagacggcggcgctctgcacattggagccgagaaatgcaggtataaatccaaggctaccatcacactctatgggaaatcggatgagggtgaatccatgcccacttttggcaagaagttcatcggcgtagaggccgggggtacgcttgagctccacggtgcacgaaaggcctcttggacgctgctcgctagaaccttgaattccagtggtctgccatttggctcttacacttttgagaaagactttagcagaggcctcaacgttagggtgatcgatcaggatactgcgaagattctcgaaagcgagcggttcgatacacatgagtatcgcaatgagtccagacggctccaggagttcttacggtttcaggacccgggccggatcgtggccattgctgtcggagattccgccgccaagagcctcctgcagggaaccatacagatgatccaagagcggctaggatctgagctgattcagggacttgggtaccgacaggcatgggcccttgttggcgtgattgacgggggttcgacatcttgcaacgagagcgtgcggaattacgaaaatcattcttctggcggaaaggccctggcgcaaagagaattctatacagtcgacggacagaagttctctgtgacagcttatagcgagtggatagagggggtgagcttgtccggattccgagtggaggttgtggatggagtcaaactgaatctcctcgacgacgtctcctcgtggaagcccggagaccaaatcgtggtggcctccactgactactccatgtaccaggccgaggagttcacccttctgccctgtagtgagtgttcacattttcaggtgaaggtgaaggagacgccacagtttttgcatatgggggagattatcgatggggtggatatgagggcagaagtcggaattctgactcggaatattgtcatccagggcgaggtcgaagacagctgctacgcggaaaaccagtgccaattttttgattacgacacttttgggggacatatcatgataatgaagaactttacctccgtgcacttatcatacgtggaactaaaacatatgggtcagcagcaaatgggaaggtacccagttcacttccacctgtgtggggatgtcgactataaagggggctacaggcacgccaccttcgtggacggtctgagcatccatcactcattcagccggtgtataaccgtacatggcaccaacggcctgctcatcaaggacacgatcgggtttgacacactgggacactgtttcttcttggaggacggcatagagcagcgaaacacactgttccacaacctgggcttgctcacaaagcctgggacgctgcttccaaccgacaggaacaattctatgtgcaccaccatgcgcgacaaggtctttggaaactacattccagtgccagccactgactgcatggcagtgtctaccttctggatagcacacccaaacaacaatctgatcaacaatgccgctgctggaagccaggacgccggtatatggtacttatttcataaggagccgacaggggaaagctccggactgcaattgctcgcgaaacccgagttgactcccttaggtatcttttacaataaccgagttcactccaactttaaagcagggctgttcattgacaagggcgttaaaaccaccaattctagcgccgcagaccccagggagtatttgtgtctcgacaactcggctaggttcaggcctcaccaggatgccaatcccgaaaaacctagggtggccgcccttattgatcggctcattgcctttaaaaataatgacaacggtgcctgggtcaggggcggggatataatcgtgcagaactctgcgtttgccgacaacggtatcggtcttacattcgcgtctgacggtagcttcccgagcgatgagggctctagccaggaagtgtctgaatccctgttcgtgggagaaagccgcaactacggttttcagggcggacagaataagtacgttgggaccgggggtatcgatcagaagcctcgcaccctcccacgaaacaggaccttcccaatcagaggcttccagatttatgacggccccattcatctgaccaggtcaacttttaagaagtatgtacctacaccagatagatactccagcgcgataggcttcctgatgaagaattcatggcagattactcccaggaacaacatcagtcttgtgaagttcgggccacacgtttccctgaacgtcttctttggaaagcctggcccatggttcgaggactgcgagatggatggggacaagaacagcatcttccatgacattgacgggtctgtgacgggctataaagacgcctatgtcgggagaatggacaattacctgattcggcatccctcatgcgtcaacgtgtccaaatggaacgccgtgatctgctctggtacttatgcgcaggtgtacgtgcagacatggtctacccagaacctgagcatgacgattactagggatgaatatcccagtaatcctatggtacttcgcggaattaaccagaaagccgcttttcctcagtatcaacccgtcgtaatgctagagaaaggttataccatacattggaatggaccagccccacgcactacctttttatacctcgtgaacttcaataagaatgactggattagagtgggactatgttacccctctaacacttcatttcaggtgacatttggctacttgcagaggcagaatggctcactatcgaaaatcgaagagtacgaaccagtccatagcttagaggagctccagagaaaacagtctgagcgcaaattttacttcgattctagcactggactgctgtttctctacctgaaggccaagtctcaccggcatggccatagttactgctcttcacaagggtgtgagagagtgaaaatccaagccgctacggacagtaaagacatcagcaactgcatggctaaagcataccctcaatactacagaaagccttccgttgttaaacgaatgccagccatgttaactggactgtgccaaggctgtggtactaggcaggtggtcttcacctcagaccctcacaaaagctatcttcctgtgcagttccagtctcccgataaagccgagactcagcggggagatcctagcgtaatctcagtcaatggcacggacttcacattccgaagcgccggtgttctgttactcgttgtggacccttgtagcgttccgtttcggcttacagagaagactgtgtttccactagcagatgtgagccgcatcgaggaatacctcaagacaggaattccacctcgatccatcgtcctcttgtctactcgcggggaaatcaagcagttgaacatcagtcacttactggtccctcttggtctcgccaagccagcccatttgtatgacaagggttctactatctttctcggatttagcggtaacttcaagccctcttggactaagctcttcaccagtcctgcaggccagggcctcggagtcctggagcagttcatacccttacagttggacgagtatggctgtccgcgcgctacaaccgtgaggcgccgggatttggagttgctgaaacaggccagcaaagcccactag

SEQ ID NO: 138610 - DNA, 3963 bp, synthetic construct
  misc_feature 1..3963: note = Description of Artificial Sequence: Synthetic coding sequence
  source 1..3963: mol_type = other DNA
atgtatgctactgacagccgggggcacagccccgcctttctgcagccccaaaatgggaattcaagacacccctccgggtacgtgccggggaaagtggttccgctgcggccgccgccgcctccaaagtcacaggctagtgccaagttcacttcaattagacgagaagatcgcgcaacgtttgcattctctcccgaggagcagcaagctcagcgtgaaagccagaagcagaaaagacacaaaaacacgttcatctgtttcgccataaccagcttttccttcttcatcgcgttggcaataatactcggcatcagctcaaagtacgcacctgacgaaaactgtccagaccagaaccccagactgaggaattgggacccagggcaggactcagctaaacaagttgttatcaaagaaggggatatgctccgtcttacgagtgatgcaaccgttcactccattgtgatccaagacggcggtcttctcgtcttcggggataataaggacggaagtagaaatatcactctaagaacacactacatcctgatccaggacggaggagcactccatatcggagctgaaaagtgtcgatataagtcaaaagctactatcaccctctatgggaaaagcgatgagggggagtccatgcctacgtttggcaagaagttcatcggagtagaagctgggggtaccctggagctccacggagctcgcaaggcgtcgtggactttgctcgccagaactctgaattcaagcggtctgccatttggttcgtatacatttgagaaagacttcagccgggggttgaacgtgcgggtgatcgaccaagatacagccaagattctagagtccgagaggttcgatactcacgagtataggaacgagtcccggaggttacaggagttcttaagattccaggaccccggacgtatcgtggctatcgcggtgggcgattctgctgcaaaaagtctgttgcagggaacgatacagatgatccaggagcgactcggttcagaactgatccaaggcctcggatataggcaggcttgggcactagtgggcgttatcgacgggggaagcacctcatgcaacgaatctgtgaggaactatgaaaaccattcatcagggggcaaagccctcgctcaacgcgaattttacactgtggatgggcagaaattcagtgtcaccgcgtactccgagtggatcgaggagacccctcagtttctccacatgggcgaaatcattgatggagtcgacatgagagcagaagtcgggatcctgacgcggaatattgtcatccaaggagaagtggaagattcttgctacgccgagaaccagtgccagttcttcgactatgataccttcggcggccacattatgatcatgaagaatttcactagtgtccacttgtcatatgtggaactgaagcacatgggtcaacagcagatgggcaggtacccagtgcatttccacctctgtggcgatgttgattataagggggggtaccgacacgctacatttgtggacggactttctattcaccacagcttcagcagatgcataaccgtgcatggaacgaatggcctactgattaaggacaccatcggattcgatactctggggcactgtttctttcttgaagatggaattgagcaacgcaacacattattccacaatcttggattgctcactaagccggggacactccttcccactgatagaaataattcgatgtgtacgactatgcgggataaggtgtttgggaattatataccagtccctgccactgactgtatggcagtgtctacgttctggattgcccatccaaacaacaacctaattaacaacgccgcggctgggagccaggacgcagggatttggtacctgtttcacaaggagcctacaggcgagtcaagtgggcttcaattattggcaaagcctgagctgacgccgctggggattttctacaataaccgggtacacagcaatttcaaggccggcctgttcattgacaagggagttaagaccactaactcctccgctgccgatcctagagagtatctgtgcttagacaacagtgcccggtttcgcccccaccaggatgcgaaccctgagaagccccgggtcgcagctctcatcgatcgcctaattgccttcaagaataatgacaacggcgcctgggtccgaggcggcgacatcatagtgcagaacagtgcattcgcggataacgggatcggcctgacattcgcctccgatggctccttccctagcgatgagggctctagtcaagaggtttccgagagcttattcgttggggaaagccgtaattacggatttcagggaggacaaaacaagtacgtcggcactggcggaattgatcagaagccccggactctgcctcgcaatcggacctttccaattagaggtttccaaatctatgacggccccatccacttaacacgatctactttcaagaagtatgtaccaacccccgacagatattcctctgctattggatttcttatgaaaaactcttggcagattactcctagaaacaatataagtttagtcaagttcggaccacacgtgagtctgaatgtgtttttcggaaagcccggaccatggtttgaggactgcgaaatggatggcgataaaaactccatttttcatgatatcgatggaagtgtgaccggctacaaagacgcctatgtaggaaggatggacaattatctaatccgccacccctcatgcgtgaacgtctcgaagtggaatgccgtcatctgttccgggacatacgctcaagtgtatgtacagacatggtctactcagaacctgtcgatgactatcacgcgagacgaataccctagtaaccccatggtgcttaggggcatcaaccagaaggccgccttcccccagtaccagccggtggtgatgcttgagaagggatacacgatccactggaacggaccggcacctcggactaccttcctgtatctcgttaattttaataagaatgactggatcagggttggactctgttatccctccaatacttcatttcaggtgaccttcggataccttcagcggcaaaacggtagcttatccaagattgaggagtatgaaccagtgcacagccttgaagagcttcagaggaaacagtccgagaggaaattctattttgactcttcaacaggactcctgttcctttatcttaaagcgaagtcacatcggcacggtcactcctactgctcttcacagggatgcgagcgcgtcaagatacaggcagccacggattccaaagacattagtaactgcatggccaaggcctatccacagtactaccgcaagcccagtgtggtgaaaaggatgccagccatgctaaccggattatgccaggggtgcggcacacgccaggtcgtgtttactagcgaccctcacaagtcatacttgcccgttcagtttcagtcgcccgacaaagctgaaacacaaaggggggacccttccgtcatctccgtgaatggaactgattttactttcagatctgccggggtgctgctgttagtcgtggacccttgttctgtaccctttcgactaacagagaagaccgtgttccccttggctgacgtcagccggattgaagaatacctgaagacgggcatccctccacggtctatcgttctgctgagtaccagaggagaaatcaagcaactcaatatctcgcatctgctcgtgcccttaggcctggcgaagcccgcacatctatatgacaaggggagtactatctttctgggctttagcgggaatttcaaacctagctggacaaaattgtttacatcccctgctggtcaagggttgggggtcctagagcagttcatacccctgcagctggatgaatacggctgtcctcgcgcaactaccgtcaggcgccgcgatctagagctgcttaagcaagccagcaaggctcattag

SEQ ID NO: 138611 - DNA, 1131 bp, synthetic construct
  misc_feature 1..1131: note = Description of Artificial Sequence: Synthetic coding sequence
  source 1..1131: mol_type = other DNA
atgacaataactcgggatgaatacccttccaatcccatggttctgagaggaatcaaccagaaggccgcattccctcagtaccaaccagtcgtgatgctggagaaaggatataccattcactggaatggccccgcccctcgaacaaccttcctttatttggttaattttaataagaatgactggatccgcgtggggttatgctacccctccaacacatcttttcaggtaaccttcggatacctccagaggcagaacggctccctctcaaagatcgaggaatacgaaccagtccacagtctggaggaacttcagaggaagcagagcgagcgcaagttctatttcgactcttctaccggcctcctgttcctgtatctgaaagcgaagtcgcatagacacggccactcctattgctccagtcaaggctgcgaacgggtgaaaatacaagccgctacagactcgaaggacatttcgaactgcatggcaaaggcttatccacagtactaccgcaagcccagcgtcgtaaagcgcatgcccgcaatgctaacaggcctttgtcagggatgtggtacacggcaggtcgttttcacaagtgatccgcataaaagctatctgccagtccaatttcagtctcccgacaaggccgagacacaacggggtgatccctccgtgattagcgtgaatgggacagacttcacctttagatccgctggagttcttctgctcgtcgtggacccatgctcagtgccttttcgtttaaccgaaaaaaccgtattcccgctggccgacgtctcgcgcatcgaggaatatctgaagacaggtatccccccgaggagcatcgtgctgttatcaactcgcggcgagatcaagcagcttaacatctcgcatcttctggtccctctggggctggcaaagccagctcacctctacgacaagggatctacaatctttctcggattttcaggcaactttaagccgtcgtggacaaagctttttacttcaccggccggccagggccttggggtgctggaacagttcatccccttgcaacttgatgaatatggatgcccgcgagcaacgacagtacggcgtcgcgacctggagctcctaaaacaggcgtcaaaggcacattag

SEQ ID NO: 138612 - DNA, 57 bp, synthetic construct
  misc_feature 1..57: note = Description of Artificial Sequence: Synthetic coding sequence
  source 1..57: mol_type = other DNA
atgtatgccactgattctagaggccattcccccgcatttctgcaacctcaaaactag

SEQ ID NO: 138613 - DNA, 570 bp, synthetic construct
  misc_feature 1..570: note = Description of Artificial Sequence: Synthetic coding sequence
  source 1..570: mol_type = other DNA
atggaggagggcggaaacctcggcggacttatcaagatggtccacctattagtcctctcgggagcctggggcatgcaaatgtgggtgacctttgtgagcggttttctcttgttcaggtccctgccgcggcacacattcggcctggttcagtcaaagctgttccctttctacttccatatttctatgggctgcgctttcataaacctgtgcattctcgcatcacagcacgcatgggcccagctcactttctgggaagcgagtcagctttacctactgtttctttctctaactctcgccacagtgaatgcccgatggctcgagccaagaaccactgccgccatgtgggccctccagactgtggaaaaagagagggggttgggaggagaagtgccaggtagtcaccagggcccggacccgtatagacagcttagggagaaagaccctaaatacagtgccttgcgccaaaatttctttaggtatcacgggttgtcctcactgtgcaacttaggttgcgttctgagcaatggactttgcctggcagggctggccctggagattcggagcctatag

SEQ ID NO: 138614 - DNA, 570 bp, synthetic construct
  misc_feature 1..570: note = Description of Artificial Sequence: Synthetic coding sequence
  source 1..570: mol_type = other DNA
atggaagaaggcggaaaccttggcgggctgataaaaatggtccatctcctggtgctgagtggcgcttggggcatgcagatgtgggtgacgtttgtgagcggtttcctcctgtttcgttcactccctcgacacacttttggactggttcagtccaagttgtttccgttctatttccatattagtatgggctgtgctttcattaacctgtgtatccttgctagtcaacatgcatgggcccagttgactttttgggaggcatcgcagttatatctgctctttctcagcttgaccctcgcaacagtgaatgcccgctggcttgaaccacgtactactgcagccatgtgggccctgcagaccgtcgaaaaagagcgggggctcggcggtgaagtaccaggcagtcaccagggtccggacccttaccgccaactgcgggagaaagacccgaaatactctgccctgcgacagaatttcttcaggtaccacgggctgagctccttatgtaaccttggatgcgtgttgagtaatggactgtgcctggccggtctggccttggagattaggtctctttag

SEQ ID NO: 138615 - DNA, 570 bp, synthetic construct
  misc_feature 1..570: note = Description of Artificial Sequence: Synthetic coding sequence
  source 1..570: mol_type = other DNA
atggaagagggtgggaacttgggaggactgattaaaatggtgcatctgctggtactcagtggggcgtggggcatgcaaatgtgggttacattcgtgagcggatttctactgtttagaagtctgcctcggcacacatttgggcttgtacagtccaagctgtttccgttctactttcatatcagtatgggctgcgcatttatcaacttgtgtatcctcgccagtcaacacgcctgggctcagctgactttctgggaagcctctcaactgtacctgttgtttctgtctcttacactggcgacggtgaatgcgcggtggctggagccaaggaccacagctgcaatgtgggcactgcagacagtggaaaaggaacggggcctcggtggagaggtgcctggtagtcaccagggccccgacccctatcgccagctgcgcgaaaaagatcctaagtattctgctctgagacagaattttttcaggtatcacgggttaagctctctgtgcaacctgggctgtgttctcagtaatgggctctgtctagcaggactggccctagaaattcgctcactgtag

SEQ ID NO: 138616 - DNA, 447 bp, synthetic construct
  misc_feature 1..447: note = Description of Artificial Sequence: Synthetic coding sequence
  source 1..447: mol_type = other DNA
atgttgccacggggcctgaagatggctccccgcggcaaacgactctctagcaccccgctggagattttgtttttccttaatggatggtacaatgccacttattttctcttggaactgttcatcttcctgtataagggggtcctgttaccatatcctacagctaatctggtgctggatgtcgtgatgcttctgctgtacctcggcattgaagtcattaggctgtttttcggcactaaaggaaacttgtgtcagaggaaaatgccactgtcgatatcagtggctctcacatttccgtccgccatgatggctagctattacctgctcctgcagacctatgtgctgaggttggaagccataatgaatggaatcctgttgttcttctgcgggagtgaattgctgctggaggttcttacactggctgccttcagttcaatggaccgcatctag

SEQ ID NO: 138617 - DNA, 438 bp, synthetic construct
  misc_feature 1..438: note = Description of Artificial Sequence: Synthetic coding sequence
  source 1..438: mol_type = other DNA
atgctccctcgcggcctcaagatggctccgaggggaaagagactctccagtactccactggagatcctgttctttcttaacggctggtataacgcaacctacttcctgctggagctatttattttcctgtataagggggtcttgttaccataccctaccgccaatctggttctggacgtggtgatgttgttgttgtatctggggattgaggtcatcagactcttctttggaactaaaggaaacctctgtcagagaaagatgccactcagcatttccgtggcgttgacgttccctagcgccatgatggctagctactaccttctgctacaaacctacgtgctaagactcgaagccatcatgaatggcattttactgtttttctgtggcagtgagttgctcctggaagtgctaacactcgctgccttctccaggatctag

SEQ ID NO: 138618 - DNA, 942 bp, synthetic construct
  misc_feature 1..942: note = Description of Artificial Sequence: Synthetic coding sequence
  source 1..942: mol_type = other DNA
atgcggacggattctggcgcccggctcgaggaaggccatctacggccccctagagccctccctccagtcccatcaattgatgatattccactatccaggcctaaaaaaaaaaagacacagcctgctgagctgcagtacgccaatgagctgggggtggaggacgaggatatcataacggacgagcaaaccaccgtggaacagcagtctgtttttaccgctcccaccggaatttcacagccagtggggaaagtttttgttgagaaatcccgcagattccaggccgcggaccgctctgagctgattaagaccacagagaacatcgacgtaagtatggacgtgaagccatcctggacgacaagggatgtggcgttgacagtgcaccgggccttcaggatgatcggactgttctcgcacggattcctggccggctgcgctgtctggaatatcgtagttatatatgtgcttgctggtgatcagttgtcaaatcttagtaacttgctgcagcagtacaaaaccctcgcgtaccctttccagagcctgctctatctcctcctggccttgtctactatcagcgcctttgataggatcgactttgcgaagatatcggtggccatccgaaattttttggctctcgacccgacggcccttgcttccttcctatacttcaccgcccttattctgtcattaagccaacagatgaccagtgacagaatacacctttacaccccttcaagcgtcaacgggagcctatgggaagcaggcattgaagagcagattctccagccttggattgttgtcaacctcgtagtcgccttgcttgtcggtctctcctggttgttcttgtcgtatcggccaggcatggatctgtcggaagagctaatgttctcctcggaggtcgaagaataccctgataaagagaaagagatcaaggcctcttcttag

SEQ ID NO: 138619 - DNA, 1203 bp, synthetic construct
  misc_feature 1..1203: note = Description of Artificial Sequence: Synthetic coding sequence
  source 1..1203: mol_type = other DNA
atgggcaagaatcccgtgaggccacctcgcgctcttccgccagttccctcgcaggatgacatcccattgagcagaccaaagaagaagaaacccagaactaagaataccccagcatccgcttccctcgaaggtctggcccaaacagctggccgtagacccagcgaaggcaatgaaccttctacgaaagagctgaaagagcaccctgaggcccccgtgcagaggcgtcaaaagaagacccggctgcctctcgaactcgagacttcatccacacagaagaaatcaagttccagctcgcttttgcgcaacgaaaatggtattgatgcggagccagcagaggaagccgtgattcagaagcctcgccgcaagacaaagaaaactcagccggcagagctccagtacgccaatgaacttggggtggaggacgaagacattatcactgatgagcagacaactgttgaacaacaaagtgtgttcacggctccaactggcatctcccaacccgtaggcaaggtctttgtcgaaaaatcaaggaggtttcaagcagccgaccgctcagaattgataaaaaccaccgagaatatcgacgtaagcatggacgtgaagccttcctggactacaagagatgtggctctcacggtacatagagcgttccgaatgattggtctgttttctcacgggtttttggctgggtgcgcagtctggaacatcgtggtaatctacgtattggcgggagatcagctgtcaaatctgtccaatttgctgcagcaatacaagaccctcgcctatccttttcagagtctgctctacctgttactagccttgagcactatttctgcatttgatcggatagatttcgcaaagatcagtgtcgctattcgaaattttcttgcacttgatcccaccgccttagcgagttttctgtacttcacagctctcatcctctcactctcacagcagatgacctccgacaggatccatctgtatactccatcctcagtcaacggttccctctgggaagccggcatcgaagaacaaattctgcagccgtggattgtggttaacttggttgtggctttacttgtcgggttgtcttggctgtttctctcctataggcctgggatggatctttctgaggagctcatgtttagtagcgaggtggaagaataccccgataaggaaaaggagatcaaagccagcagctag

SEQ ID NO: 138620 - DNA, 1227 bp, synthetic construct
  misc_feature 1..1227: note = Description of Artificial Sequence: Synthetic coding sequence
  source 1..1227: mol_type = other DNA
atgaggacggattccggcgccagactggaggaagggcacctgcggcctcctagggcactccctcccgtaccaagccaggatgacattcccctgtctcggcccaaaaagaaaaagcctcgcacaaagaacacaccagcgtccgcctccctggagggcctggcacagactgcagggcggcgcccttctgagggtaatgagccatcgacaaaagaactcaaggagcacccggaggcgccagtgcagcgcaggcaaaaaaaaactcgtctgccgttggagttggaaacatcgagtacgcagaaaaagagctcaagctcatcccttttaaggaatgaaaacggtattgacgcagaaccagccgaggaggcagtgatccagaaacccagaaggaagacaaagaagactcagcctgctgagcttcagtatgccaacgagcttggcgtcgaggatgaagatatcattactgacgagcaaactacggtggaacagcaatctgtttttacagcaccaactggcatttcgcagcctgtgggcaaggtgtttgtagagaaaagcagacgctttcaggctgccgacagaagtgaactgatcaagaccacagaaaatatagacgtgtccatggacgtaaagccttcttggaccaccagagatgtcgccttaaccgttcacagagcttttcgaatgatcggccttttctcccatggattcctcgccggatgtgccgtttggaacatcgtagtcatctatgttctggccggagatcagctgtccaacctgagcaacctcctgcagcagtataaaacccttgcctatccgttccagagtctcctttacctcttgcttgcgctcagcacaatatcagcctttgaccggatcgacttcgctaagatctccgtggccattagaaattttttggctcttgatccgaccgctttggcctcctttctttacttcacagcactcattttgtcactttcccagcagatgacctccgatcggatacatctgtacactccctcttctgtcaacggatctctctgggaagcgggcattgaagaacagatcctccagccctggatcgtagtgaacctagtcgtcgctttactcgtgggcctcagctggctgttcttgagctatcgccccggaatggatctgagcgaggagcttatgttctcctcagaagtggaagaatacccagacaaagaaaaggaaattaaggcctcttcctag

SEQ ID NO: 138621 - DNA, 1293 bp, synthetic construct
  misc_feature 1..1293: note = Description of Artificial Sequence: Synthetic coding sequence
  source 1..1293: mol_type = other DNA
atgacccactgtgcatgcgctagggatagacgagagggctggggtgcccgctgtctgggaaggaggccacctaggccggctaagagacggatgggtaagaaccccgtgcgtccacctagggcgctcccacctgtgccttcaatcgacgatatacccctgagcagacctaagaagaagaaacccaggacgaagaacaccccagccagtgcctcactggagggcctggcacagacagccggccggcggccttccgaaggcaatgaaccctcaacaaaggagctgaaggaacatcccgaggcacccgtgcagaggcgccagaaaaagacccgactgccactcgagctggagacgagctccacccagaaaaagtcgtcctcatctagtttgctgcgcaatgagaacggcatagatgctgagcctgctgaagaagctgtcatccaaaagccccggcgcaagaccaagaagacacagcccgccgaactgcagtacgccaatgagctaggagtagaggatgaagacatcattactgatgaacagaccacagttgagcagcagtccgtattcactgcccctacaggcataagccagcctgtcgggaaggtgtttgttgagaaatctcgtagatttcaggccgccgataggtcagaattgattaagacaaccgagaatatcgacgtaagcatggacgtgaagccctcctggactacacgtgatgtagccctgacagtacaccgggcattccgtatgataggacttttctcccacgggtttctggctggttgtgccgtttggaacattgtggtcatctatgtcttggccggggatcaattatccaacctgagtaatctgctgcagcagtacaaaaccctggcctatcccttccaaagccttctgtacctcctgcttgccttgtccaccatttccgcgtttgaccgtattgacttcgctaaaattagtgtggccattcgcaattttctggcccttgaccccactgccctggccagctttttatactttaccgcattaatactgagcttaagccagcagatgacctctgataggattcacctctacacgcctagttcagttaacgggagtctgtgggaagcgggcattgaggagcagatcctccagccttggatcgtggtgaacttagtcgtggctctgcttgtaggtctgagttggctgttcctgtcatacagaccaggaatggatctgagcgaggaactgatgttctcttccgaggtggaagagtacccagataaagagaaagagatcaaggcgagctcatag

SEQ ID NO: 138622 - DNA, 1227 bp, synthetic construct
  misc_feature 1..1227: note = Description of Artificial Sequence: Synthetic coding sequence
  source 1..1227: mol_type = other DNA
atgaggacggactcaggggccaggctcgaggagggtcacttgcgtcctcccagggcactgccccctgtacccagtatcgatgatattccgctttcacggccaaagaaaaagaaaccacgcactaaaaacacgcccgcatcggctagcctggaagggttggcacagacagcagggcgtcgcccaagcgaggggaacgagccaagcactaaagagctaaaagagcatcctgaggcaccagtgcagcgtcgccaaaagaagactcggctgcctttagagcttgaaacctcttcaacccagaagaagagcagcagcagcagtctgctgaggaatgagaacgggatcgacgccgagcccgccgaagaggcggtgatccagaaacccaggaggaagactaaaaaaactcaaccagcggagttgcagtacgccaacgagctcggcgttgaggacgaggacatcatcaccgacgagcaaacaactgttgaacagcagtcagtctttaccgcacccacaggcatcagtcaacccgtgggaaaggtgttcgttgagaagtctcggaggttccaggctgccgatcgcagcgaattgattaagacgacagagaacattgatgttagcatggatgtcaaacctagctggaccacccgcgacgtcgcactcactgtacaccgtgccttccgaatgattggattatttagtcatggttttctagctgggtgcgccgtgtggaacatagtggtcatttacgttttagccggcgatcaacttagtaatctcagtaacctgctgcagcaatataaaaccctggcctacccctttcaatcactgttgtacttactcctggccctaagcacaatctccgcctttgaccggattgactttgccaagatttctgtagccattcgcaactttctggcactcgacccgaccgcacttgcgagttttctctactttaccgcccttatcctctcactttcccaacagatgactagcgatcgaatacacctttacacaccatctagcgtgaatggttcactctgggaggctggtattgaagaacagattctgcagccatggattgtggtgaatctcgtggtagcgctcttggtcgggctgtcatggctattcctgtcttatcgtcccggcatggatctgagtgaggagttaatgtttagctctgaggtggaggagtatcccgacaaggaaaaagagattaaggcttcttcatag

SEQ ID NO: 138623 - DNA, 1101 bp, synthetic construct
  misc_feature 1..1101: note = Description of Artificial Sequence: Synthetic coding sequence
  source 1..1101: mol_type = other DNA
atggctttgccgccaggacccgccgctctgcgccatacactgctactgctgcccgctcttctgtctagcgggtggggtgaactggaaccccagattgatggtcaaacatgggccgaacgcgccttgcgcgaaaacgagcgacatgccttcacgtgtcgggtagccggaggccctggaacaccacgtctggcctggtacctcgacggacagctgcaggaggcgtcaacttctaggctgctatcggtgggcggggaggcctttagcgggggaacttcaacctttactgtgacagcccacagagcacaacatgaactcaattgcagcttacaggaccctagatcaggcaggagcgcgaacgccagtgtaatactcaatgtccagtttaagccagaaatagcccaagttggggctaaataccaggaagcacagggtcctggtcttcttgtcgtgcttttcgccctagttcgggctaatccccctgcaaacgtgacttggattgatcaggacgggcctgtcaccgtgaacacctcagacttcctggttctcgatgctcagaactatccatggttaacaaaccatactgtgcagttgcagcttcgcagtttagctcataacctctctgtcgtagccaccaatgatgtgggcgttacaagtgcatccttgccagctccgggcttgctggctaccagagtggaggtgccactcctaggcattgtggtggccgccggccttgcactggggacgctagtgggtttttccacactggtggcgtgtcttgtatgtaggaaagagaagaaaactaagggtccaagtagacatccgtctctgatttcctccgacagcaataatctcaagctgaataatgtgcgcctgcctagagaaaatatgtccctaccttctaaccttcaactgaacgacctgactccagactcacgtgccgtgaagcccgcggatcggcagatggcccagaacaactctcgaccagagctgctggaccctgaacctggcgggctacttacatcccaggggtttattcgtctgcctgttctcggatacatataccgtgtgagttctgtctctagtgacgagatttggttgtag

SEQ ID NO: 138624 - DNA, 657 bp, synthetic construct
  misc_feature 1..657: note = Description of Artificial Sequence: Synthetic coding sequence
  source 1..657: mol_type = other DNA
atggccttgcctccggggccggccgcactgcgtcatacacttttattgctgcctgcgttgctgtccagcgttaaacctgagatcgcacaggtgggcgccaagtatcaagaagctcagggcccaggcctgcttgtggtgctcttcgctctagtccgagcaaaccccccggccaacgtgacatggattgatcaggacgggccagttaccgtaaacacttctgattttttggttcttgatgctcagaactatccttggctcaccaatcatacagttcagttgcaactgcggtctcttgcacataacctgagcgtggtggccacaaacgacgtgggcgtcacctctgctagcctgcccgccccgggcccatcacgtcatccatccctcatcagttctgattcaaacaatctgaagctgaataacgtgagacttccccgcgaaaatatgagcctaccgtctaatttacagctcaatgatcttacccctgattctagagcggtgaagccggctgacagacaaatggctcaaaacaactcacgcccagaattgctagatcccgagccggggggtttgttgactagtcagggatttattaggctgcctgtcttggggtatatatatcgcgtgagttctgtcagcagcgatgagatctggctgtag

SEQ ID NO: 138625 - DNA, 1056 bp, synthetic construct
  misc_feature 1..1056: note = Description of Artificial Sequence: Synthetic coding sequence
  source 1..1056: mol_type = other DNA
atggccctgcccccagggcccgccgccttgagacacactcttctgctgcttcctgccctcctttcttctgggtggggggagctcgagcctcagattgatggccagacctgggcggagagagctctccgggaaaacgaaaggcacgcctttacatgccgggtggccggcggacctggaaccccccgcctcgcatggtatctggatggccagctccaggaagcctccacttccaggctgctttcagtcggcggagaagcattctcaggtggcacctctactttcacggttacagctcaccgagctcaacacgaactcaattgtagtctccaggatccgcgaagcgggcgcagtgctaacgccagtgtgatattgaacgttcagtttaagcctgaaatagcacaggtcggcgcgaaatatcaagaagcccaaggaccagggctgctggttgtcctgtttgctctggtgagggccaatccaccagccaacgtcacatggatagatcaggacggcccagtgaccgtgaacacaagcgatttcttggtcctggacgcccagaactacccatggttgacaaaccacacagtgcaactgcagctccggtccctggcgcataatctgtccgtggtggccactaacgatgtaggagttacttctgccagtctcccggctccaggccttctcgccacgagggtagaggttcccttgctaggaatagtagtggccgccggtcttgcgctgggcacgctcgtcgggttctctactctcgtcgcctgccttgtctgtcgcaaggaaaagaaaacaaaaggcccttccagacacccatccttgatctcctccgattcgaacaacctgaagcttaacaatgtgcgacttccaagagagaatatgagtttacccagcaacttacagctgaatgacctcacccccgactcccgcgccgtaaaaccagctgaccgacagatggctcaaaacaactcacgcccggaactgctggaccctgagccaggtggactgctgacctcgcaaggtcgcaggaaccaggacaaggatgcctag

SEQ ID NO: 138626 - DNA, 969 bp, synthetic construct
  misc_feature 1..969: note = Description of Artificial Sequence: Synthetic coding sequence
  source 1..969: mol_type = other DNA
atggcgctgccaccagggcccgcagccttgaggcacactctgctattactgcctgcactcctctcgtcaggttggggggagctggaaccgcaaatagacgggcagacctgggccgagcgggctctgcgggagaatgagcgacatgcattcacatgccgcgttgctggtggccccggcacgcccaggttggcctggtatttagacgggcagctgcaggaggcatcaaccagtcggctattgtcagtgggtggcgaagcttttagcggtgggaccagcacattcacggttactgctcatagggcacaacatgagctgaattgcagtctgcaggaccctaggtcaggccgctccgctaatgcatctgtgattctgaacgtgcagtttaaacccgaaatcgctcaggtgggggccaagtatcaggaagcacaaggacccgggctgctggtggtgctgttcgcactggtaagagccaatcctccggctaatgttacctggatagaccaggacggcccagtcacggttaataccagtgactttttggtactggacgctcagaattatccatggctcacaaaccacactgttcagctccaactgcggtccctcgctcacaacctgtccgtcgtggccaccaatgacgtgggagtgacttccgcctctcttcccgcgcccggtcccagtcgtcacccatctctgattagttcagacagcaacaatcttaagttgaacaacgtccgtctcccccgtgaaaacatgtcactgccgagtaaccttcagttgaatgatctcacaccggatagtagggcagttaagccagccgacagacagatggcccagaataactctaggccggagttgctggatcccgaacccggcgggctgctgacttctcagggattcattcggctccctgttctgggttatatttatcgggtttcctcagtgtcttccgacgaaatctggctctag

SEQ ID NO: 138627 - DNA, 969 bp, synthetic construct
  misc_feature 1..969: note = Description of Artificial Sequence: Synthetic coding sequence
  source 1..969: mol_type = other DNA
atggccttgccccctggtccggccgccttacgccatactttactgctgctgccggccctgctcagctccgggtggggggagctggagccacagattgatggccagacctgggccgagcgggctcttcgcgagaatgagcgccatgcatttacttgcagggtggccggcggacccggcacaccccgtctggcgtggtatctggacggtcagctgcaggaggcttccacttcccgactgctgtcagttgggggcgaggcctttagtggcgggacgagcacattcacagtgaccgctcaccgggcgcagcatgaactcaactgctccttgcaggacccccgctcgggaagatccgctaatgcatcggtcatcctcaatgttcaatttaagccagaaatcgcacaggttggagcaaaataccaggaagcccagggccctggactgctcgtggtgctgttcgcacttgtccgagccaatcctcctgccaacgtgacatggatcgaccaggatggacctgtgacagtgaacacgtctgactttctggttctagacgctcagaattacccatggctcactaatcacacagtgcagctgcagctcaggagtctcgcccacaacttatccgtggttgcaaccaatgatgtgggagttacgtccgcttccctgccggcaccgggacctagtcgccacccgagcctcatcagcagtgactccaataatttgaagctcaataacgttcgtctccctcgcgagaatatgtcactcccctcaaatctccagctgaacgatttgacacctgattcgcgcgccgtaaagccagccgacagacaaatggcccaaaataattcgcggccggagcttctggaccccgagcccggaggactgctgacctcccagggatttatcagattgcccgtcctggggtatatctaccgggtgagcagcgtgtcgtctgacgaaatctggttgtag

SEQ ID NO: 138628 - DNA, 921 bp, synthetic construct
  misc_feature 1..921: note = Description of Artificial Sequence: Synthetic coding sequence
  source 1..921: mol_type = other DNA
atggcccttcccccaggccccgccgctctgcgtcataccctgctgctgctccctgctctgttgtcaagcggatggggggagttggaaccccagatcgatggccagacctgggccgaacgcgccctgagggaaaatgagaggcacgcttttacctgccgggtggcaggcggccccggcaccccaaggttagcctggtacctcgacggccagctccaggaggcttctactagtcgactcttgtctgtcggtggagaggcgttctccggtggcacatctacttttacagttactgctcacagagcccagcacgagcttaactgcagtctgcaagaccctcgctctgggcggtctgctaatgcctcagttatactgaatgtgcagtttaagccggaaattgcgcaggtgggagcaaagtatcaagaggcacagggccccggtctcctcgtcgtgctgtttgctttggttcgagcgaacccccctgctaacgtgacttggatcgaccaagacggcccagtgacagttaatacgagcgactttctcgtcctggatgcacagaactatccgtggctgacaaaccacaccgtgcagcttcaactgaggagcctggcccataatctgagcgtggtggccacaaatgacgtgggggtgacttctgcatcacttcccgcgcctggtcctagtaggcatccgagcctgatcagctcagactcaaacaatctaaagctgaataatgtcaggttacctagagaaaacatgtctttgcctagcaatctgcagctgaacgatcttacaccggacagtcgtgtgaaacccgcagaccgacagatggcgcaaaacaattcgagaccagagttactggaccctgagccgggcgggctgttaacgtcccagggcaggcgtaatcaagataaagacgcttag

SEQ ID NO: 138629 - DNA, 1146 bp, synthetic construct
  misc_feature 1..1146: note = Description of Artificial Sequence: Synthetic coding sequence
  source 1..1146: mol_type = other DNA
atggctttacctccgggccccgcagctctcaggcatactctattactcttgccagctctgctgtcttctggctggggcgagttggagcctcagatagatgggcagacatgggcagagagagctctgcgggagaatgagaggcatgccttcacctgtcgagtggctggtggacctgggacgccgcgcctggcgtggtatttggacggacaacttcaggaagcttctacttctcggctgctgtcagtgggtggcgaagcattttcagggggcactagcacattcactgtaactgctcacagagcacagcacgagctaaactgctccctgcaggacccccggagtggcagatcagctaatgccagcgtcatcctcaacgtccagtttaagcctgagatcgcccaggtgggcgccaagtatcaggaggcacagggccccgggctactcgttgtgctattcgctctggtgagggctaacccccctgcaaacgtgacttggattgatcaggacggccctgtgactgtaaataccagtgactttctggtgttagatgcacagaactatccctggctgaccaatcacaccgttcagctgcagctgcggtcattagcacataatctgtctgttgtagccactaatgatgtaggggtcacctctgcaagcctgcctgcacccggccttctcgcgacaagagttgaggtgccactgctgggcattgtcgtggccgctgggctggctctgggcaccctagtcgggtttagcactcttgtagcatgcctcgtctgtcgcaaggagaagaaaaccaaagggcccagccgccacccaagccttatcagcagcgactccaacaacctcaaacttaataacgtacgactgccaagggaaaatatgagcttaccatccaatctacagcttaatgatctaacccctgattctcgggttaagcctgccgaccgtcagatggcccagaacaattctaggcccgagctgctggatccagaaccggggggtctgcttaccagccaggcttgcctgctgcatcacgggacccctgcgctgacgaacccctggctaccgcaccagcaggagggcgccctgccgggagggtggtccccccaggcccataactctactgtatggaaactctag

SEQ ID NO: 138630 - DNA, 810 bp, synthetic construct
  misc_feature 1..810: note = Description of Artificial Sequence: Synthetic coding sequence
  source 1..810: mol_type = other DNA
atggctctgccacccggcccagctgccctgagacacacactgctgctcctgccagccctgctgtcaagcgggtggggggaactagaaccacaaattgacgggcagacatgggccgagagggcgcttagagagaatgagagacatgcctttacctgtcgagtagctgggggtcccggaactccgaggctggcctggtaccttgatggccagctgcaagaggcttcgacatcccgcttgttgtcagtgggcggggaggctttcagcggagggaccagcacattcacagtcacagcccaccgtgcgcaacatgagctcaattgttctctgcaggatccacgatccgggaggtctgccaacgcctcagttatcctcaacgtccagtggcttttggccacccgtgtggaagtgccactgctgggtatagtcgtcgcagccggcctggccttgggaaccctggtgggattcagtacgctcgtggcatgtctcgtttgccgcaaagaaaagaagactaaaggtcccagtcgtcatccctcacttataagctccgactcaaacaatctcaaactcaacaatgtccgcttacccagagaaaacatgtcccttccgagcaatttacaactcaacgacttgacccctgacagccgcgccgtgaaacccgcggacagacagatggcacagaacaactctcgacccgagttgttagacccagagccaggaggattacttacatctcaggggttcattcgattgcccgttcttggctacatttacagggtgtcgagcgtctcttcagacgagatttggctctag

SEQ ID NO: 138631 - DNA, 669 bp, synthetic construct
  misc_feature 1..669: note = Description of Artificial Sequence: Synthetic coding sequence
  source 1..669: mol_type = other DNA
atgctctggctcctgttttttctagttaccgctatacacgcggagctctgccagccaggtgccgaaaacgccttcaaggtgcggctgtccattcgtacagcgctgggcgacaaggcctacgcctgggacaccaacgaggagtacctgtttaaggcgatggtcgccttctcaatgagaaaggttccaaaccgcgaagcaaccgaaatctcccatgtgctcctgtgcaacgtgacacagcgagtcagcttctggtttgtagtgactgacccatctaagaatcatacacttcctgccgtggaagtccagtctgccatcagaatgaataagaacagaattaacaatgcttttttcctaaatgaccagacactcgaattcctgaaaattccctccactctggcaccccctatggacccctccgtgcccatctggataatcattttcggagttatcttctgtattatcatcgtggccattgccctgttgattctgtccggcatctggcagcggagacgcaaaaacaaggagccaagcgaggtcgatgatgctgaggacaaatgtgaaaacatgattactatcgagaatggcatcccttccgatcctttggacatgaagggaggccacattaatgacgcattcatgactgaggatgaacggctgacccccttatag

SEQ ID NO: 138632 - DNA, 252 bp, synthetic construct
  misc_feature 1..252: note = Description of Artificial Sequence: Synthetic coding sequence
  source 1..252: mol_type = other DNA
atgttgaggaatctactggctttgcgccagataggacagcgaactatttctactgcctctcgccgccatttcaaaaataaggtgcccgaaaagcagaaactgttccaggaggatgatgaaatcccactttacctgaaaggaggggtcgccgacgcactgctgtacagagcgacgatgatcctgaccgtaggcggtactgcctatgcaatttacgagctcgccgtcgctagtttccctaagaagcaggagtag

SEQ ID NO: 138633 - DNA, 729 bp, synthetic construct
  misc_feature 1..729: note = Description of Artificial Sequence: Synthetic coding sequence
  source 1..729: mol_type = other DNA
atgtactacggactgtctaatttctaccagaaccaccgccgctacgtgaaaagtcgtgacgacagtcagctcaacggtgactcctctgctctgctgaacccctctaaggaatgtgagccataccggagaaatgaggacaagccaatcgcaccttgtggagctattgctaactccatgtttaacgacaccctggagctgtttctcataggaaatgatagttatcccattccgattgcactcaaaaagaaggggatcgcgtggtggacagacaaaaatgtaaagtttcgaaaccccccaggcggggacaacttggaggaaagattcaaagggaccacaaaacccgtcaactggctgaagcccgtatatatgcttgactcagaccctgacaataacggattcattaacgaagatttcatcgtatggatgcgcacagctgccctgccgacgtttcgaaagctttacagactgatcgagcgcaagtccgatctgcatccgacactgccggccgggcggtactccctgaatgtcacctataattatccggtgcactacttcgatgggcgtaagcgtatgatcctcagcacaatcagctggatggggggaaaaaacccgttcttgggtatcgcctacattgccgtgggcagtataagtttcctgctgggagtcgttctgctagttatcaaccataaatacagaaattcctcaaacactgccgatatcactatctag

SEQ ID NO: 138634 - DNA, 978 bp, synthetic construct
  misc_feature 1..978: note = Description of Artificial Sequence: Synthetic coding sequence
  source 1..978: mol_type = other DNA
atggccatgaactacaacgcaaaggatgaagtggatggagggccaccatgcgctccaggcggaactgctaagacccgtcgcccggataataccgccttcaagcagcagaggctcccagcttggcagcccatcttaacagctggaaccgtgctgcctattttcttcataataggactgatttttatacccatcggcattggtatattcgtgacctctaataatatcagagagatcgaaggaaacgtgttcatgtattacggcctctccaatttctaccagaatcacaggcggtacgtgaagtctcgggatgatagccagcttaatggcgattccagcgccttgttgaaccctagcaaggaatgcgagccctaccgccggaacgaggataaacccatcgcgccatgtggcgcgatagccaattctatgtttaacgacaccctggaattgttcctgatcggcaacgactcctacccaatccccatcgccctaaagaagaaagggattgcatggtggacagacaaaaacgtgaagttcagaaacccccccggaggcgacaacctggaggaacggtttaagggtaccaccaaacctgtgaattggctgaagccggtatatatgctggactccgatcctgacaacaatgggtttattaacgaggactttattgtctggatgaggacggccgccttaccgacctttcggaagttgtacaggctcatagaacggaagagcgatctacatccgactcttccggctggtcggtatagtctcaacgtaacctataactatcccgtgcattattttgacggacgaaagcgtatgattttgagtaccataagctggatgggtgggaaaaatccttttctgggcattgcctacattgcagttggctccatcagcttcctgctcggagtcgtgttgctggtcattaaccataagtaccgcaacagcagcaacaccgccgacatcaccatctag

SEQ ID NO: 138635 - DNA, 234 bp, synthetic construct
  misc_feature 1..234: note = Description of Artificial Sequence: Synthetic coding sequence
  source 1..234: mol_type = other DNA
atgtactacgggttatctaacttttaccagaaccaccgccggtacgtcaagtcccgcgacgacagccaattaaatggagactcgagtgccctcctgaatccgtctaaagagtgtgaaccctacaggcgtaacgaagacaagccgattgcaccatgcggggccatcgcgaatagcatgttcaacgacacactggagctgtttttaatcggtaacgactcttaccctattccatag

SEQ ID NO: 138636 - DNA, 1038 bp, synthetic construct
  misc_feature 1..1038: note = Description of Artificial Sequence: Synthetic coding sequence
  source 1..1038: mol_type = other DNA
atggccatgaattacactgccaagacgcgtcgtcccgataatactgctttcaagcaacagaggctgccagcttggcagccaattctgacggcaggcacagtgctacctatcttttttatcattggcctcatcttcatccctatcggcatcgggatatttgtcacttcaaacaatatccgggaaatcgaaattgattacaccggcaccgagccatcgtcaccgtgtaataaatgtctgagccccgacgtgacaccatgtttttgcaccattaactttaccctggagaaaagcttcgagggtaatgtcttcatgtactatgggttgagcaatttttaccaaaaccatcgccgatacgtcaagtccagagatgatagccagcttaatggtgattctagcgctctgctgaacccgagcaaggaatgcgagccctataggcgtaacgaggacaaacctatcgccccatgcggagctattgcgaacagcatgtttaatgacacactggagctcttcctgataggtaatgattcctatccaatacccatagccctcaagaaaaaggggatcgcgtggtggacagataagaacgtgaagttccgcaaccctcccggcggggataatctcgaagagcgctttaagggcacaaccaaaccggtcaattggctgaagcctgtgtacatgcttgattccgaccccgacaacaatgggttcattaacgaagacttcatcgtatggatgcgcactgctgctctgcctaccttcaggaaattatacaggttgatcgaaaggaagtccgacttgcaccccactctccctgcagggaggtactcactgaacgtgacctacaactatccagtacactactttgatggcagaaagcggatgatactttccaccatctcctggatgggtggcaagaacccgtttctgggaatcgcctacatcgctgttggatccataagtttcctgctcggcgtcgtccttctagtgattaatcataaatatcggaattcttctaacaccgcagacattacaatttag

SEQ ID NO: 138637 - DNA, 1056 bp, synthetic construct
  misc_feature 1..1056: note = Description of Artificial Sequence: Synthetic coding sequence
  source 1..1056: mol_type = other DNA
atgacctggagcgcgactgcccggggagcccaccagccggacaacacagctttcacacagcagagactgcccgcatggcaacccctcttaagtgcatctatagcactgccccttttcttttgtgccggactggcattcattggcctcggtctaggactatattacagtagcaacggaatcaaggagctggaatacgattacactggtgacccagggaccgggaattgttctgtatgcgctgctgcaggacagggaagggctctgccacccccctgttcctgcgcatggtatttctccctccccgaattatttcagggtcccgtgtatctttattatgaacttactaacttctaccagaataaccggcgctatggcgtgtcccgcgatgatgcccaactgagtggacttccctctgccttgaggcatcctgtgaatgaatgcgccccctaccagagatccgcagctggcttgcctattgcaccgtgcggagctatagccaacagtttgtttaacgacagctttagtctgtggcatcaaaggcagccgggcggtccttacgtggaggttcccctggacagatccggtatcgcatggtggacagactaccacgtaaaattccggaatccgcctttggtcaacgggtccctcgcactcgccttccagggcactgccccgcccccgaattggcggaggccggtgtacgaactatcccctgacccaaataacaccggcttcattaatcaggacttcgtcgtgtggatgaggacagctgccttgcccacttttcgcaagctctatgcccgcatccgccaaggaaattactcagctgggctgccacggggggcctatcgcgttaacatcacctacaattaccccgtcagggcctttggaggccataaactgctgatcttttcaagcataagctggatgggtggcaagaacccattcttggggattgcatatctggtcgttggctctctctgcattttaacaggattcgtgatgctggtggtttacattaggtaccaggaccaagacgacgacgacgaggaatag

SEQ ID NO: 138638 - DNA, 1056 bp, synthetic construct
  misc_feature 1..1056: note = Description of Artificial Sequence: Synthetic coding sequence
  source 1..1056: mol_type = other DNA
atgacctggtctgcaacggccaggggagcccaccagccagacaataccgcctttacccagcagcggttgcccgcttggcagcccctgctgtccgctagcattgcgctgccccttttcttctgcgcaggactggcattcatcggccttgggctaggactttactactctagcaacggtataaaggagctggagtatgactatacaggtgaccccgggactggtaactgctccgtctgcgctgccgctggtcagggccgagctctgccaccaccctgtagctgtgcatggtatttctctctccctgagctgtttcaggggccagtatacttatattacgagcttacaaatttttaccagaataaccgtcgatacggcgtgtctcgggacgacgcccaactgagtgggttgcccagtgccttgcggcatccggtgaatgagtgcgcaccttaccaaaggtctgccgccggccttcctattgctccttgtggcgctatcgccaatagtttgtttaatgactctttctccctctggcaccagaggcagcccggagggccttacgtagaagttcccctcgataggtccggcattgcctggtggacggattatcacgtgaagttccggaaccctccactcgtcaacggatcgttggctctggcattccagggcacggcaccccctcccaactggaggcgacctgtatatgagctcagtcccgaccctaacaacaccggcttcatcaaccaagacttcgtagtttggatgcgaacggcggctctccccaccttccgaaagctctacgccaggattcggcagggtaattatagcgccggccttcctcgaggcgcgtacagggtaaacatcacctataactaccctgtaagggccttcggaggtcataaacttctgatcttctcatccatttcatggatgggcgggaagaacccttttcttgggattgcctacctcgtcgtgggttcactgtgcatcctgacgggattcgtaatgttggtggtctatatcagataccaggatcaggatgatgatgacgaagagtag

SEQ ID NO: 138639 - DNA, 342 bp, synthetic construct
  misc_feature 1..342: note = Description of Artificial Sequence: Synthetic coding sequence
  source 1..342: mol_type = other DNA
atggaggaaagggcgcagcactgcctttcgcgcctattggataatagcgccctgaaacagcaggagttgccaatccatcgcctgtatttcacggcacgtagagtactcttcgtctttttcgccactggcatcttctgtctctgcatgggcattatcttgatcctgtctgctcgctctacacaagaaattgagatcaattacacacggatctgtgcaaactgtgcaaagctccgcgagaatgcatctaactttgataaggaatgtacttgttccattcctttttacttaagcggtaagatgatggtgggagaaatccaagagacgcggctcactctccactag

SEQ ID NO: 138640 - DNA, 207 bp, synthetic construct
  misc_feature 1..207: note = Description of Artificial Sequence: Synthetic coding sequence
  source 1..207: mol_type = other DNA
taattatgcatgggaattatcctaatactcagcgcccggtctacgcaagaaatagagatcaactatacgaggatttgtgcgaactgcgctaagctgagagagaatgcaagtaacttcgataaggagtgcacttgttcaatccccttctatctgtccgggaaaatgatggtcggggaaatccaggagacaaggctgacgttgcattag

SEQ ID NO: 138641 - DNA, 1203 bp, synthetic construct
  misc_feature 1..1203: note = Description of Artificial Sequence: Synthetic coding sequence
  source 1..1203: mol_type = other DNA
atggccgctaactattcctcaacaagcaccagaagagagcacgttaaagtcaagacaagcagtcagcctggcttcctggaaagactgagtgagacaagcggaggaatgtttgttggtctcatggctttcctcttgtcattttacctcatcttcactaacgaaggacgggctctgaaaacagccacaagtctagcagagggactgagccttgtggtctctccagatagcatccatagtgtggccccagaaaatgagggcagactggtgcatataatcggggctctcagaacgagcaagctactgagcgatccaaactacggcgttcatctgccagccgtgaaactgagacgtcatgtggaaatgtatcagtgggtcgaaactgaggaaagtcgtgagtataccgaagatggccaggtgaagaaagaaacacggtattcttacaataccgagtggcgctctgagatcataaatagtaagaattttgacagagagatcgggcacaaaaaccccagtgcgatggccgtggaatcattcatggcgaccgcacccttcgtgcagatcggaaggtttttccttagttcagggctcatcgacaaggtagataacttcaaaagcctaagtctcagtaaattggaggatccgcacgtggacatcatccgtcgaggagacttcttttaccactcggagaatcctaagtatccggaggtcggcgatttaagagtctccttcagctacgcgggtctgtcgggggatgatcccgatctaggccctgcacacgtggtaacagtcatagctcgacaacggggggaccagctcgtgcctttctctaccaagtccggggacacgctcttactgctgcatcatggagatttctcggccgaagaggttttccatagagagcttagatccaactctatgaaaacctgggggcttagagcagcaggatggatggctatgttcatggggctgaacctgatgacacgcattctttataccctcgtggattggttcccagtctttcgcgatttagtgaatattgggttgaaggccttcgctttttgcgtggcaactagccttacacttcttacagtggcagctgggtggctattctataggcccctctgggctcttctgattgcagggctcgccctcgtgcccattctggtcgcaaggacccgggtccccgccaaaaagttggaatag

SEQ ID NO: 138642 - DNA, 546 bp, synthetic construct
  misc_feature 1..546: note = Description of Artificial Sequence: Synthetic coding sequence
  source 1..546: mol_type = other DNA
atggcctctgctggatctggtatggaggaggtgcgggtctcagtgttgaccccgcttaaactggtgggtttggtgtgcatcttcttggccttatgcctggacctgggcgcagttctcagcccagcctgggtgactgctgaccaccagtattatcttagcttatgggagagctgtagaaaacccgcttcgctcgacatttggcactgcgagtccacattaagcagcgactggcaaattgcaaccttggctctgttgctaggcggggccgccattatcctcatcgcattcctcgtgggcctgatttcaatttgcgttggctcacgacggagattctatcgcccagtggccgtgatgctgtttgcagctgtcgttctccaggtatgctctctggtgctctatcccatcaaattcattgagacagtgtccctgaagatctatcacgagttcaactggggctacggactggcatggggcgcgacaatcttctcctttgggggagctatcttgtattgcttaaaccccaagaattatgaggattattactag

SEQ ID NO: 138643 - DNA, 2745 bp, synthetic construct
  misc_feature 1..2745: note = Description of Artificial Sequence: Synthetic coding sequence
  source 1..2745: mol_type = other DNA
atgggccctttcaagagctcagtattcattctgattctgcatctcttggaaggagctctgtccaactccttgatacaactgaataataacggttatgagggcatcgtggtggctattgatcccaacgtacccgaagacgaaactttaattcagcagatcaaggacatggtgacacaagctagtctatacctcctcgaggctactggaaagagattttacttcaagaacgttgctatcttgattcccgagacttggaagaccaaagcggactatgtacgccctaagctggaaacttataagaacgctgatgtgctggtcgctgagtctactcctcccggaaatgatgagccatacactgagcagatgggtaactgtggggagaaaggagagaggattcacctgactcctgatttcattgccgggaagaagcttgccgaatacgggcctcagggcagggcttttgtccatgaatgggctcacctccgctggggggtgttcgacgagtataacaacgatgaaaagttttacttaagcaatggcagaattcaggcagttagatgctccgcaggtattaccggaacaaacgtggtgaagaaatgtcagggaggaagttgttacacaaaaagatgtaccttcaacaaggttaccggactttatgagaaaggctgcgagtttgttctccagagtcgacagacagagaaggcttcgatcatgtttgctcaacatgtggactcgatcgtagagttttgtacggaacagaatcacaataaggaggcaccaaacaaacagaaccagaagtgtaacctgagatctacctgggaagtgatacgcgacagcgaagatttcaaaaagacaacacccatgactacccagcctcccaatcccaccttcagcctgctccagatcggtcagcgcattgtctgtttggtcttagataaaagcggcagcatggcaacaggtaacagactgaacaggctgaatcaagccggtcagttgttcctgttacagacggtggaactaggcagctgggttggcatggtgacattcgactctgccgcccacgttcagaacgagttgatccaaattaactcaggctccgatcgggacacgttagcgaaaaggctccccgcagcagcttccggcggtacttcaatctgttctggactcagatctgccttcacggtaattcgtaagaagtaccccaccgacggatccgagatcgtacttctgacagatggtgaggacaatacaatcagtggctgcttcaatgaagtgaagcagagcggagctatcattcacacggtggcccttggcccgtcagctgctcaggaattagaggaactttctaagatgacgggtgggctgcaaacatacgcctcagaccaggtccagaacaatggcctgattgacgccttcggcgcactatctagcggcaacggagcggtctcccagagaagtatccaactggaatcaaaaggcctgacacttcagaatagccaatggatgaatgggacagttatcgtggactcaacggtgggcaaagatactctgtttttgataacttggactatgcaacccccccagattctgttgtgggacccgtccggtcagaaacagggcggattcgtcgtggataaaaacacaaagatggcctacctgcagatcccaggaattgcaaaggtggggacctggaagtacagcctgcaagcctcttcccaaaccttaactctaactgtcacgtctagggcttccaatgctacattgccgccgatcacagtcacaagcaaaacgaataaagataccagcaagtttccaagtcctctcgtggtctacgccaacattagacagggggcaagccccattctcagggcaagtgtgacagcccttatcgaaagtgtgaacggaaagacagtcaccctggaactactagacaacggggccggtgcagacgcaacaaaggacgacggggtctacagccgctattttacaacctatgatacgaacgggcgctactcggttaaggtccgagcactcggcggggttaacgctgctcgccgaagagtaatcccccagcagtctggagctctttatatcccagggtggattgagaacgatgaaatccaatggaacccacctcgcccagaaatcaacaaggacgacgtacagcacaagcaggtgtgctttagcagaaccagttcaggtggttctttcgtcgctagcgatgtccctaatgctcctatccctgatctgttccctccaggccaaatcactgacctgaaggctgaaatacacgggggctcgttaatcaatcttacctggactgcaccaggagacgactatgatcatggtacggcacacaagtacatcattcgcatatctacaagcattctcgatctgcgcgataaattcaatgagtcccttcaagtcaataccactgcactgatacccaaggaggccaatagcgaagaggtgttcttgtttaagcccgaaaatataacatttgagaacggcactgacctcttcatcgctatacaggcggtcgacaaggtagacctgaagtccgagatctctaacatcgcacgggtcagtcttttcatccccccacagactccaccagaaactccatctcccgacgagacgtcagccccgtgtcccaatatccatattaacagcactatccccggtatacacatcctgaagatcatgtggaaatggatcggagaactgcagctctctatcgcttag

SEQ ID NO: 138644 - DNA, 1674 bp, synthetic construct
  misc_feature 1..1674: note = Description of Artificial Sequence: Synthetic coding sequence
  source 1..1674: mol_type = other DNA
atggccactgctgtctcccgcccttgcgcagggaggagccgcgatattctgtggagagtgcttgggtggagaatcgtggcctctatcgtttggagcgttttgtttcttcccatttgcaccaccgtttttatcatcttttctcgcatcgacttattccacccgatacagtggcttagtgacagttttagcgacctttacagctcttacgtgattttctacttcctattgctctcagtcgtaatcattattatttcaatttttaacgtggagttttatgcagtggtaccgagtattccatgttcacgactggccctcatcggaaaaattattcatccccagcagctgatgcattcatttatccatgcagccatgggaatggttatggcttggtgtgccgctgtgatcacgcagggtcagtatagcttcctcgtcgtgccctgtaccggcactaattccttcgggtctcccgcagcccagacgtgcctaaatgagtaccacttgtttttcctgctcacaggcgccttcatgggttattcctacagcctgctctactttgtgaataatatgaactatctgccgttcccaataattcaacagtacaaatttttacgctttcgaagaagcctcctgctgcttgtgaaacatagttgcgtggaaagcctgtttctggttagaaacttctgtattctgtactatttcctgggctacatacctaaagcatggatctccaccgccatgaatcttcacattgatgagcaggtgcaccgtccccttgatacagtctcgggcctcctgaacttgagcttgctgtatcacgtttggctgtgcggggtttttcttctcacaacctggtacgtgagctggattctcttcaagatatacgccactgaagcacacgtcttcccagtgcagccacccttcgccgagggatccgacgagtgcctgccgaaggtgctaaatagcaaccctccaccaatcatcaaatatctcgctcttcaggaccttatgctgttgtcacaatattctccttcaagacgacaggaagtgttttccctgagccagcctggcggtcacccacataactggaccgcaatctcccgtgagtgcctaaacttgcttaacgagatgactgagttcagtaatccctcaccaagtacaagcatatccgccgagggcaagaccatgagacagccctcagtcatatattcctggatccaaaacaagagggagcagatcaagaactttctctctaagagggtccttatcatgtacttctttagtaaacaccccgaggcctcaattcaagccgtgttttctgatgcccagatgcatatctgggccctggaaggtcttagccaccttgtggcagctagcttcacggaagaccgtttcggagttgtgcagaccacattgcccgctattctgaacactctcctcacactccaggaggccgtggacaaatacttcaagctccctcacgcatcatcaaaacctccacggatatctggaagcctcgtcgacacaagctacaaaacacttcgctttgcgtttcgggcctcactaaaaaccgccatttatcgaattacaacaaccttcggagaacacctcaatgcagtgcaggctagcgccgagcaccagaagcggctgcaacaatttctggagtttaaagagtag

SEQ ID NO: 138645 - DNA, 2025 bp, synthetic construct
  misc_feature 1..2025: note = Description of Artificial Sequence: Synthetic coding sequence
  source 1..2025: mol_type = other DNA
atggctacggctgtgtcacggccttgcgcaggcaggagtagagacattttgtggagggtgctcggctggaggatcgtcgcatcaatagtctggtcagtgttatttctgcccatttgcaccacggtgttcatcattttctcgagaattgatctttttcaccccatccaatggctcagcgactcattcagcgatctgtactcgtcctatgtgatcttttacttcctgcttctgagtgtcgttatcataatcatcagcatctttaacgtggaattttatgccgtggtaccgagtatcccctgttcacgcctggctctgataggcaagatcatccacccccagcagctcatgcatagttttattcacgccgcgatggggatggttatggcctggtgtgcagcggtgatcactcaaggtcaatattcatttctcgtggtgccctgtactggaacaaattccttcgggtctccggccgcccagacatgccttaacgagtaccacttatttttcctcctgaccggcgccttcatgggctattcgtattccctgttgtactttgtgaacaacatgaattatctaccattcccaataattcaacaatacaagtttttaagattcagacgatcattactgctgttagtgaagcacagttgtgtcgagagcctgtttcttgtaagaaacttttgtatactgtattactttctaggctatatcccaaaagcctggataagtactgcaatgaaccttcacattgatgagcaggtgcatcgcccgctagacaccgtatccggtctccttaacctttcactgctttatcacgtgtggctgtgcggtgtttttctgctaaccacatggtacgtctcttggattctgttcaaaatttacgccacagaagcccacgtgtttcccgtgcagccaccctttgcagaaggctcagacgagtgcctgcccaaggtgttgaactcaaaccctccccctatcattaaatacctagctctccaggacctgatgcttttgtctcaatactctcccagtagacgtcaggaggtattcagcctgagccagcccggcggccatcctcacaattggacagccatcagcagggaatgtctaaatctactaaacggaatgactcagaagctgatactttaccaagaagccgcggcaaccaatggccgcgtttcttcctcctatcccgtcgaacccaagaagctgaactcgccggaagaaacagcttttcagacccccaagtctagtcaaatgccaaggccgagcgttccaccacttgtaaaaacatccctgttttcgtctaagctatctactccggacgttgtttccccttttgggacaccattcggcagttcagttatgaatcggatggctggcatatttgatgtcaatacatgttacgggtccccacagtccccccagctgattcgccgcggcccccgattgtggacgtccgcaagtgaccaacagatgacagaattcagcaacccgagcccatccaccagcattagtgctgaggggaagactatgcgacagccatctgtgatctattcctggattcagaacaagcgggagcagataaaaaactttctttcaaaaagggttttaattatgtacttcttctctaaacaccccgaggccagcatccaagctgtgttttccgacgcgcaaatgcatatttgggcgctcgaaggactgtcccacctcgtcgccgccagctttaccgaagatagattcggggtcgtgcagacaacactgcctgccatcttgaataccctactgacacttcaggaggccgtggacaagtacttcaagctgccgcatgcttcttccaaaccaccacgtattagcggctcactggtggacactagctataagacacttagattcgccttcagggcttctctgaaaacagctatatataggatcactaccacatttggagagcacctcaatgccgtccaggcctctgcagaacaccagaagcggttgcagcagttcttggagttcaaggagtag

SEQ ID NO: 138646 - DNA, 1020 bp, synthetic construct
  misc_feature 1..1020: note = Description of Artificial Sequence: Synthetic coding sequence
  source 1..1020: mol_type = other DNA
atgctgctgtcccagtatagcccttctaggcgtcaggaggtgttttctctctcccagcctggggggcatccccacaactggacagccatctccagagaatgtctcaacctgctaaatgggatgacacagaagctgattctctatcaggaggccgccgccacaaatgggcgagtgtcatcaagctaccctgtggagcccaaaaaactgaactcaccggaggagacagcctttcagactcccaagagcagccagatgcctcggccctcagtcccccccctggtgaaaacaagccttttttccagcaagttaagcaccccggatgtcgtgtcaccgtttgggaccccattcgggtccagtgtgatgaaccgtatggccgggattttcgatgtaaacacttgttacgggagtccacaatcccctcagcttatccggcgtggccctcgactgtggacttctgcttccgatcagcagatgaccgagttttctaacccatctccgtccacctctatctctgcagaaggcaagactatgaggcagccttctgtaatctactcctggatacagaataagagggagcagataaagaatttcctgagcaaaagagtgctgattatgtacttcttctctaagcaccccgaagcttcaatccaagctgtgttctccgacgcccagatgcatatctgggccctggaaggcctttcccatttggtggccgcttctttcaccgaggaccgcttcggagttgttcagacaactctgccggcgatcttaaacaccctgctgaccctgcaggaggctgtcgataagtacttcaagctgcctcatgcctcatctaaaccaccccgaatctctggatccttggtggatacatcctataaaacgttgcgctttgcttttcgcgcttccctgaagaccgcaatataccggatcactacgaccttcggtgagcacctcaatgccgtgcaggcgagcgctgaacaccagaagaggttgcagcaattcctggagttcaaagaatag

SEQ ID NO: 138647 - DNA, 1629 bp, synthetic construct
  misc_feature 1..1629: note = Description of Artificial Sequence: Synthetic coding sequence
  source 1..1629: mol_type = other DNA
atggctaccgcggtgtcccgaccctgcgccggccgctctcgtgacatcctttggcgagtcctcggctggcgaatagtggcgagcatagtgtggtctgttctgtttttgccgatttgcaccaccgtgtttatcatttttagtaggatcgatctttttcaccccatccagtggctgtcagattcattcagtgacctgtattcttcctacgttatattctactttttattgctctcagtggtcattattatcatctctatttttaacgtggagttctacgctgtcgtaccatctattccatgctccaggctggccctgatcggcaaaatcatccacccgcagcagttgatgcactcattcatccacgcagctatgggcatggtaatggcctggtgtgccgccgtcataacacagggtcagtacagttttctggtagtcccttgcaccggtaccaatagtttcgggtcccccgccgcccagacttgcttgaacgaatatcatctgttctttttgctgacaggggcctttatgggctactcatatagcctgctttattttgttaacaacatgaactacctcccatttccgattatccaacagtataaatttcttagattccggcgttcactgctccttctggtcaaacatagttgcgtggaatctcttttccttgtgcgcaatttctgtatcctgtattattttcttgggtatattcccaaagcttggatctccaccgcgatgaacctgcacatagacgagcaggttcaccgtccgctggatactgtgtctggtctcctgaacctgtctttactctaccatgtgtggttgtgtggcgtgtttctccttacgacttggtatgtctcctggatcctgtttaaaatttacgccaccgaggctcacgtgtttcccgtgcagcccccttttgcggaaggtagtgacgagtgtctgccaaaggtcctgaactctaacccaccacctataattaaataccttgccctgcaggacctgatgctgctgagccagtatagtccgtctcggagacaagaggtgttctccttgtcacagccaggtggccacccacataactggaccgcaatctcccgcgaatgcctaaatctgttaaatgggatgactcagaaactaattctatatcaggaagctgcggctaccaacggtagggtcagttcatcctatcctgtcgaacccaagaagctgaacagcccagaggaaactgccttccagactccaaagagcagtcagatgccaaggccaagcgtgccccctctggttaagactagtctcttctcctccaaactaagtaccccggacgtggtcagccctttcggtactccatttggaagctcagtaatgaacagaatggctggaatcttcgacgtgaacacctgttacgggagtccccagtcaccacagttgatcagacggggtcctaggctttggaccagtgcatcagatcaacaaatgacagaatttagtaacccttctccgagcactagcataagcgcagaagcaccacggggcctgcattccggatgtttttttagatgtcccaatgcgtacctgggaatcaggcggtccgtggcactttcttcaagcatcatctacagaggatag

SEQ ID NO: 138648 - DNA, 1332 bp, synthetic construct
  misc_feature 1..1332: note = Description of Artificial Sequence: Synthetic coding sequence
  source 1..1332: mol_type = other DNA
atgaggctcacacgcaaacgactgtgttcgttcctcattgctctgtattgcttgttctcactctatgccgcatatcatgtgttcttcgggcggcggcgccaggccccagccgggtcccccaggggcctgagaaagggtgcagcaccggcacgcgagagacgtgggagggagcagtccactctggaatctgaagaatggaatccgtgggagggcgatgaaaaaaatgagcagcaacaccggttcaaaaccagtctgcagatcctagacaaatctaccaaagggaaaacggacttatctgtacagatttggggaaaggccgccattggcttgtacctgtgggagcacatcttcgaaggactgctggatccctccgatgtgaccgcgcagtggagagaaggtaagtctattgtcggacggacccagtattcttttatcacagggccggccgtaattcctggttatttttccgtggacgtgaataatgtcgtgctgattctgaatggacgtgagaaggccaagatcttctatgctacccaatggctcttgtatgcccagaatctggtccagattcagaagctgcagcatctcgcggttgttttactcggtaatgagcactgcgataatgagtggatcaatcctttcctgaaacggaatggaggttttgtggaattactttttatcatatacgactccccctggatcaatgacgtggatgtgttccaatggcccctgggtgtggctacctaccgaaactttcccgttgtggaggccagttggagtatgttgcacgacgaaagaccctatttgtgtaacttcttggggaccatttacgagaatagttccaggcaagccctaatgaacatactgaagaaagatggcaatgataagctgtgctgggtgagtgcacgcgaacactggcagccccaggagactaacgagtccctgaagaactaccaggacgctctgctacagtcagacttgaccctttgccctgtcggcgttaatactgagtgttacagaatttatgaagcgtgctcctatggaagcattcccgtggttgaggacgtgatgactgccggtaactgtggcaacacctcagtgcaccatggcgccccgttacaactgctaaagtctatgggagccccatttatattcatcaaaaactggaaagagctgcccgctgtgctcgagaaagaaaaaaccataatactgcaagagaagattgaaagaaggaagatgctgctccagtggtatcagcattttaagacagaactcaagatgaaatttactaacatcctcgaaagctccttcttgatgaacaataagagttag

SEQ ID NO: 138649 - DNA, 774 bp, synthetic construct
  misc_feature 1..774: note = Description of Artificial Sequence: Synthetic coding sequence
  source 1..774: mol_type = other DNA
atggctgccgatggagtggatgagaggagccccctcctgagcgcctcccactccggtaacgtgacccccacggcgcctccctatctccaagagagctcacctagggcggagttaccgcctccctatacagccattgcctctccggatgccagcggtattccggtgatcaattgccgtgtgtgtcagtctcttataaatcttgacggtaaactacatcagcatgtcgtcaaatgtactgtgtgcaacgaggcgactccaattaagaacccaccgaccggaaagaaatatgttagatgcccctgtaactgtctgctcatttgcaaggacacctcaagacggatcggatgtccaagaccaaactgccgacgcatcatcaacttaggaccagtgatgcttatttctgaagagcagccagcccagcccgccttgcccatccagcccgaaggaacccgggtggtttgcggccattgcggtaatactttcttatggatggaactgcgttttaataccctggcaaagtgtccacattgcaagaaaatctcttccgtcgggtccgccctccctcgtcgacggtgctgtgcctacattacaattggcatgatatgtatattcatcggtgtcgggcttacggtgggcactcccgactttgctcggcgttttcgcgctacatatgtcagttgggctattgcctatctgctcgggctgatctgcctgatcagagcttgttactggggggcaatccgagtgtcataccctgagcattcctttgcatag

SEQ ID NO: 138650 - DNA, 2745 bp, synthetic construct
  misc_feature 1..2745: note = Description of Artificial Sequence: Synthetic coding sequence
  source 1..2745: mol_type = other DNA
atgtctctttcacactggccatacttccggctggtgttgaatttccggccccaagtcatttgcttgccccaacctcccaaagtcctcggctataggctggaacctccccatctgactcttgcctgcacccttgaggggatgtacaacattatcgaggagatattggaaagagacatcaatggcactctcctgtctcaagcgacctgtgagttatgcgacgggaatgaaaatagttttatggtcgtaaatgctcttggtgaccgctgcgtgagatgcgaaccgaccttcgtgaatacttcacggtcctgtgcgtgctcagaacccaatatccttaccggcggcctctgcttctccagtacaggaaattttcctctccgccggatctcagccgctcgatatggagaggtgggtatgtcactgacctccgaatggtttgccaaatacctccagagttcagcggccgcctgctgggtctatgccaatttaacctcctgtcaggcgctaggcaacatgtgcgtcatgaatatgaattcctacgactttgcaacgttcgacgcctgtgggctgtttcagttcatttttgagaatactgccgggctgagcacagtccattctatttccttctggcggcagaatctaccctggctgttttacggtgaccaactcgggctggcccctcaggtacttagttctaccagcctccctacaaactttagctttaaaggcgagaaccagaatactaagctcaagttcgtggctgcaagctacgacattagggggaatttcctgaagtggcagacactggagggtggtgtgttgcagctgtgccccgacaccgaaaccagactcaatgctgcctacagcttcgggactacataccaacagaactgcgagattccaataagcaagatcctaattgatttccctactcccatcttctatgacgtgtacctggagtatacagacgaaaatcaacaccagtatatcctcgctgttccagtcttgaaccttaatctccagcacaacaagattttcgtgaatcaggacagcaacagtggcaaatggctactgaccaggaggattttcctggtcgatgcagtctctggacgcgagaatgatctgggaacccaaccccgagtcattcgggtggctacccaaatctctctgagcgtccacctggttcccaacactatcaacggaaatatatatcctccattgatcactatcgcgtactccgacattgatataaaggacgccaacagtcagagtgtcaaagtgtcttttagcgtgacttatgagatggaccacggcgaggcacacgtccagactgacattgctctcggtgtgctgggcgggctggctgttttggcaagcctactgaagacggcggggtggaaaagacgtatcggaagtcctatgattgatctgcagacagttgtgaagttcctcgtctattacgctggcgatttagccaacgtgttctttatcatcaccgttggcacgggactatactggctgatttttttcaaagctcagaagtccgtctctgtgttgctgcctatgcctattcaggaagagcgctttgtaacctatgtgggttgcgcattcgccctgaaggctttgcagttcctacataagctcatctctcagataaccatagacgtattcttcatagattgggaaagaccaaaaggcaaggtgcttaaagccgttgagggagaaggcggagtgaggtcagccacagttccagtgtcaatctggaggacctactttgtcgccaacgaatggaacgaaatccagaccgtgagaaaaatcaactccttatttcaggtcctcactgtactgttcttcctcgaggtggtaggtttcaagaatttggccctaatggatagcagctctagcctgtcccgcaacccgccttcatacatcgctccctatagctgcatcctgcgctatgcggtgtccgccgccttgtggcttgcgatagggattattcaggtggtgtttttcgccgtgttctacgaacggtttatcgaggataaaatacggcaatttgtcgacctctgcagtatgagcaatatctcagtatttcttctgagtcacaaatgtttcggttattatatccacggccgatccgtgcacgggcacgcggataccaacatggaagaaatgaatatgaacctgaagagggaggccgagaacctgtgctcccaacgcggcttggtgccaaacactgatggccaaacattcgagattgctatttctaaccagatgagacagcactacgataggatccacgagaccctaattaggaaaaacgggcctgcccggctgctgagttcctccgccagcaccttcgaacagtccatcaaagcataccacatgatgaacaaatttctgggctcatttatcgaccatgtgcataaggagatggactattttatcaaggataagctccttctcgagagaatcctgggaatggaatttatggaaccgatggagaagtctattttttacaatgatgaggggtatagctttagctccgtattatactacggtaacgaggcaactttgctgattttcgacctactgtttttctgtgtggttgatttagcctgccagaactttatccttgcatccttcctcacttacctacagcaagagatcttcaggtacatcagaaacaccgtcgggcaaaagaacttggccagcaagaccttggtcgaccagcgtttcctcatctag

SEQ ID NO: 138651 - DNA, 2988 bp, synthetic construct
  misc_feature 1..2988: note = Description of Artificial Sequence: Synthetic coding sequence
  source 1..2988: mol_type = other DNA
atggcaactcggggaggcgccggcgttgctatggcggtctggtcattactgtctgcccgcgcagtgaccgctttcctgcttctgtttctgccgcggtttctccaggcccagactttcagttttccattccagcagcccgaaaagtgtgataacaaccagtacttcgacatctccgcactctcctgtgtgccttgcggcgctaaccagcggcaggacgccagaggcacaagttgcgtatgtctgccaggattccaaatgatcagtaataacggcggtcccgccattatctgtaagaagtgcccagaaaatatgaagggagtcacggaagatggctggaattgcataagttgtccatctgaccttacagcggaagggaagtgtcactgcccaatcgggcatatcctagtggagagggacatcaatggcaccttactcagtcaggccacctgcgagctgtgtgatggtaacgagaattcctttatggtcgtaaatgctctgggcgatagatgtgtgcgatgtgaacccacctttgtgaatacatctcggtcgtgcgcgtgttctgaacccaatatcctgactggggggctgtgcttttccagtacgggcaactttccacttagaaggatctcagctgcaaggtatggtgaggtcggcatgtctctaactagtgaatggtttgcgaaatatctgcagagtagcgctgccgcctgttgggtgtatgcgaacttaacctcttgccaggctctcggcaatatgtgcgtcatgaacatgaatagttacgacttcgcaacctttgacgcttgtgggctgtttcaattcatcttcgagaacaccgccggcctgagcaccgtgcactctatctctttttggaggcagaaccttccttggcttttctacggggatcaactcggattggccccccaggtactgtctagcacttccctcccaaccaacttttctttcaaaggtgagaatcagaataccaaactcaaatttgtcgccgcatcttacgacatccgaggaaacttcctgaagtggcagacgctggaaggaggcgtccttcagttatgccccgacacagaaaccagactgaatgcagcatactcctttggaacaacttaccagcagaattgtgaaatccctatctctaaaattctgatcgattttccgactcctattttctacgacgtttatttggaatacaccgatgagaatcagcaccagtatatccttgcggtgcctgtgctgaatttaaacttgcaacacaataaaatttttgtgaatcaggattccaatagcggtaagtggttgctcacaaggcgcatctttttggtggacgcagtctcaggtagggagaatgatctcggtacccagccacgcgtcatccgagtcgcaacacaaattagtttgagtgtccacctggtgcccaatacaattaacggaaacatctacccacctcttatcacgatcgcctactcggacatcgatatcaaagacgccaatagccaatcagtgaaggtttctttctccgtaacatatgagatggaccacggcgaggcacacgtgcagacagacatcgcactcggagttttaggaggactagccgtgctcgctagcctcctgaagaccgccgggtggaagcggcgcatcggctctcccatgattgatctccagacagtggtgaagtttctagtgtattatgccggggaccttgcgaatgtcttctttataattacggtgggcactggactgtactggctgattttcttcaaagcacagaaaagcgtttccgtactgttgccaatgcccattcaggaggagcgctttgttacatacgtagggtgtgcattcgcactgaaggccctgcagtttctgcataaactgatctcacagataaccatagatgtgttcttcatagactgggaacgacccaaggggaaggtgctgaaagccgtggagggggaggggggtgttaggagcgccactgtccctgtttcaatctggaggacatatttcgtggccaacgaatggaatgagatccagaccgtgcgcaaaatcaactctctcttccaggtgttgaccgtcctgttcttccttgaagttgtggggtttaagaatctagccttaatggattctagtagctccttaagtagaaatcctccaagctatatcgctccatactcgtgcatattgcggtatgccgtcagcgccgcgctgtggctggccatcggcatcatccaagtcgtgttttttgccgttttttacgagaggttcatagaggataagatacgccagttcgtggacctgtgcagtatgtcaaacatctccgtatttctgctgtctcataagtgctttggatattacatccacggacggagcgttcacggccatgcagataccaatatggaagagatgaatatgaatctgaaacgcgaggccgagaatctctgcagccagcggggtcttgtgccgaacactgacggccaaacatttgagatcgccattagcaaccagatgcggcagcattatgatcgcatccatgagacccttatccggaaaaacggacccgctagactcctgagctcatctgcaagcacctttgagcaaagcatcaaggcgtatcatatgatgaacaaatttctgggcagctttatcgatcacgttcacaaggagatggattactttatcaaggataagctcctgttagagaggatcctgggtatggagttcatggagccaatggaaaagtccatattttataacgatgagggttactctttctccagcgtcttgtactacggaaatgaggccacactgctgattttcgacctgctgttcttttgtgtggtcgacttagcttgtcagaacttcatcctggccagctttctgacgtatctgcagcaagaaatttttcggtatatccgaaacactgtgggtcagaaaaatctggcatccaagactctcgtcgaccagcgctttttgatctag

SEQ ID NO: 138652 - DNA, 783 bp, synthetic construct
  misc_feature 1..783: note = Description of Artificial Sequence: Synthetic coding sequence
  source 1..783: mol_type = other DNA
atgttattcttggcattgggcagtccttgggctgtcgaactgcccttgtgcggccggcgcactgctctttgcgctgcggccgctctacgggggccccgtgcctccgtaagcagagctagcagctcttccggcccgagtggccccgtcgccggttggagtaccgggcctagtggtgcagccagacttctgcgcagacctgggcgcgcacagatcccagtttattgggaaggatacgtcagattcctcaataccccgtcagacaaatccgaagacgggcggctcatctatactgggaacatggctcgcgcagtgttcggcgtcaaatgcttttcatactccaccagcctgatcggcctcacttttcttccatatatatttacacaaaataatgccattagcgagagcgtcccactgcctattcagatcatcttttatgggattatggggtcattcacagtgataacaccagtgctgcttcactttatcaccaaaggctatgtgatcaggctgtaccatgaggccaccacagacacttataaagccatcacctacaacgccatgctggccgaaaccagcaccgttttccaccagaacgacgtgaagattccagatgcaaagcatgtatttacaacgttttacgcgaaaaccaaatcactgctcgttaatccggtgctgttcccgaaccgggaggactatattcatctcatgggctatgacaaggaggaattcatcctatacatggaggagacaagcgaggagaaacggcacaaggatgacaagtag

SEQ ID NO: 138653 - DNA, 324 bp, synthetic construct
  misc_feature 1..324: note = Description of Artificial Sequence: Synthetic coding sequence
  source 1..324: mol_type = other DNA
atgctcttcctcgccctggggagcccctgggccgtggagcttccattatgcggccggcgaaccgctttatgtgcggccgccgccctgaggggaccaagagctagcgtctcacgggcctcttctagtagtggcccctctggcccagtggccggctggtccacaggaccatccggggctgcaagattgctgcgcagacctgggcgggctcagattccggtttactgggagggctacgttcgctttctaaacactccatccgataaatccgaggacggaaggcttatttatacaggcaacatggcacgagccgtgttcggcaaatag

SEQ ID NO: 138654 - DNA, 918 bp, synthetic construct
  misc_feature 1..918: note = Description of Artificial Sequence: Synthetic coding sequence
  source 1..918: mol_type = other DNA
atggaattacactacctcgccaaaaaaagcaaccaggccgatttgtgtgacgcacgcgattggtcctcccgagggctgcccggcgaccaggcagacaccgctgcaaccagagcagctttgtgctgtcaaaagcaatgtgcttctacccctcgcgctacggaaatggagggatcaaagttgtcctcctccccagcctcaccctcgtcaagtttgcagaactctaccttgcagcccgacgcgttccctcccggtctgcttcattcaggcaataaccagattaccgcggagagaaaggtttgcaattgctgctcccaagagcttgaaacaagctttacatacgtggacaagaacattaacctggagcaaagaaatagaagctcaccttctgcaaagggacataaccatcctggtgagttaggatgggagaaccccaatgaatggagtcaagaggctgcaatttctttaatttcagaagaagaagacgacaccagtagcgaagccacctcctcaggcaaaagcattgactacggattcatctcagctattctttttcttgttacagggattttattggtaatcattagctacattgtgcctcgcgaggtgacggtagacccaaacaccgtggccgcacgggagatggagcggctagaaaaagagtctgcccgcctcggtgctcatctcgatcgatgtgtgatcgctgggttgtgcctgcttacattgggcggtgttattctgtcctgtttgcttatgatgtcaatgtggaaaggagaactatacagaaggaaccgcttcgcttccagtaaagagtcagcgaagctttatgggagtttcaatttcagaatgaaaacatccacaaatgagaacacccttgaactatccctggtggaggaggatgccctggccgtgcagtcctag

SEQ ID NO: 138655 - DNA, 951 bp, synthetic construct
  misc_feature 1..951: note = Description of Artificial Sequence: Synthetic coding sequence
  source 1..951: mol_type = other DNA
atgtccggagacacctgtctctgtcccgctagtggggcgaagcctaagctctcaggctttaagggcgggggactgggcaacaaatacgtgcagctcaatgtcggcggcagtctttactacaccaccgttagagcactaactcgacacgacaccatgctcaaagcaatgttcagtgggaggatggaggtgctcactgacaaagaggggtggattctgatcgacaggtgtggaaagcactttggtaccatcctgaattaccttcgtgacgacactattaccttaccgcagaatcgccaagagattaaagaacttatggccgaggccaagtattacctgatccagggcctggtaaacatgtgtcagtctgccctgcaggataagaaggattcctaccagcccgtttgtaatattcctattatcacctctctgaaggaggaggaacggttgatagagtcctctaccaaaccagtggtgaagctcttgtacaaccgaagtaacaataaatactcctataccagcaactctgacgaccatcttttgaagaacatagagctgtttgataaactgtcactccggttcaacgggcgtgttctgttcattaaggatgtgattggggacgaaatctgctgttggtccttttatgggcaaggacgcaagctggctgaagtttgttgcactagcattgtgtacgctacagagaaaaagcagacaaaagtggagttcccggaggctcgaatctacgaggaaactctgaacgttcttctttatgaaaccccaagggtccccgataacagtctgttagaggcaacttctcgatctagatctcaagcttctccttccgaggacgaagagacctttgaactgagggaccgggttcgcagaatccatgtcaagagatattcgacctatgacgacaggcagcttggccatcagagtacgcatagggattag

SEQ ID NO: 138656 - DNA, 210 bp, synthetic construct
  misc_feature 1..210: note = Description of Artificial Sequence: Synthetic coding sequence
  source 1..210: mol_type = other DNA
atgactactcttatacctattctgtcaacattcctgtttgaggacttctctaaagccagtggttttaagggacagcggcctgaaaccctgcatgaaaggctaactctggtctccgtgtacgccccgtacttattaataccgttcattctcttaatttttatgctgcggtctccgtattataagtatgaggagaagaggaagaagaagtag

SEQ ID NO: 138657 - DNA, 1125 bp, synthetic construct
  misc_feature 1..1125: note = Description of Artificial Sequence: Synthetic coding sequence
  source 1..1125: mol_type = other DNA
atggtgctttgggaatccccgagacagtgttcctcctggaccctctgcgaggggttctgctggctcctgctccttcccgtgatgctcctgatcgtggcgcggccagttaagctggcggctttccctacctcgcttagtgactgccagacacccacgggttggaattgtagcggttatgacgatagagaaaatgacctgttcctttgtgacactaacacctgcaaatttgacggcgaatgccttcgaattggggacacagtaacatgcgtgtgtcagttcaaatgcaacaatgactacgtgccggtgtgtgggagcaatggggagtcctaccaaaatgaatgttacttgcgccaagcggcgtgtaaacaacagtctgagattctggtcgtatccgagggcagctgtgccaccgatgccggctcaggttcaggcgatggagttcacgagggcagcggcgagacttctcagaaagagacgtcaacctgcgacatttgccagttcggcgcagagtgtgatgaggatgcagaggacgtctggtgtgtgtgcaatattgattgcagtcagactaattttaaccccctgtgtgcctctgatggcaagtcttatgataatgcctgtcagattaaagaggcctcctgccagaaacaagaaaagattgaggtgatgtcactcggcaggtgccaggacaacaccaccactactaccaagtccgaggatgggcattacgcccgtacagactatgcagaaaacgcgaataagttagaggagagcgcccgcgaacaccacattccgtgcccagaacactacaacggcttttgtatgcacgggaaatgcgagcatagtatcaacatgcaggagccctcgtgtcggtgtgacgcaggctacacagggcagcactgcgagaaaaaagattattccgtgctatacgtagtgccgggccccgtaagatttcagtatgttctgattgcggcagttattgggaccattcagattgccgtcatatgcgtcgtggtcttatgcataaccagaaagtgccccaggtctaacaggatacaccgccagaaacagaataccgggcactattcatcggataacacaacaagagcgtccacgcggctaatctag

SEQ ID NO: 138658 - DNA, 528 bp, synthetic construct
  misc_feature 1..528: note = Description of Artificial Sequence: Synthetic coding sequence
  source 1..528: mol_type = other DNA
atggtcctatgggagtcccccagacaatgttcaagttggacattatgtgaaggcttctgttggctccttctgctgcctgtaatgttgcttatcgtcgcgcggcccgtcaaactggcggctttccccacttcattaagtgactgccagactcctactggctggaattgctcaggatacgacgatagggagaacgacctatttttgtgtgacactaatacttgtaagttcgatggagagtgtttgagaataggggatacagtgacttgtgtgtgccagtttaaatgtaacaatgactatgtaccagtgtgcggttccaacggggaaagctatcagaatgagtgctacctgaggcaagcggcatgcaagcagcagagtgaaatacttgtagttagtgagggaagttgcgccacagacgcgggctccggcagcggggacggcgggaggtcctgtctgttcacttatctcaagatttattggtggatcctgctctgcatttttacgtatgtttgctctatttccgatatctag

SEQ ID NO: 138659 - DNA, 2427 bp, synthetic construct
  misc_feature 1..2427: note = Description of Artificial Sequence: Synthetic coding sequence
  source 1..2427: mol_type = other DNA
atggctgaactgctggcaagcgccggtagcgcgtgtagctgggactttcctagagccccaccatccttcccaccaccagccgcctcgcggggaggcctggggggtacaaggtcattccggccacacagaggagccgagtcccctcgtcctggtagagaccgcgatggggtccgtgtgcctatggcttcatcacggtgtccagccccacgcggctgcagatgcctccccggtgccagtcttgcctggctgggcacagtactgctgctgttggctgactgggtcctgctccgtacagcgctaccacggattttttctctcctggtccccactgccctgccactgctgcgtgtctgggctgtcggattaagccgctgggctgtcctgtggcttggggcctgcggcgtcctgagagcaacagttggctccaagagcgaaaacgccggagcacagggttggctggctgcccttaaacccctcgctgctgcacttgggttggctctgcccggtctggctctcttcagggagttaatttcatggggggcccctggctcagccgatagcacccgcctgctgcactgggggtcccaccctacagccttcgtggtgagttatgccgccgccctccccgccgctgccctgtggcacaagttggggtcactttgggtccctggcgggcagggtggctcaggtaatcctgtgcggcgcctgcttggatgcctgggaagcgaaacccgacgcctgtctttgtttttggtgcttgtggtgctgtcttccctcggggagatggcaattccgttctttacaggacggctcactgactggattctgcaggacggcagcgctgacacttttactagaaacttaacgctgatgagtattcttacaatcgccagtgctgtactggagttcgttggagatggaatctataacaacacaatgggacacgttcactcccatctgcagggtgaggtcttcggcgcagtgctgagacaggagactgaattctttcagcagaatcagacgggtaacattatgtcgcgggtcactgaggacacttccactctgtctgactcactttctgaaaaccttagtttatttctttggtatctggtgcgtggcctctgcctgctcggcataatgttatgggggtcagtgagcctgacaatggttaccctgatcaccttaccgctgttgttcctcttacccaaaaaggtaggaaagtggtatcagctgttggaagtgcaggttcgcgagtccctggctaaatccagtcaggttgctattgaagccctatcggccatgccaactgtgcgaagctttgccaatgaagagggcgaagctcagaaatttcgtgaaaagctgcaggagatcaagacactgaaccaaaaggaagcagtagcctacgctgtgaacagttggacgacttctattagcggcatgctcctaaaggtcggcatcctctatataggaggtcagctggttacctccggggctgtgtctagcggaaacctggtgacatttgttctgtatcagatgcagttcacacaggctgttgaggtgctcctttccatttatccacgagtgcaaaaggcagttggaagttccgagaagatttttgagtacctggacagaactccccgctgcccgccgtccgggttgctaacgcctctacatctggaaggcctcgtgcaattccaagacgtgtcattcgcttatcctaatagaccagatgtgttagtgcttcaagggctcacctttacactgcgtccaggggaggtgacggcattggtgggacccaatggctccggcaaatccacggtggccgccttacttcagaacctctaccagcctacagggggacagctcttgttagatgggaagcccctgccccagtatgagcataggtatctccacagacaagtggctgccgtcggtcaggaacctcaggtgttcggaaggtctctgcaggaaaacatcgcctacggcttaactcaaaaaccaaccatggaagaaattacagcagctgccgttaagtccggtgcccatagctttatttccggattaccccagggatacgacacagaagtcgatgaagcaggtagtcagctctcaggcgggcaaaggcaagctgtggctctggcacgggctctgattcgaaagccatgtgtcctcatcctggacgacgcaacttcggcactggacgctaattcgcagttacaagtggagcagcttttgtatgagtccccagagagatattcacgttctgtcctcctcattacccagcatttgagtctggtggagcaggcagatcacattttgttccttgagggaggtgccatcagagaaggaggtacccatcaacagctgatggagaagaaagggtgttactgggcaatggtacaggcacccgctgatgcaccagagtag

SEQ ID NO: 138660 - DNA, 2427 bp, synthetic construct
  misc_feature 1..2427: note = Description of Artificial Sequence: Synthetic coding sequence
  source 1..2427: mol_type = other DNA
atggctgagctgcttgcttcggcaggatctgcatgttcctgggatttccctcgggccccgccatcttttcctccccccgcagcttccagaggaggcctgggaggaacccggagttttcggcctcaccgcggagccgaaagcccgcgcccaggccgggatcgcgacggcgtgagagtgcccatggcatcctctaggtgtccagcaccccggggatgtcgctgtctcccaggcgcctctcttgcttggctcgggacggttctgctcttgttggccgattgggtgctgctgaggaccgcattgccacgcatcttttctctactagtgccaacggccttgcctctgttaagggtgtgggctgtgggtctttcacgttgggcagtgttatggctgggggcttgcggagtgcttcgtgcaacggtgggctccaaaagcgagaacgcaggggctcagggttggctggcggctctaaaaccgcttgccgcagcactggggctggctttgccgggcctcgccctctttagggagctgatttcttggggagccccaggtagcgctgacagcacccggttactccactggggaagccatccaacagcatttgttgtgtcctatgcggctgcccttccggcagctgccctgtggcacaaactcggttccttgtgggtgccaggaggccagggaggtagcggaaaccccgtgcgacgcttacttggttgtctaggaagcgagacccgcaggctctctctgtttctggtgttggtcgtcctttcttctctgggcgaaatggcgatcccgttttttaccggacgactgaccgactggatcctacaggacggctcggctgatacctttactagaaacctcaccttaatgagcatactcaccatcgccagtgctgtgctagagtttgtaggagacggtatctacaataatacaatgggacatgtgcactcgcacctgcagggagaggtgttcggggcagttctgaggcaggagacagagtttttccagcagaaccaaacaggcaacattatgtcccgtgtgaccgaagacacgtcgactttatccgattcactctcggagaacctcagcctttttttgtggtatctcgtaagagggctgtgtctgcttggcatcatgctttggggtagcgtgagcctcaccatggtgaccctcatcaccctgccactcctcttcttgctgcccaagaaagtgggaaaatggtaccagctactagaagtgcaagtgcgcgaatctctggcaaagagttcacaggtcgccattgaagctctaagtgccatgcctaccgtaaggtcttttgccaacgaagagggtgaagcccagaaatttagagagaagctgcaagagatcaaaacactcaaccagaaggaggcagtcgcctatgctgtaaattcatggaccacatcaatttccggaatgcttctcaaggtgggaattttgtatatcggggggcagttggttacatctggtgcggtatccagtggaaatctagtgacttttgtgctgtaccaaatgcagtttactcaagctgtggaggtcctactgtcgatctacccccgcgtgcagaaggcggtcggatccagcgaaaaaatattcgagtatttggatagaactcctcgttgccccccttcaggcctgctgacacctctgcatctggaaggcctggtgcagtttcaggatgtctcattcgcataccccaaccggccagacgttttagttttacagggactgacatttactctgcgcccaggcgaggtgaccgcacttgtagggccaaacgggagcggcaagagtaccgtagccgcccttctgcagaacctgtatcaaccaacggggggtcagctcctcttagacgggaaaccacttccccaatatgagcaccgttatctacataggcaagttgctgcggtggggcaggagcctcaggtatttggccgttcccttcaggagaatatcgcatacggactcacccagaagccaacgatggaggagatcacagcagccgctgtaaaaagcggtgcacattccttcatcagcggcctcccacagggatacgataccgaagtcgatgaggcggggtcacaactaagcgggggccagcgccaagcggtcgctctcgctcgggcgctcatacgcaagccctgcgtactgatcctggatgacgccacttcggctctcgacgcaaactcccagctccaagtagagcagttgctatatgaaagtccggagcgatattctcggagcgtcctccttattactcagcatctgtctctggtcgagcaggctgaccatattctgttcttagaaggcggcgctatcagggaaggaggaacacatcaacagctgatggaaaaaaagggctgttattgggctatggtgcaagctcccgccgacgccccagagtag

SEQ ID NO: 138661 - DNA, 2427 bp, synthetic construct
  misc_feature 1..2427: note = Description of Artificial Sequence: Synthetic coding sequence
  source 1..2427: mol_type = other DNA
atggctgagctgctcgcttctgctggcagcgcctgttcctgggactttcctcgggcacctccctcatttcctcccccagcagcatcacgtggtgggctgggcggaacaagatctttcaggccacaccgtggcgccgagtctcccagacccggtcgggaccgggacggcgtgcgggttcccatggcgtcatccaggtgtccggcccctcgagggtgcaggtgcctccctggcgcgagtctcgcctggttggggactgtactcttgttgctggctgactgggtgctcctccgcaccgcactccctaggatcttcagcctacttgtgcctacggcactccccctgctcagagtgtgggcagtgggtcttagccgatgggctgtgctgtggttgggggcctgcggggtactacgagccactgtgggaagtaaaagcgaaaatgccggagctcaaggatggctggctgccctcaaacctttggccgccgcactggggctggctctcccgggcttagccctctttcgagagcttatctcatggggggctcccggctcggccgatagtacccggctgctgcattggggttcccacccgaccgcttttgtagtgagttatgccgcagccctgcctgctgccgccctgtggcataaactcggcagtctgtgggtccccggaggtcagggtggatctggtaatcctgttcgccgcctgttggggtgcctcgggtcagagactagacggcttagcttgttcctcgtcctcgtggtactatccagtctgggtgagatggctattccattctttacagggagactaacagactggattctacaggacggcagcgcagatactttcacacggaatctgactctcatgtccattctcaccatcgcgagcgcagttctggaatttgttggagacggtatttacaacaataccatgggccatgtgcacagccatctgcaaggcgaggtcttcggggctgtcctcaggcaagagactgaattcttccaacagaaccagacagggaatataatgtctcgcgtcactgaagacactagcactttatcagattctctgtccgagaacctgtcactctttctgtggtacctggtcagaggactgtgcctgctcggaataatgctgtgggggagcgtgtcattaactatggtaacactcattaccctgcctctgctctttctgctccccaagaaggtagggaaatggtatcagcttcttgaagtgcaggtgcgtgagtcccttgcaaagtcttcacaggtagctatcgaagccctgtcagctatgcccaccgtgcggtccttcgcaaacgaagagggcgaggctcaaaagttccgtgagaaacttcaggaaatcaagaccctaaaccaaaaggaggcagtcgcctacgccgttaattcctggacaaccagcatctccgggatgcttcttaaagtgggcatcttatatatcggaggccagcttgtgacctccggtgccgtgtcctccggtaatctcgtcacttttgtgctgtaccagatgcagtttacgcaggcggtagaggtattacttagcatatacccacgggtgcagaaagctgtagggtcatctgaaaaaatcttcgagtacctggaccgcaccccacgctgccctccaagcgggcttctcaccccgctacacctggagggactggtccagttccaggatgtctcttttgcctacccaaatcgccccgacgtgttggtgttacaaggcctgacttttaccctccgccccggagaagtgaccgccctcgttggcccaaacgggtcaggaaagagtacagtcgctgcacttctgcagaatctgtaccaacccacggggggtcagttactgttggacgggaagccactgcctcaatacgaacatagatacctccatcgccaagttgccgctgttgggcaggagccgcaggtgtttggacgctcgcttcaagagaatattgcttacgggttaacccagaagcctacaatggaggaaataaccgctgccgcggtcaagtctggcgcgcatagcttcatcagcggcctgccccaaggatacgacacggaggtcgatgaggctggcagtcaactgtcaggaggacagcgacaggccgtcgctttggcacgcgcgctgattaggaaaccttgtgttctgatcttggatgatgcaaccagtgcacttgatgcaaacagccagctacaagtggaacaactgctgtacgaatcccccgagagatatagcagaagcgtgctcctgattacacagcatctatccctcgtcgagcaggccgaccacatcttgttcttagagggcggggctatccgagagggggggacccaccaacagctaatggagaagaagggttgctactgggccatggtacaggcccctgcggacgcacctgaatag

SEQ ID NO: 138662 - DNA, 2427 bp, synthetic construct
  misc_feature 1..2427: note = Description of Artificial Sequence: Synthetic coding sequence
  source 1..2427: mol_type = other DNA
atggctgaactgctcgcatctgcgggctccgcctgtagctgggactttccacgggccccgccgtcctttcctccacccgcggcgagcagaggcgggctggggggaacccgctcatttcggcctcatcggggcgccgaatcccccaggcctggtcgagatagggatggggtccgggttcctatggcttctagtcgctgtcctgcgccacggggatgtaggtgtttgcctggggccagcctcgcctggctgggcaccgtattgcttttgctggccgattgggtcttgcttcgaaccgccctcccccgcatcttcagcctgttagtgcctacagccctccccctgctgcgtgtgtgggctgtgggactgagtcgatgggctgtgttgtggctgggagcatgtggagtgctcagggcaacagtcggatctaaatccgaaaatgctggggcacagggttggctggcggcactgaaaccactcgctgcagccctcggcctggctctcccaggcctggcccttttcagggagctgatctcttggggcgcaccaggctctgctgatagcacacgcctgctacattggggttcccaccccacggcctttgtggtgtcttacgcagcagctttgcccgcagccgccctctggcacaagctgggctctctctgggtgcccggaggacagggaggaagtgggaacccggtgcgccgacttttggggtgtctagggtccgagactagaaggctgtcgctgtttctggtcttggtggtcctcagttctcttggtgagatggcgataccctttttcacgggacggctgaccgactggatcctgcaggatggttctgccgataccttcactagaaacctgacccttatgagcatattgaccatagccagcgccgtactggagtttgttggcgacggcatatacaacaatacgatgggtcacgtccattctcacctccagggggaagttttcggcgccgtcctgaggcaggagacagaattcttccagcagaaccagaccggcaatatcatgtctcgggttaccgaggacacctcgactctttcggactctttgagcgaaaatcttagcttgttcctgtggtacctagtgcggggcctgtgtctgctgggcattatgttgtggggatcggtgtcactaacaatggtaactctcattacgctgcctctcttgttcctgcttcccaagaaggtcgggaagtggtatcagcttcttgaagtccaggtgcgagagtcactagcaaaatcatcacaggtagctattgaggccctatccgcaatgcccactgtgcggagttttgcgaacgaggaaggggaggcacaaaagttcagggaaaagttgcaggaaataaagacactgaaccagaaagaggctgtagcctatgccgtgaacagctggaccaccagcatctcaggaatgttgttaaaggtggggattctgtatatcgggggccagcttgtgacatctggagccgtttcaagtggtaacctggtcaccttcgtgctctatcagatgcagttcacacaggccgttgaggtattgctcagcatatatcccagggttcaaaaggctgtgggaagctcagagaagatctttgagtatctggatcgtacaccgaggtgcccacccagcggcctactcacacctctgcatctggagggactggtgcaatttcaggacgtatcttttgcatatcccaatcgacccgatgtcctggtgctccagggcctcacttttaccctgaggccaggagaggtgaccgcattggtgggcccaaacggttcggggaagtccactgtggcagccctgctgcagaacttgtaccagcccaccggagggcagctgcttttagatggaaaacccctgccacagtacgagcacagatatttgcacaggcaagtggccgctgtgggacaggaaccccaggtcttcggcaggagcttgcaggaaaatattgcttatgggctgacacaaaaacctacaatggaagagattaccgcagcggccgtgaagtccggagcccacagcttcatctccggactgccacagggttacgacacagaggttgatgaggctggctcgcagctttccgggggacaacggcaggctgttgctcttgcccgggctctcattaggaagccttgcgtattaattttggacgacgccacttcagctctggacgctaattcccagctgcaagtcgagcagctgctgtatgaatcccccgaaaggtattcccggagcgtgcttctcataactcagcatctttctctggtggagcaggctgaccacatcctcttcctagaaggaggtgctatacgggagggtggaactcaccagcagctcatggaaaaaaaggggtgttattgggccatggtgcaagctccggccgatgcaccagaatag

SEQ ID NO: 138663 - DNA, 2427 bp, synthetic construct
  misc_feature 1..2427: note = Description of Artificial Sequence: Synthetic coding sequence
  source 1..2427: mol_type = other DNA
atggctgagcttctcgcctcggcaggttccgcctgcagctgggactttcccagagcaccaccatcattccccccacccgcagcgtctcggggagggctgggcgggacaaggtcatttcgaccacataggggcgctgaatcgcctagaccaggtcgcgacagagatggtgtgcgtgtccctatggcctcaagtcgctgtcccgcacccagagggtgccgttgtctgcctggggcgtctctagcctggttggggacggtgctgctgctgcttgcagattgggtgctgctacgtacagccctccctcgcatcttctcattgttagtgcccactgcattgccactgttgcgcgtctgggctgtgggactgagccggtgggctgtgttgtggctgggtgcttgcggtgtgctgcgtgcgactgtcggatccaaaagcgagaacgccggtgcccagggttggctggccgccttgaagccattggctgcggctcttggccttgctctgccgggcttagctttgttcagagaattaatcagttggggagccccaggcagcgccgactcaacccgactgctgcattggggaagtcaccccacagcctttgtagtgtcctacgccgctgccttacctgccgcagccctgtggcacaagctgggctctctgtgggtgccaggaggccagggtggcagtggcaacccagttaggaggcttctaggatgcctagggtccgaaaccagaagattgagcctatttcttgtattggtggtcctctcgagcctgggcgaaatggcgatacccttctttacggggaggctgaccgattggatcctacaggatggctccgctgacacctttactagaaatctgacgctgatgagcatcctgactatcgcttccgccgtgctcgaattcgttggggacgggatttacaacaatacaatggggcatgtacattctcaccttcagggggaagtctttggggccgtgttgaggcaggagaccgagttctttcagcagaatcagacgggcaacatcatgagtcgggtcacagaggacactagcactctgagcgactcgttgtctgaaaatctgtccctgttcctgtggtatttagtgcgcggattgtgcttgttgggaatcatgctctggggcagcgtgagtttgacgatggtgaccctgatcacattacctctgttgttcctgctgcccaaaaaagttggtaagtggtaccagttactcgaggtccaggtgcgggagagtttggccaagagttcccaggtagctatcgaggccctgtcggccatgccaactgtccggtcatttgccaacgaggaaggggaggcccagaagtttcgagaaaaattgcaagagatcaagactttgaaccaaaaggaggcagttgcatatgcagtgaactcctggacgaccagtataagcggcatgctcctcaaagtggggattctgtacattggcgggcagctggtcactagcggagcggtgagcagtgggaaccttgtcacattcgtactgtaccagatgcagttcacccaggccgtagaagtactgctctcaatttatccacgggtacagaaggcggttggcagcagtgaaaagatctttgaatacttagacaggaccccccgatgtccaccttctggcttgctcacccctctgcacctggaagggctggtacagtttcaggacgtgagtttcgcataccctaacaggcctgacgtgctcgtgctgcaaggattaacttttactctcaggcccggagaagtgacagctctcgtcggccctaatggatccggcaagtccaccgtcgcggcccttctacaaaacctttatcagccaacaggcgggcagctcttgctcgacggcaaacccttgccccagtatgagcacagatatctgcaccgtcaggtagccgcggtaggacaggagcctcaggttttcgggaggtctcttcaggagaacatagcctacgggttgacacagaagcccactatggaggaaattactgcagcagccgtgaagagcggtgcgcatagtttcattagcggactacctcagggctacgacactgaggtggacgaggcggggtctcagctcagcggtggccaaagacaagcggtggccttggcccgcgctctgattaggaaaccctgtgtgctcattctggacgacgccaccagcgccctcgacgcgaactcacagctgcaggtcgaacagctcctctatgaatctccagaaaggtattctaggtctgtcctgttaattacacagcacctgtctctggtcgagcaggctgaccacattctgttcctggagggaggcgcaataagggaaggaggcactcatcagcagctcatggaaaaaaaggggtgttattgggcgatggtgcaagcccccgctgatgccccggagtag

SEQ ID NO: 138664 - DNA, 1644 bp, synthetic construct
  misc_feature 1..1644: note = Description of Artificial Sequence: Synthetic coding sequence
  source 1..1644: mol_type = other DNA
atggccattccgttcttcaccggaagactgaccgattggatcctccaagatggatctgccgatacgtttacaaggaatttaaccttaatgtccattcttactatagcaagtgccgtgctcgagtttgtcggcgatggcatctataacaataccatgggacatgtgcatagccatctgcagggggaagtgtttggtgccgtgctccgccaagagacagaattctttcaacagaatcagaccggcaacataatgtccagggtgaccgaggatactagcacattgtctgacagtctttcagagaatctcagccttttcttgtggtacttggttaggggcctgtgtctcttgggcattatgctgtggggatctgttagcctgacgatggtaactcttataacgttgccgctgttgttccttctcccaaagaaagtggggaaatggtatcagttactggaggtccaggtgagggaatctctagccaagtccagccaagtggcgatcgaagccctgtctgccatgccaacagttagatcatttgcgaacgaggagggcgaagctcaaaaattcagagagaaactgcaggagattaagaccctaaaccagaaggaagctgtggcctacgccgtaaatagctggacaacctccatctcgggtatgttactgaaggtcggtatcctttacatcggtggacaactggtgacctcaggggccgtgtcctccgggaacctggtaacatttgtactgtaccagatgcagtttactcaagccgtggaagttctgttgtccatatatcctcgagtccagaaggcagtgggctcaagcgagaagatatttgaatatctcgacagaacacccagatgccccccatctggattgttaaccccgttgcatttggaagggcttgtacagttccaagatgtttcattcgcctatccgaataggcctgatgtgttggtgttacagggactcacctttacactgcgccctggagaggtaactgcccttgtgggcccaaacgggtccggcaagtcaactgtggcggccctgctgcagaatctttaccagcccacgggcggtcagctcctgctcgacggaaagccattaccacagtatgagcatcgatacctgcaccggcaggtagctgccgtgggccaagagccccaggtattcggacgctctctccaagagaatatcgcctacggactcacccagaagcccacaatggaagagatcaccgcagccgcagtgaaaagcggagcccattcttttataagtggacttccgcaaggttacgacaccgaggtcgacgaagcagggtctcaattatccgggggccagcggcaagccgtggcactagctagagccttgatccggaagccgtgcgtcctaatcctggatgacgctactagcgccttggatgccaacagtcagctgcaggtggagcaactgctctatgagtctccagaacgctactctcgctccgtcttgttgatcacccaacatctcagtcttgtggaacaagccgatcacatcctcttcctggagggcggtgccattcgcgagggaggcacgcaccaacagctcatggagaagaagggatgctattgggccatggtgcaggcacccgctgatgctcctgagtag

SEQ ID NO: 138665 - DNA, 2427 bp, synthetic construct
  misc_feature 1..2427: note = Description of Artificial Sequence: Synthetic coding sequence
  source 1..2427: mol_type = other DNA
atggccgaactcttagctagtgccggctctgcctgtagttgggactttccaagggccccgccttcctttccccctccagctgcttcacgtggtggccttggcgggacccgcagctttcgcccccatcggggcgctgagtcacccaggcctggacgggatagagacggcgtgagggtgcctatggcctcttcacgctgtccagctcctagaggctgtcgctgtctgcccggcgcctcccttgcctggcttggtaccgtgcttctgttgttagccgactgggtgttgctcagaactgccttaccacgaatattttcactcctggttcccactgctctgccactgttgcgagtttgggcagtgggactgagtcgctgggctgtgttatggctcggagcgtgcggagtgcttagagcaacaggtggaagcaaatctgagaacgccggtgctcaggggtggctggccgcacttaagccactcgctgccgcactaggcttggccctgccggggttagctctttttcgagaactgatctcctggggcgccccaggaagcgccgactccacaagactgctgcactggggaagtcatcccacagcctttgtggtgtcctatgctgctgcacttccagccgcagctctctggcacaagttaggctcactgtgggttccgggtggtcagggagggagcggtaatcctgtgaggcggctcctgggttgcctcggtagcgagactcgcaggctgtcccttttcctggtgcttgtggtgcttagttctctgggagagatggctattccgttttttacaggccggctcacggattggatcctgcaggacggatccgcagacacatttactcgcaacctgactttgatgagcatcttaactatcgccagtgcagtcctggagtttgtgggcgatggaatttacaacaacaccatgggccatgttcacagccatctccaaggcgaggtcttcggggctgtcctgcgccaggaaaccgaattcttccagcagaaccagactgggaatattatgagccgcgttaccgaggatacaagtactctgtccgactccctgtctgaaaatctcagcctgtttctctggtatctggttcgggggctgtgcttgttaggcattatgctgtggggcagtgtgtcactgacgatggtgaccctcatcacgctccctctcctcttcctcctcccaaagaaggtaggaaagtggtaccagctgctggaggtgcaggtgcgggagagtctggccaagagctctcaagtggccatagaggccctcagcgcgatgccgactgtaaggtccttcgcaaatgaggaaggtgaagcccagaagtttagagagaaactgcaggaaatcaagaccctcaaccagaaggaggccgtggcgtatgccgtcaattcttggaccacaagcatttctggaatgctcttgaaggtcggaatactgtacataggagggcagttagttacgtcaggggcagtgtcgagtgggaacctggtgacctttgtgctttaccagatgcagtttacacaggcagtcgaagtgttactgtccatctatccacgcgtgcagaaggcagtcggctcctcagagaagatttttgagtacttggacagaacacccaggtgtcctccatcgggacttctcacacccttacacctggagggtctggtacaatttcaggatgtgtccttcgcttaccccaacaggcctgatgtactcgttttacaagggctgactttcacactgagaccaggggaggtgacggccttggtgggccctaatggaagcggtaaaagtaccgtcgcagctctgttacaaaacctttatcagcctaccggggggcagctcctgcttgatggtaagccgttacctcaatacgagcatagatacctgcatcgtcaggtcgcggccgttggccaggagccacaggtgttcggacgatctctgcaggaaaacatagcttacggtctgactcagaagcctaccatggaggaaattactgccgctgcggtgaagagtggtgcacactcatttatctcaggcctgcctcaggggtacgacaccgaagttgacgaggccggaagccaactctccggtggacagaggcaagccgtcgcactggcaagggccttaataagaaagccctgtgtgttgatactcgatgatgctacatctgctctggatgcgaattcccagctacaggtggagcaactcttgtacgaatccccagagcgatattcgcgcagtgtcttgctaattactcagcacctgtctttagtggagcaggccgaccacatcctctttctcgagggcggagccatccgggaaggcggcacccaccaacagctgatggagaagaaggggtgttactgggcaatggtccaggctcctgctgatgcgcctgagtag

SEQ ID NO: 138666 - DNA, 2427 bp, synthetic construct
  misc_feature 1..2427: note = Description of Artificial Sequence: Synthetic coding sequence
  source 1..2427: mol_type = other DNA
atggccgaacttttggccagtgccggctccgcttgctcatgggatttccctcgggcgccacccagcttccctccacccgccgctagcagaggcggactgggcggcacgcggagcttccggccacatcgcggcgcggaatcaccgcgcccaggcagggatcgagacggcgtgagagttcctatggctagctcccgatgccccgcacctaggggctgtcggtgtctccccggcgcttcactggcttggctggggacggtactgctcctcctggcggactgggtgttgctgaggaccgccctcccgcgaatctttagcctcctcgtgcccaccgcgctacctctgttgcgggtttgggctgtcggtttatctagatgggcggtgctgtggttgggtgcatgtggggtgctgcgtgccactgtgggatcaaagtcagaaaacgcaggtgcccagggctggctggcggcccttaaacctttagcggccgctctgggcctggccctgccagggttggctctattccgtgagctgatctcctggggggctccagggtccgctgacagcactaggcttctccattggggatcccacccaaccgcgtttgtggtgagctacgccgccgcactgcccgccgccgcactgtggcacaagcttgggtccctgtgggtgcccggaggtcagggcggctctgggaatccagtgcgccgcctgttaggctgtcttggaagcgaaacccgccgtctttcactgtttttagtactcgtggttctcagcagcctcggcgagatggccatcccgttcttcacgggtagactcacagactggatcctgcaggatggctctgccgatactttcaccaggaaccttacactcatgtcgatcctgaccattgcttctgccgtcctggaattcgtcggagacggcatttataataacactatgggacacgtccactcacaccttcagggcgaggtgtttggcgcagttttaagacaggagacagagttctttcagcagaatcagacgggcaatatcatgagtagggttacagaagacacatccactctgtcagacagcctatccgagaacctgagtcttttcctctggtatctcgtgcgcggcctctgcctgctcggaatcatgctgtggggatctgtgtcactgaccatggttacgctcatcaccctgcccctcctctttctgctgcctaagaaggtggggaaatggtatcagctgctggaagtgcaggtacgggagagcttagccaagagctcccaagtggcaattgaggctctttcggcaatgcctactgtgcggtctttcgctaatgaggagggtgaagcacagaagtttcgggagaaacttcaggagattaaaactctcaaccaaaaggaggccgtggcctatgcagtaaatagctggacgacatcaatctctggaatgcttctgaaggtgggcattctgtatattggagggcagctggttacctctggggcagtatctagtgggaatctggtcacgtttgttctgtaccagatgcagtttacccaggctgtggaagtgctactgagcatctacccgagggtccagaaggccgttggttctagcgagaaaatctttgagtacctggataggactcccagatgtcctccgagtggattactgaccccacttcacctggagggcctcgtccagttccaagatgtgagtttcgcctaccccaataggccagatgtgcttgttctacaggggctgacctttactttacggcctggggaggtaaccgcattagtgggtccaaatggtagcggtaaatctaccgtggccgccctgctgcagaacctctaccaacccaccgggggacagctgctcctcgatggcaagccactgcctcagtatgagcatcgctatcttcacagacaggtggcagccgtaggccaggaaccgcaggtgttcgggcgcagcctccaggaaaacattgcgtatggattgacacagaaaccaacgatggaggaaattaccgccgcagctgtgaaatctggcgcccacagctttatctcaggattaccccaggggtatgatacggaggtggacgaggctggttcccaactgtcaggcggccaacggcaagcagtcgcgttggcacgagccctcatccgcaagccctgtgtgttaatactcgacgacgctacttcggccctcgatgcgaactctcagttgcaggtagaacagctgctgtatgaatcccctgaaaggtattcccggtccgtcttactcatcacccaacatctaagcttggtggaacaagccgaccatatcctgtttctggaaggtggagcgattcgcgagggaggtacacaccagcagcttatggagaagaaaggttgttattgggctatggtacaggcccccgcggacgcccctgagtag

SEQ ID NO: 138667 - DNA, 2427 bp, synthetic construct
  misc_feature 1..2427: note = Description of Artificial Sequence: Synthetic coding sequence
  source 1..2427: mol_type = other DNA
atggccgaattacttgcttctgcgggcagcgcctgtagctgggattttcctagagccccaccatcttttccaccccccgccgccagtcggggcggcttgggtgggactaggtcatttcggcctcatcgcggggccgagtctcctcggccaggtagggatcgcgacggcgtccgcgtgccaatggcctcgtctcgctgtcctgcccctagaggatgtcgttgcctaccaggggccagcttggcttggctgggaacggtgttattgctacttgcagattgggtgctcttacgcacagctctgccgagaatcttctccctgctcgtgcccaccgccctgccgctgttaagggtttgggctgtgggtcttagccggtgggctgttttgtggttaggagcctgtggcgtgttaagggcaacggtgggttctaagtcggaaaacgccggcgcccaaggctggctcgccgcattgaaacctttagccgccgctctcggcctggccctccccgggctggcgttgttccgtgagctcattagttggggtgccccgggtagtgccgattccactagactcctgcactggggttcccaccctacagcctttgtggtgtcctatgccgcagctctcccggcagctgccctatggcacaaactggggtcactgtgggttcctggaggccaggggggttccgggaacccagtccggaggcttctcggctgcctgggtagtgagaccaggcggctctcactcttcctggtcctggtggtcttgtcgtctcttggggagatggccattccgtttttcactggaagattgacagactggattctccaggatggctcagctgacacatttacacggaatcttaccctgatgtcgatcctgaccatcgcctctgccgtcctcgagttcgtgggcgatggtatttacaacaataccatgggccacgtccattctcatctccagggcgaggtgttcggagccgtgttgcgtcaagaaacagaattttttcagcagaaccagactggtaatatcatgagccgggtgacggaagatacctcgacactctcggactctctgagtgaaaatctgtccctcttcctgtggtacttggtgcggggcctgtgtttgctgggaatcatgctgtggggttctgttagcttgactatggtcacattgattactttgcctctgctcttcctgctaccaaagaaagtagggaagtggtaccagctcctcgaggtccaggtgcgtgaaagtttagcaaagtcctcgcaggtggccatcgaggcattaagtgcaatgccaacagtgcgaagctttgctaacgaggaaggagaagctcagaaattccgggaaaagctgcaggaaatcaagacgttaaaccaaaaagaggctgtggcatatgctgttaacagctggaccactagtatttccggcatgctgctgaaggtgggtatactatatatcggggggcaactcgtcaccagtggagccgtgtccagcgggaatctagtgaccttcgtgctttaccagatgcagttcacgcaggctgtggaagtcctgctgtccatctaccctagagtccagaaagctgtggggtcatctgaaaaaatctttgagtacttggaccgaaccccacgctgtcctcccagcggactgctcacccctctccatctagaaggcctggtgcagttccaggatgtatccttcgcatacccaaataggcccgatgttctggtgctccagggcctgacgtttacactgagacctggcgaagttactgctttagttgggcctaatggcagcggaaaatctacagtcgccgccctgctccagaatctgtaccaaccaacgggaggccagctgctcttagacggaaaacctctaccccagtatgagcacaggtatcttcatcgacaggttgccgctgtcggtcaggagccacaggtgtttggaaggtctctgcaggaaaacatcgcctatggattgacacagaagcccactatggaggagattacagccgccgctgtcaaatctggtgctcatagttttatttctggtctacctcaaggatacgacacagaagttgatgaggcggggagccagctgtccgggggccagaggcaggcggtggcactagctagggctctgattcggaaaccatgcgttctgatcctggacgacgccacaagtgcactggatgctaactcccaactgcaggtggagcaactcctgtatgagagtcccgagcggtactcacggtctgtcctgcttatcacacagcacttgtcactggttgagcaagcagaccatattcttttcctcgaaggcggggccatcagagaaggaggaactcatcagcagctcatggagaaaaagggatgctactgggccatggtgcaggctcctgctgacgctccagagtag

SEQ ID NO: 138668 - DNA, 1644 bp, synthetic construct
  misc_feature 1..1644: note = Description of Artificial Sequence: Synthetic coding sequence
  source 1..1644: mol_type = other DNA
atggccatacccttttttaccgggcgtctgactgattggatccttcaagacggtagtgcagacacattcacaagaaatctcactttgatgtccattctgactattgcaagtgctgtgttagagttcgtcggcgatggcatctacaacaataccatgggacacgtccacagccacttgcagggcgaagtctttggggccgtgctccgccaggagaccgagttcttccagcagaatcagaccggtaatattatgtcccgcgtcactgaggacacttctacgctaagcgacagcctcagcgagaacctgagcctcttcctctggtacttagtgcgcggcctgtgtttgctcggaataatgctgtgggggagcgtgtctctaactatggttacccttatcactctccccctgctgtttttgctcccaaagaaagtggggaagtggtaccaactgctcgaggtgcaggtgagggagagcctggccaaatcaagtcaggtggcgatcgaagctctttcagcaatgcccacagtgagatcctttgcgaacgaggagggggaggcccaaaagtttcgggaaaaactgcaggagataaagacactgaaccagaaagaagcagtggcttacgccgtaaactcatggacaacctcaatttctggaatgctgttgaaggtgggaatcctgtacataggaggccagctcgtgacctcaggagccgtctccagcggaaacctggtcactttcgtcctctaccagatgcagttcacccaggctgtggaggtgctcctttccatttacccgcgcgtgcaaaaggctgtaggttctagcgagaaaattttcgagtacctcgaccgaacaccacgctgtcccccaagcgggctgttgacacctctccaccttgagggactggtgcaattccaagatgtgagcttcgcttaccctaacagaccagacgtcttagtgctgcagggactgacattcacactacggccgggagaggtcaccgccttggtaggacctaacggttctgggaaatcaactgtggctgcactcctgcagaacttgtaccagcccaccggcggtcaactgctattggatggcaagccattgccacagtatgaacaccgctacctgcatcgacaggttgccgcagtgggacaggagcctcaggttttcggtagaagtctgcaggaaaacatagcctacggtctgacccagaagcccaccatggaagagatcacagcagctgcagtgaagagcggggctcatagcttcataagtgggttaccacagggttatgatactgaggtcgatgaggccggatcacagctgtctggcgggcagcgccaggctgtggccctcgccagggcccttattcgtaaaccatgtgtcctgatcctggatgatgccacctccgccttggacgcaaacagtcagctacaggtcgaacagctgctgtatgagagccccgagcgctattccagaagcgtgcttctgatcacgcaacacctgtccctggtggagcaagctgatcatatactgttcttggaaggcggtgcaattcgcgaaggcggcacccatcagcagctgatggagaagaaaggctgttattgggccatggttcaggcccctgccgatgcccccgagtag

SEQ ID NO: 138669 - DNA, 1644 bp, synthetic construct
  misc_feature 1..1644: note = Description of Artificial Sequence: Synthetic coding sequence
  source 1..1644: mol_type = other DNA
atggctatcccctttttcacaggtcgtctcaccgactggattctccaggatggctcagccgatacatttaccaggaatctgactctcatgtcaatcctgaccatcgcctccgctgtactggagtttgtcggtgacgggatctacaacaacaccatgggtcacgtgcactcacatcttcaaggggaggtgttcggtgccgtgctgcgccaagaaacggaattctttcagcagaatcaaaccgggaatatcatgtccagggtgacggaggatacatccactctctctgacagtctcagcgagaacctctctctcttcctctggtatctggtcaggggactctgcctcctcggtattatgctgtggggatctgtgagtttaacaatggtgaccctgattaccctgcccctcctgttcctactgccaaagaaagttggcaagtggtaccagctcctggaggttcaggtcagagagtctctcgccaaaagctctcaggttgctattgaagccctctcagctatgcctaccgtgaggtcattcgctaatgaggagggagaggcccagaagttccgtgagaaattgcaggaaataaaaaccctaaaccagaaggaagccgtcgcttacgccgtgaactcttggactacctctatttctggtatgctccttaaggtgggcatactgtacataggagggcagctggttacgtccggcgcagtctcatccggaaacctggtcacttttgtactgtatcagatgcagtttacccaggccgtcgaagtcctgcttagcatttatcctcgtgttcagaaagcagtgggaagtagtgaaaagatctttgagtatttggatcggactcccagatgtccaccgtccgggctgctcaccccactgcaccttgagggcctcgttcagtttcaagacgtaagcttcgcttatccaaatcgccccgatgtcctggtcctgcaggggctgacttttaccctacggcccggagaggtaaccgccctggtaggacctaacggtagcggcaagtctactgtcgccgcgctgctccagaacttgtaccagccgaccggtggccagctattgctcgatggcaagccccttcctcagtacgagcatcgctacttgcatcgtcaggtggccgccgtgggacaggagcctcaagtttttggacgttcgctgcaggagaatatcgcttacggcttgacccagaagcctactatggaagaaatcactgctgcggctgttaagagtggggctcacagtttcattagtgggttgccacagggttacgacaccgaagtggacgaggcaggctctcagctgagcggtggccagagacaggctgtagctctggccagggccctgatcaggaagccctgcgtcttaatattggacgatgccacgtctgccctcgacgccaactctcagctgcaagtagaacagctgctgtatgagtctcctgagcgctactccaggtccgttctcctcatcacacagcatctgagcctggtggaacaggccgatcacattctgttcctggagggtggcgcgattagggaaggtggaacccaccaacagctgatggagaagaagggctgttattgggccatggtgcaggcgcctgctgatgcaccggagtag

SEQ ID NO: 138670 - DNA, 1644 bp, synthetic construct
  misc_feature 1..1644: note = Description of Artificial Sequence: Synthetic coding sequence
  source 1..1644: mol_type = other DNA
atggccatacctttttttacgggacgcttgaccgattggatcctccaggatgggtcggctgatacctttacccggaatttgaccctcatgtctatcctgaccattgcatccgcggttttagagtttgtaggtgacgggatatacaacaataccatgggacacgtgcactcccacttgcagggagaagtctttggtgccgtgctgcggcaagagacggagttttttcagcagaaccagaccgggaacattatgtccagggtaaccgaggacaccagtaccctgtctgactcattgagcgaaaatcttagcctgtttttgtggtacctggtgaggggcctctgccttctaggcatcatgctgtgggggtccgtgtcactgaccatggtgactttgatcacgctgccactcctgttcttgctccctaagaaagttggcaagtggtaccagttgctcgaggtgcaagtgcgagagagcttggcaaaatcaagtcaggtggccatcgaagcactttctgccatgcctaccgtaaggtcattcgccaacgaagagggtgaggcccaaaagttcagagaaaaactgcaggagatcaaaacacttaatcaaaaggaggccgttgcctacgcagtcaactcatggacaactagtatttcggggatgctgctgaaggtagggattctgtacataggagggcagcttgttacatctggagcagtttcgtctggtaatttagtcactttcgtcctgtatcaaatgcaattcacacaggccgtggaagtacttctgagtatatacccgagagtccagaaggcagtggggtcctcggagaagatctttgaatatctcgataggacccctcgatgccctccctccggattgttgacaccactacacctcgagggtctggttcagttccaagatgtcagtttcgcatatcctaatagaccagacgtgctggtgctgcaaggcctcaccttcaccctgagacctggtgaggtgactgctctggttggcccaaacggatctgggaagagtacggtggcagcactgctgcagaacctgtatcagccaaccggcggccaactgctgctggacggaaaaccattgccgcagtacgaacaccggtacttgcaccgccaagtggctgcggtgggccaagagccccaggtttttgggcgcagccttcaggagaatattgcctacggacttacacagaagcctaccatggaagagataactgccgcagccgttaagagcggggcccattccttcatcagtgggctcccccaggggtacgacacagaggtcgacgaggccggtagtcagctgagtggagggcagaggcaggctgtcgcgctggctcgggccctgatcagaaaaccctgcgtgttgatcctggatgatgccacaagcgccctggatgccaactcccagttacaggtagagcagttactctatgaaagcccagagagatattcacggagcgtcctgctgatcacccagcacctgtctcttgtggagcaggctgatcatattctgtttctggaggggggcgctatcagggaaggcggtacacaccagcagctgatggaaaaaaaagggtgttactgggctatggtacaagcacctgcagacgcacccgagtag

SEQ ID NO: 138671 - DNA, 1644 bp, synthetic construct
  misc_feature 1..1644: note = Description of Artificial Sequence: Synthetic coding sequence
  source 1..1644: mol_type = other DNA
atggctattcctttctttacaggtcggttgacagattggattttgcaagacggaagcgctgacacgttcacccgaaatttaacactgatgtcgatcttgactatcgcgtccgccgtgctggaattcgtgggagacggtatctacaataatacaatgggccacgtccatagccatcttcaaggagaagttttcggggcagtcctccgacaagagacggagttttttcagcagaatcagaccggtaatatcatgagcagagtaacggaggacaccagcacacttagcgattccctaagcgaaaacctgagtctctttttgtggtatcttgttcggggtttatgtcttctgggaattatgttatgggggagcgttagcctgaccatggtcacattgatcacactgcctctcctgttcctattgcccaagaaagttggaaaatggtaccagttacttgaagtgcaggtgagagagagcctggctaagagttcccaggtggcaatcgaggctctgtcagccatgcccactgtcagaagttttgcaaatgaggagggagaagcacagaagtttagggagaagctccaggagattaagactctaaaccagaaggaggcagtggcctacgctgtgaactcttggacaaccagcattagtggcatgctccttaaggtgggcatactgtacatcggtggacagcttgttacttcaggcgccgtttcttccggcaacctcgttactttcgtgctctatcagatgcagttcacacaggccgtggaagttttgctgagcatatatccaagagtgcagaaagctgtgggctcctccgaaaaaattttcgaatacctggacagaacacccagatgtcctcccagcgggctccttacccccctgcacttggaaggcttagtacagttccaggatgttagttttgcctacccgaaccgtcccgacgtgctggtgctccaaggtctgacttttacactgcgtcctggcgaggtcactgccctcgtgggtccaaacggatcaggaaaatccacagtggctgccttactccagaacctctaccaacccaccggaggacaattgctcctggacggtaagcctctcccccagtacgagcacagatacctgcacagacaggtggcggcggtcggtcaggagccacaagtgtttgggcgttctttgcaggagaatatcgcatacggcctgacacaaaaaccaacaatggaggagatcactgccgccgcagtgaaaagcggagcccatagctttatttcgggattgccccaaggctacgacacggaggttgatgaggctggctcccagctgagtggggggcagaggcaagccgtggccctggccagggcacttatccgaaagccctgcgtcctcattctcgacgatgccacctcagctctagatgccaattcacagctgcaggtggagcagttgctgtatgaaagcccagagagatactcacggtccgtccttcttattacccaacatctttcgctggttgagcaggccgaccacattctgtttcttgagggcggagcaatcagagaggggggtacccatcagcaactgatggaaaagaagggctgttattgggctatggtccaggcccccgcagacgcgcccgagtag

SEQ ID NO: 138672 - DNA, 1644 bp, synthetic construct
  misc_feature 1..1644: note = Description of Artificial Sequence: Synthetic coding sequence
  source 1..1644: mol_type = other DNA
atggccatccctttcttcaccggccgcctgaccgattggattctgcaggacggtagcgccgacacattcacaagaaatttgaccctgatgtcaatcctgactatcgcctctgctgtgctggaatttgtcggtgacggtatctacaacaacactatgggccacgtgcattcccatctgcagggcgaagtgttcggggctgtccttaggcaagagacagaatttttccaacagaatcagaccgggaatatcatgagcagggtcaccgaggacacatccaccctgagtgactctctgtcagaaaatctatcgctgttcctgtggtatctggtgaggggactgtgtttgttagggattatgttgtgggggtcagttagtttgacaatggtgactctcatcacattacctctcctgttcttgctcccgaaaaaggtcgggaaatggtaccagttgctagaagtacaagtccgcgaaagcctggccaagagctctcaagtggcaattgaggctctcagcgcaatgcccacagtgcggagctttgcaaatgaagaaggagaggcccagaagttccgggaaaaactgcaggaaattaagacactgaatcagaaagaggctgtcgcatatgcggtaaactcatggaccactagcattagtggcatgcttctgaaagtgggcatattatatattggcggacagctagtcaccagtggtgctgtgagttcgggaaacctggtgactttcgtactgtaccaaatgcagttcacacaagcagtggaggtgctgctgagcatctatcctagggtgcagaaagcagttgggagcagcgagaaaatcttcgagtacttggatcggacaccccggtgtcctccttctggtttgctgacgccattacatctggagggcctggtgcagtttcaggatgtttcttttgcttatcccaaccgacccgatgtactcgtgctgcagggcctgacgtttacactgagacctggtgaagtaacggccctggtagggcctaatgggtcaggaaagtccaccgtggccgcacttctgcagaatctgtaccagcccaccggcggacaacttttgctcgatggcaagcctctgcctcagtacgaacatcggtacctgcaccgccaggtggccgcagtgggacaggagcctcaggtgttcggacggtcccttcaggagaacatagcctatggcctaactcagaagccaacaatggaggaaattactgccgccgctgtcaagagcggcgcccacagcttcatcagcggtctgcctcaggggtacgatacagaggtggatgaagctggctctcagctcagtggtggacagagacaggcagttgcactggctagagccttgatcaggaagccctgcgtcctgattttggacgacgctacgagcgccctggacgccaactctcagctacaggtggagcagctgctgtacgaaagcccagagaggtactccagatcagtgttgctaattactcagcacttgagtctcgtggaacaggccgaccatatcctcttcctggaaggcggtgctattagggagggtgggacacaccagcagcttatggagaaaaaagggtgttattgggccatggtgcaggcccctgccgacgctccagaatag

SEQ ID NO: 138673 - DNA, 1644 bp, synthetic construct
  misc_feature 1..1644: note = Description of Artificial Sequence: Synthetic coding sequence
  source 1..1644: mol_type = other DNA
atggccattccttttttcaccggtagactgaccgactggatccttcaagatggcagtgccgacacattcactcggaacctcacactgatgtccatactgactatcgcgtcggcagttttagagttcgtgggagatgggatatataacaacacaatgggtcacgtccactcccacctccagggcgaggtgttcggggcggtgctgagacaggagacagagttcttccaacagaatcaaaccggcaacattatgtctagagtaacagaagacacaagtactctgagcgactctttatcagagaacttaagtctcttcctgtggtatctagtgcgtggcctctgtctgctggggatcatgctatgggggagtgtgtcactcactatggtgacgcttataaccctcccccttctattcttgcttcccaagaaggtgggaaagtggtatcagctgctggaggttcaggttcgggagtccctcgctaagtccagccaggtggctatagaggctctttcggctatgcccaccgtgagaagcttcgccaacgaggagggggaggctcagaagttcagggagaaacttcaagaaattaagactctgaaccagaaggaggcggtcgcatatgcagtgaattcttggacaaccagcatatccggtatgttgctgaaagtgggaatcctttacatcgggggccaactggtaacttcgggagccgtgtcatccggaaaccttgttacttttgtcctgtaccagatgcaattcacccaggccgttgaagtgctgctcagcatctatcctagggtacaaaaagcggtcggttcatcagagaaaatatttgaatacttggatcgcacaccaaggtgccccccttctggcctgttaacgccccttcacctggaggggctggtccagttccaggatgtatccttcgcatacccgaatagacctgatgtactcgttctccagggccttacttttacgctgcggccaggcgaagtgacagcccttgtgggtcctaatggcagcggcaagagcactgtcgctgccctcttgcagaatctgtatcaaccgaccggcggacagttactcctggacgggaagccccttccacagtacgaacatcggtatctgcacagacaggttgctgcggtcggacaggagcctcaggtgttcggaaggtcactgcaggaaaacattgcttatggtctgacccagaaacccactatggaggaaatcaccgccgccgccgtcaagtccggcgctcactcattcatcagcggactgccccaggggtatgataccgaggttgatgaagccggatctcagctgagtgggggtcaacgccaggcggttgcactcgcccgggctctcattagaaagccttgtgtactgatcttggatgacgccacgtctgctttggatgccaattcacaattgcaggtggaacaactcctttacgagtcccctgaaaggtactcaaggtctgtgttgctgatcacccagcacctcagcctggtcgagcaggcagaccatattctatttctggaaggcggggctatcagagagggcggcacacaccagcaacttatggaaaagaagggctgttattgggccatggtacaggccccggccgatgcaccggaatag

SEQ ID NO: 138674 - DNA, 1644 bp, synthetic construct
  misc_feature 1..1644: note = Description of Artificial Sequence: Synthetic coding sequence
  source 1..1644: mol_type = other DNA
atggctattcccttctttaccgggaggctgactgactggatcctgcaggatggcagtgctgatacatttacgagaaatctcactctgatgtctattctaacaattgcgagtgctgtgctggaattcgtcggggatggaatatacaataatacaatgggacacgtccactctcacctgcaaggcgaggttttcggtgctgtcctccgacaggaaacggaattctttcagcaaaaccagactggtaacataatgtcaagggtgacggaagacacctctactctctccgatagtctgtctgagaacctgtccctcttcctgtggtatctagttcggggcctgtgtctccttggcattatgttatggggctctgtgagtctgacaatggtgactctcatcacattgccgctgttgtttcttctaccgaagaaggtcgggaagtggtaccaactcctcgaagttcaagtgagagagtctctggccaaaagctctcaggtagcaatcgaggccctgtccgcaatgcccaccgtgaggtcctttgccaacgaagagggcgaggcccagaagtttagagaaaaattgcaggagattaaaacgctcaaccagaaggaagcagtagcctacgccgtcaattcttggacaaccagcatttctggcatgctgctcaaggtcggtatcctctacatcggcgggcagctagtgaccagtggtgcggtttcttccggaaatttagtgacctttgttctctatcaaatgcagtttacacaggcggtggaggttctgctttcaatctacccgcgagtccagaaggcagtgggctcaagcgaaaagatatttgaatatttggacaggactccgcgatgtcccccgagtgggctgctgactcccctccacctagaaggactcgtccagttccaggacgtgagctttgcttatccaaatcgacccgacgtactggtactgcagggtctcacgttcacactgcgaccaggagaagttactgcattagttgggcccaacggctcaggaaaatctacagtggcagccctcttgcagaacttataccaaccaaccggcggccagcttctattagacggcaagcccctgccgcaatacgagcacaggtacctgcaccgacaggtggctgccgttgggcaagagccacaggtattcggccgctctttgcaagaaaacatagcttacggtcttacccaaaagccaaccatggaggagattaccgcagcagcggtcaaatccggggcacattcatttatatccgggctcccgcaaggctacgatactgaggttgatgaagccggttctcaactttccggcgggcagaggcaggccgtcgccctggcccgggctctcattaggaaaccatgtgtgctcatcctggatgacgcaacaagcgccctggatgctaacagtcagctacaagtggagcaactgctgtacgaatcgccggagcgctatagtcgctccgtgctcctcattacacagcacctgagccttgtggagcaggccgatcatattctgtttttagagggaggcgctattagggagggtgggacacatcaacagctcatggaaaagaaggggtgttattgggcaatggttcaggctcccgccgatgcgcccgagtag

SEQ ID NO: 138675 - DNA, 2061 bp, synthetic construct
  misc_feature 1..2061: note = Description of Artificial Sequence: Synthetic coding sequence
  source 1..2061: mol_type = other DNA
atgaggctgccagacctaaggccttggacttctctgctgctggtcgatgcagcgttgctgtggctgctgcagggccctcttggcaccctcctaccgcagggactgccgggactgtggctggagggtaccctgcgactcgggggactgtggggcttgctgaagttgagaggcctgctgggttttgtgggcactttgctgctgcctctgtgcctggctactccactaaccgtgtcacttcgagcccttgtcgctggggccagccgggcacctccagctcgcgtggctagcgccccctggtcatggctgctagtgggttatggcgcggccggcctgtcctggagcctatgggccgtgttgtctcccccgggcgcacaagagaaagaacaagaccaggtgaacaacaaagtgctgatgtggcggttgctgaaactatctagaccggacctcccactcttggtcgctgcatttttctttctggtcctcgccgtgttaggggagacgctaatccctcattactcgggccgcgtcattgacattttgggaggggacttcgaccctcacgctttcgcctcggccatctttttcatgtgtctgtttagcttcggcagttcattatcagctgggtgtcgtggtgggtgttttacttatacaatgagcagaattaacctccggatcagggaacaactattttcttccctgcttcggcaagacttaggttttttccaggagactaagacaggggagctgaattcaagactttctagcgacacgactttgatgtccaattggcttcctctaaacgcaaacgtactgttaaggtcattggtgaaagtagtagggctgtatggttttatgctttccatttcgcccaggttgactctgttatctctgctgcacatgccattcacgatcgccgccgagaaggtatataacacacgccaccaggaggtgttgcgggagatccaagacgcagtggccagagccggccaggtggtccgcgaggcggtgggcggcctgcagacagtgagatccttcggggcagaggaacatgaagtatgccgctacaaggaagcgctggagcaatgccgccaactatattggaggagggatctcgaacgggccctgtacctgctcgtgcggcgtgttctgcatctgggggtacagatgctcatgctctcctgcggcctgcagcagatgcaagatggtgaactcacccagggctccctcctgagctttatgatatatcaggagtctgttggcagctatgttcaaacattggtctatatctacggagatatgctctcaaacgtcggcgctgcagagaaagtcttctcttatatggataggcagcccaatttgccctctccgggcacgctcgcccctaccacccttcagggcgtcgtcaagtttcaagatgtgtccttcgcctaccccaacaggcccgatcggcccgtcctcaaagggcttaccttcactctccgccccggggaggtgacagcactagtcggccccaacgggtctggcaaaagcacagtggccgccctacttcaaaatctctaccaaccgacaggtggccaggtcttactcgacgaaaagccaatatcacaatatgaacattgctacttgcatagtcaggtcgtgtcagtgggacaggagccagtgctgttctccggttctgtacgcaacaacattgcctacggattacagtcatgtgaggatgataaggtgatggcggcagcacaggccgcacatgccgatgattttattcaggagatggagcatgggatctatacagacgtcggcgaaaaaggctctcaactggctgccgggcagaaacagaggctggccattgcgcgggccctagtcagggaccccagagtactcatcctggatgaagctacatcagcactggacgtgcaatgcgagcaggccctccaggactggaacagccgcggagacagaactgtcttggtgattgctcaccgattgcagaccgtccagcgggcccaccaaatactggtgctccaagaaggcaaattacagaaactggcccagctctag

SEQ ID NO: 138676 - DNA, 1962 bp, synthetic construct
  misc_feature 1..1962: note = Description of Artificial Sequence: Synthetic coding sequence
  source 1..1962: mol_type = other DNA
atgcgcttgcctgacctgcgaccttggacatccttacttctggtggatgctgcactactctggctcctgcagggcccattgggcaccctattgccacaggggctcccgggcctctggttagagggaacccttaggctaggagggctctggggactgctgaaactccgaggactgctggggtttgttggcactttgttgttgccactgtgcctggcaacaccattaaccgtgtccctcagagcattagttgcaggcgcttctagggccccccctgcacgggtagccagtgccccatggagctggttgctggtagggtacggcgccgcaggactttcctggtccctctgggctgttctcagtcctccaggggcccaggaaaaagagcaggaccaggtaaacaacaaggtactgatgtggcggcttctcaagctgtctcggcccgatttgcctctcctcgtcgcggcctttttctttctggtattggctgtcctcggcgagacacttataccacactactccggccgggtcatcgacatcctcgggggggatttcgacccccacgcctttgcctctgccatcttttttatgtgtttgttcagcttcggaagctccctttctgcggggtgtaggggaggctgttttacctacaccatgtccagaatcaatctgaggatccgggagcagctgttcagtagtctcctgcgacaggacctgggcttcttccaggagaccaaaaccggagagttgaatagcagactgagctcagatacaacgttgatgtctaattggttgccccttaacgccaacgtgctgctgcgctctctagtgaaggtggtaggcctgtatggattcatgctgtctattagccctcgactcactttgctctctttgcttcacatgccctttaccatcgctgccgagaaagtgtacaatactcggcaccaggaggttctccgtgaaatccaggatgctgtcgccagagccggccaggtagtgcgggaagccgttggcggcctacagactgtgagatcttttggagccgaagaacatgaggtctgccgatacaaggaggcactcgagcaatgcaggcagctatattggcgcagagatctagagcgggctctgtatctccttgtaagaagagtactccatctgggggtgcagatgttgatgttgtcctgtggtctgcaacaaatgcaggacggtgaactgacgcaagggtcactgctgtccttcatgatctatcaggagtccgtgggcagttacgtgcagacgctggtgtatatttacggagatatgctgtctaacgtaggtgctgccgaaaaggtgtttagctatatggacagacaacccaatctcccaagcccgggtacccttgccccgaccaccctccagggagtggtcaagtttcaggatgtgagctttgcctatcccaaccgccccgatcgccctgtgctaaaagggcttacctttaccctgaggccaggcgaggtaaccgcgcttgtcggacccaacgggagtggcaaatccaccgtagccgctctgctccagaatctctaccagcccaccggcggccaagtattgctggacgaaaaacctatttcccagtatgagcactgttacctgcacagccaggtcgtttctgtcggccaagaacctgtgctgtttagcgggtccgtgaggaataatattgcttacggtctgcaatcctgcgaagacgacaaggtgatggcggcagctcaagccgctcatgccgacgattttatacaagagatggaacacggcatttataccgatgtaggagaaaagggaagtcagcttgcagctggacagaagcagaggttggcgatcgcccgtgccttagtgcgggaccctcgcgtactgatactcgacgaggcaacctctgcccttgacgtccagtgcgagcaggccaagactctgtggaaattcatgatattttag

SEQ ID NO: 138677 - DNA, 2061 bp, synthetic construct
  misc_feature 1..2061: note = Description of Artificial Sequence: Synthetic coding sequence
  source 1..2061: mol_type = other DNA
atgcgtctgccagatctcaggccatggacctccctgctcctggtggatgctgcccttctgtggttacttcagggtcctcttggcacactgctgccgcagggtctccccgggctctggctggaaggcactctgagactgggcggactctggggcctcttgaagcttcggggcctgctcgggtttgtgggcacactgctgcttcctttgtgcctggcgacacctctgacagtgtccctccgcgctctcgtggcgggcgcctctagggcgcctcccgccagagttgcatccgcaccctggagttggctgctggtggggtatggcgcagcaggattaagctggtctttgtgggctgtcctcagtcctccaggggcccaggagaaggagcaggatcaagttaacaataaagttttaatgtggcggctgcttaaactgtcacggccagatctgccactcttggtggcagctttttttttccttgttcttgcggtgctaggcgagactctgatcccacattattctgggcgagtgatcgatatacttggcggagacttcgacccccatgctttcgccagcgcaatattcttcatgtgtttgttttcatttggttcttctctatccgcagggtgccgaggagggtgcttcacttacacgatgtcaagaatcaaccttaggatccgagaacagctgttctctagcttgctccgacaggatctgggcttcttccaggagacaaaaaccggagaactaaattcaaggctgtcaagcgacacaactctgatgtcaaattggctccctctcaatgccaacgtgctgctgagatcccttgtaaaggtcgtaggcctctacggcttcatgctgtcaatctccccacgactgaccttgctgtccctactacacatgcccttcacaattgccgccgagaaggtctataatacacgacaccaagaggtactgcgagagatccaggacgctgtcgcccgtgcgggccaggtagtacgagaggccgttggaggactgcagaccgttcgaagtttcggcgcagaggaacacgaggtctgtagatataaggaagctcttgaacagtgcagacagctctattggcggagagatctggaacgcgccttgtacctgctggtgcggcgcgtacttcatctgggcgtgcagatgcttatgctatcatgtggactccagcaaatgcaggacggagaacttacacagggtagtcttctgtcctttatgatttaccaggagagcgttggaagctatgtgcagaccttggtgtacatttacggagacatgctgtctaacgttggagccgctgaaaaagtcttctcttacatggaccgccagcccaacttaccctcacccgggactctggctcccacaaccctccaaggggtagttaagtttcaggacgtcagcttcgcctatccaaatcggccggatcgccccgtgctgaagggtcttaccttcacattacggcctggggaagtcacagcactggtggggccgaatggttccggaaagagtactgttgccgccctgctccagaatctttaccaacctaccgggggacaggttctactggatgagaagccaatttcccagtacgagcattgctatttgcacagccaggtggtctccgtgggacaagagccagtactgttctcgggtagtgtacgaaacaacatcgcctacggcctgcagtcctgcgaagacgacaaggtcatggcagcagcccaggctgcccatgccgatgacttcattcaggaaatggaacatggtatatacactgatgtaggggagaaaggttcccagttggcagccggccaaaagcaaaggttagccatagcacgggcactcgtgcgagaccctcgcgtgttaatccttgatgaagccaccagtgctcttgacgtgcagtgcgaacaagcacttcaagactggaactcccggggagatagaaccgtgttagttatagctcacaggcttcagaccgtccagcgcgcgcaccagattctggtgctgcaggagggtaagctgcagaagcttgcccagctttag

SEQ ID NO: 138678 - DNA, 1962 bp, synthetic construct
  misc_feature 1..1962: note = Description of Artificial Sequence: Synthetic coding sequence
  source 1..1962: mol_type = other DNA
atgaggctcccagacttacgaccgtggaccagtctcctgctcgtggacgccgccctattgtggctcctgcagggcccactcggaacattgctgccacaggggctccccggcctttggctcgaaggaaccttgcggctgggaggcctgtggggactgcttaaactgcgagggctgctggggtttgtgggaacgctgctgctccctttgtgtttggccacgccactcacagtgagcctgcgcgcgttagtcgctggcgcttcccgtgccccgcctgcccgtgtagcatctgcaccttggtcctggctcctggttggttacggtgccgctggtctcagctggagcctgtgggcggtgctgagcccgcccggagctcaggagaaagagcaggatcaagttaacaataaagtgctcatgtggaggctgctgaagctgtctaggccagatctccccctgctcgtggcagcctttttctttcttgtactggctgtgttaggcgagactctgattccccactactctgggcgggtgatcgacatcctcgggggtgatttcgacccgcatgcattcgcttctgccatcttcttcatgtgtctgttctcattcggcagttcgttgtccgcaggttgtcgcggaggctgtttcacatataccatgtcacgcatcaacctgagaatccgggaacagctgtttagcagcctgttgcggcaggatctcggcttctttcaggaaaccaaaactggtgagcttaattctagactgagtagtgataccactcttatgtccaattggctccctctaaatgcgaacgtgctgctccggtccttagtgaaagtagtggggctctatggattcatgctttctatttctccacgcctcactctgctttccttgcttcatatgccttttaccattgcggctgagaaagtctataatacccgtcatcaggaggtgctgagagagattcaggacgctgtggctcgcgccggccaggtcgttagggaagccgtagggggtctgcagacagttcggtcctttggagccgaggaacatgaagtctgccgatacaaagaagccttggagcagtgccgccagttgtattggcggagagacctggaaagagccttatacttactggtccgccgggtcctccacctgggggtgcagatgcttatgttgagctgtggcctgcagcaaatgcaggacggagagcttacgcagggtagtcttctttcttttatgatctaccaggagtccgttggttcatacgtgcaaacgttggtgtacatttacggagacatgctatctaacgtgggggcggccgaaaaagtcttctcttacatggatagacagcccaacctccccagcccaggcaccctggctcccaccacattgcagggtgtcgttaaattccaggatgtgagtttcgcctacccaaatcgccccgacaggcccgtgctgaaggggctcaccttcacccttaggccgggggaagtcaccgctcttgtgggccctaacggctcgggcaaatcgactgtcgccgccctcttacaaaacttataccagcctaccggtgggcaagtgctcctggatgaaaagccaatctcccagtatgaacactgctatttgcatagccaggtggtctccgtcgggcaggagccggtcttgtttagtgggtctgtccgtaataacattgcatacggcctccagagttgtgaagatgataaggtgatggctgcagctcaggcagcccacgcggacgacttcatccaagagatggagcacggcatttacactgacgtgggcgaaaagggttcccagttagcggctgggcagaagcagaggctggccattgctagggcccttgtgcgagatcccagagtcttgatattggacgaagctacatcagccctggacgtacaatgcgagcaggccaagacactctggaagttcatgattttctag

SEQ ID NO: 138679 - DNA, 2061 bp, synthetic construct
  misc_feature 1..2061: note = Description of Artificial Sequence: Synthetic coding sequence
  source 1..2061: mol_type = other DNA
atgaggctgccagatttgagaccgtggacctcgctcctgttagtggacgccgccctgctgtggcttctccaggggccactgggcacgttgctgccgcaggggctgcccgggctgtggttagagggcactctgaggcttggggggctgtggggactcttaaagctgcggggcctgctgggttttgttggcactttactcctgcccctctgcttggccactccgctcaccgtctctctcagggcgctcgtagccggtgcttcacgggccccacccgccagagtcgcctccgccccttggagctggctgctggtcgggtacggtgcggctggccttagttggtccctttgggccgtcttgagcccccccggtgcccaggaaaaggagcaagaccaagttaataataaagtattgatgtggaggctcctcaagctgtccaggcctgatctccctctcctggtcgccgcctttttttttctggtgctcgctgtgcttggggagactctcattccccattacagcggtagggtcattgacatcctaggtggagattttgacccccacgcctttgccagcgccatcttctttatgtgcctctttagtttcggctcctctctgtcagctggctgcagggggggctgcttcacctacactatgtcacgtattaatcttagaattagagagcagctgtttagctccctcctgcggcaggacctggggttttttcaggagaccaagactggggaattgaacagcagactcagctccgacacaaccctgatgtccaactggctgcccttgaacgccaacgtccttctccggtccctggtgaaagtggtgggcttgtatggtttcatgctttccatctccccccgactgacccttctgtcattgcttcacatgccatttacaattgccgcagagaaggtctataacactcgccatcaagaagtcctccgcgagatccaggatgccgttgcacgggctggccaagtcgttagagaggctgtggggggtttgcaaacggtgcgatcttttggcgccgaggagcacgaagtgtgtcgatacaaggaggcccttgagcagtgtcggcagctttactggcgtcgagacctggagcgggccctctatctgttagtgcgccgggttcttcacctcggcgtacagatgctgatgctgagctgtgggctccagcagatgcaggatggcgaactcacacagggatccctcctgtcattcatgatctaccaagagagcgtgggatcctacgtccagaccctggtgtatatctatggcgacatgctgtcgaacgtgggtgcagctgaaaaggtgttctcatatatggacagacagccaaacctgccaagtcctggtaccctcgcacccacaaccttacagggcgtcgtcaaatttcaggacgtatcttttgcctacccaaacaggcctgataggcctgtgctgaaaggtctcacattcaccttgcgccccggcgaggtaacagcacttgttgggcccaacggcagcggtaaaagtaccgtggccgcgttgctacagaacctctaccagccaacaggaggtcaagtactgctggacgagaaacccattagccagtatgaacattgttacctccactcccaggtggtaagcgtcgggcaggaacccgtgctgttcagcggctctgttagaaataatattgcttacggacttcagagttgcgaggatgataaagtgatggctgcggcacaagcagcccacgcagatgatttcatccaggaaatggaacatgggatttacacagatgtcggggaaaagggctcccaacttgccgcgggtcagaagcaacgcctcgcaatcgccagagccttagtccgggaccctcgggtgttgattctggacgaagccaccagtgcacttgatgtgcagtgtgaacaggcactgcaggattggaactcacgtggcgacagaaccgtactggtgatcgctcacagattgcagaccgtccagcgcgcgcatcaaattctggtgctccaggaaggaaaattgcagaaacttgcacaactctag

SEQ ID NO: 138680 - DNA, 1962 bp, synthetic construct
  misc_feature 1..1962: note = Description of Artificial Sequence: Synthetic coding sequence
  source 1..1962: mol_type = other DNA
atgcggctcccagacctgcgcccatggacctccctgttgcttgttgacgcagcgctgttgtggctgttgcagggcccactgggtacgttgctccctcaaggactccctgggctctggcttgaggggaccttaagactgggggggttgtggggcctgctcaagctgcgtggactcttaggattcgtcgggacactgttgctccccctctgcttagcgacacccctcacagtgtccctgcgggctctcgtggccggggcttcccgggctcctcccgcccgcgtggccagcgcaccatggagctggctgctggtcggatacggcgcagccggcctctcatggtctctgtgggcagtattgtcaccaccaggtgcacaagagaaagagcaggaccaggtcaacaacaaggtactgatgtggagattgcttaagctttcccgacccgatttaccattgctggttgccgccttctttttccttgtgttggcagttctgggggaaacattgatccctcactactcaggacgagtaatcgacatccttggaggcgattttgatccacacgccttcgcaagtgccatctttttcatgtgtctgttttcattcggcagttcgctgagtgccggctgccggggtgggtgcttcacctacacaatgtctcgtataaacctgcgtatcagggagcaactgttcagcagcctgctgcgccaggatctgggcttttttcaggagacaaagaccggcgagctgaattccagactaagttccgataccactcttatgtccaattggctgcctctgaatgctaatgtcctcctgcggagccttgtaaaggtcgtggggctgtacggttttatgttatctatctcccctcgcctcaccctgttatcactcttgcatatgcccttcaccatagcagcagagaaggtctataacacccggcaccaggaagtcctgagggagattcaggatgcagtggcccgggcaggccaggtggtgcgcgaagccgtgggagggcttcagactgttcgaagttttggagccgaggaacatgaggtgtgtcggtacaaggaggctctggagcagtgccggcagctttattggcgacgggacctagaacgggctttatacctgctggtacgccgtgtgttgcaccttggcgtgcagatgctaatgctttcttgtggccttcagcagatgcaagacggagagctgacccagggctccctgttatcctttatgatttaccaggaaagcgtcggctcctatgtgcaaaccctggtgtatatttatggtgacatgctgagcaacgtgggagctgcggaaaaggtattcagctacatggacagacaaccaaatctgccatcaccaggaaccctcgcccccaccacactgcaaggcgtagtgaaatttcaagatgtttcctttgcctatcccaacaggccagaccgccccgtgctcaagggcttaacgtttaccctcagaccgggcgaagtcacagccctagtgggacccaacggatctggcaagagtacagtagcagccctgctccaaaatttataccagcctaccggtgggcaggtgttactggatgagaaacctatcagtcagtacgaacactgttatctgcattcgcaggtcgtgtctgtgggccaggaacccgtcctttttagcggcagtgtgaggaacaacattgcttacggcttgcagagctgtgaggatgataaggttatggcagctgctcaagcagcgcatgccgatgattttatccaggagatggagcacggcatatacaccgatgtgggggagaaaggctcccagttggctgcaggtcagaaacagaggctggcaattgcacgcgcactggtgagggatcctagggttctgatcctggacgaagccacatctgcccttgacgttcagtgcgagcaggccaagacactgtggaagtttatgattttttag

SEQ ID NO: 138681 - DNA, 1962 bp, synthetic construct
  misc_feature 1..1962: note = Description of Artificial Sequence: Synthetic coding sequence
  source 1..1962: mol_type = other DNA
atgcggttacctgatttgcggccttggacatctcttctgctggtcgatgccgctctgctctggttactccagggacctttaggcacgctgctccctcaggggttgccaggcctgtggctagaagggactcttcggctcgggggcttgtggggcctgctgaagctgaggggcctactggggttcgtgggcaccctgctgcttccactgtgcttagccacacccctgacagtgtccctgagggctctcgttgccggcgctagccgcgcaccacccgctcgggtcgcgtccgccccctggtcttggctgttagtgggatacggagcggcagggctgagttggtccctctgggctgtcctgagtcctccaggcgcccaggaaaaggagcaagaccaggtcaataacaaggtcttaatgtggcggctattaaagctctctaggcccgacttacctctcttggtggctgcatttttctttctcgtgctggccgtgctgggcgagacactgattccccactattccgggcgggtgatcgatattctcggcggtgatttcgatccccatgcgttcgcctctgctattttttttatgtgtctcttctcctttggatccagcctttcagcaggctgcagagggggctgttttacatacaccatgtcccggataaatctgagaatcagagaacagctcttctcttccctgcttcgccaagatctcggtttctttcaagagaccaaaaccggggaactcaactccagattgagcagtgatacaacactaatgtccaactggctccccctcaatgcaaatgtgttattgcggagcctcgtgaaagtcgtgggcctgtacggctttatgttaagcatatcgccacggttgacattactgagcttgctccatatgcccttcacgatagccgctgagaaggtgtacaatacacgccaccaggaggtgctcagggagatccaggatgctgtggcgcgtgcaggccaggtcgtcagagaagcagtgggcggactccagacagtacgaagctttggggctgaagaacacgaggtatgcaggtacaaggaagctctagagcagtgcagacagctgtactggcgtcgggacttagagagagctctctacctgctggtgagacgcgtgctccatctgggggtgcagatgctgatgctctcttgcggattgcagcagatgcaggatggtgagctgacgcagggtagcctgttgagcttcatgatctatcaagaatccgttggaagttatgtccaaacattagtatatatttacggagacatgttgagcaatgtaggcgccgcggagaaagtcttctcgtacatggaccgccaacccaatctcccatcacccgggacgctcgcaccaaccaccctacagggtgttgtcaaattccaagacgtgagtttcgcatatcccaatagaccggaccgcccggtactgaaggggctgacgttcaccctcaggccaggcgaggtgaccgcgctggtaggtcccaatggaagcggtaaatccaccgtggctgcacttctccagaacctgtaccagcctaccggtggtcaggtgctcttggacgagaagccaatcagccagtatgagcattgttacctgcattcacaagtggtctctgtaggacaggaacccgtgctgttcagcggctctgtgcggaataatattgcctacggcctgcagtcgtgtgaggacgacaaagtaatggctgccgcacaggctgcacacgctgacgacttcatccaggagatggagcatggaatatataccgacgtcggggaaaagggatcccaactggccgcgggtcagaagcagcgactggcaattgcccgagctttggtccgcgatccgagagtactaatcttggatgaggcaacaagcgcgctcgacgtccaatgtgagcaggccaaaaccctgtggaagttcatgatcttctag

SEQ ID NO: 138682 - DNA, 2061 bp, synthetic construct
  misc_feature 1..2061: note = Description of Artificial Sequence: Synthetic coding sequence
  source 1..2061: mol_type = other DNA
atgaggctccctgacctgcgcccatggacatcactgctgctggtggacgccgcactcctctggctcctccaaggtcccttgggcacccttctgccccaggggttgcctgggctgtggctcgaaggaacccttagactggggggactctggggcttacttaaattgcggggactcctcgggttcgttgggacactgctgctccccttgtgcctagccacacctttgactgtttctctcagagcgcttgtcgccggtgctagtcgagcgcccccagcgcgcgttgcaagtgctccttggagttggttgcttgtgggctacggagccgctggcctgagttggagcttgtgggccgtgctgagcccccccggcgcccaggaaaaggagcaggatcaagtcaacaacaaagtgttaatgtggagactgctgaaattgagtaggccagatctgccactccttgtagctgctttcttttttctcgttctggcggtgctgggcgaaacacttatcccacactattccggaagggtgattgacattttaggtggtgacttcgacccccatgcttttgcttctgcaatcttcttcatgtgcctgttttccttcggttctagcctgagcgctggctgtagagggggatgcttcacttataccatgagcagaattaacttgcggatccgcgaacagttgttcagctcactgctgaggcaggatctggggttctttcaggaaacgaaaaccggggaattgaactctcgtctcagctccgacaccaccctcatgagtaactggctgcccttgaacgctaacgtgctgctcagatcacttgtgaaagtggtcggtctgtatggcttcatgctgtctatcagtccacggctcaccctcctttcgctcctgcacatgccattcactatcgctgccgaaaaggtgtacaacactcgccatcaagaggtgttgagagaaattcaggacgcagtggcacgagcggggcaagtggttcgggaggctgtaggcggtctgcaaaccgtccggtcttttggggcagaagagcatgaggtctgtaggtacaaggaggctcttgaacagtgcaggcagctttactggaggagggacctggagagagccctttacctgttgatccgtcgggtcttacaccttggcgtgcagatgctgatgctcagctgcggactccaacagatgcaggatggagagctcactcagggatccctcttgagcttcatgatttatcaggagtccgtcgggagttacgtgcaaaccctagtgtatatatatggggatatgttaagcaacgtgggggcggccgaaaaggttttctcatatatggacaggcagcccaacctgccaagtccaggtaccctggcccccaccacactccagggcgtggttaagtttcaagatgttagctttgcataccccaaccggccggatcgcccagtcctgaagggcctgacctttacactgaggcccggggaagttacggcgctggtgggacccaacggcagcggcaagtccacagtggcagccctgctacagaatctatatcagcccacaggcggccaggtgttactcgacgagaagccaatcagccagtatgaacactgttacctccattcccaagtagtgtcagttgggcaagagcctgtactatttagcggctccgtaaggaacaatattacctatggtctgcagtcatgcgaggacgacaaagtgatggctgccgcccaggcagcccacgctgacgacttcatccaggagatggagcacggcatttacactgacgttggggaaaagggctctcaactggctgctggacaaaagcagagactggccattgcaagagcactcgttcgcgacccgcgtgtgctcattctagatgaggcgacttccgctctggacgtccagtgcgagcaagcccttcaggattggaactcccggggagaccggactgtgctcgtgattgcccaccgactacagacagtgcagagagctcaccaaatcttggttctccaagaggggaaactgcagaaacttgcccagctttag

SEQ ID NO: 138683 - DNA, 1962 bp, synthetic construct
  misc_feature 1..1962: note = Description of Artificial Sequence: Synthetic coding sequence
  source 1..1962: mol_type = other DNA
atgcgactgcccgatctgcggccatggactagccttctgctggttgacgcagccctgttgtggttgcttcagggtcctcttgggaccctgctgccccagggcctcccaggcctgtggctggagggtacacttcggttgggtggactttggggcttacttaagctgcgcggattgcttggcttcgttggcaccctgctcctccccctttgtcttgctaccccgctgacagtgagcttgcgggctctggtggctggtgccagccgggccccgcccgccagagtggcctcagcaccctggagctggctacttgtaggctacggcgcagctggtctttcgtggtccttgtgggcagtcctcagcccacccggtgcacaagagaaggaacaggaccaagtgaacaataaagtgctcatgtggcgtctgttgaagttaagtagaccggacttacccctgctggttgctgcattctttttcctggtcctcgccgtgcttggagagaccctcattccccattactcgggacgggtcatagatatcctaggcggtgacttcgacccccacgcatttgcctccgcaattttttttatgtgtctcttttcattcggatcgagcttgtcagccggctgtaggggggggtgctttacgtatacgatgagtcgtataaacctacgcattcgagagcaactgtttagctctttgttacgtcaagacctcgggtttttccaggagacgaagaccggtgaactcaattccaggctgtctagcgataccacgcttatgagtaactggctgccgctgaacgcaaatgtgttgcttagaagcctggtgaaggtggttggcctttacggttttatgctgtctatcagccctcggttgactctgttgagtctgctccatatgcctttcacaatagctgccgagaaggtgtataacacacggcaccaggaagttctaagagagattcaggacgccgtcgcccgtgcgggacaggtcgttcgagaggctgtgggaggtctgcaaacggtgcgcagctttggcgctgaagaacacgaagtatgcaggtataaggaagcgctggagcagtgcaggcagctctattggcgccgggatttggagcgggcactgtatttgctggtgcgccgcgtcctccatctgggagttcagatgttgatgctaagttgtggcctgcagcagatgcaggacggcgagctcacccagggatcacttcttagcttcatgatctaccaggaaagcgtcggttcctatgtgcaaacattggtgtacatctacggtgacatgctatcgaatgttggcgcagccgagaaagtgttttcctatatggacaggcagccaaatctcccttcccccggaaccctcgctcccaccacactccagggcgtcgtaaagtttcaggatgtgtctttcgcctaccccaatcggccagaccgacctgttcttaagggtttgaccttcacactacgcccgggtgaagtcaccgctctggtaggacctaacggctctggtaaatctacagtggctgctcttctccagaacttatatcagccaactggggggcaggtccttcttgatgagaaacccatttcccaatatgagcattgctatctccattcccaggtggtgagtgttggccaggagccggttctattcagcggctctgtgcgcaataacatcgcctatgggttacaatcatgcgaggatgataaggtaatggcagccgctcaggcagcccacgctgacgattttatccaggaaatggaacacggtatttataccgatgtcggcgagaaggggagccagctggccgccggccagaaacagcgcctagccattgcccgggctttggtaagggaccctcgtgtgctgatactcgacgaagctacatcagcgctggacgttcagtgtgagcaggccaaaacactgtggaagttcatgattttctag

SEQ ID NO: 138684 - DNA, 1962 bp, synthetic construct
  misc_feature 1..1962: note = Description of Artificial Sequence: Synthetic coding sequence
  source 1..1962: mol_type = other DNA
atgaggcttcccgacctccggccatggactagtttactgctggtggacgcggctcttctgtggctgttgcaaggtcctctgggcaccctgttaccccagggcttgcctggactttggctggagggtaccctgaggcttggtggcctttggggcctgctcaagctgagagggctcctagggtttgtggggacactccttctccctctctgcctggctacccccctgactgtttccctccgcgccctggtggcaggcgcttctagagccccccctgcccgagttgcatctgccccttggagctggctccttgtaggatacggagccgcaggcttgtcttggagcctctgggcagttttaagccccccgggcgcgcaggagaaagagcaggatcaggtaaacaacaaagtgttaatgtggcgactactcaagttgagtagacccgatctgccactgctggtagcagctttcttctttctggtcctggctgttttgggtgagacacttatcccgcactattcagggagagtgattgacatcctcggcggagattttgacccccacgcatttgcatcagcaatttttttcatgtgcctgttctcctttggatctagcctttccgcaggctgccggggcgggtgctttacttacacaatgagccggattaacctgaggattcgcgaacaacttttctcaagcttgcttagacaggatttgggcttcttccaggaaaccaaaacgggggagcttaacagtcggctcagctctgatacaactctcatgtcaaactggctccccttgaatgctaacgtcctgcttagaagtcttgtgaaggtggtgggactttacggcttcatgctatctatatccccaaggctcaccctccttagcctgctccacatgcctttcactattgccgctgaaaaagtgtacaacacccgtcaccaggaggttttacgagagatacaggatgctgtggcaagggccggacaggtggtcagggaagccgtcggtggcctgcagaccgttagaagcttcggggcagaggaacacgaagtttgtcgctacaaagaagctctagaacagtgtcgccagctgtattggcgcagagacctggagcgcgccctgtacctattggtgcggcgcgttctgcatcttggcgtgcagatgctgatgttatcatgcgggctacagcagatgcaggacggagagctcacccaagggagcctcctcagctttatgatttatcaagaatccgtgggctcttatgtgcaaacacttgtgtacatttatggtgacatgctgtctaatgttggtgcagccgaaaaggtattctcatacatggaccgacagcccaaccttccctctcccggcaccttagcgccaaccaccctccagggagttgttaagtttcaggatgtttcctttgcttatcccaatcggcctgaccggccggtgttaaagggactgacattcaccctgcggcccggagaagttacagcgctcgtgggaccaaacgggtcgggcaagagcaccgtcgccgccctcctccaaaacctttaccaacccaccgggggtcaggtgcttcttgacgagaagcccatttctcagtatgaacattgttacctgcattctcaggttgtgagcgtcggccaggaaccggtgctgttctccggttcagtgaggaacaacatcgcatacggtttgcaatcttgtgaggacgacaaggtcatggccgcagcccaagcagcacatgcagacgacttcattcaggagatggagcacggaatttacaccgatgtgggcgagaagggctcacagctcgcggccgggcaaaagcaacgccttgccattgctagagcattggtcagggaccctcgagtgttgattctcgacgaggcaacatctgctctggacgttcagtgtgagcaggctaaaacattatggaaattcatgattttctag

SEQ ID NO: 138685 - DNA, 2061 bp, synthetic construct
  misc_feature 1..2061: note = Description of Artificial Sequence: Synthetic coding sequence
  source 1..2061: mol_type = other DNA
atgaggttgccggatctgagaccgtggacttcccttctgcttgtagacgccgctctgctctggctgttacaagggcccctcggcaccttgctgccacaggggctccccggtctctggctggaggggactctgcgcctcggaggattgtggggactgctgaaactgcggggacttctgggctttgttggcaccctactcctgccactgtgtttggccacacccctgaccgtatccctcagagctctggtggctggcgcttcccgggcacccccggccagagtagcttcagctccatggagttggctgctcgtgggctacggtgcggcaggactttcgtggagtctgtgggctgtgctttccccccctggggcccaagagaaggaacaggaccaggtcaacaacaaggtgctcatgtggaggctgcttaagctgtccagacctgatctaccattgctggtggccgcattctttttccttgtgctcgccgtcctaggagagaccctaataccccactattccggaagggttattgacattctgggaggcgactttgatccacacgcttttgcatccgcaatattttttatgtgtctgttttcattcggcagcagcttgtctgccggctgtaggggcggatgttttacatacacgatgagtcgcatcaacttaagaattcgggagcagctattttcctccctgcttaggcaggacttggggttctttcaggaaactaagacaggggaactgaatagcaggctgtcgagcgataccactctcatgagtaactggttgcccttgaacgccaacgttctgctgaggagcttggtgaaagtggtgggactgtatggttttatgttgtccattagccctcggctgaccttgttatccttacttcatatgccctttactatcgccgcagagaaggtctataacactcgtcatcaagaagtgctccgtgagattcaggatgctgtggccagagccgggcaagtggtacgggaagccgtcggcggcctacagacggtaaggagcttcggtgccgaggaacatgaagtgtgccggtacaaggaggcgttggagcagtgtaggcagctctactggcgccgcgacctagagcgagccctgtacttgcttgtgcggcgggtgctgcacctcggagtgcaaatgcttatgttatcctgtggcttgcagcagatgcaggacggcgagttaacccagggctctctgctgagcttcatgatctatcaagagtcagtcggttcatacgtacaaacactagtgtacatttacggcgatatgctgagcaacgtaggcgctgcagagaaggttttcagttatatggatagacagcctaatcttcccagccccggcacccttgcacccacaacattgcagggggtggtaaagttccaggacgtcagctttgcatatccaaataggccagacagacctgtgctcaaagggctgaccttcaccctcaggcctggagaagtgacagccctggtgggccctaacgggtctggcaagtctactgtagccgctctgctgcaaaatttgtaccagccaacgggtggtcaggtgctgctggatgagaagccaatctctcagtatgaacactgttatctgcactcccaggtggtgagtgtcggtcaggagcccgtccttttttctgggtcagtgcgcaataacatagcttatggcctgcagagttgcgaagatgacaaagtgatggcggcggcacaggccgctcacgcagatgacttcatccaggaaatggagcacggcatatataccgatgtgggagagaaaggttcacagctggccgcgggtcaaaaacagcggcttgccattgctcgtgcacttgtgcgagacccccgtgtacttatcctggacgaggcaacatccgccctcgacgtccagtgtgagcaggccttacaggactggaacagccgtggcgatagaaccgtactggtgatcgcacacagacttcagactgtgcagcgagctcatcagatcctggtcctccaggagggtaagcttcaaaaattagcacaattatag

SEQ ID NO: 138686 - DNA, 1962 bp, synthetic construct
  misc_feature 1..1962: note = Description of Artificial Sequence: Synthetic coding sequence
  source 1..1962: mol_type = other DNA
atgaggctgcccgatctgaggccctggacatcactgctcttggtggacgccgcacttctgtggctccttcagggccccttagggaccttgcttcctcaaggcttgccagggctgtggctggagggcactctgagactgggggggttatggggcctcttaaaactgcgcgggctgcttggattcgtgggtaccctgctgttgcctttgtgtctggctaccccactgacagtgtcgctgagggcccttgtggctggcgcttctagggcgccaccagcacgcgtagcatccgccccctggtcctggctgctggtggggtacggggccgcaggtctctcttggagtttgtgggccgtcctaagcccgcccggtgctcaggagaaagaacaagaccaagtgaataataaagttttgatgtggcgcctgctgaaactcagtcggcccgatctccccctgctggtcgccgcctttttttttcttgtgctggccgttctcggcgagactttgatcccgcactattcaggcagagtgatagacattttgggcggcgattttgatccccatgcattcgcatccgccattttcttcatgtgcttgtttagctttggcagctcactgtccgccggttgtcgcggggggtgcttcacatatacgatgagccgcataaatctccgaatccgggagcagctgttctcaagtctgctgagacaagatctgggcttcttccaggaaaccaaaacgggagaactgaattccaggctctcgtccgataccacactgatgtctaattggttaccactgaacgcaaatgtgctgctaagaagcttagtgaaggtggtggggctgtacgggttcatgcttagtataagcccgcgtttgactttgctgagcctgcttcatatgccgttcacaatcgctgccgagaaggtctacaacacgcgccaccaggaagttctgcgggaaatccaggacgcggtcgcgcgagctggacaggttgttagagaggctgttgggggcctgcagaccgtgcgcagttttggagccgaagagcacgaggtttgtcggtacaaagaggccctggaacagtgcagacagctgtactggcgcagagacctcgaacgtgctctatacctattgatcaggcgcgtgctgcacctcggggtccagatgctgatgctgagctgtggactccagcagatgcaagacggggaacttacccagggaagccttttgagttttatgatttaccaggaaagtgtggggtcctacgtccagaccctggtctacatctacggcgacatgctaagtaacgtgggtgccgctgagaaggtcttcagttacatggatcgacaaccaaacttaccctctcctgggacattagcaccaactactctccagggagtggtgaaatttcaggatgttagctttgcctatcccaatagaccggatagacccgtgttgaagggcctcacatttacactgcggccaggggaagtgaccgcactggtggggccgaacggatctggcaaatctacagtggcagctctcttacaaaacttgtatcagcccacaggcggccaggtgctgctcgacgaaaaacccatctcacaatatgagcattgttatcttcacagccaggtagtgtccgtcggtcaggagcccgtcctgttctcagggtctgtgcggaataatattacatatggtcttcagtcatgcgaagacgataaagtgatggccgccgcgcaggctgctcatgccgacgacttcatacaggagatggagcatgggatttacacagacgttggcgaaaagggttctcagctggctgctggtcagaagcagaggttagccatagcaagagccttagtgagagatccgcgggtgctcatactggacgaagcaactagtgctttagatgtccagtgtgagcaagccaagacactctggaaattcatgatcttctag

SEQ ID NO: 138687 - DNA, 1962 bp, synthetic construct
  misc_feature 1..1962: note = Description of Artificial Sequence: Synthetic coding sequence
  source 1..1962: mol_type = other DNA
atgagattgcccgatttacgtccctggaccagcctgctgctggtggatgctgccctgctttggctgttgcaggggcccttaggaactcttctacctcagggcctgcctggattatggttggagggcacacttaggctgggaggcctttggggccttctgaagctccggggactcctggggttcgtcggaaccctgttactgcctctatgtctggcgacaccacttacagtctctctgagagccctggttgcaggggcaagccgcgccccgcccgctagagtcgcatccgcgccctggtcctggctcctcgttggatacggggccgccgggctgtcttggtcactttgggccgtattatctccacctggggcccaagaaaaagagcaggaccaggtgaacaataaagtcctgatgtggagactgctaaagctcagccgacccgatctgccactgctggtcgctgcatttttttttttggtgctggccgtcttaggagagaccctgatcccacactatagcggtcgggtcattgatattctgggaggcgactttgacccccacgcttttgcatcagccatcttctttatgtgtttgttttcttttggcagttctctttccgccggctgcagagggggctgtttcacgtatactatgagtcgcatcaatctgcgaatccgagaacaacttttcagcagtctgctaagacaagatcttgggttctttcaggaaaccaagactggggagctgaactctcgcctctcgtctgatactaccctcatgagtaactggctgcccctgaacgcaaacgtgttgctgaggtcattggtaaaagtggtcgggctttacggttttatgctctcgatttccccgcgcctgacgctcttgtcactgcttcatatgccattcacaattgcagctgaaaaggtctacaatacgaggcaccaggaggtgctgagagagatccaggacgccgtggcgagggctggccaggttgtgcgggaggctgtcggtggcctgcagactgtccgaagttttggcgccgaggaacacgaggtttgcaggtataaggaagctctcgagcagtgtaggcagctctactggcgacgcgacctagaacgcgcactgtatctcctggtgaggagggtgctgcacctaggtgttcagatgctgatgctgtcctgcggactccagcagatgcaggacggagaactcacccagggctctctgctgagctttatgatctatcaggagtccgtgggaagttacgtgcagacgctggtgtacatctacggggatatgctctctaatgtcggcgctgcagagaaagtgttctcctatatggaccgccaacctaatctgccctcacccggcaccctggctcctactactctgcaaggcgtcgtgaagttccaggacgttagcttcgcttatcctaataggcccgaccgcccggtactgaagggattaacattcaccctgagacccggcgaggtgacagctctggtgggaccgaatggctccggtaaatccaccgttgcagctttactgcagaacttatatcagccaactggtggccaggtgctgctcgatgaaaagcctattagtcaatacgaacattgttacttacactcccaagtggttagtgtggggcaggagcctgtgttattcagtggctccgtcagaaacaatatagcttacggtctgcaaagttgcgaggacgacaaagttatggccgccgcgcaggcagcccatgccgacgactttatccaggaaatggagcacggtatctatacagacgtgggggagaaaggatctcagctggccgccgggcaaaagcaacgtctggctatagccagagccctggttcgtgatccgcgcgttctgatcctagatgaggcgacgtctgcactggacgtgcaatgcgaacaggccaagaccctttggaagttcatgatattttag

SEQ ID NO: 138688 - DNA, 2112 bp, synthetic construct
  misc_feature 1..2112: note = Description of Artificial Sequence: Synthetic coding sequence
  source 1..2112: mol_type = other DNA
atgagacttccggaccttcggccttggaccagtctgcttctagtggatgccgcgcttctgtggcttttgcagggtcccctggggactctgctgccccaaggactcccaggactgtggctcgaaggcacactgaggcttggcgggctctggggccttctgaaactgaggggcctcctcgggtttgtcgggacactactgctgccactgtgtctggccacacccctgacggtttccctgagggccctggttgccggcgcctcaagggctcccccagccagagtggcgtccgccccatggtcttggctgcttgtggggtacggcgctgcaggcctgtcttggagcttatgggctgtgttatcacctccgggggcccaggaaaaagaacaggatcaagttaacaacaaagttctaatgtggagactgctgaagctttcacgacctgatttacccctgttggtggcagcctttttctttctggtgcttgccgtgctgggcgagactctgatcccacactatagcggtcgggtcattgatatcttgggaggtgattttgatccccatgcttttgcctccgccatcttctttatgtgcctcttttcgtttggatcgtctctgagcgccggatgtcgcggaggctgtttcacatacactatgtccaggataaacctgcgcattcgcgagcaattatttagttctctgctgcgccaagatctcggcttcttccaggagacgaaaaccggcgagttgaattctaggctatcgagcgacacaaccctcatgtccaattggttacctctcaacgctaacgtcctgcttcggagtcttgtcaaggtggtggggctttacggcttcatgttgtcaatcagccccagactcaccttgctgtcactccttcacatgccgttcacaatcgcggctgagaaagtatataacacacggcatcaggaagtcctgcgtgagatccaggacgccgtagcaagagctggccaagttgtgcgggaagcagtgggggggttgcagactgtcagaagcttcggcgcggaagaacacgaggtgtgtcggtacaaagaagcgttggagcaatgccggcagttgtattggcgcagggacctcgagcgcgcactctacctgcttgtgaggcgagtgctccacctaggtgtgcagatgcttatgcttagctgcgggttgcaacagatgcaagacggagaactcacgcagggatctctactctcttttatgatctatcaggagtccgtcggctcctacgtgcagactctggtgtatatctatggcgatatgctgtctaacgtgggtgccgcagaaaaggtattctcttacatggaccggcaaccaaatctgcctagcccggggaccttagccccaaccactctgcagggagtggtgaaatttcaggacgtgagttttgcataccccaaccggcctgatcggcctgtgctgaagggactcacctttactctgcgccctggtgaggtgacagcactggtggggccaaatggctcaggtaagtccaccgtagcggcgcttcttcagaatctgtatcagcccactgggggacaagtcctgctcgatgaaaaacccatttcccaatacgagcattgttacttgcacagtcaagttgtatccgtcggtcaggagcccgtgttgttttccgggtcggtgaggaataacatcgcttatggattacagagctgcgaggacgacaaagtcatggccgctgcccaggcggcgcacgcagatgactttattcaggaaatggaacacggtatttataccgatgtcggagaaaaaggttcacaactcgccgccggccagaaacagcgcctcgcaatcgctcgagctctggtccgagaccctcgcgtgctcatcctggatgaggcaacatccgctcttgatgtacagtgtgagcaggccctgcaagattggaatagcaggggcgatcgcacagtattagttatcgcccaccgcctgcaggccgttcagagggcacaccagatcctcgtgttacaggaagggaagctgcagaagctggctcagctccaagagggccaagacctgtattctcgactggtgcagcagaggctgatggactag

SEQ ID NO: 138689 - DNA, 2112 bp, synthetic construct
  misc_feature 1..2112: note = Description of Artificial Sequence: Synthetic coding sequence
  source 1..2112: mol_type = other DNA
atgagactcccagacctccgcccatggacatcacttttgcttgtcgacgcagccctactgtggctgctgcagggccctctcggtacactgttacctcaaggattgccgggattgtggctggagggaactctgaggctgggaggactttgggggctgctaaagctgcgaggtctcctgggattcgtggggactttgttgctcccactgtgtttggcaactccactgaccgtctcacttagggcactggttgcaggcgccagtcgtgcgccccctgctcgcgtggcctctgccccatggtcctggctgcttgtaggctatggcgcagcaggacttagctggagcctttgggcagtgctgtctccacctggagcacaggagaaggaacaggatcaggtgaacaacaaggtcttaatgtggaggttgctgaagctgagcaggcctgatttaccactgctggttgctgcctttttcttcctggtgctggcagtgctgggggagaccctgatcccacactactccgggcgtgtgatcgatattctgggtggggacttcgatcctcacgctttcgcttcagctatcttcttcatgtgcctcttcagcttcgggagctccctttccgctggatgtcggggtgggtgcttcacatataccatgtcacggatcaacctgcgcatacgagagcagcttttttcttccctgcttcgtcaagacctcggatttttccaggaaacaaaaactggcgagctcaatagtcggcttagcagcgacacaaccctcatgtctaactggctcccgctgaacgctaacgtactcctgcgaagtctggtaaaggttgtgggcctttacgggttcatgctctcgatttcaccccgtctgactctgctctcgctgctgcatatgccgttcaccattgcggccgaaaaggtgtacaatactaggcaccaagaagtcctgcgagaaatacaggacgccgtggcacgggcagggcaggtcgtgagagaggcagttgggggcctccagaccgtgcggagttttggggccgaggaacatgaggtgtgccggtataaagaagccctggaacagtgccggcagctgtactggaggcgagatctggagagagctctgtatcttctggtgagacgggtgttacaccttggtgtgcagatgctgatgctgtcctgcggactgcaacagatgcaggacggcgagcttacccagggttccctgctctcatttatgatctaccaagagagcgtgggatcttacgtacagaccctagtgtatatttacggggacatgttatccaacgtgggggctgcagaaaaggtgttcagctatatggaccgtcagcctaacctgccaagccccggaaccctcgctccaactacccttcagggagtggtgaaattccaagacgtgtcttttgcctatcctaatcgccctgacaggcccgtcctgaaaggtctcactttcacgcttaggcctggagaggtcaccgccctggtggggcctaatgggtcaggcaaatcaacggttgcagccctgcttcaaaacctatatcagcctaccggagggcaagtcctccttgacgaaaaacccatatcacaatacgagcattgctacctgcactcacaggtagtctccgtcggccaagagcccgtgcttttcagcggaagtgttcggaacaatattgcctatggactgcagtcgtgtgaggatgataaagtgatggcagccgcacaagccgcccacgccgatgactttatacaggagatggagcacgggatctacaccgatgtaggggagaaagggagccagctggcagccggacagaaacagcgccttgccattgcccgcgccctggtgcgggaccccagggttctcatcctggacgaagcgactagcgcgctggacgtgcaatgtgagcaggccctacaggattggaattctagaggggatagaaccgtgctcgtgatcgcgcatcgcttgcaggccgtgcagcgggctcatcaaatactggtcctccaagaaggcaaactgcaaaagcttgcccagctgcaggaaggccaggacttatacagtcgtctcgtccagcaacgtctgatggactag

SEQ ID NO: 138690 - DNA, 2112 bp, synthetic construct
  misc_feature 1..2112: note = Description of Artificial Sequence: Synthetic coding sequence
  source 1..2112: mol_type = other DNA
atgagattgcccgacctacgtccctggacctctcttctgttggtggatgctgccttactgtggttacttcagggaccactaggcaccttgctgccgcaggggctgccagggctgtggcttgaaggaacgcttcggttgggtggactgtggggattactgaaactgcgaggtctgcttggatttgtggggaccctcctgctcccgttgtgcctcgcgaccccgctaacggtgagccttcgggcccttgttgccggagcctcgcgggcgccccctgcccgggtggcctctgcaccctggagctggctgctcgtgggttacggcgccgctggactctcctggtctctgtgggcagtacttagcccgcctggagctcaggagaaggagcaagaccaggtcaataacaaagtgcttatgtggcgcctcctgaaactgtcccgacctgatctcccactactcgtggcggcgttcttcttcctggtgttggccgtactgggagaaaccttgatacctcactatagcggccgcgtcattgacatccttggaggcgattttgatcctcatgcctttgcctctgcaatattttttatgtgcctcttcagctttggatcgagcctgagtgctggatgcaggggcggatgcttcacatatactatgagtaggatcaatctccgaatcagagagcagctttttagctctttattacgccaagatctgggcttctttcaggagacaaaaacaggggaactgaactcacgattgtcttccgatactaccctaatgtccaactggctccctctcaacgccaatgtgctgctgcgcagtctcgttaaggtggtggggctgtatgggttcatgttgtctatctcgccccggctcaccctcctgtctcttctccacatgccattcactattgctgccgagaaggtgtacaatacccgacatcaggaagttctgcgcgagatacaggacgctgtggctagggctggtcaggtagttcgagaagcggtgggtggcctccagacggtgcgcagctttggggctgaggagcatgaagtgtgtaggtacaaagaagctctggaacaatgcagacagttatactggagacgggacctggagcgtgcattgtacttacttgtcagaagggtgctgcatctgggagtgcaaatgctgatgctgtcctgcggccttcaacagatgcaggatggggaacttacacagggttctctccttagcttcatgatttaccaggagagcgtcggtagctatgtccaaacgctcgtttatatctatggtgacatgctctctaacgtgggtgcggccgagaaagtcttctcctatatggaccggcagcctaaccttccatcgccaggcacgctggcacccacaaccttgcagggagtcgttaagttccaagacgtaagctttgcttacccgaatcggcccgacaggcccgtgttaaagggcttaacttttaccctgagacccggggaggttacagcccttgtgggtcccaacggaagcggaaaaagtacagttgcagccctcctgcagaatttgtaccaaccgactggggggcaagtcttactggatgaaaagccaatttctcagtacgaacactgctatttacactcacaggtcgtctcggtgggacaggaaccagtgttgttctcaggtagtgtcaggaataatatagcttatgggctgcagtcttgtgaagatgacaaagtgatggccgccgctcaggccgcacacgccgatgatttcatccaagagatggaacatggtatctacaccgatgtgggcgagaagggctcacagttggccgccgggcagaaacagcggctcgcaattgcaagggccctcgtcagggatcctcgggtgctaattctcgatgaggcaacaagtgccctggacgtgcaatgtgaacaggcacttcaagactggaactctcgaggcgatcgtacggttctggtcatcgcacaccgcctccaagcagtgcagcgcgcacaccaaatcctggtgttgcaagagggaaagttacagaagttagcccaactgcaggagggtcaggacttgtactccagactggtccaacaacggctcatggactag

SEQ ID NO: 138691 - DNA, 2310 bp, synthetic construct
  misc_feature 1..2310: note = Description of Artificial Sequence: Synthetic coding sequence
  source 1..2310: mol_type = other DNA
atgagactaccggatctgcgcccctggactagcctgttactggtggacgctgccctactgtggctgttgcaaggcccattgggaaccctgcttccccagggtctgcctggcctttggttggagggcaccctgcgcctcggtggtctgtggggacttcttaagctgaggggcctccttggctttgtaggtaccctgctgcttcctctgtgcctggctactccacttacagtgtcattgcgcgcacttgtcgctggtgcctcgcgcgccccacctgcccgagtggcctccgccccatggagctggctgcttgtgggatacggagctgctggtttgtcttggagcctatgggccgtgttgtctccccctggtgctcaggaaaaagaacaggatcaggtgaataacaaggtgctgatgtggcgcctgctgaagctgagccgcccagacctccccctactggtggcagcctttttttttctcgtcctcgccgtactcggggagactttaatccctcactactccgggcgtgtcattgatattctgggtggggactttgatccacacgcctttgcctcagcaatcttcttcatgtgtctctttagctttggatcatctctgagcgcgggctgccgaggcggatgttttacatacactatgagccggattaacctgaggatacgggagcagttattctcctcgctactccggcaggacctgggattctttcaagagactaagactggcgaactaaactcgagactgagctcagacactactctgatgtctaactggctccccttaaatgcaaacgtactgctccggagcctggtgaaggtcgtaggcttgtatggatttatgctgtctatcagtccccgactcacactgctgtcactgttgcatatgccattcacgatagctgcagaaaaagtctataatacgagacaccaggaggtgctgcgagaaatccaggatgctgttgcccgtgcagggcaggtggtgcgtgaggctgtaggtggcctgcagacagtcagaagctttggggccgaagagcatgaggtctgtcggtacaaggaggccctcgaacagtgtcggcagttgtactggcgtagagacctggaacgagccctatatctgttagtgcggcgcgtgttgcacttgggagtacaaatgctaatgctctcatgcggtctgcagcagatgcaggatggcgaattgacccagggttcacttcttagcttcatgatttatcaagaaagcgttggatcatacgtgcagacgctggtttacatctatggagatatgctcagcaatgtgggagcggccgagaaggtcttttcctacatggatcgccagccaaatttgcccagccccggcacactagcccccacaacgctgcaaggtgtggtgaagtttcaggacgtgagcttcgcatatcccaaccggcccgaccgaccagtgctgaaaggcctgacattcacgttgaggcccggcgaagtcactgcactcgtagggcccaatggctcagggaagtctactgtggccgccctgcttcagaatctgtatcagcccactgggggtcaggtactgctcgatgaaaagccaataagccagtacgaacattgttatttacattctcaggtggtctctgttggccaggaaccagtcctgttcagcggcagtgtgaggaacaatattgcgtatggactgcagtcatgcgaagatgacaaggtaatggctgctgcacaagccgctcacgccgacgacttcattcaggaaatggagcatgggatttacacggacgtaggcgagaaggggtctcaactcgccgccggacagaagcaaagactcgctattgccagagctctggttagggaccccagggtgcttatcctggacgaggctactagcgccctggatgttcagtgcgagcaggcgaatggcttctgggttgggccactcggcggcggctcagctagtgagtccgatccaacagggtttttgcatgacagccgacatcggctctcttctgatgttggaatgttcgttgctctcacaaaattgggccagcctgatgcggaacaatggaactcacgcctggatttactcgagagaagcagacaggcagtggatggcgtgtgtcggcacaattaccgtctgggcgcaccattcaccgtgggcagaaaggttcagccagaggtcactgtctaccccgagagaactccactgctccaccagcacaatctactgcactgctctgtcaccggattctaccccggcgatatcaagattaagtggttccttaatggccagtag

SEQ ID NO: 138692 - DNA, 2310 bp, synthetic construct
  misc_feature 1..2310: note = Description of Artificial Sequence: Synthetic coding sequence
  source 1..2310: mol_type = other DNA
atgcgactccccgacctgagaccctggacctctctgttgttagttgacgcggccttactttggttattgcaggggccactgggtaccctgctacctcaggggcttccagggctctggctcgaagggaccctacgcttgggaggtctttggggtctgttgaaactgagaggcctgctgggctttgtcggaaccttgctcctgccgctatgtttagccacacccctaactgtgtccctcagagctctggttgccggcgcgtctagagctcccccagctcgtgtggcgtcagcaccctggagctggctcctcgtcggctatggggccgccggactctcttggtctctgtgggccgtcctgagtcctccaggcgcccaggagaaagagcaggaccaggtaaacaacaaggtcctgatgtggagattgctcaagttgtcaagaccagatctgcctctgctggtagccgcctttttctttctcgtgttagcagtactcggcgaaacactaataccacactattccgggcgggtaattgacatcctcggcggcgactttgacccgcacgcatttgcttccgcaatcttctttatgtgtctgttcagcttcggatcatctctgagcgcgggatgtcgcggtggatgttttacctataccatgtctagaatcaacttaaggatcagggagcagctgtttagtagtctgctgcggcaggacttgggcttttttcaggagacaaagaccggcgaactcaattcccggctgtctagtgatacgacattgatgagcaactggctaccattaaatgcaaacgtcctactgagatcgttggtgaaggtggtcggactttacggctttatgctgagcatctctcccagacttactctgctgagtctgctgcatatgccattcaccatcgccgccgagaaggtgtataatactcggcatcaggaggtcctaagagagattcaggatgccgtggcccgtgcaggacaggtcgtacgggaggcagtgggagggttacagacggtcaggtctttcggggctgaagagcacgaagtgtgtagatataaggaagccctggagcaatgccgccagctttactggagacgggatctcgagagagccctctacctgctcgtccgacgggtgctacaccttggagttcagatgcttatgctcagttgtggactgcagcagatgcaggacggcgaattgacccagggctcactactgagctttatgatttaccaggagagtgtgggtagctacgtccagactttagtttacatctacggagatatgctgtcaaacgtaggagccgccgagaaggtcttctcctacatggaccgccaacctaacctgccttccccaggaaccttagcacccaccacactgcaaggggtggtaaagttccaagatgtgagctttgcctacccaaacaggcctgataggcccgtattgaagggtctaacctttactcttagaccaggcgaggttaccgctctggtgggaccaaacgggtcaggtaagagtaccgtggcggccctccttcagaatctgtaccagccaactggaggccaggttctcctcgatgagaagccaatttcacagtacgaacactgctatctccactcccaggtggtgagtgtgggccaggagccggtgctgttcagcggcagtgttaggaataatattgcttacgggctgcagtcatgcgaagatgataaggtaatggctgcagcccaggcagcgcatgccgatgacttcatccaggaaatggaacacggtatctataccgatgttggcgagaagggaagccagttagctgccgggcagaagcagcgcctcgccattgcgcgtgctcttgtccgggatccccgcgtgctgattctagatgaagcgacctctgccttggacgtacagtgcgagcaggctaatggtttctgggttgggcccttaggtggcggcagcgcctcggagtcagaccccaccggatttttacatgatagtcgccaccgactgtcttcggatgtggggatgttcgtcgccttgaccaaattgggccagcccgacgccgaacagtggaatagccgccttgacctgctggaacgctcccgtcaagccgtggatggggtatgccgccataattatcgcttaggggcacccttcaccgtaggccgcaaggtgcagcctgaggttacagtttatccagaacgcacccctctgctacaccagcacaatcttctgcattgttctgtgacgggtttttaccctggagatatcaagattaaatggttccttaatggacagtag

SEQ ID NO: 138693 - DNA, 2310 bp, synthetic construct
  misc_feature 1..2310: note = Description of Artificial Sequence: Synthetic coding sequence
  source 1..2310: mol_type = other DNA
atgagacttccagatctgagaccatggacctccttgctccttgtcgatgcagcacttctttggctactgcagggaccgctcggcactctgttgccacaggggctgcccggcctgtggctggaaggcacactgaggttgggtggcttgtggggccttttaaagctgagagggctgttgggattcgtcggaaccctcctcctgccgctttgtttagccacgccactcacagtgagtctccgcgctctcgtggctggcgcaagtcgagctccaccagctcgtgtagctagcgcaccatggagttggttgctggtaggttacggagcagcagggttgtcctggtcactctgggctgtcctcagccctcccggggcccaagagaaggagcaggaccaggtcaataataaagttttgatgtggcgcctgctgaagctcagccgtccagacctgcctttactcgtggctgccttttttttcctagttttggccgtccttggcgagacattgattccacattactctggcagggtgattgatatactcggcggggatttcgacccacatgcattcgcaagcgccattttcttcatgtgtttgttctctttcggcagctcactgtcagccggatgtagggggggatgctttacgtatacaatgagccgcattaatttaaggattagagagcaactgttttcatcactcctgcgacaagacctcggcttcttccaagagactaaaacaggggagctgaacagtcgactctcctctgataccaccctgatgagtaattggcttcccttgaacgccaacgtgctcctccgctcactcgtaaaggtcgtgggtctgtacggcttcatgttgtcgatctccccacggctgactttgctgagtcttcttcacatgcctttcacaatcgctgcagaaaaagtttataatacacgccaccaagaagtcttacgggagatccaagatgccgtggcaagagccggccaagttgtcagagaggccgtcgggggcctgcagaccgtcaggtcttttggtgcggaggagcatgaggtatgtcggtacaaggaagctcttgagcaatgcagacagctctattggaggagggatctggagcgtgccctatacttgctggtgagaagggttctgcatctcggcgtccagatgctcatgctctcgtgtgggctgcagcagatgcaggatggggagttgacgcagggctctttactcagcttcatgatttaccaagagtccgtcggatcttacgtacagaccctggtctacatctatggcgatatgctgagtaatgtgggagcagctgagaaagtgttttcttacatggatcggcagccgaacctcccttcacccgggacactggcaccaaccactctgcagggtgttgtaaagtttcaggacgtatcattcgcctaccccaatcgcccagacaggcccgtgctgaagggactgaccttcacattacgcccaggagaggtgacagccctggtggggcccaatgggagcgggaaatcgacagttgccgcactgttacagaatctttaccagcctacaggggggcaggtgctcctggacgagaagcccatttcgcagtacgaacattgttatctgcacagccaagttgtatctgtagggcaggaacccgtgctctttagtggaagtgttcggaacaacatcgcatacggactgcagtcttgcgaagacgataaggtcatggccgctgcgcaagcggctcatgccgatgactttatccaggagatggagcatggaatatacacagatgtgggggaaaaggggtcgcagctggcagccggacaaaagcagcgattggccatagctagggccctcgtgagggacccccgtgtgcttatactcgatgaggctaccagtgcactggacgtgcagtgcgagcaggctaatggattctgggtcgggcccctgggaggtggctccgctagcgaaagtgaccccaccgggtttttgcacgattctcgtcatcgactgtcttcagatgtcggcatgtttgtcgccctgactaaacttggacagcctgatgcagaacagtggaactcaagactggacctcctggagcggtccaggcaagccgttgacggcgtttgccgccacaactaccggctgggtgccccattcaccgtcggaaggaaagtacagcccgaggtcaccgtctatccagagaggactcctttgttacaccagcacaacctgctgcactgcagtgttacaggcttctatcccggtgacattaaaatcaagtggtttctgaatgggcagtag

SEQ ID NO: 138694 - DNA, 2310 bp, synthetic construct
  misc_feature 1..2310: note = Description of Artificial Sequence: Synthetic coding sequence
  source 1..2310: mol_type = other DNA
atgagactccctgatctgcgcccttggaccagcttactcctggtcgatgcagccctgctgtggctgcttcagggaccactcgggacattattgccccagggactgccagggctgtggctggagggaaccctgaggctgggcggcctctggggtttgctcaagctgcgcggcctgttgggcttcgtagggaccctgctgctgccactgtgcctagccacccccctgaccgtgtctcttcgcgctctcgtggccggcgcgtctagagcccctcctgcacgggttgcgtcagctccctggagttggctgctggtcggatacggtgccgccggcctatcttggtcgctgtgggctgtcctttcaccccctggagctcaggagaaggaacaggaccaggtcaataataaagtcctgatgtggcgtctgctgaagttgtctcgccccgatctgccgctgctggttgccgccttctttttcctggttctggccgttctcggggaaaccctgataccgcactattctgggcgagttatcgacatcctgggaggagatttcgacccccacgctttcgccagtgccattttttttatgtgtctgttctcattcggctcaagcctgtctgcaggatgccggggaggctgttttacatacaccatgagcagaatcaacttaagaatcagagagcagttgttctccagcctgttgaggcaggatcttgggttctttcaggagaccaagaccggcgaacttaatagcagactgtcatccgacaccacattgatgtctaattggctgcctcttaatgcgaacgtactgctgcggtcgttagtgaaggtcgtcggtctctacggattcatgctttctatctccccaaggctcacactcctgtctctactgcatatgcctttcaccattgccgccgagaaggtgtacaatactcggcaccaggaggttctgagagaaattcaagatgccgtcgcacgtgctgggcaggtcgtccgcgaggccgtagggggccttcaaaccgtccgcagctttggggctgaagaacacgaggtgtgtcgatataaggaagctcttgagcagtgccgtcagctgtactggaggagggaccttgaacgggcgctttacctgcttattcgacgggtgctgcaccttggcgtgcagatgcttatgctgagttgtgggcttcagcagatgcaggatggcgaactcacccaaggctcactgctgagctttatgatttatcaagagagtgtgggctcttatgtgcagactctcgtttatatttatggcgacatgttgagcaacgtcggagccgctgagaaggtgtttagttatatggaccgacagcccaacctcccttcccccggtaccctggcaccgaccaccctgcagggcgtggtcaaattccaggacgtatccttcgcctacccaaaccggcccgaccgccctgtcttgaagggtctgaccttcaccttgcgaccaggcgaggttacagcactggtgggccccaacggctctggcaaaagcactgttgcggcgctacttcagaatctgtatcaaccaacaggcggccaggtcctcctggatgagaaaccaatcagccagtacgagcattgctatttacacagtcaggtagtctccgtgggccaagagccagtactgttttcagggtctgtgcgcaataacattacctatggattgcagtcgtgtgaagacgataaagtgatggctgcagctcaagctgctcacgcagatgatttcatccaggaaatggaacatggtatatataccgatgtcggagagaagggttcacagctcgcagccggccagaaacagcgtctcgctattgctcgagccttagtgcgagatcctagagtgctgatcttagatgaagccacttcagccctcgatgttcagtgtgagcaggctaacggtttttgggtcggtcctcttggcggcggcagcgctagtgagagcgaccctaccggattcctccatgacagcagacataggctttcctctgacgtgggtatgttcgtcgcactgaccaagcttgggcagccagacgcggagcaatggaactcaagactggacctcctggagcggtcccggcaggccgtcgatggagtgtgtaggcacaactacagattgggcgcacccttcacggtgggccgtaaggtccagccggaggtgacagtctaccccgagagaacgcctctattgcaccagcataatttgttacactgttccgtgactggcttctatccaggtgatattaaaataaaatggttcctgaacggacagtag

SEQ ID NO: 138695 - DNA, 2310 bp, synthetic construct
  misc_feature 1..2310: note = Description of Artificial Sequence: Synthetic coding sequence
  source 1..2310: mol_type = other DNA
atgaggctccccgacctgagaccttggacatctttattgctggttgatgcggcattgctctggctgctgcagggtccactgggtacactgctacctcaggggctgcccggattgtggcttgaagggaccctcagactgggcggtttgtggggcctgctgaagctgaggggcctgctcggcttcgtcgggaccctgctcttacccctctgcttagccacccccctaactgtgtccctaagagccctggttgccggcgcaagtcgcgccccccccgcccgtgtggcctccgccccttggtcttggctgctcgtggggtatggcgccgctggattatcatggagcttgtgggcggttttgtctccaccaggcgcgcaagagaaagaacaggatcaggtgaacaacaaagtgctcatgtggcgcctcctaaagctgtctagaccagatctacccctcctggtggcagcgtttttctttctggtacttgcagttttaggggagacgctcatccctcattattctggacgcgtgattgacatactagggggcgacttcgacccgcacgccttcgccagcgccatcttctttatgtgtctcttttcgttcggcagctctttgtccgccggatgtcggggaggctgttttacctatacaatgagtagaatcaacctccgaatccgggagcagctgttctcttctctgctgagacaggatctcggcttcttccaggaaactaaaactggggagctaaatagccgcctgtccagtgatactaccctgatgagcaactggctgcccctaaacgcaaacgtcctgcttagaagtctggtcaaggtagtcgggctgtacggattcatgctgagcatttcccccaggctcactctcttgagtcttctgcatatgccctttacgattgcagcggaaaaggtgtataacacgcgccaccaggaagtactgcgggagattcaggatgccgtagccagagcgggacaggtagtgagagaggccgtgggcgggctccagacagtgcgctcctttggggcagaagagcatgaggtatgcaggtataaagaagcacttgagcagtgccgccagctgtactggcgcagggacctggaaagggctctgtacctgctggtgcgcagggtcctgcatttgggggtgcagatgctgatgctctcatgcggcctgcagcagatgcaagacggcgagttgactcaaggatctctactgtcattcatgatctatcaggaatcggtgggctcctacgtgcagaccctggtgtatatatacggggacatgctctctaatgtcggggcggctgaaaaggtgttctcatatatggaccgccagccaaatctcccaagccctgggacactcgcccccacaacactacaaggggttgtgaagtttcaagacgtgtctttcgcgtatccaaatagaccggataggcccgtcctcaaaggtctgacctttacactgcgcccaggcgaagtgaccgcgctggtggggcccaacggctcagggaagagtacggtagcggccctcctgcaaaacctataccagccaacaggaggtcaggtactactggatgaaaagccgatatcccagtatgaacactgctatctacacagtcaagtcgtatcagtgggacaggagcctgtattattttcagggtctgttcgcaataacatagcctatggtctgcagtcctgcgaggatgataaagttatggcagccgcccaggcagcccatgctgacgatttcatacaggaaatggaacatggaatttacacggatgttggtgaaaagggttctcaactcgcagccggccagaagcaaaggctcgcaatcgccagagcgctagtcagagatcctcgcgtgctaatcttggatgaagccacttcagctctggatgtgcagtgcgaacaggcaaatggcttttgggtcggcccccttggaggcggtagcgcatctgagtcagaccccacaggctttttgcatgattctagacatagactgtcttctgatgtcggcatgttcgttgctctgacaaaactgggtcagcctgacgccgaacagtggaacagccgacttgacttgcttgaacgcagccgccaagcagtggatggagtatgtaggcacaattacaggctgggcgcgccgtttacagtgggtcggaaagtgcagcctgaggttaccgtctatccagagaggacaccactgctccatcagcacaacctgctgcattgtagcgtgaccgggttctaccctggggacatcaagatcaaatggtttctgaacggacagtag

SEQ ID NO: 138696 - DNA, 2310 bp, synthetic construct
  misc_feature 1..2310: note = Description of Artificial Sequence: Synthetic coding sequence
  source 1..2310: mol_type = other DNA
atgcgcctccctgacttgaggccgtggaccagcctcctgctcgtggacgctgcattactctggctgctgcagggccccctggggacgctccttcctcagggtctgcctggactctggttggaggggacattaagactcggaggcctgtgggggctgctaaagctgcgaggcctgcttggttttgtcggtactctcctgttacctctctgcttagcaactccattgactgttagtttgcgcgcactcgtggccggagccagccgggctcccccagcaagagtggcaagcgccccttggagctggctgctggtgggctatggggccgccgggctgtcttggtccctctgggcagtgctctctccacctggcgcgcaggaaaaggagcaagaccaagttaacaataaggtgctgatgtggagactcctaaagctgagccgacctgacctaccactcttggtggctgcatttttctttctagtgctcgcggttctcggcgaaacccttatcccacactacagcggtagggttatcgatatactgggcggagactttgatcctcacgcttttgcaagcgccatcttcttcatgtgtcttttctcatttggctcttcactgtctgcgggttgtagaggaggctgcttcacatacacaatgagccggatcaatctccggatacgtgagcagttgtttagctccctcctgcggcaagatctaggatttttccaggaaactaaaaccggagaactgaacagcaggctgtcgagcgacaccacactgatgtcaaactggttgcctctcaatgcaaacgtgctcctgcgatccttagtgaaagtcgtgggcttgtacgggtttatgctcagcatctccccgcgtctcacactgttgtccctcttgcacatgccattcaccatcgcggcagaaaaagtgtacaatacaagacaccaagaagtgttgcgggaaattcaggatgccgtggcacgagccgggcaagtggttcgtgaagccgtgggagggctgcaaacggtaaggtcctttggagcggaggagcatgaagtctgtcgatacaaggaagcccttgaacagtgcaggcaactatactggaggcgagacctggaaagggcgctttacctgctggtcaggagagtgctgcatctaggggtgcagatgctcatgttaagctgtgggctccaacaaatgcaggatggggagctcacccagggcagcctcctatcctttatgatttatcaagaatccgtggggtcatacgtgcagacgcttgtttatatctacggggacatgctgagtaacgtgggcgcagcagagaaggtcttttcttacatggataggcagccaaatttgccctcccctggtacactcgcccccaccaccctacagggagtggtgaagttccaggatgttagcttcgcttaccctaacaggcctgacagacctgtgttgaagggcctcaccttcactttgcggccaggtgaggttacagccctcgtgggccctaacggaagtggaaaaagcactgttgctgcattgctgcagaatctctaccagccaactgggggacaagtgctactcgatgagaaacccatctcccaatatgagcattgttatttgcacagtcaggtggtcagtgtcggccaagagcccgtcttgttcagtggctctgtcaggaacaacatcgcctatggcttgcaatcttgcgaggatgacaaggtgatggccgccgcccaggccgcccacgctgatgacttcattcaagaaatggaacacggcatctatacagacgtgggcgaaaagggctcacagttggccgctggacaaaagcagaggctcgccattgcgagagctctggtgagagatcccagagtgttgattttggacgaggctacgtctgctctcgacgtgcaatgcgaacaggctaatggattctgggtcggccccttgggcgggggcagcgcctcagagtccgatcccaccggattcctgcacgactctaggcatagactgtcttctgacgtgggcatgttcgttgctctaaccaagctcggccagccggatgccgagcaatggaattcccggttagacctgctggaacgaagtcgtcaagcggtggacggagtgtgccggcataactatcgtctgggggcaccctttacagtggggagaaaggtacaacctgaggtcacagtctaccccgagagaaccccacttctgcatcaacacaacctgctgcattgttccgttaccggtttctaccctggtgacatcaaaatcaagtggttcctgaacggacagtag

SEQ ID NO: 138697 - DNA, 2697 bp, synthetic construct
  misc_feature 1..2697: note = Description of Artificial Sequence: Synthetic coding sequence
  source 1..2697: mol_type = other DNA
atggtgtgggatcggcagactaagatggagtacgagtggaagccggatgagcaaggacttcagcagattcttcaactgcttaaggagtctcagtccccagacactacaatacagagaacagtacagcagaagttagaacagctgaaccaataccctgacttcaacaactacctaatctttgtactgacaaaacttaaaagcgaggacgagccgaccaggagcctaagcggattgatcctcaaaaataacgtgaaagcacacttccagaactttcccaacggtgtgacagactttatcaagtccgagtgcctaaataatatcggcgatagtagccccctgattagagctacagtcggcatcttaatcactactatcgctagtaagggcgagcttcaaaactggccagacctgcttcctaaactttgctcccttctggactccgaggattacaacacatgcgaaggcgctttcggcgcgctgcagaaaatctgcgaagactcagcagaaattctcgactctgacgttttggaccggcctctgaatatcatgattcctaagttcttgcagttcttcaagcactcctcccctaagattagaagccacgcagtggcctgtgttaatcaatttatcatctcgcgcacccaggccctcatgctgcatatcgacagtttcatagaaaatttgtttgctctggcaggcgacgaggaaccggaggtgagaaagaatgtttgtcgcgccctggtgatgttactggaggttcggatggaccggctgttgccccacatgcataatatagtggagtacatgctgcaaagaacacaagatcaagatgaaaacgtggcactagaggcttgtgagttctggctcaccctggctgagcaacccatttgtaaagacgtactggttcgccatttacccaagctgataccagtgctcgtcaacggaatgaagtactctgatatagatatcatcttgctgaaaggcgacgtagaagaggatgaaactatacctgactccgaacaggacattcgcccaagattccaccgcagcaggacggtcgcacagcagcacgatgaagacggtatagaggaggaggacgacgacgacgacgaaatagatgatgacgacactatcagtgattggaatctcagaaagtgcagtgcggcagccctggacgtgctggccaacgtctatcgcgatgagttactgcctcacattcttccgcttctcaaggagttactattccatcatgagtgggtcgtcaaggaatcagggatcttagtccttggagcgattgctgaaggttgcatgcaggggatgattccttacctacctgagctaatcccccatctcatacagtgcctgtccgacaagaaggcactcgtgcgaagtattacatgttggaccctttcacgttatgcgcactgggtggtttcccagccaccagatacctatctcaagccgttgatgaccgagctgctcaagagaattctggatagcaacaaacgagttcaagaagctgcgtgtagcgcatttgctacattggaagaggaggcctgtacagagctcgtgccctacctggcctacatattagatacgctggttttcgcgttctccaagtatcagcacaagaacctactcattttgtatgacgccattgggaccctggccgatagtgtgggccaccacctgaataagccagaatacatacagatgctaatgccacccctgattcaaaaatggaacatgctgaaagacgaggataaagacctcttccccctgctggagtgtctttccagcgtggccactgccttgcagagcggctttctgccttactgcgagcctgtgtaccagcgttgtgtcaatctcgtgcagaagactcttgcccaggccatgctgaacaacgcgcaaccagatcaatacgaagcccctgataaagatttcatgattgtggccctagacctcctgagcggattggcagagggcctcggaggcaacatcgagcaactggtggcaagaagtaatattctgacacttatgtaccagtgtatgcaagataagatgccggaggtgcgccaatcatcattcgccctgctgggggacctcaccaaggcttgttttcagcacgtcaaaccctgcattgctgacttcatgcccatcctgggcacgaatctgaaccccgagttcatctcagtgtgcaataatgctacttgggctatcggagaaatctcaattcaaatgggtattgaaatgcagccgtatatccctatggtgctgcatcagctggtagaaataatcaaccgtcccaatactcctaaaacgctgctcgaaaacacggccattaccattggacgactaggatacgtgtgtccccaggaggtcgccccgatgctgcagcaattcataaggccttggtgcacctccctgcgtaacattagggacaatgaagaaaaggattccgccttccgggggatctgcacaatgatatctgtgaaccccagcggggtcattcaggatttcatcttcttttgcgacgcggtcgcctcttggatcaaccccaaagacgacctgagagacatgttctgcaaaatactgcacggatttaagaatcaggtcggggacgaaaattggcgccggttctccgatcaatttcctttgccactcaaagagcgactcgccgcattttatggtgtgtag

SEQ ID NO: 138698 - DNA, 387 bp, synthetic construct
  misc_feature 1..387: note = Description of Artificial Sequence: Synthetic coding sequence
  source 1..387: mol_type = other DNA
atggagtatgagtggaagccagacgaacagggtctgcagcagattctccagctgctcaaggagtcgcagtctcctgacaccactattcagaggaccgtccaacagaagctggaacagctgaaccagtatcccgattttaataattacctgattttcgtgctgacaaagctgaagagcgaggatgaacctaccagatccctttctggcctgatccttaagaacaatgtcaaggcccacttccagaactttcctaatggggtgacagacttcataaagtctgaatgtctgaataatattggagatagcagtcctctgatcagagccactgttgggctgacccttttacatgtctcaataagtctgtccagtgtgggccttaagctgtag

SEQ ID NO: 138699 - DNA, 2547 bp, synthetic construct
  misc_feature 1..2547: note = Description of Artificial Sequence: Synthetic coding sequence
  source 1..2547: mol_type = other DNA
atggtctgggaccggcagacaaagatggagtacgaatggaagccagacgaacaaggcctccagcagatactccaactgcttaaggaaagtcagtcgcccgacactaccatacagcggaccgtccagcagaagttggagcagctgaaccagtatccggacttcaataactacctgatctttgtcctcaccaagctgaagtccgaaggtatcctcattaccactatagcctccaagggagaattacagaattggcccgatctgctccccaaattatgctccctgctggacagtgaagactataatacttgcgaaggtgcttttggcgcgcttcagaaaatttgcgaagacagcgctgagatactcgactcggatgtcctggaccgcccccttaatattatgattcctaagttcctccaattttttaagcattctagcccaaagatccggtcgcacgctgtcgcttgcgttaatcagtttattatttcccggacacaagccctaatgctgcatatcgactccttcattgagaatcttttcgcccttgctggggatgaagaacccgaagtgcgaaagaatgtttgtcgggccctggtcatgctgttagaagtccgcatggataggctcctgccccatatgcacaatatcgttgagtacatgttgcaacggacccaggaccaggacgaaaatgtggcactggaagcatgtgaattctggctgacccttgccgagcagcccatctgcaaagacgtactcgtgcgccacttgccgaaattgataccggtcctggtgaacggaatgaagtactccgatatcgacatcatcctcctgaaaggagacgttgaagaagacgaaaccattccagactccgagcaggatattcggcctcgctttcaccgatcgagaacggtagcacagcagcatgacgaagatggaatcgaggaagaggatgacgacgacgatgagatagatgacgatgacacgatatccgattggaatttgcgcaagtgttctgccgcggccctagatgtgctggctaacgtgtaccgcgacgagctattgccccacatcctgcctttgctcaaggaactgctcttccatcacgagtgggtggtgaaagagtctggcatcttggtcctgggcgctattgccgagggttgtatgcagggcatgataccatacctgcctgagctgattcctcacttgattcaatgtctctccgacaaaaaagccctggtgcggtcgattacatgctggaccctatctcgctatgcccattgggtagtctctcaacctccagatacatacttaaagcctctgatgactgagttactcaagcggatattggactctaataaaagggtgcaggaagcggcgtgtagcgcctttgcaacacttgaggaagaggcatgcactgaattggtcccctacctggcttacatcctcgacaccctggttttcgcatttagtaaatatcagcataagaatctgctgatcctgtacgacgccattggcactttggctgactcagtgggccatcatttgaacaagcctgaatacatccaaatgctaatgcctcccctgatccaaaagtggaacatgcttaaggacgaagacaaagatttgtttccactgctggagtgtctctcctccgtcgctacggccttacagagtggattccttccatactgtgagccagtgtaccagagatgcgtgaacctggtacagaagacacttgcacaagcgatgctgaacaacgcccagcctgatcagtatgaggccccagataaggatttcatgattgtggccttggatctactctcaggtctagccgaagggctgggcgggaacatcgagcaactggtggcccgtagcaacattctgacactgatgtatcagtgcatgcaggataaaatgcctgaggtaaggcaatctagttttgcattgctcggcgatttgacaaaggcctgcttccaacacgtgaagccttgtatagctgatttcatgcccatcttaggaactaacctgaacccggagtttatctccgtgtgtaataatgctacctgggccatcggggagattagcatacagatggggatcgagatgcagccctacattcccatggtgctgcatcagctcgtcgagatcataaacaggcctaacaccccaaagactctgctggagaacaccgccatcaccattgggagattgggctacgtgtgtccacaggaggtcgccccgatgttacaacagtttatccggccttggtgcacaagtttaagaaatattcgagataacgaagaaaaggactccgccttccgcggaatttgcaccatgatctctgtgaacccaagtggggtgatccaggattttattttcttttgtgatgccgttgcctcttggattaaccccaaggatgatttgcgtgacatgttctgtaaaattctccacggattcaaaaaccaggtaggcgacgagaattggcggcggttcagcgatcagttccccttgcctcttaaagaacgcctggccgcgttttatggagtgtag

SEQ ID NO: 138700 - DNA, 2673 bp, synthetic construct
  misc_feature 1..2673: note = Description of Artificial Sequence: Synthetic coding sequence
  source 1..2673: mol_type = other DNA
atggagtacgaatggaaacccgacgagcaggggcttcagcagatactgcagctgctaaaggagtcccagagtccagataccacaatccagaggacagttcagcagaaacttgagcagcttaaccaatatccagacttcaataactacttgatatttgtgctaacaaagctgaagagcgaggatgagccaactcgctccctgtccggacttatcctcaagaacaatgtgaaagctcacttccagaattttcctaacggcgtgacggattttatcaagtccgagtgtttgaacaacataggtgatagttcgcctttgataagggcaactgtgggtatcctgatcaccactatcgcatccaaaggtgagctacagaactggcctgatcttctgcctaaattgtgttccctacttgatagtgaagattacaacacctgtgaaggagcctttggagctcttcaaaagatctgcgaagacagcgcagagatcctcgattccgatgttctcgatagaccactcaatataatgatccctaaattcctgcagtttttcaaacactcctccccaaaaataaggtcacacgcggtcgcatgcgtcaaccagtttattatatctcgcacccaggccctcatgcttcacattgactcttttatcgagaatctgtttgccctcgcgggggatgaggaacctgaggtcaggaagaacgtgtgcagagcgctggtgatgcttctggaagtccggatggataggctcttaccccacatgcacaatatcgtggagtacatgctgcagcgaacacaggaccaagacgaaaacgtcgcccttgaggcgtgtgagttttggcttaccctggctgagcagccaatttgcaaagacgtacttgtaaggcacctgccgaaactgataccagtcctggttaacggaatgaaatatagcgatattgacatcattctgctcaagggggatgttgaggaggacgaaacgatccctgattcggaacaggacatcagacccagattccatagaagccgtactgttgcccaacaacacgatgaggatgggatcgaggaggaagacgacgacgatgacgagatcgatgatgacgacacgatctccgattggaatctacgaaagtgctctgccgctgcactggacgtacttgctaatgtctacagagacgaactgctgccccacattttgccccttctgaaggaattgctgtttcatcacgagtgggtagtcaaggagtctgggatacttgttctcggcgctatcgccgaggggtgtatgcaaggcatgattccttacttgcccgagctgataccccatctgatccagtgtctatctgacaagaaggctctcgtgcggagtatcacttgttggacgttgtcaagatacgcgcactgggtcgtgagccagccacctgatacttaccttaagcctctgatgaccgaactgcttaagcggattctcgatagtaacaaacgggttcaggaggccgcctgttctgcttttgctacccttgaagaggaggcctgtaccgagctggtgccttatttggcctatatcctggatacactggtgttcgcttttagcaaataccagcacaagaacctactcatcttgtacgacgcgatcggaactcttgcggactccgtcggacatcatctcaataagcctgagtacatccaaatgctcatgcctcccttgatccagaagtggaacatgctgaaggatgaggacaaagatctgttccccttgctagagtgcctcagttccgtggccacggccctacagtccggttttttgccctactgcgagcctgtttatcagcgatgtgttaatctggtacagaaaactctcgcacaggcaatgctcaacaacgctcagcccgatcagtatgaagctcccgataaagactttatgatcgtggctctcgacttgctgagtggtttagcggaaggcttaggagggaacatcgagcagctggtcgctcgatcaaacattctgaccctcatgtaccagtgcatgcaggacaaaatgccggaggtgagacagagctcatttgccctgctgggagacctcacaaaggcttgctttcaacatgtaaagccttgcattgctgatttcatgcccatcttgggcacaaacctgaatccagagtttatctccgtgtgcaataatgcgacgtgggccatcggtgaaatcagtattcagatgggaatcgagatgcagccttacattcccatggtgcttcaccagctagtggagattataaaccgccctaacacgcccaaaacgctcctggagaacactgccatcacgattggaaggctcgggtatgtgtgtccgcaggaggtggcaccaatgctccagcagtttattaggccatggtgtacctcgttaagaaacattcgggacaacgaagaaaaggacagtgcctttaggggcatttgcactatgatcagtgtcaatccctctggggtcattcaggattttatcttcttctgcgatgcagtggcctcctggatcaatcccaaggacgatttacgcgacatgttttgtaagatcctccacgggttcaaaaaccaggtaggggatgaaaattggcggaggttctcagaccagtttcctctgcccctcaaggagaggctggccgcattttatggagtctag

SEQ ID NO: 138701 - DNA, 2664 bp, synthetic construct
  misc_feature 1..2664: note = Description of Artificial Sequence: Synthetic coding sequence
  source 1..2664: mol_type = other DNA
atggactggcagccggatgagcagggcctgcaacaggtgctccagctgcttaaagacagccagtcgcctaacaccgctactcagagaatcgtacaggacaagttaaagcaactgaatcaatttccagacttcaataactacctgatcttcgtgctaacccgtctgaaaagcgaagatgaaccaacaaggtctcttagtggcctgattcttaagaataatgtgaaagcccactaccagtctttccccccacccgtagctgacttcatcaaacaggagtgcctgaataatatcggcgatgcttcctccctgattcgcgctactatcggaatcttaattaccaccatagcttctaagggggagctgcagatgtggccagagctattacctcagctgtgcaacttgcttaatagtgaagactataacacttgcgagggggcgttcggcgctcttcaaaagatatgcgaggattcttccgaactgctcgattcagacgcgcttaatcggcccctgaacattatgattcccaagttcctgcagttcttcaagcactgctctcccaagatccgtagccacgccatcgcttgcgtgaaccagttcatcatggatagggcccaagcgctgatggataacatcgataccttcatcgagcatctgtttgcgttggcggttgacgatgatcccgaggtgaggaaaaacgtgtgccgcgcattggtcatgttattggaggtaagaatcgatcgcctcattccacacatgcactcgataatccagtacatgctgcagaggacccaggatcatgatgagaacgtggccttggaagcctgcgagttctggctgactctagccgaacagcccatttgcaaagaggtgctcgctagccacttggttcagcttatccccatcctggtaaatggtatgaaatactccgaaattgatatcatccttctgaaaggagacgtggaagaagatgaagcggttcctgacagtgaacaggacataaaacccaggtttcacaagtcacgtaccgtgactctcccccatgaagccgagcgccccgatggatcagaagacgcagaggatgacgatgatgacgatgctctaagtgattggaacttacgtaagtgctcggccgccgccctcgacgtgctggcaaacgttttccgggaggagctgcttccccatctgctaccgttactgaaaggacttctcttccatccagagtgggtcgttaaagagagtgggattctggtcctgggtgccatagccgagggttgtatgcagggaatggtgccgtacctgcctgaactgatccctcatctgatccagtgcctttcggacaagaaagctctagtgagaagcatagcttgttggaccctgtcaaggtacgcacattgggtggttagccagcccccagacatgcatctaaaacctctgatgaccgagctcttaaagcgcattttagatggcaacaagcgggttcaggaagctgcctgttcagcatttgccacgttagaagaggaggcctgcacagaattggtcccttatctgagttacattctagacaccctagtctttgcctttggaaaatatcagcacaaaaacctcctgattctctacgacgccattggcactctcgctgactccgtcggacatcacctaaaccagcccgagtacatccagaagctgatgcctccactcattcagaaatggaatgaactcaaggatgaggacaaggatctgtttcccctgcttgagtgcctgtcatcagtggcaacagccctccagagcggttttcttccctattgtgaacccgtttatcaaaggtgtgtgacactggttcagaaaactctcgcccaagcaatgatgtatacacagcaccccgagcagtacgaggctcccgataaggacttcatgatcgtggccctggacttactttctggacttgccgagggcttgggagggcatgtagagcagctggtcgctcgctcgaacatcatgacactgctgtttcagtgcatgcaggatagtatgcctgaagtgcggcaaagctcattcgcactgctcggcgacctgacaaaagcgtgctttatacacgtgaagccttgtatcgccgagtttatgcccattctcggcactaatctgaaccccgaatttatctccgtgtgcaacaacgccacctgggctattggagagatatgcatgcaaatgggcgctgaaatgcagccatacgtgcaaatggtcctgaacaacctggtggagatcatcaataggcctaacacaccaaagacactcctagaaaataccgcaataacgatcgggaggttaggctacgtatgtcctcaggaagtcgcccccatgctgcagcagttcattcgcccttggtgcacaagcttgaggaacattcgagacaacgaggaaaaggacagcgcatttcgcggcatctgcatgatgataggagtgaacccaggaggcgtagttcaagacttcatattcttctgtgacgcagtagcaagctgggtttccccaaaggacgacctccgcgatatgttttacaagattcttcatggcttcaaggaccaagtcggagaagataattggcaacaattctctgaacagtttcctcctctattaaaagagagactcgcagcattttacggggtgtag

SEQ ID NO: 138702 - DNA, 2100 bp, synthetic construct
  misc_feature 1..2100: note = Description of Artificial Sequence: Synthetic coding sequence
  source 1..2100: mol_type = other DNA
atggactggcagcccgacgaacaggggctacagcaggtgttgcaactactcaaggacagtcagtctccgaataccgccacacaaagaattgtccaggataaactcaagcagttgaaccagtttccagactttaacaactacttgatatttgtcctgacacgcttgaaatctgaggacgaacccacccgcagtctaagcggattgattcttaaaaacaatgtcaaggctcactaccagagcttccccccgccagtggccgacttcataaaacaggagtgtcttaacaatattggcgatgcttccagccttatccgcgcaacaattgggattctcatcaccactatagcctccaagggtgagctccagatgtggcctgagctgctgccccagctctgcaacttactcaactctgaagactacaacacatgtgaaggggccttcggcgctctccagaagatctgtgaggattcctctgagttgttggattcagacgccctgaataggcctctgaacattatgatcccaaagtttttgcagtttttcaaacattgcagtccaaaaatcagatcacacgcgattgcctgcgtgaaccagtttattatggatagggcccaggcgcttatggacaacattgacacgttcattgagcatctgtttgcattggcggtggacgatgacccagaagtgagaaaaaacgtctgtcgagcacttgtgatgctactggaagtccgcatagatcggttaattccccatatgcattcaattatccagtacatgctgcagcggacccaggaccacgatgaaaacgtggcactcgaagcttgcgagttttggctgaccctcgcagagcagcccatttgtaaggaggtgctcgcaagtcacctagttcaactgatcccaattttggtcaatggcatgaagtacagcgagatcgatattatcctacttaaaggtgatgttgaagaagacgaagcagtcccggactccgagcaagacatcaagccccgctttcacaaaagcaggaccgtgacattaccccatgaggcggagaggccagacggatcagaggacgccgaagatgacgatgatgacgacgccctctccgattggaacttacgcaagtgtagcgctgctgcgctggatgtcttggccaatgttttcagggaagaactgcttccacacctgctccccctgctgaaaggtctccttttccaccctgaatgggtcgtcaaagagtccggaattctggtactcggggctattgctgagggctgcatgcagggcatggtgccctacttgccggaactgatccctcatctaattcagtgcctctcagacaaaaaggcgctagtccgctccattgcctgctggactttgagcagatacgctcattgggtggtcagtcaaccccctgatatgcacctgaagccactgatgaccgaactgctgaagcgcatccttgacggcaataagcgggtccaggaagcagcttgttcagcctttgctactttagaagaggaggcctgcacggaactcgttccttatctgtcttacattctggacacactggtgtttgcgttcggcaagtaccagcataagaacctgctgatcctatacgacgccattggaactctggcggactccgtgggtcatcaccttaatcagccagagtacattcaaaagctcatgcctccgctgatacaaaaatggaacgagctcaaggatgaagacaaggaccttttcccgctcctcgaatgcctctccagtgtagccactgccctccaaagtggttttcttccatattgcgaacctgtgtaccagaggtgcgtcactctcgtgcaaaaaactttagctcaagccatgatgtacacccagcatccagagcagtatgaggccccagacaaggatttcatgatcgtagcattagacttattaagcggtcttgccgaagggctagggggccacgtggagcagctcgtagcccacagcccttcattccctccccaccctctccccccagcgggcagcagagtctgtccttttgtgactgttctgtgttggggattggctcctcggtggcgcgagattcccttagtttag

SEQ ID NO: 138703 - DNA, 2694 bp, synthetic construct
  misc_feature 1..2694: note = Description of Artificial Sequence: Synthetic coding sequence
  source 1..2694: mol_type = other DNA
atggactggcaaccggatgagcaaggcctccagcaagtgctgcaactgctgaaagactcccagtctcctaacacagccacacagaggatcgttcaggacaagcttaagcagctgaatcaatttcccgatttcaataattatctgattttcgtgcttacgaggctaaagtctgaagacgagccaacacgatccctcagcggactgatcttgaagaataatgtgaaggcacactaccagagtttcccaccccccgtggccgatttcatcaaacaagagtgcctcaataatatcggagacgccagctcactgatcagggcaacgattggcattctgattactacaatcgcgtccaaaggcgaattgcagatgtggcccgagctgctcccccaactctgtaatcttttgaacagcgaagactacaatacctgcgaaggcgccttcggcgccctgcagaaaatctgcgaagactcgagcgagctcttagacagtgacgctttgaatcggccgctgaatatcatgataccgaaattcctgcaattttttaagcactgcagtcccaagatcaggtcgcacgcaatagcttgcgtgaatcagttcataatggacagagcccaggcactgatggataacatcgacacttttatagagcacctcttcgcccttgctgttgacgatgaccccgaagtcaggaagaatgtgtgcagggcactggtgatgctgctagaggtgcgaattgatcgattgattccccatatgcactcaattatccaatacatgctccagcgaactcaggaccacgatgagaacgtagctctcgaagcatgtgagttctggctgaccttggccgaacaacctatttgtaaggaagtacttgcgagccacctggtgcagcttattcccatcctggttaatggaatgaaatacagcgagattgacataatcctgctgaagggcgatgtggaagaggacgaggctgtgccagattcagagcaggacatcaaaccccgattccataaaagcaggactgtaaccttaccgcacgaggccgagaggcctgacgggagtgaggacgctgaagacgacgacgacgatgacgccctgtccgattggaatctgaggaagtgctctgccgctgctctggacgttcttgcgaacgtgtttcgcgaggagctgttgccccacctcctgcccctcttaaaaggactgctgttccatccagagtgggtcgtgaaggaatcaggaatcttggtacttggcgccattgccgagggttgtatgcaagggatggttccttacctgcctgaacttattccacacctgatccagtgcctgagtgacaagaaagcgctggttcggagtatcgcctgttggactctttccaggtatgcacactgggtggtgagccagccacccgatatgcacttaaaacccctgatgactgagctgctgaaaagaatactggatggcaataagcgggtgcaggaagcagcctgttcagcatttgctaccttggaagaggaggcctgcaccgagttagtcccatacttatcatacatcctcgataccctggtttttgcgtttgggaaataccagcataaaaatttattgatcctctacgatgctatcggcaccctggccgactctgtcggacatcacttgaaccaaccggaatacatccagaaattgatgcccccactgatccagaagtggaacgaacttaaagacgaagataaagacctattcccgcttcttgagtgtttgagctcagtggccacggcactgcagagtgggtttctaccttactgtgagcctgtttaccagcgctgcgttacgttggtgcaaaaaacacttgctcaggccatgatgtacacccagcatcctgaacagtatgaggcacctgataaggacttcatgattgtggccttagatctgctctctggactggccgagggcctcggcggccatgttgagcagcttgtggcgaggtccaacatcatgacgctgctgttccagtgtatgcaggactccatgccagaggtccggcagtcctcctttgcacttctgggggaccttaccaaggcctgttttatccatgtgaaaccttgcatcgccgaatttatgcccattctcggtaccaacctcaaccctgagttcatctctgtctgtaacaatgccacgtgggctatcggtgagatctgtatgcagatgggcgccgagatgcagccctacgttcagatggtcctcaataatctcgtagagatcatcaacagacctaacacgccaaaaaccctattagaaaacacgggccgtctcacaagtccatctgccatccccgccatcacaattggacgactgggttacgtgtgccctcaggaggtcgcccctatgctacagcagttcattaggccttggtgtacttcgcttcgcaatattcgcgacaatgaggagaaagactctgctttcaggggtatatgcatgatgatcggcgtgaatccaggaggtgtggtgcaggatttcatcttcttctgcgacgctgtggccagttgggtgagccccaaagacgacctacgcgatatgttttataagatattgcacggattcaaggatcaggtcggcgaggacaactggcagcagttctcggaacagttccctcctctactgaaagaaagactggcagcgttctatggagtctag

SEQ ID NO: 138704 - DNA, 2664 bp, synthetic construct
  misc_feature 1..2664: note = Description of Artificial Sequence: Synthetic coding sequence
  source 1..2664: mol_type = other DNA
atggattggcaacctgacgagcaggggttgcaacaggtgctacaactcttaaaagattcccagtctccaaacacagcaacacaacggatcgtgcaagataaactgaaacaattaaatcaatttcccgacttcaataactatctcatcttcgtgctaaccagacttaaatccgaagatgagcctacaaggagcctgagcggcctcatcctaaaaaataacgtgaaggcccattatcagtcgttcccccctcccgtagctgacttcattaaacaggagtgtctcaacaatatcggtgacgccagctcgcttattcgcgcgactattgggatcttgatcacgactattgcctcaaaaggggaactgcagatgtggccagagcttttgccacagttatgcaatctcctcaacagtgaagactacaacacatgcgagggtgcctttggcgcactgcaaaaaatctgtgaagactcttctgaactgttagactcagatgcactgaataggccactgaacattatgataccaaagttcttgcagtttttcaaacattgttctccaaagatcagaagccacgcaattgcatgtgtgaatcaattcataatggatcgagcccaggccctgatggacaacatcgataccttcatcgagcatctctttgccttggctgtggacgatgacccagaagtgagaaaaaatgtctgcagagccctggtcatgctgctggaagttcgtatcgacagactcatccctcacatgcattctataattcagtatatgttgcagaggactcaggaccatgacgaaaatgtcgccctcgaggcgtgtgagttttggctgaccttggccgagcagcctatttgcaaggaagtgctggcctctcacctggtgcagttaatacccatcctcgtgaatggaatgaagtattcagaaatcgacatcatactgctgaagggtgacgtggaggaggatgaagccgtccccgattctgaacaggacatcaaacccaggttccacaagtctcgcactgtgaccttaccacacgaggctgaaaggcctgacgggagtgaagacgccgaggacgacgacgacgatgatgccctatcagattggaatctgagaaagtgctccgccgccgccctggacgtgctcgctaacgtctttagagaggagctcttgcctcacctgctgcccctgctgaagggtcttttgtttcatcctgagtgggtggtcaaggagagtggcatcctcgtgctaggggctattgctgaagggtgtatgcagggcatggtgccttatctgccagagctaatacctcatctgatacagtgtcttagtgacaaaaaagccctggttcgatccatcgcctgctggacgctgagcagatacgcacattgggtggtctcccaaccacccgatatgcatctgaagccactcatgactgaactactgaaacggattctggatggaaacaagcgggttcaggaagccgcctgtagtgccttcgccaccctggaggaagaggcctgcaccgagctggtcccctacctgagctatattcttgatactttggtgtttgcttttggtaagtaccaacacaagaacctgctcatattatacgacgcaatcggaaccctggccgactctgtaggacaccatctgaaccagcctgaatacatccagaaattgatgccgccactgattcaaaagtggaatgaactgaaggacgaagataaggatctgtttccattgctggaatgtctgagtagtgtcgcaaccgccctccagagcgggtttctgccttattgtgagccggtttatcagcggtgtgttaccctggttcagaagacattggctcaagccatgatgtatacacagcaccccgagcagtatgaggctcccgataaagactttatgatcgttgctttagatctactctctggcctggctgaagggcttggcggacatgttgaacagcttgtggcacgctccaatattatgactctactatttcagtgcatgcaagactcaatgcctgaggtgcgccaaagcagtttcgctcttctgggcgacctaacaaaggcatgtttcatacacgttaagccatgtatcgccgaatttatgcctatcctgggcactaaccttaatccagagtttatttctgtgtgtaataacgcgacatgggcaatcggggaaatttgtatgcagatgggtgctgagatgcagccctacgttcagatggtcctgaacaatctggtggaaatcatcaatcgccccaacacacccaagactctgttagaaaacactgctatcaccatcggccgactggggtacgtctgcccccaagaagtcgccccaatgctgcagcaatttattaggccgtggtgtacctctctccgcaatatacgtgacaacgaagagaaggactccgccttccgcggaatatgtatgatgatcggggtcaatcccgggggtgtcgtgcaagattttatcttcttctgcgacgccgtggcatcttgggtgagccccaaggatgatttaagggacatgttctataagatactgcatggcttcaaagaccaggtcggcgaggataactggcagcagttttccgagcagttcccccccctacttaaagagagactcgcggcgttttacggcgtgtag

SEQ ID NO: 138705 - DNA, 2694 bp, synthetic construct
  misc_feature 1..2694: note = Description of Artificial Sequence: Synthetic coding sequence
  source 1..2694: mol_type = other DNA
atggattggcagccagacgaacagggactccagcaggtcttgcagctgctcaaggatagtcagagtccaaatactgctactcaacgcattgttcaggacaagctgaagcaacttaatcagtttccagacttcaataactatctgatcttcgtactcacccggctcaagtctgaggatgagcctacccggagtctgtctgggctcattcttaagaacaacgtgaaggcccattaccagtcctttcctccacccgtcgctgattttatcaagcaggagtgcctcaataatatcggagatgcttcttctctcattcgcgccaccatcggcatcctcatcacaacaatcgcaagcaagggggagctccagatgtggccagagctgttaccccagctgtgcaaccttctgaactcagaggattacaacacctgcgagggtgcctttggtgccttgcagaagatttgcgaggatagcagtgaattgttagactccgacgcgctaaaccggccactcaatattatgatcccaaagtttcttcagttcttcaaacactgttccccgaaaataaggagtcacgccatcgcatgcgtgaatcagtttataatggatcgggcccaagcacttatggacaacattgatacttttatcgaacacttattcgccttagccgtggatgatgacccagaagtgaggaagaacgtgtgtcgagctctcgtgatgttactcgaagtgagaatagaccgcctgattcctcatatgcattctattattcaatacatgttacaaaggacacaggaccatgatgaaaacgttgcgctggaagcttgtgagttctggctcaccctcgcagaacagccgatatgtaaggaggtgctggccagccacctcgtacagctgattccgattcttgtgaatggtatgaagtactctgagatcgacattatcctgctgaaaggagatgttgaagaggacgaagctgtgcctgactccgaacaagacataaaaccccgattccataaatcccgaaccgttacgcttccccacgaagccgagcggcctgatggttctgaagacgcagaagacgatgatgacgacgacgcgctgtccgattggaacctgcggaaatgttcagcagcagccttggacgtgctggccaacgtgtttagagaggagttgctgccacacctgttgccgttattgaaaggactgctgttccacccagagtgggttgtgaaagagagcggaattttggtcctcggtgctatcgccgaaggatgtatgcagggcatggtcccatacctgcctgagttaattccccacctaatccagtgcctctctgataaaaaagcactggtgcgtagcatcgcctgttggacactttcccgatacgcgcactgggtggtgagccagccacctgacatgcatctcaagcctttgatgaccgagctgctaaagcggatcctggatggcaataaaagagtgcaagaggccgcgtgcagtgcttttgcaactctcgaggaggaagcatgtacggagctcgtgccgtatttgagctacatccttgataccctagtgtttgccttcggtaagtatcagcataaaaaccttctgattctgtatgacgccattggcacactggctgactctgttggccatcatctcaatcaaccagaatatatccagaaactcatgcccccactgatccagaaatggaacgaactgaaggacgaagacaaagacctgttccccttgttggaatgcctctccagcgtagctaccgctttgcagtctggctttttgccctattgtgagcccgtgtatcagagatgcgtcacacttgtccagaagactttggcccaagcaatgatgtatacgcaacaccccgagcaatacgaggctccagataaggatttcatgatcgtagcacttgatctactcagtggcctggcagaggggctcggtggccatgtggagcagcttgtggctaggagcaacatcatgaccttactgttccagtgtatgcaagacagcatgcctgaagtgaggcagtcatccttcgcactgttaggagatctcaccaaggcatgtttcatccacgtcaagccatgcatagccgagttcatgcctatattaggaaccaacctcaatcctgagtttatatcagtctgcaacaatgccacctgggctattggagagatctgtatgcagatgggagcagaaatgcagccctacgtccaaatggtgcttaacaatttagtggagattattaacaggccaaatacaccaaagaccctcctggagaatactggtaggttgacctcaccgtcagccattcctgctatcacaattggccgtcttggatacgtgtgcccacaggaagttgcacctatgctgcagcagtttatcaggccttggtgcacctctctacgtaatattcgagacaatgaggagaaagattccgcattcagggggatctgcatgatgattggagtgaacccaggaggcgttgttcaagattttatctttttttgcgacgccgttgcaagctgggtgtcacctaaggacgatctgcgagatatgttctataagatcctccatggtttcaaggaccaggtgggcgaggacaattggcagcagtttagcgaacagttcccccctctgcttaaagagcggctcgctgctttctatggggtgtag

SEQ ID NO: 138706 - DNA, 3156 bp, synthetic construct
  misc_feature 1..3156: note = Description of Artificial Sequence: Synthetic coding sequence
  source 1..3156: mol_type = other DNA
ggacagtctgtcggtggccgaggacttttccgcgactgtgcttgcatcgaggagacgacgggtgcgggcgctctctcacgaagtggggcaggtccgctggacgttgaggcagctgggccatctccttcgcgctgcgaaggtggtggctcacttagagccagaagtcgcggtcagaggcatgggccgccatgggacgagggttcgtcactcggaccaatgcgcatccggcgggctcctccgcctcctccagtggcccgattccatattccccctcctgccctgccttcccccagactgagaggccggggctggcggtcttggagaggaccacgaacatgggcgggggttgatcgccggcctccgcctgtgcgccgcgggaggtctagacggcatgctgcgactgccgcctctggcgcgccccctggttcccatactgagcctcagcgcccatctgctgatccaggcccttacttgcgtagcctgccttgtgctatggattggcagccagacgaacagggtctgcagcaagttctgcaacttctcaaagatagccagagtccaaacacagcaacgcagagaatcgtccaggacaagctgaagcagttgaaccaattcccagatttcaacaattacctgatcttcgtcctgaccagactgaagtctgaagatgagcccacacgttcgctgtccggtctcatactgaaaaataacgtgaaagctcattatcaatctttcccaccaccagtggcagacttcattaagcaggagtgcctcaataacataggagacgccagcagtttaatccgagccactataggcatactaataacgacaatcgcgtccaagggcgagttgcaaatgtggcctgagctgcttccgcagctgtgtaatctgctgaactcagaagattataacacctgtgagggtgcgttcggcgccctgcaaaaaatctgcgaagatagttccgaactgctagattccgatgcccttaatcggcctctgaatataatgattcccaagtttctacaattttttaagcactgtagtcccaagatacgaagccacgctatcgcatgtgtcaaccagttcataatggatcgagctcaggctttaatggataacatcgacacgttcatcgaacatttgttcgctctggcagtggatgatgacccagaagtccggaagaacgtttgtcgcgccctggttatgctgctcgaggtgcgcatagaccgcctcattcctcatatgcactctattattcagtacatgctccagaggacacaggatcacgacgaaaacgtggcactcgaggcctgcgagttttggcttacccttgcggaacaaccaatttgtaaagaggtgctggcttcacacctggtacagcttatccccatattggtcaatggcatgaagtacagcgaaatagatataatactgcttaaaggagacgtggaggaggacgaagctgtgcctgattctgaacaggacatcaaaccacggttccacaaatctcggacggtcacgctgcctcatgaggctgagcgcccagacgggtcagaagacgcggaggatgacgatgacgatgacgctctgtccgactggaacctccgtaagtgttcagcagcggctttagacgtactcgccaatgtttttcgggaggagttacttccccacctgctgccactgctgaaagggctgttgtttcatccagagtgggtagtcaaagagtctggcattctggtcttaggtgccatcgcagaagggtgcatgcaaggcatggtcccgtacctgcctgagttgattcctcatttgatccagtgtctgagcgacaaaaaggcgctcgtcagatccatcgcttgttggactttgtcaagatacgctcattgggtcgttagtcagcctcctgacatgcaccttaagcctctcatgaccgagctcctgaagcggatcctagatggtaacaaacgcgtccaggaagcagcctgtagcgcatttgcaacattggaggaagaagcctgtacagaacttgtgccttatctgtcttacattttggacacgctcgtctttgctttcggcaagtaccagcacaagaatctgcttattttgtacgatgctatcggaaccctggccgatagcgtggggcaccacctcaatcagcccgaatatatccagaagctcatgccgcccttgattcagaaatggaacgagctgaaagacgaagacaaggacctcttccccctgctcgagtgtctttcctcagtggccaccgctcttcagagcggattccttccatactgtgagcccgtgtaccagcgatgcgtaactcttgttcagaagaccttggctcaagccatgatgtacacacagcaccccgaacaatacgaagctcccgacaaggactttatgatcgttgctctggatctgctgtcgggtctggctgagggtctcggcggacatgtcgagcagctggtggccaggtccaacatcatgaccctgctgtttcagtgcatgcaagactctatgccagaggtgagacaatccagttttgccctgcttggggatctgacaaaggcctgcttcattcatgtgaaaccctgcatagctgagtttatgcctatcctcggcactaatttgaacccagagttcatcagcgtttgtaataacgctacctgggccattggcgaaatctgcatgcaaatgggagctgaaatgcagccatacgtccagatggttctaaacaatctcgtcgagatcatcaatagacctaacacccccaaaaccttgttggagaatactgcaatcacaattggacggttgggttacgtttgtccccaggaggtcgcccccatgcttcagcagtttattcgaccctggtgcacctccctcagaaatattagagacaacgaagaaaaagactccgcttttagaggcatttgtatgatgattggcgttaaccccggcggagtggtacaagacttcatttttttttgcgatgcagttgccagctgggtgagccctaaggacgacctcagggacatgttttacaagatcctgcacgggtttaaggaccaggttggagaagacaactggcagcagttctccgagcagttccccccgcttttgaaggagagattggcagcattctatggcgtttag

SEQ ID NO: 138707 - DNA, 2316 bp, synthetic construct
  misc_feature 1..2316: note = Description of Artificial Sequence: Synthetic coding sequence
  source 1..2316: mol_type = other DNA
atggattggcagccagatgagcaggggctccaacaggttcttcagctgctgaaagatagtcagagccctaatacggccacacagaggatagttcaggacaaacttaagcagctaaatcaatttcctgatttcaacaattacctcattttcgtcttgacacgcctcaagtccgaagacgagcccacccggtccttgtctggactgattctcaaaaacaacgtgaaagcacactatcagtcttttccaccaccggtggccgacttcatcaagcaagagtgtctgaataacatcggcgacgcttcgagcctgatacgggccaccattggaattcttataaccaccattgcttctaagggggagctgcaaatgtggcccgagctgcttccacagctgtgcaacctgttgaattctgaagactacaacacttgcgagggtgcctttggggccctgcaaaagatttgtgaggattcttctgaactcctcgactccgacgctcttaatcgtccattgaacatcatgattcctaaattcctccaattttttaagcattgttctccaaagattcggtcccatgctattgcctgcgtgaatcagttcatcatggaccgagcacaggcattgatggataacattgacacgttcatagaacacttgtttgctcttgccgtcgatgatgatcccgaggtccggaaaaatgtctgccgagctctcgtcatgcttctggaggttcgcattgatagattgatcccacacatgcacagcattatccagtacatgctccagcgaacgcaggatcatgacgaaaatgtggcactcgaggcgtgtgaattctggctgacactagccgaacagccgatctgcaaggaagttctggcaagccacctggtccagctcatccccatccttgttaacggtatgaagtacagcgagatcgatatcattttacttaagggggacgtggaggaggacgaggctgtacccgattcagagcaagatatcaagccgagatttcacaagtctcgcaccgtcactctgcctcatgaggcagaacggccagacggctcagaagatgcagaggatgacgatgatgacgatgccctgagtgattggaatctgagaaagtgctcggctgctgcgttggacgttttggcaaacgtcttcagggaagagctgctgccccacctactccctcttctgaaagggctcctttttcaccccgagtgggttgtgaaagaatcaggcattcttgtgcttggagccatagcagagggttgtatgcaaggaatggtaccatatctgccagagctaatcccacacctgatccagtgcctgtccgataaaaaagcgctggtccgctccattgcctgttggacactctccaggtacgcccattgggtagtgtctcagcctcctgatatgcatctgaagccactgatgaccgagctgctcaaaaggatactggacgggaacaaacgagtgcaggaagccgcttgttcagcatttgcaactttggaggaagaagcctgtaccgagctcgttccatatctgagctacatactggatacactggttttcgctttcgggaaatatcaacacaagaacctcctcatactgtatgatgcaatcggaacgcttgccgactcagtgggtcaccacttgaaccagccagagtacatccaaaagcttatgcccccattgatccagaagtggaacgagcttaaggatgaggacaaggacctctttcctctcttagagtgtctgtcctctgtggctacggctctgcagtccgggttcctgccctactgcgagcctgtgtaccagagatgtgtcacgctggtgcaaaagactcttgcccaggccatgatgtatacccagcatcccgaacagtacgaggcccctgacaaggatttcatgatcgttgccctggacctgctctccgggcttgcagaggggctgggcgggcacgtagagcagctggtcgcccggtcaaatatcatgactttgctgttccagtgcatgcaggattctatgccagaagtccggcagtcttcgtttgccctgctgggagaccttactaaggcatgcttcatccatgtgaagccatgcatcgccgagttcatgcctatattaggaaccaatctgaatcccgagttcatttctgtctgtaacaacgctacctgggcaattggggagatatgtatgcagatgggcgctgaaatgcagccatacgtgcaaatggtactgaacaacttggtggaaattattaaccgtcctacgccgtctcagaaacagaataagactaagaagaacaagtag

SEQ ID NO: 138708 - DNA, 2772 bp, synthetic construct
  misc_feature 1..2772: note = Description of Artificial Sequence: Synthetic coding sequence
  source 1..2772: mol_type = other DNA
atggagggtgccaagcctactttacagctggtgtatcaagcagtgcaagcactgtaccacgatccagaccctagcggaaaggaaagggcctctttctggttgggtgagctccagagaagtgttcacgcctgggaaatcagcgaccagctcctacagatccggcaagatgtcgagtcctgctacttcgccgcccaaacaatgaagatgaaaattcagacctcattttacgagttacccacagactcccatgcttcacttagggattcactgctgacccatatccagaacctcaaggatctgagccctgtaatcgtaacacagttagcactcgccatcgcggatctcgcactgcagatgccatcatggaaaggatgcgtacagaccctcgtcgaaaaatattctaacgatgtcactagcctgcccttcctgctggagatcctgactgtgctgcccgaggaggtgcacagcaggtccctaaggattggtgccaatcgcagaacagaaattattgaggatctcgcattttactcaagcactgtcgtgagcttacttatgacttgtgtggagaaggccggtactgacgagaaaatgttgatgaaggtctttcgatgccttggatcttggtttaacctcggcgtgctggacagcaacttcatggccaataacaaacttttggctttgttgttcgaggtcctgcagcaggataagacctccagtaaccttcatgaggctgctagcgactgcgtctgttccgcgttatatgccatcgagaacgtggagaccaaccttcccttagccatgcagctttttcagggcgtgcttacgctcgagaccgcttaccacatggcggtggctcgcgaagacttggataaggtgctcaattactgcagaattttcacggagttatgtgagaccttcttagagaaaatcgtttgtactccaggccaaggactgggcgatttgcggacactagaactgctgctgatttgtgcaggacatccacagtatgaggttgtagagatatcattcaacttttggtatagactcggcgaacatttgtataagacgaacgacgaggtgatccacggcattttcaaggcttatatccagcggctactccacgcattggcccgtcattgtcaactcgagcctgaccatgagggggtgcccgaagagaccgatgatttcggtgaattccgcatgagagtatcggatttggtcaaagacctgatcttccttatcggctccatggagtgctttgcccagctgtacagtacgcttaaggaaggcaatccaccttgggaggtgaccgaggccgttttatttatcatggctgccatcgcgaagtctgtggaccccgaaaacaatccaactctcgtggaagtgctggaaggagtcgtgcggctgcctgaaaccgtccacacggccgtgagatacactagtatcgagctggtgggcgagatgtccgaagtggtggaccgaaatccccagttcctcgatcccgtcctggggtatctcatgaaaggtctgtgtgagaaaccactggcctcggccgcggccaaggccatacacaacatttgtagtgtctgcagggaccacatggcacaacactttaacggcctgctggaaattgctcggtccctggacagctttttactaagtcctgaagctgcagtgggcctgctgaaagggacagcactagtcttagcccgtctgcccttggacaaaattacagaatgcctatcagaattgtgttctgtgcaggtgatggccctgaagaagctgttgtcacaagagccgagcaacggcatctcatccgacccaaccgtgttcctggacagactggctgtgatcttcaggcatactaaccctatagtagaaaatggacagacgcatccctgtcagaaggtgattcaggagatctggccagttctgtctgagacacttaacaaacatcgtgcagataatcggattgtagagcggtgctgtcgttgcctgcgctttgctgtccgttgcgttggtaaggggtccgcagctctcctgcaacctttagtcacccagatggtcaacgtttatcacgtgcaccagcatagttgcttcctgtacctggggtccattctggtggatgagtatggtatggaggagggctgtagacagggccttctagacatgctgcaggcattgtgcattcctacctttcaacttctggagcaacagaatgggctgcagaaccacccagacactgtcgatgacctgttccgtttggctaccagattcatacagaggtctccagtgacactactgaggagtcaggtggtcatccctatcctccagtgggccatcgctagtactaccctcgatcacagagatgccaactgctccgtgatgcgctttctgagggacctgatccacacaggagtcgcgaatgatcatgaagaggatttcgagctgaggaaagaactcattggacaggtcatgaaccagctcggccagcagctagtatctcagctccttcacacgtgctgcttctgtctgccaccttatactcttcctgacgtcgcggaggtcctgtgggaaatcatgcaggttgatcgtcctaccttttgcagatggctcgagaactccctgaaggggctccccaaggagacaacggtgggggccgtgaccgtgacgcacaaacagctgactgattttcataagcaggtcacctcagcggaggagtgtaaacaggtgtgctgggcacttcgagactttacacgactgttccgctag

SEQ ID NO: 138709 - DNA, 2874 bp, synthetic construct
  misc_feature 1..2874: note = Description of Artificial Sequence: Synthetic coding sequence
  source 1..2874: mol_type = other DNA
atggagggggccaagcctacactccagcttgtgtaccaggcagtgcaagccctttatcatgatccagacccatctggtaaggaaagagcaagcttttggctgggagagttacaacggagcgtgcacgcttgggagatctccgaccagttgctgcagatccgtcaagatgtggagagttgctacttcgcggcccagactatgaagatgaaaattcagacctcattctacgaattacctactgactctcatgcaagcttgcgggactcccttttgactcatatacagaacctaaaagacctcagcccagtgatcgtgacacagctagcactcgcaatcgcagacctagccctgcagatgccatcttggaagggatgcgtccagaccctggtggagaaatacagtaacgatgtgaccagtctacccttcctcctggaaattcttaccgtgcttcccgaggaagtgcattctaggtccctgcgaattggggctaacaggaggacggagattatcgaagacctcgcattttattcgtcaacagtcgtctcactgcttatgacttgtgtggagaaggccggcacagatgagaagatgctgatgaaggtgtttagatgtctggggtcctggttcaatctcggcgtcctagattctaattttatggctaataacaagctcctggctttactgtttgaagttttgcagcaggataaaacttctagtaatctgcatgaagccgcttcggattgtgtgtgcagtgcgctgtacgcgatcgaaaacgtggagacaaacctgcccctggcgatgcaacttttccagggagtgcttacattggagactgcttatcacatggcagtcgcaagagaggacttggacaaagtgctgaactactgccggatattcaccgaactttgtgaaactttcctcgagaagatcgtgtgtaccccagggcaaggtctgggcgacctgcgtactctcgagcttctgctaatttgcgcagggcacccacagtacgaggtggtggaaatcagttttaatttttggtacaggttaggggaacatttgtacaaaactaatgatgaggtaatccatggcatatttaaggcgtatatacagcgactgttgcacgcccttgcgagacattgccagctcgagccagaccatgaaggggtccccgaggagacagatgactttggggaattcaggatgcgtgtgtccgatttggtgaaggacctcatctttcttatcgggagtatggagtgtttcgcgcaattgtattccaccctcaaggaaggaaatccaccatgggaggttaccgaggctgtgttgttcatcatggccgccatcgccaaatcagtggaccccaagaaaccattctcgaatgcggtgtgtcggcacagcttgctgttcgggcaaaatatcacctctgagatatcaaactgtgagtatttgcctccagtactgcgagaaaataaccccaccctggtcgaggtgctagaaggagtcgtcagactccctgagacagtgcacaccgctgtgaggtatacaagtatcgagctggtgggtgaaatgagcgaagtcgtcgacagaaacccacagtttcttgatcccgtcctaggatatctaatgaaggggctttgtgagaagcctctcgccagtgccgcagcgaaggctatccacaatatctgcagtgtgtgtcgcgatcatatggctcagcacttcaacgggctccttgagatcgcccgctctctggattcatttctgctgagtcctgaagcggcggtggggctattgaagggcacagccctggtgctcgctaggctgcccctggacaagataaccgaatgcctgtccgagctgtgtagcgtccaggttatggcccttaagaagctcctaagccaggagcccagtaatggtatcagcagtgatccaactgtgtttctggaccggttagctgtcatttttcgacacacaaatcctattgttgagaacggccaaacacacccctgtcaaaaagtcatccaagaaatctggccagtcctctctgagacactcaataaacaccgcgctgacaacagaatcgtggagagatgctgtcgctgcctgaggttcgccgtgagatgtgtgggcaaggggagcgctgctcttcttcagcctttagtgactcagatggtcaacgtgtaccatgtacaccaacacagctgcttcctgtacctgggaagtatcctggtcgacgaatatgggatggaggagggatgcagacagggcctgctcgacatgctccaggccctctgtattcccacatttcaattacttgagcagcaaaacggcctgcagaatcacccagacacagtggacgacctgtttaggctggcaaccagattcatccagagatcacctgtgacactgcttcggtcccaggtggtcatacctatcctgcagtgggcaattgcttcaacaacactcgatcatcgggatgcaaattgttccgtcatgcgttttctgagagacctaatccacactggggtggccaatgaccatgaagaagacttcgaactgcgaaaagagttaataggacaggtgatgaaccagctgggccaacagttggtgtctcagctgttacatacatgctgcttctgcctccccccctatactctgccagacgtggcggaggtgctgtgggagataatgcaggtcgacagacccaccttttgtagatggctcgaaaattctctgaaggggctgcccaaggaaactacagtgggggcggtgacagtgactcacaagcagctcaccgattttcacaaacaggttacatccgccgaagaatgcaagcaggtgtgctgggcactacgggacttcactcggttgttccggtag

SEQ ID NO: 138710 - DNA, 2874 bp, synthetic construct
  misc_feature 1..2874: note = Description of Artificial Sequence: Synthetic coding sequence
  source 1..2874: mol_type = other DNA
atggaaggcgctaagcctacattgcagctggtgtatcaggccgtgcaggccctgtatcacgaccctgacccctctggcaaggaacgcgcgtccttttggcttggtgagctccagcgctctgtacatgcctgggagataagcgaccagttgttacagatcagacaagatgtggaatcttgttacttcgctgcacagaccatgaaaatgaagattcagacatccttttacgagttgcccaccgattcacacgcctccctcagagacagtctgctaacacacattcagaatttgaaagatctgtccccagtgattgttacccagttagccctggcgatcgccgacttagctcttcagatgccgtcttggaagggatgtgtgcagactttggttgaaaagtactccaatgatgttacctcactaccattcctcttggaaatcctgacagtactgcctgaagaagtacactccagatccttgcgcatcggggctaaccgccggacggagatcattgaagacctggcattctattctagcaccgtagtgtctttgttgatgacatgcgttgagaaagctggaacagatgagaagatgttgatgaaagtattccggtgtttgggttcgtggttcaatctgggggtactggattctaactttatggccaacaataaattattggctctgctttttgaggtgctgcagcaggataagacatctagtaacttacatgaagcagcaagcgattgcgtctgtagtgccctctacgcaatcgagaacgttgagaccaacttacctctggctatgcagctttttcagggcgtgttaaccctagaaacagcttaccacatggctgtagctagagaggatctggacaaagtgctgaactactgtcggatttttaccgagctctgcgaaaccttcttagagaagatcgtgtgtaccccaggtcaaggactgggtgacctgaggactttggagctcctgctgatctgcgccggtcacccccaatatgaagtggtggaaatctcttttaacttttggtatcgcctaggggaacacctgtataaaactaatgatgaagtaattcacggcatcttcaaggcatacattcagagattactgcacgccctggcgcgacactgccagcttgagcctgatcatgaaggcgtacctgaagagaccgatgacttcggagagtttcgtatgcgcgtgtctgatctggtgaaggatctcatctttttgatcggatccatggagtgttttgctcagttatactcaacccttaaagaaggcaaccctccttgggaagtaaccgaagccgtactgtttatcatggccgctattgccaaatctgtcgacccgaaaaagcctttctccaatgcggtgtgtaggcattccctgctgtttggccaaaacattacaagcgagatcagcaactgtgagtatctgccccccgtccttagggaaaacaaccccacattggtggaggtgctagagggcgttgtgaggctcccagagacggttcacaccgcagtacgatatactagcattgagctggttggagagatgtccgaagtggtggaccgaaatcctcaatttctcgacccggtacttggatacctaatgaagggactttgcgaaaagcccctcgcatctgcggctgctaaagccatccataacatctgcagcgtatgccgggaccatatggcacagcacttcaacgggcttcttgaaattgccagatctctggactcctttcttcttagcccggaggctgctgtgggtttgctcaaaggcactgcactggtgctcgcacggttacctttggataagattacagaatgtctgtcggagctatgttcagtgcaggtgatggctctcaagaagcttctgagccaggaacccagcaacgggatcagttctgaccctactgtctttttagataggcttgcggtgattttccgacacacgaaccccattgttgagaatggccaaacccatccttgtcaaaaagtcattcaggagatatggcctgtgctctccgagaccttgaataaacacagggctgacaacagaatcgttgaacggtgctgccggtgcctgaggttcgccgtgagatgcgtggggaaaggcagcgctgctttactgcagcccctcgtcacacaaatggtgaacgtctatcacgtgcaccagcattcttgctttctctatttaggttccatcctggtcgatgaatacggtatggaagaaggctgtcgtcagggtcttctggatatgctgcaggctttgtgcattccaaccttccagctcttagagcagcaaaacggcttacaaaaccaccccgacaccgtggacgacctgtttagactggccacccggttcattcagcggtctcctgtgacccttttacggtctcaggttgtcattcccatcctgcagtgggccattgctagtacaaccctggaccacagagacgcgaactgttcagttatgcggttccttcgagacctgatccacaccggggtggctaatgaccatgaagaagacttcgaactgcggaaagaactcattggccaagtcatgaaccagttgggccaacagcttgtaagccagcttctgcacacctgttgcttttgcctaccaccctatacacttccagacgtggctgaggtattgtgggaaatcatgcaagttgataggcccactttttgccggtggctcgagaatagtctgaaaggtttgcctaaggagaccacggtgggcgcagtgactgtgactcataaacagctcacggactttcacaaacaggtcacatctgcagaggagtgcaagcaggtctgctgggcacttcgggattttactaggctttttagatag

SEQ ID NO: 138711 - DNA, 2580 bp, synthetic construct
  misc_feature 1..2580: note = Description of Artificial Sequence: Synthetic coding sequence
  source 1..2580: mol_type = other DNA
atggaaggtgctaagccaactttacagctggtctaccaagcagtgcaggccctgtaccatgatcctgaccccagcggcaaggagcgagctagcttttggctcggtgagctgcagagatccgtgcacgcctgggaaatctctgatcagctcctccaaatcagacaggacgtcgagtcttgttacttcgccgcacagacaatgaaaatgaagatccaaacttcattctatgagctcccgactgattcccacgcaagcctaagggactctctgttgacccatatccagaatctcaaggacttatcaccagttatcgttactcagctcgccctcgcaatcgcggatctggctctccaaatgcccagctggaaggggtgcgtccaaacactcgtggagaagtactctaacgatgtgacaagcctcccctttctcctggaaattctgacagtgttaccagaagaggtgcactccagatcactaagaatcggggcaaatcgccggactgagataattgaggacctcgccttctacagctcaacagtagtttcgctgctgatgacttgcgtcgaaaaggcaggcaccgacgaaaagatgctcatgaaagtgtttcggtgtctgggatcttggttcaatctgggtgtgctcgacagtaatttcatggcgaacaataaattattagcgctactttttgaggtgttgcaacaagacaaaacctcctctaacctacacgaggccgcctcggactgcgtgtgcagcgcactctacgcgattgagaacgttgaaaccaatctgcccttagccatgcagttattccagggcgtgctaaccctcgagaccgcttatcatatggccgtggcccgggaagacctcgacaaagtgcttaattattgtagaatttttaccgagctctgcgagaccttcctcgaaaaaatagtgtgcacacctggccaggggctgggagatttgcggacactggaattgcttctgatctgtgccggccacccacaatatgaagttgtcgaaatcagctttaacttctggtaccgactcggggaacacctgtataagaccaacgatgaggtcatccatgggattttcaaagcctacattcagagacttctgcatgcactggcccgtcactgtcaactggagcctgatcacgagggggtcccggaagaaacagacgacttcggagaatttcggatgagggtgtctgacctggtcaaggacctgatattcctgatcggctccatggagtgttttgcccagctgtatagcactcttaaagaaggaaacccgccctgggaagtcactgaggcagtgcttttcatcatggcagccattgcaaaatccgtggacccggaaaacaacccaacactcgtcgaggttcttgagggcgtagttcggcttcccgagaccgtgcacacggccgtgcgctatactagcatcgagttagttggggagatgtcagaagtggttgatagaaaccctcaatttctgggcaccgctctcgtcctggcgagactcccacttgataagattacagagtgcttatccgagctctgctccgtccaggtgatggcactcaaaaaactgctgtctcaagaaccctcaaatgggatctcttcggatcctacagtgttccttgatagacttgcggtgatatttaggcacactaacccaattgtggaaaacgggcagacccatccctgccaaaaagtgatccaggagatctggcctgtgttatccgagactctgaacaaacatagagccgacaacagaatcgtggagcgctgctgcaggtgcctgcggtttgccgtgcgctgtgtgggaaagggctctgccgcactgttacagccactggtgacccagatggtaaacgtgtatcatgtgcaccagcatagttgtttcctctacctcggatccattctggtggatgagtacgggatggaggaaggctgtagacaaggactactggatatgctgcaggcattatgtatcccgacctttcagctactggaacaacagaacggccttcaaaatcaccctgacactgtcgacgacctcttccgtcttgccacaaggttcattcagcgaagtccagtgactcttctcaggagtcaggtggtgatcccgatcctccagtgggcaattgcctctaccaccctggaccacagggatgcgaattgcagcgtcatgaggtttctgcgcgaccttatccacactggggttgccaatgaccatgaagaggattttgagcttcgtaaagagctgatcggccaggtgatgaaccagctgggacagcaactggtgagccagctgttgcacacttgttgcttctgcctacctccgtacacgctgccggatgtggctgaggtgctctgggaaataatgcaggtagataggcctaccttttgtaggtggcttgaaaattccttaaaaggccttccaaaggaaactacggtgggcgctgttactgtgacccataagcaacttactgactttcacaaacaggtgacgagcgctgaagagtgtaagcaggtttgttgggcactccgcgactttacccgcctgttcagatag

SEQ ID NO: 138712 - DNA, 4236 bp, synthetic construct
  misc_feature 1..4236: note = Description of Artificial Sequence: Synthetic coding sequence
  source 1..4236: mol_type = other DNA
atggccgaggccaggaaaaggagagagcttttgccactaatttatcatcacctgctcagggcaggatatgtgcgagctgctcgtgaggttaaggaacagagtggccagaaatgtttcttggcacagcccgtcacccttctggacatctacacccactggcagcagacgtctgaactgggccggaaacgcaaagctgaggaggatgcagcgcttcaggctaaaaaaacgagggtgtccgatcctatctcgacatccgaatcctcagaggaagaggaagaggctgaggcagaaacagccaaagccactcccaggcttgcaagcacaaatagctcagtgttaggggcggacctccctagttcaatgaaagagaaggctaaagcagaaacagagaaagcagggaagacgggtaattccatgccccaccccgctacaggcaagaccgtagcgaatctgctgtccgggaagtccccaagaaaatccgccgaaccttccgcaaatactaccctcgtgtctgaaaccgaggaggagggttccgtgccggctttcggagcagccgctaaacctgggatggtgtcagctggtcaggctgattcttctagcgaagatacatctagcagctctgacgagacagacgtagaagttaaggcttccgagaaaattctgcaggtgcgggccgcatccgcgcccgctaaggggacccctggaaagggtgcgacaccagcccctcccggaaaggccggagcagtggcttcccagactaaagccggcaagcccgaggaagactctgaatcatcttccgaggaaagcagcgatagtgaggaagaaacaccagctgcaaaggcgcttctccaagctaaagcgtcaggcaagacctcccaagtgggtgccgcctctgctccagccaaggagtctccgagaaagggtgctgcgccggcacctccaggaaagaccgggcctgccgtcgcaaaagctcaggccggaaagagagaggaggactcacagtccagcagtgaagaatccgacagtgaagaagaggctccagctcaagctaaaccgtcagggaaggccccacaggttcgcgccgcttccgccccggcgaaagagtctcctcgtaaaggagctgcaccggcaccacctcgcaaaacaggtcccgcagccgctcaagtgcaggttggaaaacaggaggaggatagcagatcttcttccgaggagagtgatagcgatcgagaggccttggcagctatgaacgctgcacaggttaagcccctgggaaaatctccccaagtcaaaccagcatctacaatgggaatgggcccacttggtaagggggctgggcccgtaccgccggggaaggtcggccccgccacacctagcgctcaggtcggcaaatgggaagaggatagcgagtcctcgtccgaagaaagtagcgatagctctgatggtgaagtgcctacggccgtggcccccgcgcaggagaagtccttagggaatatcctgcaggctaagcccacctcctcaccagccaaggggcctccgcagaaagctggaccagttgctgtccaggttaaggccgagaaaccaatggacaacagcgaaagttctgaggaaagttccgactccgcggactctgaagaggcgccagccgcaatgacagctgcacaagctaagccggcgctcaaaattccgcagactaaagcctgtcccaagaagaccaataccaccgcaagtgctaaggttgctcccgtacgtgttggtacccaggcccccaggaaggccggaaccgccacttcccccgccgggtcaagccccgcagtggccggggggacacagcggcctgcagaggactcatcttcatcggaagagagcgactctgaagaggaaaagacagggctcgctgtaactgtcggccaggctaagtcagtgggtaagggcctccaggttaaagccgcctccgtgcccgtaaaagggtctcttggccagggcacggcacctgtcctgcccggtaaaactggcccgactgtcacccaggtcaaagctgagaaacaggaagacagcgaatcttccgaagaggaaagtgacagcgaggaggccgctgcgtccccagcccaagtcaaaacttcggtgaagaagacccaagccaaggcaaatccagccgcggcccgcgctcccagtgccaaaggcacaatatccgcacccggtaaggtggttaccgctgccgcccaagctaaacagagatccccctctaaggtgaagccccccgtccggaacccccaaaatagtacagttctggctcgcggcccggcatccgttccatcagtgggaaaagctgtcgcgacagccgcacaggctcaaaccggaccggaggaagattccggaagttcagaggaagaaagcgactcggaagaagaggccgaaacattggcgcaggtcaagccatcggggaaaactcaccagattagggccgccctggcacccgctaaggaatcacccagaaagggtgctgcacccacacctcctggcaagaccggaccgtctgctgcacaggccggaaagcaagacgacagtgggtcatcatcagaagagtcggacagtgacggggaggctcccgctgccgtaacttccgcccaagtgattaaaccccctctcattttcgttgaccccaaccgctccccagcaggacctgctgcaactcctgcccaagcacaagccgccagcacccccagaaaggctcgggcctcagaaagcactgcccggtcatcctcatccgagtctgaagacgaggatgtaattccagcaactcaatgcttaacaccaggcatacggaccaacgtcgtgacaatgcccactgcccaccctcgcatcgcaccaaaagctagcatggctggcgcgtcaagcagtaaagagagtagccggattagtgacggcaagaaacaggaagggcccgctacacaggtgagcaaaaagaaccccgccagtcttcctttgactcaggcagcactgaaggtgttggcacagaaggccagcgaggcgcagcccccggtggcccgcacacagccgagtagtggcgtggattccgccgtcgggacccttccagctaccagcccacagtcaaccagtgtccaggcgaaaggtaccaacaagttgcgaaagcctaagctgcccgaggtccagcaagcaactaaggcaccagagagtagtgacgactcagaagacagcagcgatagcagctccggcagtgaggaagacggcgagggtccccagggtgctaagtccgcccacaccctgggccccactccctcccgcaccgagaccctggttgaggaaactgctgccgaaagttcagaggacgacgttgtggctcccagccagtcccttctctccgggtatatgacacccgggctgacgcctgcgaacagtcaagcctccaaggccacacctaaactggactcctcccctagtgtgagcagcactctcgctgccaaagatgacccagatggaaaacaggaagccaaaccccagcaggccgctggcatgttaagcccgaagacagggggtaaggaggcggccagcggaacaacaccccaaaagtctaggaaaccaaagaaaggggctgggaaccctcaggcttccacactggcactgcagtcaaatattacgcaatgcctgctgggccagccatggccactgaacgaggcccaggttcaggcttctgtggtaaaggtgctcaccgaactgcttgagcaggaacgcaaaaaggtggtggacaccaccaaagaaagctccagaaagggttgggaatcccggaagaggaaattgagcggcgatcaacccgcggccaggacccccagatccaaaaagaagaaaaaactgggcgctggtgaaggcggcgaagcttcagtgtcccctgaaaagacaagcactactagtaagggcaaagcaaaacgcgacaaggctagcggtgatgtcaaagagaagaagggcaagggcagtcttggatcccaaggcgccaaggatgaacctgaggaagaactccagaagggtatgggaaccgtcgaggggggagaccagagcaacccgaaaagtaagaaggaaaaaaagaagtccgacaaacgtaagaaggacaaggaaaagaaggagaagaaaaaaaaggctaagaaggccagtacaaaagacagcgagagccctagtcagaagaagaagaagaaaaaaaagaaaactgcagagcaaacagtctag

SEQ ID NO: 138713 - DNA, 4470 bp, synthetic construct
  misc_feature 1..4470: note = Description of Artificial Sequence: Synthetic coding sequence
  source 1..4470: mol_type = other DNA
atggcagaggccaggaaacggcgcgaactgctccccctcatttatcaccacctgctgcgcgctggctacgtgcgggccgccagggaagtgaaggaacagtcaggccagaaatgttttctggcccagcccgtcaccctcctcgatatatacactcactggcagcaaacaagcgagctgggccggaagaggaaagctgaagaagatgccgccctgcaggctaagaagacccgagtcagtgatcctatttccaccagtgagagcagcgaagaggaggaggaagccgaagctgagactgcaaaggccactcctcggctcgcctctaccaactcctcagtgctaggcgctgacttgccttctagtatgaaagaaaaggcgaaggcggagacagaaaaagcaggaaagaccgggaattctatgccccacccggcaactggaaagaccgtggccaatctactgtctggcaaatctcctcgaaagtctgcagaaccttccgctaacacaactctagtatccgaaactgaagaggaagggtccgtgcctgcgtttggcgccgccgccaaacccggcatggtctccgccgggcaagcagactcctcaagcgaagataccagttcctcctccgatgaaaccgacgtggaaggaaagcctagtgtgaaaccagcccaagtgaaagccagttctgtttcaaccaaggagtccccagccaggaaggcggctcccgcacccggcaaagtgggtgatgtgactcctcaggtaaaggggggggcattacccccggcaaaacgggccaagaagcctgaggaagagtcagagtcctctgaggaggggtctgagtccgaggaagaggcgcccgcaggtacccgcagccaagtcaaggcttctgagaaaattttgcaggtgagggccgcttccgcgcccgccaaagggacaccaggcaaaggtgccaccccggctccgccaggcaaggctggtgcagtagccagtcagaccaaggccggtaaaccagaggaggactcagaatcctcatccgaggaaagctccgactcagaagaggaaaccccagcagccaaggcacttctgcaagccaaagcctccggtaaaacatcccaggtgggcgccgcatcggccccagcaaaagaatcaccaaggaagggggcggcacctgcccctccaggcaaaacaggacctgccgtggctaaggcccaggctggtaaaagggaagaagatagccaatcctcaagcgaggagagcgacagcgaggaggaagccccagcccaggcaaagcctagcgggaaagcacctcaggttcgcgctgcaagcgcacctgctaaggaatcaccaagaaagggggccgcccctgctccacctcggaagactggtccagctgctgcccaggtgcaggtgggaaaacaagaggaagacagtagaagctcctctgaagagtcagactcagatagagaggctctggccgcgatgaacgccgctcaagtgaaaccacttgggaagtcaccccaagtcaagcctgccagtaccatggggatggggcccctgggcaagggtgcgggccctgtcccaccgggtaaggttggccccgctactccctctgctcaggtggggaagtgggaggaagatagcgagtccagtagtgaagagagttccgacagtagcgatggcgaggtgcctaccgcagtagcaccagcacaagaaaagagcttggggaacatccttcaggcgaagccaacaagctcccccgccaagggccctcctcagaaggctggtcctgtggccgtacaagtaaaggctgaaaaacctatggacaactccgagtcaagtgaggaaagctccgattccgctgactcggaggaggcccctgccgccatgacagccgcacaagctaaacccgcattgaagataccacaaaccaaggcctgcccgaagaagacaaatacaactgcatctgctaaagtggcccctgtacgcgttggaacccaggctccacgcaaagcagggacggctacttctcccgccggtagttcacccgccgtggccggcggcacacagcgccccgccgaagacagttcatcttccgaggaatcagattcggaagaggaaaagaccgggcttgctgtaacagtgggccaggcgaagagcgtgggcaagggtctccaggtgaaggctgcttcagtacccgtgaaaggcagccttggacagggcacggcacctgtactgcctggtaagaccggaccgaccgtgacccaggtgaaggctgagaagcaggaggactctgagagttcagaagaggagagtgactccgaggaagcggccgcttccccagcccaggtgaaaacctccgtgaaaaagacacaggcaaaggctaatcccgccgcagcgcgggccccaagcgctaagggcacaatttctgccccaggtaaagtggtgactgctgcagcccaggcgaaacaacggtctccttcaaaggtcaaacctcctgttcgcaacccacagaatagtacagtgcttgcccggggtccagcctccgtaccctccgttgggaaggctgtggccaccgccgcacaagcccagactgggcctgaggaagactctgggtcatcagaggaggagagcgatagtgaagaggaagctgaaacattggcgcaggtaaagcctagtgggaaaacacaccagattagagctgccttggcacccgctaaggagagtcctcgcaaaggcgcagctcctacccctcccgggaaaacgggcccctcggctgcccaggcaggcaagcaagacgacagtgggagttcttcagaagaatctgacagcgacggcgaagcccctgctgcggtcacatcagcccaagtgatcaagcctcccctgatattcgtggacccaaatcgtagcccagcaggccccgccgcaactccagcccaggcccaggcagctagcacgccgcgcaaagcgagggcctcggagtctactgctcgcagttcaagcagtgagagtgaggatgaggacgtgattcctgctactcaatgtttaacaccagggatacgaaccaatgtggtcacgatgcctactgctcaccccaggatcgctcctaaggctagcatggcgggcgcttcaagttctaaagagagctctaggatctccgacggcaagaaacaggaggggcctgcgacgcaggtctctaaaaaaaatccagccagcctgcctttgacccaagccgctttgaaggtgctcgctcaaaaggccagcgaggctcaacctccagtggcaaggacacagccatccagcggtgtggattctgccgtgggaaccttgcccgccaccagcccccaatctacgagcgtgcaggccaagggaactaataaactacggaagccaaagttgcctgaggtccaacaagctactaaggcacctgagtcctccgatgacagtgaggattccagcgactcctcctctggatctgaggaagacggcgaaggtccacagggagccaaaagcgctcacacactcgtgggcccaaccccatcccgaacagaaacccttgtcgaagagaccgccgctgagtcctcagaagacgacgtggttgcccctagccagtccttgctttccggctacatgacccctggcctgactcccgccaattctcaggcatctaaggccacacccaaactggacagttccccatccgtgtcatccaccctcgccgcgaaggatgaccctgacggaaaacaggaggctaaaccccaacaggctgctggcatgctgtccccaaagacaggcgggaaggaagccgccagtggtactactcctcaaaagtcaaggaaacccaagaaaggagcgggaaaccctcaggcttccactctcgcgctccagagtaacataacccagtgtttgctggggcagccctggccactgaacgaggctcaagttcaggcctctgtggttaaggtgttgaccgagttgctcgaacaagagcgcaagaaggtcgttgataccaccaaggagagctcaaggaaaggatgggagtcccgcaagcgcaaattatccggggatcagcccgccgcacgtacaccccgcagcaaaaaaaagaagaagctaggagccggcgaaggcggcgaagctagtgtgtctcccgagaaaaccagtaccactagcaagggaaaagccaagcgggataaggcgagcggagacgtgaaggaaaaaaagggcaaaggctcactgggatcccaaggcgcgaaagacgagcctgaagaggagctgcagaaaggaatgggcaccgtggaaggcggtgaccagtccaatcctaaatccaaaaaggagaagaagaagtcggataaaagaaagaaggataaagagaagaaagaaaagaagaagaaggcgaagaaggcgagtactaaggactccgagagtccttcacaaaaaaagaagaagaagaagaagaaaactgccgagcagactgtttag

SEQ ID NO: 138714 - DNA, 2877 bp, synthetic construct
  misc_feature 1..2877: note = Description of Artificial Sequence: Synthetic coding sequence
  source 1..2877: mol_type = other DNA
atggcagaggcgagaaagagacgagagttactgccactgatttatcaccacctgctccgcgccgggtacgttcgagctgcccgcgaagtgaaagagcagtctggacaaaagtgcttcctggcccagccagtgacacttctggacatatacacccactggcaacagacctcggagttgggtcggaaaagaaaggcggaagaggatgccgcgctgcaggctaaaaaaaccagggtgtcggacccgatcagcactagcgagtcttcggaggaggaggaagaggccgaagcagagacagcgaaagcaaccccccggctggcatccaccaacagcagtgtactaggggccgatctgcctagttccatgaaggagaaggcaaaagccgagaccgagaaagccggcaagaccggtaacagcatgcctcaccctgcaactggaaaaaccgtcgctaacctgttgtccgggaagagtcctagaaagagcgctgaaccttctgccaatacaacacttgtaagcgagactgaggaggagggatctgtgcctgccttcggcgccgctgccaaaccggggatggttagtgcaggccaggccgattcaagctcagaggacacatcctcttcttccgacgagaccgacgttgagggcaagccgtcagtgaaacctgcccaggttaaagcatcaagcgtgtccacaaaagaatcccccgcacgcaaagccgctccggcccctgggaaggtcggtgacgtcactcctcaggttaagggtggcgccctgccacctgccaaacgtgctaagaaaccggaagaggagtccgaaagctctgaagaaggatccgaatctgaggaggaagctccagcgggaacccgtagccaggtaaaagctagcgaaaagatattgcaagtgagagcagccagcgctcccgcaaagggaacccctggaaagggagctactccagcacctccgggaaaagccggggctgtggcatcccagacgaaagcagggaagcctgaggaagactctgagagttccagcgaggagagctccgatagtgaagaagagactcccgctgctaaagctttgctgcaggctaaggcttccgggaagacatcccaagttggcgccgcttcagctcctgctaaagaatcaccccggaaaggcgccgccccagcacctccaggtaaaacaggacctgcagttgctaaggctcaggccggaaaacgcgaggaagacagtcaatcaagctccgaagaatctgatagtgaggaagaggctccggcacaggcgaaaccatctgggaaggccccacaagtgagagcagcctcagcccctgcaaaggagtcccctcgtaagggcgccgctccagccccgcctcgaaagaccggtccggctgccgcccaagtgcaggtgggtaagcaggaagaagactcaaggtcgtcctcggaagaatccgacagcgacagggaggccttggcggcaatgaatgcagctcaggtgaagcccctcggaaagagtccacaggtaaagccagcatcaacaatgggtatgggccctctgggtaaaggcgctggccctgtgccacctggaaaggtgggtcctgccactccctcagctcaggtgggcaagtgggaagaagattccgagtcaagctctgaagagtcttcggacagctctgatggtgaggtcccgactgccgtggctccagcacaggaaaaatcccttggaaacattctgcaggccaaacctacaagctctcctgccaaggggcccccgcagaaggcgggacctgtagccgttcaagttaaagctgaaaaacccatggataactccgagagctcagaggagagttctgatagcgcagatagcgaagaagccccagccgcaatgactgctgcacaagccaaacccgccttaaagattccccagacaaaggcttgtcccaaaaagacgaacacaacagcctcagcaaaggtcgctcccgtgcgtgtgggaactcaagcccctcgaaaggccggaaccgctacaagtcccgctgggtcgagcccggccgtggccggcgggactcagcgccccgccgaggactcatcgagctcagaggaatctgatagcgaggaggagaaaactggcctggccgtaactgttggacaagcgaagagcgtgggcaaaggactgcaggttaaggccgcttctgttcccgttaaggggtccctgggtcagggcactgccccggtgcttccaggtaagacgggaccaacagtaacgcaggtgaaagccgagaagcaagaggatagcgaaagtagtgaggaagagtcggactcagaagaggctgctgcttctccagcacaggtaaaaacttcagtcaagaagacgcaggcaaaagcaaaccccgctgctgcccgagcaccaagcgctaaggggacaatctcggccccggggaaagtcgttactgccgctgcccaggcaaagcaacgatctccctccaaggtgaagccccccgtgagaaacccacagaattccaccgtgctggcaaggggtcccgcatccgtgccaagcgtaggcaaggctgtagccacagccgcccaggcccagaccggccccgaggaggactccggatccagcgaagaggaatcagacagcgaagaggaggcagagaccttggcccaggtgaaaccgagtggaaagactcaccagattcgggccgccctggcccccgcaaaagaatcgccaaggaagggcgccgcacctacgcccccaggtaagacagggccaagtgccgcccaggccggcaagcaggacgattctggaagcagctcagaagagtccgattctgacggtgaggcccccgctgcggtcacctccgcacaggatcaggagagcagttag

SEQ ID NO: 138715 - DNA, 4245 bp, synthetic construct
  misc_feature 1..4245: note = Description of Artificial Sequence: Synthetic coding sequence
  source 1..4245: mol_type = other DNA
atggccgaagcgaggaagcgaagggagctcctgccgctgatttaccaccatttactaagggccggctacgtgagggcagctagagaagtcaaggagcaaagcggccagaagtgcttcctcgcccagccagtcactctcctagacatctacacacactggcagcagacttcagaactggggcgcaaaaggaaggctgaagaggacgctgcactgcaggccaagaaaactagggtatccgaccctatctcaaccagcgaaagttcagaggaggaggaagaagctgaggctgaaacagcgaaagccactccacggctggcatccaccaatagtagcgtcttgggagccgacttgccttccagcatgaaagagaaggccaaagctgagacggagaaggcaggaaagactggcaattcaatgccccacccagcaactggcaaaaccgtggccaatctcctgtcaggtaagagcccccgcaagtccgctgagccctccgccaacacgactttggtcagcgagaccgaggaagaggggtcagtgcccgcgtttggagctgccgcgaagcccggtatggtgagtgctggacaggcagatagcagctctgaggataccagctcgagttctgatgaaacagatgtcgaggggaagccaagcgtgaaacccgctcaagtgaaagcatcctctgtatccaccaaagagagccctgcaagaaaggctgctccggcccctgggaaggtaggagatgttactccacaagtgaaagggggcgccctcccgcctgctaagagagctaagaaacccgaagaagagtctgagagttccgaggaggggtctgaatccgaggaagaggctcccgccgggactaggtcccaggtgaaggccagtgagaaaatcctgcaggtccgcgctgcatctgcaccagccaaaggcacacctggaaagggagcaactccagccccgcccgggaaggccggtgcagtcgcctctcaaacgaaggcagggaagccagaagaggactcagagtcatcatctgaagaaagcagcgatagtgaagaggaaactccggccgccaaggctctgctccaggctaaggcctccgggaagacgtctcaggtgggcgccgctagtgcccctgccaaggaatccccccgcaaaggagcagccccagctccgcccggaaaaacagggcctgcggtggcaaaggctcaggcagggaaacgcgaagaagacagtcaatcttcttctgaagagtccgattccgaagaggaggcgccggctcaggcaaagccttccgggaaggctcctcaggtgcgtgccgccagcgcacctgccaaagaatcccctcggaagggggccgcccctgcacctccacgaaaaaccgggccagccgcagcacaggtgcaggtcgggaaacaggaggaggattcccgttcctcctccgaggaatccgactcagatcgggaagccttagccgctatgaatgccgcccaggtcaagccactgggtaaatctccacaggtcaaacctgctagcactatgggcatgggacccctgggcaaaggtgctgggcccgtccctcccgggaaagtgggtcccgctacaccctcggcgcaagtgggaaagtgggaggaagatagtgagtcttcaagcgaggagagtagcgactcatctgatggcgaggtgcccacagctgtggcaccagctcaggagaaatcccttggaaatatcttacaggccaaacctacgagtagcccagccaagggacctccgcagaaagccggaccagtggcagttcaggtcaaggctgagaaacccatggataattccgagtctagtgaggagtctagtgatagcgctgattctgaggaggctccagcggcaatgacagccgcgcaggccaaacccgcactgaaaattcctcagactaaagcctgtccaaagaagaccaatactacagcctcagccaaagttgcgcctgtgcgggtcggcacacaggcccccaggaaggcaggcaccgccacatctcccgcggggtcaagtccggctgtcgcaggaggtactcagcgccctgcagaggattcttcttcctcagaggaatcagattctgaggaagaaaagactggcctggctgtgaccgtcgggcaggccaagtccgtaggaaagggtctccaggtaaaggccgcaagcgtccccgtcaaaggtagtctgggtcagggcacagctccagttcttcctggtaaaaccggaccgacagtgacacaggtgaaggcagagaaacaggaggacagcgaaagctcagaagaggagtctgactcagaggaagcagccgcgagtcccgctcaggtgaagacctctgttaaaaaaacccaggccaaggctaatcccgccgcggcccgcgccccctcagccaagggtacgatttccgccccaggaaaagtggtcacagccgcagctcaggccaaacaaaggagcccgagtaaggtgaagcctccagtgagaaatcctcagaacagcactgtcctcgccaggggacctgcttctgtccccagcgtcggcaaagcggtagcaactgctgctcaggctcagactgggcccgaggaagatagcggaagctctgaagaagaatccgattccgaagaggaggcggaaactctggcccaggtaaagcccagcggcaagacccaccagatccgagctgctctggcgccagccaaggaatcccctaggaaaggtgccgcgcccactcccccgggcaaaaccggacccagcgctgcacaggctgggaaacaggacgattctggctctagcagcgaggagtctgattcagacggtgaagctcccgccgcagtcacctctgcccaagtaatcaagccgcccttaatctttgtagatcccaataggagcccagcggggcctgccgccactcccgctcaggcacaggccgcgtccacccccaggaaggcccgagctagtgaaagcacagcacggtcttcgtcctccgagtccgaggacgaggacgtaattccagctacccagtgtcttacccccgggattcggaccaatgttgtgacaatgcctaccgctcacccccgcatcgcacctaaagccagcatggccggtgcatctagcagtaaagagtcctccaggatctccgacggaaaaaagcaggaagggcctgccactcaggtggatagcgctgtcggaacactgcctgccacctcgccgcaaagtacatccgtccaggccaaaggtaccaataaactgcggaaacctaagctgccggaagtgcagcaggccactaaagcccccgagtcttccgatgacagcgaggactcctcagatagtagctctgggtccgaagaagacggagagggcccacagggagctaaatcggcccacaccctcggccccactccctctcgtaccgagacattggtcgaagaaactgccgctgagtcctccgaagatgatgtcgtggccccgtcccagagcctgttatccggctacatgactcccgggcttaccccagccaacagtcaggcttctaaagctacacctaaactcgacagttcccccagcgttagtagtaccttagccgccaaggatgatccggacggcaaacaagaggccaagcctcagcaggccgctggaatgctcagccccaaaaccggaggcaaggaggcagccagcggcaccacgcctcagaaatcccgcaagccaaaaaagggcgctgggaacccacaggcttccacactggcattgcagagtaacatcactcaatgcctgttgggccaaccctggcctctgaatgaggcacaagtccaggcctccgtggtcaaggtcctaactgagctcctggagcaggagcgtaaaaaggtggtggacaccacaaaggagtctagccgaaaaggatgggaaagccggaagcggaagctgagcggcgaccagcctgccgcccgaactccccgaagtaagaaaaagaagaaattgggcgctggagaaggcggagaagcttcagtgtctcccgagaaaacctcaacaacctctaaggggaaagccaaacgtgataaagcctctggagacgtgaaagaaaagaagggtaaaggaagcctgggcagccaaggcgccaaagacgaacccgaggaggaattgcaaaaaggcatggggaccgtcgaagggggggaccagtctaacccgaagtccaaaaaagaaaagaagaaaagcgacaagcgaaagaaggacaaatag

SEQ ID NO: 138716 - DNA, 4356 bp, synthetic construct
  misc_feature 1..4356: note = Description of Artificial Sequence: Synthetic coding sequence
  source 1..4356: mol_type = other DNA
atggccgaggcccgcaagcggagggaactgttgccattgatttatcatcatctgctccgtgccggatatgtgagggcggcacgggaagttaaggagcagtccggccagaagtgttttttggcccagccagtcacactactcgacatctatactcactggcaacaaacttctgaactgggccgaaaacggaaagccgaagaggacgctgccctgcaggctaagaagaccagagttagcgatccaatcagcacaagcgagtcctcagaagaagaggaagaggctgaggccgagacagctaaggctacccccagactggcctccactaattcaagtgtacttggggcggatctgccttctagtatgaaggaaaaagccaaggcagagactgagaaagcagggaaaactgggaatagcatgccccatccagcaaccggcaagacagtggccaatctactgagtggcaaatcgccaagaaaatcagcagagccaagtgcaaataccacccttgtgtcggagacagaggaagaggggtctgtgcccgccttcggagccgcggcaaaacctggaatggtcagcgccgggcaagcagacagttcctccgaagacacatcatctagctctgacgagacagacgttgaaggcaaacctagcgtgaagccggcccaggtgaaagcgtcttcggtttccacaaaggagtctccggccagaaaagccgcccctgctcctggcaaggttggggacgtcacaccccaggtgaaggggggtgcactgcccccagccaagagagctaaaaagcccgaagaggaatctgaatcttcggaagagggtagtgaatctgaagaggaagcccctgcagggaccagaagccaggttaaggcttcagagaagattctgcaggtgcgggccgcctctgctccggccaagggtacccccgggaagggcgctaccccggccccccctgggaaggcaggtgccgtcgcttcacagacgaaggctggtaagcctgaagaggacagtgaaagttcttctgaggaaagctctgattccgaggaggagacccctgctgccaaggccttgctgcaggcgaaggcctccggaaagaccagccaggttggcgcagcgagcgcccccgcaaaagagagcccccgcaagggggccgcaccagcccctccaggaaagactggacctgctgtggctaaggcccaggctgggaagagagaagaagattcccaaagcagcagtgaggaaagtgatagtgaggaagaagctccggcccaggccaaaccctccggcaaggccccccaagttagagctgcgtccgcccctgccaaggaatcccctcggaagggcgccgctcccgcccctccacgtaaaacagggcctgccgccgcacaagtgcaggtggggaagcaggaagaggacagccggtcctctagcgaggagtccgactcagaccgagaagccttggcagctatgaacgctgcccaagtcaaaccattgggcaaaagcccacaggtgaagcccgcgagtaccatgggtatgggccccctgggcaaaggagcaggaccagttccgcccgggaaggtaggacctgccacaccctcagcccaagtgggtaaatgggaagaagattccgaatcctcttccgaggaaagctccgattcatcagacggcgaagtgcctaccgcagtggctcccgctcaggagaagtctctcgggaatatcctacaagccaagccgacatcctctcctgctaaagggcctccacagaaggctggcccagttgctgtgcaggtgaaagctgagaagcctatggacaatagtgagtcaagtgaagaatcttcagactctgccgactctgaggaggcacctgcggccatgactgctgcccaggccaagccagctttgaaaattccccagacgaaggcctgtcctaaaaagactaacaccaccgcatccgctaaagtggcccccgtccgcgtgggtacccaggccccgcgaaaagccggtacagcgactagtccagcaggttcttcccccgccgtcgccggcggcactcagaggcccgcggaagactcctcctctagcgaggaatccgacagcgaagaagagaagactggactggctgtgaccgtcggacaggccaagtcagtgggtaaaggcctacaggtgaaagctgcaagtgtccccgttaaagggagtcttggacaaggcacagcccctgtgcttcctggtaaaaccggacctacggtcacccaagtcaaggccgagaaacaggaagattcagagagtagtgaggaggaatccgacagtgaggaagccgcagcctcacccgcacaggtcaagacgtccgttaaaaagactcaggccaaggccaatccggcagctgctagggccccaagtgccaaagggactatatcagccccaggaaaagttgtgactgccgctgcacaggcgaaacaacggtcaccatccaaggttaagccaccggtgcgtaacccccagaatagcaccgtgctggcccgagggcctgctagcgtccccagtgtgggaaaagccgttgctactgcagctcaggctcaaaccgggcctgaagaggactcaggcagcagcgaagaagagtctgattccgaggaggaagccgagactctggcacaggtcaagccatccggaaaaacgcatcagatacgagcagccctggcccccgccaaagaatcccctcgcaagggcgccgccccaactccccctggaaagactggccccagcgccgcccaggcaggaaaacaggatgactccggctcgtcgtccgaggagtcagattctgacggcgaagcgcctgcggctgtgacttctgcccaagtgatcaagccacctctgattttcgtcgatccaaatcggtctcctgcgggccccgccgccaccccggcccaagcccaggccgcaagtaccccaagaaaggcccgagcgtctgagtcgactgctcgaagctcctcgagtgagtcagaagacgaggatgtgatcccagcaacacagtgtttgacacccgggatacggaccaacgtggtgacaatgcccactgctcacccccgaatcgcccctaaggcaagtatggcgggtgccagcagctccaaggaatcgtcccgtatctccgacggcaagaagcaggagggaccagcgacacaggttgacagcgctgtgggaacgctgcccgccacatcccctcagagtactagcgtccaggctaaggggaccaacaagctgagaaaacccaaactcccagaggttcagcaggcaactaaggccccagagtccagcgatgattctgaagattcttccgacagttcatcagggtccgaggaggacggcgagggaccacagggggcaaagtcggcacacacacttgtcggtccaaccccatcccggaccgaaaccctggtagaggaaactgccgccgaaagcagcgaggatgacgtcgtcgccccatcgcagtccctgctttcaggatatatgactcctggtttgactccagccaacagccaggcgagtaaagcaacccctaagctagactcgtccccgagcgtgagtagcaccctggccgcaaaagacgatccggatgggaagcaggaggccaagccccagcaggcagctggcatgctaagccccaaaacaggaggcaaagaagcagcctctggaaccacaccgcagaagtcacggaaacctaaaaaaggtgcgggaaaccctcaggcgtctacattggctctgcagagcaacattacccagtgtttattgggccagccctggccactgaacgaggcccaagtgcaagccagcgtggtgaaggtactcaccgagttgctggaacaggagcggaagaaggtcgtggatactaccaaggagtcatctcgcaaaggctgggagagtcggaaaagaaagctgtccggagaccagcccgcggctcgcacccctagatccaagaaaaaaaagaaactgggagctggggagggcggcgaagcctctgtaagccccgaaaagaccagcacaacttcaaaaggtaaggcaaaacgggataaggcttccggcgatgtgaaagagaagaaagggaagggttcattgggatctcagggcgctaaggacgagccggaggaggagttgcagaagggaatggggaccgttgaggggggtgatcagtcaaatcctaagtctaaaaaggagaagaagaaatcggataaacggaaaaaggacaaggagaaaaaagaaaaaaagaagaaggcaaaaaaagcttccaccaaagattccgagagtcccagccagaaaaaaaagaaaaaaaaaaagaaaacggccgagcagaccgtgtag

SEQ ID NO: 138717 - DNA, 4239 bp, synthetic construct
  misc_feature 1..4239: note = Description of Artificial Sequence: Synthetic coding sequence
  source 1..4239: mol_type = other DNA
atggctgaggcgcgtaaaagacgggagctgctccctttgatctaccatcacctcttaagggccgggtatgtgagggcagcccgcgaggtcaaggagcagtcaggacagaagtgttttctggcacagccagttaccctattggatatctacacccattggcagcagacatccgaactgggacgcaagagaaaggcagaggaggatgccgcccttcaggccaaaaagacacgtgtttcggatccaatttcgactagcgagtcctcagaggaggaggaagaagccgaggccgaaacggccaaagcaacacctcgcctggcttcgaccaattcaagtgtgctcggagctgacctcccctcctccatgaaggaaaaggccaaagcagaaactgagaaggctggaaaaacaggcaactccatgccccatccagcgacaggaaagaccgtggccaatcttctctcgggtaaatccccacgaaaatctgctgagccctccgcaaataccacgcttgtgtccgagacagaggaagaaggctccgtaccagcattcggtgctgccgcaaaacccggtatggtttccgcagggcaggccgactcctcgtccgaagatacgagctcttcctccgacgagactgacgtcgaggtgaaagcctccgagaaaatcctgcaggtgcgtgcagcctcagctcctgccaaaggaactccagggaagggggcgaccccggccccgccgggtaaagctggcgcagtggcttcccaaactaaagccggaaaaccagaagaggacagcgaatcctctagtgaggaaagttcagactctgaggaagagaccccagccgctaaggccttgctgcaggccaaggcatcgggaaaaacatctcaggttggtgccgcatcagcccctgccaaagaaagcccgcgtaagggcgccgcaccagcccccccgggcaaaacaggccctgccgttgctaaagcgcaggcaggaaagagagaggaggacagccagtcctcgagtgaggaatcggatagcgaagaagaagcccctgcccaagcaaaaccatccggcaaggcgccccaggttagggctgcatcagcgcccgccaaagagagcccccgcaaaggagccgccccagccccgcctcgcaaaactgggccggccgccgcgcaggtacaggtcggcaaacaggaagaagacagccggtcttcttcggaagaaagcgatagcgatagggaggctctcgccgctatgaacgctgcccaggtcaaacccctgggcaaatcaccgcaggtgaaaccagcttcgacgatggggatgggcccgttggggaaaggcgcgggccctgttcctcccggcaaagtgggtcccgccaccccatccgcccaggtgggtaagtgggaggaagactccgaaagctctagcgaagagtctagtgacagctctgatggagaggtacctacagctgtggcccctgcccaagagaaatccctgggtaacatcttacaggccaagcccacctctagcccagccaagggccccccccagaaggccggaccagtagccgtgcaggttaaggcggagaaacccatggataacagtgagagttctgaagagtccagcgattctgcggattccgaagaggccccagctgctatgactgccgctcaagccaagccagccttgaaaattccccagaccaaggcctgtcctaaaaagaccaatacaaccgccagcgctaaggttgcccccgttcgtgtggggactcaggctcctagaaaggctggcactgcaactagccctgcagggtcctcgcctgccgtggctggaggaacccagagacctgctgaggattcttcatcatccgaggaatccgactccgaagaggaaaaaaccggattagcagtgaccgtgggtcaagcgaagagcgttggaaagggattgcaagtgaaggcggccagcgtgccagtgaaagggtccctggggcaagggacagccccggttctacctggaaagactggccctacagtgacacaagtgaaggccgaaaagcaggaagactcagaatcttcggaggaggagtctgactctgaggaagctgccgcttcgcctgcacaggtcaagacatcggtgaagaagactcaagcaaaagccaacccggcagctgctagagccccgtccgccaagggtacaataagcgcacctgggaaagtggtcaccgcggccgcacaggctaaacagcgctcacctagcaaggtgaaaccacccgtgcggaatcctcagaatagtaccgtgttagcgagggggccggcaagcgtaccttccgtgggcaaagccgtggcgactgcagctcaggcacaaaccggccctgaagaggactccggcagtagcgaagaggagtcagattcagaggaggaggccgaaacattggcacaggtgaagccatcaggcaagacgcaccagattcgagccgctctggctccagccaaggaaagtccacgcaaaggggcagcccctaccccccctggcaaaaccggcccctccgctgctcaagcagggaagcaggacgactcgggatccagctctgaggaatcggactctgatggggaagcccccgccgctgtgactagcgctcaagtgatcaagccccctctgatcttcgtagatccaaaccggagcccagcgggcccagcagctactcctgcccaggcccaggcggcctcaacccctagaaaagcaagggccagtgagtccactgctcggtcatcctcaagcgagagtgaggatgaagatgtgataccggccacccagtgcttgacacccggcattcgcaccaatgtggtgacaatgccaaccgcccacccacggatcgcccccaaagcctcaatggccggagcatcatcaagcaaggaatctagccggatctccgatggaaagaaacaggaaggcccagctacacaggtgagcaagaagaaccccgcgagcctgcccctgactcaggctgccctaaaggtgcttgctcaaaaagcttctgaagcgcagcctcccgtcgcgcggacacagccaagttctggagtggattccgctgtgggtaccctgcctgcaacttctcctcaaagcacaagcgtgcaagccaagggaacaaacaagctcagaaagcccaaactgcctgaggttcaacaggctacgaaagcccccgaatcctccgacgactcggaagactcctctgacagctcttccggcagtgaagaggacggtgagggcccacagggggctaaaagtgcccacacactggttggtcctacgccttccagaactgaaaccctggtggaagaaaccgcagcagaatcatctgaggacgacgtggttgcaccgagtcaatccttgctgagcggatacatgaccccagggttaactccagctaatagccaggcaagcaaggcaactcctaagctggatagctccccgtccgtcagcagtactctcgccgccaaggatgatcctgacggtaagcaggaggctaagccacaacaggccgccggaatgctgagtcccaaaactggcggaaaggaagctgcttcaggcacaaccccccagaagtctcggaagcccaaaaaaggtgctggcaatccccaagcttctacattggcgcttcagagcaatattacccaatgccttctcggacagccgtggcctttaaatgaagctcaagtgcaagcgtcagtagtgaaagtgctgacggagttactagaacaggagaggaaaaaggttgtagataccacgaaagagtcaagcaggaagggttgggaatctagaaagcggaaactttccggcgaccagcccgccgcacgcacaccaagatcgaaaaaaaagaaaaagctgggtgccggtgaagggggtgaggcctccgtaagccccgagaaaacatcgacaacaagtaagggtaaggcaaaacgggataaggctagcggcgacgtaaaggaaaaaaagggcaaagggtccctagggagccagggcgccaaggatgaacctgaggaggaacttcagaaaggcatgggcaccgttgaggggggcgaccaatctaatcccaagagcaaaaaagaaaaaaagaaatctgataagcggaagaaggataaggagaagaaagagaaaaagaaaaaggctaaaaaggcaagtactaaagactcagagtctccctcgcaaaagaagaagaagaagaagaaaaaaaccgcagagcagactgtctag

SEQ ID NO: 138718 - DNA, 4578 bp, synthetic construct
  misc_feature 1..4578: note = Description of Artificial Sequence: Synthetic coding sequence
  source 1..4578: mol_type = other DNA
atggcagaggctcgcaagcgcagggaactactgcctctgatctatcatcatctgctgcgtgctggatacgtgcgagctgcaagagaagtaaaggagcagagcgggcagaaatgcttcttagcacagccggtcacccttctggacatctatactcattggcagcaaacctctgaactcggacggaaaagaaaagccgaggaggatgccgctttacaggctaagaagactcgcgtatccgatcctatttccacctccgaatcatcagaggaagaggaggaggccgaggctgagaccgcgaaagcgacaccaaggctggctagcactaactcgtctgtcctcggggctgatttgccttcgtccatgaaggaaaaggccaaggcggaaactgagaaggccggtaagacaggtaattctatgccccatcccgccactggcaaaacggtggccaacctgctgagtgggaagagccctagaaagtccgcagaaccgagcgcaaatactacactcgtcagcgagacggaggaggagggtagcgtgccagccttcggggcagcggcgaagcccggtatggttagcgctggacaggctgattccagctccgaagacacatccagttcatctgatgagaccgacgtggaaggaaagccgtctgtgaagcctgcgcaggtaaaggcttcatccgtatctaccaaagaaagccccgcccggaaagcagctccagctccaggtaaagtcggagacgtgacgccccaggtgaagggaggggctttacccccagctaagagggcaaaaaagccagaagaggaaagcgagtcctctgaggaaggatccgagtcagaagaggaggcgccagcaggaaccaggagccaagtcaaggcttccgaaaagatactccaggtgcgtgccgcctcggccccagcgaagggaactccaggcaaaggagccacaccagccccccctggtaaggcaggtgctgtcgcatctcagactaaggccggtaagccggaagaagatagtgagtcatcatccgaagaaagttcagacagtgaagaggaaacccccgcggcaaaagcccttctgcaggccaaagcaagcggcaagaccagccaggttggagcagcatccgcgcctgctaaagaatctccccgcaagggcgccgcacctgctcccccaggtaagacaggaccagcagtggccaaggcccaagccggcaagcgcgaagaagattctcagtcctcttcagaagaaagtgactccgaggaagaggcccctgcacaggctaaaccatcaggcaaagcaccccaagtaagggctgctagtgcacccgccaaggaatcacccagaaaaggtgcggcccctgctcccccaagaaaaactgggccagctgccgcacaagtacaggtcggcaagcaagaagaagacagcaggagttcatccgaggagtccgacagcgaccgtgaggctctggctgccatgaatgccgcccaggtcaagcccttgggcaagtccccacaggtgaagcccgccagcaccatggggatgggcccgcttgggaagggggccgggcccgtgccccccgggaaggtgggtcctgccactccaagtgctcaggttggaaaatgggaggaggatagcgagtctagctcggaagagtcaagcgacagttccgacggagaggtgcccaccgcagttgctcccgcccaagaaaaatctctggggaacattctccaggctaagcctacatcgagccctgctaaaggtccaccccagaaagctggtccagtggcagttcaggtgaaggcagagaagcctatggataattctgagtcaagcgaggagtcttccgactccgctgacagtgaggaggctccagcggctatgaccgctgcccaggccaaacccgcattaaaaatcccacaaacaaaggcctgccctaagaagacaaacaccactgcatccgccaaagtcgctcccgtccgagtcgggacacaggctcccaggaaagctggaaccgctacctcacctgctggttccagtccggcggttgctggtggtacccagagacccgccgaggatagttccagctccgaggaatctgacagcgaggaagagaagaccggactggcagttacagtgggccaggcaaaaagcgtaggcaagggtcttcaagtcaaagccgccagcgtgcccgtgaaggggtccctagggcagggaactgctccagttctgcctgggaaaacaggtcccactgtcacacaagtgaaagccgaaaaacaggaagactcagaaagctctgaggaggaatccgattcggaggaggccgcagcctcaccggctcaggttaaaactagtgttaaaaagacacaggctaaggccaaccccgctgcagcaagggctccttcagctaaagggacaatttccgccccgggtaaggtggtcacagcagctgcccaagctaaacagcgatcaccctcgaaagttaaaccccctgtgaggaatccgcagaacagcactgtccttgcgagagggcctgcctctgtgccatctgtgggtaaggctgtggctactgcggcccaagctcagaccggccctgaggaagacagtggcagctcagaagaggagagtgacagtgaggaggaggccgagaccctagctcaggtcaagccctccggaaaaacacatcagatcagagcagcgttggcccctgccaaagagagcccccggaagggagcagctcctacgcccccaggaaaaaccggtccaagcgccgctcaagccggaaaacaagatgactccggctcaagctcagaagagagcgatagcgacggggaagctcctgcagcagtcacaagcgcacagaaagatagtaacagtaaaccagctaggagcaaaactcttgcaccagcacctcccgaaagaaatacggaaggttcctccgaatcttcagaggaggaactgcccctgacccaggtaataaagccacccctcattttcgtcgatcctaatcgcagtcctgcaggccccgcggcaactcccgcccaggctcaggcagcaagcaccccaaggaaagctcgggccagcgaaagcacagctaggagctcctcctctgaatccgaggatgaagacgtaatacctgctacacagtgcctcaccccaggcatccgaacaaacgttgtcacaatgcctaccgcacatcccagaatagcgcctaaggcttcaatggctggcgcatcaagtagtaaagaaagcagtcgcatttccgacggcaaaaaacaggaagggccggcaacacaggtcagcaagaaaaaccccgccagtctgccactgactcaggctgcattaaaagtcctcgcccagaaagcctcagaggcacagcctcccgttgcacggactcagcccagtagtggtgtagactctgctgttggaactctgccagccaccagcccacagtctacaagcgtgcaagccaagggcacaaacaagctccgaaaaccaaagctacccgaagtgcagcaggccaccaaagcacctgaaagcagtgatgatagtgaggactcttcggactctagcagtggctcagaagaagatggcgagggaccacagggcgcgaagtctgcgcatacgctcggtccgactccatctagaactgagacgctggtggaagaaactgcagccgaaagtagtgaagatgacgtggtggctccctcccagagtttgctcagcggctacatgacgcccgggctgactcctgccaattcccaggcgagcaaggccaccccaaagttagactcctccccttcggtttcctcaacccttgccgctaaagacgatcctgatggcaagcaagaggccaagccacaacaggctgccgggatgttgtcccccaagaccggcggcaaagaggccgcctctggcaccaccccccagaaaagtcgcaaaccaaaaaaaggcgccgggaacccgcaggcatccacactcgcacttcaatctaacattactcaatgtctgttaggacagccatggccgttaaacgaagcccaggtgcaggcctcagttgtcaaggtgctcaccgagctgttggagcaggaacggaagaaggtagtggacactaccaaagagtcttctcggaaagggtgggaaagcagaaagcgtaaactcagcggagaccagccggctgccagaacaccaaggtcaaaaaagaagaaaaaattgggagccggagagggcggcgaggcctcagtgagccctgagaagaccagtactacgtccaaggggaaagcaaagcgcgataaggccagtggcgacgtgaaagaaaagaaaggaaaggggagtctcggtagccagggtgctaaagatgagcctgaagaggagttacagaaaggaatgggtacggttgagggaggggatcagtccaatccaaaaagtaaaaaggaaaaaaagaagtcggataagcgaaaaaaggacaaggaaaaaaaggagaagaaaaaaaaagcgaagaaagcctcaactaaggatagcgagagcccttctcagaaaaagaagaaaaaaaagaagaagaccgctgagcaaaccgtgtag

SEQ ID NO: 138719 - DNA, 4467 bp, synthetic construct
  misc_feature 1..4467: note = Description of Artificial Sequence: Synthetic coding sequence
  source 1..4467: mol_type = other DNA
atggccgaggcgcgaaagcggcgggagttgcttcctcttatataccatcaccttctccgggcaggatatgtgcgggccgcgcgggaagtgaaggaacaaagtggtcagaaatgctttctggcgcagccagtgacactcctggatatctatacccattggcaacagacgtcagaacttggcagaaaaaggaaagcagaggaggatgccgctctgcaggcaaagaagactcgggtcagcgacccaatttcaacctctgaatcctctgaggaagaggaagaagcggaggccgaaaccgccaaagctactccccgactcgcaagcactaacagtagcgttctcggagccgatctgccctccagtatgaaagaaaaggcaaaagccgaaaccgaaaaagccggaaagacaggtaacagcatgcctcacccggccaccggaaagacagtagcgaacctcctttccggcaaatccccaagaaagagcgccgagccttccgccaacactactctggtgagtgagacagaggaggagggctcagtccccgcctttggcgccgcagccaaaccaggtatggtctccgctggacaggctgattcatcctccgaggatactagctcttcatccgacgaaactgatgtcgagggtaagccctccgtgaagccagcacaggtaaaggcgagctcagtttctaccaaggaatctccggctcgaaaagcggctcccgctcctggcaaagtcggggacgtgacccctcaggtgaagggtggcgcattaccaccagccaagcgggcaaagaagcccgaagaagaatccgaatcgagtgaggaaggctctgaaagcgaggaagaagcacccgccggaacacgcagtcaggtgaaggcttcagagaaaattctgcaggtgcgtgcggcttccgctccggccaaaggaactccaggtaagggcgccaccccggcccctcctggcaaggcgggagcggtggctagtcagaccaaggccggaaagcctgaggaggactcagaatcatcttctgaagagtcctcagatagcgaggaagagacacccgctgctaaagctttactgcaggccaaggcaagcggcaaaaccagtcaggtgggcgccgccagcgcgccagccaaggagtcgccgagaaagggtgctgcaccggcccctcccgggaagaccggaccggcagtcgctaaggcccaggctggaaaacgagaggaggattcacagtcaagttcagaggaatcagattcagaggaggaagccccagcacaggccaaaccctcgggcaaggctccacaggtgcgagccgcatctgctcccgctaaggagtctccgagaaagggcgcggcacccgccccccctcggaaaactggaccagccgctgctcaagtccaggtcggaaaacaggaggaggactcccgatctagctcagaggaatcagattccgatcgggaggctctggccgctatgaatgctgcacaggtgaaaccactgggcaaaagcccccaggtcaagccagcctctaccatggggatggggcccctgggcaagggtgccgggcccgtgccacctgggaaagtcggcccggccacaccttcagcccaagtgggcaaatgggaggaagacagcgagtctagttccgaagaatcttccgactcaagcgacggcgaggtccctacggctgtagcccccgcacaggaaaagtctttagggaacatacttcaggccaagcccaccagctcccccgctaaaggccctccccaaaaggcaggccccgtggctgtccaggtgaaggctgagaaacctatggacaatagcgagtcctccgaagagagcagtgatagcgcagacagcgaggaagctcccgctgctatgaccgcagcgcaggcaaagcctgcccttaaaatacctcagactaaggcctgcccaaagaagacgaacacaacagcgagtgctaaagtagctcccgtcagagtaggtactcaagcacccaggaaagctggaaccgctaccagtccagccgggagttcccctgccgttgccggtggcacccagaggcctgcggaggacagcagtagttctgaggaatccgacagcgaggaagagaaaacaggacttgccgtgaccgttggacaggctaagtccgtaggaaaggggttacaggtaaaagccgccagtgtacctgtgaaaggtagtttagggcagggtacagcacctgtgcttccaggcaagacaggccctactgtaacccaggtgaaggcggagaaacaagaagatagcgagtcctccgaagaagaatccgatagtgaggaagcagccgcatcacctgcccaggtcaagacgtccgtcaaaaaaacacaggccaaggctaatccagcagccgcgcgcgcaccctcagcaaagggcactattagtgccccaggaaaggtagtaaccgccgcggcacaagccaagcaaaggagcccaagtaaagtcaaaccgccagttcgaaacccccaaaattctactgttttggctaggggaccggcctcagttccaagcgtcggtaaagcagtggcaaccgccgcacaagcacagaccggaccggaggaggattccggatcaagtgaagaagaaagcgattctgaggaggaagcagaaacccttgcccaggtcaagccatccggtaagacacaccaaatccgggctgccttagcccccgctaaagagagccctaggaagggagccgctccaacccccccagggaagacagggccgtcggcggcgcaggcggggaaacaagatgattccggctctagttcagaagagtcagatagtgacggggaggcccccgccgcagtgactagtgcccaggtcatcaagccacccctgatttttgtcgaccctaatcgctcccctgcgggccctgcagctactccagctcaggctcaggcggcctccacgcccaggaaggccagggctagcgagagcacagctaggtccagcagctccgagtctgaggacgaagacgtcatccctgcaacccagtgtctcacccctggcatacgaaccaacgtggtgacaatgcccacagcacatcccaggatcgcccccaaggcaagcatggccggagcttcttccagtaaggagtctagccgaatcagcgatggaaaaaaacaagagggtcctgccacacaagtcagtaagaagaatcccgccagcctcccactcacacaggctgccctaaaagtacttgctcagaaggcctccgaggcacagccgccggtcgcccgaactcagccatcctccggtgtggactccgccgtaggaacactgcccgcaacctcgccccaatctacctctgtccaggctaaaggtactaacaagctccgcaagcccaaactccccgaggtgcaacaggcaactaaggccccagaaagcagcgacgacagcgaggacagcagtgactccagttccggttctgaggaggacggcgaaggtcctcagggagcaaaatccgctcacacattgggcccaactccgagcaggacagaaactctcgttgaagaaacggccgccgaaagctcagaggacgatgtggtggccccaagtcagtccctgcttagtggctatatgactccgggcctgaccccagcaaacagccaagctagcaaggcaactccaaaactcgactctagcccttcggtgagtagtacacttgcggccaaggacgatccagacgggaagcaggaggccaagcctcagcaggctgctggaatgctcagccctaaaacaggcgggaaagaagctgcctccggtaccacaccccaaaagtctagaaagccaaaaaagggagccggtaacccacaggccagtaccttagcactgcagagcaacatcactcagtgtctcctaggccagccttggcctctgaatgaagcccaagttcaagcaagcgtcgtgaaggtgctgacagaactgctcgaacaagaaagaaagaaagtcgtggacacaaccaaagagtcctctcggaagggttgggagagtcgcaagcgtaaattatcaggagaccagccggccgccagaacccctagatccaaaaaaaaaaaaaagctgggcgcgggtgagggtggcgaggcatctgtaagccctgagaaaacgtccacgaccagtaagggaaaggcaaaacgggacaaagcctcaggagatgtcaaggagaaaaaaggaaagggtagtctcggttcacaaggcgctaaggacgaacccgaggaagagctacagaagggcatgggtacagttgaaggtggagatcaatccaaccccaaaagcaagaaggaaaagaagaagagcgataagcggaagaaagacaaagagaagaaagaaaagaagaaaaaggctaaaaaagcctccacgaaggacagcgagtccccatctcagaaaaagaagaaaaagaagaaaaaaactgcagagcagaccgtgtag

SEQ ID NO: 138720 - DNA, 255 bp, synthetic construct
  misc_feature 1..255: note = Description of Artificial Sequence: Synthetic coding sequence
  source 1..255: mol_type = other DNA
atggccaccatggaaaataaagtgatttgcgcgttggtccttgtgagtatgctggctcttggaacactggcggaagctcagactgagacgtgtactgtggcaccaagggagagacagaactgtggcttcccaggagtcacccccagccagtgtgccaacaaggggtgctgttttgacgatactgtccgaggagtgccttggtgcttttaccccaacactatagatgtccctcctgaggaagagtgcgagttttag

SEQ ID NO: 138721 - DNA, 390 bp, synthetic construct
  misc_feature 1..390: note = Description of Artificial Sequence: Synthetic coding sequence
  source 1..390: mol_type = other DNA
atgggcagacgggacgcccagctgctggccgcgctgcttgtgttggggctctgtgcacttgcaggctcagaaaaaccatcgccatgccagtgctcgcgactatctccccacaacagaacaaactgcgggtttcccggtataacttctgatcagtgtttcgacaatggctgctgcttcgactcctctgtaaccggcgtgccatggtgcttccatcctctgcctaaacaagaatccgaccaatgtgtcatggaagtgtccgataggcgcaattgcggctatcccggcatttctccagaagaatgcgcttctaggaagtgctgctttagcaatttcattttcgaggtcccttggtgcttttttcccaagagtgtggaggactgccattactag

SEQ ID NO: 138722 - DNA, 1749 bp, synthetic construct
  misc_feature 1..1749: note = Description of Artificial Sequence: Synthetic coding sequence
  source 1..1749: mol_type = other DNA
atgccaggccgcacctgggaactgtgcctacttcttttgctgggcctgggcctgggatcacaagaggccctgcccccaccatgcgagtcagagatttattgccatggagaactcctgaatcaggtgcaaatggccaaactctaccaggacgacaagcagttcgtggatatgcctttatccattgccccagaacaggttctgcagactttcacagaactcagccgggatcataaccactctatccccagggagcaattgcaggcctttgtgcatgaacatttccaagcaaaggggcaggaactgcaaccatggacccctgccgactggaaggactcaccccagtttcttcaaaaaatctccgacgcgaaactgcgcgcctgggccggtcagctgcatcagctgtggaaaaaactcggcaagaagatgaagcccgaagtgcttagccatccagaaaggttctccttaatctacagtgagcaccctttcatcgtgcccggtgggcggttcgtggagttttattattgggactcctactgggtgatggagggtctattgctcagtgagatggcggagactgtcaaggggatgcttcaaaactttcttgacctggtcaagacctacggccatgtgccaaacggtgggcgggtgtattacttgcagaggtcgcagccacctctgttgacactgatgatggattgttacctgactcatactaatgacaccgccttcctgcaagaaaacatcgagaccctggctctggagctagacttctggaccaagaatcgaactgtgtcagtctcactggaaggaaagaattatctcctgaaccgttactacgtaccatacgggggtccgcggcccgagtcttattcgaaggacgttgagctggcagatacattgcccgagggggaccgcgaggccctctgggctgagctgaaagccggggccgaatccggctgggatttttcaagtcggtggctgataggggggccaaatcctaattctttgagtggaatccgtacaagcaaacttgtgcctgtggatctcaacgcttttttatgccaggctgaagagctgatgtccaacttttatagccgcctgggcaacgacagccaggccacaaagtacagaattctgcggtcacagaggctggctgccttgaacactgtgctgtgggatgaacaaacgggagcgtggttcgactatgacctggaaaagaagaagaagaatagagaattttatcctagcaacctgacacccctttgggctggatgtttttccgaccccggggtcgctgataaagcactgaagtaccttgaggataataggattctcacttaccaatacggtatacctacctctctgcagaagacagggcagcagtgggacttccctaatgcctgggctcccctccaggacctggttatacgcggattagccaaagcccccctacggagggcacaagaggtcgcattccagcttgcccagaactggatccgcacaaacttcgatgtttactcccaaaaaagcgcaatgtatgaaaaatatgacgtgagcaatggcggtcagccaggcggcggaggagagtacgaagtgcaagaaggtttcggatggacaaacggagtcgtgttgatgctgttggatagatacggcgaccgccttacctctggcccgaaattaccgttccttgaacctcactgccttgcaacccttttgccatctctcctgctgtcactgctcccttggtag

SEQ ID NO: 138723 - DNA, 1656 bp, synthetic construct
  misc_feature 1..1656: note = Description of Artificial Sequence: Synthetic coding sequence
  source 1..1656: mol_type = other DNA
atgccgggtcgaacttgggagttgtgtctcctcctgttgcttggattgggcttaggcagtcaggaagcactcccccccccttgtgaaagcgagatctattgtcacggcgaacttctcaaccaagtacagatggccaagctctaccaagatgacaaacagtttgtcgatatgcctctaagtatagcccctgagcaggtgctgcaaacatttaccgaactctcccgcgaccacaatcattctatcccacgggaacagttgcaggctttcgttcatgagcattttcaggccaaaggacaggaattacaaccctggactccagcagactggaaggattctccccagtttctgcagaagatctccgacgctaaactaagggcgtgggcggggcagctgcatcagctatggaagaaactgggcaaaaagatgaagccagaggtgctgagtcatcccgagcgttttagcctgatctacagtgagcaccccttcatcgtgcccggcgggcggttcgtggagttctattattgttacggacatgtgcccaacggaggtagagtgtactacttgcagcggagccagcctcctttactaaccctgatgatggattgctatctcacccataccaacgacaccgcttttctccaggagaatattgaaacactcgcgctggaactagacttttggacgaagaatcggactgtgtctgtgtctctggagggcaaaaactatcttctcaaccgctactatgttccttacggaggaccccggcccgagtcttacagtaaggatgtggagttagcggacacactcccagagggggatcgggaagccctttgggccgagctcaaggctggtgctgaatcagggtgggatttttctagcaggtggttaattggggggccgaaccctaactcacttagcggcatacgcacatccaagttagtacccgttgatcttaacgcattcttatgccaggccgaggagctgatgtccaacttctatagccgtctgggcaatgactcccaggctacaaaataccggatcctgagaagccagagactggcagccctgaataccgtgctgtgggatgaacagaccggagcctggttcgattatgaccttgaaaagaagaaaaagaaccgggagttttacccatccaatcttacacccttatgggctggctgctttagcgatccgggcgtcgctgacaaagccttgaagtacctggaagataacagaatcttaacttatcagtatggcatccccacttccctgcagaagacaggacagcagtgggacttccctaatgcttgggcccctttacaagacctggtcatccgaggcttggctaaagctcctcttcgacgcgctcaagaggtggccttccagcttgcacaaaattggataagaacaaatttcgatgtctattctcagaagtctgctatgtacgaaaaatacgacgtgtcaaacggtggacagcctggcggcggcggagagtatgaggtccaggaggggttcggctggaccaacggcgtggtgctgatgcttctggacagatacggggaccgtctgacctcggggccaaagctcccgttcctggaaccgcactgcctcgccacgcttctaccgagtctgctgctctcccttttgccgtggtag

SEQ ID NO: 138724 - DNA, 1380 bp, synthetic construct
  misc_feature 1..1380: note = Description of Artificial Sequence: Synthetic coding sequence
  source 1..1380: mol_type = other DNA
atgcctaactgcgtccccggccagggaagttgcatttccagcgggagaagctggggcagacgctatcagcgcccaggtccagcacagggattgaccaagggcacagaggagcgcaacgtcccaggcgcccacagcgttttcggtgcgcaaattcgagatagttattgggttatggaaggcctcttgctgagcgagatggcagagactgtcaaaggcatgctccagaatttcctcgatttggtcaagacatatggacacgtacctaacggcggaagagtgtactacctgcagcggagccagcctcctctgctcaccctgatgatggactgctacttaacgcacacaaatgatacagcattcctgcaggagaacattgagaccctggccctggagctggacttctggacaaagaatcgaactgtctctgtaagcttagaaggaaaaaactacttgttgaacaggtactacgtcccttacggcggcccaagacctgagagctactcaaaggacgtggagctcgccgatacactgccagagggggaccgcgaggcactgtgggcagaactgaaagcaggggccgagagcggttgggacttcagttcgaggtggttaattggcggccccaacccaaattcactctcaggcatacggaccagcaaactcgtgccagtggatctgaatgccttcttatgtcaagccgaagaactcatgtccaatttctactcacgcctcggcaacgactcacaggcgaccaaatatcggattctacgctcacagcgattggccgccctaaatactgtgttgtgggatgagcagaccggtgcatggttcgactacgatctcgaaaagaagaaaaagaaccgagagttttacccctccaacctcacgcctttgtgggctgggtgtttctctgacccaggtgtcgccgataaagcccttaagtatcttgaagacaaccggatcttgacctaccaatatgggatccccacatccttgcagaaaacggggcagcagtgggattttccgaacgcctgggccccattgcaagaccttgtcattcgaggactggcaaaagcacccctgcgaagggcccaagaggtggcattccaactggctcaaaattggatcaggactaacttcgacgtgtactctcagaagtctgccatgtacgagaaatatgacgttagtaatgggggccagcccggtggaggaggggaatatgaagtacaagagggcttcggctggacaaacggagtggtgctcatgctactggataggtacggggaccgacttacgagtggtcctaagttgccattcctggagccccactgtctggctactttgctgcccagcctactcctgtcacttctcccctggtag

SEQ ID NO: 138725 - DNA, 1641 bp, synthetic construct
  misc_feature 1..1641: note = Description of Artificial Sequence: Synthetic coding sequence
  source 1..1641: mol_type = other DNA
atgcccggacggacttgggaactttgtcttttgctcctgctcggtctcggactgggcagccaggaggcgctcccacctccctgtgagagcgagatctactgtcacggcgaacttctgaatcaagtgcaaatggccaagctgtaccaggatgataagcaattcgtggacatgccactctcaatcgctcccgagcaggtcctgcagacctttaccgagctgtcacgtgaccacaaccactccatcccaagagagcaactccaggcctttgtgcatgaacattttcaagccaaaggccaagaactgcagccttggacacccgccgactggaaggattcacctcaatttctccaaaagatttcagatgcaaaactgcgagcatgggctggccagttgcatcagctgtggaaaaagcttgggaagaagatgaagcctgaggtcctgtcacatccggagcggttcagtcttatctactctgaacatccattcatagtgcctggcgggagattcgtggagttctactactgctacgggcatgtgcctaatggggggcgcgtgtattacctgcagaggtctcagccccccctcctgacgctcatgatggactgctacctcacacacacaaacgacaccgcttttttacaggagaacatcgagaccctggcgctggaacttgatttttggaccaagaaccggaccgtgagcgtatcactggaagggaagaactacctattgaatcgttactacgtgccctacggcgggcctaggcctgagtcttatagcaaggatgtcgagctggccgatacactaccagagggcgatcgtgaggccctgtgggctgaattgaaagctggcgccgagagcgggtgggatttctcatctaggtggctgatcggaggtccaaatcccaattcactttctggcattaggacctctaagctcgttcctgtggacctgaatgctttcctgtgccaagcagaggaactcatgtcgaacttctatagccgcctcgggaatgattctcaggccaccaagtaccgcatcctgcgctctcagcggttagcggccctgaatacagtgctctgggatgaacagacaggggcttggttcgactacgacctggaaaagaagaagaagaaccgcgagttttatccaagcaacctcacacctctgtgggcaggctgtttttcagacccaggtgttgctgacaaagccctgaaatacctggaagataatcgcatactgacctaccaatatgggatccctacatcactgcagaaaactgggcagcagtgggactttcctaacgcctgggcccctcttcaagatttagttattcgcgggcttgccaaagcacccctgcgaagagcacaagaggtcgcctttcagctggcacagaactggatccgaaccaactttgatgtctactcacagaagagcgccatgtacgaaaagtacgatgtgagtaatggcgggcaacccggcggcgggggcgaatacgaggtgcaggagggcttcggctggactaacggggttgtgttgatgctactggacaggtacggcgaccggctcactagtggacctaaactgccattcctggagccccattgcctgggaccccctttctgcccagcatcctgctag

SEQ ID NO: 138726 - DNA, 1734 bp, synthetic construct
  misc_feature 1..1734: note = Description of Artificial Sequence: Synthetic coding sequence
  source 1..1734: mol_type = other DNA
atgcctggacgaacctgggaactgtgcttactacttctcctgggccttgggctaggtagccaggaagcactgccacctccttgcgaatccgagatatactgccatggcgagctactcaatcaggttcagatggccaagctgtaccaggacgacaaacaatttgttgatatgccgttaagcattgctccagaacaggtcctccagacattcaccgaactgtctcgtgaccacaaccactcaatcccaagagaacagctccaggcttttgttcatgaacactttcaggccaagggccaggagttgcagccctggacaccagcagattggaaggattccccccagtttctccagaaaatttctgacgcaaagctgagagcttgggctgggcagctccaccagctctggaagaagctggggaaaaagatgaagccagaggtcctttcccatcctgaacgattttctttaatttatagcgagcaccccttcattgtgccaggtgggcgcttcgttgagttctattactgggatagctattgggtcatggagggacttttattatctgaaatggccgaaaccgtgaaagggatgctgcagaacttcctcgacctggtgaagacgtacggccacgtccctaacggtgggcgggtgtactacctacagaggtctcagccaccattgcttaccctaatgatggactgctacctgacacatactaacgatacggcattcctccaggagaacattgagactctggcactggagctggatttctggacaaagaaccgaacagtgtccgtgtcactcgagggaaagaattacctgctgaatcgatactacgttccctatggcggtcctagacccgagtcctattcgaaagacgtggagctggctgacacgctcccggagggcgaccgcgaggccctctgggccgagctgaaagcaggggctgaatcgggctgggatttctcttctcggtggttaattggcggccctaatcctaattctttgtccggcatcaggacgtcaaagctcgtgccagttgacctgaacgccttcctctgccaagccgaggaactgatgagcaacttctatagccggttgggcaacgactcccaggccaccaagtaccggatccttagaagtcaacgtctagcggccttgaacacagttctatgggacgagcagacaggcgcttggtttgattacgacctcgaaaagaagaagaagaaccgggagttttatccctcaaacctgacgcctctatgggcgggctgcttcagtgatccaggcgtggcagacaaagcgcttaagtatctagaggataacagaattttgacgtaccaatacgggattccaacatctctgcagaagacgggtcagcagtgggatttcccaaacgcgtgggctcccctgcaggatcttgttatccgcgggttagcaaaagctcctcttagacgagcccaggaggtggcatttcagcttgctcaaaattggattcgcacgaacttcgacgtgtatagtcagaagtccgccatgtacgaaaagtacgacgtttcgaacgggggccagccaggcgggggcggggagtacgaagtgcaagaaggcttcggctggaccaacggagtggttctcatgctgctagaccggtatggcgaccgcctgacgagtggaccgaagttaccttttctagaaccacattgtctcgggcccccgttttgccctgcgagttgttag

SEQ ID NO: 138727 - DNA, 273 bp, synthetic construct
  misc_feature 1..273: note = Description of Artificial Sequence: Synthetic coding sequence
  source 1..273: mol_type = other DNA
atggaggagactaccgattggatctacggcttctttagtctattgtctgatatcatatctagcgaagacgaagaggacgatgacggcgacgaagacacagacaaaggcgagatcgatgaaccaccactgaggaagaaagagattcacaaggataaaacagaaaagcaggagaagcctgaacggaagattcagacaaaggattggtctgcaaactcctccaccatcagaacactcaagctgactcagctgaaaccgatttacatttgcacttag

SEQ ID NO: 138728 - DNA, 654 bp, synthetic construct
  misc_feature 1..654: note = Description of Artificial Sequence: Synthetic coding sequence
  source 1..654: mol_type = other DNA
atggaggaaaccacagactggatctatggatttttcagcctgctgtccgacatcatatcctcagaagatgaagaggatgatgatggagatgaggacaccgacaagggcgagattgacgagccccccctgcggaaaaaggaaatccacaaagataagaccgagaagcaggagaaacccgaaagaaagatacagactaaggtcacacacaaggaaaaggagaaaggtaaggaaaaggttagggagaaggaaaagcccgagaagaaagcgacgcataaggagaagatcgagaaaaaagagaagcccgagacaaaaacactcgcgaaggaacagaaaaaggcaaagactgcagaaaagagcgaggagaaaactaaaaaggaggtgaaagggggaaagcaggagaaggtgaaacaaacggcagctaaagtgaaggaagtgcagaaaacaccgtcaaaaccaaaggagaaagaagataaagaaaaagccgcagtctctaaacacgaacagaaagggttccccgggccgggcatccgcaattcctcatactattgccagtatattaagggccaaatcaatgcttggaacgatctgcgcactagtcttctccccattccctatctcagctgtggaaagatgtgctctaatttcaataattag

SEQ ID NO: 138729 - DNA, 2166 bp, synthetic construct
  misc_feature 1..2166: note = Description of Artificial Sequence: Synthetic coding sequence
  source 1..2166: mol_type = other DNA
atgaccgagatcacggcagaaggcaatgccagcaccaccaccacagtaatcgattctaagaacggctctgttcccaagtcacctggtaaggtgttgaaaagaaccgtaacggaagatattgtgacaactttcagcagccctgcagcctggctactggtcattgccctgataattacctggtccgccgtggctatcgtgatgttcgatctggtggactacaagaactttagcgcatcatccattgccaagataggtagcgatccactgaaactggtgcgcgacgcaatggaggagaccacggattggatatatggcttcttctccttactttccgacatcattagctccgaggacgaagaagacgatgacggcgacgaggacactgataagggggaaattgacgagcctccattgcggaaaaaggaaatccacaaggataagactgagaagcaggaaaagcctgaacgaaagatccagacgaaagttactcataaggaaaaggaaaaaggtaaggagaaggttagggagaaggaaaaaccagagaaaaaagccacacacaaggagaaaatcgagaaaaaagagaaaccagaaacaaaaaccctggcaaaagaacagaagaaagctaagacggccgagaaatcagaggaaaagacaaaaaaggaagtcaaaggaggaaaacaggagaaagtcaaacaaactgctgccaaggtcaaagaggtccagaaaactccatcaaagcccaaagagaaggaggataaagaaaaggctgccgtgtctaagcatgagcagaaggaccagtacgctttttgtcggtacatgatagatattttcgtacatggcgatctcaagcctggccagtctccggcgatccccccacctctcccgacggagcaggcttcacgcccgacccccgccagtcccgcacttgaagagaaagagggtgagaaaaagaaggcagaaaaaaaagttacctctgagaccaaaaaaaaggaaaaagaggatatcaagaagaagagtgagaaggaaacagccatcgatgtggagaaaaaggagccaggcaaagcctccgaaactaagcagggcactgttaagattgcggctcaggcggccgctaaaaaggatgagaaaaaggaggactcaaaaaagacgaaaaagcccgctgaagtcgagcagccaaaaggtaaaaaacaggaaaagaaggagaagcacgttgagcctgcaaaaagccctaaaaaggagcatagcgtacccagtgataagcaggtgaaggccaagacagagagagccaaagaggaaattggggctgtgtcaataaaaaaagccgttcccggcaagaaggaggagaaaacaacgaagacagtggaacaagagattcgaaaggagaagagcggtaaaacgagtagtatcctgaaagacaaggaaccaattaaaggaaaggaggaaaaggttcccgcctcactaaaagagaaggagcccgagaccaaaaaagatgaaaagatgagcaaagccggcaaagaggtgaagccaaagcctccccagctacagggaaagaaggaagagaagcccgaaccacagattaaaaaagaggctaaacctgcaatctccgagaaagtgcaaatccacaaacaggatatagtgaaacctgagaagacagtcagccacgggaagcctgaggaaaaagtgctgaaacaggttaaggccgttaccatcgaaaagactgccaaaccaaaacctaccaagaaggcggagcaccgcgagcgggagcctccatccattaagaccgataagcccaagccgaccccaaaaggtacctcagaggtgaccgagtcaggaaaaaaaaagaccgagatctctgagaaagagtccaaggaaaaggccgatatgaagcaccttagggaggaaaaggtcagcactcgaaaagaatccttgcagcttcacaacgtgacgaaggaggatgtagaggatgtgcccgcatccaagaaagcaaaggagggaacagaggatgtgtcacccacaaaacagaaaagccctatatctttctttcaatgcgtctatctagacggttataatggatacggatttcagttcccctttacacccgctgatcggccaggtgaaagtagtggccaggccaattctcctggacagaagcagcaagggcagtag

SEQ ID NO: 138730 - DNA, 81 bp, synthetic construct
  misc_feature 1..81: note = Description of Artificial Sequence: Synthetic coding sequence
  source 1..81: mol_type = other DNA
taaatccacaaggacaagacggaaaagcaggagaaaccggagcgtaagatacagaccaaagaggtgggccacagttcctag

SEQ ID NO: 138731 - DNA, 456 bp, synthetic construct
  misc_feature 1..456: note = Description of Artificial Sequence: Synthetic coding sequence
  source 1..456: mol_type = other DNA
tgaactcataaagaaaaagaaaaaggaaaagagaaagtgagagagaaagagaagccagagaaaaaggcgacacacaaagaaaagatcgagaagaaagagaaacccgaaactaagactctggctaaggaacagaaaaaagccaagaccgcagaaaagagcgaggaaaaaacaaaaaaggaggtaaaaggtggcaaacaagaaaaagtgaaacagaccgcggcaaaggttaaagaagtgcagaaaactcctagcaagcctaaggaaaaggaagacaaggagaaggccgctgttagcaagcacgagcagaaaggcttcccaggcccgggaatcaggaacagcagctactactgtcaatacatcaaggggcagatcaacgcctggaacgatctgaggacgagcctcctgccaattccttaccttagctgtgggaaaatgtgttccaattttaataattag

SEQ ID NO: 138732 - DNA, 2196 bp, synthetic construct
  misc_feature 1..2196: note = Description of Artificial Sequence: Synthetic coding sequence
  source 1..2196: mol_type = other DNA
atcgtagaaatctaccctcaaggaaacgctagcactacaaccacagtcatagattctaagaatgggtctgtacccaagagccccgggaaggttttaaaaaggacggtgaccgaggatattgtgactacattttcatccccagctgcctggcttttggttatcgcccttataattacctggtccgcagtcgcgatagttatgttcgacttggttgattacaaaaattttagtgcctcgagcatagccaagatcggaagcgaccccctgaagctggtgcgagatgccatggaggagaccacagactggatttacgggttcttttccctgctgagtgatatcatctcttctgaggatgaggaagacgatgatggagatgaggacaccgataagggcgaaatcgatgaaccaccactgcgcaaaaaggaaatccataaagataagaccgaaaagcaggaaaagcctgagcggaagatccaaacgaaagtcacgcacaaagagaaagaaaaaggaaaagaaaaagtgcgtgagaaagagaaaccggaaaaaaaagctacgcacaaagaaaagatcgagaagaaagagaaaccagagaccaagaccctggctaaggagcagaaaaaggcaaaaaccgccgagaaaagtgaggaaaagacaaagaaagaggttaaggggggcaagcaagaaaaggtaaagcagacagccgctaaggtaaaggaggtgcagaaaacaccatccaaacccaaggaaaaagaagacaaggaaaaggccgccgtgagcaagcacgagcaaaaggaccaatatgctttctgcagatacatgattgacatctttgtacatggagacttaaagcctgggcagagtccagccattccaccacctctccctacagagcaggcctctaggcctaccccggcttcgccggcactggaggaaaaggaaggagaaaaaaagaaggccgagaaaaaggtgacctctgaaaccaagaaaaaagagaaggaggacatcaaaaagaaatctgagaaagagaccgctatagatgtggagaaaaaagtgcaggagcctggtaaagctagcgagactaagcagggcacagtgaagatcgccgcgcaggctgcggctaaaaaagatgaaaaaaaggaagattcgaaaaagacaaagaaaccagcggaagtggaacaacccaaagggaaaaagcaggaaaagaaagagaagcacgtcgagcccgccaaatcaccgaagaaagaacatagcgtgccctcggacaaacaagttaaagccaaaacagagcgcgctaaagaggagattggcgctgtgagtatcaagaaggctgtaccaggaaaaaaggaagaaaaaacaaccaagactgtcgagcaggagatcagaaaagaaaagtccgggaaaacttctagcatacttaaagataaagaaccgatcaagggaaaggaagagaaggttcctgcgtccctgaaggaaaaagaaccagagactaagaaggatgagaaaatgtccaaggccgggaaagaggttaagccaaagccgcctcagttgcagggcaaaaaggaggagaagcctgagcctcagattaagaaagaggctaaacccgcaataagcgaaaaggtgcagatccacaagcaggatatcgtaaaacccgaaaagacagtctctcacggaaagccggaagagaaggtgctgaaacaagtgaaagcggtgaccatcgagaaaacagctaagcccaagcccacaaagaaggcagagcatagggagagagaacccccctccattaagaccgataagcctaagcccaccccaaaagggacgtccgaggtgactgaatccggcaagaagaagacagaaatttctgagaaggaatctaaggaaaaagctgacatgaaacaccttcgtgaggagaaagtatccacgaggaaggagtctctgcaactgcacaacgtgacaaaagccgaagaggtagactccaccctggaagacgtggaagacgttccggcctctaagaaggctaaggagggaaccgaagacgtgtcaccgaccaaacagaagtcccctataagttttttccagtgcgtgtacttggatggttataacggctacgggtttcaattcccgtttacacctgctgaccgccccggcgagtcatcaggacaggccaattccccaggacagaagcaacagggacagtag

SEQ ID NO: 138733 - DNA, 2190 bp, synthetic construct
  misc_feature 1..2190: note = Description of Artificial Sequence: Synthetic coding sequence
  source 1..2190: mol_type = other DNA
atgacagagatcacagctgagggaaacgcctccacaaccacgaccgtcatcgatagcaagaatgggtccgtgcctaaatccccagggaaggtgctgaagcgcaccgttaccgaggatatcgtaaccacattttctagcccagcagcttggctactggtgattgcactgatcattacctggtccgcagttgctatcgtcatgtttgacttggtggactacaaaaatttcagcgccagtagcatagctaaaataggctccgacccactaaaactcgtcagagacgcgatggaagagacaactgattggatctatgggtttttctctcttctgtccgacattatcagctcagaagatgaggaagatgatgacggcgatgaggatactgataagggagagatcgacgagcctcccctccgcaagaaagaaattcataaagacaagaccgagaaacaggagaaaccagagcggaaaatccaaacaaaagtgactcacaaagagaaggaaaaggggaaagagaaggtgcgggagaaggaaaaacctgaaaagaaagccacccacaaagaaaagattgagaagaaggaaaaacccgagaccaaaactctcgctaaggaacaaaaaaaggccaagacagccgaaaagtccgaagaaaagaccaagaaagaagtcaaaggaggtaagcaggaaaaagttaaacagaccgctgccaaggtgaaagaggtgcaaaaaaccccatccaaacctaaggagaaagaagataaagaaaaagccgccgtgtctaagcatgagcagaaagaccagtatgcgttttgccggtacatgatcgacatcttcgtgcatggtgacctaaaacctggtcagagtcccgccatacctccccccctacccaccgagcaggccagtcgaccaacccccgcctcacctgccttggaagaaaaggagggcgagaagaagaaagccgagaagaaggtaacctccgaaacgaagaaaaaggaaaaagaggacatcaagaagaaatcagagaaggagaccgcaattgacgttgagaagaaagagcccgggaaggcatctgaaacgaagcaggggacggttaaaatagcggcccaagcagccgcaaagaaggacgagaaaaaagaagacagcaaaaaaacaaagaagccagcggaggttgagcagccaaagggaaaaaaacaggaaaaaaaagaaaaacacgtggaacctgccaagagccccaaaaaggaacactccgtgccttccgataagcaggtcaaggccaagactgagcgcgcaaaagaagaaatcggagccgtcagcataaaaaaggcagtcccaggaaaaaaggaggaaaaaaccaccaagactgtggaacaagagattagaaaggagaaaagcggcaaaaccagttcaattctgaaggacaaagaaccaataaaagggaaggaggaaaaagtccctgctagcctcaaggaaaaggaacctgagactaagaaggatgaaaaaatgagcaaggctgggaaggaggtaaagccaaaaccgcctcaacttcagggcaaaaaagaggaaaaacctgaacctcaaatcaaaaaggaggcgaagccagcgattagcgagaaggttcagattcacaaacaagacattgtgaagcccgaaaaaacagtgagccatggcaagccagaggaaaaagttcttaagcaggtcaaggcggtaacgatcgagaagaccgccaagcccaaaccaactaaaaaagcagagcacagggaaagggaacccccaagtattaaaacggataagcccaagcccacacctaagggaacctccgaggttactgaatccggtaagaaaaaaactgagatcagcgaaaaagagtccaaagagaaagctgacatgaagcacctgagggaagaaaaagtctcaaccaggaaagagtcacttcagcttcataatgtgactaaagccgagaagccggcccgggtttcgaaggacgtggaagacgtgcccgccagcaagaaagccaaagaaggcactgaagacgtaagccccactaagcagaagagcccaatcagtttcttccagtgcgtgtatcttgacggatacaatggatacggcttccaatttcccttcactcctgccgatcggcccggggagagtagcgggcaggccaatagccccgggcagaaacaacaagggcagtag

SEQ ID NO: 138734 - DNA, 135 bp, synthetic construct
  misc_feature 1..135: note = Description of Artificial Sequence: Synthetic coding sequence
  source 1..135: mol_type = other DNA
tgaatccacaaagacaagactgagaagcaggaaaaacccgagcgcaaaatacagacaaaggactggtccgctaatagttctacgatcaggaccctgaagctaactcagctcaaaccaatttatatctgtacttag

SEQ ID NO: 138735 - DNA, 1038 bp, synthetic construct
  misc_feature 1..1038: note = Description of Artificial Sequence: Synthetic coding sequence
  source 1..1038: mol_type = other DNA
atcgtagaaatatacccacagggaaatgcgtctacaaccacgacagtgatcgactccaaaaatggctcggtgccgaaaagccctggaaaggtattgaaaagaaccgtgaccgaagatatagtaaccacgttctcatcccctgccgcatggctcctggtcatcgctctgattatcacgtggagcgcagtggccatcgtcatgttcgatctggttgactataaaaatttcagcgcatcctcaatagctaagattggcagcgatcccctgaaactagtcagagatgccatggaagagacaaccgattggatctacggattctttagcctcctgtccgatatcatcagctcagaggatgaagaggatgacgatggcgatgaagacacagacaagggggaaatcgacgagccccccctgcgcaagaaagaaatccataaggataagacggagaaacaggaaaagccagaaaggaaaatccaaactaaggtcactcacaaagaaaaggagaaggggaaagaaaaagtaagggaaaaggaaaagcccgaaaagaaagccacccacaaggaaaagatcgagaagaaggagaaacccgagactaaaactttagcaaaggaacagaaaaaagctaaaacagccgagaaaagcgaagagaaaacaaaaaaagaagtgaaaggagggaagcaggaaaaggtgaagcagactgctgcaaaagtgaaagaagtgcagaaaaccccttcaaagccaaaagagaaggaggataaggagaaggccgcagtctccaagcatgagcaaaaagatcagtatgccttctgcagatacatgatagacatatttgtacacggcgatctgaagcctgggcaatcacccgccattccacctccccttcctaccgaacaggcatcccgcccaactccagcgtcccctgcactagaggagaaggagggtgaaaagaaaaaggcagagaaaaaggtgactagcgaaactaagaaaaaagaaaaggaagatattaaaaaaaagaaaaaaaaaaaaaaaaaaaagtag

SEQ ID NO: 138736 - DNA, 504 bp, synthetic construct
  misc_feature 1..504: note = Description of Artificial Sequence: Synthetic coding sequence
  source 1..504: mol_type = other DNA
atgaccgaaatcaccgctgagggcaatgcctcaaccacaaccaccgttatagactctaaaaacggctcggtccccaagtcgcctggaaaggtgttgaaacgaacggtcactgaggacattgttacaacgttttcatctccagccgcatggctgctggtgatcgctctgattatcacctggagcgctgtggcaattgtcatgttcgacttggtggactacaagaactttagcgcaagtagtatcgcaaaaattggaagtgatccattgaagttggtcagggacgcgatggaggaaacaaccgactggatatatggattcttttccctcctgtccgacatcatctccagcgaggacgaggaagacgacgacggggacgaggacacggacaaaggagagatagatgagccacccctccgcaaaaaagagattcataaggataagactgaaaaacaggaaaagcccgagcgtaaaatccaaaccaaggaggtcggacactcatcgtag

SEQ ID NO: 138737 - DNA, 987 bp, synthetic construct
  misc_feature 1..987: note = Description of Artificial Sequence: Synthetic coding sequence
  source 1..987: mol_type = other DNA
atgactgagattacagccgagggaaacgcatcaaccaccactacagtcatcgacagtaaaaatgggtctgtgcccaagtcgccggggaaggttttaaaacggacagtgaccgaggatattgttacgacgttcagctctcccgctgcttggctcttagtcatcgccctgatcattacctggtctgccgtcgcaatcgtgatgttcgacctcgtggactacaagaatttttccgcctcctccattgcaaagattggtagtgatcctcttaagttggtccgcgacgcgatggaagaaaccacagattggatatacggtttcttttctttgctgagtgacatcatttccagcgaggacgaagaggacgacgacggtgatgaggataccgacaagggggaaatcgacgagcctccactgcggaagaaggaaattcacaaggacaagactgagaagcaagagaaacccgagaggaaaatacaaacaaaagttacccacaaggagaaagagaaaggaaaggaaaaagttcgggaaaaggagaaacccgaaaaaaaggcgactcataaagaaaagatcgagaagaaagagaaacccgagacgaagacgctggctaaggaacaaaaaaaggcaaaaacagctgagaagtcagaagaaaagactaaaaaggaagtgaagggcggaaagcaagaaaaagtcaagcaaactgcggctaaagtcaaggaagttcagaagaccccgagtaagccaaaggagaaagaggataaagagaaggcagctgttagcaagcacgagcagaaggaccagtacgctttctgcaggtacatgatcgatatttttgtacacggagacttgaaacccggtcagtcacctgcaatcccgccacccttacccactgagcaagcctcgaggccgactcctgccagcccagccctggagggagataaagcgtctaaggagaagaaaaggaaaatgaaaaggatgtccgaaaaatag

SEQ ID NO: 138738 - DNA, 894 bp, synthetic construct
  misc_feature 1..894: note = Description of Artificial Sequence: Synthetic coding sequence
  source 1..894: mol_type = other DNA
atgaccgaaattaccgcagagggtaacgcgagcactaccacgactgtcatcgactctaagaatgggtcagtaccaaagtctcctgggaaagtgctcaaacgaacagtcaccgaagatatagtcactaccttcagctcaccagccgcttggctactggtgatcgctctcatcattacatggtctgcggtcgctatcgtgatgtttgaccttgttgactacaagaacttcagcgcctcctcaattgccaagatcgggtcggatccattgaagctggtccgggacgccatggaggaaacgaccgattggatctatggctttttctcactcctaagcgacatcattagcagtgaggatgaagaagatgacgacggggatgaagacaccgataagggagaaatcgatgagcctccactgcggaagaaggagattcacaaggacaagaccgagaagcaggaaaagccggagaggaagatccaaacaaaagtgacccataaagagaaagaaaaaggtaaggagaaagtgcgtgaaaaggagaaacccgagaaaaaggcaacgcataaagagaaaatagaaaagaaggagaagcccgaaaccaagaccttggccaaggaacagaaaaaagcgaagaccgccgagaaaagcgaggagaagacaaaaaaagaggtgaagggagggaagcaggaaaaagtgaagcagaccgccgcgaaagttaaggaagtccaaaagactccatctaaacccaaggaaaaggaggacaaagagaaggccgcagtctctaaacacgaacagaagggtcaatctcctgcgattcccccacctctgccgactgagcaggcgagtagacccacacctgccagccccgcactggaggggaagtacttcttcttttcgtag

SEQ ID NO: 138739 - DNA, 5832 bp, synthetic construct
  misc_feature 1..5832: note = Description of Artificial Sequence: Synthetic coding sequence
  source 1..5832: mol_type = other DNA
atgagccccctcttgcgcagtatttgcgacatcactgagatcttcaaccagtatgtgagtcacgattgtgatggagccgcactgactaagaaagatctcaaaaatctcctggagcgcgagttcggtgctgtattgcgaaggccacacgaccctaaaaccgtagatctgattttggaactgcttgacttagacagcaacggacgcgtcgacttcaacgagttcctcctgttcatctttaaggtggcgcaggcgtgctactatgccctgggtcaggcgaccgggttggatgaggagaaaagagctcgttgcgatggtaaagagagcctgctgcaggaccggcggcaggaagaagatcagcgtagattcgaaccaagagacagacagttagaggaggagcccggtcagaggaggcgccagaagcggcaagagcaggaaagggagctggcagagggggaggagcaatcagagaaacaggagaggctggagcagcgggataggcaacgtagggacgaagaactgtggagacagcgccaggagtggcaggaaagggaggagcgacgggccgaggaagaacaactgcagtcctgcaagggccatgagacggaggaatttccggacgaggagcagctgcggaggagagaactgctggagctgcggcgcaaaggaagggaagaaaagcagcagcagagaagggagcggcaggatagagttttccaggaggaggaggaaaaggaatggcggaagcgcgaaaccgtgctccggaaggaggaagagaagcttcaggaggaagagccacagcggcagcgtgaactccaagaggaggaggagcagctaagaaaattagaacggcaagagctgcgccgagagaggcaagaggaggaacaacagcagcagcgactccggcgagaacagcagttaagacggaagcaggaggaggaaaggagagagcagcaagaggagcggcgtgagcagcaggaacggagagaacagcaggaggagaggagagagcagcagctgcggagagagcaggaagaaaggcgggaacaacagctgaggcgggaacaggaagaggagcgcagggagcagcagctgaggagagaacaagaggaggagagaagggagcagcagctgagacgcgagcaacagctccgcagagagcagcagctacggcgcgaacagcaactgagacgtgagcagcagttgaggagggaacaacaactcagacgcgagcagcagctcagacgcgaacagcagctaagacgtgaacaacagctgaggagggaacaggaggaagagcgacacgagcagaagcatgaacaggagcgtcgcgaacaacgtttaaagagggaacaagaagaaagaagagactggctcaaaagagaagaggagacagaaaggcacgaacaagaaagacgcaaacagcaacttaagagggaccaggaagaggaacgaagggaaagatggctcaagttggaagaagaggagagaagagagcaacaagagcggcgggaacagcagctccgacgtgaacaggaagagcggagggaacagcgtctaaagcgacaggaagaagaagaacggctccagcagcgattgcgctcagaacagcaactgagaagagagcaagaggagcggcgggagcagctcctgaagcgggaggaggaaaaaagacttgaacaagagcgccgggaacagcggttaaaacgggaacaggaggaacgtagagaccagctcctgaaacgggaagaggagcggagacagcagaggttaaagcgagaacaggaggagagacttgagcagaggttaaagcgcgaggaggtcgaaaggttggaacaggaagaacgtagggagcaacggcttaaaagagaagagcctgaggaggaaagaaggcagcagctgctgaagagcgaggagcaggaggagagaaggcagcaacaattgcgcagggaacaacaagaacgccgtgagcagaggctgaaacgtgaggaggaagaggagagactagagcagaggctgaaacgcgaacatgaggaggaacgaagggagcaggagcttgcagaggaagaacaggagcaggcaagggagcgcattaagtcacgtatccccaagtggcagtggcagttggaaagcgaggctgatgctcgtcagagcaaagtttactctagaccgaggaagcaggaaggccagcgacgccgccaagaacaggaggagaagagaaggcgacgggaaagcgaattgcagtggcaggaggaggaacgggctcaccgacagcaacaggaggaagagcaaagaagggatttcacttggcagtggcaggccgaagaaaaaagcgaacgaggtcggcaaagactctccgcgagacccccactgcgcgaacagagggagcggcagctacgggctgaggagcgccagcagagagagcagcgcttcctgcccgaggaagaagagaaggaacagcggagacgacagcgaagggagagagaaaaggagctgcagtttctcgaggaggaagagcaactgcaacgtagagagagagcccagcaactacaggaggaggaggatgggctgcaggaagaccaggagagacggaggtcccaggagcagagacgcgaccagaaatggcggtggcagttggaagaagaaagaaagcggaggagacacacactttatgccaaacccgcactgcaagaacaactgcggaaggaacagcaactgctgcaggaggaggaggaggagctccagagggaagagcgtgagaaacgtaggcgacaggaacaggaacgacaatatcgggaagaagagcaattgcagcaggaggaggagcagcttctgagggaagagcgagagaaacgccgaagacaagagcgagagcgtcagtacaggaaggacaaaaagctgcagcagaaggaggagcagctactcggcgaggagcctgagaagaggcgcagacaagagagggagaagaagtacagagaggaagaagaacttcagcaggaggaagagcagttgctgcgggaagagagggaaaaacgtcggaggcaggaatgggagaggcaatacaggaaaaaagatgagttacagcaagaggaggagcagctcctacgagaggagcgtgagaaacggcggttacaggaaagagaacgtcaataccgagaagaggaagaattacagcaggaagaggagcagctgttgggtgaggagcgcgaaactcggcgtcggcaggagctggaacgccagtaccgcaaggaggaggagttgcaacaggaggaggaacagttgttaagggaggagccagagaagcgacgcaggcaggagcgcgaaagacagtgcagggaagaggaagagttgcagcaagaggaagagcagctgctcagggaagagagagaaaagcgaaggaggcaggaacttgagcgccagtacagggaggaagaggaggtacagcaggaggaggaacaactcttaagggaagagccagagaagcggcgcaggcaggaactcgaaagacaatatagggaagaggaagaactccagcaagaggaggaacagttgttgcgcgaggaacaagagaaaagacgacaagagcgcgagcgacagtacagggaagaagaggaactccagcgtcaaaagcggaaacaaagataccgggacgaagatcaaagaagtgatctgaagtggcagtgggagcccgagaaagagaatgctgtccgcgataataaggtctattgtaagggacgcgagaacgagcagttccggcagctggaggactcccagctgcgagaccgccagagtcagcaggacctgcaacacctactgggcgagcagcaggaacgtgaccgtgaacaggagcggaggcgctggcagcagagggacaggcacttccccgaggaggaacagctcgagcgtgaggagcaaaaggaagccaagcggcgcgatcggaagtctcaagaagagaagcagctgctgcgtgaggagcgtgaggaaaaacgtcgtcggcaggagacagaccgtaaatttcgcgaggaggaacaacttctgcaggaaagagaagagcagcccctgcggcgacaagaaagagaccgaaaatttagagaagaagagttgcgccaccaggaacaagggagaaagttccttgaagaggaacagcgcctgcgccggcaggagcgggagcggaagttcctcaaggaggaacaacagctgaggtgccaggaacgggaacagcagttgcggcaggaccgggaccgcaagtttcgcgaggaagagcagcaattaagccgtcaggagcgcgacagaaagttccgtgaggaggagcagcaagtgcgaaggcaggagcgggagcgtaaattcctcgaagaggagcagcaactgagacaggaaaggcaccgtaaatttcgcgaggaggagcagttgctccaggagcgggaagaacaacagctccataggcaagagcgggatagaaagttcctggaagaggagcagcagttgcgccggcaggagcgagaccgtaaattcagagaacaggagctgcggtctcaggagccagagcgcaaatttctagaagaggagcaacaattgcaccggcaacagagacagcgaaagttcctccaggaagagcagcaattgaggcgccaggagagagggcagcagcgcagacaggatcgagaccggaagtttagggaagaagagcaactgagacaggagagagaggaacagcagctgtccaggcaggaacgcgatcgaaaatttagactcgaagaacaaaaggtaagacgacaggagcaggagagaaagtttatggaagatgaacagcagctgcgacgtcaggaaggacagcaacagttgagacaggagcgggaccgcaagttccgcgaggacgagcagttactgcaggagagagaggagcagcaactccaccgccaggagcgtgaccggaaatttttggaagaggaaccccagttgagacgccaggaaagggaacaacagttgcggcacgacagagatagaaagtttcgggaggaagaacagctgctgcaggagggggaagaacagcagctgcggagacaggagcgtgaccggaagtttagagaggaggaacagcaacttcgcagacaggagagggaaaggaagtttttgcaggaggagcagcagctgaggaggcaagagctagagcgcaagttccgggaagaggaacagctgcgacaggaaacggagcaggagcagctccggaggcaagagaggtaccggaagatattagaggaagagcagctgcgacccgagcgggaggagcagcaactgaggaggcaggagcgggaccgtaagtttagggaagaggaacaattgcggcaagagagggaagaacagcagcttcgctctcaggagagtgacagaaagttcagggaggaggagcagctccgacaggagcgggaggagcagcagttgcggccccagcagagagacggtaaataccgctgggaagaggaacagttgcaacttgaggaacaggagcaacggctcagacaagaaagggatagacagtatcgagcagaggagcaattcgctacacaggaaaaatccagacgggaggagcaggagctgtggcaagaggaagaacagaagcgaagacaggaacgggaaagaaaactccgggaagagcatatcagacgccaacaaaaggaggaacagcgacacagacaggtcggagagatcaagagtcaggaaggcaaaggccacggcaggctgctcgagcctggcacccatcagtttgcgagcgtgccagtgagatcttcccccctttatgaatacatccaggagcagcggagccagtaccgaccatag

SEQ ID NO: 138740 - DNA, 540 bp, synthetic construct
  misc_feature 1..540: note = Description of Artificial Sequence: Synthetic coding sequence
  source 1..540: mol_type = other DNA
atggctaagacagcgatggcctataaagagaagatgaaggaactttctatgctaagcctgatatgtagctgtttttatcctgaacccaggaacatcaacatatacacctatgatgatatggaggttaaacagattaacaagcgagcttcgggtcaagcattcgaactgatcttaaagccgccctctccaatatccgaggcaccacgaacactggctagtcccaagaagaaagatttgtccctcgaggaaatccagaagaagctggaagctgccgaagaacgccggaagagccaagaagcccaggttctgaaacaactcgccgaaaaacgcgagcacgaacgcgaggtgttacagaaggctctggaggagaataataacttcagcaaaatggcggaagagaagctgattctgaagatggaacagatcaaggaaaacagggaggctaacctcgcagcaattatagaacgcctccaggaaaaagagcgccatgcagccgaggtgcgtcggaataaagagcttcaagtggagctatctggatag

SEQ ID NO: 138741 - DNA, 3885 bp, synthetic construct
  misc_feature 1..3885: note = Description of Artificial Sequence: Synthetic coding sequence
  source 1..3885: mol_type = other DNA
atgccatacgaggttaatgctggctatgatttcacaaacatggttagaaagaaaaaccctcctcttcggaatgtggctagcgagggggaggggcagattttggagcctataggcaccgagagcaaggtttctggaaaaaataaggaattctcagccgaccagatgtcagagaataccgaccaatcagatgcagcagaactgaaccataaagaggaacacagcctgcacgtccaagaccctagctccagctccaaaaaggatctcaaaagtgccgtgctgagcgagaaagccggtttcaactatgagtccccctccaaaggggggaacttccctagttttcctcacgacgaagtcaccgatcgcaacatgctggccttctcctcgccagcagctgggggtgtttgtgaacctctgaagtcacctcagagagcagaggccgatgatcctcaggatatggcttgcacgccgagcggcgattctctggagacgaaggaggaccagaaaatgtcacccaaggccaccgaagagaccggccaggcccaatccggacaggcaaattgtcagggtctgagtcccgtctcagtagctagcaaaaatccccaggtgccatctgacggcggagtaagattaaataaatccaaaactgacctgctggtgaacgataaccctgacccagcccctctgtcacctgaacttcaggatttcaagtgcaatatttgtggatatgggtattatggcaacgacccgactgacctgattaagcatttccgcaagtaccacctgggtctgcataataggaccagacaggacgcagagcttgattcaaagattttggctctgcataacatggtgcaattttctcatagcaaggatttccagaaagtgaatagaagcgtcttctctggcgtcctccaggatattaacagctccaggcccgttttgctgaacggaacttacgacgtgcaggtcacgtcaggtggaacgttcataggcatcgggcgtaagactccggattgtcagggaaatacaaagtacttccgatgcaaattctgtaattttacatatatgggaaattcgagcactgagctagaacagcatttccttcagacgcacccgaacaaaattaaagccagtttgcccagctctgaagtcgctaaaccttccgagaagaatagtaataaatcaatacctgctctccaatcctctgattcaggggacttaggtaagtggcaggataagattaccgtgaaggcaggagatgacacacccgtcgggtactccgtcccaataaaacctctcgattctagtcgacagaatggtacagaagctactagctattattggtgcaagttttgttctttttcctgcgagtcgtcatctagtttgaagctacttgagcactacggcaaacagcacggtgccgttcagtccggaggtctcaatccagaactgaatgacaaacttagtagaggctctgtgataaatcagaacgatcttgctaagtcgagtgagggagagacgatgacaaagacggacaagtcctcaagcggagcaaaaaagaaagattttagcagcaagggggcagaggacaatatggtgacatcctacaattgccagttttgtgactttcggtatagcaagagccacggacccgacgtaatcgtggtaggtccacttcttcgacattatcagcagctccacaatatccacaagtgtacgataaaacattgccctttttgtcctcgcggactgtgttctccagaaaagcacctgggggagatcacctaccccttcgcctgtcgcaaatccaattgttctcactgcgccttgttgctgctgcacctcagccccggggccgcaggaagcagtagagtgaagcaccagtgtcatcaatgcagttttaccacacctgatgtggacgtgctactatttcattacgagtccgtccatgagagtcaggcatctgacgtgaagcaagaagctaaccatctgcagggcagtgacgggcagcagagtgtcaaggagtcaaaggagcactcatgtaccaaatgtgacttcatcacacaggtggaagaggaaattagtcgccactataggcgggcccacagctgttacaagtgtagacaatgttccttcacagccgcagatacccagagccttctggagcactttaatacagtgcattgccaggaacaggatatcacaactgccaacggagaggaggatgggcacgccatttcaacgattaaggaagagcctaagattgactttcgggtatacaatctgctgactcccgattcaaaaatgggagagcccgtctctgagagcgtagtgaagcgggaaaaactcgaagagaaagacggcctcaaggagaaagtttggactgagagcagtagcgacgacttgcgtaacgtgacatggcggggagcagacattcttcgtggttccccttcctacacacaggccagtttagggctgctgaccccagtctctggcacccaagaacaaaccaaaacactgcgcgattctcctaatgtagaggccgcccacctcgcacggcctatttacgggctcgccgttgaaaccaagggctttcttcagggcgccccggcaggcggagagaagtcgggcgccctccctcaacaatatccagcatccggagaaaataagtctaaggatgagtcccagtccctgctgaggcgacgtagggggagtggagttttttgcgcaaactgcctaaccacaaaaacctccttgtggcgcaagaacgccaacggcgggtatgtctgcaacgcatgcggtctctaccagaagcttcattctaccccacgcccacttaacattattaagcagaacaacggggaacagatcattcgccggcggactaggaaaagactgaaccctgaagcactgcaggccgaacaactgaataagcaacaaaggggttctaacgaagagcaggtcaacgggtctccactggagcgccgatccgaggatcacctgaccgagtcccatcagagggaaatccctttgccttccctctccaaatatgaagcccagggctccttaactaaaagccactctgcacagcagcccgtgctggtgtcacagaccctagacatccacaaacgcatgcaacccctgcatatccaaataaagagtccccaggaaagcacgggggatcctggtaactcatctagcgtctccgaggggaaggggagctctgagcgcggatcaccgattgagaagtacatgcgccctgctaaacaccccaattacagtccccccggatcccccatcgagaaatatcaatatcccttgtttggattgcctttcgtccataatgattttcagtcagaggccgattggcttcgattttggtcaaaatacaagttgtcagtgccagggaatccccactacttgtctcatgtcccggggctgcctaacccttgccaaaactacgtgccgtacccgaccttcaacctgccgccacatttcagcgcagtggggagtgacaatgatatcccactggacctggccataaagcacagcaggcctggaccaacagccaatggcgcctctaaggagaaaacaaaggctccccctaatgtgaagaatgagggaccacttaatgtggttaagacggaaaaggtggaccgttccacacaggacgaactgagcaccaagtgtgtgcattgtggcatcgtgtttctggacgaggttatgtatgctctacacatgagctgccatggggactctggacccttccaatgctccatttgccagcacttatgcacagataaatacgatttcacaacccatattcaaagagggctgcatagaaacaacgcgcaggttgaaaagaacgggaaaccaaaggagtag

SEQ ID NO: 138742 - DNA, 3858 bp, synthetic construct
  misc_feature 1..3858: note = Description of Artificial Sequence: Synthetic coding sequence
  source 1..3858: mol_type = other DNA
atgcagtctaacatggtgcgaaagaagaatcccccattaagaaacgtggcctcagagggtgagggtcagatcttggagcccatcggtaccgagtccaaggtgtcgggcaagaataaggagttttctgctgaccaaatgagcgagaacacagaccagagcgatgccgccgaacttaatcataaggaagagcattctctgcatgtccaggaccctagttccagtagtaagaaagacctcaaaagtgcagtgctaagtgagaaagccggcttcaactatgaatctccatcgaaagggggaaactttccgtctttcccacatgatgaagtgaccgataggaatatgttggcgttttcgagccccgctgctggaggcgtgtgtgaaccccttaagagcccacagagggccgaggcagatgacccccaggatatggcctgcaccccatccggagatagtttggaaactaaggaggaccaaaagatgagcccaaaggcaacagaggagacaggacaagcccagagtggacaagctaattgtcagggcctaagtcccgtgtctgtggctagcaaaaacccacaggtaccttcagatgggggagtccgcctcaacaagtcaaagaccgacctgttagtaaacgataatcctgatcccgccccactgagccctgagttgcaggacttcaagtgcaatatctgcggttacggttattatggcaatgaccctactgacctgataaagcacttccgaaagtatcacctcgggctacacaacaggactcgacaagacgctgaactcgatagtaaaatcctggccttacacaacatggtccagttttctcatagtaaggacttccagaaggtaaataggagcgtgtttagcggcgtgctgcaagacatcaactccagcagaccggtgttgcttaatggaacatacgacgtgcaggtgacttcaggtgggacgtttatcggcatcggccgcaaaacccccgattgccaggggaacaccaaatatttcaggtgtaagttttgtaactttacttacatgggtaacagcagtaccgagctggaacagcacttcctgcagacccatcccaataagatcaaagcctccttaccatcctctgaggttgccaagccttccgagaagaactctaacaaatctatacccgcgttgcaaagtagcgactctggcgatctgggtaagtggcaggacaagattaccgtgaaggccggagatgatactcctgtcggctattctgttcctatcaagcccctcgactccagtaggcagaacggtacagaggccacctcatactactggtgcaaattctgtagtttcagctgtgaaagcagcagctccctaaagttgctggaacactatggaaaacaacatggggccgtccagagcggagggctgaatccggaactcaatgacaaactctctaggggatcagtcattaaccagaatgatctggctaagtcctctgagggcgagacgatgacaaagactgataagtcctcgagcggcgctaagaagaaagacttctccagcaaaggcgcagaagataacatggtgactagctataactgccagttctgcgatttccgatattcaaaaagccatggacccgacgttattgttgtcggaccccttctgcgccactatcagcagcttcacaatatccacaaatgcacaatcaagcattgccccttctgccctagaggtctttgttcccccgaaaaacatctgggtgagatcacctatccctttgcatgtcgaaaatccaattgctctcactgcgctctgctactcttgcacctcagcccaggtgcggcggggagctccagagtgaagcatcagtgtcaccagtgttcctttaccacacctgacgtggatgtgctgttgttccactacgagtctgtgcacgagagtcaagcctccgacgtaaagcaggaagcaaaccatttgcagggcagcgacggccaacagtctgttaaagagagtaaggagcacagctgtactaaatgcgattttatcacccaggtcgaggaagaaatcagtcgacactataggagggcccattcatgttataaatgtagacaatgtagcttcacggccgctgacactcagtcccttttggagcactttaatacggtacattgccaggagcaggacattaccacggccaatggtgaggaggacggccacgctatatccacaattaaggaggaaccaaaaatcgattttagagtgtacaacttgcttacaccagacagtaaaatgggcgaacccgtaagtgaaagtgtcgttaagagagagaaattagaagaaaaagacggcctgaaggagaaagtgtggaccgaatcatccagtgatgacctgcgaaacgtaacttggcggggtgcagacattctgcgggggtcaccgtcatacacgcaggcgagtcttgggcttctgactcctgtgtcgggaactcaagaacaaacaaaaacacttagagacagcccaaacgtcgaggccgctcacctggcccgacccatctatggcttggcagtggagactaagggatttttgcagggagcccccgcaggtggagagaagagtggggctctgcctcagcagtatcccgcctccggagaaaataaatctaaggatgaatcacagtctctgctgcgtaggaggcgtggatccggagtgttttgtgcaaattgcttaactaccaaaacatctctttggaggaagaacgctaatggagggtacgtgtgtaacgcatgtggactgtatcagaaactgcatagcaccccgagacccttgaatatcattaaacagaacaacggagagcagataattaggcggcgcactaggaagcgcctcaatcccgaggcactgcaggcagagcagctgaacaagcaacagcgagggtccaatgaagaacaggttaacgggtctcccctagagcgtcggtccgaagaccatctcactgagtcacatcagcgggaaataccgctcccaagtctcagcaagtacgaggctcagggttcactgacaaaatcccattccgctcaacaacccgtgctcgtgtcccagacactggatattcacaaacgcatgcagccccttcacattcagattaaatccccacaggagtcaaccggcgatccaggcaatagctcaagcgtgtccgaagggaagggaagtagcgaacggggctcaccaatcgagaaatatatgcggcccgcaaagcaccccaactatagcccacccggcagtcccattgaaaaatatcagtaccccctatttggtcttccttttgtgcataatgacttccagagcgaggccgactggctgaggttctggtctaaatacaaactgagcgtccctgggaatccacactatttaagtcatgtcccaggactgccaaatccctgccagaattatgtcccttaccccacctttaatcttcccccccatttctcagctgttgggagcgataatgacatccccctggacttagctatcaagcactctagacccggcccgactgccaacggcgcatctaaggagaaaacgaaagctcctccaaacgtcaagaacgagggccctttaaatgtggtaaagaccgaaaaagtcgatcgctccacacaggatgagctgagtactaaatgcgtgcattgcggcatagtctttctagacgaagtgatgtacgccctgcatatgagctgtcatggcgacagcggacctttccagtgttctatctgtcaacacctgtgcacggacaaatacgatttcactacccatatccagagggggctccaccgtaataacgcacaggtggagaagaatggaaagccgaaggaatag

SEQ ID NO: 138743 - DNA, 705 bp, synthetic construct
  misc_feature 1..705: note = Description of Artificial Sequence: Synthetic coding sequence
  source 1..705: mol_type = other DNA
atgcgcaagactagactgtggggccttttgtggatgctgtttgtgtcagagctgcgagccgcaactaaattgaccgaggaaaagtacgaactcaaggaggggcaaacgctcgacgttaaatgcgattatacgcttgagaagtttgctagcagccagaaagcgtggcagatcattagggatggcgaaatgcctaaaaccttggcctgtaccgaacgacccagtaagaattcacatcccgttcaggtgggccgcataatcctggaggattaccacgatcatgggctcctaagagtgagaatggttaacctgcaagtcgaggatagtggcctttatcaatgtgtaatctatcagccaccaaaggagccgcacatgctatttgatcgaattcgccttgttgtaactaaaggattttcagggactcccggttctaacgaaaacagtacccagaacgtctataaaatccctcctactaccaccaaggcattatgtcccctatatacctctccaagaacagtcactcaggctccccccaagagcaccgctgacgtgagcacccccgactccgaaattaacctcactaacgtcaccgatataatcagagtgcccgtgtttaacattgtgatcttgttagcagggggctttctcagtaagtccctggtgttctcggtgctgttcgctgtaacactgcgctccttcgtgccctag

SEQ ID NO: 138744 - DNA, 453 bp, synthetic construct
  misc_feature 1..453: note = Description of Artificial Sequence: Synthetic coding sequence
  source 1..453: mol_type = other DNA
atgcggaagaccagattatggggtctgttgtggatgctgtttgtatctgaattgcgggcagccaccaagctgaccgaggaaaaatacgaactgaaggagggccagaccctggacgtcaaatgtgactacaccctcgaaaagttcgcatctagccagaaggcttggcagatcatccgggacggtgagatgccaaaaaccctcgcctgcactgagcgtccatctaagaattcgcaccctgtccaagttggtcgaattattctggaagattatcacgaccatggactccttagagtacggatggtcaatctccaggtggaggattctggcttgtaccaatgcgtcatataccagccccccaaagagccgcatatgctatttgaccgtatccggttggttgttactaagggttttaggtgttcgactctgtcattttcttggctggtggattcgtag

SEQ ID NO: 138745 - DNA, 678 bp, synthetic construct
  misc_feature 1..678: note = Description of Artificial Sequence: Synthetic coding sequence
  source 1..678: mol_type = other DNA
atgaggaagacacggctatgggggctgttatggatgttgtttgtgtccgagctgcgcgcagctacaaaactcacagaggaaaagtacgaactaaaagagggccagactttggacgtaaaatgcgactacacactggaaaaatttgcctcctcacaaaaggcttggcaaatcataagagacggcgaaatgcccaaaaccctggcttgtaccgaaagaccatctaagaacagtcaccctgtgcaggtcgggaggataatccttgaggactatcacgatcatggcctactgcgcgtccgcatggttaatctccaagtggaggattccggcctctatcagtgcgtgatataccaaccgcctaaagagccccacatgctcttcgatcgcattcgcctggtagtcacaaagggcttcagtggcacacccgggtccaacgagaattcgacccagaacgtgtataagatcccgcccactactacaaaggccttgtgccctctgtacacttcacccaggaccgttactcaggcgccgcccaagtccactgccgatgtatccacaccagacagcgagattaatctcacaaacgtaactgacattatcaggtactcgtttcaggtccctggcccattggtttggactctgagtcccttatttccatccctgtgtgccgaacggatgtag

SEQ ID NO: 138746 - DNA, 501 bp, synthetic construct
  misc_feature 1..501: note = Description of Artificial Sequence: Synthetic coding sequence
  source 1..501: mol_type = other DNA
atggagcctttaagactactcatcctcttattcgtaacagagttaagcggggcgcacaacaccactgtctttcaaggggtggctggccaatctctgcaggtgagctgtccatatgattctatgaagcactggggcagaagaaaggcctggtgcaggcagctgggggagaaaggcccgtgccaacgtgtagtgtctactcacaacctgtggctgctgtcctttttgcgccggtggaacggctcaacggctatcacggacgacactctcggcggcaccctgacaatcacgctacgcaacttgcagcctcacgacgcaggcctgtaccagtgccaatctctgcatggaagcgaagctgatacactccgcaaggtgctggtagaagtcctggcagatcccctggaccacagagacgcaggagatctgtggttccctggggaatccgaaagtttcgaagatgctcacgtggagcattcaatcagtcgggcagagaggcacgtttag

SEQ ID NO: 138747 - DNA, 693 bp, synthetic construct
  misc_feature 1..693: note = Description of Artificial Sequence: Synthetic coding sequence
  source 1..693: mol_type = other DNA
atggagccattgagattactcatactgttattcgtgaccgagctgagcggggcccacaacacgactgtatttcagggggtggcgggacagtctttgcaggtgagctgcccctacgattccatgaagcattggggcaggaggaaagcttggtgtcgtcaattaggagaaaaaggcccttgccagagggtagttagcacacacaatctgtggctgctgagctttcttagaaggtggaatgggtctacagctattaccgatgataccctagggggaacacttaccataactctgcggaatcttcagccccacgatgccggcttgtatcaatgccagtcactgcatggttctgaggctgatacccttcggaaagtacttgtggaggtgctggcagaccccctggaccaccgcgacgcaggcgacctctggttccccggggagtccgaatctttcgaggatgcccatgtagaacactcaatctctcggtcgctgctcgagggcgagatcccattccctcctacctcaatcctgctcttgctggcgtgtatcttcttgatcaagattctcgcagcttcagctctctgggccgcagcctggcacggccaaaagcctggaacgcacccaccctcagaactagattgtggacatgatccagggtatcagctccaaacactcccgggtcttcgggatacctag

SEQ ID NO: 138748 - DNA, 660 bp, synthetic construct
  misc_feature 1..660: note = Description of Artificial Sequence: Synthetic coding sequence
  source 1..660: mol_type = other DNA
atggagcctttaagactccttatacttctcttcgtgacagaactgtccggggcccataacaccacagttttccagggagtagcaggccagagtctccaggtgagctgtccttacgattcgatgaaacactggggccggagaaaagcctggtgcaggcagctcggggagaaaggaccttgccagcgggtcgtctcaacccacaatctgtggcttttatcgttcttacgtcgttggaacggctcaaccgcaatcaccgatgatacgctggggggtactctcaccatcacattacgcaacctccaacctcatgatgcaggcctctaccagtgtcagtctctgcacggaagtgaggctgacacgttacgcaaagtcttggtggaggtacttgctgatccgctcgaccatcgcgacgccggagatttatggttccccggagaatctgagtcctttgaggacgcccacgtggagcatagtatcagccgagccgaaaggcacgtcaaggaagatgatggcaggaaaagccccggggaagttcccccaggaacaagcccagcatgcatactggcgacctggccaccaggccttctcgttctgctttggcaagagaccacgttaccggagcactgtttttcttggacacttgaggctggcaccgggtag

SEQ ID NO: 138749 - DNA, 936 bp, synthetic construct
  misc_feature 1..936: note = Description of Artificial Sequence: Synthetic coding sequence
  source 1..936: mol_type = other DNA
atgggtctgacattactgcttctgctgctcctcgggcttgaaggtcagggcatagtgggctcactgcctgaggtgttacaggcaccagtcgggagctcaatcctggtccagtgccactaccgcttgcaggatgtcaaagctcagaaggtgtggtgccgattcttgcctgaaggctgccaacccttggtgtccagcgccgtagacagacgcgcaccggcaggccggaggacatttctcactgatctcggcggtggcctcctgcaagttgagatggtaacactacaagaggaggatgctggtgagtatggttgcatggtcgacggagctaggggccctcaaatcttacaccgcgtgagcctgaacattcttcctccagaggaggaagaggaaacgcataagattgggtccttggccgaaaacgccttctccgaccctgccggctccgccaatcccctcgagccttcacaagacgagaagagtatcccactgatttggggcgcggtgctgctggtcggccttctggtcgcagccgtggttctttttgccgttatggccaagaggaagcagggtaacaggttgggggtgtgcggcaggttcctgtcaagcagggtgtccgggatgaacccgtcttctgtcgtgcaccatgtgtcagacagtggtccagctgctgaactgcccttagatgtgccccacatccgacttgacagcccgccttctttcgacaacaccacatatactagcctgcctcttgacagtccctcgggaaaaccatcgttgcctgcaccatcctccctgccccccctgccacccaaggttctcgtgtgtagtaagcctgtgacgtacgcaactgtgatctttcccggcggcaacaagggagggggaaccagctgcggcccagctcagaatcccccaaataaccagaccccctcctcctag

SEQ ID NO: 138750 - DNA, 600 bp, synthetic construct
  misc_feature 1..600: note = Description of Artificial Sequence: Synthetic coding sequence
  source 1..600: mol_type = other DNA
atggggttgaccctgctgctgctcttactgctggggctagaaggccagggaatcgtaggttccctaccagaagtcctccaggccccagtcgggtcctccattcttgtccaatgccactaccgcctgcaggatgtgaaagcccagaaggtatggtgccgctttctgccagagggctgccagcctttagtaagttcagcggtcgatcgtagggctcctgctggcagacgcactttcctgacagatctgggaggtggactcctgcaggttgagatggtgactctccaggaggaggatgccggtgagtatggatgtatggtcgacggggccaggggcccacaaatcctgcatagggtgtccctcaacattctgccaccagaggaggaggaagagactcataaaattggctctctagctgagaacgccttctcagatcctgcgggaagcgccaacccactggagccctcccaggatgagaaatcaatcccgctcatctggggcgccgtactcctggtgggtttgctggtagcagcggtggtcctatttgcggtcatggccaaacgcaagcaggagtctctgcttagtggcccaccacggcaatag

SEQ ID NO: 138751 - DNA, 603 bp, synthetic construct
  misc_feature 1..603: note = Description of Artificial Sequence: Synthetic coding sequence
  source 1..603: mol_type = other DNA
atggggctcacattattgctcctcttactgctgggactggaggaggaggaagaggaaactcacaagatcggaagcctcgccgagaatgccttctccgatcccgccggatctgcaaaccccctagagccttcccaggacgagaaaagcattccgctaatctggggtgccgtactgctggtgggactgttggttgctgcggtggtgctcttcgccgtcatggccaagagaaaacaggggaaccgcctgggagtgtgcgggcgcttcctgtcgtcgcgggtatctggcatgaatcccagcagtgtcgttcaccacgtttcagactcggggccagcagccgaactacccctggacgttccacatatacgcctggacagcccaccatcttttgataacaccacttacaccagcctccccttggattctcccagcgggaaacccagtctccccgccccaagctccctaccccccttaccgccgaaagtgcttgtttgttcgaaacctgttacatacgccacagtgatttttcccggcggtaataagggcggcggtacatcatgtggtcccgcacagaacccacccaacaaccagacaccgagctcctag

SEQ ID NO: 138752 - DNA, 966 bp, synthetic construct
  misc_feature 1..966: note = Description of Artificial Sequence: Synthetic coding sequence
  source 1..966: mol_type = other DNA
atggcccctgcatttctcctgctgttgctgttgtggccccagggatgtgtgagtgggccctctgccgactcagtttacacgaaagtgcgcctgctcgagggggaaactctctcggtgcagtgttcttataagggatacaagaacagggtggagggcaaggtctggtgcaagatccggaaaaaaaaatgcgagcccgggttcgccagagtctgggtgaaagggccaagatacctgttacaggatgacgcgcaggccaaagttgtgaatatcaccatggtagccttaaagctgcaggactccggaagatattggtgcatgagaaatacatctggtatactctatcctctcatgggattccagctcgatgttagtcccgcacctcagactgagcgaaacatccccttcacccacctcgacaatattttgaagtctgggactgtgactacaggtcaggcacccacatcaggcccagatgcccctttcactaccggtgtcatggtgttcacgcctggactgattactctcccaagactcctggcctctaccaggcccgcctccaaaaccggctacagcttcacagcaacaagcacgacttctcaaggcccgaggcgtacaatgggttcacagacagtgacagcatccccctctaatgccagggattcttccgccgggcccgaatcaatatcgaccaaatctggagatctgtctacgcggagccctactactggcttatgcctgacatcccgttcactgttgaaccgcctgccatcgatgcctagcatcagacatcaagatgtgtactcgaccgtcctcggcgtcgtgctgaccctcctggttcttatgctgatcatggtgtatggcttctggaaaaaaaggcatatggcttcttactccatgtgcagcgacccgagtacccgagacccacctggccgccctgagccttacgtggaagtgtatctcatctag

SEQ ID NO: 138753 - DNA, 2562 bp, synthetic construct
  misc_feature 1..2562: note = Description of Artificial Sequence: Synthetic coding sequence
  source 1..2562: mol_type = other DNA
atgtgctgcgaaaaatggagtcgggtggccgagatgttcttatttatagaggagcgggaggattgtaagatcctgtgtctgtgttcacgggccttcgttgaagacaggaaactgtataatctgggattaaaggggtactacattcgcgattcgggaaataattctggggaccaagcaacagaggaagaagaagggggctactcatgcggaacagccgagagtcatgacagcaaaggcattggtctggacgagtcggaactcgactctgaagctgagcttatgcggtctatgggtctccctttgcagttcgggaggattacagcccacaaggattttgaggtgagcatgaatactcgtaacaaggttaaaattaaaaaaaaaaaacaccaaaaaaagtatttggacgagatcgttcaggagagctggagaaaggagtatgaggaggacgacatcttggcttccgacgatcctagctcgatcgagcagtatgagaacacccgcacatacgaactgcagtccaagaaagacactgagaccgaaaacccaccagtggagaatactctgtcacccaagttggaaattacagaaaagtgggagaagtattggaatgaatacgggggcggcttgttgtggcagtcatggcaggaaaagcatcccggccaagcccttagctccgagccgtggaattttcccgacactaaggaagagtgggaacaacactacagtcagctatattggtattatctcgagcagttccaatattgggaggcacagggctggaccttcgacgcctctcagtcttgcgatactgacacctacaccagtaaaacggaggcagacgataagaatgatgaaaaatgcatgaaggtcgacctggtttccttcccgagcagccctatcatggtagacaatgactcctctgggacgtccgataaggaccattccgaaattctcgatggtataagcaacataaaattgaattctgaagaagtgactcagagccagctcgactcctgcaccagtcacgatggccatcagcaattgtctgaggtgtcttcaaagcgcgaatgtccagcatcggggcagtctgaaccccgcaacggaggtaccaacgaagaatctaattcctcaggcaatactaatactgacccacccgcagaggactcacagaagagcagcggggccaatacgtccaaagatcgccctcacgcctctggtactgatggggacgaaagcgaggaagatccgcctgaacataagcccagcaagttgaagcggagccatgagctggacatcgatgaaaacccggctagcgattttgacgatagcggcagtcttctcggtttcaagtacggttccggccagaagtacggtggaatccctaacttctcccaccggcaggtgcggtatctcgagaaaaacgtgaaactcaaaagcaagtatctagacatgagaaggcaaataaagatgaaaaacaaacacatcttcttcaccaaggagtccgagaaacctttcttcaaaaaatctaaaatcctgtctaaagtggagaaatttctgacgtgggtgaataagccgatggatgaagaagcgtcccaggaatcctcgtctcacgacaacgtgcatgatgcctctacaagcagcgatagcgaggagcaggatatgagcgtaaagaaaggggatgaccttctggaaactaataatccagaacctgaaaagtgccagagtgtgtcaagcgctggagagctggagacagaaaactatgaacgagactcactgctggcgacagtgcctgatgaacaagactgtgtgacccaggaagtcccggattcacgccaggctgaaacagaagccgaagtgaagaagaagaagaacaagaagaaaaacaagaaagttaatggactcccacccgagatagctgcggtccccgagttagctaaatactgggcccaacggtaccgcttgttctctcggtttgacgatggtatcaaactggatcgtgagggctggttttctgtgacccctgagaaaattgctgagcatatagccggccgggtgagccagtcgtttaagtgcgacgtggtagtggacgctttctgcggggtgggaggcaacactatccaattcgctctaacaggcatgcgagtgatcgctatcgacatagatcccgtgaagattgctctcgcacgtaacaacgctgaggtgtatggtattgctgataagattgaatttatctgtggcgattttttgttacttgccagcttcttgaaggctgatgtggtgttcttgtctcctccttggggaggacccgattatgctactgctgagactttcgatatccggacgatgatgagtccagacggattcgagatcttccggctgagcaagaagattaccaataacatagtgtatttcctgcctcgcaatgctgatatcgatcaggtagcctcccttgcagggcctgggggccaggttgaaattgagcagaacttccttaataataagttgaagacaattaccgcgtacttcggcgatttgattagacggcctgcgagcgagacgtag

SEQ ID NO: 138754 - DNA, 1266 bp, synthetic construct
  misc_feature 1..1266: note = Description of Artificial Sequence: Synthetic coding sequence
  source 1..1266: mol_type = other DNA
atgtggtaccatcgactgagtcacctgcatagtcggttgcaagatctgctgaaaggcggcgttatctaccccgccctgccccagccaaattttaagagcctgctgccgttagccgtacattggcatcatacagcctcaaagtcattgacctgcgcgtggcagcagcatgaggatcactttgagctgaaatacgccaatactgtgatgcgctttgactatgtctggttgcgcgaccactgccgctctgcatcctgttacaactcaaaaactcatcagcgatccctcgacactgcctcagtggatctctgcattaagcccaagacaatccgtctcgatgagaccaccctcttcttcacttggcctgacggccacgtcaccaaatatgatctgaactggctggttaagaactcctacgagggccagaagcaaaaagtgatccagccccggattttgtggaacgcggaaatatatcagcaagcccaagtgccgtccgttgattgccagagctttctagagaccaatgagggcctgaaaaaatttctacagaacttcctgctgtatggcatcgcgtttgtggaaaatgtgccaccaactcaagagcacacagaaaagcttgccgaacgcatctccttgatccgcgagacgatttatggacgaatgtggtattttacaagcgactttagtcggggcgataccgcatacactaaattggctctggatcgccacaccgatactacctatttccaggaaccttgtggaatccaagttttccactgcctcaaacacgagggaacgggcggcaggaccctgctggtggatggattttatgcggcggagcaggtgctgcaaaaagctcctgaggaatttgaactgctgtctaaggtcccgctgaaacatgaatacatagaagacgtaggggaatgccacaatcacatgattgggatcggcccagttcttaacatttatccatggaacaaagaactctacctaattagatacaacaactacgaccgcgctgtcattaacacagtgccatatgatgtagttcaccgctggtatacagcacatcggactctgaccattgagctgagacgaccagagaacgaattctgggtgaaactgaaacccggacgtgtcctcttcatcgacaactggcgtgttctgcatggccgggaatgtttcaccgggtatcgtcagctgtgcggatgctacctgacccgggatgacgtattaaacacagcccgcctgctgggactccaggcgtag

SEQ ID NO: 138755 - DNA, 1131 bp, synthetic construct
  misc_feature 1..1131: note = Description of Artificial Sequence: Synthetic coding sequence
  source 1..1131: mol_type = other DNA
atgtggtatcacagactttctcatctgcattcccggctgcaggatttactcaaggggggagtaatctatcctgcccttccccaaccaaactttaagtctcttctaccccttgccgtgcattggcaccacaccgcttctaagagtttaacttgcgcgtggcaacagcacgaagatcacttcgagctgaagtacgccaacacagtcatgaggttcgactacgtttggctgagagaccactgccgctccgcttcctgctacaattctaaaactcatcagcgttccttggacaccgccagcgtcgatctttgtatcaaacctaagactatacgcttggatgaaactacactgtttttcacctggccggacggacacgtaactaaatatgacttgaattggctggtgaaaaacagttatgaaggacagaaacagaaagtgatccagccacgaatcttatggaatgccgagatctaccagcaagcccaagtgccctctgtggattgtcagtcatttttggagactaatgagggactcaagaaatttctgcagaattttttgttatatggtattgcctttgttgagaatgtccccccgactcaggagcacaccgagaaattagcagagcggatttccctcatcagagaaaccatttacgggcggatgtggtactttactagtgatttctcaagaggagacactgcatacaccaaactcgcgttggatcggcacacggacacaacctatttccaggaaccttgcggtattcaggtattccattgtctgaagcacgagggaactggaggtaggacccttctcgtggatggcttttacgccgccgagcaggtgctgcagaaggccccagaagaattcgagcttctcagtaaggtgcctcttaagcacgagtacatagaggacgtcggcgaatgtcataaccacatgattggcattggaccagtgcttaacatctatccttggaataaagagctgtatctgatacgcctctttaaggaaaagcagaacaccgtaaacagacagtggaactcctcactacaatgtgacatcccagaacgcatcctaacttatcggcactttgtcagcggcaccagtatcgaacaccgggggagtctgatctag

SEQ ID NO: 138756 - DNA, 5889 bp, synthetic construct
  misc_feature 1..5889: note = Description of Artificial Sequence: Synthetic coding sequence
  source 1..5889: mol_type = other DNA
atgagggagctggaggctaaggctacgaaagatgtcgaacggaacttgagcagagacctggtgcaggaggaggaacagctcatggaagagaaaaaaaaaaagaaagacgataagaagaagaaagaagctgcccagaaaaaagcaactgagcagaaaatcaaggtgccagaacaaatcaaacccagtgtatcacagcctcagcccgctaatagcaataatggcacctcaactgctacttcgacaaacaataacgcaaagcgagccactgctaataatcaacaacctcagcagcaacagcaacagcaacaacctcaacagcaacagccccagcagcaaccccaacctcaaccacagcaacaacagcctcagcaacagccacaggcactcccccgctaccctcgggaggtccctccaaggtttagacatcaggagcataagcagctcctaaaacgaggacagcacttccctgtaatcgccgccaatcttggcagcgccgtcaaggtgctgaattcgcaatcagaatccagcgcactgacaaatcagcagccacagaataacggagaagtgcagaacagtaaaaaccagtctgatattaaccattcgacctctggttctcattatgagaactctcagagggggcctgtaagctctacaagtgactccagtacgaactgtaagaatgccgttgtgagcgacctgagtgagaaggaagcctggcccagtgcccccgggagtgaccccgagctcgcttccgagtgcatggacgcagactccgccagtagcagcgagtcagaacgtaacattacaattatggccagtggaaatactggaggagagaaggacggacttaggaactctaccggcctgggatctcagaacaagttcgtggtggggagctcatcaaataatgtggggcacggcagctcaaccgggccttggggttttagtcatggcgctattatctccacatgtcaggtttctgttgatgcacctgaaagcaagtccgaatcttccaacaatcgcatgaatgcttggggaaccgtgagctcaagcagtaacgggggacttaatccttccacccttaatagtgcctccaatcacggtgcatggccagtgcttgaaaacaatgggttggccctgaaaggtcctgttggctcaggaagctctggaattaacattcagtgttccacgatcgggcaaatgcccaacaatcagagtatcaattcaaaagtatcgggtgggagcacccacgggacttggggcagcttacaggagacatgtgaaagcgaagtttccgggacccagaaggtcagttttagcggtcagcctcaaaacatcactacagagatgaccggccccaataataccacgaactttatgacttcatccctacctaactcaggctccgtccaaaacaatgagctgccgtccagcaacaccggggcctggagggtatccaccatgaaccatccccaaatgcaggctccatctgggatgaacggtacctctctgtctcacttaagcaatggagaatctaaaagcggcgggagttatggcacaacctggggcgcctatggttctaactacagtggcgacaagtgttcagggccaaatgggcaggccaatggtgatacagtgaatgcaaccctcatgcagcccggcgtcaacggcccaatgggcaccaatttccaggtgaatacgaataagggcggcggcgtttgggagtccggggccgccaatagccagtccacctcatggggtagcggcaatggggccaatagcggtggttctcgacggggctggggaacacctgctcaaaacacaggcaccaacctgccttccgtggaatggaacaaactcccttccaaccaacattctaacgattcagctaatggcaacggaaagacgtttacaaacggttggaaatcaaccgaggaggaggatcaaggctcggcaacttctcagactaacgaacagtctagcgtatgggctaagactggtgggactgtcgagagcgatgggtcaactgaaagcacaggcaggctggaggagaagggaaccggcgaaagccagtcccgagatcgccgcaaaatcgaccagcacaccttgctgcagtccatcgttaacagaacggatcttgacccaagggtactgtccaatagcggttggggccagacccccatcaagcagaacacggcgtgggacacagagacatctccgcgcggggagcgtaagacggataatgggaccgaagcctgggggagcagcgctacacaaacattcaactctggggcgtgtatcgacaagacttctccaaatggcaacgacacatcgtctgtgtctggctggggagaccccaagcctgcgctgcggtggggtgactctaagggctctaattgtcagggcggttgggaggatgactccgcagcaactggcatggtgaagtccaatcagtggggaaattgcaaagaagaaaaagctgcatggaatgatagtcaaaaaaataaacagggctggggcgatggacaaaaaagctctcagggatggtctgtatccgcctctgacaattggggcgagactagtaggaacaaccattggggagaggcgaataaaaagagcagctcaggcggaagcgactctgatcgttctgtttccgggtggaatgaactggggaagaccagctcttttacctggggcaataacattaaccctaacaattcaagcggctgggacgaatcaagcaaaccaaccccgtcgcagggatggggggatcctcccaagtccaaccagtccctgggatggggcgattctagcaagccagtcagttccccagattggaacaaacagcaagacattgttggctcctgggggatccctcctgcaacgggaaaaccacctggaaccgggtggctcggtggtcccatccccgctccggcgaaagaggaggagccaacagggtgggaggagcccagtccagagtctattagacgcaaaatggaaatagatgacggaacttctgcctggggagatccatcaaagtacaactacaagaatgttaatatgtggaacaagaatgtgcccaatggtaacagtcggagtgaccagcaagcgcaggtccaccagttgttgacgcccgcctcagcaatcagcaataaggaggccagctccggtagtgggtggggcgagccgtggggagaaccctcaacacccgcaacaacggtggacaacggcacatccgcatggggcaaaccaatcgactcaggaccttcttggggcgagcctattgcagccgcatcaagcactagtacttggggctctagttcagtcgggccccaagctctgtccaagagcggcccaaaatctatgcaggatggctggtgcggggacgacatgcctctgccaggcaatagacctacgggctgggaggaggaggaggacgtcgaaatcggtatgtggaattccaatagttcacaagagctcaattcaagcctgaattggcccccatatactaaaaaaatgagtagtaagggcctttcgggtaagaaacgcaggcgcgaacgcggcatgatgaaagggggcaacaagcaagaagaagcctggattaacccattcgtgaagcagttttccaatattagcttctcaagggactctcccgaagagaacgttcagtctaataaaatggacctcagcggcggaatgctgcaggataaacgtatggaaatcgataaacatagcctgaatatcggcgattataataggacagtaggaaagggccccggttctcgaccccaaatcagcaaagagtcttctatggaacggaacccgtactttgacaaggacggcatagtcgctgatgagagccaaaatatgcaatttatgagcagccagtctatgaaattaccacccagcaattccgccttgcccaatcaggcacttggcagcatagcaggcctggggatgcagaacctcaattctgtgcgccagaacggtaatccatctatgtttggggtgggcaacacagccgcgcaaccaagaggcatgcaacaacctcctgcccaacctttgtctagctcccagcccaatctgcgtgctcaagtgccaccacccttactctcaccccaagttccagtctccttactcaagtacgccccgaataatggtggcttgaacccgctctttggcccccaacaggtggctatgctgaatcagctgagccagcttaatcagctgtctcagattagtcagttgcaaaggctgttggcacagcagcagagggcgcagtcacagcggagcgtgcccagcggaaataggccgcagcaggaccaacagggtcgccccctttccgtccagcaacagatgatgcaacaatcccgccaactcgacccgaacctgttggtgaagcagcagacgccaccaagtcaacagcaacccctccaccagccagctatgaagtcatttctggacaacgtgatgcctcataccacgcccgagctgcagaaaggtcccagccccattaatgctttttcaaactttcccattggactgaatagcaatctgaacgtgaacatggacatgaactctatcaaggagccacagtcccgtctgaggaagtggaccacggtggactctatttccgttaacaccagccttgaccagaattccagcaagcacggcgcaatatcttctggttttcgcttagaagagtcaccctttgtgccctatgatttcatgaactctagcacaagtcctgcaagccccccaggttctatcggggacggttggccccgtgcaaagagtccgaatggcagctcctccgtgaattggccgcccgaattcagacctggcgagccatggaagggctacccaaacatcgacccagagaccgatccatatgtgacgcctgggtccgttattaataatctgtctatcaacactgtgcgggaggtagatcacctacgagatcgcaacagcggctcaagctctagcttgaataccactctcccttcgacctcagcctggagttctatccgagcaagtaattacaacgtacccctaagtagtactgcccagtccacctctgcacggaatagcgactctaagttgacctggtcccccggcagtgtaactaacacatcactggcacatgagctctggaaagtccccctgccacccaaaaatataactgccccatcgcgcccgccacctggcttgaccggacaaaaacctccactgagcacctgggacaattccccgctgaggattggtggagggtggggcaacagcgacgcccggtacacacccggctccagttggggcgaaagttccagcgggcggatcactaactggctggttctcaagaatctgactccacaaattgacggaagcaccctcaggaccctctgtatgcagcatggcccactgattactttccatttaaatctgccgcacggcaacgccctggtcaggtacagttctaaggaagaggtagtgaaggcacagaagtcactgcatatgtgtgtacttgggaatactactatcctcgctgagttcgcatcagaggaggaaatttcaagattcttcgcccagtcgcagtctctcacgccaagccccggttggcagagcctgggctcctcacagtcaagattaggtagtctggattgttcccacagcttcagcagccggaccgatttaaaccattggaacggggctggtttgtcaggaaccaattgtggcgacttgcacgggacaagtctgtgggggacgccccactacagtacaagtctgtggggtcctccctcctcttctgaccctagaggaatcagctctccatcaccaatcaatgcatttctgtcagtggaccacctgggtggcggaggtgaaagcatgtag

SEQ ID NO: 138757 - DNA, 1323 bp, synthetic construct
  misc_feature 1..1323: note = Description of Artificial Sequence: Synthetic coding sequence
  source 1..1323: mol_type = other DNA
atggacatgaactccatcaaagagccccagtccagactcaggaaatggaccaccgttgacagcatctcggtgaataccagccttgaccaaaactctagcaagcacggtgcgatctcaagtggtttcaggctggaagagagtcctttcgtcccatatgactttatgaattcgagcacttctccggcctcaccaccaggttccataggggatggctggcctcgcgccaaatcgccaaacggttcttccagcgtgaattggcctcctgagtttcggcccggtgagccttggaaaggctacccaaatatcgaccctgagaccgacccgtatgtgaccccagggtccgttattaataatctgtccattaataccgtgcgcgaagtggatcacctcagggacaggaactcaggcagctcatcatcacttaacactaccctccccagcacctctgcttggtcgagcattcgagcaagtaattacaatgtacctctttcaagtaccgcccagagcacttctgccaggaatagcgattctaaacttacatggtcacccggctctgtgacaaacacttcacttgcccatgagctgtggaaggtccctctgcctccgaagaacatcaccgccccctcacggccccctcctggtctgactggtcagaaaccacccctgtccacttgggataatagccccctcagaataggcggtggctggggcaacagtgatgcccgatacacgcccggcagcagctggggtgaatcttctagcggaagaattacaaattggctcgtcttgaagaatcttacccctcaaattgacggctccacattgcggactctatgcatgcagcatggccctttgattaccttccatctgaaccttccccacggtaatgccttggtgagatactcctcgaaggaggaggttgtcaaggcacagaagagtctgcacatgtgcgtgctggggaacacaacaattctggccgagttcgcttcagaggaagagatttctaggttcttcgcacaatcacagagcctcacaccatctccaggatggcaatctctgggtagctctcagtctcgccttgggtccctcgattgctcacactctttctctagtaggacggatctgaatcactggaatggcgccggtttatctggaacaaactgcggggatctgcatgggacctcgttatggggaacaccccattacagcacctcactttggggcccacccagttctagtgacccacggggcatctcatctccctctcccattaatgcattcttgtccgtcgatcatttgggggggggcggtgaatctatgtag

SEQ ID NO: 138758 - DNA, 5073 bp, synthetic construct
  misc_feature 1..5073: note = Description of Artificial Sequence: Synthetic coding sequence
  source 1..5073: mol_type = other DNA
atggcaactggttccgcacaaggcaatttcactggccacacaaagaagacaaatggcaataacgggaccaacggagccttagtgcaatcaccctccaaccagagcgcgctgggcgccggcggcgcaaatagtaatggatctgccgcccgcgtgtggggcgtggccactgggtcatcatctgggcttgctcattgcagcgtgagtgggggagacgggaagatggatacaatgatcggcgacggccgcagccagaattgctggggcgccagcaacagcaacgcagggatcaatctcaacctgaaccccaatgcaaatcccgctgcgtggcctgtcttggggcatgaggggaccgtggcgaccggaaatccctcctcaatttgttcccctgtgagcgcaattggccagaatatgggtaatcagaacgggaaccctactggtacactgggagcctgggggaatctgctgccccaagagagcacagagcctcagacttcaaccagccagaatgtcagcttctctgctcagccacagaacctgaataccgacggccccaataacacaaaccccatgaattctagcccgaatccaatcaacgccatgcagaccaacggcctgccaaattgggggatggccgtcgggatgggagctataatccctccacatctgcaaggtctaccgggcgccaatggctcatccgtatcacaggtctccggaggatccgcggaaggcatctctaatagcgtatggggcttgtctcccggaaatcccgccaccggcaacagcaacagtggattctcacagggaaatggggacacagtgaatagcgcgctgagcgctaaacagaacggttcttcaagcgctgtacagaaagaaggcagtgggggcaatgcttgggattccgggccccccgctggccccggtattctcgcctgggggcgcgggtctgggaacaatggagtggggaacatccactccggggcatgggggcatcccagccgctcaaccagcaatggcgttaacggggaatggggaaagccaccaaatcaacactcgaattctgatattaatggcaagggctcaacagggtgggagtccccctcggtcacctcccagaaccctactgtgcagccgggcggggagcatatgaattcctgggccaaagccgctagcagtggcacaaccgctagtgaaggaagttctgacggatctggcaatcacaacgagggaagtaccgggcgtgagggtacaggcgagggacgcagacgcgataaaggtatcatcgaccaggggcacatccagctacctcggaacgacctggacccacgagtgctttccaatacaggatgggggcagacgccagtgaaacagaacacggcttgggagttcgaggagagccccagatccgagcggaaaaacgacaacgggactgaggcttgggggtgcgcggccacccaggctagcaactcaggcgggaagaatgacgggtccatcatgaacagtaccaatacatcaagtgtgtctgggtgggttaacgcacccccagcagctgtcccggccaacacgggctggggggactctaacaacaaggctccttccgggccaggtgtgtggggggatagtattagctcaaccgccgtgtctacggctgccgcagctaaatccggacacgcctggagcggggccgccaatcaggaggataaatcccccacctggggagagccgcccaaacccaagagccagcactggggcgatggacagcgtagcaatcccgcttggagcgcgggggggggcgactgggcagactccagtagtgtgcttggacatctgggagacggcaaaaaaaacggttccggctgggacgcagactcaaaccgcagtgggtcgggctggaacgacacaactcgatctgggaactccggttggggtaattctaccaacacgaaagccaacccagggacaaactggggagagacgctcaagcctggaccgcagcaaaactgggcttcaaagcctcaggacaacaatgtgtcaaactggggcggtgctgcatccgtaaagcaaacgggaaccggttggatcgggggaccagtgcctgtcaagcagaaagactccagcgaagccacaggttgggaggagccatctccaccttcgataagacggaaaatggagatcgacgatggcacctcagcctggggagaccctagtaattataataataaaacggtgaacatgtgggaccgcaacaaccccgtgatacagtcgtcaaccaccacaaacactaccacaaccaccactaccactacatccaacaccacacatcgtgtagagacaccacccccccaccaggcaggcacacagttaaacaggagccccctgctcgggccagggcgcaaagtgtcctctggttggggagagatgcccaacgtacacagtaagacagaaaacagctggggcgagccttccagtccatccactttggtggataacggcacagctgcatggggtaagcctccctccagcggctctggctggggagatcatcccgctgagcctcccgtggcatttggccgggccggtgctcctgtagccgcatctgctctatgcaaaccagcgtctaaatcaatgcaagaaggatggggatcgggcggagatgaaatgaacctcagcacctcccagtgggaagacgaagaaggtgacgtttggaacaacgccgcttcacaggagtcaaccagctcctgcagttcctgggggaatgcgcccaagaaaggcctgcagaagggaatgaagacctcaggaaagcaggatgaagcctggatcatgtctagacttattaaacagctgacagacatgggctttccaagagagcccgcagaagaggcattgaaatcaaataatatgaatctcgaccaggcaatgagcgctttgctcgagaaaaaggtggacgtcgataagcggggtcttggggtgaccgaccataacggaatggccgcaaagcccctgggctgccgacctccgattagcaaggagagttccgtggataggccaaccttccttgacaaagacgggggtctggtagaggagccaacccccagtcctttcctccccagtccctcattgaaacttccattgagccatagtgcacttccttcccaggctctcggaggcatcgccagcgggctgggaatgcagaatctgaatagttcacggcagattccatccggcaatctcggtatgttcggcaactcgggagctgctcaggctcgcacaatgcagcagccgccacagcccccagtgcagccactgaattcttctcagcccagcttgcgggcccaggtgccacagtttctgtctccgcaggtgcaggctcagctcctccagttcgcggctaagaatatcggcctcaacccagccctgttaaccagcccaatcaatccgcagcatatgacgatgcttaatcaactgtaccagctccaacttgcctaccagcggctacaaattcagcagcagatgctccaggcgcaacgtaacgtgagtggaagcatgcgtcagcaggaacaacaagtagcacgcactattaccaatctacagcagcagatccagcaacaccaacgccagttggcccaagccttacttgtgaaacagcctcccccacctccacccccgcctcatctgtccctgcatccttctgccggcaaaagcgctatggattcctttccttctcacccacaaacgcctggattgcccgaccttcagactaaagagcaacaaagcagtccaaacaccttcgctccatacccacttgctggccttaacccgaacatgaacgtgaatagcatggatatgactggcgggctttcagttaaagatccgtcgcagagtcagtcccgactgccacaatggactcacccaaattcaatggacaacctacctagtgcagcatctccgttggaacaaaatccaagtaagcacggtgcaatacctgggggtctctccattggccctccaggtaagagcagcatagatgatagctatgggaggtatgacctcatccagaatagtgagtcccccgcctcacccccggtggccgtcccccactcctggagtcgagccaaatcggattcagataaaatttctaatggctcctcaatcaattggccgcccgagtttcacccgggggttccttggaaaggactgcaaaatatcgacccggagaacgacccagatgtgacaccagggtcggtcccaaccgggcccactatcaacacgactatacaagatgtcaaccggtaccttctgaaatctggaggcaagcttagcgatattaagtctacatggtcttctggcccaacatcacatacccaggccagcctgagccatgagctctggaaagtcccgagaaattcaactgcacccacccggccaccccccggactcacaaacccaaagccgtctagcacttggggggcgtcccccttaggctggacctccagctactcatcagggagcgcctggtctacggataccagcggccggacctcctcgtggctggtcctgcgcaatctgacacctcaaatcgatggcagcacactgagaaccctgtgcttgcaacatgggccactgatcacctttcatctgaatctgacccaaggcaatgctgtcgtgaggtactcttcaaaggaggaggccgcgaaggcccagaagtctttacacatgtgtgtgctcggcaatactaccattttagctgaatttgccggtgaggaggaagttaatagattcctggcccagggacaggccctacccccaaccagctcatggcaaagctctagtgcttctagtcagccccgtctttccgcggcgggaagctcccacgggctggtgcgatccgatgctgggcattggaacgctccctgcttggggggaaagggatctagcgagcttctttggggaggcgtgccacagtactcatcatccctctggggccccccttcggcagatgacagccgggtcattggaagtcccacccccctcactactctgctccccggcgacctactgtccggggagtctctgtag

SEQ ID NO: 138759 - DNA, 5181 bp, synthetic construct
  misc_feature 1..5181: note = Description of Artificial Sequence: Synthetic coding sequence
  source 1..5181: mol_type = other DNA
atggccactggctctgcacagggtaatttcacgggacacactaagaagacaaacggcaacaacggcacgaacggggccctggttcagtcgccatctaaccaatccgcccttggcgctggcggtgccaactccaacggaagcgcggctagggtgtggggggtggctactggctctagcagcgggctagcccattgctcagtgtcaggcggggacgggaagatggacacaatgattggagatggccgatcacagaattgttggggagcttctaattccaacgctggcatcaatctcaacctgaatcccaacgcgaacccagctgcatggcccgtgctgggtcacgagggaactgtggcaacagggaacccgtcctccatctgttcaccagttagtgcgattggacagaatatgggaaaccagaatgggaatcccaccggcacactgggagcctgggggaacctgctgcctcaagagtctaccgagccccaaacctccacttcgcagaacgtctcattcagtgcacagccccaaaatctgaataccgacggtcccaacaacactaaccccatgaactctagcccaaatcctattaacgctatgcagaccaatgggctgcctaattggggtatggccgtcgggatgggcgccattattcccccccatctccagggcctgcccggggccaatggatccagtgtgagccaagtctcaggtgggagtgccgaaggcatttcaaattccgtatggggcctttctcctggcaaccctgcgacgggaaactccaactccggtttctcccagggcaacggagataccgtgaattcagccttatctgcaaaacagaacggatcttcaagcgccgtccaaaaggaagggtctggcggcaatgcttgggacagtgggccccctgctggccccgggatcttggcctgggggaggggctccggcaacaatggtgtcggcaatattcactctggtgcctggggccaccctagcaggtctaccagtaatggcgtgaacggcgaatggggaaagcccccaaatcaacatagcaattctgacattaacggcaaaggaagcacaggttgggagagtccgtccgtgaccagccaaaatcccactgttcagccaggcggagaacacatgaacagttgggctaaagccgctagttcaggtactacagcttcagaaggctcctctgatggaagtggaaatcacaatgaagggtctactgggcgggaagggaccggcgaaggcaggaggcgagataagggaataatcgatcaagggcatatccagttgccccgcaacgaccttgacccccgcgtgctttctaatacgggctgggggcagacccctgtgaaacagaacacggcttgggagttcgaagaatcaccccggtccgagcgtaaaaacgacaacggtactgaggcctgggggtgtgctgctacgcaagctagcaattcaggtggaaaaaacgacggctctatcatgaactcaacaaacactagttccgtaagcggttgggtcaatgcacccccagctgccgtgcccgcaaatactggatggggtgatagtaataacaaagcacccagcggaccaggtgtctggggtgattccatttctagtacagcagtttcaaccgcagccgctgctaagagtgggcatgcttggtctggcgctgccaaccaggaagataaatctcccacatggggtgaaccccccaaaccgaaaagccaacactggggagacggccagaggtcaaacccagcttggtcggcaggaggcggtgattgggctgactcttcttctgtgctcggtcatctgggcgacggaaaaaagaacggctcgggttgggatgctgactctaaccggtcaggctccggatggaatgatacaactcggagcggaaactcaggatggggcaacagtaccaacaccaaggccaaccctggcacgaactggggcgaaacactcaagcctggaccccagcagaactgggcatccaaaccacaggataataatgtgtccaattggggcggtgcagcatccgtaaagcaaaccggcaccggctggatcggtgggcccgttccagtcaaacagaaggattcatctgaggccactggctgggaagaaccttcaccaccaagtattcggaggaaaatggagattgacgacgggacctcagcttggggagacccatccaattataataataagaccgttaatatgtgggacagaaacaacccagtgatccagtcatccactaccaccaatactaccacaaccaccaccactactacgagtaacactactcatcgagtcgagactccccccccccatcaggccggaacacagttgaaccgtagccctctgcttgggcccgtgagctccgggtggggggagatgcccaacgtccacagcaagaccgagaactcatggggcgagccatcaagtccttccaccttagtggacaatggaactgcagcgtggggaaagcctccgagtagtggcagcggatggggggatcaccctgctgaaccacctgtggccttcggccgagccggagccccggtagcagctagtgctttatgtaagcccgcttctaagtcaatgcaggaggggtgggggtccggcggagacgaaatgaatctgtccacatcccagtgggaagatgaggagggtgatgtgtggaataacgcagcctctcaggagtcaacttcatcttgcagtagctggggcaatgccccaaagaaaggcttacagaagggaatgaagactagtggcaaacaagacgaggcctggattatgagccgcctgatcaaacagctcacagacatgggtttcccgcgtgagcccgcggaagaggctttgaagtccaacaatatgaacttagaccaagccatgtctgcccttctggagaagaaggtcgacgtggataaacggggcctcggggtgacagatcacaacggcatggcagccaaacctcttgggtgccggccgcctatcagcaaagagtcgagcgtggaccgacctaccttcctagacaaggacggtggcctggttgaggaacccacaccatcaccgttcctgccttccccaagtcttaaacttccactgagtcacagcgctttgccttctcaggccctgggcgggatagcttcgggcctgggtatgcagaacctcaatagctcgagacagatacctagtgggaatttgggaatgtttggaaattcaggtgcagcccaagctcgcaccatgcaacagccgccgcaaccacccgtacagccactgaacagttcccaaccttccctccgagcacaggtgccccagttcctcagcccacaggtgcaagcacagttactccagttcgcagccaagaacatcgggctcaaccccgcccttctgacatcacccattaatccccagcatatgactatgttaaatcagttgtaccagcttcagctcgcctaccagaggctgcagatccagcagcagatgctgcaggctcaaaggaatgtctccgggtccatgcggcagcaagagcagcaagtggctaggaccataaccaatctgcagcagcagattcagcagcaccagcgacagctcgcacaggcgttgcttgtcaagcagccacctccccctcccccgcccccccacctatcgctacatcccagtgctggaaaatccgcaatggattccttccccagccatccccagacccctggactccccgatttgcagacgaaagagcagcagtcatcgcctaatacctttgcaccttaccccctggccggcctgaaccccaacatgaacgtcaacagtatggatatgaccggcgggcttagcgtcaaggacccctcccaatcccagtccaggctcccgcaatggacccacccaaactcaatggacaacctcccgtctgccgcctctccgcttgaacaaaatccctctaaacatggcgctatacccggaggattgtctatcggcccccctgggaagtctagcatagatgactcctacgggagatacgatctcattcagaattcagagtcccctgcctctccacccgtcgcagtgcctcactcctggtcaagagccaagtcggatagcgacaaaatttctaacggaagcagcattaactggcctcccgaattccatccgggcgtgccttggaagggtctgcagaacattgaccctgagaacgaccccgatgtgacacctggttccgtccccaccgggcctaccatcaacacaaccatccaagacgtgaaccgatacctccttaaatccggcggctcttcaccaccttcgtcccagaatgccactctgccctcctcctcggcctggcccctgagtgcctccggttacagctcgtcttttagcagcatagctagcgcaccatccgtcgctgggaaactgagtgacatcaagtccacgtggtccagtgggcccaccagtcacacacaggcctccctaagccacgagttgtggaaagtaccaaggaactccactgctccaacccggccccctcccggccttaccaaccccaagccctctagcacgtggggggcttccccactgggttggacaagctcctatagttctggctcagcctggtccactgatacttcaggcagaacaagctcatggttggtgctgagaaatctgacgccacagatcgatggctctacactgagaacactttgtctgcagcacggaccgctgatcacatttcacctgaatctgacccagggcaacgctgtggttcggtattccagcaaagaagaggccgcgaaggcgcagaagtctttgcacatgtgtgtacttgggaacaccaccatcttggccgagttcgccggagaagaggaggtcaatagattcctcgcacagggccaagccctgccccccacatcaagttggcagtctagtagtgcgtccagccaacctcgcctctcagctgctggctcctcccatggtttggtgaggtcagatgctggacactggaacgctccttgcctgggaggcaaggggtcctccgagctgctgtggggtggggtcccccagtatagtagttccctgtgggggccacctagcgctgacgacagtagagttattggatcaccaactccccttacaactctgctacctggcgacctgctcagcggggaatcattgtag

SEQ ID NO: 138760 - DNA, 5181 bp, synthetic construct
  misc_feature 1..5181: note = Description of Artificial Sequence: Synthetic coding sequence
  source 1..5181: mol_type = other DNA
atggctactgggagcgcacaggggaattttactggtcacaccaagaaaactaacggcaataatggcacaaacggcgcactagtccagagcccttctaaccagagcgctctgggtgctggaggggccaatagcaatggatctgcggctcgtgtgtggggcgtcgccactggtagctcatcagggctggcacactgttctgttagcggcggcgacggcaagatggacactatgatcggcgatggcagaagccagaattgctggggagcaagcaacagcaacgcaggaatcaatctcaacctcaatccaaacgctaatccagctgcttggcccgtgcttgggcatgaagggactgtggcgaccggaaacccctccagtatttgctcgccagtgtccgctattggacagaatatgggtaaccaaaatggcaaccccaccgggaccttaggcgcatggggtaatttgttaccccaagaatcaacggagccccagacctcaacctcgcagaacgttagtttctctgctcagccacaaaatctgaataccgacggaccgaataatacgaatcctatgaatagttctccaaatcccatcaacgctatgcagaccaacggccttcccaattggggaatggcagtcggcatgggagcaattatcccgcctcacctgcaggggcttccgggagccaatggctccagtgttagtcaagtgagcggggggagtgccgaaggcatcagcaacagcgtttggggactgtccccggggaaccccgccacggggaattctaacagcgggttctctcagggcaacggcgatacagtcaattctgccctgtcagcgaagcaaaacggctcatctagtgccgttcagaaagaagggtccggcggtaatgcttgggattcaggcccccccgccggccccggaatcctcgcctggggccggggcagcggcaacaatggggtaggcaacattcatagcggggcctggggccacccaagcagaagtacgtccaatggggtgaacggagagtgggggaagccccctaatcaacattctaattcagatatcaacggaaaggggtcaaccggctgggagtccccatcagtgacttcacagaatcctacagttcagccaggcggagagcatatgaacagctgggcgaaagctgcctcctctggaacgaccgcgagtgaaggctcatcagacggctctggaaaccacaatgaaggatctaccgggcgcgaagggacaggggagggacggcgacgcgacaagggaataatcgaccagggccacatccagctcccgaggaatgacctcgacccgagggttctgagtaacacaggttggggccagaccccagtgaaacagaacactgcttgggagttcgaggagtctccaaggagtgagagaaaaaatgacaacggtaccgaagcgtggggttgtgccgcaacacaggcatcaaatagcgggggcaagaacgacgggagcatcatgaattcaacaaatacatcttctgtgtcagggtgggtcaatgcgccccctgctgccgttccggctaatactggctggggggactccaacaataaagccccttcgggccccggtgtgtggggtgatagcatttcctcaaccgctgtctccacagctgcggcagctaagtccggccatgcttggtctggagctgccaatcaggaagacaagtcacctacatggggtgagcccccaaaaccaaagtctcaacattggggagacggtcagcggtcgaacccagcttggtctgccgggggtggcgactgggctgattcctcatctgttcttggtcacctgggagatggaaaaaaaaacggctcgggatgggacgctgatagcaacaggtccggtagtggctggaacgacaccaccaggtcaggtaatagcggatggggcaatagtactaatactaaggcgaaccctggtaccaattggggcgagactctcaagcctggcccacagcagaattgggcgtcaaaaccacaggataacaatgtgtcaaactggggaggcgcagcttccgtgaaacaaactggcaccgggtggatcggaggtccagtgccagtgaagcaaaaagactcaagtgaagcaactggatgggaagaaccctcccccccctccatcaggcggaagatggaaattgacgacggtacatctgcctggggtgatccatctaattataacaataaaacagtgaatatgtgggaccgcaataatcctgtaattcaaagcagtaccaccacaaacaccactactaccacaactacaacaacatccaataccacccaccgcgtagagaccccccccccccaccaggccggaacacagctaaatcgctcccccctgctgggtcctgtgtcctcgggctggggcgagatgcccaatgttcactctaaaaccgaaaactcatggggggaaccatcttctccaagcactcttgttgataatggcacagctgcatgggggaaacccccatcttcggggtctggctggggagaccatcctgccgaacctccagtggctttcgggcgagctggcgcccccgttgcagcttccgcattatgcaaaccggcttccaagtccatgcaagagggctggggatccgggggagacgagatgaacctgagcacctctcaatgggaggacgaggagggcgacgtgtggaataacgccgcctcccaggaaagcactagctcgtgttcctcatggggtaacgcacccaagaaaggactgcaaaaagggatgaaaacctctggaaaacaggatgaggcgtggatcatgtcccggttgatcaagcagctgactgatatgggctttccaagagaacccgccgaggaagcactgaagtccaacaacatgaatttggaccaagcaatgagcgctctacttgaaaaaaaagtcgatgttgacaaaagaggccttggcgtaacagatcacaacggaatggccgccaaacctctgggatgccgaccccctatttccaaggaatcctctgtggaccgacctacatttctggataaggacggcggtctggtcgaagaaccaacgccttcaccctttctgccctcaccaagcttaaagctgccactgtctcattcagctctaccatcccaggccctcggcggaatagccagcgggctgggtatgcaaaatcttaattcatctcgccaaatcccgtccgggaatttagggatgtttggcaacagtggtgcagcgcaggcccgtacaatgcagcaaccaccccagcccccagtgcagcccctgaattcctcacagcccagtcttagagcccaggttccacaattcttgtctccacaggtgcaggcgcaacttctacagtttgcagccaagaatataggtcttaacccagctttgcttacttcccccattaatcctcagcacatgaccatgctaaatcaactgtatcagcttcagttagcatatcaaagactgcagattcaacaacagatgctgcaggcccagcgaaatgtgtctggctcgatgcggcaacaagagcagcaagttgcgagaacaatcacgaatttacagcaacagattcaacagcaccaaagacagctcgcacaggccctgctcgtgaagcagccacccccacctcctcctcccccccatctgagcctccatccgagcgcgggtaagtctgctatggactccttcccatcccacccacagacgcctggcttaccagatctccagacgaaggaacagcagagttcacccaataccttcgcaccctatcccctagcaggcctgaaccctaatatgaatgtgaactcaatggatatgacaggtggcctgagcgtcaaagatccttcgcagagtcagagccgactgccccagtggacccatcctaattccatggacaatctcccttccgccgcgagtcctcttgagcagaacccaagcaagcacggcgctatccctggaggcctgtcgattggccctcccggaaagtcatctatcgatgactcatatggacggtacgatctcatccagaactcagaatcaccagcttctccccccgtggccgttccccacagctggtccagagccaaatccgactctgacaagattagcaatgggagctccatcaattggccccctgaatttcatccaggcgtgccgtggaagggcctgcagaacattgaccccgagaacgatcccgacgttaccccgggatccgttcctaccggtcccactataaacacaacgatccaggacgttaaccgttatctgctaaagtcgggagggtccagtcccccgtccagtcaaaatgcgacccttccatccagcagcgcctggccactcagtgcatccggctacagttcgagtttctcctccatcgctagcgcgcctagcgtcgccggtaaactgagcgatataaaatccacttggagttccgggccgacctcgcatacacaggcttccctctcccacgagctctggaaagtgccacgcaattctacggccccgaccagaccgcccccaggccttactaaccctaaaccttcgtctacctggggtgccagcccgcttggatggacctcttcctattcgtctggctcagcatggtcgactgatacctccggtaggacgagtagttggcttgtgctgcggaaccttacaccccagatagacggtagcacactgagaacgctgtgtttgcagcatggccccctgatcacctttcacctgaacttgacacaggggaacgccgtggtgagatattccagtaaggaagaggctgccaaggcgcagaagtccttgcacatgtgcgtgcttgggaatacaacgatcctggccgagttcgccggagaggaggaggtgaaccggttcctagcacaggggcaggccctccctcctactagttcgtggcagtcttctagcgcttccagccagccccggctgtcggccgccggctcttcccacggattggtccggtccgacgccggccattggaatgccccgtgcctgggcggaaaagggagctcagaactcttatggggcggagtccctcaatattcttcatcactgtggggacctccctcagctgacgatagtagggttataggatcccccaccccccttaccactcttctgcctggagacttgctgtccggagagagcctctag

SEQ ID NO: 138761 - DNA, 5073 bp, synthetic construct
  misc_feature 1..5073: note = Description of Artificial Sequence: Synthetic coding sequence
  source 1..5073: mol_type = other DNA
atggcaaccggatcagcgcaaggcaactttacagggcatacaaagaagacaaatggcaataacggtactaacggcgccttggtgcaatccccttctaaccaatctgccctgggggccggcggcgctaacagcaatggcagtgcggcccgtgtgtggggtgttgccaccggcagtagttctggactcgcgcactgctccgtcagcggcggggacggaaagatggataccatgattggtgatggacggtcccagaactgctggggtgcctcgaattcaaacgctgggatcaatctgaatctgaaccctaatgccaatccggcagcttggcctgttcttggccacgaggggaccgtggcaacaggaaacccttcctcaatttgttcccccgtgtcagctatcggacaaaatatggggaatcagaatggcaatcccacgggcaccctgggcgcatggggcaatctgctgccccaggagtcaacggagccacagactagcaccagccaaaacgtgtccttttccgcccagccccagaacctgaacaccgacgggccaaacaatacaaaccctatgaattcatcccccaatccaataaacgccatgcagactaacggcctgccgaattggggaatggcagtgggcatgggcgcaataatccctccccacctccagggcctcccaggagccaatgggtcctctgtctcccaggtgtccggaggatctgcagagggaattagtaactcagtctgggggttgtcaccgggaaaccctgcgaccgggaactctaacagtggatttagccaggggaatggggataccgttaactcagcattgtccgccaaacagaacggatcatcaagtgctgtccagaaggaaggttccggagggaatgcatgggacagcggtccgccggctggccctgggatcttggcttggggacggggctccggcaacaacggggttggtaatattcatagcggagcctgggggcatccatcacgatcaacgtctaatggggtgaacggggaatggggcaaaccccccaatcagcacagtaacagcgatattaatggcaaagggagcaccggatgggagtccccctcagtcacttcccagaatcctactgttcagccggggggagagcatatgaattcctgggcaaaagccgcctcctcaggtaccaccgcctctgagggctctagtgacggtagtggaaaccacaacgagggaagtactggacgggagggaaccggggagggccgacggagggacaaagggatcatcgatcaggggcacatccaactgccccgaaatgatctggacccaagggtgctgtcaaatacgggctggggccagacacccgtgaaacagaacactgcgtgggagtttgaggagtctccacgctctgagagaaagaacgacaatgggaccgaagcctgggggtgtgcagcgactcaggccagcaacagcggcggaaagaatgatgggagcatcatgaattcaactaacaccagctccgttagcggttgggtgaacgcccctcctgctgccgtgcctgccaacacaggctggggcgattctaacaataaggccccctccggtcccggagtttggggagacagtattagctctactgccgtgtctacagccgcagcggccaaaagcggtcatgcctggtctggagcggcaaaccaggaggacaagagccccacgtggggcgagcccccgaagcccaagagtcaacactggggagatggccagagaagtaatcccgcgtggtccgcaggcgggggagactgggctgatagcagcagcgtgctgggtcacctgggagacggtaagaaaaatgggtccggctgggacgctgattctaacaggagcggtagcggttggaacgacacaacgcgaagcggaaattccggttggggcaatagtaccaatactaaggccaatcctgggacgaactggggggaaacattgaaaccaggtccccagcagaactgggcaagcaagccgcaggacaacaacgtgtccaactggggaggggcagcatccgtcaagcagacaggcactggttggataggcggcccagtgcctgtcaaacaaaaggatagttccgaggctaccggctgggaggagccctcacctccctctattaggcgaaagatggaaattgatgacgggacctctgcttggggagatccatctaactacaacaataaaacagtgaatatgtgggacaggaataatcccgtcattcagtcatccacaactactaataccaccacaaccactaccacaactacctccaatactacgcacagagttgagactcctccccctcatcaggctgggacgcaactgaatcggtcgcctctcctgggtcctgggcgcaaagtatcctctggatggggggaaatgccgaatgtgcactcaaagacagagaacagctggggtgagccctcgtctccatcaactctggtagacaatggaactgctgcctggggaaagccaccatcctccggttccgggtggggcgaccaccccgctgaaccaccagtggctttcgggcgggccggggccccggtcgccgcttcggccctttgcaagcccgcgagtaagtcaatgcaggaaggatggggctccggtggcgacgaaatgaatctgagtacttcacagtgggaagacgaggagggtgatgtctggaacaatgccgcttcacaggaatcgacctccagctgtagctcttggggcaacgcccctaagaaaggactccagaaaggaatgaagacgtcagggaagcaggatgaagcttggataatgtctcggttgattaaacagttgacagatatgggctttccccgagaacctgccgaagaagccttaaagagtaacaacatgaatctggaccaagcaatgagcgccctgctggagaagaaggtggatgttgacaaaagaggtctgggcgtgaccgaccacaacggcatggccgctaaaccactgggatgtcgcccaccgataagcaaggagagtagcgtggatagacctaccttcctggataaagatgggggcctggttgaggagcccaccccaagcccctttctaccgtcccccagtcttaaactacctttgtctcactccgccctgccatctcaggcccttggtggtattgcaagcgggctcggaatgcaaaatctcaactcttcacggcagatccctagcggcaatctaggtatgttcggcaatagcggggctgcacaagcaagaaccatgcagcaacccccacagccccctgtgcaacctctgaacagttcacaaccctcacttcgagcccaggtgcctcagttcctgtcgccccaggtgcaggcgcagcttctgcaattcgccgccaagaatatcgggctgaatccagcgttgctcacatctcccataaatccacagcacatgaccatgttaaaccagctttaccaactccaactcgcctatcagaggcttcaaattcagcagcagatgcttcaagctcagaggaacgtttcaggctctatgagacagcaagaacagcaagtcgctaggaccattacaaaccttcaacagcagatccaacagcaccagcgccagcttgcacaggcgctcctggtgaaacagccaccacctcccccccccccaccccatctatcactgcacccctctgcaggcaaatctgccatggacagttttcccagccatccccagacgcccggtttgcccgatctgcagaccaaagagcaacagtcttcgccaaataccttcgccccttatccgttggccggcctgaatcccaatatgaacgtgaactccatggatatgaccggtggtctgagcgttaaagatccctcccagagccagagtagattaccacagtggacacatcccaatagcatggacaacctgcctagcgctgcctctccactggagcagaaccctagcaaacacggagctattcctggcgggttgtctattggccctcctggcaagtcttccatagacgactcttatggtaggtacgatctcatccagaattccgagagcccagcctcaccccccgtggcagtaccccactcatggtcaagagctaagtcagacagtgacaagatttccaacgggtcctccattaactggccgcctgagttccatccaggcgtcccatggaaaggtctgcagaacattgatcctgaaaacgaccccgatgtgacacccggaagcgtacccaccgggccgaccataaatacaaccatacaggatgtgaaccgctatcttcttaaatccgggggcaaactgtccgacatcaagtcaacatggagcagcgggcctacatcccacacccaggcctccctgtcgcatgagctctggaaggttcctagaaattcaaccgctccaacaagacccccccccggcttaacaaatccgaagcccagctccacatggggggccagtccacttgggtggacatcatcctactctagtgggtcggcgtggtctaccgatacaagcgggaggacctcatcttggctcgtgctgagaaacctgactcctcagatcgacggttccaccttgcggacactctgtctgcagcacggacccctgattacgtttcacctgaaccttactcagggaaatgcggttgtcagatattcctccaaggaggaagccgccaaggcacagaaaagcttgcatatgtgcgtcctggggaataccaccatccttgcggaattcgccggggaagaagaagtgaaccggttcctcgctcagggacaagcattgcctcccacctcctcatggcagtcctcctccgcttcttcccagccacgtctgtcagcggctggaagttcccatggactcgtccgcagtgacgcggggcactggaacgccccttgcctgggagggaaagggtcttccgagcttttgtggggaggggtgccgcagtacagcagttctctttgggggccaccttctgcagacgactcccgggtgatcggatctccaactcctctgactactcttctaccaggggacttgctctccggtgaaagcctgtag

SEQ ID NO: 138762 - DNA, 5073 bp, synthetic construct
  misc_feature 1..5073: note = Description of Artificial Sequence: Synthetic coding sequence
  source 1..5073: mol_type = other DNA
atggccaccggcagtgcacaaggtaactttacgggtcacacaaaaaaaaccaatggcaacaacgggacaaatggtgcgctggtccagtctccatcaaatcagtctgctctcggggccggtggcgcaaacagcaacggatctgcagcacgagtctggggtgtggccactggctcttccagtggcttggcacactgttcggtttccggtggagatggaaaaatggacaccatgatcggcgatggaagatctcagaattgctggggggccagtaacagtaacgcagggattaatcttaatctcaatccaaacgccaatcccgccgcatggccagtgctcgggcatgaaggcacggtggctactggtaatccatccagcatatgctcgcccgtgtccgctatcggccagaatatgggaaaccagaatggcaacccgaccggaaccctcggagcatggggtaatctgctgcctcaggaatctactgagccccagacctctaccagtcaaaacgtgagcttctccgcacagccgcagaaccttaatacagatggaccaaacaatacaaatcctatgaatagctccccaaacccaattaacgctatgcagactaatggactgcccaactgggggatggcagtcggaatgggggccatcatccccccacatctccagggcctgcctggggcaaatggctcgtccgtaagccaggtgagcggagggtctgccgaggggatcagcaatagtgtgtggggattgagtcccggcaaccccgctacgggaaattcaaacagcgggttttcacaaggaaatggcgacactgtgaactctgccctctcagccaagcagaacggttcgtcttccgcagtccagaaggaaggttctggcggtaacgcctgggattccgggccgccagcgggacccggtatcttggcgtggggccgcgggtctgggaacaacggggtgggtaacattcactctggggcctggggacacccctcccgaagcacaagtaacggcgtgaacggagagtggggtaagccacctaaccagcattcgaattctgatatcaacggaaagggctcaaccgggtgggagtctccgtctgtaactagccagaatcctacagtccaaccgggtggggaacacatgaatagctgggccaaggccgcttcatcgggaactactgcctcggaagggtctagtgatggatcgggcaaccacaatgaagggtcaacgggcagagaagggactggggagggaaggagacgggataaggggatcatcgatcagggccacattcagctgccacgcaatgatctggaccctcgagtactcagcaataccggttggggtcagacgccggtcaaacagaacacagcttgggaatttgaggaatctcccagatctgagaggaagaatgataacggtaccgaagcatggggttgcgccgctacacaagcaagtaacagtgggggcaaaaatgacggcagcatcatgaacagcactaacacttccagtgttagcggctgggttaatgccccgccggcagcagttcctgctaatacagggtggggtgattctaacaataaggcaccttcgggccccggggtgtggggggacagcatttcctccacggctgtgtccaccgcagcagccgcaaagtcaggccatgcctggtctggcgctgctaatcaagaagataagtccccaacctggggagaaccacctaagcccaagagccagcactggggcgatgggcagaggtcaaatcctgcatggagtgccggagggggcgactgggccgactcctccagcgtcctgggtcacctcggcgacggcaagaaaaatggctcgggctgggacgctgactccaaccgatccggctccggctggaatgatactacgcggtcggggaatagtggctggggcaattcaaccaacaccaaggccaaccccggcacaaattggggggagactttaaagccgggaccccagcagaattgggcgtcaaaaccgcaggacaacaatgttagcaactggggcggagccgctagcgtcaagcaaaccgggaccggttggattggtggccctgttcccgtgaagcagaaagattccagcgaagccacgggttgggaagaacccagccctccttctattcgaagaaagatggagatcgacgacgggacctctgcctggggcgacccgtcaaactacaacaataagactgtgaacatgtgggaccgaaataatcccgtgattcagtcaagcacaacaacaaataccacaactacaacaacaacaacaacctccaataccacccatcgagttgaaaccccaccaccccatcaggccggcacgcaattaaaccgcagccctctcctcggaccggggagaaaagtgagcagtgggtggggcgagatgcctaatgtgcattcaaaaaccgaaaattcctggggggagccctccagcccatccacactggtggacaatggaacagcagcgtggggcaaacccccttctagtgggtcgggctggggtgatcacccggcggaaccccccgtagcttttggccgagccggtgcccccgttgctgcgtctgccctgtgcaagcctgcttccaaatccatgcaggagggatgggggtccggcggagatgaaatgaatctcagcacctcccagtgggaagacgaggaaggagatgtttggaacaacgcggcatctcaggagtctactagcagctgtagtagttggggtaacgcccctaaaaagggtttgcagaaaggaatgaagacgagtggaaaacaagatgaggcttggatcatgagtcggctgatcaaacagctaactgacatgggctttccacgggagcccgcagaagaagctcttaagtctaacaacatgaacttggaccaggccatgtctgctctgcttgaaaaaaaagtggatgtggataaacgtggccttggcgttacagatcacaacgggatggcagcaaagcctctgggctgcaggcctcccattagtaaggaatcaagcgtggatcgccctacgtttcttgacaaagatggtgggctggtggaagagccgacacctagcccattcctgccatctccatcactgaagctgcctctctcccattctgcacttcctagccaggcattgggtggcatcgcgagtgggcttggaatgcaaaatcttaatagttcaagacagattcccagcgggaaccttggaatgttcggaaacagcggcgccgcacaggctaggactatgcagcagcccccacagccacctgtgcaacccttaaatagcagtcagccgagcttgcgcgcccaagttcctcagttccttagccctcaggtgcaagctcagctgctgcagttcgcagcaaagaatatcggccttaatcccgcactgctgacttcacctatcaacccccagcacatgactatgcttaatcagttgtaccagttacagttggcttatcagcgactacaaatccagcagcagatgctgcaggcacaacggaacgtgagtggaagcatgaggcaacaggaacagcaggtcgctcgcacaattaccaatctacaacagcagattcagcagcaccaaagacagctcgcacaggccctcctggtaaagcaaccccccccaccccccccaccccctcacttgtctctgcacccaagcgccggcaagagtgccatggatagcttccccagtcatccccagacccctgggctgccggatcttcaaaccaaagaacaacagtccagcccgaatactttcgctccctatcccctcgccgggctgaatcctaacatgaatgtaaatagtatggacatgaccggcggtctttccgtcaaagatccttctcagtcacagtcccggttgccccagtggactcatccgaattctatggacaacctacctagcgcagcctcgcccctggagcaaaacccatctaaacatggcgccatacctgggggtctgagcatcggcccacctggcaaatcctctattgatgatagctacggaagatatgatctgattcagaatagcgaatcgcctgcttctcctccagtggctgtgccccactcttggagtcgggccaagagcgacagcgataaaataagtaatggctccagcattaactggccacccgaatttcaccctggcgtgccgtggaaaggactgcaaaacatagatcctgagaacgaccccgatgtgacacccggaagcgtcccgacagggcccaccatcaacacaaccattcaagatgtgaaccgctatctgctgaaatcagggggaaaactctcagatataaagtccacttggtcctctgggccgacaagtcacacccaggcgagcctctctcatgaactgtggaaagtgcctaggaatagcaccgcacctacacgacccccccccggtctgactaaccctaagccctctagtacatggggggcctctccgcttggctggacctcctcctattcttccggaagtgcatggagcactgatacctccggaaggacgtcaagctggctggtgctccgcaacctcactccgcagatcgacggctcgacacttagaaccctttgcctgcagcacggcccgctgataacgttccacctgaacctaacacaggggaacgccgtcgtgcgctactcttccaaagaggaggcggcaaaggctcaaaaaagcctgcatatgtgcgttttaggtaatactacaatccttgctgagttcgccggggaagaggaagtgaatcggtttctggcccagggacaggcattgccacccactagtagctggcagagcagctcagctagctctcagcccaggctgtctgctgcaggatcctcccatggactagtgagatctgatgccggtcactggaacgctccctgtctcgggggcaagggttcctcagagctgttgtgggggggcgtcccacaatacagctctagtctatggggacctccatctgctgacgactctagagttattgggagtcctaccccactcactaccctgctccctggcgacctgttgagtggcgaatcactgtag

SEQ ID NO: 138763 - DNA, 5181 bp, synthetic construct
  misc_feature 1..5181: note = Description of Artificial Sequence: Synthetic coding sequence
  source 1..5181: mol_type = other DNA
atggccacgggctctgctcagggtaatttcactgggcatacaaaaaaaaccaacgggaacaacggaacaaatggggccctagtccagagtccatccaatcagtccgcgctcggagccggcggcgccaattcaaatggcagtgcagcccgcgtgtggggcgtggccacagggtcctcttccgggctggcacattgcagcgtgtctgggggcgacgggaagatggatactatgatcggggatggtagaagccagaactgttggggtgccagcaacagcaacgctggcatcaatctgaatctgaatccaaatgccaatccagccgcctggccagtgttaggccacgaaggcaccgtagccactgggaatcctagcagtatttgctcaccagttagcgccattgggcagaacatggggaatcaaaatggaaacccaacaggcacgttgggagcgtggggtaacctattgccccaggaaagcacagaacctcagaccagcacctctcagaacgtgtctttttctgcccagccgcagaatctcaataccgacggccccaacaacacaaaccccatgaactcctcgcctaaccccatcaacgccatgcagactaacggtctgcctaattggggcatggctgtggggatgggcgcaattataccgccgcacctccagggactgccaggggctaatggatcatcagtgagccaagtctcaggaggttcagcagagggtatttccaactccgtgtgggggctcagcccgggtaacccggctactgggaactccaatagcggatttagtcaaggaaacggtgatactgtgaatagcgccctgagtgcgaagcagaatggaagtagcagcgcggtgcaaaaagagggatctggaggcaacgcctgggactctgggccgcccgccgggcccggcatcctagcctggggacgaggttccggaaataatggtgtcggcaatatccatagcggggcttggggacacccctcacggagcacatccaacggggtgaatggggagtggggtaagcctccaaaccagcattccaactcagacattaatggcaaagggtctactggttgggaatctccctccgttaccagccaaaatccgacagttcaacctggcggtgagcacatgaattcttgggccaaggccgccagcagcggcaccactgccagcgaagggtcttccgacggctcgggcaatcataatgagggatctacagggcgtgaggggactggcgagggtaggcgccgggataaaggcatcatcgatcagggccacatccagttgccgcggaatgacttagaccctagagtgctcagcaacacagggtggggacagacgcctgttaaacagaatacagcctgggaatttgaggaatctccacgatcagaaaggaaaaacgacaacggcactgaggcttggggatgtgccgctacccaagcatctaatagcggaggcaaaaacgacggtagcataatgaactcaactaatacctcctcggtgtctgggtgggtgaatgccccgcctgccgctgtccctgctaatacgggttggggcgacagcaacaacaaggccccctctggtcccggcgtttggggcgacagcataagtagtaccgccgtctctactgccgcagccgccaaaagtggccatgcctggtccggtgctgcgaaccaggaagacaaaagccctacctggggcgagccacctaagccaaagtcacaacactggggagacggtcagcggagtaacccggcttggtctgccggggggggggattgggctgactcatcatccgttttgggccacctaggagacggcaaaaagaacggcagtgggtgggatgcggatagtaacaggtctggcagtggatggaacgataccacccgcagcggtaacagcggctggggtaattctaccaacactaaagccaacccaggcacaaactggggtgaaactctgaaacctggacctcaacagaactgggcctctaagccacaggacaataacgtttccaactggggtggagccgctagcgtgaagcagaccggtactgggtggatcggcggacccgtcccagtgaagcaaaaagacagctcagaagctacaggctgggaagaaccctccccccccagcatccgccggaagatggagatagacgacggcacttcagcctggggggatccctccaactataataataagacagtcaatatgtgggacaggaacaatccggttatacagtcatctacaactaccaatacgaccacaactacgacgacaaccacatcaaatacgacccatcgcgtcgagacccctcctccccaccaggccggcacccaattaaaccgatctccactgctcggacccgtctcgtcaggatggggcgaaatgccgaatgtgcacagcaagactgagaacagttggggagaaccctcgagcccctctaccctagttgacaatggcaccgccgcctggggcaaaccacccagctccggctccggctggggagaccatcctgccgagcccccagttgccttcgggcgagccggagcccctgtcgccgcctcggcgctgtgcaagcccgcttccaaatctatgcaggagggatgggggtcaggaggagacgaaatgaacctgagcaccagtcaatgggaggacgaggagggagacgtgtggaacaacgcagccagtcaagaaagtacatcatcatgctcaagctggggaaatgcgcctaaaaagggcctgcagaaaggtatgaagacatctggcaaacaggacgaggcttggatcatgtcgcggctaatcaagcagttgacagacatgggattccctcgagaacctgccgaggaggccctcaagtctaataacatgaatttagaccaggccatgagcgcgctgttagaaaagaaagtggacgtggacaaaagagggctcggcgtaactgatcataacgggatggcagcgaaaccgctgggatgtagaccccccatcagcaaagagagttcagtcgaccggcctacttttctcgataaggatggcggactggtggaggagcctactccatcccccttcctcccctcaccttctctgaaactgcctctttctcattctgctctcccatcccaggctctgggcggaatcgcatccggacttgggatgcagaaccttaattcttcaaggcagattccgtccggcaatctgggaatgtttgggaattcaggcgctgctcaggcccgcaccatgcagcaaccaccccagcccccagttcagccattaaacagctcacagccctcattgagagcccaggtgccgcaatttctatcgccccaagttcaggctcagctcctacagttcgccgccaaaaacatcggtcttaatcccgccttgctcaccagtcccatcaacccccagcatatgaccatgctgaatcagctttatcaactgcagcttgcataccaacgcttacagatacagcagcagatgctgcaggcccagaggaatgtctccggaagcatgcgccaacaagagcagcaagtagctaggacaatcaccaacctccagcagcaaattcagcagcaccagaggcagctcgcccaagcacttctggtgaagcaaccaccacctccccctcccccacctcacctttcactgcatccatccgcagggaaaagcgcaatggacagcttcccatcgcatcctcaaacccccggcctgcctgacctacaaaccaaagaacagcagtcatctcctaacacgttcgcaccgtaccccctggctgggctcaatcctaacatgaatgtaaattcaatggatatgactggaggcctgagtgtgaaagacccttctcagtcacaatcacggcttccccaatggacccacccaaacagcatggacaatctgccgagcgctgcaagtccccttgagcaaaacccctctaaacatggcgccataccgggcggcctgtccatcggccctccggggaagtctagcatcgatgattcgtatggtagatatgacttgattcagaattctgaaagcccagccagccctcctgtcgctgtacctcacagctggtctagagctaagagcgactcggacaagatttccaacggatcttcaatcaattggccaccagagttccacccaggcgtcccatggaagggactgcagaatatcgatcctgaaaatgaccccgacgtgactcccggcagcgtaccgaccggacccactataaacaccacaattcaggacgttaaccgttacttgctgaaaagcggaggctccagcccaccctcatctcagaatgctactcttccctccagcagcgcatggcccctgagtgcttccggttactcttcttccttttcttccatagcttccgcacctagcgtggcaggtaagcttagcgatatcaagtcaacttggtcttcaggccctacatcacatacccaggcctctctatcacacgagctgtggaaggtccctcggaactctacagctcccactcggcctcccccagggctgaccaatccgaagccttcttccacatggggagcctcacccctgggatggacgtcttcctactcttccggatccgcctggagtaccgacaccagcggtcgcacatcctcctggcttgttttgaggaacctcacccctcagattgatggtagcacgctaagaaccctgtgtctccagcacggacccctcatcacttttcatctgaatttaacacaaggcaatgcagtggtccgctatagctccaaggaggaagcagccaaagcccaaaagtctctgcacatgtgtgttctgggaaacacaactattctagcagagttcgcaggcgaggaggaggtgaacagatttttagcccagggccaggctctgcctcctacctcatcctggcagtcatcctctgcctcaagccagccccgtctaagtgcagctggatcttctcacggattggtgcggagcgatgccggccattggaatgctccatgtctgggcgggaaaggcagtagtgagttgctttggggtggggtcccccagtattcttctagcctttggggacccccatccgccgatgattcaagggttataggatccccaactcccctgaccactttgttgcctggcgacttactgtcaggggagtcgctttag

SEQ ID NO: 138764 - DNA, 1959 bp, synthetic construct
  misc_feature 1..1959: note = Description of Artificial Sequence: Synthetic coding sequence
  source 1..1959: mol_type = other DNA
atgggaggatggaaagggcccgggcaacggcgcgggaaagagggacccgaagctcgccgacgcgctgctgagagaggcggcgggggaggcggcgggggggtgcccgctcccaggtcacctgcccgagaacccagacctcgctcatgcctcctgctgccaccaccctggggcgccgccatgacgcccgacctcctcaactttaagaaaggttggatgagtatcctcgatgaaccaggggaacccccatctccctctctgaccaccacctccacctctcagtggaagaaacactggttcgtgctgacagatagctctctcaaatattaccgcgattccaccgctgaggaagctgacgagttggacggtgagatagacttgcgttcttgcactgacgtgacagagtacgcagtgcagaggaactatggatttcagatacacacaaaggatgccgtgtatacgctttccgccatgacaagcggaatccgcaggaactggattgaagcgctgaggaagacagtcaggcctacgtctgctcctgacgtgactaaactgagcgatagcaataaggagaacgctctgcattcctactctacccagaagggcccgttgaaagcaggcgagcaacgggccggcagtgaagtcatttccagagggggacccaggaaagccgatgggcaaagacaagcgctcgactacgtggaactgtcccccctgacccaggctagcccacaaagagcccgcacacccgcgaggaccccagatcggcttgccaagcaagaggagctggaaagagacctggcacagcgatctgaagagagacggaaatggtttgaagctacagattcccgcacccctgaagttcctgctggtgaaggacctaggagggggcttggagccccactgaccgaagaccaacagaatagactgtctgaggaaattgaaaaaaagtggcaggagctggagaaactgccactccgggaaaataagcgcgtgcctttaactgccctcctcaaccagagccgcggggagcggcgcggacctccgtctgatgggcatgaagctctggagaaagaagtccaggctttgcgcgcccagctggaggcctggcgcttgcaaggggaggctccccagtcggcccttcgctcacaggaggatggacacatcccccccgggtatatttcccaggaggcttgtgagcggagtctggccgaaatggagtcctcccaccagcaggtaatggaagagctgcagaggcatcacgaacgagagctgcagagactgcaacaagagaaggaatggctgttagctgaagaaaccgcagccaccgcctcagccatcgaagccatgaaaaaggcctatcaggaagagcttagcagagagctctcgaaaacaaggtcattgcaacaaggcccggacggactccgaaaacagcaccaatccgacgtcgaggcattgaaacgcgagcttcaggtgctcagcgaacagtacagtcagaagtgtcttgagatcggcgcgctgatgaggcaagccgaggagcgcgagcacactctcaggaggtgtcagcaagagggtcaggaactgctacgccacaatcaggagttacatgggcgtctgtcagaggagattgatcaactcagagggtttatcgcgtcgcagggtatgggtaacggttgtggtcgctcaaatgaacgctcctcttgcgagctggaagtccttttgcgagttaaggagaatgaactacaatacctgaaaaaggaggtgcagtgtcttagggatgaactccagatgatgcaaaaggataagaggtttacttctgggaagtatcaggatgtctacgtagagctgagtcatatcaagacgcggtcagagcgcgagatagagcaactcaaagagcatttgcggctggcgatggctgctctgcaggagaaagagtctatgcgaaacagtctagccgaatag

SEQ ID NO: 138765 - DNA, 7098 bp, synthetic construct
  misc_feature 1..7098: note = Description of Artificial Sequence: Synthetic coding sequence
  source 1..7098: mol_type = other DNA
atggaggaagtgcccggggatgctctgtgcgaacacttcgaagccaacattctgacacaaaatagatgtcagaattgctttcacccagaggaagcacacggagcccgttaccaggagttgcgcagtccatccggagcagaagtgccctactgtgatctgcctaggtgtccacctgcccctgaggaccccctgtctgcctcaaccagcgggtgccaatcagtagtggaccccggcctgcgccccggacccaagcgggggcctagcccctccgccggcctgcctgaggaggggcctaccgcagctcccaggtctcgatccagagagttagaggctgtcccctatctggagggcctaacaacctctctgtgcggttcctgcaacgaagaccccggctcagacccgactagctcaccagatagtgcaaccccagatgacacatcaaattctagctctgtcgattgggataccgtcgaaagacaggaggaggaagcgcccagttgggacgagctggcagtgatgattccccggaggcctagagaagggccgagagccgatagctcccagcgtgcgccatccctgttgaccaggagtccggtcggcggagatgcagccggacagaaaaaagaggacaccggaggtgggggccgtagcgcaggccagcattgggcacgcctgcgaggcgagtccggcttgtcgcttgagcgccatcggagcacactcacacaggcgagttcaatgacaccacacagcgggccccggtctacaacttcccaagccagtccggcccagcgcgataccgcccaggccgcctctacacgcgagatcccccgagccagctctccccacaggatcacgcaaagagacacatcaagagccagctccacccagcaagagatctcccgggcttcttcaacacaacaggaaacatcccgggcctctagcacccaagaggacacccctagggcatcaagcactcaggaggatacccccagagctagttccacccaatggaacactccgcgagcgtcctctcccagtcggtctacacaactcgacaaccctcggacctcatccactcaacaagacaatcctcaaacaagtttccctacatgtacacctcagagggagaatccaagaacaccttgtgtccagcaggacgacccgcgggcctcaagccctaatcggacaacccagagggagaactctcggacttcgtgtgctcagcgagataatccaaaggcttcccggacaagctctcctaaccgcgctacaagagataacccaagaactagttgcgcccagcgggacaaccctagggccagtagcccgagcagggcgaccagggataacccaaccacgtcttgcgctcagagggacaatcctagggcaagccgcacaagcagcccgaatagggccacccgcgataacccgaggacatcttgcgcccagagagataatcctcgggcctcgagtcccagcagggccaccagagataacccaacaacatcatgcgcccagagagacaaccccagagcctcaaggaccagctccccaaaccgagcaacgagggacaacccccgaacatcctgcgcacagagagacaaccctcgtgcatcaagcccaaacagagccgctcgcgataaccccaccacaagctgcgcccagagagacaacccacgggcatcaagaacgtcgtcacctaacagagcgactagagacaacccacgaacgtcttgtgcgcaacgagataacccgcgagctagctctcctaatagggcaaccagagacaacccaacaacaagctgtgctcagagggataacccccgcgcaagccgcactagttcccccaatagagcaacccgcgacaacccacgcactagctgtgcccagcgcgataacccgagagcttcctctcccaacaggactacacagcaggacagtccaagaacttcatgtgcgcgacgggacgatcccagagcctcttcacccaaccggacgatccagcaggaaaatccgaggactagctgtgcccttagggataatcccagagcaagttcacctagcagaactatacaacaagaaaatccacgcacgagttgtgctcaaagggatgacccccgggcatcctcccctaatcgcacgacgcaacaggagaaccctaggacatcctgtgcacggcgcgataaccctcgtgcaagcagtagaaataggactatacagcgcgacaaccccaggacaagctgtgcgcagcgtgacaatcccagggccagttcacctaatcgcacaattcagcaagagaacctgaggacctcctgcaccagacaggataatcctaggacaagctcacccaatcgggccactcgcgataatcccagaaccagttgtgcgcaaagggacaacctgagagcgagctctcccatacgagcaacgcagcaagataacccgcgcacctgtattcagcaaaatatacctcgctcatcttccacccagcaagacaatccaaaaacatcatgcacaaagcgcgacaacctccggccaacctgcacgcagcgagaccggacacagagtttctcatttcagcgggacaacccaggtaccagcagctcccagtgctgtacacaaaaagagaatttgcgcccttcttcaccccacagaagtactcagtggaacaatcctcggaactcatcgccgcatcgcactaacaaagatattccttgggcatcctttccgctgaggccaactcaatcggatggccctaggaccagctcaccaagccgctcaaagcaaagcgaagtgccatgggccagcatcgctctccggcccacacagggggatcggccacagacgagtagccccagccgccctgcccagcacgaccctccgcaatcttcgttcggccctacccagtacaatcttccgtcacgcgccacgtcgtcttctcacaatcccggacatcaaagcacatcccggacctcctcaccagtctaccccgctgcctacggtgcacctctcacgtcccccgagccatcccaacctccctgtgcagtgtgcatcggacacagagacgcccctcgggcctcaagccctccccggtatctgcagcacgacccattcccatttttccctgagcccagagcacccgagtcagagccgccacaccatgaacccccgtacattccacccgccgtctgcattggtcatcgcgatgcgccaagagcttcaagccctcctagacacacacagtttgacccttttccttttctgcccgatacctcagatgctgagcaccaatgccagtccccccagcacgaaccactgcaactgcctgcccccgtgtgcataggctacagagatgcacctcgcgcttctagcccccctcggcaggcccctgagcctagtcttctcttccaagacctgcccagagcaagcacagagtctctggtgccatctatggattccctgcatgaatgccctcatatccctaccccggtttgcatcgggcaccgggacgccccatccttctcaagtccaccccgccaggcccctgagccttcccttttcttccaagatccgcctggcacgtccatggaatccttggcgcccagcaccgacagtctacatggctcacccgtactcatcccacaggtgtgcatcggccatcgggacgctccacgcgcgtcctcccctccccggcatccgccatcagatctcgcattcctcgctccatcaccgtctcccgggtcatccggtggatcccgtggaagtgcgccacccggggaaacacgtcacaaccttgaaagggaggagtatactgtgctggctgatttgcccccgccccgcaggttggcacagcgacaaccggggccacaggcccagtgctcaagcggcggcagaactcacagtcctggccgtgctgaggtggaacgtctcttcgggcaggaacggcgcaagagcgaggctgccggtgcattccaggcccaggatgagggcaggtcacagcagccctcacaaggccagagccaactgctgcggcgccagtcctctcccgctccgagcagacaggttacaatgctcccggcaaagcaagccgagttaacccgcaggagtcaggcagaacctccgcatccatggtcaccagagaaacgccctgagggtgaccgacagctgcagggctcacccctgccccctcggaccagcgctcgcacgcctgaacgtgaactgaggacccagagaccactggagagtgggcaagccggcccacgacagccgctaggcgtgtggcaaagccaggaagagcctcctggatcccagggcccgcaccgccatttggaaagatcttggtcctcccaggagggggggctaggtcccggaggctggtggggctgtggagagcccagcttgggcgcagccaaggccccagagggggcatggggtggcacgtcccgggagtataaggagagctggggtcagccggaagcttgggaggaaaagccgacccacgaactcccaagggagctgggtaagcgtagtccacttacctcacccccggaaaattggggaggaccagcagaaagcagccaatcatggcacagcgggactcctaccgcagttggttggggtgcggagggagcctgtccctaccctcgaggatcggagcggagaccagaactggattggagagatctgcttgggctgctgcgcgccccgggtgagggtgtttgggctcgcgtgccttccctggattgggaagggctcctcgagctcttgcaggcaagacttcccaggaaagaccctgcaggacatcgcgatgatttagcccgagctcttggtccagaactcggacccccaggaactaatgatgttcctgaacaggagtcccacagccaacctgaaggctgggcagaagcgactcccgttaacgggcactcccccgcgcttcaatcacagagtcccgttcagctcccttcacccgcatgtacatctacgcagtggccaaagattaaggttacccggggtcccgcaaccgccactcttgccggcctggaacagactggccctctcggaagtagatcgaccgcaaaagggcccagcctcccggagctgcagttccagcccgaagagcccgaagaaagtgaacctagcaggggccaggatcctctgacggaccagaagcaggcagattccgccgataaacgccctgccgaggggaaggcggggagcccactgaaaggcagactggtgacttcttggcggatgccaggcgatagacccacactgttcaatcctttcctgcttagcctcggcgtcctgaggtggcgcaggccagaccttctgaactttaagaaggggtggatgtctattctcgatgagcccggcgagcccccctctcctagcctaactacgacttctacttcacagtggaaaaagcactggttcgtgcttacggattcaagcctgaagtactatcgtgatagcaccgcagaagaggcagacgaactggacggggaaatcgatctgcgctcctgcaccgatgtgacagagtatgcagtgcagcgcaattatggattccagattcacactaaggacgctgtgtatactctttccgccatgacttctggcattcgcaggaactggatcgaagcattgcggaagaccgtgcggcccacatccgccccggacgtgaccaagctgtcagatagtaacaaagaaaacgcgctacacagttacagcacccagaaggggcccttgaaggctggcgagcagagggcagggtccgaagtaatcagtcggggcggacccagaaaggctgacgggcagagacaggctcttgactatgtagagctgtctcctcttacccaagcatccccacagcgcgcccggaccccagccagaactcccgaccgactggccaaacaggaagagctggagagggacctggcccagcggagcgaagaacgcaggaagtggttcgaggcgaccgactctaggacccctgaggtcccagccggggaggggccaagacgaggactcggcgcccccttgactgaagaccagcagaaccgcctgagtgaggagatcgaaaagaaatggcaggaacttgaaaagctgcccttacgcgaaaacaaacgcgtgcctctgactgcactcctcaatcagagtagaggagagcggcggggtccaccttcagacgggcacgaagccctggagaaagaggtgcaggccctcagggctcaactggaagcatggagactacagggtgaggccccccagtccgcactgcggagtcaagaggacggacacattccccccggttacattagccaagaagcatgtgaaagatccttagctgaaatggagtccagtcatcagcaggttatggaggaattacagcgtcaccacgagcgggagttgcaaaggctccagcaggagaaggaatggcttctggctgaggagaccgccgcgactgcctcggctatcgaggccatgaaaaaggcataccaggaggagctttcacgagaactgagtaagaccagatctctgcagcagggtcccgacgggctccggaagcagcaccagtctgacgtggaagccctcaagcgggaactgcaggtgctctctgagcagtactcacagaagtgtttagaaattggggctctcatgagacaggctgaagagcgcgagcatacgctgagacgctgtcagcaagaaggccaggaactcctgaggcacaaccaggagctgcatggtaggttaagcgaagaaatcgatcaattacggggcttcattgcctctcaggggatgggtaacgggtgtggacgaagtaacgaacggagctcatgcgagctggaagttctcctgcgcgttaaggaaaatgagttgcagtatctaaagaaggaggtgcagtgcttgcgggacgagctgcagatgatgcagaaggacaaaaggtttactagcggaaagtaccaggatgtttatgtggagcttagtcatataaaaacccgatcagagcgggaaattgaacagctgaaagagcatctgcgcttggcgatggctgcgcttcaggagaaagaatccatgcggaactctctcgcggagtag

SEQ ID NO: 138766 - DNA, 1296 bp, synthetic construct
  misc_feature 1..1296: note = Description of Artificial Sequence: Synthetic coding sequence
  source 1..1296: mol_type = other DNA
atgggaggctggaagggtcccggacaacgacgcggcaaagagggaccagaggcgcgtagacgggcagctgaacgcggcggcggtgggggtggggggggcgtccccgcgccacgttctcccgcccgcgaaccccgccctcgctcatgtttgcttttgcccccgccttggggagccgctatgacccctgacctactgaacttcaagaaggggtggatgtccatcctggacgagccaggcgaacctcctagcccttccctgacaaccactagcacctcccagtggaaaaaacattggttcgtgctgactgactcaagcttgaagtattatcgcgatagcaccgccgaagaagctgacgaactcgatggcgaaattgaccttcgatcttgtactgacgttaccgagtacgcagtgcagcggaactatggctttcagatacacactaaggatgccgtctacactctgtctgctatgacatctggcatcaggagaaattggatcgaagctcttcgcaaaacagtgaggccaaccagtgctccagatgtaacgaagttatccgattcaaataaggagaatgcactccatagctacagcacccagaagggaccgctcaaggccggcgaacagagggcaggcagcgaggtgatcagtcggggaggacccagaaaagccgacggccagagacaggcacttgactatgtcgagctgagcccccttacacaggcatccccgcagcgcgctcggacgcctgctagaacacctgataggctggccaaacaggaggagctggaacgcgatctcgcccagcggtctgaggaaaggcgcaagtggtttgaggcaacagacagtcggacccccgaagtgccagccggtgaaggcccccggcgcgggctgggcgcgcccctcacggaggaccaacagaacaggctcagcgaggagattgagaaaaaatggcaggaactggagaagcttcctctgcgcgagaacaaacgcgtgcctttgaccgcactgctcaatcagtctcgcggagagcgtaggggaccgccctccgacggccacgaagccctggagaaggaggttcaggctctcagggcccagctggaagcttggaggctccagggcgaagctccgcaaagtgcactgcggagccaggaagatggtcacattcccccaggatatatttctcagctcgtcggcgtgatcacagtgcccgtgttgcaaactcgccctttgtcaagcgagcgcttgtgtgacctgccaaaggttacacccccagctgggttgaagggcggaatctag

SEQ ID NO: 138767 - DNA, 5070 bp, synthetic construct
  misc_feature 1..5070: note = Description of Artificial Sequence: Synthetic coding sequence
  source 1..5070: mol_type = other DNA
atggaggaagtaccaggagacgccttatgtgagcattttgaggctaacatcctcacccaaaataggtgccaaaactgcttccatcccgaggaggcccatggcgcccggtatcaggaactgcggagcccttccggtgcagaggtgccttattgtgatttgccccgctgtcctccagcacctgaggacccgttgtccgcttccacttccgggtgccagtctgtcgttgaccctggactgcgaccgggccccaagagaggacccagccctagcgcagggctccctgaggagggcccgaccgccgctcctaggtcgaggagtcgggagctggaggcagtgccttaccttgagggtctcactactagcttgtgcggctcctgtaacgaggatcctggctccgatccaacatcttctccggacagcgcaacacccgatgacaccagcaactcctctagtgtggactgggataccgtggagaggcaggaggaggaggctccgtcttgggatgagttagcagtgatgattcctagaaggcctcgggaggggccacgagctgatagctcccagagggctccaagtctgctcacacgcagcccagtgggcggcgacgccgctgggcagaaaaaagaggatacagggggaggcgggcggtcagcaggccagcattgggcgcggctgaggggagagagtggtctatccctggagcgacacagatccaccctgactcaggcttctagcatgactcctcatagcggcccaaggagtactacaagccaggcatctcctgcacagcgcgatacggcccaagccgcatcaactcgggagattcctagagcatcatcccctcacagaatcacgcaacgggacacctcccgcgcctcctccactcagcaagaaatatcccgcgcctcttccactcagcaggagaccagcagagcctcaagtacacaggaggacaccccgagggcctcctctactcaggaggatacgcctcgcgcatcctccactcagtggaacaccccgcgcgcctcctctcccagccggtccacgcagctggacaaccccagaacgagtagtacccagcaggacaatcctcagacctccttccccacttgtactccccaacgtgagaatccacgcactccatgtgtccagcaggacgatcctcgggcctctagccccaaccgaacaacccaacgtgaaaactctagaacttcatgtgctcagagggataaccccaaagcttcccggacttcttccccaaatcgcgcaacaagagacaatcccagaaccagctgcgcccagagagacaacccgcgtgcatctagcccatcacgcgctacccgcgacaatcctacgacaagctgcgcccagagggacaatccaagggcaagtcggaccagctctcccaatagggctactcgagacaaccccagaacttcttgtgcacagcgcgataatcctcgcgccagtagcccaagtcgggcgacaagggacaacccgactacctcctgtgcgcagcgggataaccccagggcctccaggacctcttccccaaatagggcgacacgcgacaatccaaggacctcttgcgcgcaaagagacaaccctcgggcatcaagtcccaatcgcgccgccagagataacccaaccacctcctgtgcccaacgtgataatccgcgggccagccgaacctcaagtcctaaccgagctacaagagacaacccacggaccagttgcgcccagagggacaaccctcgggcttcctcccccaatagagcaacccgcgacaatcctaccactagctgtgcacagagggataatcctcgggcctctagaaccagctcccctaatcgcgctacccgtgataatcctcggacttcctgtgctcagagagacaatccgagagctagctctcccaataggaccactcaacaggactcacctagaacatcctgtgcgcggcgggatgatcctcgagctagctctccaaacaggaccattcagcaggagaacccaagaacttcttgtgccctgagggataacccccgggcctctagcccgtcccgcactatacagcaggaaaaccctagaacctcctgtgctcagagagacgatcctcgcgccagcagtccaaacaggacaacccaacaggagaacccgcgaactagttgcgctagacgcgacaatccccgggccagctccagaaatcggaccattcagcgggacaatcccaggacaagctgtgctcaacgggacaaccccagagcctcctctcccaacagaaccatacagcaagaaaacctgcgcacgagctgcactaggcaggacaatccacgtacctcatcacccaacagagccacacgcgataacccaaggacgtcctgtgctcagcgagacaacttgagagcctcaagccccattcgcgcgacacagcaagacaacccaagaacctgtatccagcaaaacatcccacgcagttctagtacccagcaggacaaccccaaaacttcttgtacaaagagagacaatctgcggcccacctgcacccaacgggatagaactcagagctttagtttccagagggataatcccggcacatcctctagccagtgttgcacacagaaagagaacctgagaccctccagcccacacagaagtactcagtggaacaaccctcggaattctagtcctcatagaactaacaaagatatcccatgggcgtcctttccacttcggcccacacagagcgacggcccgcgcacatcatctcccagccggagcaagcaaagcgaggttccgtgggcctccattgctctaagaccaacgcaaggcgatcgccctcagacatcctcgccgagccggcccgcgcaacatgatccaccacagagtagcttcggcccaacacagtacaacctccccagtcgggccacctcatccagtcacaaccccggtcaccaatctacaagtcgcacatcatctccagtgtatcccgccgcgtatggggccccactgacttcgcccgagcctagccagcctccatgtgccgtgtgcattgggcacagagatgccccacgagctagctcgccaccacgttatctacagcacgatccttttccttttttcccagaacctcgagcacccgagtcagaaccccctcatcacgagcctccatacattccgcctgccgtttgtatcggccaccgcgatgctccacgcgcatcctctccccctcgccacacgcagttcgacccatttcccttcttgccagacacttccgatgccgaacaccagtgtcagtccccacagcacgaacctcttcagcttcccgcccctgtgtgcatagggtatcgcgatgcccccagagctagttccccaccgcgccaagcgcctgagcccagtctattattccaagacttgcctcgtgcatcaacagagtccctcgtcccctccatggacagcctgcacgagtgccctcacatcccaaccccagtgtgtattggccacagagatgcccccagcttttcttcaccccccagacaggctcctgagcccagtcttttttttcaggaccccccgggcacttctatggaatccttagcacccagtaccgattcactgcatggaagcccagtcctgattcctcaggtctgtataggtcatagggacgcccccagggcctctagcccgccgcgtcatcctccctcagatttagctttcttggcgccatcgccctctcccgggtccagcggaggctcgcggggatctgccccgccgggggagacaagacataatctcgagagagaggagtatactgtactggctgacctcccccctccccggcgactagcacagagacagcccggccctcaggcgcagtgtagctctggaggccggacacactctcctggaagagccgaagtcgagcggctcttcggccaagaaaggagaactatgctgccagccaaacaggctgaattgacgagaaggtcccaggccgaacctccacatccttggagccctgaaaagagacctgagggtgacaggcaactccaagggagccctttacccccgcgcacgagcgcgcggacccctgaacgggaattgcggacacagcgacctcttgaatcaggacaggctggacctcgccagccccttggggtttggcaatctcaggaagaacctccagggagccagggcccacatcggcatctcgaacggagctggtcctctcaggagggaggacttggccctggcggatggtggggctgcggtgagcctagtctgggtgccgccaaggctcctgaaggcgcttgggggggtaccagccgagaatataaggagtcatgggggcaacctgaggcctgggaagagaaacccactcacgagctccctcgggagctggggaagcggtctcccctgacaagcccccccgagaattgggggggacctgccgaaagcagccagagttggcactccgggactccaacagcagtagggtggggcgcggagggcgcctgcccctatcctcgcggatcagagcgccgccctgagctcgactggcgggaccttctgggtctgctgagggcccctggagagggggtctgggcaagggtcccatctctggactgggagggtctgttagagctgcttcaggcgcgactccccaggaaagatccagccgggcatagagatgacctggctcgcgccctcgggcccgagctgggacctccagggactaatgatgtgccagagcaagagagtcactcccagccagaaggctgggccgaagccacaccagttaatggtcactcgcctgcactgcagagccagtctcccgttcaattgccctcaccggcttgtacaagtacgcaatggcccaaaattaaagtgaccagaggcccagccacagccacccttgctggcctggagcagacaggacctctgggcagccgctccactgcaaagggtccatcgcttcctgaactgcagtttcagcctgaggaacccgaagagtccgagcccagcagggggcaggatcccttgaccgaccaaaagcaagctgactcatag

SEQ ID NO: 138768 - DNA, 771 bp, synthetic construct
  misc_feature 1..771: note = Description of Artificial Sequence: Synthetic coding sequence
  source 1..771: mol_type = other DNA
atgtctatcctggacgagccgggtgagcctccaagcccttccctcacaaccacgtcgacctcccaatggaaaaagcattggttcgtattaactgacagctctttaaagtattaccgggactcgaccgccgaggaagccgatgaactggatggcgagattgacctgcggagttgtactgacgtaaccgagtacgccgttcagagaaattacgggttccagattcacactaaggacgccgtttatactctgtcggccatgacctccggcattcgtcgtaactggatcgaagcactaaggaagacggtgcgtccaacttctgccccggatgttactaaactcagtgatagcaacaaggaaaacgctctccatagttacagcacccaaaaggggcccctgaaagccggagaacagagagcgggctccgaggtgatttctcgtgggggacccaggaaggctgacgggcagcgccaggccttagattatgtggagctgagcccccttactcaagcgtctccccagagagcaaggacacctgctcgcacgcctgatcgccttgctaaacaggaggagctggagcgggacctggcacaacggagtgaagagagaagaaaatggttcgaggccaccgacagccggactcccgaggtgccagcgggagagggaccaaggcgcggattgggagcccccctcaccgaagatcagcagaaccggttgtccgaagagatcgaaaaaaagtggcaggaactggagaaactccctctgcgagagtag

SEQ ID NO: 138769 - DNA, 252 bp, synthetic construct
  misc_feature 1..252: note = Description of Artificial Sequence: Synthetic coding sequence
  source 1..252: mol_type = other DNA
atgagtatcctggatgagccaggcgagccacccagtcccagtttgacaactacttcaactagtcagtggaaaaaacactggttcgtgctgactgattcatccttgaagtactatagggatagcacagccgaagaagcagatgaactggacggcgagattgacctccggagttgcaccgatgtgactgagtacgctgtgcagcgcaattacggattccagattcacaccaaggacgctgtctacacactgtag

SEQ ID NO: 138770 - DNA, 2577 bp, synthetic construct
  misc_feature 1..2577: note = Description of Artificial Sequence: Synthetic coding sequence
  source 1..2577: mol_type = other DNA
atggcagaactttctgaagaagctcttttaagtgtcctgcccacaattcgtgttccaaaagctggagaccgcgttcacaaagacgagtgcgcatttagctttgatactcccgagagcgaaggcgggctctacatttgcatgaacacctttttgggatttggtaaacaatacgtagagagacactttaacaaaacaggtcagcgggtttatctacatctgagacgcaccagaaggcccaaggaagaggatccggccaccggaaccggcgatcctcccaggaaaaaaccaacccgactagccattggagtggagggcggctttgatctgtctgaggagaagttcgagctagacgaagacgttaagatcgtgatcctccctgattacctggaaattgctcgtgacggtttaggcgggctgcccgatattgtgcgcgaccgcgtgacctctgccgtggaagcactgctgtcagccgatagtgcctctcggaagcaggaggtgcaagcctgggacggggaagtccgtcaggtctctaagcatgcattctcactgaagcagctggataacccagcccgaatcccaccttgtggatggaaatgctcaaagtgcgacatgcgagagaacctgtggctcaacctgacagacgggagtatcctttgtggtaggaggtattttgacggctctggtggaaacaatcatgccgtcgaacactatagagaaaccgggtatcctctggccgttaagttggggacaatcacccctgatggagccgacgtctatagctatgacgaagatgatatggtacttgacccttctctagccgaacacctgtcacattttgggattgatatgctgaagatgcagaaaaccgataaaaccatgaccgagttagaaatcgacatgaatcagaggataggcgagtgggaactgattcaagaatcgggagttcctctgaaacccctcttcggacccggttacaccgggattagaaacttaggcaactcatgctatctcaactcagtggtccaggtgctgttttccattccagattttcagagaaagtacgtagataaactcgagaaaatcttccaaaatgctccaactgaccctacccaggatttttcgacccaggtggccaaactaggacatgggctgttatctggtgagtactcaaagcccgtgcctgagagcggggatggagaacgcgtgcccgagcagaaagaagtgcaagacggcattgcgccgaggatgtttaaggccttgatcggtaaggggcacccggagttcagtaccaatcggcagcaggacgcccaggagttcttcctgcatctgattaacatggtggagcgaaattgcaggtcctctgaaaaccctaacgaggtgtttcgtttcctggtggaagagaagattaaatgccttgcgactgagaaggtgaagtatacgcagcgggtggattacatcatgcaactccccgttccaatggatgctgcactgaacaaggaggaactcctcgagtatgaggagaagaagagacaggcggaggaggagaagatggcgctgcctgagctggtaagagcacaagtcccttttagtagctgccttgaagcatacggggccccagagcaggtcgacgatttctggagtaccgcgttacaggctaaatctgttgccgtgaaaactactcggtttgcaagcttccccgattatctggtgattcaaatcaaaaagtttacatttggactggactgggtgcctaagaaactcgacgtgtctatcgaaatgcccgaagagctagatatctcacaactgaggggcacaggcctgcagcccggcgaggaggagctgccagatatagcgcccccactcgtgacccccgatgagcccaagggaagtttgggcttctatggtaacgaggatgaagatagcttctgtagtccacacttttctagccctacgagcccaatgttagatgagtctgttatcattcagcttgtcgagatggggtttccaatggacgcatgtcggaaagctgtttattacacgggcaattccggcgccgaggccgccatgaattgggtgatgtcccacatggacgaccctgacttcgcaaacccgctcatcctccctggatcttctggccctgggtccacctctgctgctgctgatccaccgcctgaggactgtgtcacaacgattgtgagcatgggctttagtcgagaccaggcactcaaggcactccgtgctactaataactctctggaaagagctgtcgattggattttctcacatatagacgatctagacgcggaggccgcaatggatatctcggagggacgatcggccgccgactctatctccgagtcagtgccagtaggcccgaaagtgcgagacggcccggggaagtaccagctgttcgccttcatcagtcatatgggaacttctacaatgtgtggacattacgtatgtcatattaagaaagaggggaggtgggtgatatataatgatcagaaggtgtgtgcatcagaaaaaccccctaaggacctgggatacatctatttctaccagagggtggcctcgtag

SEQ ID NO: 138771 - DNA, 750 bp, synthetic construct
  misc_feature 1..750: note = Description of Artificial Sequence: Synthetic coding sequence
  source 1..750: mol_type = other DNA
atggccccaagtcggaaattcttcgttgggggaaattggaaaatgaacggtcgcaagcagagcctcggggaattgatcggtacactcaacgcagccaaggtgcctgcagatacagaagtggtgtgcgctccccccaccgcctatatcgacttcgcccgccagaagcttgacccaaaaattgcagtggcagcccagaattgctataaggttacaaacggggcctttaccggtgagatctcgccaggcatgatcaaagactgcggcgccacatgggtggtcctggggcatagcgaacggcggcacgtatttggcgaaagcgatgaactgattggacagaaggtggcccacgcactcgctgagggactgggggtgatagcctgcatcggagaaaaactggacgagagggaagcgggcatcacagagaaagtcgtgtttgagcagacaaaagtgatagctgacaatgtcaaggactggtcaaaggtcgtcttggcttacgaacctgtgtgggcaatcggaacagggaaaaccgcaacccctcaacaggcccaggaagtgcacgaaaagctcaggggttggctgaaatccaacgtctctgacgctgtcgcccagagtactagaattatttacggtgggtcggtcactggggctacttgcaaggaactggcgtcgcagccggatgtggacggctttctcgtggggggcgcttccctgaagcctgagtttgtggacattattaacgccaaacagtag

SEQ ID NO: 138772 - DNA, 504 bp, synthetic construct
  misc_feature 1..504: note = Description of Artificial Sequence: Synthetic coding sequence
  source 1..504: mol_type = other DNA
atgatcaaggactgcggtgctacatgggtggtgctcggtcactccgaaagacgccacgtgtttggagaatctgatgagttaatcggccaaaaggttgcacatgcgctggctgaaggactgggcgttattgcctgtataggtgagaagttggacgaaagagaggcagggatcaccgagaaggtcgtcttcgagcagacgaaagttattgcagacaatgtaaaagactggagcaaagtcgtgttagcttacgaacccgtctgggccattgggaccggcaagaccgccactcctcagcaggcccaggaagttcacgagaagctgaggggctggctcaagtccaacgtgagcgatgccgtggcccagagtactagaataatctacggaggctccgtaaccggggcaacctgcaaggaacttgctagccagcccgatgttgacggcttcctggtgggcggtgcctctctgaagccagaattcgtggatatcattaacgcaaagcagtag

SEQ ID NO: 138773 - DNA, 1233 bp, synthetic construct
  misc_feature 1..1233: note = Description of Artificial Sequence: Synthetic coding sequence
  source 1..1233: mol_type = other DNA
atggatgtcatggaattgctggaagaggacctgacctgccccatctgctgctctctgttcgatgacccccgagtcctgccatgctcacacaatttctgtaagaaatgcctggaggggatactcgaaggttcagtgcggaactctctctggagacctgcgccattcaaatgtcccacatgtcggaaggaaacgagcgcaactggtataaactctcttcaggtaaattatagtctgaaaggcatcgtggaaaagtacaacaaaatcaagatcagcccaaagatgcccgtgtgcaaaggccacctgggacagcctttaaacatcttttgcctgaccgacatgcaacttatttgtggcatttgtgccactcgcggcgagcacacaaagcacgtgttctgttcgatcgaagacgcctacgctcaggagcgggatgccttcgaaagcctgtttcagagcttcgaaacttggcggaggggtgatgccctgtcaaggctggacactctcgagacttccaaacgtaaatcacttcagctgctgaccaaggattctgacaaagtgaaggaattcttcgaaaagctgcaacacacactggaccagaagaagaatgagatactatcagacttcgaaaccatgaagttggcagtgatgcaggcatacgacccagaaataaataagttgaacaccattctccaagagcaacgaatggcttttaatattgctgaggcattcaaggacgtcagcgagccaatcgtatttctgcagcagatgcaggaatttcgtgaaaagatcaaagtaatcaaggagacacccctccccccatctaatctccctgcgtctccgttaatgaagaattttgacacttctcagtgggaagacatcaagctggtggatgtggacaagctgagcctaccccaggatacaggcacattcatctccaagataccatggtccttctacaaattgtttctactgattcttctgttggggctggtgattgtattcggcccaactatgtttctcgaatggagcttatttgacgatctggctacatggaagggatgcctgagcaatttctctagttacctgaccaaaaccgctgattttattgaacagtccgtcttctattgggaacaagtgacggacgggtttttcattttcaatgagaggtttaaaaacttcacactggtagttctgaacaatgtagcagagtttgtttgtaaatacaagctgctctag

SEQ ID NO: 138774 - DNA, 1233 bp, synthetic construct
  misc_feature 1..1233: note = Description of Artificial Sequence: Synthetic coding sequence
  source 1..1233: mol_type = other DNA
atggacgttatggagctccttgaggaggatctgacttgtcccatctgctgctcacttttcgatgatccgcgggttctcccctgttctcacaacttctgtaagaaatgtcttgagggaatccttgaagggagcgtgagaaactctctgtggcgtccggcaccatttaagtgtccaacttgcagaaaggagacctctgccacgggcatcaatagcctgcaagtgaactactccttaaaaggaatcgtggaaaagtacaataaaattaagatatcgcccaagatgccagtgtgtaaaggccatctcggacagcccctgaacattttttgcctcaccgatatgcagcttatctgcgggatatgcgccactagaggcgagcacaccaaacacgtgttttgctcaattgaggacgcttatgctcaggaaagggacgcctttgagtccctcttccagagcttcgagacatggaggcgcggcgacgctctgtcaagattggatacgcttgaaacgtctaaacggaaatctcttcagctgcttactaaagacagcgacaaagttaaggaattcttcgagaagctgcagcacactctggaccagaagaagaatgagattctgtcagatttcgaaacgatgaagctagctgttatgcaggcttatgacccggagattaacaagttgaacaccatactccaggaacaacgaatggcctttaatattgccgaagcttttaaggacgtgtccgagccgattgtgttcttgcagcaaatgcaagagttccgcgaaaagattaaggtgattaaggaaaccccattgccccctagtaatctacccgcatccccactgatgaagaattttgatacatcgcagtgggaagacattaaattagtggatgtcgacaaactgagtctcccacaggacaccggcacttttatttctaagattccttggtctttctacaaactgttcttgctgatcctccttcttggcctagtgatagtatttgggccgaccatgttcctggaatggagtttgtttgatgacctagcgacttggaagggctgtctgagcaactttagtagctacctcactaagacagcggattttattgagcaatccgtattctactgggagcaggtgaccgacggtttcttcatcttcaatgaaaggtttaagaattttactttagtggtgctgaacaacgttgcagaatttgtgtgcaaatacaaactgctgtag

SEQ ID NO: 138775 - DNA, 1224 bp, synthetic construct
  misc_feature 1..1224: note = Description of Artificial Sequence: Synthetic coding sequence
  source 1..1224: mol_type = other DNA
atggagctcctggaggaggatctgacatgtcccatttgttgcagcctgtttgacgatcccagggtgctgccctgttcgcacaacttctgcaagaagtgtctggagggcatcctcgaaggttccgtgcggaattcactgtggcggccagccccctttaagtgccccacttgcaggaaggagacctccgccaccggcattaacagccttcaggttaactactcacttaaaggcatagtggagaaatacaataaaatcaaaatctcccccaagatgcccgtttgtaaagggcacctcggacaaccactcaatatcttctgtctgactgatatgcaattaatctgcgggatctgtgccacacgcggtgagcatactaaacacgttttttgctccatagaggacgcttacgcgcaggaaagggacgcatttgaaagcctcttccagagcttcgagacttggcgccgaggggatgcattgagccgacttgataccctagaaacttccaaacggaaaagcttgcaactcctcaccaaggattcagacaaggtgaaagagttctttgagaagctgcagcataccctcgaccagaagaagaacgagatcctttcagattttgagactatgaaattagctgtaatgcaggcttatgatcctgaaataaacaagctgaatacaatactgcaggaacagaggatggcttttaacatagctgaggctttcaaagatgtgtctgagcccatcgtcttcctccagcagatgcaggagtttcgtgagaagattaaggttattaaggaaactccgctaccaccatccaacctgccagcgtcccccttgatgaaaaactttgatacctcacagtgggaggatattaagctggtggacgtggacaagctgtctctgccacaggacaccggtacttttatatcaaagattccctggagtttctataaattgttcctcctcatactgctgctgggtctcgttatcgtgtttggacctacaatgtttctggagtggtcactgttcgacgatttggctacgtggaaaggctgtttaagcaatttctcctcttaccttactaagaccgcagactttattgagcagtcagtcttctattgggagcaggtgaccgatggatttttcatctttaatgagagatttaagaacttcaccctggtcgtcctaaacaacgttgccgaatttgtttgcaaatacaaactactgtag

SEQ ID NO: 138776 - DNA, 801 bp, synthetic construct
  misc_feature 1..801: note = Description of Artificial Sequence: Synthetic coding sequence
  source 1..801: mol_type = other DNA
atggaactgctggaggaggatctgacctgccctatttgttgtagcctgttcgacgaccctagagtgttgccgtgttcacataatttttgtaagaaatgtctggagggtattttggagggcagtgtgaggaacagcctctggcgaccagcaccctttaagtgccccacgtgtaggaaagaaacatcagccaccggcataaactccctccaggtcaattactccctgaaaggcatcgtcgagaaatataataaaatcaagatctcccccaaaatgcccgtgtgcaagggccacttagggcagccactgaacattttctgcctgaccgacatgcagctgatctgcggcatttgcgctactcgaggtgagcacaccaagcatgtgttctgtagtattgaggatgcctacgcccaggagcgcgatgccttcgagtctttattccaatccttcgagacttggcgaaggggtgacgccttatcccgcctggatactcttgagaccagcaagcgaaaatccctgcagcttctgacgaaagatagtgacaaggtcaaggaatttttcgagaaattgcagcacacgcttgaccaaaaaaagaatgagatcctcagcgactttgagaccatgaagcttgctgtgatgcaggcttatgatccagagattaataaattaaacaccatcctgcaggagcaacgcatggctttcaacatagccgaggctttcaaggatgtttcagaacctatagtgttcttacagcaaatgcaggaatttcgcgagaaaatcaaggtgatcaaggagacaccttag

SEQ ID NO: 138777 - DNA, 1224 bp, synthetic construct
  misc_feature 1..1224: note = Description of Artificial Sequence: Synthetic coding sequence
  source 1..1224: mol_type = other DNA
atggagctgctcgaagaggatctcacgtgccccatctgctgttctttgttcgacgatccaagagtgctgccttgtagtcacaacttttgtaaaaaatgccttgaagggatccttgagggtagcgtcagaaatagcttgtggaggcctgcccccttcaaatgtcctacatgccgcaaagagacctctgctaccggcattaattccctacaggtcaattattcccttaaaggcatagtggagaaatataacaaaattaagatctcaccaaaaatgccagtgtgtaaggggcacctaggacagcctttaaacatattctgtctgacagacatgcagttaatctgtggaatttgcgccacccgtggcgagcataccaagcacgtattctgttctatcgaagatgcatatgcccaggaaagagacgcattcgaatcactgtttcagtctttcgagacttggaggcgcggtgacgcacttagtcgccttgacactttggagacatctaagagaaaatctctgcagctccttaccaaggatagtgacaaagtcaaagaatttttcgagaagctccaacacactctcgaccaaaagaaaaacgagattttatcggatttcgagaccatgaagctcgccgtgatgcaggcttacgaccctgagatcaacaagttgaacacaatactgcaagagcagagaatggctttcaacattgctgaggcgttcaaagacgtgagcgaacctatcgtgttcttgcaacagatgcaggagtttcgcgaaaagatcaaggtaattaaggagacaccactgccaccctctaatctgcccgccagccccctgatgaaaaactttgacacatctcagtgggaggatatcaaactcgtagacgtggataagctgtccctacctcaggacactggcacttttatttctaagattccctggtctttttacaagctgtttttgcttatattgttgctggggcttgtgatcgtcttcggacctaccatgttcctcgagtggagcctctttgacgacctggccacatggaaaggctgtctatcaaacttttcttcgtatctcacaaaaaccgctgattttatcgagcagtccgtcttctattgggagcaggtcactgatgggttttttatttttaacgagaggtttaagaactttaccctggtagtgctcaacaacgtcgctgaatttgtttgcaaatacaagttgctgtag

SEQ ID NO: 138778 - DNA, 390 bp, synthetic construct
  misc_feature 1..390: note = Description of Artificial Sequence: Synthetic coding sequence
  source 1..390: mol_type = other DNA
atggaacttctagaagaagatttaacttgtccgatctgctgttccctgttcgatgatccaagggtactgccttgttcacataacttctgcaagaaatgcctcgaaggaatcttggagggaagcgtgcggaatagtctctggcggcccgcccctttcaagtgccccacctgtaggaaagagacctccgcaactggtattaactccttgcaagtaaactattcgctgaagggaattgtagagaaatacaataagataaaaatcagtcccaagatgccagtctgtaagggccacctgggccagccccttaacattttctgcctaacagacatgcagctgatttgcggcatctgtgccacacggggtgagcacacgaagcacgtcttctgctag

SEQ ID NO: 138779 - DNA, 1224 bp, synthetic construct
  misc_feature 1..1224: note = Description of Artificial Sequence: Synthetic coding sequence
  source 1..1224: mol_type = other DNA
atggagctattggaggaagaccttacttgccctatctgctgctcgttattcgacgatccacgggttctgccctgctctcacaatttttgcaagaaatgtcttgaaggaattctagagggatccgtgcggaacagcttgtggagacctgcaccatttaaatgccccacctgtcgcaaggagacatctgcaaccggaattaattctctgcaggtgaactactcacttaagggaatcgtggaaaagtacaataagatcaagatctcacctaagatgccggtatgcaaggggcacttaggccaacccctgaacatcttctgcctgacggacatgcagctgatctgtggcatctgcgctaccagaggagaacacactaagcatgtgttttgtagtatagaagacgcctacgcgcaagagcgggatgcctttgaatcgctttttcaatcattcgagacctggcgccggggcgatgcactaagccgcttagatacgttggagacctcaaagaggaaaagcctccagttactgaccaaggactcagacaaagtaaaggagttcttcgaaaagctccagcacaccctggaccagaaaaagaacgaaatcctctccgattttgaaaccatgaagctggctgtcatgcaagcctatgatcccgaaattaataagctgaacactatcctgcaggaacagagaatggccttcaatatagccgaagccttcaaagatgtgagcgagcctatcgttttcttacagcagatgcaggaatttagggagaaaattaaagtgattaaggaaactcctctgccaccgtctaacctgcctgcaagtcccctgatgaaaaattttgatacctcacagtgggaagacatcaagctggtggacgttgataagctgtccctgccccaggatactgggacattcatttcaaagattccgtggtcattttataagctgttcctgctcatccttcttctggggctagtcattgtctttggacccaccatgtttttggagtggtcattgtttgacgatcttgccacatggaagggctgcctttctaacttctctagctatctgacaaaaacggctgacttcattgagcagtctgtgttttattgggaacaggtaaccgatgggttctttatctttaacgaacggttcaagaacttcaccttggtcgtgctgaacaacgttgcagaatttgtctgtaaatataagctcctgtag

SEQ ID NO: 138780 - DNA, 669 bp, synthetic construct
  misc_feature 1..669: note = Description of Artificial Sequence: Synthetic coding sequence
  source 1..669: mol_type = other DNA
atgaacgacctctccaaccgggtgtggagtatttctcaggagccagatccggttcagcggctgcaggcctacactgcaacggaacaggaaatgcagcagcagatgagcctgggggaactgtgccacccagtcccgcttagcttcgagcctgtgaagtcattcttcaaggggctggtcgaggccgtggagtctaccctgcagacacctctggacatcagactgaaagaatcgatcaactgccaattatccgacccctcatctacaaagcccggcacgctcctcaaaacatcccccagcccggaacgttccctgcttctcaaaagctgctgggccgcttggggcccgtgtccctgttgtgggagcaccaggtccggtaagtgttggttagtcacggcgtcaccccctgccgctacaacggggaggcttacttgccgtcggagagctcctgccggcggctgggctcggccaaccccaccgttcggagctgccggtcctcgacctcctccagcttgggccgcaaccgctagtccgggtgccagcagcgccaccaccctctcaactggaccttctaccactgcatcggctgcagcatgtggcccggcaactactagcacaggcagcgcaagcagctggacaacacgccctgcatcctccccctccaccacatag

SEQ ID NO: 138781 - DNA, 1329 bp, synthetic construct
  misc_feature 1..1329: note = Description of Artificial Sequence: Synthetic coding sequence
  source 1..1329: mol_type = other DNA
atggcaggcgccgccactggctcaaggacccctggacggtcggaactagttgagggctgcggctggcggtgtccagagcatggggaccgggtggccgagctgttctgccggcgctgccggcgctgtgtctgcgccctttgtcctgtccttggggcacaccgcggccaccccgtaggtctagctctcgaggcagccgtgcatgtgcagaagctgtcacaggaatgcctcaagcagctcgcaattaaaaagcaacagcatatcgataacatcacgcagattgaggatgcgactgaaaagctgaaggccaacgcagaatcaagcaagacctggctcaaggggaagttcaccgagctacggttgctgctggatgaggaagaagccttggccaaaaagtttatcgataagaacactcaactgaccctgcaggtttatagagagcaggccgactcttgccgggagcagctggacatcatgaacgacctgtctaaccgtgtttggagtatctctcaagagccagacccagtgcagagactgcaggcttatacagctaccgagcaggaaatgcagcagcagatgagtttaggagaactttgccatcccgttcctctcagcttcgaacccgttaaatcttttttcaagggcctggtggaggctgttgaaagcacattgcagacgcccttggacatccggctgaaggagagtattaactgccagctgtctgatccttcctccactaaacctgggactctcctaaaaacatcccctagtcctgagaggtcactgctgctcaagtacgccagaactccaactctcgatccagataccatgcatgcccgattacggttatctgccgatcggcttaccgtaagatgcggcctattggggagcttagggccagtgcctgtgttgaggttcgacgctttgtggcaggtcttggcaagagattgttttgctaccggacggcactattgggaggtagatgtgcaggaggcgggggctggctggtgggtgggcgcggcatatgctagtctgaggcgtcgcggggcttctgccgccgcccgtctggggtgcaatagacaatcatggtgcttgaagagatacgacctcgaatactgggcattccacgacggtcaaagatcccgccttagaccccgggacgacctggaccgtctcggggtgtttcttgactacgaagccggcgtcctggccttctatgatgtcaccggaggtatgtcccatttgcatacttttcgcgctacattccaagagcccttatatcccgctctcaggctttgggaaggcgcaatttcgatccctcggctgccatag

SEQ ID NO: 138782 - DNA, 1329 bp, synthetic construct
  misc_feature 1..1329: note = Description of Artificial Sequence: Synthetic coding sequence
  source 1..1329: mol_type = other DNA
atggcaggggccgcaactggcagtcgtactcctggaaggagtgagttagtggaaggctgcgggtggcggtgccctgaacatggagatcgcgtcgctgaactcttctgtcgcagatgtagacgatgcgtctgcgccttatgccccgtgctcggcgcccaccgaggacacccggtgggactggccctcgaggccgccgtgcacgtgcagaaactctctcaggagtgcctgaaacaactagcaatcaaaaagcagcagcacatagataatattacgcagatcgaggatgccacggaaaaactgaaggccaatgctgaatcgtcaaaaacctggttgaagggcaagttcaccgaactgaggctgcttctggacgaggaggaagcactggccaagaaattcattgacaagaatacacagctgactttgcaggtgtatcgcgaacaagccgattcgtgccgagaacagcttgacatcatgaatgatctgtctaacagagtctggtccatctcgcaggaacctgatcccgttcagcggctccaggcttatactgccacggaacaggagatgcagcagcagatgtccctcggcgagctatgccatccagttcctctttccttcgaaccggtcaagtcgtttttcaaggggctggttgaggcagtagaatctaccctgcagacccccctagatatccggctgaaggagtccatcaactgccaactgtccgacccctcctccacaaagccaggaaccctgcttaaaacgtcccctagccccgaaagaagtcttctgttaaaatatgccaggacccctacattagaccctgacactatgcatgcccgtctgcggttgagcgccgatcgcttgacagtccggtgcggccttttgggctcactaggccccgtccctgtgctgaggtttgacgcgttgtggcaggtattggcaagagactgcttcgcaaccggacgtcactactgggaagtcgacgtgcaggaggcaggggctgggtggtgggttggagcggcctatgcgtccttaagacggaggggggcgtcagctgccgctagactggggtgcaacagacagtcatggtgcctcaaacgctacgaccttgaatattgggctttccacgacggccaacgcagcagactcaggccccgagacgacctggaccgactcggagtttttctggattacgaggctggagtccttgcattctatgatgtgactggaggaatgtctcaccttcacacttttcgcgctacatttcaggagccactgtatccggccttgcgcctttgggagggagctatttctatcccacggctgccatag

SEQ ID NO: 138783 - DNA, 1221 bp, synthetic construct
  misc_feature 1..1221: note = Description of Artificial Sequence: Synthetic coding sequence
  source 1..1221: mol_type = other DNA
atggcgggcgctgccacaggatcaagaactcccggtcggtccgagctagtggaaggctgcggctggcgttgtcccgaacacggagatcgtgtcgctgagcttttctgtagacgctgcaggaggtgcgtgtgcgctctgtgtcctgtgctgggtgcccatagaggtcatcctgtcggtctggcccttgaggcagccgtgcacgtgcagaagttgagccaggaatgtctaaaacagctggccatcaagaagcagcaacacattgacaatattactcagatcgaggatgccaccgaaaaactgaaagccaatgccgaatcctcaaagacctggctgaagggtaagtttacagagctacgacttctgctggacgaagaggaggctctcgctaagaaattcatcgacaaaaatacccagctaacactccaagtatatcgggaacaagcagatagttgccgggagcagctcgatatcatgaacgacctcagcaaccgggtgtggtctatctcacaggagccagatcctgtgcaacgtctccaggcctacacagcaactgagcaggagatgcagcagcagatgtccctgggggagctgtgtcacccggtccctcttagcttcgagcccgtaaagagcttttttaagggtctggtggaggccgtcgagagcaccctccaaactcccctggatatccgcctcaaagaatctattaattgtcaactcagtgacccatcatccacgaagcccggtacgttgctgaagaccagtccttcacctgagaggtctctgcttctaaagtacgcacgtaccccaacactcgatccagacaccatgcacgctcgtctgcgcctgtctgcagataggctgaccgtccgatgtggcctgctgggatccctaggccctgtccccgtactgcgctttgatgcgctgtggcaggtcctggctagagattgtttcgcgaccggcaggcattattgggaggtcgatgtgcaggaggccggcgccggatggtgggttggagctgcttatgcaagcctcaggagaaggggggcctctgccgctgcaagacttgggtgcaatcggcagtcttggtgcctcaagcgctatgacctggaatattgggcttttcatgatggtcagcggtctgcctgtggccctgccaccaccagcaccggttccgcctcaagctggacgaccagaccggcctctagcccctctacaacctag

SEQ ID NO: 138784 - DNA, 762 bp, synthetic construct
  misc_feature 1..762: note = Description of Artificial Sequence: Synthetic coding sequence
  source 1..762: mol_type = other DNA
atggcaggggcggctaccggtagtcggactcctggtcgctctgagttagtggaggggtgcgggtggcgctgccccgagcatggcgatagggtggcagaactgttctgcagacgctgcagacgatgcgtttgcgctctgtgccccgtcttaggggcgcaccgagggcatcccgtaggcctggctttagaagccgccgtccacgtgcagaagctgtcacaggagtgccttaagcagctggcgatcaaaaaacagcaacatatcgataacattacccagattgaagacgctaccgaaaaactgaaggctaacgccgagtcctcaaagacttggctgaagggcaaattcacagagcttcgcttactgctggatgaggaagaggccttagcaaaaaaatttatcgataagaatactcagctaaccctccaggtgtatagagaacaggccgatagttgccgggagcagcttgacattatgaacgacctgtctaatcgggtgtggtcgatttctcaggagcctgatccggtgcagcggctccaggcatatacagccaccgaacaggaaatgcaacagcagatgagtctcggtgagttatgtcaccccgtacccctgtcattcgagcccgtgaagtcattttttaaggggttggtggaagcggtcgaatccacccttcagacaccgttggacatccgattgtccccgacaaaccacgcctatagtgccctgaaagtgtcttcccctaggctggtttctaataggccttag

SEQ ID NO: 138785 - DNA, 1329 bp, synthetic construct
  misc_feature 1..1329: note = Description of Artificial Sequence: Synthetic coding sequence
  source 1..1329: mol_type = other DNA
atggccggagcggctaccggcagcagaactccaggtcggtccgagctggtcgaaggctgtggatggaggtgtcccgaacacggcgaccgggtggccgagctgttctgtagacgttgtaggcgatgtgtctgtgcactgtgccctgtgctgggcgctcaccgggggcacccagtggggcttgcccttgaggcggccgtgcacgtgcagaagctgtcccaggaatgcctgaagcagctggcgatcaagaaacagcagcatatcgacaatatcactcagatcgaggacgctaccgaaaaacttaaggctaacgctgaatctagtaaaacgtggctgaaaggcaagttcactgagctgagacttttgttggacgaagaagaggctctagcaaagaagtttatagataagaatacacagctgacattgcaggtgtatcgcgagcaggcagactcctgccgcgagcagctcgacataatgaatgacctcagtaatcgagtgtggtcgatctctcaggaaccagatccagtgcagcggctccaggcctacacagctactgagcaggagatgcaacagcaaatgagcctgggtgaactctgccatcccgtgccactgagttttgagcctgttaaatccttctttaaaggtctggtcgaggccgtagaaagcaccctccagacacctctcgatattaggctgaaagaaagcataaattgccagctgagcgatcccagctcaacaaagcctggaaccctactgaagacttccccctccccagaacgcagcctgctactcaagtacgcacgtacccctacacttgatcccgataccatgcacgcaagactgaggctgagtgccgaccgcctcacggtgcgctgtggccttttaggttctttggggcctgtccctgtactccgcttcgatgccctgtggcaggtgctggccagggactgttttgccacgggacgccactactgggaggtggacgtccaggaggcgggtgctggatggtgggttggtgcggcttacgcttcactcagaagacgtggcgcgtctgccgcagccaggctggggtgcaaccggcagtcatggtgtctgaaacgatatgatctcgagtattgggccttccacgacggtcagcgcagtagactccggccgcgcgatgatcttgaccgccttggagtgttcttagattacgaggcgggggtgctggccttttatgatgtgacaggcggaatgagccacctgcacacctttcgagccaccttccaggaaccactgtacccagctttacgactttgggaaggtgccatcagtatccctaggctgccctag

SEQ ID NO: 138786 - DNA, 672 bp, synthetic construct
  misc_feature 1..672: note = Description of Artificial Sequence: Synthetic coding sequence
  source 1..672: mol_type = other DNA
atgagcgcaggcagcgacgggggggggcgacacttttgcggaggtatcaactgccagctcagtgacccttccagcaccaaacctggcaccctgttgaaaacctctccgtccccagagaggagcttgctgcttaaatatgcccggacacctaccctggatcctgatacgatgcacgcacgcttgcgcctcagtgctgacagactgacagtgagatgtggacttcttggctcacttggacctgttcccgtacttagatttgatgccttatggcaggtcctggctcgagactgttttgccaccggtagacactattgggaggtggacgtgcaggaggccggggccggttggtgggtaggtgccgcgtatgctagtttacgccgtcgcggagcctcagctgccgcaagactcggctgtaatagacagtcttggtgtctcaagcgctatgaccttgagtactgggcatttcacgatggccagaggagcagactgaggccacgggatgatctggatcgcctgggcgtttttttggattacgaggcaggcgtgctggcgttttacgacgtgactggtggtatgagtcatttacacacctttcgagctacatttcaggaaccattatatcccgcactgcggctgtgggagggcgccatctctattccccggctcccttag

SEQ ID NO: 138787 - DNA, 2316 bp, synthetic construct
  misc_feature 1..2316: note = Description of Artificial Sequence: Synthetic coding sequence
  source 1..2316: mol_type = other DNA
atgcaccgctccggccgctacggtacgcagcagcaaagagccgggagcaagacagccgggcctccttgccagtggtcgcgtatggcaagcgaaggaaccaacatccctagccctgtcgtcaggcagatcgataaacaatttttaatctgtagcatttgtttagagcggtataagaaccccaaagtcctaccgtgcctgcacactttttgcgagcggtgcttgcagaattatatccccgctcattcactgacactcagctgccctgtctgccggcagacctctatattgccggagaaaggggttgccgcccttcaaaataacttcttcatcaccaacctgatggacgtgttgcagagaactccagggtccaacgctgaagagtcctccattctcgagacggtgacagcagtggccgccggaaaaccgctcagctgccctaaccatgacggaaatgtgatggaattctactgtcagtcatgcgagaccgctatgtgtcgggagtgcaccgagggtgaacacgcggaacatcctacagtcccgctgaaagacgtggtcgagcagcacaaagcctccctgcaagttcagctcgatgctgtgaataagcgtttgccggaaattgacagtgctctgcagttcatttccgagatcattcaccagctcactaaccagaaagcttcgatagtggatgatatacattctactttcgatgaactccagaaaactcttaatgttaggaagtcagtcctgctcatggaactggaggtaaactatggtctgaagcacaaagttctccaatcacaattggacactttactacaaggccaggaatctattaagagttgcagtaatttcacagcacaagcacttaaccacggcactgagacagaggttttgctcgtgaaaaaacagatgtccgagaaactcaacgaactggccgaccaggattttcctctccatccgagggagaatgaccagttggatttcatcgtcgagactgagggtttgaagaagagtatccacaacctgggcaccatactcactaccaacgctgtagcgtccgaaactgttgctacgggcgaaggcctccgacagaccatcataggccagccgatgtcagtaacaattacaacgaaggataaggacggagagctgtgtaagaccggcaacgcctaccttacagcagaacttagcacccctgacggctccgtggcagatggggaaattcttgataataagaacggcacgtatgagttcctctacaccgtccagaaagagggtgacttcacactgtctctgaggctctacgaccagcacatacgggggtcccccttcaagctaaaagtgattcgaagcgcggatgtgagcccaacaactgaaggagtaaaacggcgcgtgaagagccccggcagcgggcatgttaagcagaaggcagtgaagcgcccagcaagcatgtactctaccggcaaacgtaaggaaaatcccattgaagacgacctcatctttcgcgtggggacaaagggaagaaataaaggcgagtttactaacctccagggcgttgctgctagtaccaacggcaagatcctgattgcggactcaaataaccagtgcgtgcaaatctttagcaatgatggacaattcaagagccgcttcggaattcgcggccggagccccggccaattgcaaagacctaccggagtggcagtacatccttctggcgacatcattattgcagattacgacaataagtgggttagtatcttctcatctgatggtaagtttaaaaccaaaatcggctccgggaaactaatgggccccaaaggcgtgagcgtggaccggaatggccatatcattgtggtggataataaagcttgctgtgttttcatattccagccaaatggtaaaatagtgacccgattcggcagccggggcaatggtgacaggcaattcgccggcccacacttcgccgccgtgaactcaaataatgaaattatcattactgatttccataatcattccgtgaaggtattcaaccaggaaggggagttcatgcttaaatttggttctaacggcgagggcaatgggcagttcaatgccccgaccggggttgccgtggattccaacggcaacatcatagtggccgattgggggaactcccggatccaggtctttgacggatctggctccttccttagctatatcaatacctcagctgatcccctgtatggcccccagggattggctctgacctctgatggtcatgtagtggttgctgatagcggcaaccactgcttcaaggtatatagatacctacagtag

SEQ ID NO: 138788 - DNA, 2235 bp, synthetic construct
  misc_feature 1..2235: note = Description of Artificial Sequence: Synthetic coding sequence
  source 1..2235: mol_type = other DNA
atggcgagcgaggggaccaacatcccaagcccagtggtcagacaaatcgacaaacagttcctgatatgctcaatctgtttagagcgatataagaaccctaaggtgttgccttgcctgcacacattttgtgagagatgcctgcagaactatattccagcacacagtctgacactgtcatgccctgtctgccgccagaccagtattctgccagagaaaggcgttgcagcactgcagaacaatttcttcatcacaaatctaatggacgtcctacagaggacacccggatctaatgccgaggagtccagcatcctggaaacagtgactgccgtcgcagccggaaagccacttagctgtcctaaccatgacggcaacgtgatggaattttattgccagtcttgcgaaaccgcaatgtgccgggagtgtaccgagggcgaacatgcagagcatcctactgtgcccctgaaggatgtggtggaacagcataaagcttccctccaggtacaacttgacgctgtcaataaaaggctccctgagatcgacagcgctctccagtttatcagcgagataatacaccagcttactaatcagaaggcttctatagtggacgatatccacagtactttcgacgagcttcaaaagacacttaatgtgcggaaatctgtgcttctgatggagcttgaagtgaactacggactgaagcataaagtgctccagtcacagctggacaccttgctccagggacaggagagcattaagagttgtagcaatttcactgcacaggccctaaatcatggcacagagacggaggtcctactcgtgaagaaacagatgagtgagaaattgaatgagctcgccgaccaggatttcccacttcacccgagagaaaatgatcaactggacttcatcgtcgagacagagggcctcaagaaatcgattcacaatttgggaacaatcttgaccaccaatgccgttgccagtgaaacagtggcgactggggagggactgaggcagaccatcatcgggcaacctatgtccgtcacaatcaccaccaaagataaggatggggagttgtgtaagaccggaaatgcctatttgacagccgagttgtcaactccagacgggtctgttgctgacggagaaatcttggataacaagaacggaacatatgaattcctgtacaccgtacagaaagagggagattttacactgagcctgcgattgtatgatcaacacattcgcggatctccatttaagcttaaagttatacgctcagccgacgtttctcctactaccgagggcgttaaaaggcgggtgaagtcccctggcagtggccacgtgaaacagaaggccgtaaagaggccagcgtctatgtactccactggcaagcggaaagagaaccccatcgaggacgatctgatttttagggtgggaacgaaaggaagaaacaaaggggaatttacgaacctgcagggagtggcagccagcacaaatggtaaaattctgatcgcagattctaacaatcagtgtgttcagattttctctaatgatggccaattcaagtcacggttcgggatacgtgggcgatcgcctggccagctgcaaaggccaaccggcgtggcagtacacccctctggtgatattattatcgcagactacgataataagtgggttagtatcttcagtagtgacgggaagtttaagaccaaaattggctcaggaaagctgatggggccaaagggggtttcagtggatcggaatgggcacatcattgtcgtggacaacaaagcttgctgtgtattcatcttccaacccaatgggaagatcgtgacgagatttgggtctcgtggcaatggggacagacagttcgccgggccccactttgccgccgtgaacagcaacaatgagattatcattacggacttccacaatcacagcgtcaaagttttcaatcaggagggtgagttcatgttgaagtttggttctaatggagaaggtaatggacaatttaacgcacctacaggggtcgctgtcgattcaaacggcaacatcatcgtcgccgactggggcaattctcggatccaagtcttcgacggttccggaagtttcctgtcatacatcaatacttctgcggacccgctgtacggacctcaggggctggccttaacctctgatggccacgttgtcgtggccgatagcggtaaccactgtttcaaggtctacagatatttgcaatag

SEQ ID NO: 138789 - DNA, 1428 bp, synthetic construct
  misc_feature 1..1428: note = Description of Artificial Sequence: Synthetic coding sequence
  source 1..1428: mol_type = other DNA
atggccagcgcagcgagactcactatgatgtgggaggaagtgacatgtcctatttgcctggatccttttgtggagccggtgtcgatagagtgtgggcacagtttttgccaagaatgcatcagccaggtgggtaagggaggcggcagcgtctgtcccgtctgtcgacaaagattcctcctgaagaacttgaggcctaaccgccaacttgctaatatggtaaacaacttaaaggagataagtcaggaggcaagagaaggcactcagggggaaaggtgtgctgtgcatggcgaaaggttgcatcttttttgtgaaaaggacggcaaggctctgtgttgggtgtgcgctcaaagtagaaaacaccgggaccatgctatggtaccactcgaggaggctgctcaggaataccaagagaagctgcaggtggccctgggagaactgaggaggaaacaagaactggcagagaaactcgaagtggaaattgccatcaaaagggcagattggaaaaaaacagttgaaacacagaagtctcgcattcatgctgagttcgtgcaacaaaagaacttcctagtggaggaggagcagcgccagctgcaggagttagaaaaggatgagagagagcagctgagaatcttgggagagaaggaggccaaactcgctcagcagtcccaggctctgcaggaactgatctccgagttggacaggaggtgccattcatctgctttggaactcttacaagaggttataatagtgctggagcgtagcgagtcatggaacctgaaggacctggatattacctccccagagctgaggtcagtgtgtcatgtcccgggactcaagaaaatgttgcgcacatgcgccgttcatattaccttggacccagatacagctaacccttggctgatactctctgaagatagacgacaggttcgcttaggggacactcagcagtcaattccgggcaatgaagagagatttgacagctaccccatggtgttgggagcgcagcatttccacagcggcaaacactactgggaggtggacgttaccgggaaggaggcatgggatctcggcgtgtgcagggattccgttagacgaaaaggccacttcctcctttcttcaaaaagcggcttttggaccatctggctctggaataagcaaaaatatgaggctggaacctatccccagacaccgctacatctgcaggttcctccatgtcaggtcggcattttccttgactacgaggctggcatggtgagcttttataacatcaccgatcacggtagcctgatctactcattttctgagtgcgccttcacgggccctctgcggccgttcttttccccaggctttaatgatggcggaaaaaacaccgctcctttgaccctgtgcccccttaatattgggagccagggctccacagattactag

SEQ ID NO: 138790 - DNA, 1428 bp, synthetic construct
  misc_feature 1..1428: note = Description of Artificial Sequence: Synthetic coding sequence
  source 1..1428: mol_type = other DNA
atggcttctgccgctaggctgactatgatgtgggaagaagtgacgtgcccaatctgtttagacccgttcgtagagcctgtgtccatcgagtgtggacactccttctgtcaggagtgcatttcgcaggttggcaaaggtggtggttccgtgtgcccagtttgccggcagcggtttcttttaaaaaacctgaggccaaacaggcagctggcaaacatggtgaacaatctgaaggaaatctcccaggaagctagagaaggtacccagggtgaacgctgcgctgtgcacggagaaaggctgcacttgttctgcgaaaaagacggtaaggccttgtgttgggtttgcgctcagtcccgcaaacaccgcgaccatgcaatggtccctctggaggaggctgcccaagagtatcaggagaaactgcaggtagccctgggagagcttagaagaaagcaagaactcgccgaaaagctggaggtggaaatagccataaaacgggccgattggaaaaagaccgtagagacacaaaaatctcggatacacgccgagtttgtccagcaaaagaatttcctggttgaagaggagcaacggcaacttcaggaactcgaaaaggacgagagagaacagctgaggatcctcggcgagaaggaggcaaagctcgctcagcagagtcaggctctccaggaattgatatccgaacttgaccgacggtgtcactcttcagcccttgaactcctacaggaggtgatcgtgttgggccctcggtcagagtcttggaatctgaaggatctagacataacgtctcctgagttacggagcgtctgtcatgtgcccggattgaaaaaaatgttgcgaacatgtgctgtccatattacattggaccctgataccgccaatccctggcttattctctctgaagaccggcgccaagtgcgtctgggggacacccagcagagcattccaggcaatgaggagcgctttgactcatatccaatggtgctgggggcacagcactttcactctggcaagcattattgggaagtagatgtcactgggaaagaggcttgggatctgggagtgtgtcgagattctgtgcggcggaagggccatttcctgctttcctctaaatccggtttttggaccatttggctgtggaataagcaaaagtacgaagctgggacatatccacagactccactgcacctgcaagtccccccctgtcaggtgggtattttccttgactatgaggcaggcatggtgtccttttacaacattactgatcacggcagtctgatctatagtttctcggagtgcgcatttaccggcccactgcgcccgtttttctctccaggctttaacgacggaggcaagaatacagcccctttgacactgtgtcccctgaacataggcagtcagggaagtactgactactag

SEQ ID NO: 138791 - DNA, 1497 bp, synthetic construct
  misc_feature 1..1497: note = Description of Artificial Sequence: Synthetic coding sequence
  source 1..1497: mol_type = other DNA
atggacttttcagtgaaggttgatatcgagaaagaagtgacttgccctatttgcctggaactactgacggagcctcttagtctggactgcggacactctttttgtcaggcctgtatcactgcaaaaattaaagaaagtgtgattatctcacgaggcgaatcatcttgtcccgtttgtcagactaggttccagccagggaacctgaggccaaaccgacatctcgcaaacatcgtagaacgcgtcaaggaagtgaagatgtctccacaggaaggtcagaagcgagacgtttgtgagcaccatgggaaaaaactgcagattttttgtaaggaagacgggaaggtgatttgttgggtctgtgagcttagccaagagcaccagggccaccagacattccggattaacgaggtggtaaaggagtgtcaggaaaaactccaggttgcactccagcgactgattaaggaggaccaggaggcagaaaaactggaagatgacatcaggcaggagcgtaccgcttggaagaactacattcagatcgagaggcagaagattctgaagggtttcaacgaaatgcgggtaatcctggacaatgaagaacagagggagcttcaaaagctggaagaaggggaggtcaacgtcttggataacctggccgccgcgaccgatcaactggtgcagcaaagacaggatgccagcaccctaatcagtgacctgcagaggaggcttagaggcagctccgttgagatgctacaggatgtgatagacgtgatgaagcggtcagagagttggacgctgaagaagcctaaatcagttagcaagaagctgaagagcgtctttcgagttccggatttatctggaatgttgcaggtacttaaagaactgacagatgtgcagtactattgggttgatgtaatgctgaatcccggttccgccaccagtaatgtggctatttctgttgaccagagacaagtgaaaaccgtcaggacttgtaccttcaaaaactcaaatccatgcgacttctctgcttttggtgtattcggatgccagtatttcagcagcggcaagtattactgggaggtggacgtgtccggtaaaattgcttggattttgggagtccactcaaagatcagcagcctcaataagcgaaagagtagcgggtttgcatttgacccctccgtcaattatagtaaagtttattcaaggtacaggccacagtacggctattgggttattggattgcagaacacctgcgagtacaatgcctttgaagattcctcctcatctgaccccaaggtgctgactctctttatggctgtgccgccctgccgtatcggagtgtttttggactacgaggcaggcatagtctcatttttcaacgtgactaatcatggagcattgatttataagttcagcggttgtcggtttagccgaccagcttacccctactttaacccttggaactgcctggtccccatgaccgtgtgccctccgagttcatag

SEQ ID NO: 138792 - DNA, 684 bp, synthetic construct
  misc_feature 1..684: note = Description of Artificial Sequence: Synthetic coding sequence
  source 1..684: mol_type = other DNA
atggacttttctgtgaaagtagacatcgagaaggaggtcacttgcccaatatgtctggagttgctcacggagcccctttcgctggactgtggtcatagcttctgtcaggcttgtatcactgcgaaaataaaggaaagcgtgatcatttcacggggcgaaagctcatgtcccgtgtgccagactcgcttccagccaggcaatctgcggccgaatcgccatttagctaatatagtagagcgtgtgaaagaagtgaaaatgagcccccaagaaggacagaagagggacgtgtgcgaacatcacggtaagaagctgcagattttctgcaaagaggatggaaaagttatttgttgggtgtgcgagttaagccaggaacatcaagggcaccagacattccgcattaatgaggtggttaaggagtgccaggagaagttacaggttgccctgcaaagactgatcaaggaagatcaggaagccgaaaagctggaggacgatatcagacaggaaagaactgcgtggaaaaattacatccagattgagcggcagaaaatcctcaaggggttcaacgaaatgagagttatcctggataatgaggaacagcgggagctacagaagctggaggaaggggaggtcaacgtgcttgacaatctcgctgcggccaccgaccagctggtgcagcaacggtag

SEQ ID NO: 138793 - DNA, 612 bp, synthetic construct
  misc_feature 1..612: note = Description of Artificial Sequence: Synthetic coding sequence
  source 1..612: mol_type = other DNA
atggactttagcgttaaggttgacatcgaaaaagaggtgacctgtccgatatgtctggagctgctcaccgaaccactgtctctggactgcggtcactcattttgccaagcttgtatcacagctaagataaaagaatctgtcatcataagccggggagagagttcatgtccagtatgccagacccggtttcaacctggaaatctgcgacccaataggcacctagcgaatatcgttgagcgggtgaaagaagtgaaaatgtcaccccaggaaggtcagaagcgggatgtttgcgaacatcacgggaagaagttgcagatattctgcaaggaggacggaaaggtcatatgttgggtatgtgagctctcccaagaacatcaggggcatcagacttttaggataaatgaagtagtgaaggagtgccaggagaagctccaggtagcactgcagcgacttatcaaggaggaccaggaagcagagaaattagaagatgacatacgccaggagagaacagcctggaagaattatattcaaatagaaaggcagaagattctgaaggggtttaatgaaatgcgcgtgatcttggataacgaggagcaacgggagctccagtag

SEQ ID NO: 138794 - DNA, 1263 bp, synthetic construct
  misc_feature 1..1263: note = Description of Artificial Sequence: Synthetic coding sequence
  source 1..1263: mol_type = other DNA
atggatttcagcgtcaaagtggacatcgagaaggaggtgacctgccccatatgccttgagctgttaactgaaccacttagcctagattgtggacattcgttctgtcaggcttgtatcacagccaaaattaaagagtctgtgattatctccagaggtgaaagctcatgcccagtatgccagaccagatttcagcccggtaatctgcgacctaaccgacaccttgccaacatcgtggagcgggtcaaagaagtgaagatgtctccccaggaaggccaaaagagggacgtctgtgaacaccatggcaaaaagctgcaaatcttctgcaaagaggacggaaaagtgatcctcgacaatgaggaacaaagggagctgcaaaaattggaggaaggcgaagtgaacgtgctggataatctggccgccgccactgatcaattggtacagcaacggcaggatgccagcacgctgatcagtgacctccaaaggaggctgcgcggcagctcggtggaaatgctgcaggatgtgatcgatgttatgaagcgctctgagtcctggacactcaaaaaaccaaagtcagtgagcaaaaaacttaaatccgtgtttagggtccccgatttgagtggaatgctgcaggtactgaaagaacttactgatgtccagtattactgggtcgacgtaatgctcaacccaggttccgctactagcaacgtcgccattagcgtggaccaacgccaagtgaaaacagtgcggacttgcacattcaaaaactctaacccttgcgacttctccgctttcggcgtctttggatgccagtatttttcctcaggtaaatactactgggaagtcgatgttagtggcaagatcgcatggatcctcggcgtgcattctaaaatctccagcctaaacaagcggaagagttcaggatttgccttcgacccatctgtgaattactccaaagtctactctagatatcggccacagtacggttattgggtgatcggtcttcaaaacacatgtgaatataatgcctttgaagactcatcgtccagcgaccctaaggtgcttaccctgtttatggctgtacccccctgcaggattggggtcttcctggactacgaagccggaatcgtgtccttttttaatgtcaccaatcatggcgctctgatctataaattctcaggctgtcggttctctcggcccgcatatccttactttaacccatggaattgcctggttccaatgaccgtttgtcctcctagttcctag

SEQ ID NO: 138795 - DNA, 930 bp, synthetic construct
  misc_feature 1..930: note = Description of Artificial Sequence: Synthetic coding sequence
  source 1..930: mol_type = other DNA
atgcgcgttatcctcgacaatgaagagcagcgcgagctacagaaactggaggagggggaagtgaatgtgttagacaatctagctgctgctacggaccagctcgtccagcagagacaggatgcttcaacgcttatctccgatctccaacgtcgactgaggggaagctccgtcgaaatgctgcaggacgttatagatgttatgaagcggtctgagtcttggactcttaagaaacccaaatccgtgtcgaaaaaacttaagtctgtctttagggtgccagatctgtccggaatgttgcaagttctcaaagagctgacggatgtgcagtactactgggtggacgtgatgcttaaccctggtagcgccacttctaatgtggccatttctgtcgatcagcgccaggtgaagacggtgcggacatgtacattcaagaattccaacccgtgcgacttttccgcttttggagtgtttggctgccaatatttctcatctggcaagtactattgggaggtcgatgtgtctggaaagatcgcctggattctgggggtacatagcaagatttcctcgctgaataagaggaaatcaagcggctttgcgttcgaccctagtgtaaattacagtaaggtttattctcggtaccggcctcagtatggatattgggtcatcgggctgcagaacacatgcgaatacaacgcattcgaagactcgtcctcttctgaccctaaggtgctcactctttttatggctgtacccccatgcaggatcggcgtgttcctggattatgaagccgggattgtgtcattctttaatgttaccaaccatggcgctctgatctataagttttccgggtgccgattctcacgacccgcctacccctatttcaacccctggaattgcctggtgcctatgacggtttgccccccctcaagctag

SEQ ID NO: 138796 - DNA, 1893 bp, synthetic construct
  misc_feature 1..1893: note = Description of Artificial Sequence: Synthetic coding sequence
  source 1..1893: mol_type = other DNA
atggcagaactatgtcccctcgcagaggagctctcatgctccatatgtctggagcctttcaaggagccagtaactacaccatgcggacataatttttgcggttcctgtctcaatgaaacgtgggcagttcaaggctccccttatctgtgcccacagtgccgggctgtgtaccaggctcgccctcagttgcataagaatacagtcctgtgcaatgtagtggaacagtttctgcaggcagatcttgcgcgcgagccgccggcagatgtctggacccctcccgcaagagcctctgccccatctcccaatgcgcaggtggcatgtgaccattgtctgaaggaggcagcagttaaaacatgcctggtatgcatggcttcattctgccaggagcacctacagccacacttcgactccccagccttccaggatcaccccctgcaaccccccgtgagagacttgctgaggcggaaatgtagccagcacaaccggttgagagagttcttctgccctgaacatagtgaatgtatttgccacatttgcctggttgagcataagacttgctcacccgccagtctgtctcaggccagtgccgatctagaggccacgctgcgccacaagttgacagtcatgtactcgcaaattaacggagcctctagagccctggacgacgtgcggaatagacagcaggacgtccgcatgaccgccaataggaaagttgagcagctccagcaggagtacactgaaatgaaagctctgctggatgcctccgagaccacgtctacaagaaagatcaaggaggaggagaagcgggtgaatagtaagttcgatactatctaccagatcctccttaagaaaaagtcagagatccagacattgaaggaggagattgagcagtcccttaccaagagggacgaattcgagtttctcgagaaggcctccaagctcaggggtatttccaccaaacccgtatacattcctgaggtggagctgaatcataaattaatcaaaggcatccatcagtctaccatcgatctaaaaaatgaactcaagcaatgtatcggccgcctccaagaacccacgccgagctctggcgatccaggtgaacacgaccctgctagtacacacaagagtaccagacccgtcaaaaaggtgtcgaaggaagagaagaagtcaaagaagcctccccccgtccctgccttgccctctaagctccccacatttggggcacctgagcagttggtagacctgaaacaagccgggctagaggcggctgccaaggccacgtcctcacatccaaattccacaagcctaaaagctaaagttctagaaacatttttagccaagtcaaggccggagctgctcgaatattacatcaaggtcattctagattacaatacagcccacaacaaggtagctcttagcgagtgctataccgtcgcttccgttgctgaaatgccccagaattataggcctcaccctcagaggttcacatactgttctcaggtcctgggcctgcactgttacaaaaaagggatacattactgggaggttgaactccagaaaaataacttctgtggcgtggggatctgctacggatctatgaacagacagggtccagagtcaaggctcgggcggaacagcgctagttggtgtgtggaatggtttaatacgaaaatttccgcctggcataacaacgtggaaaagacattaccgtctactaaagccacgcgcgttggtgtgctgttgaattgcgaccacggattcgtgattttttttgctgtggctgacaaagtgcatctgatgtacaaattcagggtggacttcacggaagctttgtatcccgctttctgggtgttcagcgccggagcaacgttgagcatctgctcccccaagtag

SEQ ID NO: 138797 - DNA, 1893 bp, synthetic construct
  misc_feature 1..1893: note = Description of Artificial Sequence: Synthetic coding sequence
  source 1..1893: mol_type = other DNA
atggctgagctttgtccgctcgcagaggagctatcatgctccatctgcctggagcccttcaaggaaccagtaacgacgccctgtggtcataacttttgcggttcctgcttgaacgagacttgggccgtgcagggttccccttacttgtgtccccaatgccgggccgtttaccaagcccggcctcaattgcacaagaacaccgtgctgtgcaatgtagtggaacaatttctccaggccgatctggcacgcgagccaccagcagacgtgtggacccctccagcccgagccagtgcgccttcccctaacgcacaggtcgcttgcgaccactgtctcaaggaggccgcagtgaagacatgtctggtgtgtatggcctctttctgtcaagaacatctgcaacctcatttcgattcccctgcatttcaggatcacccgctgcagccccccgtgagagatttgcttcggaggaaatgttctcaacacaaccgtcttcgggaattcttttgccccgagcactcagaatgcatttgccacatctgtctggtggaacacaaaacctgttcccccgcttcgctcagccaggcgagcgccgatctggaggcgacactgaggcataaactgaccgtaatgtactctcaaattaatggtgcctctcgtgccctagacgacgtacgtaaccggcagcaggacgtgcgaatgactgccaacaggaaagtcgagcagcttcagcaagagtacaccgaaatgaaagccttactagatgccagtgaaaccacctctaccagaaagatcaaggaggaggaaaaaagggtgaactcaaagttcgacactatatatcagatcctgctgaagaagaagagtgagatccaaactctaaaggaggagattgaacagtccctgactaagcgggacgagttcgaatttctagagaaggcatctaaactgagagggatcagcacaaagccagtgtatattcccgaggtggaacttaatcacaagctgataaagggcatccaccagtccactatcgacttaaagaacgagctgaaacagtgcattggtcgcctacaggaaccgactccgagttctggcgaccccggggagcacgaccccgctagtacacataagtcgacccgacccgtcaaaaaggtgtctaaagaagaaaaaaagagcaaaaagccccctccagtgcccgccttgccttctaagttacccaccttcggggcgccagagcagctcgtggatctgaagcaggccggcttagaggccgctgctaaggcaacttctagccaccccaactctacctcccttaaggccaaagtgctggagacctttctcgctaagagtcgtcccgagctcctggaatattatataaaagtcatccttgattacaataccgctcataataaagtagcgctaagtgaatgttataccgtggctagcgttgctgaaatgcctcagaattatcgcccccacccccagcggtttacgtactgttcgcaggtgctgggcctgcattgctacaaaaagggcattcattattgggaagtagagctccaaaagaataatttttgtggggttgggatctgctatggaagtatgaacaggcaggggccagaaagcagactggggaggaacagcgcatcctggtgcgtggagtggttcaatacaaaaatcagcgcatggcacaataatgtggaaaaaacactgccaagcactaaggccactcgtgtgggagtgctgctgaattgcgaccatggcttcgtaatcttttttgctgtcgcggataaagtccacctcatgtataagtttcgtgttgactttacagaggcactgtaccccgcattctgggtattttctgccggggcaactttaagcatatgttctccaaaatag

SEQ ID NO: 138798 - DNA, 1077 bp, synthetic construct
  misc_feature 1..1077: note = Description of Artificial Sequence: Synthetic coding sequence
  source 1..1077: mol_type = other DNA
atggcatcaggcagcgtggccgagtgtctacagcaggaaacgacatgtcctgtgtgcctgcagtacttcgcagagccaatgatgctggactgcggccataatatttgttgtgcatgtctggcccgatgttggggaaccgcagaaaccaatgtctcttgccctcagtgtcgtgagacattcccacaacgacatatgcgacctaaccggcatctggcgaacgtaacccagctggtcaaacagctccgtacagaacgcccatcaggcccaggcggggagatgggagtgtgtgagaaacatcgagagcccttgaaactttattgtgaagaggaccagatgccaatttgcgtcgtctgcgatagaagtcgggagcacagagggcattctgtgctacctctagaagaagccgtcgagggattcaaggagcagatccagaaccaactggaccaccttaagcgggtgaaggaccttaagaaacgccgaagggcgcagggagaacaagcccgggccgagttattgtctctgactcagatggaaagggagaagatcgtatgggagtttgagcagctgtaccacagccttaaagagcatgagtacagactgttggctcggttggaagaactggacttggccatctataacagcatcaacggcgccattacccagtttagctgtaacattagccacctgagcagtctgattgcgcagctggaggagaagcagcagcagccaactcgcgaactgttgcaagacataggagacaccctgtcccgcgctgagagaatccgaattccggagccatggatcactcctcccgatctgcaggagaagattcacatcttcgctcagaaatgtttgttcctgacggaaagcctcaaacaattcaccgaaaagatgcagagcgacatggagaagatacaggaactgcgcgaggcccagctttactctgtcgacgttacactggatccagataccgcatatccctccttgattttgtctgataatctccgccaggtccgatactcctatctccagcaagatcttcctgacaaccctgagaggtcacccagcaccacgtag

SEQ ID NO: 138799 - DNA, 1542 bp, synthetic construct
  misc_feature 1..1542: note = Description of Artificial Sequence: Synthetic coding sequence
  source 1..1542: mol_type = other DNA
atggctagtggcagcgtcgctgagtgcctgcagcaggagaccacctgtccggtgtgcctccagtatttcgccgagcctatgatgctggattgtggccacaatatctgctgcgcctgtctggccagatgttggggaaccgccgagacgaatgtgtcgtgccctcagtgtcgagagacttttcctcaacgccatatgagaccaaaccggcacctggctaacgtaacccagctggtgaagcagcttcggacagaaaggcctagcgggcccggcggggaaatgggagtgtgtgaaaaacatcgcgaacctcttaaactctattgtgaagaggatcagatgcccatatgcgtcgtgtgcgatcgctcacgggagcaccgcggccattccgtgctgccgctagaggaagccgtcgagggtttcaaagaacaaatacagaatcagttggaccacctgaagcgggtgaaggatctcaagaaacggcggagagcgcagggcgaacaggcccgggcagaattgctgagcctgactcaaatggagcgggaaaaaattgtgtgggagttcgagcagctttatcattctctcaaagagcatgaataccgtttgctggccaggctggaagagttagacctagcaatatataatagtatcaacggagccatcacccagttcagctgcaacataagccacctgtcaagtctgatagcacaactcgaagagaaacaacagcaacccacccgggaattgctgcaagatatcggcgacactttgtccagggccgagcgcatcagaattccagagccctggattacgccacccgatctgcaggaaaagatccatattttcgctcagaagtgcctctttcttacggaatcgttaaaacaattcaccgagaagatgcagtcagatatggagaaaatacaggaactgagggaggcccagctctacagcgtggacgtcacactggacccagacaccgcatacccctccctcatactctctgataatctccgacaagtgcgctacagctatctacaacaggatctgccagacaatcccgaaagattcaacttatttccttgcgtgctgggaagcccctgtttcattgcagggcgccactattgggaggtggaagtgggggacaaggctaaatggaccataggtgtgtgtgaagatagcgtgtgtcgcaaggggggagtgacatctgccccacagaatggattttgggcagtgtcattatggtacggcaaagaatactgggcattgacttccccaatgaccgcgctgcctctgcgcacacccctgcagcgagttggcatcttcctcgattatgatgccggcgaggtgagtttctacaatgtgaccgaaaggtgccatacctttacattttctcatgcgacattctgcggtccagtccgaccatatttttccctttcctattccggtggcaaatccgccgcgccactgattatttgtcctatgtctggcatcgatgggttctctggccacgtggggaaccatgggcattctatggagacctccccctag

SEQ ID NO: 138800 - DNA, 1542 bp, synthetic construct
  misc_feature 1..1542: note = Description of Artificial Sequence: Synthetic coding sequence
  source 1..1542: mol_type = other DNA
atggcctctggaagtgtggccgagtgccttcagcaggaaaccacctgcccggtgtgtctacagtattttgccgagcctatgatgctggattgtggacacaacatttgctgcgcatgtctcgctcggtgctggggaaccgcggagactaatgtgtcatgcccccagtgtcgcgaaacttttccacagcgccatatgcgccctaataggcatctcgctaatgtgacacagttagtgaaacagctgcggacagaaagacccagcggaccaggtggcgaaatgggggtatgcgagaagcatagggagccactgaaattgtattgcgaggaagatcagatgcctatttgcgtggtctgcgatagaagtagggaacataggggacacagcgttttgccgctggaagaagccgtggagggatttaaagaacagatccaaaaccagctcgaccatctcaaacgggttaaagacctgaaaaaaagaagacgggctcaaggagaacaagctagagccgaactgctgagcctgacacaaatggaaagagagaaaatcgtgtgggagttcgaacaactgtatcacagcctgaaagagcacgagtataggctactcgctcgcctcgaagagctcgatctggcgatttacaatagcataaacggcgctatcactcaattctcgtgtaatatcagtcatctgagttcactcatcgctcagctcgaggagaagcagcagcagcctactcgtgagctgctgcaggacatcggcgacacgctgtctcgagctgaacgaattcgcatccccgaaccctggattacccctcccgacctacaggaaaagatacacattttcgcccagaagtgtttgtttctgaccgaatcgctgaagcagtttacagaaaagatgcagtccgacatggagaagatccaagaattacgcgaggcccagctgtattccgtggatgtgacgttagatcctgatactgcatacccatctctcattctgtccgacaacctgcggcaagtgcggtactcctacttgcaacaggacttgccagacaaccccgaaaggttcaatctgtttccctgcgtgcttggctccccctgttttattgcaggtcgacattactgggaagtagaggtgggagataaagctaaatggactataggcgtgtgtgaggactctgtttgccggaagggcggcgttactagcgcaccacagaacggcttttgggccgttagcctttggtacgggaaggagtactgggcacttacttctcctatgacagcgctacctctgaggacccctctccagagagtgggaatcttcctcgactacgacgccggggaggtgtccttctacaacgtaaccgaaagatgccatacctttacattcagccacgccaccttctgcggaccagtacggccatacttctctttgtcctacagtggcggaaagtctgctgccccattaattatttgtcccatgagcggcatcgacggtttctcaggtcatgtcggtaaccatggtcactctatggaaacaagtccctag

SEQ ID NO: 138801 - DNA, 1077 bp, synthetic construct
  misc_feature 1..1077: note = Description of Artificial Sequence: Synthetic coding sequence
  source 1..1077: mol_type = other DNA
atggccagtggcagcgtggcagagtgcttgcaacaagaaactacatgtcccgtctgtttgcagtacttcgccgaaccaatgatgctggactgcggccataacatttgctgcgcctgtctggcccggtgttggggaaccgcagagaccaacgtgtcttgtcctcagtgccgcgaaacatttccacagcgccacatgaggcccaacagacacttagcgaacgttactcagctggtgaagcaactgcggaccgagagacccagtgggccgggcggtgaaatgggcgtgtgcgaaaagcaccgggagcctctgaaactttactgcgaagaggatcaaatgccgatctgcgtggtctgtgacaggtcacgcgagcaccgcggccactctgtgctgcccctggaggaggccgtcgaaggctttaaggagcagattcagaatcagcttgaccatctgaagagagtgaaagaccttaagaagcgccggcgggcccagggagaacaagcaagggcagagctactgtcactgactcaaatggaacgggagaaaatcgtctgggagttcgaacaactctaccactcgctcaaggagcacgaatatcgcttgctagcccgcctcgaggagctggatctggcaatctacaactcaattaatggtgctattacgcagttctcctgcaacatctcacatctttcttccttgatagctcagctggaggagaaacagcagcaacctacacgcgaactattacaggacataggagacactttgtcacgggcggagcgcatacgcatccctgagccgtggatcacccccccagacctgcaggagaagattcacatcttcgctcaaaaatgtctgtttctaactgaatcattaaagcagtttacagagaagatgcagagcgatatggaaaaaattcaagaactgcgcgaagcccagctgtattcagtggacgtgacgctcgacccagacaccgcatatccgtctctcattttaagcgacaatctgcgtcaggtgaggtactcatacttacagcaggacctcccagataaccccgagcgaagtccaagtactacatag

SEQ ID NO: 138802 - DNA, 747 bp, synthetic construct
  misc_feature 1..747: note = Description of Artificial Sequence: Synthetic coding sequence
  source 1..747: mol_type = other DNA
tgacttaaacagtttaccgagaaaatgcagtccgacatggaaaagattcaggagagcgcggacagcctggagggggggatcttggatttaggtagcgtgttgtcccacatactgccagtgtccgaactgagagaggcccaattatattccgtggacgtgaccctcgatcccgacaccgcgtatccatccctcattctgagcgacaacctccgccaggttcggtactcctacctgcagcaggacctgcctgacaatcccgagaggtttaatcttttcccttgcgtcctgggtagcccctgtttcattgcaggtcgacactattgggaggttgaagtgggggacaaggccaagtggacaatcggtgtgtgcgaggatagtgtctgcaggaaaggcggcgttacttcggcaccacaaaacggattctgggccgtttccctctggtacggcaaggaatactgggcactaacctctccaatgactgcattgcctttgagaacccctctgcagagggtgggtatttttctggattacgacgccggggaagtgtctttttacaacgtcacggaacgctgccacacttttactttctcccacgcgacattctgcggacctgttaggccctacttctcactgagctacagcgggggaaagtccgctgctcctctcattatttgcccgatgtctggaatcgatgggttttcggggcatgtgggaaatcatgggcactccatggagacttctccctag

SEQ ID NO: 138803 - DNA, 1077 bp, synthetic construct
  misc_feature 1..1077: note = Description of Artificial Sequence: Synthetic coding sequence
  source 1..1077: mol_type = other DNA
atggcaagcggaagcgtggctgaatgtctccagcaggagacaacctgcccagtctgtctccagtacttcgcagaacccatgatgttggactgtggtcataatatctgctgtgcttgtctagctagatgttggggaacagctgaaacaaatgtctcttgcccccagtgtcgcgaaaccttccctcagagacatatgcggccgaaccgtcacctggctaacgtgacccagctcgttaaacagctccgcactgagaggccctcaggacccggcggagagatgggggtctgcgaaaagcaccgcgaacccctgaagctctattgtgaagaggaccagatgcccatatgcgttgtttgcgacagaagcagagagcatcgaggccactccgtgctccccctggaggaagccgtggagggctttaaggaacagattcagaaccaattagatcatttgaagcgtgtgaaggacctgaagaagcggcgtcgcgctcaaggtgagcaggcaagagcagagttgctgtcattaacccaaatggagagagagaaaatcgtttgggaattcgaacaactgtatcactctcttaaggagcatgagtataggctgttggctcgcctggaagaactagacctggctatttataattccatcaacggagccatcactcagttttcctgtaacatttcgcatctgagcagtctcatcgcgcaactggaagaaaagcagcaacagcccacaagagaacttctccaggacatcggagatacgctgtcccgagccgaacgcatccggatccctgagccttggatcactccccccgacctgcaggaaaaaatccacatcttcgctcaaaaatgccttttcctcactgagagtctaaagcagttcactgagaaaatgcagtctgacatggaaaagatacaggagctccgtgaggcccagctctacagtgttgacgtcaccctggacccagacacagcgtatccatccctgatactcagtgacaatctacggcaggttcgctattcatacttgcaacaggacctgcctgacaatcccgaaagatccccgagcacgacctag

SEQ ID NO: 138804 - DNA, 747 bp, synthetic construct
  misc_feature 1..747: note = Description of Artificial Sequence: Synthetic coding sequence
  source 1..747: mol_type = other DNA
tagctaaagcagttcaccgagaagatgcagtctgacatggaaaagattcaggaaagtgccgactctttggaagggggaatcctggacctaggatccgtgctgtcacatatcttgcccgtcagcgaactgagagaggctcagttgtatagcgtcgacgtcaccctcgatccagatacagcctacccatcactgatccttagtgataatcttcgccaagtacgctattcctatcttcagcaggatctgcccgataacccagagagattcaacctctttccttgtgtgctgggctctccctgcttcatcgccggcagacattactgggaggtagaggtgggggataaggccaaatggaccatcggggtctgcgaggatagcgtgtgccggaaaggtggcgtcactagcgcaccgcagaacgggttctgggccgtaagtctctggtacggcaaagaatactgggccctcacatctcctatgacagcactccccctccgcacccctctgcaaagagtaggaatattcctggattacgatgctggcgaggtgtctttctacaatgttactgagcgctgtcatacatttacattttcgcacgccaccttttgtggccccgtgaggccgtacttctccctgtcctactctgggggaaagtccgcagcccccttaataatctgtccaatgtccggcattgatggattcagtggccacgttggcaaccacggacattccatggaaacatcaccgtag

SEQ ID NO: 138805 - DNA, 1077 bp, synthetic construct
  misc_feature 1..1077: note = Description of Artificial Sequence: Synthetic coding sequence
  source 1..1077: mol_type = other DNA
atggcttctgggagcgttgcagaatgcctccagcaggagactacctgccctgtgtgtctgcagtattttgctgaacctatgatgctggactgtggccataacatctgctgcgcttgtctggcacggtgctgggggaccgctgaaactaatgtctcctgccctcagtgccgggagactttcccccaacggcacatgagacccaaccgacatttagcaaatgtaacacagctagtcaagcagctgagaaccgagcgcccatcaggacccgggggtgagatgggggtgtgcgaaaaacaccgggagcccttgaaactgtactgcgaagaggatcagatgcctatttgtgtcgtgtgtgaccgctctcgggagcacagggggcatagcgtcttaccactcgaggaggctgtggaaggcttcaaagaacaaattcaaaaccagctggaccacttaaaacgcgtgaaggatctgaaaaaacggcggagggcgcagggggagcaggcaagggcagagctgttgtccctcacacagatggaaagagagaaaatagtctgggaatttgaacaactctaccattctttgaaagagcatgagtatcgtctgctggctagattggaagagctggatcttgccatctacaatagcattaatggggcaatcactcaattcagctgcaatatttcgcacttatctagtcttatcgctcaactggaagaaaagcagcagcagcctactcgggaattactccaggatataggtgatacgctgtccagggccgaacgcatccgcatccccgagccctggatcaccccccccgatctccaagagaagatccacatcttcgcacagaaatgcttgtttctcactgaaagcctgaaacagttcaccgagaagatgcaatcagacatggaaaagattcaggagctgcgagaggcccagctgtattctgttgacgtaaccctagaccccgatactgcttacccttccctgatcttgtcggacaacctcaggcaggtaaggtactcttatttgcagcaggacctgcccgacaaccctgagaggagccccagcacaacatag

SEQ ID NO: 138806 - DNA, 747 bp, synthetic construct
  misc_feature 1..747: note = Description of Artificial Sequence: Synthetic coding sequence
  source 1..747: mol_type = other DNA
taactaaagcaattcaccgagaagatgcagtccgacatggagaaaatccaagagagcgccgattctctggagggcgggatcctggacctagggagcgttctatcacatattctgcctgtcagcgagctgcgcgaggcccagttgtactcagtcgatgtcaccttagatccagacaccgcctatccaagcctgattctttctgacaatctccgacaggttagatattcatacctgcagcaggatctcccagataaccctgagcgctttaatctgttcccatgcgtgcttggaagcccctgcttcattgctggtagacactactgggaggtggaagttggcgacaaggcgaagtggacgatcggtgtctgtgaggacagtgtgtgtaggaagggcggcgtcaccagtgcgccacagaatggcttttgggccgtctccctgtggtacgggaaggagtactgggcattaacatctccaatgactgcactaccacttagaaccccgctgcagagggtgggcatattcttggattatgacgccggtgaggtgtcattttataacgtgactgaacgctgccatactttcaccttctcccatgccactttttgcggacctgtccgaccctattttagccttagttattcaggcggcaagtccgctgcccctctaataatctgcccaatgtccggaatcgacgggttctctggccatgttgggaaccacggtcacagtatggagacttccccttag

SEQ ID NO: 138807 - DNA, 750 bp, synthetic construct
  misc_feature 1..750: note = Description of Artificial Sequence: Synthetic coding sequence
  source 1..750: mol_type = other DNA
atggccagtgggagcgttgccgagtgtctccagcaggaaaccacatgtcccgtttgcctccagtacttcgccgaacccatgatgctcgattgtggccataacatatgctgcgcctgcttagcgcgttgctggggcaccgctgagaccaatgtttcctgcccacagtgccgtgaaaccttccctcaacggcacatgaggcctaacagacacctggcaaatgtgactcagctagtcaaacagctcaggactgaaaggcctagcggccctggtggggagatgggagtttgtgagaagcatagagaaccgcttaagctgtactgtgaagaagaccagatgcctatttgtgtcgtttgtgaccgaagcagagagcatagggggcacagcgtcctacctctcgaggaagccgtggagggatttaaggagcagatccagaatcagctggaccacctgaaaagggtcaaagacctcaagaagcggcgtagggcgcaaggtgagcaggctcgagcggaactcttgtccctaacccagatggaacgcgaaaagatcgtgtgggagttcgaacagctttaccactcacttaaggaacatgagtaccgtctcctcgcaaggttagaggagctggatcttgcaatttacaattctatcaatggggccatcacacagtttagttgcaacatctcccacctctcaagcttaatcgcgcagctggaggaaaaacaacagcaaccgacacgagagctgctccaatag

SEQ ID NO: 138808 - DNA, 1542 bp, synthetic construct
  misc_feature 1..1542: note = Description of Artificial Sequence: Synthetic coding sequence
  source 1..1542: mol_type = other DNA
atggcatcaggcagcgtcgccgagtgtcttcaacaggagacaacttgtccggtctgtctccagtactttgcggagcctatgatgttagactgcggccataatatctgctgtgcttgcctagccagatgctggggcacggctgagacaaatgtctcatgcccccagtgtcgcgagacgttccctcagcgtcacatgcggcccaatcgacatttggcgaatgtcacacagctcgtgaaacagctgcggacagagcgcccttcagggccagggggggagatgggagtctgcgagaagcatagggaaccgcttaagctgtactgtgaagaagatcaaatgcccatctgtgtagtgtgcgacagatcccgcgaacaccgcggacactctgtcctcccattggaagaggcagtggagggcttcaaggagcagatccagaaccagctcgatcacctcaagagggtcaaggatctaaagaaacgacgaagggctcagggcgagcaggctagggcagaactgttatcattgacccaaatggagcgcgagaaaattgtctgggaatttgagcagctttatcacagccttaaggaacatgagtacaggctgttggcccggttagaggagctggatttagcgatatataattctattaacggggccatcacacagtttagctgcaacatcagtcacctgtcttccctgatcgcacagttggaggaaaagcaacagcagcccacaagggaattgctacaggacataggagacactctctcccgggccgagcgtattagaattcctgagccatggataacacccccggatctgcaggaaaaaatccacatttttgctcagaaatgcctttttctgacagaatccctcaagcagttcacagagaaaatgcaatctgacatggagaaaatccaggagctgcgggaagcccagttgtactccgttgacgtgactttagatcctgacaccgcctatccatctctcatcctgtctgataatcttaggcaagtgaggtacagttatctacagcaggacctgcctgacaatccggaaaggttcaatctatttccgtgcgtgctgggcagcccatgcttcattgccggtagacactactgggaggtggaggtgggggacaaggctaagtggactatcggtgtgtgtgaggacagcgtgtgtcgcaaaggcggggtgacctccgctccacagaacggcttctgggccgtgtcactatggtacgggaaagaatattgggctctgacaagtcccatgactgcacttccccttcgcactccgctccagcgcgtaggtattttccttgattatgacgccggagaagtgtccttttataatgtgactgaacgctgtcacacctttacattttcgcatgcaaccttctgcggccccgtccgtccatatttttctttatcttattccggtggtaagagtgctgctccacttattatctgtccaatgtcaggtattgacgggttctctggacacgtaggcaaccacggccatagcatggaaacatccccctag

SEQ ID NO: 138809 - DNA, 1542 bp, synthetic construct
  misc_feature 1..1542: note = Description of Artificial Sequence: Synthetic coding sequence
  source 1..1542: mol_type = other DNA
atggcgagcggctcagtcgccgaatgtctgcagcaagagacaacctgccctgtctgcttgcagtacttcgctgaacctatgatgctggattgtggacacaacatttgttgtgcatgcctagcaaggtgttggggtacagcggaaacgaacgttagctgcccccaatgccgcgagactttcccccagcgacatatgaggccgaacagacacctcgctaacgtgacacaactggtgaaacagctgcgcaccgaaagacctagcggcccgggaggagagatgggagtgtgcgagaaacacagggaacccttgaaactgtattgcgaagaggatcaaatgccgatttgtgtagtatgcgacaggagccgcgagcatagagggcactctgtgttacctcttgaagaagcagtggagggctttaaggaacaaatccaaaatcaactggaccatctcaaaagggtcaaggacttaaaaaagcggcggcgcgcccagggcgagcaggcccgtgcagaattgctcagcctcacacagatggagagggagaagatcgtgtgggagtttgagcagctttaccacagtttgaaagaacatgagtatagactgcttgccagactggaggagctggatctggccatatataattcgatcaatggagccatcacccagttttcatgtaatatatcccacctttcatctctgattgcccagctggaagaaaagcaacagcaacccacccgcgagctgctgcaagacatcggggacacgctgagtagggctgaacgcatcagaatccctgagccttggattacccctccggacctacaagagaagatccacatcttcgcacagaagtgtctgttcttaacggaaagcctgaaacagtttacggaaaagatgcaatccgatatggagaaaatccaagagctcagggaggcccagctgtacagcgtggacgtgacactggatccagataccgcctacccctcgctgatcctgagcgataacctgcgccaagtgcgctatagttacttacagcaggacctcccagacaacccagagaggtttaatcttttcccttgtgtgcttgggagcccgtgtttcattgcggggcggcactactgggaggttgaagtaggtgataaagccaaatggaccatcggcgtgtgcgaagacagcgtatgccgtaagggcggcgttacgtctgctccacagaatggattctgggctgtctcattatggtatggaaaagaatactgggctctgacatctcccatgaccgcacttcccctccggactcccctgcagcgggtaggtatttttctggactacgatgctggtgaagtgagtttttataacgttacagagagatgccacaccttcacttttagccatgcaaccttttgcggcccagtcagaccttatttttccctgtcctatagtggtggaaaatcagctgctcctcttataatatgccccatgtccggaatcgacgggttttcaggtcatgtcgggaaccacgggcatagcatggagacctctccatag

SEQ ID NO: 138810 - DNA, 750 bp, synthetic construct
  misc_feature 1..750: note = Description of Artificial Sequence: Synthetic coding sequence
  source 1..750: mol_type = other DNA
atggcaagcgggagtgtggccgagtgtctccaacaagagacaacttgtcccgtgtgcttgcagtattttgcagagccaatgatgctcgactgcggacataacatatgctgcgcttgcctggcaaggtgttggggaactgccgaaacaaacgtatcttgtcctcagtgcagggaaaccttcccacagcggcacatgcgccccaatcggcatctggccaatgtcacccagctggtgaagcagctgcgcactgagcgtccaagcggaccagggggcgaaatgggagtatgtgagaaacaccgggaacccctcaagctttactgtgaggaggatcaaatgccaatatgtgtcgtttgtgatcggagccgggagcaccgggggcactctgtgctccccctggaggaggctgtagaaggatttaaagagcagatccagaatcaattggaccacctaaaaagagttaaagacctcaaaaaacgcagaagagcgcaaggggaacaggcccgcgccgagctgctttcactcacgcagatggagagagagaagattgtttgggagttcgaacagctctatcattccctcaaagagcatgaataccgcctcttggcacgcctagaggagctcgacctcgctatctacaattcgattaacggcgctataacacaattctcatgcaacatctcccacctgagttcactgattgcacaattagaagagaaacaacagcagccaacaagagagctgctgcaatag

SEQ ID NO: 138811 - DNA, 1542 bp, synthetic construct
  misc_feature 1..1542: note = Description of Artificial Sequence: Synthetic coding sequence
  source 1..1542: mol_type = other DNA
atggcaagcggcagcgtggccgagtgcttgcaacaagagactacatgtccagtctgccttcagtattttgcagagccgatgatgctcgactgtggccacaatatatgctgtgcttgtcttgcaaggtgttggggaacagccgagacaaatgtgtcgtgtccacagtgcagagagacttttccccagagacatatgaggcccaatcgacatctggctaacgtcacccagctcgtgaagcaacttcgaactgaacgcccatctggacctggcggagagatgggcgtgtgcgagaaacaccgcgaaccgctcaagttgtactgcgaggaagatcagatgcccatttgcgttgtgtgtgaccgatctcgggaacaccgcggacacagtgtgctgccccttgaggaggccgtcgaagggttcaaagaacaaattcaaaatcagcttgaccacctcaagagggttaaagacctgaagaaaaggaggcgggcccagggggagcaggcccgcgcagaactgctcagccttacgcagatggagagggagaaaattgtgtgggaattcgaacagctgtaccatagtctcaaagaacatgagtatcgcctattggcacgactcgaggagctcgaccttgccatatacaattctatcaatggtgccatcactcagtttagttgcaacatctcgcatctgtcttccctgattgcccagcttgaggaaaagcagcaacagcccacaagggaacttcttcaggacataggggatacactctcccgcgctgagagaatccggatccctgagccctggatcacgcctccagacctccaggagaaaatccacatctttgctcagaagtgcctgtttctcactgagagcttgaagcaattcactgagaagatgcagagcgacatggaaaaaattcaggagctgcgagaagctcagctctactccgtggatgtgaccctggatcccgatacggcttatcccagcctcattctgtcggataatctgcgacaggttcggtattcatacctccagcaggatctaccggataatcccgaacggttcaatctattcccctgcgtgctgggctcaccttgtttcattgccggacggcactattgggaagtcgaggtgggtgataaagccaagtggactattggcgtctgcgaggacagcgtatgccggaagggaggagtgaccagtgctccgcaaaatgggttctgggctgtttcattgtggtacggcaaagaatattgggcacttacgtcaccaatgacagccctgcccctaagaacacccctacagcgggtgggtatctttctagattacgatgcaggggaagtgtccttctataacgtgaccgaaaggtgtcatacctttactttcagccacgccacattctgtggaccggtgaggccttatttttcattatcatattccggcggtaaaagcgctgcacctctgatcatctgtccaatgtctggcatagacggcttcagcggccatgtcggcaatcacgggcatagtatggaaacctcgccctag

SEQ ID NO: 138812 - DNA, 744 bp, synthetic construct
  misc_feature 1..744: note = Description of Artificial Sequence: Synthetic coding sequence
  source 1..744: mol_type = other DNA
ctcaagcagttcactgaaaaaatgcagtctgatatggaaaaaattcaggaatcagcagacagtttagaggggggtattttagacctgggtagcgtgctatcacatatcctgcccgtaagcgagttgcgggaggctcagctctactccgtggatgtcaccctggaccctgatactgcctatccgagcctgatcctgagcgacaatctgcgccaagtacgctactcttatcttcagcaggacctgcctgataaccctgagagatttaaccttttcccatgcgtgctggggtccccctgctttatcgccggaaggcactattgggaggtggaagtcggcgacaaagccaaatggacaatcggggtgtgtgaagactccgtgtgccggaaggggggagtgacttctgccccccagaatggattttgggccgtaagcctctggtatggcaaggaatattgggccctcacatcccctatgacagctcttccactgcgcacccctcttcagcgcgtggggatcttccttgactatgacgccggtgaggtgagcttttataatgtaactgagcgctgccacactttcactttctcccatgcaacgttttgcggacctgtgaggccatatttttcgctgagttactctggcggtaagtcggcagcacctttgattatctgcccaatgagcgggatcgacggatttagtggtcacgtaggaaaccatggccacagcatggagacctcgccatag

SEQ ID NO: 138813 - DNA, 750 bp, synthetic construct
  misc_feature 1..750: note = Description of Artificial Sequence: Synthetic coding sequence
  source 1..750: mol_type = other DNA
atggcatcaggatctgtcgcagaatgcttgcagcaggagacaacatgtcctgtctgcctgcaatatttcgccgagcctatgatgctcgattgcggacataacatatgctgtgcttgtctagcaaggtgctggggcacggccgagacgaacgtgagctgtccacagtgccgcgaaactttccctcagaggcacatgagacccaacagacatctcgccaatgtcactcagctagtgaagcagcttcgaactgagcggccatcaggcccaggaggcgagatgggagtctgtgaaaaacaccgcgagccattaaagctctactgcgaggaagaccagatgcccatttgtgtggtgtgcgaccgcagtagagagcatagggggcacagcgtcctaccactcgaagaggctgtggagggattcaaggaacagatccaaaaccagctggatcacctgaaacgggtcaaggacctaaagaagagaaggcgtgcacagggggaacaagcgagagcagagttactgtccctcactcagatggagagggagaaaatagtatgggagtttgagcagctttatcactcacttaaggagcatgaataccgcctgttagcgaggcttgaggagctcgatctggcaatctataactctataaatggtgccattacccagttttcatgtaacatcagtcacctgagctccctgatcgcacaactggaggaaaaacagcaacagccaacccgcgagctgctacagtag

SEQ ID NO: 138814 - DNA, 159 bp, synthetic construct
  misc_feature 1..159: note = Description of Artificial Sequence: Synthetic coding sequence
  source 1..159: mol_type = other DNA
tgactgagggaggcccagctgtactccgttgacgttaccttggatccggacactgcctacccctcacttatcctgtctgataacctgaggcaggttagatacagctaccttcaacaggatctgccggataaccccgagcggtccccctccacaacctag

SEQ ID NO: 138815 - DNA, 696 bp, synthetic construct
  misc_feature 1..696: note = Description of Artificial Sequence: Synthetic coding sequence
  source 1..696: mol_type = other DNA
taaagtgcggactcgctcgagggaggcatcctggacctggggtccgtgcttagtcacatcctgcctgtctctgagctcagagaggcccagctctatagcgtggacgtcacgctggatccggatacagcatatccctctctgattctgtccgataatttacgccaggttcgctacagctatctgcagcaggacctgcctgataacccggagaggttcaatttgtttccttgtgtgcttggctccccttgttttattgctggcagacactactgggaagtggaggtgggggataaggcaaagtggaccattggggtgtgtgaggactccgtatgtaggaagggcggggttactagcgctccacagaatgggttctgggccgtgagcctctggtatggcaaggaatattgggcgctaaccagcccaatgacagctctgccactgcggactccgttacagcgcgtgggaatcttcttagactatgacgccggcgaggtcagcttttacaacgtgaccgaacgatgtcacacttttaccttcagtcacgccacattctgcggcccagttcgaccctactttagcctgtcgtacagcggagggaaatcggcggctccgctgataatctgtcccatgtccgggattgacggcttctctggccacgttggcaaccatggacacagcatggagacctccccgtag

SEQ ID NO: 138816 - DNA, 624 bp, synthetic construct
  misc_feature 1..624: note = Description of Artificial Sequence: Synthetic coding sequence
  source 1..624: mol_type = other DNA
tgattgcgtgaggctcagctgtattctgtggacgtgaccctagacccggatacagcttatcctagtcttattctgtcggataatttgcggcaggttcgatattcttacctccaacaagatttacctgacaacccagagagattcaatctattcccatgtgtactggggtcaccttgcttcatcgccgggaggcattattgggaggtcgaagtgggggacaaagcgaaatggacgatcggggtctgtgaagactcagtgtgcaggaaaggcggagtgacctctgctccccagaatgggttttgggctgttagtctgtggtacggcaaggaatactgggcccttactagcccaatgactgctttgcctctacgtacccccctacaacgtgtgggcatcttcctagactacgacgccggggaagtgtccttttacaacgtaactgaacggtgtcacaccttcacctttagccatgcgactttctgcggccctgtgcgaccctatttcagcctgtcttattccggtggaaagagcgccgctcccctcatcatctgtcccatgagtggcattgacgggttctctggacacgttgggaatcacggccatagcatggaaacttcgccttag

SEQ ID NO: 138817 - DNA, 1077 bp, synthetic construct
  misc_feature 1..1077: note = Description of Artificial Sequence: Synthetic coding sequence
  source 1..1077: mol_type = other DNA
atggccagcgggagtgtagctgaatgcctgcagcaggagaccacatgcccagtgtgcttacagtacttcgccgagccaatgatgttggactgcgggcacaacatatgctgcgcgtgtctggcccgttgctgggggacagcagagactaacgtttcttgccctcaatgtcgcgagactttccctcagaggcacatgcggccaaatcgtcatttggccaacgtgactcagctagtcaagcagttgagaacagagaggcccagcgggccagggggcgagatgggcgtctgtgaaaagcaccgggagccactgaaattatactgtgaagaagatcaaatgcccatatgcgttgtgtgcgacaggtccagggaacatagaggtcacagcgtgctcccactcgaagaggccgtcgagggctttaaagagcaaatccaaaatcagttggaccatctgaagagagttaaagatctcaaaaaacgtcgccgagcccagggcgagcaggcccgggccgaactgctctccctgacccagatggagcgagaaaaaattgtctgggaatttgagcagctgtaccactcactgaaggagcacgagtatagactgttagctagactcgaggagttggatttggccatttacaactcaatcaatggcgccattacacagttctcttgtaacatctcacatttgtcatccctgatagcacagctggaagagaaacaacagcagccaactagagaactcttacaggacatcggtgacacactgtctagggctgagagaattaggatcccagaaccatggattacacccccggacctacaggaaaagatacacatctttgcacagaagtgcctgtttctgacagagtccctaaaacagttcaccgagaaaatgcagtcagacatggaaaaaattcaagagctccgggaggcccagctctacagcgttgacgtcaccctggatcctgacacagcctaccctagcttgattctgtctgataacctgcggcaagtgcgctacagctaccttcagcaggatctcccagacaacccagaacgtagtcctagcacgacgtag

SEQ ID NO: 138818 - DNA, 747 bp, synthetic construct
  misc_feature 1..747: note = Description of Artificial Sequence: Synthetic coding sequence
  source 1..747: mol_type = other DNA
tgactcaaacagtttactgagaagatgcagtctgatatggagaagatccaggaaagtgcagatagcctggagggcggtatccttgacctcggttcagtactgtctcatatccttccggtgtcagaattgcgagaggcgcagctctattccgtggatgtcacgctggaccccgatactgcctatccttccctcatcttgagcgataatcttaggcaggttcgctactcttacctacagcaggatctgcccgacaatccagagcgattcaacttgtttccttgtgttctgggttccccctgttttatcgctgggaggcactattgggaggtggaggtgggcgataaagctaaatggacgatcggagtgtgtgaggactccgtatgccggaaaggtggcgtcacctcagctcctcagaatggattctgggctgtgtcactgtggtacgggaaggagtactgggcgctaactagccccatgactgccttgccattacggaccccactgcagcgggttgggatcttcctcgattacgacgcaggggaagtgagcttttacaacgtgaccgagcgatgccacactttcactttctctcacgctactttttgtggccctgttcgtccctacttcagcctttcctattccggcggaaagagcgcggctcccttgatcatctgtccaatgtctggcattgacggatttagcgggcacgtaggcaaccacggacattccatggagacatccccctag

SEQ ID NO: 138819 - DNA, 750 bp, synthetic construct
  misc_feature 1..750: note = Description of Artificial Sequence: Synthetic coding sequence
  source 1..750: mol_type = other DNA
atggcgtctggctctgtcgctgagtgcttacagcaagagacaacctgccctgtgtgccttcagtacttcgctgaaccaatgatgctggattgtggacacaatatttgctgcgcctgtctggccagatgttggggaactgctgaaactaatgtcagctgccctcagtgtcgcgaaactttccctcagcggcacatgcgaccaaaccgacatctcgctaacgtgacacagctggtgaaacagttaagaactgagcgcccctcaggccccgggggcgagatgggcgtgtgcgagaagcaccgggagcctctcaaactctactgcgaagaggaccaaatgcccatctgtgtggtttgtgatcggtcaagagaacacagagggcatagcgtgctgcccctggaagaggctgtggaggggttcaaagaacagatccagaaccagttggatcatctaaaacgtgttaaggatctcaaaaaaaggaggcgagcacagggcgagcaggccagggcagaactgttatctctcacccagatggagagagaaaaaatagtgtgggaatttgagcagctgtaccacagcctgaaggagcacgaataccgcctgctcgcccgtctggaggaacttgacttggctatctacaactccataaacggcgctattacacagttttcctgcaatatcagtcacttatcgagtcttattgctcagctggaagagaagcagcagcagcccacccgggagctgctgcagtag

SEQ ID NO: 138820 - DNA, 2202 bp, synthetic construct
  misc_feature 1..2202: note = Description of Artificial Sequence: Synthetic coding sequence
  source 1..2202: mol_type = other DNA
atggccaagcgggaagatagtcccgggccagaagtccagcccatggataagcagtttctggtgtgtagcatatgtctcgatcgctatcaatgccctaaagtgctcccatgcctgcacacgttctgtgaaaggtgtctccagaattatattccggcccagagtctgaccttgtcctgccccgtgtgccggcaaaccagtatactgcctgaacagggtgtcagcgcgctccaaaataacttctttatatctagcctaatggaagctatgcagcaagctcccgatggcgcccatgatcccgaggacccgcatcccctgtccgttgtggccggtcggcccctgtcttgtcccaatcacgagggtaagaccatggaattctactgcgaagcttgcgagaccgcaatgtgtggggaatgccgggctggagagcacagggagcagcataaagccgctctacagcgacagcttgaggcggtacgtggtcggctccctcaacttagcgccgccattgccctggttggtggcatcagccagcagcttcaggaaaggaaggctgaagcactggcgcagatctctgctgccttcgaagacctggagcaggctttacagcagaggaagcaggcgctcgtgagtgatctggaaaccatttgtggcgccaagcaaaaggtgctgcagtcacagctggatacgctccggcagggccaagaacatatcggtagtagttgtagctttgcggaacaggcgttaagactcggtagcgcccctgaagtgctgcttgtccgcaaacacatgagagaacgcctagctgcactagctgctcaggcttttccagagcggcctcacgagaatgcccagctcgaacttgttctggaggttgatggcctgaggcggtccgtgcttaacttgggagcgctgctcactacgtccgccactgcccatgagaccgtcgctaccggcgaaggcttgaggcaggcgcttgtgggacaacctgcaagcctgacagttaccacgaaagataaagacggaagactcgtccgtacaggaagtgcagagctccgagctgagataacaggccccgatggtactaggctgcctgtgcccgtggttgaccacaagaacgggacctacgagcttgtgtacaccgcaagaacagaaggggagctgctcctttctgtgctgctgtacggtcaaccagtgagaggctcgccgttccgcgtgagggcactcagacccggggacttacccccaagtccagatgacgtcaagcgcagggttaagagtcccggtggccccggatcacacgtaagacagaaggccgtaaggcgaccttcctcaatgtatagtaccggcgggaaaagaaaggacaaccctattgaagacgagctggtgtttcgggtcggcagcagaggccgggaaaaaggcgaattcactaacctgcaaggtgtgagcgccgcatccagtggccgcattgtggtggcagattcaaacaaccagtgcatacaagtcttttccaatgagggccaattcaagttccggtttggcgtgcggggccgtagtcccggccagctgcagaggcccactggtgtggccgtagacacaaacggcgacataatcgtggcagactacgataaccgttgggtcagcatctttagccctgagggaaagttcaaaaccaagattggcgctgggagactcatgggccctaagggcgtcgcagtggatcgcaatgggcatattattgttgttgataacaagagttgctgcgttttcaccttccagccaaacgggaaattggtgggtagatttggcggtagaggggcaaccgaccggcacttcgccgggccgcactttgtggccgtcaataacaaaaacgaaattgtggtcactgattttcataatcactctgtaaaagtttatagcgcagacggcgaatttcttttcaagttcggaagtcacggggagggaaatgggcagtttaatgccccaaccggggtggctgtcgatagtaatgggaatataatcgtcgccgattggggtaacagcaggatacaggtcttcgatagttccggatcctttctgtcttatatcaacacatctgcggagccactatacggacctcaggggttagccctgacgagcgatgggcatgtggtggtggcagacgcgggtaatcattgtttcaaggcctacagatatcttcaatag

SEQ ID NO: 138821 - DNA, 2235 bp, synthetic construct
  misc_feature 1..2235: note = Description of Artificial Sequence: Synthetic coding sequence
  source 1..2235: mol_type = other DNA
atggctaagcgtgaagactcgcccggtccagaagttcagcccatggacaagcagttccttgtgtgttccatctgcctggaccgctatcagtgtcccaaagtcctgccttgtttgcacacgttctgcgagagatgtctgcaaaactatattccagcgcagtcgctgacgctgagctgtccagtgtgtaggcagacctcaatcttgcccgagcagggggtgtccgcactgcagaacaacttctttatctcaagtcttatggaagcgatgcagcaggcccccgatggtgcacacgaccctgaggatccccacccgctttctgttgtggccgggaggcctctctcttgccctaatcatgagggcaagacgatggagttctactgcgaagcctgcgagacagcaatgtgcggggaatgcagagccggtgaacatcgagagcacggtaccgtccttcttcgggacgtggtggagcagcataaagccgctctgcagagacagctggaggcggtgcggggacggttgccgcaactcagtgcggccatcgctctagtcggaggcatcagccaacaactgcaggagaggaaggcggaggccctagcacagatttcggctgcgttcgaggacctcgagcaagcacttcagcagcgaaaacaagcactggttagcgacctagaaactatttgcggtgcaaagcagaaggtgctccaatctcagctcgacacccttcgacagggccaggaacatatcggaagtagctgttctttcgccgaacaagctctcagacttgggtccgccccggaggtgctgctagttaggaagcatatgcgagagcgcctggccgccctggccgctcaggccttccctgaacgacctcatgaaaatgctcagttagagctggtgctggaagtggacgggctccgccggtccgtgcttaacctgggtgcattgctaactacttctgccactgctcacgaaacggtggcgacaggtgagggcttaaggcaggcactggtgggacagccggcatccctgaccgtcaccacaaaggacaaggacggccgactggtccggaccggaagcgccgaactacgtgccgaaattacgggcccagatggcacgagactgccggtcccagtggttgaccacaaaaatggaacttacgaattggtgtacactgctagaactgagggagagctcctcttgtccgtgcttctctatggccaacccgtaagaggcagcccttttcgagtgcgggcattgagacctggagatcttcctccaagtccggatgacgtcaaaagacgggtgaaaagcccaggcggtccagggagccacgtcaggcagaaggccgtgagaaggcctagttcaatgtatagtactggaggcaagagaaaagacaatcccatcgaggatgagctagtgtttcgggtaggcagcagagggcgggaaaagggcgaatttacaaacctccagggagtctcagccgcttcctcagggcgcatcgtcgttgccgattccaataaccaatgcattcaggtatttagtaatgaaggtcagttcaagttccgttttggtgtccgaggacgcagccctggccaactgcagaggccgaccggtgtggccgtggatactaacggagacatcatcgtggcggactacgacaatcgctgggtgtccatttttagccctgagggcaagtttaagacaaaaataggcgctgggcggctcatggggcctaaaggggtggcagtggaccgcaatggccatattatcgtcgtggataacaaatcgtgttgtgtcttcacatttcagccaaacggcaaactcgtgggcaggtttggggggaggggcgcgacagaccgccacttcgccggcccccactttgtggcggtcaataataaaaacgagatcgtcgtgactgactttcacaatcattccgtgaaagtctacagcgcagatggcgagttcctgttcaagtttggcagtcacggtgaaggaaacggccaatttaatgctcctactggcgtggcagtggacagtaatggtaacataattgtggcagactggggaaacagtcgtatacaagtgtttgatagttctggttcattcctgtcttatattaatacatcagccgagcccttgtatggcccacagggcctggctctaacctccgatggtcatgtagtggtcgccgatgctggaaatcattgctttaaggcctataggtatttgcagtag

SEQ ID NO: 138822 - DNA, 2235 bp, synthetic construct
  misc_feature 1..2235: note = Description of Artificial Sequence: Synthetic coding sequence
  source 1..2235: mol_type = other DNA
atggctaaacgcgaggattccccaggaccagaagtccagcctatggacaagcaatttttagtctgttcgatctgtttagatcggtatcagtgtcccaaagtactcccatgcttgcacactttttgcgaaaggtgcctccagaattacattcccgcccagtctttgaccctgtcctgccctgtctgcagacagacgagtatattaccggagcagggagtgtccgccctgcaaaataattttttcatatcctcactaatggaggccatgcagcaggctcctgacggagcgcatgaccctgaggatccccaccctctcagtgtcgttgccggccggccgctgagttgtcctaatcatgaggggaagacaatggagttttactgtgaagcttgtgagactgctatgtgtggtgaatgccgtgcaggggagcatagggaacacggtactgtcttattgcgggacgtcgttgagcagcacaaagcagccctgcagcggcagctggaggctgtgcgcggacgactgccccagctctccgctgcaattgcattggttgggggcattagccaacagctgcaggaacggaaggccgaggccctggcgcaaatttcagcagcattcgaggatcttgagcaggctttgcagcaaagaaagcaggcgctggtgagcgatctggagacaatctgcggtgcaaaacaaaaagtattacaatcccagctggataccctcagacaggggcaggaacatatcggcagctcatgctcgttcgctgaacaggcattaaggctcggatccgcgcccgaggtactcctcgttaggaagcacatgcgcgaaaggcttgccgcacttgctgctcaggcctttcccgagcgcccacacgagaacgcccagttggaattagtgttagaggtcgatggcctgaggcgttcagtgctcaacctgggcgcccttttgacaacgtctgcaaccgctcatgagaccgtcgcgacaggcgaagggttacggcaggctttagtaggccagcctgcttcacttacagtcaccactaaagacaaggacgggcgcctcgtgcgaacggggagcgcagagctgcgcgcagagattacaggacccgatggaacgaggttacctgtgcctgtagtggaccataagaatggtacctatgagctggtgtatactgcccgtaccgaaggtgagctgctcctgtccgtcctgctctacgggcagccggttagagggagcccatttcgcgttcgcgcattgcgacccggggacctgccccccagccctgacgacgtaaagcgtcgagtgaaatcaccaggagggccagggagccacgtgaggcagaaggcagttaggcgccctagttccatgtattcaacaggcggcaagagaaaggacaatcccatcgaagatgagttggtgttccgagtgggttcaagaggtagagaaaagggtgagtttacaaacctgcagggggtgagtgctgcctcaagtggtagaatcgttgtggctgactccaataatcagtgcattcaagtcttctctaacgagggtcaatttaagtttagatttggagtacgaggccgatcaccaggccaattacaaagacctaccggggtcgcagtggataccaacggcgacattatagttgctgactacgacaaccgctgggtgagcatcttctcgcccgagggtaagttcaagactaagatcggtgcaggaaggctgatgggacccaagggtgtcgccgttgatagaaacggccacattatcgttgtcgacaataagagttgttgcgtgtttacattccagcctaacggaaagcttgttggaaggttcggcggacgcggggccactgaccgccattttgccggaccacacttcgtggccgtgaataacaaaaatgagatcgtggtcactgatttccacaatcactctgtgaaggtctatagcgcggacggcgagttcctgttcaaatttggatcccacggcgagggcaacggccagtttaacgcgccgacaggagtggcagtcgactctaacggcaatattatcgttgccgactggggaaacagccggattcaggtttttgatagttcagggagctttctctcatacatcaatacatccgcagagcccttgtacggaccacagggactggccctgacctccgacggacacgtggtcgtagcggacgcgggaaaccattgcttcaaggcctatcggtacctacaatag

SEQ ID NO: 138823 - DNA, 2235 bp, synthetic construct
  misc_feature 1..2235: note = Description of Artificial Sequence: Synthetic coding sequence
  source 1..2235: mol_type = other DNA
atggccaaacgtgaggacagcccaggtccagaggtgcagcctatggacaagcagtttctggtgtgctccatttgtctagaccgataccaatgtcccaaggtgttgccgtgtcttcataccttctgtgagagatgccttcagaactacatcccagcccagagccttacgctgtcctgccccgtgtgccggcaaacatccatactgcctgaacagggtgtgtccgctttgcagaacaatttcttcatttcgtctctgatggaagctatgcagcaggcaccggatggcgctcatgaccctgaggacccccacccattgtcagtggtggccggccggcccctctcctgccctaatcatgaaggcaagactatggagttttactgtgaagcctgtgagacggccatgtgtggagagtgcagggcaggagaacaccgcgaacatgggaccgttctgctccgcgacgtagtggagcagcataaggctgcccttcagaggcaacttgaggcagtccgcggccgacttccccagctgtctgccgcgatagctttagtgggagggatcagtcagcaattgcaagaaaggaaggccgaggcacttgctcagatcagcgccgcctttgaagacctggaacaggccctccagcagcggaagcaggccctcgtcagtgacctcgagactatctgtggcgctaaacagaaagtcctgcagagccagctcgatacactcaggcaaggacaagaacacattggcagctcttgctctttcgctgaacaggctctgcgccttggctctgctcccgaggtgcttctggtgcgcaagcatatgagggaaaggctcgctgctctggccgcacaggctttcccagagaggcctcatgaaaatgcacagctggagctggtattggaggttgacggtctcaggcgttcagttcttaacttaggggcactgctgaccacctctgccactgcacacgagaccgtcgctaccggagaggggttgcgccaagcgctggtagggcagccagcttcgctgaccgtcaccacaaaagacaaagacggaagactggtacgaaccggtagtgctgagcttcgtgccgagatcacagggccagatgggacacggttacccgtccctgttgtggaccataaaaatggcacctacgagctggtctacactgctaggaccgaaggggagctgttgttatctgtcctcctctatgggcagccggtccggggcagccctttcagagtgcgcgccctgcggccaggagatctcccaccttcacccgacgatgtgaaacgtagagtcaaatctcctggtggtcctggcagtcacgtgcgtcagaaggccgtcaggaggccctctagcatgtacagcactgggggaaaacgtaaggataatcctattgaagacgaattggtgttcagagtcggctctcggggccgtgagaaaggcgaatttactaacctccaaggggtttcagctgcgagtagtggtagaatagtagtggccgatagcaacaatcagtgcattcaggtgttcagcaacgaaggccagttcaaattcaggttcggagtgcggggccgtagtcccggccagctgcagaggccaacaggggtggccgtcgacacgaatggagacatcatagtagccgactacgacaacaggtgggtaagtatatttagtccagaaggcaaattcaagacgaagattggggctgggagactcatgggacctaaaggcgtggccgtcgacaggaatggacatataatcgtggtggacaacaaatcttgctgtgtattcactttccagcctaacggaaaactagtgggcaggttcggggggagaggggcgaccgacagacatttcgccggcccgcacttcgtggcagtgaacaataagaacgagatcgtggtgactgactttcataatcactccgtgaaggtgtattcggctgacggagagttcttatttaaattcggcagccatggcgagggcaacggacagttcaacgcacccaccggagtggctgttgatagtaatggtaacataatcgtggcagactgggggaattctcgcatccaggtgttcgactcatcaggcagtttcctgagttacattaacacctctgcggagccgctgtatggcccacagggactagctctaaccagcgacggccatgtggtggtggccgacgccgggaatcactgctttaaggcgtaccgttacctgcagtag

SEQ ID NO: 138824 - DNA, 2229 bp, synthetic construct
  misc_feature 1..2229: note = Description of Artificial Sequence: Synthetic coding sequence
  source 1..2229: mol_type = other DNA
atggcaaagcgggaagactctccaggtcctgaggtgcagccaatggacaagcagttcctggtgtgttccatatgtctggacaggtatcaatgtccgaaagttttaccatgcctgcacactttctgtgagcgttgtcttcagaactatatcccagcgcagagtctcacgctgtcctgcccagtctgcaggcagacatcaatactgcccgagcaaggggtgtctgctctccagaacaactttttcatctctagtctgatggaagccatgcagcaggcacccgatggcgcgcacgatccggaagatccccatccactcagcgtggtggccggtcgcccgcttagctgccctaaccatgaagggaaaactatggaattttactgtgaggcatgtgagactgctatgtgcggagaatgcagagccggcgaacatagagagcatggcactgtcctcctcagggacgttgtcgaacagcataaggctgctctccagaggcaactggaagcagttagagggcggttgccgcagctgtcagccgctatcgccctggttggagggattagccaacagctgcaggagcgcaaggctgaggccctggctcaaataagtgccgctttcgaagacctcgaacaggccctccagcagcgaaagcaggcccttgtttccgacctcgagacaatatgtggagccaagcagaaggtcctacagtcacagctggacaccctgcgacaggggcaggagcacattggttcttcttgttcttttgcggagcaggcgctgcgcttgggtagcgcacccgaagtgctgctagtgcgtaaacacatgcgggaacgattagccgcattggctgcacaggctttccctgagcgccctcatgaaaatgcgcagctcgagctggtgctggaggtggacgggctgcgtcggtcagtattgaacctgggggccctgctgaccactagtgccactgctcacgagaccgtggccacaggtgagggccttaggcaggcattggtcggccaacctgcatccctcacagtgaccacgaaagataaggacggaaggctggtcaggaccggaagcgctgaattgcgggcggagataactggccccgacggtacaaggctacctgtgccagtcgtagaccataagaatggcacctacgagcttgtctacacggcgcgtacagagggtgagcttttgctgtcagtgctcctatacggccaaccagtccgcgggagcccctttagagtgcgagcactacgccccggagaccttcctcccagtccggatgacgtgaaacggcgggtgaagagtcccggtggtcccggcagccacgtgcgacaaaaggccgtgaggcggcccagctccatgtattcaactggcggaaagcggaaggacaaccctatagaggatgagctagtgtttagggtggggtctagaggccgggaaaagggagaattcacaaaccttcaaggcgtgagcgcagccagctctggaagaatcgtagtggccgactccaataaccaatgtattcaggttttctccaacgagggccagttcaagttcaggtttggtgtcaggggaaggtcacccgggcagctccagcgacccactggagttgctgtggacaccaacggggatatcatcgtggccgattacgataatagatgggtgagcattttcagcccagagggtaagtttaagacgaagatcggagcaggcaggttgatggggcccaaaggggtggccgtagataggaacgggcacattattgtggtggataacaaatcttgctgcgttttcacctttcaaccaaatggaaaattggtaggtcgcttcggtggacggggtgcaaccgaccgtcactttgcggggccgcatttcgtcgcagtcaacaacaaaaatgagattgtcgttacggactttcacaaccattccgtcaaggtttattctgcagatggagagtttctctttaagttcggatcacatggcgaagggaacggccagtttaatgccccaactggagtcgcagtcgacagcaacgggaatattattgacgtttgtcgcgcaagtccctatccatcttacacacctccccatccctgccagtccgccccccacccacccgcttggggtcagaacagtctcccacaggacaggtcaccgtcatcctgcttgcctaccacactctatacacttacggagaccgcaattccccatccgccatactag

SEQ ID NO: 138825 - DNA, 1878 bp, synthetic construct
  misc_feature 1..1878: note = Description of Artificial Sequence: Synthetic coding sequence
  source 1..1878: mol_type = other DNA
atgaaaaccatggagttctattgcgaggcctgcgaaaccgcaatgtgcggagaatgccgagctggagaacacagagaacatggtacagtgcttttgcgcgacgtcgttgaacaacacaaagcagcactccagcgccagttggaggccgtgcgcggcagactcccacagctcagcgctgctattgcccttgtcggtggaataagccaacaattgcaggagaggaaagccgaggccctagcccaaatttccgcggcatttgaggatctcgagcaggcacttcagcagcgcaagcaggcactagtgtcagaccttgaaacaatatgcggcgctaagcagaaggtgctccaatcacagctggacactttgcgccaggggcaggagcatatcggttccagctgcagctttgcagagcaggctttgagactgggcagcgcccctgaagtccttctagtgcgcaaacatatgagggaaagattggccgcgctcgctgcccaagcttttccagagagaccacatgaaaatgctcagctcgagcttgtactggaggtggacgggctgagaaggtctgtcttaaacctcggggcgctattaacaaccagtgctaccgcccacgaaaccgtagcaacaggggagggcctgcggcaggccctggtaggacaacccgcttcactgactgtgaccaccaaggacaaagacggtcgtctcgttaggaccggaagcgccgagctgcgggcagagataacaggcccagatggaacgcgtctgcccgtcccggttgtagaccacaagaacggaacttacgagctcgtttacaccgctcggactgaaggggaactacttttgtctgtgcttctctatgggcagcccgtccgcgggagccccttccgggtccgcgcgcttcgacctggtgacctacccccttcccctgacgatgtcaagagacgggtgaagtccccagggggacctggaagccacgtgcggcagaaagcagtccgccgcccctcttccatgtacagcactggtgggaagaggaaagataatcccattgaagatgaattggtgttccgcgtcggttctcgtggccgcgagaagggcgaattcactaatctccagggagtgtccgccgcaagttctggacggatagttgtggcagatagcaacaatcagtgcatccaagtattttccaatgaggggcagtttaagtttcggttcggggttcggggccgctccccagggcagttgcagcgtcccaccggcgtggcagtggatactaatggcgacattatagtggccgattacgacaatagatgggtgtccattttttctccggaaggcaagtttaaaactaagattggcgcaggccgacttatggggcccaaaggagttgctgtcgacaggaatggccacataatcgtcgtagataacaagtcttgctgcgtctttaccttccagccgaacgggaagttggtcggccgatttgggggtaggggagcaacagaccgccactttgccggcccccactttgtggccgtgaataacaagaatgaaatcgtcgtcacagatttccataatcactcagtcaaagtttatagcgcagatggcgagttcctgtttaaatttggcagccacggagaagggaacggccagttcaacgcccctaccggagtcgcagtggactccaatggaaacattatcgtggctgactggggcaactctagaatacaggtgttcgacagttccggttcttttctgagctacatcaataccagtgcagaacctctgtacggaccacagggcctcgcactgacgtctgacggacacgtggtcgtcgctgatgccggaaaccattgttttaaggcatatcgttatctccagtag

SEQ ID NO: 138826 - DNA, 2001 bp, synthetic construct
  misc_feature 1..2001: note = Description of Artificial Sequence: Synthetic coding sequence
  source 1..2001: mol_type = other DNA
atggccaaaagagaagatagtcctggtcctgaagtccagcctatggataaacaattcctggtgtgctcaatctgcctggaccggtaccaatgcccaaaagtgctcccgtgcctccatacattctgcgaacgctgcctgcagaactatatccctgcccagtccctgaccttatcctgcccagtttgcagacagacctcgatcctgccagagcagggcgttagcgccctgcagaataatttcttcattagttccctgatggaggctatgcaacaggctcctgacggcgcccatgacccggaagaccctcatccactctcagtggtagcaggtcgaccactctcttgccccaaccatgagggcaagactatggagttttattgtgaggcatgtgaaaccgccatgtgtggcgagtgccgggcaggagagcacagagagcacgggaccgtgctgctgagagacgtagtcgagcagcacaaagctgcattacagaggcaactcgaagccgtgaggggtcgtctgccccaattgagcgcggcgatcgctttggtcggcggtatttcccagcaactccaggagcgtaaagccgaggccttggcacagataagtgccgcctttgaagatctcgagcaggccctgcagcagcggaagcaggcacttgtgtcagatctggtcgacggactgaggaggagtgttctgaatctgggcgccctgctcaccacctctgctacagctcatgagacagtggccaccggcgagggccttcgacaagcgctcgtgggtcaacccgcctcgctcacggtgactactaaggacaaggacggacgccttgtacggactggctccgcagagttgagagccgaaattacagggcccgacggtacaagattgcctgtgcctgtcgtggaccacaaaaatggaacctacgaacttgtgtataccgcccgaacggaaggcgagcttctcttatctgtcctgctgtatgggcaacctgttcgggggtcccctttcagagtgcgggcacttcgcccaggcgatctaccccctagccctgacgacgtcaaaagaagagttaagagccccggaggacctggttctcacgtcaggcagaaggccgtacggcggccaagtagcatgtattcaaccggcggcaaaagaaaggataacccaatcgaagatgagctggtatttcgggtggggtcccggggccgggagaaaggcgagttcaccaacctgcaaggggtgtccgcagctagctccgggagaatcgtggtggccgacagcaacaatcagtgcatccaggtgttcagcaacgaaggccagttcaagtttagattcggcgtgcggggcagatcaccaggacagctgcagaggccgacaggagtagccgtcgatacaaatggcgacatcatagttgccgactatgataatcggtgggtctctattttttctcctgaaggtaagtttaaaactaaaattggtgctggaagattgatggggcctaagggcgtagctgtggatagaaatggccatattattgtcgtggataataagtcatgctgtgtattcacatttcagcccaacggtaaactagttgggcggttcggcggcaggggcgcgaccgataggcactttgcaggaccccatttcgtggccgtaaataacaagaatgagattgtagtcactgactttcacaatcactctgtgaaggtctactcagctgatggcgagtttctgttcaagtttggatctcacggagaaggcaatggacagtttaacgccccgaccggagttgctgtcgattccaatggcaacatcatcgttgccgactggggcaattcgaggattcaggtcttcgacagctccggctcattcctttcatatataaacacttcggcagagcctctctatggcccacagggccttgctctgacctctgacggacatgtggtcgtcgccgatgctggaaaccattgttttaaagcttaccggtacctgcagtag

SEQ ID NO: 138827 - DNA, 2226 bp, synthetic construct
  misc_feature 1..2226: note = Description of Artificial Sequence: Synthetic coding sequence
  source 1..2226: mol_type = other DNA
atggctaagcgcgaggatagccctggcccagaggtgcaaccaatggacaagcagtttctcgtgtgtagtatttgtctcgatcgttatcagtgcccaaaagtcttaccatgcttacataccttctgtgaacgctgcctccaaaactacatcccagcccagtcccttactctgagctgcccggtttgtagacagaccagtatcttgccagaacagggagttagcgcgttgcagaacaatttttttatttctagcctcatggaagctatgcagcaggcaccagacggggcacacgaccctgaggacccacaccccctctctgtcgtggcaggtcgcccgctcagctgtcccaaccacgagggtaagacgatggaattctattgcgaggcctgtgaaaccgcaatgtgcggtgagtgccgtgctggagagcaccgggaacacggaacagttctgttgagggacgtcgtagaacagcacaaagcagcactccagaggcagcttgaagccgtgagagggaggttgcctcaactctccgcagccatcgccctcgttggaggcatctctcagcagctgcaagaaagaaaggcagaggccctggcccagatcagtgctgctttcgaggacctcgagcaggcactgcagcaacgcaaacaggccctggtgtctgatctggaaacaatttgcggcgccaagcagaaagttctccagtcccagcttgacactctccggcaaggccaagagcatattggtagcagttgtagtttcgccgagcaggcgttgcgcctgggctcagctcccgaagttcttctcgtgcgaaagcacatgagagagcggctcgcagctctcgctgctcaggcctttccagagcgaccacatgaaaatgctcaattggagctggtccttgaggttgatgggctgaggcgtagtgtcctgaatctcggcgcgctgctgaccacatctgctacggcgcacgagactgtggccacaggggagggcctccgccaggccctcgtcggacagccggcctcactgaccgtgactaccaaagacaaagacggccggctagtgaggactgggagtgccgagctgcgcgccgaaataactgggccagacggaactaggctgccggtgcctgtggtggaccataagaatggaacctacgaactggtgtatacggctcgcactgagggcgagctgctgttatcggtgttactctacggccagcctgtacgtggttccccgttcagggtccgcgcgctgagacccggggatctgccgccaagcccggacgacgtcaagcgcagagtgaaaagcccaggaggtccaggctcacatgtgcgccaaaaggcagtgcggaggcccagttctatgtattccacagggggaaagcgtaaagacaaccccatcgaggatgagctcgtatttcgtgttggctcccgaggtagggaaaagggcgagtttaccaacctgcagggcgtatcggccgcttcctcgggacgtatcgtggttgccgactcaaacaaccagtgcatccaagtgttctctaatgagggccagtttaaatttcgcttcggagtgcgaggacgctcacccgggcagttgcagcgccctactggagtcgcggtggacacaaatggagacattatcgtcgccgactatgataacagatgggtgagcattttttctcctgagggtaagttcaagaccaagataggcgcaggcaggcttatgggacctaaaggcgtggccgtggaccgcaatgggcacattatagtcgtcgacaacaagtcatgttgtgtctttactttccagcctaatggaaaactcgtggggcggttcgggggacgaggcgccaccgatcggcacttcgctggacctcactttgtagcagttaataataagaacgaaatcgttgtcaccgatttccacaaccactccgttaaggtgtactccgcagacggagaattcctgtttaagtttggctcccacggggagggtaacggccagttcaacgcccccactggggtcgcagtggacagcaacggtaacatcattgtctgtcgcgcgtctccctacccgagctacaccccccctcatccgtgccagagcgcacctcaccccccggcatggggccaaaatagcctgcctcaggatcgttctccatccagttgtcttcccactaccctgtacacgctgacagaaactgctatcccacaccccccatattag

SEQ ID NO: 138828 - DNA, 1278 bp, synthetic construct
  misc_feature 1..1278: note = Description of Artificial Sequence: Synthetic coding sequence
  source 1..1278: mol_type = other DNA
atggcctctggccagttcgtcaacaagcttcaggaagaagtgatatgccccatatgtctagatattctgcagaaacctgtcacaatcgattgtggacacaacttctgcttgaagtgcatcacccaaataggagaaacttcatgcggattcttcaagtgccccttatgcaaaaccagtgtgaggaaaaacgctatccggtttaattccctgttgcggaatcttgtggaaaagatccaagccttgcaggcatctgaagtgcagtccaaacggaaggaggccacgtgtcctagacaccaagagatgtttcattacttttgcgaagatgatggaaaattcctctgttttgtgtgctgcgaatccaaggatcataagtcccacaacgttagcctcattgaagaggctgcccagaattaccaggggcagatccaggagcagattcaggtactgcagcaaaaggaaaaagaaacggtacaggtgaaagcccaaggcgtccacagggtggatgtgtttacagaccaggtcgagcatgagaaacagcggattctgaccgagttcgagttactgcatcaagtgctcgaagaggaaaaaaattttctgctgagcaggatctactggctaggtcatgaaggcactgaggccgggaaacactacgtggcctctactgagccccagctgaatgaccttaagaagctagtggattccttaaaaaccaagcagaacatgccacccagacagcttcttgaggatatcaaagtggtcctgtgcagaagcgaggaattccagttcctgaatcccacccccgtcccgcttgaactcgaaaagaaactgtcggaggctaagtctcgccatgattctattacaggctcactaaaaaagtttaaagatcagttacaagcggaccgtaagaaggacgagaatcgcttttttaagagcatgaataaaaacgacatgaagtcctggggcctgctccagaaaaataatcacaaaatgaacaaaacctcagagcctgggtcctcttccgctggcggccggaccacatcaggtccccctaaccaccacagtagcgcaccttctcactctctgttccgggccagcagcgctggaaaagtcacattccctgtttgtctgctcgccagctatgacgaaatctcaggccagggggccagtagtcaggatacgaagacattcgacgtagctctgagtgaggaacttcatgctgcgttgagtgagtggctcacggcaatacgcgcctggttttgtgaggtgcccagttcatag

SEQ ID NO: 138829 - DNA, 1278 bp, synthetic construct
  misc_feature 1..1278: note = Description of Artificial Sequence: Synthetic coding sequence
  source 1..1278: mol_type = other DNA
atggcctcgggacaatttgttaataagttgcaggaagaggtgatctgccccatttgcttggatattctgcagaaaccagtcacaattgattgtggccacaacttttgcctgaagtgcatcacccagatcggcgagacctcttgcggatttttcaaatgcccactctgcaagaccagcgtgagaaagaatgcaatccggtttaacagtctgctgaggaatttggtggagaaaatccaggccttacaggctagcgaggtgcagtctaaacgcaaggaagccacgtgtccaagacaccaggaaatgtttcattacttctgtgaggacgacggaaaattcctgtgcttcgtgtgtcgggaatcgaaggatcataagtcccacaacgtaagcctcatagaggaagcggctcagaactaccagggacagattcaggagcaaatccaggttttacagcaaaaagagaaggagacagtccaggttaaggcccagggggttcacagagtcgacgtcttcactgaccaggttgagcacgaaaaacagagaatattgacagagtttgagctgctacatcaggtacttgaggaagaaaagaactttcttctaagtaggatttattggctgggccacgaaggaactgaagctggcaagcactatgttgcgagcaccgagccacagttgaacgatctcaagaagctcgtggactcactgaaaaccaaacagaatatgcctccacgtcagctgctggaaccagcccagcctcacctcccccgctcagaggagttccagtttctcaacccaacgccggttcccctagagttggagaagaagttatcagaggcaaagagccggcatgactccattacaggaagcttaaagaaattcaaggatcagcttcaggccgatcgcaagaaggatgagaaccgatttttcaagtccatgaataaaaacgacatgaaaagctggggcttgttgcaaaagaataaccacaaaatgaacaagacgtctgagccaggatcgtcgagtgcaggcggaagaacaacatccgggcctccgaatcaccactcaagtgccccaagccattccctgttcagagcttcctctgccggaaaggttacgtttcctgtttgtctcctagctagttacgacgaaatcagcggacaaggggcctcttctcaggacaccaaaacgtttgatgtggccctttcagaagagctccacgcggccctgtcagagtggctgactgcaattagggcctggttctgcgaggtccccagttcttag

SEQ ID NO: 138830 - DNA, 1278 bp, synthetic construct
  misc_feature 1..1278: note = Description of Artificial Sequence: Synthetic coding sequence
  source 1..1278: mol_type = other DNA
atggcatctggccagtttgtaaataaactccaggaggaagtgatatgcccgatatgcctcgatatacttcagaagcccgttacgattgactgcgggcacaatttttgcctcaaatgcattacacaaatcggggagacatcctgtggattcttcaagtgccccttatgtaagacaagcgtaagaaagaacgctatccgtttcaatagtctattacggaacctggtggagaagatccaggctctccaagcttccgaagtgcagagcaagagaaaggaggccacatgccccagacaccaggaaatgttccactacttttgtgaggacgacggcaagttcctgtgcttcgtctgcagggaaagcaaggaccacaaatcccacaatgtcagcctgattgaagaagctgctcagaactatcaagggcagatccaggaacagattcaggtactgcagcaaaaggagaaggaaactgtacaagtcaaagcacagggggtgcacagagtggacgtgtttacagaccaggttgagcacgaaaaacagcgcatactgactgagtttgagttgcttcatcaagtcctcgaggaagagaaaaactttctgctgtctcgcatttattggctgggacatgagggcacagaagctggaaaacactacgtcgccagcactgagcctcagctgaacgacctgaaaaagctggttgactccctgaagactaagcagaacatgccccctagacagctgctcgaggacattaaggtggtcctttgcagatctgaggagtttcagttcctgaaccctacccccgtgcccctcgaactagaaaagaaactatccgaggccaagagcagacatgactcaatcacaggctccctcaagaaatttaaggaccaactgcaggccgaccggaaaaaagacgaaaaccgtttctttaaaagcatgaataaaaacgatatgaagtcttgggggctgttacaaaagaataatcacaagatgaacaaaacctcagaacccggcagctcgtccgcaggcggccgaactacctcagggccaccgaatcaccattcctctgctccatcgcattccctctttcgggcatctagcgccggaaaagtgacttttccagtgtgtctccttgcctcttatgacgagatatcggggcagggggcctctagccaggatactaaaaccttcgacgtggctttgagcgaagagctgcacgcagcactgtccgaatggctgacagccatcagggcctggttctgcgaggtgccctcctcttag

SEQ ID NO: 138831 - DNA, 747 bp, synthetic construct
  misc_feature 1..747: note = Description of Artificial Sequence: Synthetic coding sequence
  source 1..747: mol_type = other DNA
atggcctccgggcagttcgtgaacaagctgcaggaggaggttatttgccctatctgcctagacattctccagaaaccagtcactatcgattgcgggcataacttttgcttgaaatgtattacccagattggagagacatcatgtggctttttcaagtgccccctgtgtaagacctctgtccggaagaatgcgatccgctttaactctttactgcgcaacctggtggagaagatccaagccttacaggccagcgaggtccagtctaaaaggaaagaggccacctgtccacgtcaccaggagatgttccattacttttgtgaagacgacggcaagtttctctgtttcgtctgtcgggaatcaaaggatcacaagagtcacaatgtaagtctgattgaggaggccgcccagaattaccagggccagatccaggagcagatccaagtgctccagcaaaaggaaaaggaaaccgtccaggtgaaagcgcaaggtgtacaccgggtggatgtgtttactgaccaggtcgagcacgaaaagcagcggatccttacggagttcgaattattgcatcaggtgctggaggaagagaagaacttcctactgtcccgaatctattggctcggacacgaagggaccgaagctggaaaacattacgtagcatctacagagccacagttaaacgatctgaagaaattggtggattctttgaagaccaaacagaatatgcccccccgccagctccttgagtag

SEQ ID NO: 138832 - DNA, 1278 bp, synthetic construct
  misc_feature 1..1278: note = Description of Artificial Sequence: Synthetic coding sequence
  source 1..1278: mol_type = other DNA
atggcctccgggcaatttgtcaacaagcttcaggaggaggtcatttgcccaatttgtctcgacattctgcagaaacccgtgacaattgactgtggacataacttttgccttaagtgtataacccagattggcgagacctcctgcggcttctttaagtgcccattgtgcaagacttcagtgcggaaaaatgctatacggttcaattctctgttgcgcaacctggtggaaaagatccaggctctccaagccagtgaagttcaatccaagcggaaggaggcaacctgcccccggcatcaggagatgtttcattacttttgtgaggacgacgggaaattcttatgtttcgtgtgtcgcgaatcaaaagaccacaagtctcacaacgtctcgctgattgaagaagcagcccaaaattatcagggccagatccaggagcagatccaggtactgcaacagaaggaaaaagagactgtacaggtgaaagcacagggggtgcatcgagttgacgtcttcacagatcaagtcgagcatgagaagcagaggatcctgaccgaattcgagctgttgcatcaagtcctggaagaggagaagaatttcttactaagccgcatctactggcttggacatgaggggactgaggcgggaaaacattacgtggcaagcaccgaacctcagttaaacgatttaaaaaaactggtggattctctcaaaaccaaacaaaatatgcccccaagacagctgctggaggacataaaagtggtgctttgtcgatctgaggagttccagtttctaaacccaacccctgtaccccttgagcttgagaagaaactgtctgaggctaaatcccggcatgatagcatcacggggagccttaagaagtttaaggaccaactgcaggccgacaggaagaaggatgaaaacaggtttttcaagtctatgaataaaaatgatatgaagagctggggcttactccagaagaacaaccacaagatgaataagaccagcgagcccggatcgagttccgcgggcggacgaaccacaagtggacctccaaaccaccacagttctgcacccagtcattctctcttccgggcaagcagcgcaggaaaagtgacatttccagtttgcctccttgcctcgtatgatgagatatcaggtcagggggcgtcctctcaggacacaaagaccttcgacgtggcactgagtgaagagctccacgccgctttgagcgagtggctaactgccatccgggcctggttctgcaaggttccctcgtcctag

SEQ ID NO: 138833 - DNA, 1278 bp, synthetic construct
  misc_feature 1..1278: note = Description of Artificial Sequence: Synthetic coding sequence
  source 1..1278: mol_type = other DNA
atggcatcaggccaatttgtgaataaactgcaggaggaggtaatatgccctatttgtctagatatactgcagaaacccgtcacaatcgattgtggccacaatttctgcctgaaatgtattacacagattggggaaacatcctgcggcttctttaaatgtccactctgtaaaactagtgtgaggaaaaacgcgattcgatttaactcgctcctgaggaatttagtggaaaagatccaggcactgcaggcaagcgaggtccaatctaagaggaaggaggccacctgtccgaggcaccaagaaatgtttcattacttttgcgaagacgacggtaaatttctttgctttgtgtgtcgggagtctaaagatcacaagagccataacgtgtctctgatcgaagaagctgcccagaactatcagggtcagatccaggaacagatacaagtcctacagcagaaagagaaggagaccgtgcaggtgaaggcccagggcgtgcaccgcgtagatgtctttactgaccaggtggaacatgagaaacagcggattcttactgaattcgaattgctgcaccaggtccttgaggaggagaaaaatttcctgctatcccgaatctactggctgggccacgagggcaccgaagcgggcaagcactatgtggctagcacggagccacagctaaacgatcttaaaaagctggtggattccctgaagacaaagcaaaacatgcctccacggcaattgcttgaggatatcaaggtagtgctgtgcaggtcagaagaattccaatttctaaacccaacgcctgtcccactggagctggaaaagaagctgagtgaagcaaaatctcggcacgattctataaccggttctttgaagaagtttaaagatcagctgcaagcagaccgcaagaaagacgagaatcgttttttcaagagcatgaacaagaatgacatgaagagctgggggctgcttcagaagaacaatcacaaaatgaataaaacctccgagccaggcagttcatccgccggaggcaggaccacgtcaggaccgccaaatcaccattcttctgcgccatcccactcgctgttccgggcctcttcagctggcaaagtgaccttccccgtgtgtctactggccagttatgacgaaatctcaggacaaggagcgtcgtcccaagacaccaaaacctttgatgtcgccctatccgaagagctgcacgctgcactcagtgaatggctgacggcaatacgagcttggttttgtgaagtcccctcttcttag

SEQ ID NO: 138834 - DNA, 1278 bp, synthetic construct
  misc_feature 1..1278: note = Description of Artificial Sequence: Synthetic coding sequence
  source 1..1278: mol_type = other DNA
atggctagtggccaatttgttaataagctccaggaagaagtgatctgtcctatttgtcttgatatccttcaaaaacctgtcacaatcgactgtggtcacaacttttgccttaagtgtataactcagatcggcgaaacctcatgcgggttcttcaagtgccctctgtgcaaaacgtctgtacgcaaaaacgctatccggttcaacagcttactgagaaatcttgtggagaagattcaggcgctacaggcatccgaagttcagtctaaacgtaaggaggcaacatgccctcggcaccaggagatgttccactacttctgtgaagacgacggaaagttcctgtgtttcgtatgcagagagagtaaggaccacaaaagccacaacgtcagcctcatcgaggaggctgcccagaactatcagggccagatccaggagcaaatccaagttttacaacaaaaggagaaggagacagtccaggtgaaagctcagggggtccacagagttgacgttttcaccgaccaggttgagcatgaaaaacagagaatccttactgaattcgagttactccaccaagtgctggaagaggaaaaaaactttctgctctctagaatatactggttaggacacgaggggaccgaagctgggaagcactacgtggcgtccaccgaaccccagctaaacgacttaaaaaagctggtagacagcctcaaaacaaagcagaatatgccaccccggcaactcctcgaggacataaaagtcgtgctgtgtaggagcgaggaattccagtttcttaaccccactccagttcctttggaactggagaagaagctttccgaagctaaatcgcggcatgattctatcactggctctctaaaaaagtttaaggatcagctgcaggccgatcgaaaaaaagatgagaatcgctttttcaagtcaatgaacaaaaatgacatgaaaagttggggactcttgcaaaagaataatcacaagatgaacaagacaagcgagccaggatctagtagcgctggggggcgaaccacgtccggaccaccaaatcaccacagctccgctccatcccattccctcttcagggcctcttccgctggcaaagttaccttccccgtttgtttgcttgcctcttacgatgagatatctgggcaaggagcatctagccaagataccaaaaccttcgatgtggctttgtcagaggagctgcatgctgccctgtcggaatggttaacagccatacgcgcctggttctgcgaagtgccatcctcctag

SEQ ID NO: 138835 - DNA, 1278 bp, synthetic construct
  misc_feature 1..1278: note = Description of Artificial Sequence: Synthetic coding sequence
  source 1..1278: mol_type = other DNA
atggcctctggacagtttgtgaacaagctgcaggaagaagtgatctgcccaatctgcctggatattctgcagaaacccgtgacaattgactgtggacacaatttctgccttaagtgcatcactcagatcggggaaacaagttgcggattttttaaatgcccattatgcaagacatctgtgcggaaaaacgctatccgattcaacagcctgttgagaaatcttgtcgagaaaatacaggctttgcaggcctcagaggtgcagtctaagcggaaagaggccacttgccccaggcaccaggagatgttccattacttttgtgaggacgacggaaaattcctttgcttcgtgtgccgcgagtcaaaggaccacaagagtcacaacgtgtctctgatcgaagaagctgcacagaattaccagggccagatccaggaacagatccaggttctccagcaaaaggaaaaggaaacggtccaggtgaaggcacagggggtgcaccgagtggatgtttttaccgaccaagttgagcacgaaaagcagaggatcctgacagaatttgagctgctacatcaggtgttagaggaagagaagaacttcctgctctctagaatctactggttagggcatgagggtactgaggcggggaagcattatgtggccagtactgaaccgcagctgaacgatctgaaaaagttagtggactccctcaaaaccaaacagaacatgccccctcgtcaactgctcgaagatatcaaggtggtactgtgcaggtccgaggaattccagtttctgaaccctactcccgtgcccctggagctggagaagaagctgtccgaggccaaaagccgccatgacagtattacaggatccctcaaaaagtttaaggatcaactgcaggcggatcgaaaaaaggatgagaaccgcttcttcaaaagtatgaataaaaatgatatgaagagttggggtctgctccagaaaaacaatcacaagatgaacaagacctcagagccaggcagcagctccgctggtggcagaactacatccggcccaccaaatcaccattcatccgcccccagtcactcattgtttagagcctcttccgccgggaaggtaacattcccggtgtgtctgttggcttcgtacgatgagatctctggacaaggtgcctccagtcaggataccaagacattcgatgtcgccctttcagaagagctccacgccgctctcagcgagtggctgaccgccatacgggcctggttttgcgaggtccccagctcttag

SEQ ID NO: 138836 - DNA, 1278 bp, synthetic construct
  misc_feature 1..1278: note = Description of Artificial Sequence: Synthetic coding sequence
  source 1..1278: mol_type = other DNA
atggccagtggccaatttgttaataaactgcaagaagaagtgatttgccctatctgcctggatatcctccagaaacctgtgacaatcgattgtggccacaacttttgcctcaagtgtattacgcagatcggggaaacctcctgtggtttttttaagtgcccattgtgtaaaacgtctgtgcgcaagaacgcgatccgctttaactctctcctccgcaacttagtcgagaagattcaggcactgcaggcctccgaggtgcagagcaagcgcaaggaggccacctgcccaagacatcaggagatgttccactacttctgtgaggacgatggcaaattcctttgtttcgtgtgtcgtgagtcaaaggaccataaatcgcataacgtgtccctgatcgaggaagcggctcagaactaccaaggacagatacaagaacagattcaagtgctccagcagaaagagaaagagaccgtccaggtgaaagctcagggagtacacagggtcgacgtgtttacagaccaggtggaacatgagaaacaacgaattttgacagaatttgagcttctacatcaggtgttggaagaggaaaagaacttccttctctctcgcatctactggctcgggcacgagggaacagaggctggtaagcattacgtggcatcgaccgaaccccagctcaacgacttgaagaaactgatcgattcactgaaaacaaaacagaacatgccccctcggcagcttctggaagatatcaaggtggtgctttgccgaagcgaagaatttcagtttctgaatcctactccggtgccactcgagctggaaaagaagctgtctgaagcgaagtcccgccacgactcaataaccggctccctgaaaaagttcaaggaccagctccaggctgatcgcaaaaaagatgaaaaccgctttttcaaatcgatgaacaagaatgatatgaaaagctggggcctccttcagaaaaataaccataagatgaacaagacctccgagcccggcagttctagcgccggcggtcgaaccactagtggcccacctaaccaccactcttccgccccttctcacagcctgtttcgcgcctccagcgccgggaaagtgactttccccgtctgcttgctggcaagctacgacgagatcagcggccaaggcgccagctctcaggacaccaagacctttgatgtcgccctatccgaagagctgcacgccgctcttagcgagtggctcacagcaatccgagcttggttttgtaaggttcctagttcctag

SEQ ID NO: 138837 - DNA, 1278 bp, synthetic construct
  misc_feature 1..1278: note = Description of Artificial Sequence: Synthetic coding sequence
  source 1..1278: mol_type = other DNA
atggcgtctggtcagttcgtgaataaacttcaggaagaagtgatctgtccaatctgccttgacatccttcagaaacctgtgaccattgattgcgggcacaacttctgcctgaaatgtatcacgcaaatcggggaaactagttgtgggttctttaaatgccccctgtgcaaaacaagcgtacgcaaaaacgcgatccgcttcaatagcctgctgcggaatctggtggaaaagattcaagccctgcaagcctcagaggtccagtctaagcgcaaagaggccacctgtccacggcaccaggaaatgtttcattacttctgcgaagatgatggaaaattcctgtgcttcgtgtgcagggagagtaaggaccataagtcacataacgtatcactgattgaggaagccgctcagaactatcagggccagatccaggagcagatacaggtattacagcagaaggagaaggaaacggttcaggttaaggcccagggggtgcaccgggtggacgtttttacagaccaggtcgaacacgaaaaacagcgaatcctgacagagttcgagcttctccaccaagtcctcgaggaagagaaaaattttttactctcgcgtatttattggttaggccacgaagggactgaagctggcaaacactacgtcgcctccaccgaaccccaactgaatgatcttaagaagctcgtggatagcctcaaaacaaaacaaaatatgcctccaagacagctcctggaagatatcaaagtagtgctttgcagaagcgaagaattccagttcctcaaccccacgcccgttccactggaactggagaagaagctgtccgaagcgaaatctcgccacgattcaataactggcagcctgaaaaagttcaaggatcagctgcaggccgatagaaaaaaagatgagaatcgcttcttcaaaagcatgaataaaaatgatatgaaatcatgggggctccttcagaagaataaccataagatgaataaaacctccgagccaggctcttcctccgccggggggagaaccaccagtgggccccctaaccaccacagcagcgcgccgagccatagtcttttccgggcctctagtgctggcaaggtaactttccctgtctgtctgctggcatcctacgacgaaatatctggtcagggcgcatcaagtcaggatacgaagacctttgacgtggccctgagcgaagagttgcacgcagcactgagcgagtggctgaccgccatccgggcttggttttgtgaagtgccatcttcttag

SEQ ID NO: 138838 - DNA, 1278 bp, synthetic construct
  misc_feature 1..1278: note = Description of Artificial Sequence: Synthetic coding sequence
  source 1..1278: mol_type = other DNA
atggcctctggtcaattcgtgaataaactgcaggaagaagtgatctgtccgatatgcctggacatcctgcaaaagcccgtgactatcgactgtggacataatttctgtttaaagtgtatcacccagattggcgagacatcatgcggcttctttaagtgccctctatgtaaaaccagcgtgagaaagaacgctatccgttttaacagcttattacgtaacttggttgagaaaatacaggcacttcaagccagcgaagtgcagagtaagcgaaaggaggcaacttgtcctagacatcaagagatgttccactacttctgcgaggacgacggcaagttcctgtgcttcgtctgccgcgagagcaaggatcataagtcccacaacgtctcactgattgaggaggccgcacagaactatcaaggacaaatccaggagcagatccaagtgcttcagcagaaggaaaaagaaactgtgcaggttaaagcccagggggttcaccgtgtggatgtcttcaccgatcaagtggagcatgaaaaacaaagaattctgaccgagtttgaactccttcatcaggtgttggaagaggaaaaaaactttttgctgtcgaggatttactggttgggacacgaaggtaccgaggccggcaaacactatgtagcgagcacggagccacagttaaacgatctcaagaagctggtcgatagcctcaaaacaaaacagaatatgcctcccaggcaactcctggagcccgctcagccccacctgccacgcagcgaggagtttcagtttctcaatcctacacccgtgccactggagctcgaaaaaaagctcagcgaagcaaagtcaagacacgactctattactgggtctctgaaaaaatttaaggaccaactgcaggccgaccgtaaaaaggacgaaaaccgattctttaagtccatgaataagaacgacatgaagtcctggggcttactacaaaaaaataatcacaagatgaataagacatccgaacccgggtctagttcagccggcggcaggactaccagcgggccgcccaatcaccacagcagcgccccctcccactccctctttcgggctagctcagccggtaaggtgacgttccctgtttgcctgctggcatcttatgatgagatctccgggcagggggcctctagtcaggataccaagacatttgatgtggccctgagtgaggaactgcacgctgccctctctgaatggctgactgccatacgtgcttggttttgtgaggtccccagcagctag

SEQ ID NO: 138839 - DNA, 1278 bp, synthetic construct
  misc_feature 1..1278: note = Description of Artificial Sequence: Synthetic coding sequence
  source 1..1278: mol_type = other DNA
atggcctctgggcaatttgtaaataagcttcaggaggaagtcatctgccctatttgcctagatattttacagaaacccgtgacaattgattgcggtcacaatttctgcttgaagtgtattacacagataggcgagacttcttgtgggttcttcaagtgccctctctgcaagactagcgtcaggaaaaacgccattagatttaatagtttgctgagaaacttagtggaaaaaatccaagccctgcaagcaagcgaggtgcaaagtaaacgcaaagaagctacttgtccccgtcaccaggaaatgtttcactacttctgtgaagacgatggtaagtttctttgttttgtttgtagggagagcaaggaccataaaagccataatgtgagtttaatcgaggaagccgcgcaaaattatcagggacagattcaggaacagatccaggtgcttcagcagaaggaaaaggaaaccgtgcaggtcaaagcacagggagtacacagggtcgatgtcttcaccgatcaagttgagcacgagaagcagaggattctgaccgagttcgaacttctacatcaggtgcttgaggaggaaaaaaacttcctgctctccaggatttactggctgggccatgaaggtacagaggcgggcaagcattacgtggcttcaaccgagccccagctcaacgatcttaaaaagcttgtggatagcttgaagacgaagcagaacatgcctcctaggcaactcctcgaagacattaaggtggtcttgtgccggagcgaggagtttcagttcctgaatccgacccctgtgccactagagttggaaaaaaagcttagtgaagcaaaatctagacatgacagcatcaccggctccctaaagaaattcaaggatcagctccaggcagatcggaagaaagacgagaacagattctttaagagtatgaacaaaaacgatatgaagtcctggggcctcttacaaaagaataatcacaaaatgaacaagacatccgagccgggctccagttccgcgggcggccggaccacgtcggggccaccaaaccaccatagtagcgcacccagccattcactgtttagggcttcttccgcaggaaaggtgaccttccctgtctgcctactggcctcatacgatgaaattagtggccagggcgcaagttcccaggacacgaagaccttcgacgtagccttgtccgaagagctccatgcagcactatcagaatggctgactgctataagagcatggttttgtaaagttccatcctcctag

SEQ ID NO: 138840 - DNA, 1278 bp, synthetic construct
  misc_feature 1..1278: note = Description of Artificial Sequence: Synthetic coding sequence
  source 1..1278: mol_type = other DNA
atggcctctgggcagtttgtgaataagctacaggaagaagtgatctgtcctatttgtctggacatcctccagaaacctgtcaccatcgattgtggccataatttttgccttaaatgtataacgcagatcggagaaacttcatgcggcttcttcaaatgtccactttgcaaaacctcagtgcggaagaatgctattcggttcaactcactgctgagaaatctcgtggaaaaaattcaagccctgcaagcctccgaggtgcaatcaaagaggaaagaagccacctgcccacgccatcaggagatgtttcactacttctgtgaggacgacgggaagtttctgtgtttcgtctgtcgcgagagtaaagaccataaatctcataatgtttctcttattgaggaggcagcccagaattaccagggccagattcaggagcagatacaagtcttgcagcagaaggaaaaggaaaccgtgcaggttaaggcgcagggagtccaccgcgtggacgtgtttacggaccaggtggaacatgaaaaacagcgcattttaaccgaattcgagctgcttcaccaggttttggaggaagagaagaatttcttattgagtcgaatctactggcttggacatgagggaacagaggctggcaagcactatgtggcctcaactgaaccgcaactgaatgatcttaaaaagctggtagacagcctgaagacgaagcagaacatgccgccacgtcagctcctggaaccggcacagccccatcttcccagatcagaggagttccagttccttaacccgacaccggtccccctcgagctggaaaagaagctgtccgaagccaagagcaggcacgatagcataactggcagtctgaaaaaattcaaagatcagctccaggcggatcgcaagaaggatgagaacagattcttcaaatcaatgaataaaaacgacatgaaatcctgggggcttctccagaagaacaaccacaagatgaataagacgagcgaacccggaagtagcagcgctgggggcagaacaactagcggcccccctaaccaccacagtagcgccccttcccactctctttttcgcgcttcttctgcggggaaagttaccttccccgtgtgcctgttagcctcttatgacgagattagtggccagggagctagcagtcaagatactaagactttcgacgtggccctgtccgaggaattgcacgccgctttatctgagtggctgaccgccatccgcgcatggttctgcgaagttcccagttcatag

SEQ ID NO: 138841 - DNA, 1278 bp, synthetic construct
  misc_feature 1..1278: note = Description of Artificial Sequence: Synthetic coding sequence
  source 1..1278: mol_type = other DNA
atggcgagcggccaatttgtgaacaaactgcaggaagaagttatctgtccaatttgcctggatatcctgcagaaacctgtcacaattgattgtggacacaacttttgtcttaagtgtattacacagattggggagacttcctgtggcttttttaagtgcccactttgcaagacctcggtcagaaaaaacgctataagattcaactcgttgctccggaatctcgttgagaaaattcaggccctgcaggcaagcgaggttcaaagcaagcggaaggaggcaacgtgcccgcggcaccaggaaatgttccattatttctgcgaagatgatggaaagtttctttgctttgtgtgcagagagtcgaaagaccacaaatcccacaatgtgtccttgatagaagaggctgcgcaaaactaccaggggcaaatacaagaacagatccaggtgttgcaacagaaggagaaagaaactgtgcaggtgaaagctcaaggagtccaccgcgtggatgtgttcactgatcaggtcgagcatgaaaaacaacggatcttgaccgagttcgagctgttacaccaggtccttgaagaagaaaaaaacttcttactatctcgaatttattggctgggacacgagggtaccgaagctggcaagcattacgtcgcaagcaccgagccacagctcaatgatctaaaaaaattgatcgattccctgaagaccaagcaaaatatgccaccacgacaactcttggaacccgcccagcctcacctgcctagatctgaggagttccaatttttgaacccaacacccgttcccctggagctggaaaaaaagctatcagaggccaaatctcgccacgactccatcaccggctcgctgaaaaagttcaaagatcagttgcaggcagaccgcaaaaaggacgagaaccgcttcttcaagtctatgaacaagaacgatatgaagtcctggggattgttgcaaaaaaataaccataagatgaataagacctcggagccaggctcgtcaagcgccggaggtcggacaacgagcgggcctccgaatcatcactcgagtgccccatctcactccctatttagggcctcctccgccgggaaagttaccttccccgtttgtctgctggcttcgtacgacgaaattagcggccagggggccagcagccaagataccaagaccttcgatgtggctctatcagaggaattgcatgccgccctgagcgaatggctgacagcaatccgggcttggttttgcaaggtcccaagcagctag

SEQ ID NO: 138842 - DNA, 1278 bp, synthetic construct
  misc_feature 1..1278: note = Description of Artificial Sequence: Synthetic coding sequence
  source 1..1278: mol_type = other DNA
atggcatccggccagttcgtcaacaagctgcaagaagaggtgatttgtcccatctgcctcgatattctgcaaaagcctgttacaatcgactgcggacacaatttttgtctaaagtgtatcactcaaatcggcgagacaagttgcgggttctttaagtgccccctctgtaagacctccgtgagaaagaacgctatccgctttaacagcctccttcgtaacctggtggagaaaatccaggcactccaggcgagcgaggttcagagcaagaggaaagaggccacctgcccccgtcaccaggagatgttccattatttttgtgaggatgacggcaaatttctatgcttcgtatgctgtgagtccaaagaccataaaagtcataacgtgtccttaatcgaagaggccgcccagaactatcaaggccagattcaggagcagattcaggtactgcagcaaaaggaaaaagaaaccgtccaagtcaaggcacagggggtgcatcgggttgatgtgttcaccgaccaggtcgaacacgagaagcaacgcattctgaccgaattcgagctcctgcaccaggtgctggaggaagagaaaaatttcttgttgtcccgtatttactggctcggccacgaaggaacagaagcaggtaagcactacgtggcgtccacggagccacaactcaacgacctcaagaagcttgtggacagcctgaaaacgaagcagaacatgccccctcgacagctgctagaacccgcacagcctcatctcccgagatccgaggagtttcagtttctcaacccaactccagtgcctttggagctggagaaaaagctgtcagaggctaagtccagacacgacagcatcacggggtccctgaaaaagtttaaagatcagcttcaggctgacagaaaaaaggacgagaatagatttttcaagagcatgaataagaacgatatgaagtcatggggcttgctgcagaaaaacaatcacaagatgaacaaaaccagcgaaccaggcagctcctccgctggagggagaactactagtggacctccgaatcatcactccagtgcgccgtcccacagcctgttcagggcttctagtgcgggcaaggtgacattcccggtgtgtctgcttgcctcatacgacgaaatttctgggcagggcgcatctagccaggatactaaaaccttcgatgtggctctctccgaggaactccacgccgctcttagtgagtggctaaccgcgatcagggcctggttttgtgaagtgcccagttcctag

SEQ ID NO: 138843 - DNA, 1278 bp, synthetic construct
  misc_feature 1..1278: note = Description of Artificial Sequence: Synthetic coding sequence
  source 1..1278: mol_type = other DNA
atggcgagtggccagtttgtcaataagctgcaggaagaggtgatctgcccaatctgcttagatattctgcagaaacccgtgacaatcgactgcggacacaatttctgccttaagtgcattacacagattggtgagacctcttgcggcttctttaaatgccctctctgcaaaacttccgtgagaaaaaatgccataagattcaactccctgttgaggaacttagtggaaaaaatacaggctttgcaagcctcagaggtgcagtcaaagagaaaagaagcgacatgtccaagacaccaggaaatgttccattatttttgtgaggacgatggcaagtttctgtgttttgtgtgtagagaatccaaagaccacaaatctcacaacgtgtcgctcattgaggaagctgcccagaattatcagggacagattcaggagcaaatacaggtgttacagcagaaggagaaagagactgtacaggtgaaagctcagggggtgcacagggtcgacgttttcaccgatcaggtcgaacatgagaagcagagaatccttacagagttcgagctgctgcatcaggtcttagaagaagagaagaacttcctgctatcacgtatttattggctgggtcacgaggggaccgaggctggaaagcattacgttgctagtactgagccacagttaaacgacctgaagaagttagttgactctctcaaaaccaaacagaacatgcctcctagacagttgctagaggatatcaaggtagttctgtgcagaagcgaggagtttcagttcttgaaccctactcctgtgccgctcgaattagagaagaagctctctgaagctaagtcgaggcacgactcgatcactggcagcttaaagaaattcaaagaccaactacaagccgataggaaaaaggatgagaatagatttttcaaaagtatgaacaaaaatgatatgaagagttggggcctgctacagaaaaataatcataagatgaacaagacttccgaacccggttctagtagcgctggaggcagaaccacctccggtccccccaatcaccacagcagtgcaccgtctcattcattgtttagggcctctagcgccgggaaagtgactttcccagtctgcttgttagcttcttatgacgaaatatcaggtcagggagccagctcccaagatacgaaaaccttcgacgtggccctgagcgaggagttacatgctgccctgtccgagtggctcacagccatccgcgcctggttctgcgaagtgccctcctcatag

SEQ ID NO: 138844 - DNA, 1278 bp, synthetic construct
  misc_feature 1..1278: note = Description of Artificial Sequence: Synthetic coding sequence
  source 1..1278: mol_type = other DNA
atggcgtctggacaattcgtgaacaagctccaggaagaggttatttgtcctatttgcttagatatcctgcaaaagccggtgactattgactgcggtcataatttttgtcttaaatgcataacccagataggggaaacttcctgcggattcttcaagtgcccactgtgcaagacctctgtgcgcaagaatgccattcggtttaacagcctgttacgaaatctagtggaaaagattcaggcgctgcaggccagcgaggtgcagtcaaaacgaaaggaggccacctgccccagacaccaggaaatgttccattatttttgtgaagatgatggaaagttcctttgctttgtgtgccgggaaagcaaagatcacaagtctcataatgtctctctgattgaggaggccgcccagaactaccaaggccagattcaggaacagatacaggttttacaacagaaagagaaggagactgtgcaggtgaaagcccagggagtgcatcgagtggatgtgttcaccgaccaagttgagcacgagaagcagcggatcctgacagagttcgagctgctgcatcaggtgttggaggaggagaagaattttctgctcagcaggatctactggcttggacacgagggtactgaggccggtaagcactatgtcgccagcacagaacctcagctgaacgatctcaagaaactggtggactcgctgaagacgaaacaaaacatgcctccaagacagctgctggagcccgctcagccccaccttccacggtctgaggaatttcagttcctgaaccctacgccagttccacttgagctggagaaaaaattgtcagaagcaaaaagccgtcacgattctattaccggaagcctaaaaaaattcaaagaccagcttcaggctgatagaaaaaaagatgagaaccgatttttcaaatcaatgaacaagaacgacatgaaatcatggggactgcttcaaaaaaataaccacaaaatgaacaagacatccgagccagggtctagctccgctggaggcaggaccacctctgggcctcctaatcaccatagctcggccccttctcacagccttttccgggcaagcagcgcaggaaaggtgaccttccccgtttgcttgctagcgtcttatgacgagatcagcggccagggcgccagttctcaagacaccaagacctttgacgtcgccctgagtgaagaattacatgctgccctatccgagtggctgaccgctattcgggcgtggttctgtgaagtgccatctagctag

SEQ ID NO: 138845 - DNA, 1278 bp, synthetic construct
  misc_feature 1..1278: note = Description of Artificial Sequence: Synthetic coding sequence
  source 1..1278: mol_type = other DNA
atggccagtggtcaattcgtgaacaagctccaagaggaagtgatttgcccaatatgtctggacatcttgcaaaagccagtgaccattgactgtgggcacaacttttgcttgaagtgtatcacacaaatcggcgagacttcctgcggcttctttaaatgccctctttgtaaaacctctgtacgaaagaatgcaatccgttttaactccttactgcggaatctcgtcgagaagattcaggcactgcaggcctctgaagtgcaatctaaacggaaggaggctacctgtcctaggcatcaggagatgttccactacttttgtgaagatgacggcaaattcctgtgtttcgtgtgctgcgaatcaaaggatcataaatcacacaacgtatcccttatcgaggaggcggcccagaactatcaaggccaaattcaggaacagattcaggtactgcagcagaaggagaaggagactgtgcaggtgaaagcccagggggttcacagagtggacgtgttcacagatcaagtggagcacgaaaaacagcggatactgaccgagttcgagttgctgcatcaagtgctagaagaagagaagaattttctgctctcgcgcatctactggctaggccatgaaggtacagaggcaggcaaacattatgttgcttcgactgagccacagcttaatgatctgaagaaactggtggatagtttgaagacgaagcagaatatgccgcccagacagctacttgaggatatcaaggtcgtgttgtgccggtctgaagaattccagttcctcaatcctactcctgtgcctctggaactggaaaagaaactcagcgaggccaaaagccgccacgatagcatcaccggtagcctgaaaaagttcaaggaccaattgcaggcagaccggaagaaggacgagaataggttcttcaagagtatgaataagaacgatatgaagagctgggggctcctgcagaagaacaatcataagatgaacaagacatctgaaccggggtcaagtagcgcaggtggccgaacgacatcaggcccgcccaaccatcacagcagtgcccccagccacagcttgtttcgcgcttcaagcgctggcaaggtcactttccctgtatgtctgcttgccagttatgacgagattagcggccagggagcaagttcccaggatacaaagacatttgatgttgctctgtctgaggagctgcacgccgccctctcagaatggctcaccgcaatcagggcatggttttgtgaggtgccatcatcctag

SEQ ID NO: 138846 - DNA, 1278 bp, synthetic construct
  misc_feature 1..1278: note = Description of Artificial Sequence: Synthetic coding sequence
  source 1..1278: mol_type = other DNA
atggccagcggccagttcgtaaataagctgcaagaagaggttatttgcccaatatgtcttgatattctccagaaaccagtaaccatcgattgcggacacaatttctgcctaaagtgcattacgcagataggcgagacctcttgtgggttcttcaagtgcccactatgtaaaacctctgtgagaaagaatgctattcggttcaactcactgctaagaaacctggtagaaaaaatacaggctttgcaggcaagtgaggtgcaatcaaagcgcaaggaggcgacatgtccccgacatcaggaaatgttccactacttttgtgaggacgacggcaagttcctgtgttttgtgtgtagggaatccaaggaccataagagtcacaacgtgagtctaatagaggaagctgctcagaactaccagggccagattcaggagcagattcaagtgctgcaacagaaggaaaaagagaccgtgcaagttaaggcgcagggcgtgcacagagttgatgtctttactgaccaggtggagcatgaaaagcagcgcatcttaaccgagttcgaactcttgcatcaagtgcttgaagaggaaaagaatttcctccttagtcgcatctattggctgggccatgagggaacagaagctggtaaacattacgtggccagcacagaacctcaactgaatgacttgaagaagctgattgattcgcttaagaccaaacagaacatgccgccccgccagctgctcgaagatataaaggtcgtgctgtgcagatctgaggagttccagttcttgaatccaactcctgtccctctggaactggagaagaaattgtcagaggctaagtcaaggcatgactcaatcacggggtctctgaaaaaatttaaagaccagctgcaggccgatcgaaaaaaggacgagaatcggtttttcaagtctatgaataagaatgatatgaaatcatggggactcctgcagaagaacaaccacaaaatgaataaaacctccgagcccgggagctcttcagccggcggtcgcactacaagcggacctcccaaccaccatagctccgcacctagccatagtcttttcagagctagttctgcagggaaggtaacctttcctgtgtgtctactcgcgtcttacgatgagatttccggccagggagcctcttcgcaggacacgaagacattcgacgtcgctttatcagaggagctccacgcggcactcagcgaatggctcaccgcaattcgggcttggttttgcaaggtaccatcctcgtag

SEQ ID NO: 138847 - DNA, 1278 bp, synthetic construct
  misc_feature 1..1278: note = Description of Artificial Sequence: Synthetic coding sequence
  source 1..1278: mol_type = other DNA
atggcgtccggacagtttgtgaacaaactgcaggaagaggtgatttgccccatctgcctggatatactccagaaacctgtgacaatcgattgtggccacaatttttgcctcaagtgtatcacccagatcggcgagaccagttgcggtttcttcaagtgccccctgtgtaagaccagtgtccggaagaatgcaatcaggttcaacagtttgctgcgtaacttagtggagaagatccaggcactccaggcttcagaggttcaatcaaagcgtaaagaggcaacttgtccccggcaccaggagatgtttcattatttctgtgaggatgacggaaaatttctgtgcttcgtgtgcagagagtccaaagatcataagagtcacaacgtgtccctgatcgaggaggcagcccagaattatcaggggcagatccaagagcagatacaggtgttgcagcagaaagagaaggagaccgtccaggtgaaggcacagggcgtgcatagggtggacgtattcaccgatcaagttgagcacgagaagcaacgtattctgaccgagttcgagctgctgcaccaggtgctggaagaggagaaaaattttctcttatcacggatttattggcttggacacgaagggaccgaagccggcaagcactatgtggctagtacagagccccagctgaacgacctgaaaaagctcgtcgatagtctgaaaactaagcaaaacatgccaccacggcaactgttggagcctgctcagcctcatttacccaggtccgaggagttccaattccttaaccctacgcccgtgccactcgagctggagaagaaactatccgaggccaagagcagacacgactcaattacgggaagcctgaagaagttcaaggaccagttacaggcagacaggaaaaaagatgagaaccggttcttcaagagcatgaacaaaaatgacatgaaatcttgggggctactccaaaaaaacaaccataagatgaataaaacaagcgagcccgggtcctccagcgcaggtggcaggaccacttctggcccaccaaaccaccattccagcgcaccatctcacagcttattcagggcaagcagcgccggaaaagtgacctttcccgtctgtctgctcgcaagctatgacgagatatcaggccagggcgcaagttcccaggacacaaaaacatttgatgttgcccttagcgaggagctccatgcagctctgtccgaatggctgacggccatccgggcatggttctgtaaggttccctcctcttag

SEQ ID NO: 138848 - DNA, 1278 bp, synthetic construct
  misc_feature 1..1278: note = Description of Artificial Sequence: Synthetic coding sequence
  source 1..1278: mol_type = other DNA
atggccagcgggcagtttgtcaacaagcttcaggaagaagtcatctgccctatttgtcttgatatcctgcagaaacccgtcaccattgattgtgggcataatttttgtttgaaatgcataactcagataggagagacctcctgcggtttttttaaatgtccattgtgcaaaacatcagtgcgcaagaatgccatcagatttaattcactcctccggaatctcgttgaaaagatacaggctctgcaggctagcgaggtgcaaagcaagcgtaaggaggccacttgcccacgccaccaggagatgtttcactatttctgcgaagacgatggaaaatttctgtgtttcgtatgcagggaaagcaaggatcacaaatcacataacgtcagtctcattgaagaagccgcccagaattaccagggccaaatccaggagcaaattcaggtgctgcaacagaaagagaaggaaactgtccaagtgaaagcccaaggcgtccaccgggtcgacgttttcaccgaccaggtggagcacgagaaacaacgcatactgactgaattcgagctcctgcaccaggttctggaggaagaaaagaacttccttctatctcgtatttactggctcggacatgagggcacagaagctgggaagcactacgtagccagcactgagcctcagctcaatgacctaaagaaactcgttgacagcctgaaaactaaacagaacatgcccccgaggcagctgctcgaagacatcaaggtcgtcctgtgtcgatctgaggagtttcagtttttgaacccaacacccgtcccactcgaactggagaagaagctgtcagaagcaaaaagtaggcacgatagtatcacagggtctctcaagaagttcaaggaccaattacaggccgatcgcaagaaagacgagaacaggttcttcaaatccatgaacaaaaacgacatgaaatcttggggactcctgcagaagaacaatcacaagatgaacaagacctccgaacctggttctagcagcgcaggtggcaggaccaccagcggcccccccaatcaccatagcagtgcaccctcccattccttgttccgggcttcaagcgccggaaaagtgaccttcccagtgtgtctactggctagctatgacgagatctccgggcagggagccagctctcaggacactaagacatttgatgttgcactctcagaggagttacacgctgcactatccgagtggttaaccgctatccgggcgtggttctgtgaggtcccctccagctag

SEQ ID NO: 138849 - DNA, 1278 bp, synthetic construct
  misc_feature 1..1278: note = Description of Artificial Sequence: Synthetic coding sequence
  source 1..1278: mol_type = other DNA
atggcctctggtcagttcgtgaacaaactacaggaggaagtgatttgcccaatttgtttagacatcctccagaagcctgtgacaatcgactgcggacataatttttgtctaaagtgtataactcaaatcggcgagacatcgtgcgggttcttcaagtgtcctttgtgtaagacttccgttcggaagaacgccatcagatttaattccctgctgaggaatctggtggagaagatacaggctctgcaagcctctgaagtgcagtcaaagaggaaagaagccacctgcccaaggcaccaggagatgttccactatttctgtgaggatgacgggaaattcctgtgtttcgtgtgtcgggagtccaaagatcataagagccataacgtcagccttatcgaagaagctgcacagaactatcagggccagatccaggagcaaatccaggtgctacagcagaaagaaaaggagacagtacaggtgaaagcccagggcgtgcatagggtggatgtcttcacagaccaggtggaacatgagaaacaaaggatcctaactgagttcgaactactacatcaggtcctcgaggaggaaaaaaattttcttttgagtcgcatttattggctgggtcacgagggaactgaggcagggaagcattatgtcgctagcactgaaccacagctcaatgacctgaagaagctggtggattcgcttaagactaagcagaacatgcctcccaggcagctgctggaggatattaaggttgtgctttgtagaagtgaagaattccagttcctgaacccaacccctgttcccctggaactggagaagaaactttccgaagccaaatctcgtcatgactctattacaggcagccttaagaaatttaaagaccaactccaggcagaccgcaagaaggacgagaacagattctttaagagcatgaataagaatgatatgaagtcatggggcttgctgcagaagaataatcataaaatgaataagactagtgagccagggtcttcctctgctggagggaggacaacctctggccctccaaatcatcactcatctgcaccttcacacagtctttttagagcatccagcgccggcaaagttactttccccgtgtgcctgcttgcttcttatgacgagatatccggccaaggagccagcagccaggacacaaaaacgtttgatgtggctctttctgaagagctgcatgcagccctcagcgagtggctaactgctatccgggcctggttttgtgaagtacctagcagctag

SEQ ID NO: 138850 - DNA, 1962 bp, synthetic construct
  misc_feature 1..1962: note = Description of Artificial Sequence: Synthetic coding sequence
  source 1..1962: mol_type = other DNA
atggctgctgctgcggctagccatctcaacttagatgccctaagagaagtactggagtgcccaatttgcatggaatcctttaccgaggagcaactccgcccgaaattgctgcattgtgggcatactatctgtcgccaatgcctcgagaagcttctcgcatcttctatcaacggcgttaggtgccctttttgcagtaagattacaagaattaccagtctaacacaactgactgacaatctaaccgttctcaagatcattgataccgccggcctgtcagaagcagtcggattgctaatgtgcagatcctgcggcagacgactcccaagacaattttgcagatcatgtgggctggtcttatgcgagccctgccgagaagccgaccaccagcctcctggacactgcactctgccagttaaggaagcggcagaggaacgtagaagagatttcggagagaaacttacacggctccgagagctcatgggagagcttcagcgacgcaaggccgctctcgaaggcgtatcaaaggacctccaagcccgatacaaggccgttctccaggagtatggacatgaggagcggcgggtgcaggacgaactggcgagaagtaggaaattttttactggttccctcgctgaagtcgaaaaaagcaattctcaggtggtagaagaacaatcttacttgctcaatatagccgaagtgcaggctgtctctcggtgtgattacttcctcgcgaaaatcaaacaggcagacgtcgccttactggaagaaacagctgacgaagaggaacctgaattgaccgcaagccttccccgcgaacttacgcttcaagacgttgagttactcaaagtgggtcatgtcggtcctctccagatcggacaggccgttaagaagccacggacagttaacgtagaggatagctgggcaatggaagccacagcctccgctgcaagtacaagtgtgacctttcgcgagatggacatgtctcccgaggaggtggtggcatccccacgagcgagtccagccaaacagagaggtcctgaggcagcgtctaacatccagcagtgcttgtttttaaagaagatgggagcgaagggctccactcccggaatgtttaatctgcccgtaagcttatatgtgacctctcagggcgaagtcctggttgctgatcgtggaaactacagaatccaggtgttcactcgcaaaggctttttgaaggaaatcaggcgttccccaagcggtattgactcctttgtgctttctttcctcggggccgacctacccaaccttactcccttgagtgttgcaatgaactgtcaaggtttgataggtgtgacagactcctatgataactctctgaaggtctacaccctggatggtcattgcgttgcctgtcatcgcagccagctttccaaaccctggggaattactgctctgcccagcgggcagttcgtcgtgaccgatgtggaggggggcaaactgtggtgttttaccgttgaccgcggtagcggcgtggttaagtactcatgcctgtgctctgcagtgaggccaaagtttgtgacctgtgacgcagaagggacggtgtactttactcaggggcttggtttgaatctggagaaccgccaaaacgaacatcatctcgaaggcggcttctccattggaagcgtgggtcccgacggccagctggggaggcagataagccacttttttagcgagaatgaagactttcgctgcattgccggtatgtgcgtcgatgcacgcggcgacctgattgttgctgattcatcaaggaaggagattctacattttcctaaggggggcgggtactcggtgctaatcagggaaggcttaacctgccctgtcggcatcgctcttacacccaaaggccagctgcttgtcctcgactgctgggatcattgtatcaagatctacagctaccacttaagaaggtactcgacaccctag

SEQ ID NO: 138851 - DNA, 522 bp, synthetic construct
  misc_feature 1..522: note = Description of Artificial Sequence: Synthetic coding sequence
  source 1..522: mol_type = other DNA
atggccgcagccgctgcctcgcaccttaacttggacgccctgcgagaagtgctcgagtgtccaatttgtatggaaagcttcactgaggaacagctgcgccccaagttgctgcactgcggccacacaatctgtcgccaatgccttgaaaaactccttgcctcttctattaacggcgtccgctgtcccttctgctcgaaaataacccgcatcacctccctcactcaattaaccgacaacttgaccgtgctgaagatcattgacacagcaggcctgtcagaagccgttggccttctaatgtgccggtcgtgcggtagacgtttgccccgccaattctgtcgcagctgcggtcttgttctgtgtgagccgtgcagggaagctgaccaccagccccccggtcattgcacactgcccgtcaaggaggccgccgaggagcgcagaagggatttcggggagaagttaactcgcttacgagaattaatgggcgaactacagcgccgaaaggccgcattggagggagtctag

SEQ ID NO: 138852 - DNA, 1962 bp, synthetic construct
  misc_feature 1..1962: note = Description of Artificial Sequence: Synthetic coding sequence
  source 1..1962: mol_type = other DNA
atggctgctgccgccgcatcccatctcaatctagatgccttgagggaggtcctagagtgccctatctgtatggaatcttttaccgaagagcagcttcgccctaagctgctgcactgcgggcacacgatctgtagacagtgcttggaaaaactgttggccagcagcattaacggcgtgaggtgcccgttttgctccaagatcacaagaataacctcactcacccagcttactgataatttgactgtcctaaaaataatcgacaccgcaggcctcagtgaggctgtggggttgcttatgtgccggagctgcggccggagactgcctaggcaattctgcaggtcctgtggtttagttctgtgtgaaccgtgtcgagaggccgatcaccaaccaccgggccactgtaccttgcctgtcaaagaggcagccgaagagaggaggcgtgatttcggagaaaagttaacacggctaagggaactgatgggcgagctccagaggcggaaggcagccctggagggggtttcgaaggacctgcaggcgaggtataaagctgttctgcaagaatacggacacgaagaacggagggttcaggacgaattggcgcgctcgagaaaattttttaccgggagtctggcagaggtggagaaatctaactctcaggtagtcgaggagcagagttacttgctgaatatcgccgaggttcaggcagtaagccgttgtgactacttccttgcaaaaattaagcaggccgacgttgcgcttttggaggagaccgcagacgaggaagaacctgaactgaccgcctctttgcctagggagttgacccttcaggacgtagagttgctcaaggttggacacgtcggtcctcttcagatcggccaggcagtgaagaagcctcgtacagtgaatgtcgaagactcctgggctatggaggctacagcctccgcagccagtacgtcagtgacctttagggagatggacatgtcacctgaggaagttgtggcctcgcctcgagcttcacccgccaagcagagaggcccagaagctgcttctaacatacaacagtgcctgttcttgaagaagatgggggccaagggaagcacccctgggatgttcaacttacccgtgtctctgtatgtgacctcccagggggaggtcctggtcgccgacagggggaattatcgcatccaggtgtttacaaggaaagggtttctgaaagagataaggaggtcaccttctgggatcgactcctttgtcttgtcctttctgggggcggatttaccaaatcttaccccccttagtgttgctatgaattgtcagggcctgatcggtgtgacagatagctatgataattcgctgaaggtgtatacattggacgggcactgtgtggcctgccatagatctcagcttagcaaaccctggggcattacagccctgccctcaggccagtttgtggtcactgatgtggagggcggcaagctgtggtgtttcaccgtggatagaggaagcggcgtcgtgaagtattcttgcctttgcagcgccgtgcggcctaaattcgtaacctgcgacgccgagggaactgtgtacttcactcaaggcttggggctcaacctggagaatcggcagaacgagcaccatttggaggggggcttttccatcggttccgtcggtccagacggacagcttggccggcagataagccattttttctctgaaaatgaagatttcaggtgtattgcaggtatgtgtgtggacgccagaggagatctgattgtggccgacagtagccgcaaagagatcctacattttcccaagggcggcggttacagtgtgctcatcagggagggactgacatgccccgtcggcattgccctgaccccaaaaggacagctgcttgtgttggattgctgggatcactgtatcaaaatttactcttatcatcttagaaggtacagcaccccatag

SEQ ID NO: 138853 - DNA, 3384 bp, synthetic construct
  misc_feature 1..3384: note = Description of Artificial Sequence: Synthetic coding sequence
  source 1..3384: mol_type = other DNA
atggcagagaacaagggaggcggagaagccgagtccggggggggtggctccggcagcgccccggttacagctggcgctgccggcccagctgcacaggaagctgagccacccttaaccgccgtgctggtggaggaggaggaggaagagggtggacgcgctggcgctgaaggaggggcagccggcccggatgacggaggcgttgccgctgcatcctccggatcggctcaggccgcctcgtctcccgccgcatctgtgggaacgggggtcgccggcggagctgtgtctactcccgctcctgccccagctagcgcccccgcacccggtccctccgcgggcccgccccccgggcccccagccagcctcttagacacctgtgcagtttgtcagcagagtttacaaagccgccgggaagctgagccaaagttgttgccctgcctgcactctttctgtctccggtgtctgccagagccagaacgacagctgagcgtccccattccaggcggctctaacggggacatccagcaggtcggcgtaattcgctgtcctgtgtgtcgacaggaatgccggcaaatcgacctcgtggataattacttcgtcaaggacacatcggaggctccttcatcgtctgatgagaaatccgagcaagtgtgtacatcctgcgaagacaacgcgtctgcagtgggcttttgcgtagagtgtggggaatggctctgcaaaacctgtatcgaggcccaccaaagggtaaagttcacaaaggaccacctgattaggaaaaaggaggacgtgtcagaatcggtgggcgcctctggtcagaggcctgttttctgcccagtgcataagcaagagcagctgaagctgttttgtgagacatgcgataggttgacgtgcagagactgccaactgctggagcacaaggagcacaggtaccagttcttggaagaggcatttcaaaatcagaagggcgccatcgagaatcttctcgctaagctcctggaaaagaagaattacgttcactttgccgccactcaggtccagaatagaattaaggaagtgaacgagacaaacaagagggtcgagcaggagattaaggtcgccatcttcaccctaattaatgagataaataagaaaggaaagtctctgctccagcagctggagaatgtcacgaaagagcggcagatgaagctccttcagcaacagaatgatattaccggactttctcgccaggtgaagcacgtgatgaattttacaaactgggcaattgcatcaggaagctctacagcccttctgtactcgaagcgtctgatcacttttcagttgcgtcatatcctcaaggcccgatgcgaccccgtgcccgccgcaaatggggcgataagattccattgcgatcccactttctgggccaaaaacgttgtgaacctaggcaacctggtcatcgagagtaaacctgcacctggttacacacccaatgttgtggtcgggcaggtcccacctggcaccaaccatatttccaaaacgcccgggcagattaacctcgctcaactgcgcttacagcacatgcaacagcaggtctacgctcaaaagcaccagcagttgcagcagatgagaatgcaacagccaccagctcctgttcctacgactacaaccactacccagcagcatcctcggcaggccgcccctcagatgttacagcagcagccaccacggctaatctctgtgcagaccatgcaaaggggcaacatgaattgtggcgctttccaggctcaccagatgcgcctagcccagaatgctgctagaatcccaggtatcccccgccactctggaccccagtactcaatgatgcagccccatctgcagcggcagcatagcaacccaggccatgccgggccgttcccagttgtttctgttcacaacacaacaattaacccgacatcccccaccaccgcgacgatggccaacgccaataggggaccaaccagtccttccgttaccgctatcgaacttatcccaagcgtaacgaaccccgagaacctgccatcattgccggatataccccccatccagttagaggacgcaggatcttcatccctcgataatctcctgtccaggtacatctccggttctcatttgcccccacagcccactagtaccatgaacccgagtcccgggccaagtgccctgtctccaggttcttccggacttagcaacagtcatacaccggttcgaccgccatcaacaagttcaaccgggtctcggggctcttgtggaagcagcggtaggaccgccgagaaaacgtcccttagctttaaaagcgatcaggtcaaggttaagcaggagccgggtacggaggacgaaatttgttcgttctcaggcggtgtcaagcaagagaagacagaagacgggcgtcgctctgcctgtatgctgagttctcctgagagcagtctgacgccccctctctctacaaatctgcatcttgaaagcgaactggacgctttggcctcgctggaaaaccacgtgaagatcgagcccgctgacatgaatgaaagttgcaaacagtcagggttgtcctctctggttaatggtaaatcgccgatacggagccttatgcatagaagtgccaggatcggaggtgacgggaataataaggatgatgaccccaatgaggactggtgcgccgtctgccaaaatggcggcgatctgctgtgctgcgagaagtgccccaaggtgtttcatctgacttgtcatgtgccaacacttctctcattcccaagtggcgactggatctgcaccttttgccgagacatcggcaaacccgaagtagagtatgattgtgataatttgcagcactctaaaaagggcaagaccgctcagggactgagccctgttgatcagaggaaatgtgaaaggctcctgttatacctttactgtcacgagctctccattgaattccaagaaccagtcccagcctcgatcccaaactactataaaattattaaaaagccaatggacctgagcactgttaagaagaagctgcaaaagaaacatagccagcactaccaaattcccgatgattttgtcgccgatgtgcggcttattttcaagaattgcgagcggtttaatgagatgatgaaggttgttcaagtatacgccgatacacaggagattaatctcaaggccgattctgaagtcgcccaggccggtaaggctgtggctctttacttcgaggacaaactgaccgagatttattccgacagaacttttgcccccctgccagagtttgagcaagaagaggatgatggggaggtcaccgaggattcggatgaggacttcatccagccaaggcggaaacgactgaagagcgacgagcgccccgttcatataaagtag

SEQ ID NO: 138854 - DNA, 3333 bp, synthetic construct
  misc_feature 1..3333: note = Description of Artificial Sequence: Synthetic coding sequence
  source 1..3333: mol_type = other DNA
atggccgagaacaagggtggaggggaggcggagtccggcgggggaggctccgggtctgctcctgttaccgccggtgctgccggcccggccgctcaggaggccgagcctcccctcaccgcagtcctcgtggaagaggaggaagaagaggggggtcgtgcgggggcggagggaggtgctgctggcccagacgacggcggggttgctgctgcaagcagtggatccgcccaagccgcttccagccccgccgcgagcgtcggaacaggtgtggcgggcggcgctgtcagcacacctgctcctgccccagccagtgcacccgcacccgggccaagtgcagggcctcccccaggaccacctgcttccctcctcgacacctgtgcagtgtgtcagcagagcctccagtcccggagggaggccgagcccaaacttctgccgtgtctacactcgttttgcctcaggtgccttcctgagccagaacggcagctgtccgttccaatccccggaggcagtaacggcgacatccagcaggtgggggtgattcggtgtcccgtatgtaggcaagagtgtagacagatcgaccttgtcgacaattatttcgtgaaagatacgtcagaagccccttcttcctctgacgagaagagcgagcaggtatgcacctcgtgcgaggataacgcctccgctgtcgggttttgcgtggaatgtggagagtggctctgtaagacctgcatcgaggcccaccagagagtcaaatttacaaaagaccacctgatacggaagaaagaggatgtctccgagtcagtgggcgcctccggacagcggccagtgttctgtcccgtgcacaaacaggagcagctgaagctgttttgtgagacatgcgatcgcctgacatgtagggattgccaactcctggaacacaaggaacacaggtaccagttcttggaggaggcgtttcagaatcaaaaaggtgcaatcgagaacctgcttgctaagcttctggaaaagaaaaactatgtccacttcgccgcaacccaggtacagaatcgcattaaggaggtaaatgagaccaacaagcgcgtggaacaggagattaaagtcgccatcttcacactaataaatgagattaacaagaaagggaagtcccttctccaacagctcgaaaacgtgacaaaggagcgtcagatgaagttgctgcagcaacagaatgacatcaccggcctaagcaggcaagtgaagcacgtaatgaattttaccaactgggcaatcgcatctggttcttctaccgccctcctgtacagcaaaaggttgataactttccagctgcgccatattttaaaggcccgctgcgatccagtgccagccgccaacggcgccatcaggttccactgtgatccgacgttttgggccaagaatgtggttaacctgggtaatttggttattgagtctaaacccgcccccggatataccccgaacgttgttgtggggcaggtgccgcctgggacgaatcatatctcaaagactcctggtcaaataaacctggcgcagctgagactacagcacatgcagcagcaggtgtacgctcaaaagcatcagcagctgcaacagatgcgcatgcaacagcccccagctcctgtgcccaccaccaccaccaccactcaacaacacccgcgacaggccgctccccaaatgctgcagcagcagccgcctagactcattagcgtccagaccatgcaaaggggcaacatgaattgtggggcttttcaagctcaccaaatgcgactcgcccagaatgccgctcggatcccgggaatcccacgacatagtggcccacagtatagcatgatgcagccccatctccaaaggcagcacagcaacccaggtcatgccggcccctttcctgtggtcagcgtgcataacacgaccatcaatccaacttccccaactactgccacaatggcaaatgctaatcgcggccccacttctcctagcgtcactgctatcgaactgattccctccgtcactaatccagagaacttacctagtctgcctgacatcccgccaattcaactggaggatgccggatccagcagcctcgataatcttctgtcacgttacattagtggatcgcaccttccaccacagccgacaagtacaatgaatccctctcctggaccttccgccctctcccccggaagttcaggactctcaaactcccacaccccggtgaggcccccttccacatcatctactgggagcagaggaagctgcggttctagcggccggacagccgagaagacctcgctcagttttaagagcgaccaggtgaaggtcaagcaggaaccaggaactgaagatgagatctgctctttcagtggcggcgtcaaacaggaaaagacagaagacggtcgtagaagtgcatgtatgctatctagtcccgagagtagcctgacaccgccactgtccaccaacctccacctggagtcggaactggatgctctggccagcctcgagaaccatgttaaaatagaacccgcagacatgaacgagtcgtgtaagcagtctggactgtcctcgctggtcaatgggaaatcccccatccgcagcttgatgcatcgtagcgcccggatcggcggcgacggcaataacaaagacgatgatcctaatgaggattggtgcgctgtgtgtcagaacgggggggacctgctgtgttgtgaaaagtgtcctaaggtattccacctcacatgtcacgtccccaccctgctgtccttcccttccggcgattggatttgcacattctgtagagatattggaaaacctgaagtggaatatgattgtgacaatttgcaacactccaaaaagggaaagactgcacagggtttaagtcctgtcgatcagaggaaatgtgaacgactcctgctgtacttgtattgccacgagctgtccattgagtttcaggagccagtccctgcttccatcccgaattactataagattatcaagaagcctatggacttatctaccgttaagaaaaaactgcagaaaaagcatagccagcattaccaaatacccgacgatttcgtggcagatgtacgcttgatcttcaagaactgcgagagattcaatgaagcagatagtgaggtggcacaggccgggaaagctgtcgcattatacttcgaggacaaactgaccgaaatatactccgaccgcacattcgcacccttgccagagtttgaacaagaggaggacgacggggaagtaaccgaagactcagacgaagactttattcagccacggcgaaagcggttgaagtctgatgagcggccagtgcatattaaatag

SEQ ID NO: 138855 - DNA, 2667 bp, synthetic construct
  misc_feature 1..2667: note = Description of Artificial Sequence: Synthetic coding sequence
  source 1..2667: mol_type = other DNA
taatctgtcggagcaagtggccagaggcccgtgttttgtccagtgcacaaacaagaacaactgaagctcttctgcgagacctgcgaccggttgacttgccgagattgtcagctgctggagcataaggagcataggtaccaattcctggaagaggcctttcagaatcaaaagggcgctatcgagaatctactcgccaaattgctggaaaaaaaaaactacgtacactttgccgccacccaggttcagaataggatcaaggaagtgaacgagaccaacaaacgcgtggagcaggaaatcaaggtcgccatctttactttaattaacgagatcaataagaagggcaaaagcttgttgcagcagctggagaacgtcactaaggagcgacagatgaaacttctgcagcagcaaaatgatattaccgggctgagcaggcaagtaaagcacgtgatgaacttcaccaactgggctatcgcatccgggagttcaaccgctctgctttattccaaacggctgattacatttcagctcagacatattctcaaggcccgctgcgaccccgttccggccgcaaacggcgctattcggttccactgcgaccctactttttgggctaagaatgtggtgaacctcgggaatttagtaatagagtctaaacctgcacctgggtatacacccaatgttgtcgtcggccaggtgcctccgggaaccaaccatatcagtaagacgcctggtcagatcaacttggcacagctacgactgcagcacatgcaacagcaggtctatgcacaaaagcaccaacagcttcagcagatgcgcatgcaacagccccccgcccctgtgccgacaactacaactactacacagcaacatcctcggcaggcagctccgcagatgctgcagcagcagcccccaagactgatctctgtacaaactatgcagagggggaacatgaattgcggggcctttcaagcacatcagatgcgattggcacagaacgcagcaaggatccccgggattccacgacacagcgggccacagtatagcatgatgcagccgcacctacaaaggcagcactcaaaccccgggcatgctggccctttccccgtggtctctgtccacaacacaacgattaaccctacctcccctacaacagcaactatggctaacgccaacagaggtccgacaagcccatctgttacggcaatcgaactcatccccagcgtcaccaaccctgaaaatctcccatctcttcccgatattcctccaatccaggcaaacgtggttccaatgatgcattcctggtacgaattcggggcgagggagaagacccaggaccaaaatgtgctggaggatgcaggctcatcatcacttgacaatctcttgagtcgctacatatcaggctctcatctgcccccccaacctacgtctaccatgaatccatccccaggaccctccgctctctcgcctggatccagtgggttaagtaactctcatacccctgtgagaccaccgtcaacctcttccacaggcagccgcggctcctgcggatcgtcaggccggaccgctgagaaaacgtctctgtccttcaaatccgaccaggtgaaggtgaagcaggaacctggaacggaggacgaaatctgcagcttctccggcggtgtcaaacaggagaagacagaagatggaaggagatccgcatgcatgttgtcctctcccgaatcatctctgactccaccacttagtacaaatcttcaccttgaatctgagctggatgctctcgcctctctggagaatcacgttaaaatcgaacccgctgacatgaatgagagctgtaagcagtccggactgtccagtctcgtcaatgggaaatcaccaattaggtccctcatgcatcggtccgccaggatcggcggcgacgggaataacaaagacgacgatccaaatgaagactggtgtgcagtgtgccagaacgggggggatctgttgtgttgcgaaaagtgccctaaggtatttcacctcacttgccacgtgcctactctgctgtcctttccttccggcgattggatctgtaccttctgcagggacatagggaaacccgaagtggaatacgactgtgataatctgcagcacagcaagaaggggaaaaccgcccaggggctgtcaccagtggatcagcgcaaatgtgaacgactgttgctgtacctctattgtcacgaactctccattgagttccaagagccagtccccgctagcattcccaattattataagatcatcaagaagcccatggacctctctacggtcaagaagaagctgcagaagaagcatagccagcattaccagatccccgatgacttcgtggcggacgttagactgatctttaagaactgcgagagattcaacgaaatgatgaaagtcgtgcaagtctatgccgacacccaagaaattaacctgaaggcggatagtgaggtggcccaggccggaaaggctgtagccttgtacttcgaggataagctgacagagatatacagcgatcgcacattcgctccgttgcctgaattcgagcaggaagaggacgatggcgaggttacagaagactcagatgaggattttatacagccacggaggaaaagacttaaatcggacgaacggcctgtccatattaagtag

SEQ ID NO: 138856 - DNA, 2280 bp, synthetic construct
  misc_feature 1..2280: note = Description of Artificial Sequence: Synthetic coding sequence
  source 1..2280: mol_type = other DNA
atgaagctgctccagcagcaaaatgacattacgggcctatcgcggcaggtgaaacatgttatgaacttcacaaattgggccattgcttcaggatcgtctaccgcactgctctactccaagagactcataaccttccaactgcgccacatactcaaggcccggtgtgatccagtgccagctgctaacggcgccattcgctttcactgcgaccccacattctgggccaagaacgtcgtcaacctcggaaatcttgtaattgaaagcaaaccagcgcctgggtataccccaaatgtagtcgtaggacaggtcccaccgggcacaaaccacatttcaaagaccccaggtcagattaacctggcgcaactgagactgcagcacatgcagcagcaggtgtatgcccaaaaacaccaacagttgcagcagatgaggatgcagcagcctcccgccccggtcccgacgacaacaaccacgacgcagcagcatcctcggcaggccgccccccagatgctccaacaacaaccacctaggctcatctcggttcagacaatgcagcggggcaatatgaattgtggcgcctttcaggcccaccaaatgcgactggcccagaatgctgccaggattccaggcatcccgagacattccggaccacaatatagtatgatgcagcctcacttgcaaagacagcactctaatcctggtcatgctggcccattccccgtagtgtcagtgcataacactactatcaatcctaccagcccaaccacagccacaatggctaatgctaacaggggcccgacctcaccaagcgtgaccgctatagagctgattccatccgtaacgaatccggagaatctgccaagtctgcctgatatccctccgatccaggctaacgtggtaccaatgatgcatagttggtacgaatttggtgctcgagaaaagacccaggatcagaatgtcctagaggacgccggatcatctagcttagacaatctcctgagcagatatatttcaggcagccacctccccccacagcccacctccaccatgaatcctagccctggcccatctgccctctcccctggctcgagtggcctctctaactcccacactccggtgcgtcctcccagcacaagttccacggggagccgcggaagctgtggttcaagtggccgtacagctgaaaaaacctcactgagttttaagtccgaccaggtgaaagtcaagcaagagccagggactgaggacgaaatttgttcattcagcgggggagtcaaacaggagaagacagaagatggaagaaggtcagcatgtatgcttagctcgcctgagtccagcctcaccccaccactctctactaatcttcatctggagagcgagctcgatgcactcgcctcactagaaaaccacgtgaagattgagcctgccgatatgaacgaaagctgtaaacagagcggactgtcctctttggttaacggaaaatcacccataaggtccctgatgcataggagtgccagaatcgggggcgacggcaataacaaagacgacgacccaaatgaggactggtgcgccgtgtgccagaacgggggcgacctgctctgctgcgaaaagtgtcctaaggtttttcacctcacgtgccatgtaccgactttattgagttttccctccggagactggatctgcaccttttgcagagatattgggaagcctgaggtggagtatgattgcgacaatcttcagcacagcaagaagggtaagactgctcagggattatcacccgtggaccagcgcaaatgtgagcggctcctgttgtacttatactgccacgagctcagcatcgagtttcaagagcccgtccccgcgagcatacccaattactacaagattatcaaaaagcccatggatctctcaaccgtcaaaaagaagctgcagaagaagcactcccagcactaccagattccagacgactttgtggccgacgtgcggttaatatttaagaactgcgaacggttcaatgagatgatgaaggttgtgcaagtttatgctgatacacaggaaattaatctgaaggctgattctgaagtggcccaggctgggaaagcggtagcactgtactttgaagataaactgaccgaaatttatagtgaccggacttttgctcctctgccagaatttgaacaggaggaagacgacggtgaggtgaccgaagattcagacgaggacttcatccagcctcgccggaagcgcttgaagtcggacgagaggccagtgcatatcaagtag

SEQ ID NO: 138857 - DNA, 2529 bp, synthetic construct
  misc_feature 1..2529: note = Description of Artificial Sequence: Synthetic coding sequence
  source 1..2529: mol_type = other DNA
atgtgtgggtcagaacggatattgcaggctggtaatattttagagatccgggtcgggcaagctggggctaggcgtgtcgcaacaatgacctcacccgtgctagtcgacatccgggaggaagttacatgtcccatttgtctggagctcctgaccgaacccctttctatcgactgtggccattcattctgccaagcatgtatcacccctaatggcagagagtccgtgatcggccaggagggggagagatcttgcccggtgtgccaaacgtcctaccagcccggcaaccttaggccaaatagacacttagcaaatattgtccgccggctgcgcgaggtggtcttgggtcccggcaagcagctcaaggccgtgctgtgtgccgatcatggtgaaaagctacaactcttttgccaggaggacggcaaagtcatttgctggctgtgtgagcgctcccaggagcacaggggacaccacacatttttagttgaggaagtggcacaggagtaccaggagaagttccaggaaagcttgaaaaaactgaagaacgaggagcaagaagccgagaagcttactgcattcattcgtgagaagaaaacatcttggaagaaccagatggaacccgagcggtgcagaattcagactgagttcaaccaactgcgtaacatccttgatcgcgttgaacagcgggaattgaaaaagttggagcaggaagagaaaaaaggactgcgcatcatagaagaggccgagaacgacctcgtgcaccaaacccagagcttaagggagctgatcagcgacctggagcgcagatgtcaggggtcaacgatggaactcctgcaggacgtgtccgacgtgactgaaagatccgagttctggacgctgcggaagcctgaagccctccctaccaagctcagaagcatgttccgtgcccccgacctgaagcggatgttacgcgtctgtagagagttgacagatgtacagagctattgggctatacagggtagccttacaaggcgggagcggagagcaagcggcgttaggactagaagatcccaggggtctagcgccatggccagcaagatccttctgaacgtgcaggaggaggttacttgcccaatctgtcttgagctgcttaccgaacctctcagtctcgattgtgggcattctctatgtagggcgtgcatcacagtgtctaataaagaagccgttacgagcatgggcggcaagtcatcttgtcctgtttgtggtatctcctactcctttgaacacctgcaggctaaccagcacctcgccaacattgtagagcgactgaaggaagtcaagctgagccccgataacgggaagaaaagagatctgtgcgaccaccacggtgagaagctgttgctcttctgcaaggaggaccgtaaagtaatctgttggctgtgtgaaaggagccaggaacacaggggccaccataccgtcctgaccgaggaagtcttcaaggagtgccaggaaaaattacaagcagtattaaaacggcttaaaaaagaggaggaggaggccgagaaactcgaagccgacatccgggaagagaaaactagctggaagtaccaggtccagactgaaaggcagcgtattcagacggagttcgatcaattgcgctccattcttaataatgaggaacaaagggagctgcagaggcttgaggaggaagaaaagaaaacgctggataagttcgccgaggccgaagacgaactggtccagcagaagcagttggttagggagctgatcagcgacgtggagtgccgttcacagtggtcaaccatggaactgcttcaggatatgtctggcattatgaagtggagcgagatctggagactaaagaaaccaaaaatggtgtctaagaaattaaagactgtttttcacgctcccgatctgagtcggatgctacagatgttcagggagctcaccgcagtgcggtgttactgggtggacgtgacactgaactcggtcaatctgaatttaaatttagtattgtccgaggatcagcgccaggtgatcagcgtgcctatttggccctttcagtgctacaattacggggttttgggctcccagtacttttcctccgggaagcactattgggaagtggacgtttcgaaaaaaactgcctggatcttaggtgtgtattgcagaacttattccagacatatgaaatatgttgttagacgctgcgccaaccgacaaaatctgtacaccaagtatcgcccacttttcggttactgggtgattggcttacagaataagtgtaaatacggcgtgtttgaggagagcctgtcaagcgacccggaggtgctcaccttgagcatggccgttccgccctgccgcgttggggtttttttggactacgaagccggaatcgtctcctttttcaacgtcacttcccacgggagcctcatttataagttctctaagtgctgcttctctcagcctgtgtatccatacttcaacccatggaattgtccagctccaatgacactgtgtcctccgtcaagctag

SEQ ID NO: 138858 - DNA, 1467 bp, synthetic construct
  misc_feature 1..1467: note = Description of Artificial Sequence: Synthetic coding sequence
  source 1..1467: mol_type = other DNA
atggcttctaagattttgctcaacgtgcaagaggaggtgacttgtcctatttgtctcgagctgctgacagagcccttgtctctcgattgcggccactctctctgtcgagcctgcatcaccgtgtcaaacaaagaagccgtgactagcatgggaggaaagagtagctgccccgtttgtggaatctcatatagcttcgaacacctgcaggctaaccaacacttggctaacatcgtggagagacttaaggaagtgaaactttccccagataatggcaagaaacgggacctctgcgaccatcatggagaaaaactgctgctattttgcaaggaggacaggaaggtcatctgctggttgtgcgaaagatctcaggaacatcggggccaccatactgtgttgactgaagaagtatttaaggaatgccaggagaaactgcaggccgtactcaagcgacttaagaaggaagaagaagaagcggaaaaactggaagcggacattagggaggagaaaacatcctggaaatatcaagtgcagaccgagcgccaacgtatccagacagagttcgaccagctgcgaagtattctgaataacgaggagcagagagagctccaaagactggaagaagaagagaagaagaccctagataagttcgccgaagccgaggacgagcttgttcagcagaagcagcttgtgcgtgagctgatctccgacgtggaatgtagatcacagtggagtaccatggagctgctccaagacatgagtggaatcatgaagtggtccgaaatttggcgcctcaaaaagcctaaaatggtcagtaagaaactcaaaacagtgtttcacgcacccgacttgagtagaatgctgcagatgtttagggagctgaccgcagtccgatgttattgggtggatgtgacgctgaactcagtaaaccttaacctgaacctcgttctttctgaggaccaacggcaggtgatttctgtgcctatttggccgtttcagtgttataactacggtgtgctcgggtctcagtatttcagctctggtaagcactactgggaggtggacgtgtctaagaagaccgcttggattctgggcgtatattgccggacctattctagacatatgaagtacgtggtgagacggtgcgctaataggcagaatctctatacaaaataccgacctctctttgggtattgggtaatcggcctccagaacaaatgcaagtacggagtgtttgaagagagccttagcagtgatcctgaggtactgactctgtctatggctgtccctccatgtcgagtgggggtctttctggactatgaagccggaatcgtgtcattcttcaatgtcacatcacacggctctctgatttacaagttcagcaaatgctgtttttctcagccagtgtacccctatttcaacccctggaactgcccggccccaatgacgctttgcccaccctccagttag

SEQ ID NO: 138859 - DNA, 1467 bp, synthetic construct
  misc_feature 1..1467: note = Description of Artificial Sequence: Synthetic coding sequence
  source 1..1467: mol_type = other DNA
atggctagcaaaatcttacttaatgttcaggaagaggtgacctgtccaatttgccttgaattgttaaccgaaccacttagtcttgactgcggacacagtctctgtagagcttgcatcactgtaagcaacaaggaagcggttacttccatggggggcaaatcttcttgcccagtttgtgggatatcctattcatttgaacatctgcaagcaaatcagcacctggccaacatagtggaacgcctgaaagaagtcaaactgagcccggataacggcaagaagagagacttatgcgaccatcacggcgaaaaactacttcttttttgcaaggaggacaggaaagtgatctgctggttgtgtgaaagatcacaggaacaccgggggcatcacaccgtgctaactgaggaggtcttcaaggaatgtcaggagaagttgcaggctgtacttaaacgcctgaaaaaagaggaggaggaggctgaaaaactcgaagcagatattcgggaggagaagacctcctggaagtaccaggtacagacagaacgccagagaatacaaactgaatttgatcaactgcgaagcattcttaataatgaagaacaaagggagctccagcggcttgaggaggaagagaagaagaccctggacaaatttgccgaggcggaggacgagcttgttcaacaaaagcagcttgtgcgagaattgatctcagacgtcgagtgtcggagccagtggagcacgatggagctccttcaagacatgtctggcatcatgaaatggtctgagatatggcgccttaagaagccaaaaatggtgagtaaaaagctcaagacggtgttccacgctcctgatctgagccgaatgctccagatgttcagagagcttactgcagtacgatgctattgggtggatgtgactctaaactccgtgaatttaaacctgaacctggtgcttagtgaagaccagaggcaggtcataagcgtgccaatctggccttttcagtgctacaactacggcgtgctcggttcacagtatttttctagtgggaagcattactgggaagtcgacgtatcgaagaaaacagcctggattttgggcgtttactgtcgcacttattctcgccacatgaaatacgtcgtccggcgttgtgccaaccggcagaacttatacaccaagtatcgaccactgttcgggtattgggtgattggcctacagaataagtgtaagtacggcgtgtttgaggagagcctgtcgagcgatccagaagtcctcacactgagcatggccgtgcctccttgcagggtaggtgtgtttctggactacgaagctggaattgtgagttttttcaatgtgacttctcacggcagtttgatctacaagttttctaagtgctgcttcagccagccagtctatccttatttcaacccatggaattgcccggctcctatgactctgtgccccccatccagctag

SEQ ID NO: 138860 - DNA, 1467 bp, synthetic construct
  misc_feature 1..1467: note = Description of Artificial Sequence: Synthetic coding sequence
  source 1..1467: mol_type = other DNA
atggcgagcaagatactacttaatgtgcaagaggaagttacctgcccaatctgcctggaactgttaaccgagcccctctccctggattgtgggcactccctgtgtagagcttgtataacagtcagtaacaaggaggctgtgacctccatggggggaaagtccagttgcccagtctgtggaatcagctacagtttcgagcacctccaggctaatcagcatctggccaacatcgtggagcgtctgaaagaggtaaaactttcccctgacaatggaaaaaaaagagacctatgtgaccaccacggtgagaaattactcttgttttgtaaggaagatagaaaggttatttgttggctctgcgagcgctcgcaagagcacagggggcaccacaccgtcctaaccgaggaagtgttcaaggaatgccaggagaagttgcaggcggtcctaaaacggttaaagaaggaggaagaagaggccgagaagcttgaagccgacatcagggaagaaaaaacaagctggaaataccaggtacaaaccgagagacaacggattcagacagagttcgatcagttgagaagcatcctcaacaacgaagagcaacgagagctgcagcgactggaagaagaggaaaagaagaccctggataagttcgcagaggccgaggatgagcttgtgcagcaaaagcagctcgtccgcgaactgatcagcgacgtagagtgccggtcccaatggtcaacaatggaactccttcaggacatgtccggcatcatgaaatggtctgaaatctggcgtctgaaaaaaccaaaaatggtgtcaaagaaactgaagaccgtgtttcatgcccccgacttgagccgtatgctacagatgttccgcgaattaaccgccgttcgttgttattgggtggacgtgacactgaacagtgtgaatctcaacctcaacctggtattgtccgaggaccaacgacaggtgatctccgttcccatttggcctttccagtgttataactatggcgtcctgggtagccagtacttttccagcggcaagcactattgggaggtcgatgtgagtaagaagaccgcatggatactgggagtgtattgtagaacatactctcgccacatgaagtacgtggtgcgcaggtgtgccaacaggcagaatctgtatacaaaatatcgtccactcttcggctactgggtgattggcttacagaacaaatgtaagtacggcgtgttcgaggaatctttatcttccgaccccgaagtgctgaccctttccatggcagtccctccatgcagggttggggtcttcctggattacgaggctggcattgtttccttttttaatgttacaagccatggaagtttgatctataagttcagtaagtgttgtttctcacaacccgtttatccttacttcaacccatggaactgtccggccccgatgacactgtgtccaccttcttcgtag

SEQ ID NO: 138861 - DNA, 2187 bp, synthetic construct
  misc_feature 1..2187: note = Description of Artificial Sequence: Synthetic coding sequence
  source 1..2187: mol_type = other DNA
atgtctgaaagcggcgagatgtcggaatttggctatattatggagctcatcgccaaaggcaaggttaccatcaagaatatcgagagggaactgatctgccccgcctgtaaggaattgttcacgcatccactgattctcccttgtcagcactctatttgccataaatgtgtgaaagagctgcttctcaccctggacgattctttcaatgacgtaggatctgacaacagtaaccagtcctcgccccggctgcgcctgccctctccctctatggataaaatcgacagaatcaatagacctggatggaagcgcaattcgcttactccccgaaccacagtgttcccatgccccggttgtgagcatgacgtcgatttgggcgaacgaggcattaacgggctattccgaaatttcacactagagacaatcgtggaacgctatcgccaggccgcccgcgccgccactgccataatgtgtgacctctgtaagcctcccccgcaggagagcacaaagtcctgcatggattgctccgcctcctactgtaatgagtgcttcaagatccaccacccttgggggaccattaaggcccagcacgagtatgtgggtccaaccaccaacttccggcctaagatcttgatgtgcccagagcacgagacggaaagaattaatatgtattgcgaactttgcaggcggccggtgtgtcatctgtgcaagcttggcggaaatcacgctaaccaccgggtgaccaccatgtcctctgcctacaaaactctaaaagaaaagctgagtaaagacattgactatttgattgggaaggagtctcaggtgaagtctcagatatccgaattgaatctcctgatgaaggaaactgaatgtaatggggagcgagccaaagaggaagcaattacccacttcgaaaaattgtttgaagtgcttgaggaacgtaaatcttcagttctgaaggcaatcgactcgagcaagaagctcaggctggataagttccagacgcagatggaggagtatcagggcctgctggagaataatgggctcgtgggttatgctcaggaggtcttaaaggagacagatcagtcctgctttgtacaaacagcaaagcagcttcacctccgtatccagaaagccacggagtcactgaagtcgtttcggccagccgctcagacgagctttgaagattacgtggtaaatactagtaaacaaacagagctgctaggcgaactttcattcttttcttctggtattgacgtgcccgagatcaatgaagaacagtctaaggtgtataataacgctctgatcaactggcatcaccccgaaaaggacaaagccgacagttacgtcctggagtaccgcaagatcaaccgagatgacgaaatgtcttggaacgaaatagaagtgtgcggtacctccaagataattcaggatctggaaaattctagtacttatgcctttcgggtgcgagcttataagggatcaatctgtagcccttgctcaagagagctgattctacacactcctcctgccccagttttctcattcctttttgacgagaaatgcggctataataatgaacacctattgctaaatctgaaacgtgatcgcgtcgagagccgggctggattcaatttgcttctcgcagccgagcgcattcaggtaggctactatacctccttggactacattatcggtgatacaggaatcaccaagggtaagcacttctgggcttttcgtgtagaaccttattcctatctggtaaaggtgggagtcgccagttccgacaaacttcaagagtggttacgttctcctagggatgccgtgagccctaggtacgaacaagactctggccatgactcaggatctgaggacgcatgctttgattcatcccagccctttacccttgtcaccataggaatgcagaagttctttatcccaaagagccccacctccagcaacgagcctgaaaaccgagtgctgccgatgccaacaagtattggcatcttcctcgactgtgataagggaaaagtggacttttacgatatggaccagatgaagtgcctctatgagagacaggtcgattgctcccacaccttgtatcctgcattcgctttgatgggctcaggtggaatccagctggaggagccaatcaccgccaagtatctcgagtaccaagaggacatgtag

SEQ ID NO: 138862 - DNA, 186 bp, synthetic construct
  misc_feature 1..186: note = Description of Artificial Sequence: Synthetic coding sequence
  source 1..186: mol_type = other DNA
atgagcgagtctggcgagatgagcgagttcggttacattatggaactcatcgcgaagggcaaagcctccgcaatgggattacagcagacacacgaacattctaggctgacaagcaaaggaggcgaagcccgatgtccgttcgagatctctgaggtgggaaaacagtctctgccgcggcgcacgtag

SEQ ID NO: 138863 - DNA, 183 bp, synthetic construct
  misc_feature 1..183: note = Description of Artificial Sequence: Synthetic coding sequence
  source 1..183: mol_type = other DNA
atgagtgagtctggggaaatgtcagaatttggctatattatggagctaatagccaagggaaagatgcccgactggcggaggggctatagatgtcggcagggatgcggcaaaaccaccgagctcgcgacagccaccgacttttcacaaactggtaataagagcgggaagcatttcaaaacgtag

SEQ ID NO: 138864 - DNA, 2895 bp, synthetic construct
  misc_feature 1..2895: note = Description of Artificial Sequence: Synthetic coding sequence
  source 1..2895: mol_type = other DNA
atggacgagcagtcagtcgagtctatcgccgaggtatttaggtgttttatctgtatggagaaactccgagacgcaaggctgtgcccccactgttcaaaattatgctgttttagctgcatccgaaggtggttaacggagcagcgcgcacaatgccctcattgcagagcccctctgcagctccgtgagttagtaaactgcaggtgggctgaggaggttacccagcaactcgacacgctccagctttgcagcctgacgaaacacgaagagaacgaaaaggataagtgtgagaaccaccatgagaagctgagcgtgttctgctggacctgcaagaaatgtatctgccaccagtgtgctctctggggcggaatgcacggcggtcacacttttaaacccctggcagaaatatatgaacagcatgtgactaaagtcaatgaggaagtggctaaactccggcggaggctgatggaactcatttcattagtccaggaggttgagcgaaatgtcgaggctgtgagaaacgccaaggacgaacgagtgcgggagatccgcaacgctgtggagatgatgattgctcgactcgatacccagctcaaaaataagctgattactctgatggggcagaaaaccagtctcactcaggaaacagagctgctcgagtcattattgcaggaagtggaacatcagctgaggtcctgctcgaagtcagagttaatttccaaatcttcagagatcttaatgatgtttcagcaggtccatcgcaagcccatggccagctttgtcaccactccggtgcctcccgatttcacgtcagagttggtgccctcttatgactcagccaccttcgtgttggagaatttctctactctgcgacaacgggcagatccagtttacagcccaccactacaggtcagtggactgtgctggaggctaaaggtgtaccctgacggtaatggtgttgtgagaggatactaccttagtgttttcctggaactgtccgctggtcttcctgaaacatcgaaatatgagtatcgagtcgaaatggttcatcagagctgtaatgatcctaccaagaatatcattagggaattcgcatcagacttcgaggtgggtgagtgttggggttataatcggttctttcgtctcgacctgttagctaacgagggctacttgaatccccagaacgacactgttatcttgcgctttcaagtccgcagtccaacatttttccagaagtcgagggaccagcattggtatattacgcagctggaggcagcccaaaccagctacattcagcaaatcaataacttaaaggagagactaactattgagctgagtaggacccagaagagcagagatctgagcccacctgacaaccaccttagcccccagaacgatgacgccctggagacgagagcaaagaagagcgcctgtagcgatatgctgctcgaaggcggacccaccacggcgagcgtgcgcgaagctaaggaggatgaggaggacgaagagaaaattcagaacgaagattaccaccatgaactgtcagatggcgacctagatctggatttggtgtatgaagatgaagtgaaccagcttgacggctcctcttcttcagcttcaagcacagccacctctaatacagaagagaacgatatcgatgaagagacaatgtctggcgagaacgatgttgagtacaacaacatggaactagaggaaggagaactcatggaagacgccgcagccgctggacccgccggatcgtcgcatggctacgtcggcagtagcagtcgcatctctcgtcgcacacacctgtgcagtgccgctacgtcaagtctgctggatatagacccacttatcttgattcaccttctggatttaaaggatagatcgtctatcgagaacctgtggggcctccagccccgcccacctgcgtcccttctgcagcctaccgcatcctatagccggaaagacaaagaccagcgaaaacagcaggccatgtggcgagtccctagtgatcttaaaatgctcaagcgtctcaagacacagatggctgaagtcaggtgcatgaagaccgatgtgaagaacacccttagtgagataaaaagcagttctgcagccagcggtgatatgcagacatcgcttttttctgcagatcaggctgccctggccgcttgcgggacagaaaacagtgggagactgcaggacctgggaatggagctgctcgccaagagcagcgtcgctaactgttatatcaggaacagtaccaataagaaaagcaattctcctaagccggctcggagctcggttgcaggctccctgtctctgcgccgggccgtcgaccccggagagaactcgcgctctaagggtgactgccagacattgtctgaagggagtccagggtcctcccagagcggctctagacattcatctcctcgagcactcatccacgggagcatcggggacatcctgcccaaaaccgaggaccgccagtgcaaagccctcgactctgacgctgtggtagtagctgttttcagtggcctacccgcagtcgaaaagagaaggaagatggttacccttggcgctaacgcaaagggcgggcaccttgaggggcttcagatgacagatctcgaaaataacagcgagaccggggaactgcaaccggtgctgcccgaaggtgcctctgccgcccctgaggagggaatgtcctcagactccgacatagaatgtgacaccgaaaatgaggagcaggaggaacatacatcagtcgggggctttcacgactctttcatggtgatgactcagccacctgatgaagacacccacagttcttttcctgacggcgagcagattggccctgaagacttgtcatttaatactgacgagaactctggacggtag

SEQ ID NO: 138865 - DNA, 2412 bp, synthetic construct
  misc_feature 1..2412: note = Description of Artificial Sequence: Synthetic coding sequence
  source 1..2412: mol_type = other DNA
atgcacggcggccacacctttaagccgctggccgagatctacgagcaacatgttacaaaggttaacgaggaggttgcaaagctgaggagacgcctgatggagctcatttctcttgtgcaagaggttgaaagaaacgttgaggctgttcgaaacgccaaggacgagagggttcgtgagatcagaaacgccgtcgagatgatgattgcgcgcctcgatacccaactcaaaaacaaattaatcacactgatgggacagaaaacttctcttacgcaggagacggaattgctcgaaagcctgctccaggaggtcgagcatcaactcagaagctgctcaaagagtgaactgataagcaaatcctcggaaattctaatgatgttccagcaggtacaccgaaaacccatggcttcatttgtgaccacccccgtgcccccggatttcaccagcgagttagtcccctcctatgatagcgccacctttgttctggagaatttcagcaccctgagacagagagccgacccagtttattcaccacccctgcaggtgtccggtttatgttggaggttaaaggtgtaccccgacggcaatggcgtggtgcgcggctactacctctcagttttcctggagctgtcagcaggactccccgagaccagcaagtatgaatatagggttgagatggtgcaccagagctgtaacgacccaacaaagaatatcatccgagagttcgccagcgatttcgaggtgggagagtgctggggctataaccgtttctttcggctggacctgctcgcgaatgaaggataccttaacccacagaatgataccgtcattctgcgcttccaagtaaggtcgccgacatttttccagaagtctcgagatcagcactggtatattacacagctcgaagccgcacagaccagttacatccaacagatcaacaatctaaaagaacggctgacaattgagctctccagaacacaaaaatctagggatctgagccccccagataatcacttatccccgcagaacgatgacgccctggagacacgcgcgaagaagagtgcatgcagcgatatgttgcttgagggcgggcctacgaccgcatcagttagggaagcaaaagaggacgaggaggacgaagagaagatccaaaacgaagactaccatcatgagcttagcgatggtgaccttgacctggacctggtctacgaagacgaggtcaatcagcttgacggctcttcatcaagcgcaagcagcaccgccacctctaataccgaagaaaatgatatcgatgaggagaccatgagcggggaaaatgatgtcgagtacaataatatggagctggaggagggagaactcatggaggatgctgctgcagcgggaccagctggatccagccacggttatgtgggcagcagctcccgcatatcccgcaggacccacttgtgctctgcagctacctcaagtctgttggacatcgaccccctcatcctgatccacctcctcgaccttaaggaccgatcatctatagagaacctgtgggggcttcagcctcgacctccggcgtccctgctacagccaactgctagctacagtagaaaggataaagatcaaagaaaacagcaggctatgtggcgggtgcctagtgacttaaaaatgctgaaacggctgaagacacaaatggctgaggtgaggtgtatgaaaacagacgtgaagaatacgctgtccgagattaagagctcctcagcagcgtcaggcgatatgcaaacgtcattattctctgctgaccaggcagctctcgcagcctgcggcactgagaactcaggcaggctacaggatctgggaatggagctcctcgcaaaatctagtgtcgcgaactgctacattcgaaactccacaaacaagaaatctaattcccctaagcctgccagatcgagcgtcgctggctccctcagtttgcggagggctgtggacccgggagaaaatagtaggtccaaaggagactgtcagacactgtcagaggggtcccccggcagctctcagagcggatccaggcacagctcgcctagggctttgatccatggttcaatcggagatatcctacctaagactgaggataggcaatgtaaggctcttgattcggatgcagtcgtcgtcgctgtattttcaggcttgccagcagtggaaaagaggaggaaaatggtgaccttgggcgcgaacgccaagggcggccacttagaagggctgcagatgacggacctcgagaacaacagtgagaccggcgagctccagcccgtgttgcccgagggagcctcagccgccccagaggaggatactcactccagctttccggacggcgagcagattggcccagaggacctgtcgttcaatactgacgagaactcagggaggtag

SEQ ID NO: 138866 - DNA, 2793 bp, synthetic construct
  misc_feature 1..2793: note = Description of Artificial Sequence: Synthetic coding sequence
  source 1..2793: mol_type = other DNA
atggacgaacagtctgtcgagcgctggttaaccgagcaaagagcccagtgcccccactgtagagcccccctccagctcagagaactggttaactgccggtgggccgaggaggtaacacagcaacttgatacacttcagctatgctccctaacaaagcacgaggagaatgaaaaagacaaatgcgaaaaccaccacgagaagctttcagtgttctgttggacctgtaagaagtgcatttgtcaccaatgcgccctgtggggcgggatgcatgggggacacacttttaagcccttagcagagatctacgagcaacacgttacaaaggttaacgaagaagtggcaaagctacgaaggagactcatggaactgatttccctcgtacaagaggttgaacggaacgttgaagccgtccggaatgcaaaagatgaaagagttcgtgagatcagaaacgcggtggagatgatgattgctcggctcgatactcagctgaagaacaagctcattacgctcatgggccagaaaacatccctcacccaggagacagagctgttggagagtctcctgcaggaagtggagcatcagctccgaagttgctcgaaaagtgaactgatttccaagtcaagtgagatcctgatgatgttccagcaagtgcatcggaagcccatggcctcttttgtcacaacccctgtgccccctgacttcacaagtgaactggtgccttcttacgacagcgctacatttgtgttagaaaacttttccacactacggcagcgggctgatcccgtttatagcccacctctgcaggtgtctgggctctgctggcgcctgaaagtttaccccgatggcaacggggtggtgcggggatattacctgagtgtctttctggagcttagcgccggactgcctgaaacctcaaagtacgaatatcgggtggaaatggtccaccagtcttgcaatgatccaacaaaaaacatcatacgcgagttcgcctccgatttcgaagtcggtgagtgctggggctacaatagattcttccggctcgacctcctggccaatgaggggtacctaaatccccagaacgacacagtaattctgcgatttcaagtccgctcacctacgttcttccaaaagtcccgggaccagcattggtatatcacccaactcgaggccgcacaaactagctacatccaacagatcaacaatttgaaagaacgccttaccattgagctgagtagaacgcagaaatccagagacctgtcgcccccagataaccatttgagccctcagaacgacgacgctcttgaaacgcgcgcgaagaagtctgcatgcagtgatatgctgcttgaaggggggccaactacagcatctgtacgggaggcaaaagaggacgaggaagacgaggaaaagatacagaatgaggattaccaccatgaactgagcgatggagatctggaccttgaccttgtctatgaggatgaggtaaatcagctcgacgggagcagttcatcagcgtcttccaccgccacatctaataccgaggagaatgatatcgacgaggaaaccatgtcaggtgaaaacgacgtggagtacaataacatggagctcgaggaaggtgagctgatggaagacgcagctgcagcagggccagccggatccagccacgggtacgtgggcagttcctcccgaatttcaaggcggacacacctatgctccgccgccactagctccctgctagatatcgatcccctgatactgatccacttactcgacctaaaggacaggagctccatagagaacctgtggggcctacaaccaaggcctccagcgtccctgctgcagccgaccgcttcttactctagaaaggataaggatcagcgcaagcagcaggccatgtggagggtgccttcagacctcaaaatgcttaagcggctgaagacacagatggccgaggtgcgatgtatgaaaaccgacgttaagaacaccctgagcgaaattaaatccagcagcgccgccagcggcgacatgcagacatctctattttccgccgaccaggctgcattagcagcatgcgggaccgagaattccggcaggctgcaagaccttggaatggaactgctggcgaaatccagcgttgccaattgttatatacggaatagtaccaacaagaagtccaacagtcccaagcctgccagatcctcagtggccggttctttatcgttgcgccgggccgtggaccccggcgagaattcacggtctaagggtgactgccagacactttctgaaggttcgccgggttcatcacagtccgggtcacgccactcctctccaagggcactgatccacggctccatcggcgacatcctgcctaaaaccgaagacaggcagtgtaaggcgcttgattctgacgccgtggtcgtcgctgtgttctctgggttgccagcggtagaaaaaagacggaagatggtgacattgggagccaacgcgaagggggggcatctggaaggtctccagatgactgacctggagaacaactcagagacaggcgaactgcagcctgtccttcccgagggggcctcagcagctccggaggaaggcatgtcttccgatagtgacatagagtgcgacacagagaatgaagagcaagaggagcatacaagcgtaggagggtttcacgacagcttcatggtaatgacacagccacccgatgaggacactcactcctcttttcctgatggcgagcaaattgggcctgaagacctgtcgttcaatacagatgagaactctgggcggtag

SEQ ID NO: 138867 - DNA, 2895 bp, synthetic construct
  misc_feature 1..2895: note = Description of Artificial Sequence: Synthetic coding sequence
  source 1..2895: mol_type = other DNA
atggacgaacagagcgttgagtcgattgcggaggtgtttagatgtttcatttgcatggaaaagttgcgagacgctcggctgtgtccccattgttcgaaattgtgctgcttcagctgcatacgcagatggcttacagaacagcgtgcccagtgcccccattgccgggcccccctgcagctccgggagcttgtgaattgcaggtgggcggaggaggtgacacaacagctggatactctgcagctctgttccctgaccaagcatgaggaaaacgaaaaggataaatgcgagaatcatcacgaaaaactctccgtcttctgttggacatgcaaaaaatgtatatgccatcagtgtgccttgtgggggggcatgcatggaggtcacaccttcaaacccttagctgagatctatgagcagcacgtcactaaagttaacgaagaggtcgcaaaactcaggaggcggctcatggaactcatcagcctagtgcaggaggtcgagagaaacgtggaggcagtgagaaatgctaaagacgagagagtgcgtgagattcgcaatgcagtagagatgatgatcgcacgcctggatactcaactgaagaataaactgattacgctgatggggcagaaaacaagcctgactcaggagaccgaacttcttgagtcattgttgcaggaagtagaacatcaattacgcagctgcagcaaatccgaattgatcagcaaaagctccgaaatcctgatgatgttccagcaggtacatagaaagccaatggcctcttttgttactacccctgtgccccctgattttacctccgagctggtgccctcttacgactctgccacattcgtgcttgaaaacttcagcacactcaggcagagggccgatcctgtgtattccccaccccttcaagtctctgggctgtgttggcggttaaaggtgtatccggatgggaatggcgtggtcaggggctactacctgtcggtgttcctggagttgagcgccgggctccccgaaacttctaaatacgaataccgcgttgagatggtgcaccagtcctgcaacgaccctacaaagaacataattcgagaattcgcctctgactttgaggtcggagagtgttggggttataacagattttttcgactggacctcctcgccaatgaaggatatctgaacccacaaaatgatactgttatacttcgattccaggtacggtcgccgactttctttcagaaatcgcgcgaccaacattggtatatcactcaactcgaagctgcacagacaagctatatccagcagatcaataatttgaaagagaggcttacaatcgagctgtcgcgcacccagaagtctagggatctaagcccccctgataaccatttatctccccagaacgatgacgccctggaaacacgggcaaagaagtcggcatgcagtgatatgttgctggaaggcggccccacaacagcgtctgtgagggaggctaaggaagacgaggaagacgaagagaagatccaaaatgaggactaccatcacgaacttagcgacggagacttggatctggatctcgtgtatgaagatgaggtgaaccagttagacgggtcatcgagctcggcgagctctacggcgacaagtaatactgaagagaatgatatcgacgaggaaaccatgtccggagagaatgacgtcgaatataataatatggagcttgaggaaggcgagctcatggaagacgccgccgccgcaggccctgccggctcctcccacggctacgtgggctcatcctctagaatatcccgcagaacccacctgtgctctgcggctacatcaagtttgcttgatattgaccctctgatcttaatccatctcctagatctcaaagacagatcgtcaattgagaatctgtggggtcttcagccccgccctcccgcatccctgcttcaacctaccgcttcttacagtcgcaaggataaggatcaacgcaaacagcaagccatgtggcgcgtgccttctgaccttaaaatgctcaagaggctcaaaactcagatggcagaggtccggtgtatgaagaccgacgttaagaatacactgagcgagataaaaagcagttcagctgcatctggagatatgcagacctctttgttcagcgctgatcaggctgccctggctgcctgtggcactgaaaactctggccggttgcaggatctgggaatggaactattggccaagtcctctgtggctaactgttacattcgcaactctacaaacaaaaagagtaatagccccaagcctgcccgttcttccgtggcagggtctttatctcttcgcagggcggtagacccgggggagaactcccgtagcaaaggtgactgtcaaacattgagcgaaggctccccaggctccagccagtcaggttcaagacatagttcaccacgagcgctgattcatggcagcatcggcgatattctgcccaaaacagaggacaggcagtgtaaggccttagactcagatgcggtagttgtggcggtgtttagtggtctaccggctgtcgagaaaaggaggaagatggtcacactcggcgccaacgctaagggcggccacctggaggggttacagatgactgatctggagaacaactcagaaactggtgaattgcagccagtcttgcctgaaggcgcctccgcagcaccagaggaagggatgagctcagatagtgacatcgagtgtgacaccgaaaatgaggagcaggaggaacatacctctgtggggggattccacgacagcttcatggtgatgacgcagcctcccgatgaagacactcacagctcctttcccgatggtgaacaaatcggcccagaagatctttccttcaatacagacgaaaattcggggcgctag

SEQ ID NO: 138868 - DNA, 1557 bp, synthetic construct
  misc_feature 1..1557: note = Description of Artificial Sequence: Synthetic coding sequence
  source 1..1557: mol_type = other DNA
atggctgaaaccagtcttcttgaggcaggggcaagtgcagcctccactgcagctgccctggaaaacttgcaggttgaagcatcctgctcagtgtgccttgagtatttgaaggagcctgttattattgagtgtggtcataacttttgcaaggcttgtatcacgcgatggtgggaggacttggaacgggactttccatgtcccgtctgtcgcaagactagtaggtataggtccctccgccccaatcgccagctgggaagtatggtggagattgctaagcagctccaagccgtgaaaaggaaaatccgtgacgagtcactatgtcctcaacatcacgaggccttgtccctgttctgctatgaggaccaagaggcagtctgtctaatttgcgccatctcacacacacacagagcacataccgtggtgcctctggatgacgccacgcaggagtataaggagaaactgcagaagtgcctcgaaccccttgagcaaaaactccaggagatcacccgatgtaagtctagcgaagagaagaaacccggggagttgaagcgactggtcgagtccaggcgccaacagatcctgagggagtttgaggaactccatcggagactcgacgaagagcaacaggtgttgctgtctcggttggaggaagaggagcaggacattctccagcggctccgggagaacgctgcccatttaggagacaagcggcgcgatctggcacacctcgccgccgaggttgaaggaaaatgccttcagtctggcttcgaaatgcttaaagacgttaagtctacccttgagaagaatatacctagaaagtttggcggctccctgtctaccatctgtcccagggatcataaggccttgctcggcctggtgaaggagattaaccgatgtgaaaaggtgaaaacgatggaagtcacaagtgtcagtattgaactggagaagaacttctcaaatttccccaggcagtatttcgccctccggaagattctaaaacagttaatagccgatgttaccctggacccagagactgctcaccctaacttggtgcttagcgaggatcgcaagtccgtgaagttcgtggagacacggcttcgtgatttgcccgacacccctcgccgctttactttttacccatgtgtgttggctactgaaggattcacatccggacggcactactgggaggtggaggtaggcgacaagacacattgggccgttggtgtctgtagggactccgtgtctaggaagggagaactaactcctcttcccgaaaccggctactggcgggtgcgtctctggaacggcgacaaatacgcagccacgacaacacctttcacaccgctgcacattaaggtaaaaccaaagagagttggtatttttctcgactacgaagccgggacactaagtttttacaatgtcaccgataggagtcatatctacacgtttacagacacttttacagaaaaactgtggccactgttttatcccggtattagagccggacggaaaaatgcagccccacttaccataagacccccaacagactgggagtag

SEQ ID NO: 138869 - DNA, 1467 bp, synthetic construct
  misc_feature 1..1467: note = Description of Artificial Sequence: Synthetic coding sequence
  source 1..1467: mol_type = other DNA
atggcagagacatccctgctggaggctggggctagtgccgcctctactgccgccgctctcgaaaatctgcaagtggaggcttcctgctctgtgtgtctggaatacttgaaggagccggtcatcattgaatgtggccataacttctgcaaagcttgcatcactagatggtgggaagatctcgaaagagattttccctgccctgtctgtcggaaaacctctcgctatcgctcactgcgtccaaatcggcagcttggctcgatggtcgaaattgccaaacaactgcaggctgtcaagcgcaagattagggatgagagcttgtgtccccagcaccacgaggcgctgagtcttttttgttatgaggatcaggaggctgtttgcctgatctgtgcaatatcccacacgcaccgcgcccatactgttgtccccctcgacgacgccacacaggaatataaagaaaagctccagaagtgcctagagcctctcgaacagaagctccaggagatcacacgttgcaagagctcagaggagaaaaagcccggcgaactgaaaaggctggtggaaagtcggcggcagcagattctgagggagtttgaggaacttcatcggaggctggatgaggaacaacaggtattacttagtcgtctcgaagaggaagagcaagacatactacaaaggctgagggagaatgctgctcaccttggtgataagcggcgcgatctcgctcacctcgccgccgaggtggaaggaaagtgccttcagagcggctttgaaatgctgaaggacgtcaaatctacgctcgagaagtgtgagaaggtgaaaactatggaagttacgtccgtcagcatcgaactagagaaaaacttttccaacttccctcgacaatactttgcactccgcaaaattctgaagcagctgatcgcagacgtcaccctggatcccgaaactgcacacccaaacctcgtgctttccgaggacagaaagagcgtcaaattcgtggaaactcgcctcagagaccttcctgatacgccccggagatttactttttacccatgcgtgctcgcgacggagggtttcactagcggaaggcactattgggaggtagaggtgggcgacaagactcactgggcggttggggtatgtcgcgactccgtctctcggaaaggtgagctgactcctttgccagagacaggctattggcgcgtcagattgtggaatggcgacaaatacgctgcaactacaacgccgtttacacctctgcatattaaggtgaagcctaaacgcgtgggcatcttcctcgattacgaagctggcaccttgtctttttacaatgtcaccgatcgtagtcatatttataccttcacagatacctttaccgaaaaactttggccattattttaccccggcatccgtgcgggtcggaaaaacgccgctcccctcaccatcaggccgccaaccgattgggagtag

SEQ ID NO: 138870 - DNA, 1467 bp, synthetic construct
  misc_feature 1..1467: note = Description of Artificial Sequence: Synthetic coding sequence
  source 1..1467: mol_type = other DNA
atggccgaaacctccctcctcgaagcaggcgcatcagcagcttctaccgctgccgcattggagaaccttcaggtagaggcaagctgttccgtttgtttggagtatctgaaggagcccgtgatcatcgagtgtggccacaacttctgtaaggcgtgcattactcgctggtgggaagaccttgaaagagattttccctgcccggtgtgtcgtaagacatctagatataggagtctgaggccaaacagacagttgggcagcatggtggagatagcgaagcagctccaggccgtcaaaagaaaaataagagacgaaagcctatgtccccagcaccatgaagccttgtcgctgttttgttatgaagatcaggaagctgtttgtctcatctgtgccatttctcacacacacagggcccacactgtggtacctctggatgacgctacacaagagtataaggaaaagttacaaaaatgtctggaacctttagagcagaaactgcaggaaattactcgatgcaagtcaagcgaagagaagaagcccggtgaactgaaacggctcgtagagtcaagaaggcagcaaattctccgtgagttcgaggagctccaccgccggctagatgaggagcagcaggtgttgttgagccggctggaggaagaggaacaagacatacttcagaggctacgggaaaatgcagctcaccttggggacaaacgcagagatctggcccacctcgctgccgaggtagagggaaaatgcttacagtccgggttcgaaatgttgaaagatgtgaaaagcaccctggagaaatgcgaaaaggtgaaaacaatggaggtcacctccgtgagtatcgagttggagaaaaatttctcgaacttccctcgccaatactttgcgttgagaaagatcctaaaacagttaatcgccgatgtgacactggacccagagaccgctcatccaaatctggtcctgagcgaagaccgcaagtccgtgaaatttgtggagactaggctccgcgacttgccggataccccacgaaggttcaccttctatccttgtgtgctggccactgagggttttacttctgggcgccactattgggaagttgaggtcggagataaaacccattgggcggttggggtttgccgagatagtgtctcgcggaaaggagagctcacccccctgccagagaccggctactggcgcgttcgcttatggaacggcgacaaatacgcagcaaccacaaccccattcacgccgcttcatattaaagtgaaacctaaacgcgttggcatctttctcgactacgaggccggtacattgtccttttacaacgtcaccgataggagtcacatatacacatttaccgacacattcactgaaaagctgtggcctctcttttacccaggaatccgggcgggtcgcaaaaacgccgctcccttgacgatccgtccccctacggactgggagtag

SEQ ID NO: 138871 - DNA, 1557 bp, synthetic construct
  misc_feature 1..1557: note = Description of Artificial Sequence: Synthetic coding sequence
  source 1..1557: mol_type = other DNA
atggcagagacaagcctgcttgaagcgggtgcctccgccgcttcaaccgctgccgctctcgagaatctccaggtggaagcctcttgcagtgtgtgcctggaatatctgaaggaaccagtaattatcgaatgcggtcataacttctgtaaagcatgcatcacgaggtggtgggaagatctggaacgggactttccatgccctgtctgcagaaaaactagccgctaccggtcccttcggcccaaccgtcagcttgggagtatggttgagatcgcaaaacagctgcaggccgttaaaagaaaaatacgtgacgagtcgctttgccctcagcatcatgaggcattatccctgttttgctacgaggaccaggaggcagtgtgcctgatctgtgcaatctcacacacccacagagctcacaccgttgttcccctcgatgatgctacccaagagtacaaggaaaagttgcaaaaatgtctggagcccctcgaacaaaagctccaggaaatcaccaggtgcaagtcaagtgaggaaaagaagcctggggagctgaaacgcctggtggagagtcgtaggcaacagatcctgcgggagttcgaagaactgcataggcgacttgatgaagaacagcaggtgttattgtcacgcttggaggaggaggaacaagacatccttcagaggctgcgcgaaaatgcggctcaccttggagataaacgtcgcgatctggctcatttggccgccgaggtcgaggggaagtgcctgcaatctgggttcgaaatgctcaaggatgtcaaaagtacactagaaaagaacattcctagaaagtttggtgggagtctatcaacaatctgtcctagggaccataaggctctcttgggactggtaaaagagatcaatcgctgtgagaaagtgaaaaccatggaagtgacatctgtgagcatcgagcttgagaaaaatttctctaactttcctagacagtatttcgcacttaggaagatactcaaacaactaattgctgacgtgaccttggatccggaaaccgcacacccaaatctggttttgtccgaggacaggaagtccgtaaagtttgtggagacacggctgcgcgaccttcccgatactccgaggagatttacattttatccctgcgtgctagccaccgagggtttcaccagtggaaggcactactgggaagtggaagttggcgacaagacccactgggctgttggcgtgtgtcgggattccgtgtcaagaaaaggggaactcactccactacccgagaccgggtactggagagtccggctctggaacggcgacaagtacgccgctacaacaactccatttacccctctgcacattaaggtgaaacccaagagggtgggcatttttttagactatgaggcagggacacttagcttttacaatgtaacggaccgctcgcacatttatacctttaccgacacattcactgagaagctgtggcccttgttttacccggggatacgtgcaggtcgtaagaacgccgcccctttgaccatccggccccctactgactgggagtag

SEQ ID NO: 138872 - DNA, 1467 bp, synthetic construct
  misc_feature 1..1467: note = Description of Artificial Sequence: Synthetic coding sequence
  source 1..1467: mol_type = other DNA
atggccgagaccagcttgctcgaagctggagcatcggccgcctcaacagcggctgccttggagaacctacaggtcgaggcctcctgttccgtctgcctggagtacctcaaggagccagtgataatagaatgtggacataacttctgcaaagcatgcattacccgctggtgggaggacctagaaagggatttcccctgtccagtctgccggaagaccagtcgctaccgcagtctacgtcctaatcggcagttgggttctatggtggaaatcgctaaacagttacaggctgtgaagcggaaaataagggacgagtctttgtgtcctcaacatcacgaggcactctccctgttttgttacgaagatcaggaagccgtgtgtctaatttgcgctatcagccacacacatagagctcacaccgtggtgcctttggacgatgctacccaggagtataaagaaaaactgcagaaatgccttgaaccactggaacagaagctgcaagagattacacgttgtaaatcatccgaggagaagaaacctggcgagctcaaaagactggtggaaagtaggcggcagcaaatcctgcgcgaattcgaggagctccaccggcgtctggacgaagagcaacaagtgttactgtctcgcttggaggaggaggagcaggatattctgcagcgtcttcgcgagaacgcagcgcacctgggtgacaagagacgcgacctagctcatttggccgcagaagtcgagggaaaatgcctccaatcaggcttcgaaatgttaaaggatgtcaagagtacgctggaaaagtgtgagaaggtgaaaacgatggaagtgacttccgtcagtatcgagctggaaaagaacttcagcaatttcccccgtcagtactttgctctgcgcaagatccttaaacagcttatcgcagacgtcacgctggaccctgaaacagcgcatccgaacctggtcttatctgaagaccgcaagagcgtgaagttcgttgagactcgcttgagggacttgcccgacaccccgcgccggtttacgttctatccttgtgttctggccactgaaggatttacttctgggagacactactgggaagtggaagttggagacaaaacccactgggccgtcggcgtctgtagagactccgtctccagaaagggagagctgacccccctaccagaaaccggatattggagagtgcgcctctggaatggcgataaatatgccgctaccaccacaccttttactccgctgcacattaaagtaaaaccaaagcgtgtggggatcttcttggattacgaggcaggcacgctctctttctacaatgtcacggatcgttctcatatctatacttttacagacaccttcacagagaagctatggccacttttctaccctggaatccgggctggccgtaagaacgctgcccctctcaccatcagacctcccaccgactgggaatag

SEQ ID NO: 138873 - DNA, 1557 bp, synthetic construct
  misc_feature 1..1557: note = Description of Artificial Sequence: Synthetic coding sequence
  source 1..1557: mol_type = other DNA
atggccgaaacctctctgctcgaggccggcgcctccgcggcatccaccgctgctgcgctcgaaaacttgcaggttgaggccagctgtagtgtctgccttgagtacctcaaggagccggtgattatagagtgtggacataacttttgcaaggcctgcataacgaggtggtgggaggatctggagagggatttcccttgtcccgtctgcagaaagacaagtagatatcgcagcctcagacccaatcgccagctcggaagcatggttgaaatcgccaagcagctgcaggccgtaaagcggaaaattagagacgagtcgctatgtccgcagcaccacgaggcattgtctttgttttgctacgaggaccaggaagccgtgtgtctgatttgtgccatatcacacacacacagagcccacacagtggtgcctctcgatgatgccacccaggagtataaggaaaagttacagaagtgtctggagcctcttgagcagaagctccaggagatcacgcggtgtaaatccagtgaggagaaaaagccaggagagctgaagagacttgtggagagccgtcggcagcagattctgcgcgagtttgaggaactgcaccgaaggctggacgaggagcagcaggtcctactttctaggttggaggaagaggaacaggacatactccaacgccttagggagaatgctgcccatttgggtgacaaacgccgggacctggctcacctcgccgcagaagttgaagggaagtgcctccagtccgggtttgagatgctcaaggacgtgaaatccactctcgaaaaaaacatccccagaaagttcggaggctcactgtctactatctgcccccgtgatcataaggcactgctgggtctggtgaaggaaatcaaccggtgcgagaaagtgaagaccatggaggtcacgagtgtgagcatagagcttgaaaagaatttctcaaatttccctcggcagtattttgcattacgcaaaatcctaaagcaactgatagccgacgtgaccctggatcccgagactgctcacccaaacctggttctttcagaggataggaagtcagtgaagtttgtggagactcggctgagagatctgcctgacacaccccgccgctttaccttctatccttgtgtgttagcgactgaggggtttacctccggtagacactattgggaggtggaggttggcgacaagacacattgggccgttggggtttgcagggacagcgtctccagaaagggagagctgaccccactgcccgagacgggctattggcgggtccgactttggaacggcgacaaatacgctgcaacgaccacccctttcacacctcttcacatcaaggtcaagcctaagcgcgtcggtatttttttggattacgaagccgggacactctctttttataatgtgacggaccgtagtcacatctataccttcaccgacaccttcactgaaaaactgtggccactcttttaccccggtatccgggcaggcagaaagaatgcagccccgcttactataaggcccccaaccgactgggaatag

SEQ ID NO: 138874 - DNA, 1467 bp, synthetic construct
  misc_feature 1..1467: note = Description of Artificial Sequence: Synthetic coding sequence
  source 1..1467: mol_type = other DNA
atggctgaaacttcattacttgaagctggggcttcggcagcctctactgccgccgcattggagaacttacaggttgaagcatcctgcagcgtttgtctggagtatcttaaggagcccgtgattatcgaatgcggacataacttttgcaaggcatgtatcactagatggtgggaggacctcgagcgcgattttccatgcccagtgtgccggaaaacatctagatacaggtccctgcgcccaaaccgccaattaggatcaatggtagagatagcaaaacaactgcaggccgtgaagaggaagatccgggatgaatctctgtgcccgcaacaccatgaagcactcagccttttttgttacgaggatcaggaagctgtctgcctcatctgcgccatatcccacacacaccgcgcacatacagtcgtgcctctggatgacgcaacccaggaatataaagaaaaactccagaagtgcctggaacctctggagcaaaaactacaggaaattaccaggtgcaaatcatccgaagagaagaagccgggcgaactgaagcgactcgtggaatcccggaggcaacagatcttgagggaattcgaggaacttcacaggagattagatgaagagcagcaggtcctgctgagtcgactggaggaggaagaacaggatatactacaacgactgagagagaacgcagcccacctgggagacaagagaagggacttagctcacttggcagcagaggtcgaagggaagtgcctccagtccggctttgaaatgctgaaggacgtgaagtctaccctcgagaagtgtgaaaaagttaaaacaatggaggtgacatccgtgtccatcgagctggaaaaaaatttctcgaacttcccacgacagtattttgctttaaggaagatccttaagcaactgatcgccgatgtaactctggatcctgaaacggcacaccctaacctggtcctgagcgaagaccgtaagagcgtgaaatttgtagaaaccaggctgcgcgacctaccagacacccccaggcggtttaccttctacccttgcgttctcgccacagaaggcttcacctccggtagacactattgggaggtggaagtgggcgacaagacccattgggccgtgggggtctgccgtgatagtgtatccaggaagggcgaacttaccccgttgccagaaacaggctattggagagtccggttatggaatggagataagtatgctgcaacaaccacacctttcactcctctgcacatcaaagttaaaccaaagagggtgggtatatttttagattacgaggctggaacactgagtttctacaacgtaacagacagatcgcatatttacactttcactgataccttcaccgaaaaactctggcctctgttctacccaggcattcgtgccggacgcaagaacgctgctccccttactataagaccgcctaccgactgggaatag

SEQ ID NO: 138875 - DNA, 1467 bp, synthetic construct
  misc_feature 1..1467: note = Description of Artificial Sequence: Synthetic coding sequence
  source 1..1467: mol_type = other DNA
atggccgagacctccttgttggaagcaggagcgtccgcagcaagtaccgctgcggctttggagaacttgcaagtggaggccagctgttctgtgtgcttagaatatttaaaggaaccagtgattattgagtgtgggcataacttctgcaaggcttgcatcactcggtggtgggaagatctggaacgcgattttccctgtcccgtctgccggaagacgtcacgctaccgttcactgcggccgaataggcagctgggttcaatggtggaaatcgcaaaacagctgcaggctgtcaaacgaaagatacgggatgaaagcctgtgtccacagcaccatgaggcgctgagtttattctgctacgaagaccaggaagcggtgtgcctcatttgcgccatttcacacacacaccgcgctcacacagtggtcccgcttgatgatgcgacccaggagtataaggaaaagctccaaaaatgcctggagccacttgagcagaagctccaggaaattactcgctgcaagtcgagtgaagaaaaaaagcctggagaattgaagagattggtcgaatctcgacgacagcagatactccgcgaatttgaggaacttcacaggagactggacgaggagcagcaggtactgctgagtcgtttggaggaggaagagcaagacattctccaacggctgcgtgagaatgccgcccacttgggcgacaagagacgggaccttgctcacctggcagccgaggtcgagggtaagtgcttgcaaagtggctttgagatgctgaaagacgtgaaaagcaccctcgaaaagtgcgagaaggtaaagaccatggaagtcacatccgtgagcattgagctcgaaaagaacttttctaattttccacgccagtacttcgcccttagaaaaatactcaagcagttgattgcagacgttactcttgatccggagacagctcaccccaacttggtgctgagcgaagataggaaatccgtgaaattcgttgagaccagactgcgagacctcccagataccccaagaaggttcactttctatccttgtgtattggccactgagggatttacgtcggggcggcactattgggaagtcgaggtgggcgacaaaacacattgggcggtgggcgtttgtcgcgatagcgtgtcgcgcaagggggaactcaccccattgcccgaaaccggctactggcgggtccgactgtggaacggcgacaagtacgccgctacgactacacccttcacaccgctgcatataaaggtgaaaccaaaaagggtcggcattttcctggactatgaggctgggacgctcagtttttataacgtgacagaccggagccatatatacacattcacggatacttttactgagaagctttggccgttgttttatcccgggattagggcaggtcgaaaaaacgcagccccactgacaatcaggccacccacagactgggaatag

SEQ ID NO: 138876 - DNA, 1467 bp, synthetic construct
  misc_feature 1..1467: note = Description of Artificial Sequence: Synthetic coding sequence
  source 1..1467: mol_type = other DNA
atggccgagacctctcttctcgaggctggggcatctgcggccagcacagcagcagctctggaaaacctacaggttgaggcttcctgcagtgtatgtctggagtacctgaaagaacccgtaatcatcgaatgcggtcacaacttctgtaaggcgtgcataaccagatggtgggaagacctcgagcgggattttccctgtcctgtctgcaggaagactagtagatataggtcgcttaggccaaacagacaacttggttccatggtagagatagccaagcagcttcaggccgtgaagcgaaaaattagagatgaaagcctttgcccacagcatcacgaggctctctcccttttctgctacgaagaccaagaagctgtgtgcctcatttgcgctatctcccacactcaccgagcacacaccgtggttccgctggatgacgccacccaagaatataaggaaaagttacaaaagtgcctagaaccactcgaacagaagctgcaggaaatcacaagatgcaaatccagcgaggaaaagaaacctggggaactaaagcggttggtagagtcccgcagacagcagattctcagagaatttgaggagttacacaggagactggacgaggagcagcaagtactgctatctcggctggaggaggaggagcaagacatactgcaacgtctaagggaaaatgcagcccacctgggggacaaacgccgggatctcgcccatctggccgcagaagtcgaaggaaagtgcctccagtccggatttgaaatgctgaaagatgtaaagtctactctggagaagtgcgagaaagttaaaactatggaagtgactagtgtgtctatcgagttggaaaagaacttcagcaattttccaaggcaatacttcgccttacggaaaatactgaaacagctcatagcggatgtgactctagacccagagaccgcccaccctaatttggtgttaagtgaagatcggaaatcagtaaagttcgtggagacccgcctgcgggaccttccagatacgccccggagatttacgttttatccttgcgtattggctacagaaggattcacatcagggaggcattactgggaggtcgaagtcggcgacaagactcactgggcggtcggcgtgtgccgtgatagcgtcagcaggaaaggggaattgactcccctgccagagaccggatattggcgggtgaggctgtggaacggcgataagtacgccgccaccaccaccccctttacaccacttcacattaaagtgaagcccaaaagagtggggatcttcctagattatgaggctggaacactttctttctataacgtgactgataggagccacatctataccttcaccgatacattcacagagaagttatggccactcttttatcctggaatccgagctggtcgcaaaaatgctgccccattgacaattcggccacctactgattgggaatag

SEQ ID NO: 138877 - DNA, 435 bp, synthetic construct
  misc_feature 1..435: note = Description of Artificial Sequence: Synthetic coding sequence
  source 1..435: mol_type = other DNA
atggcagagaccagtctgctagaagcaggcgcgtccgccgcctccaccgctgccgccctcgagaacctacaggtggaggccagctgtagcgtatgcctcgaatacctgaaagaaccagtaataatcgagtgtgggcataatttctgcaaggcgtgtataactaggtggtgggaggaccttgagagggatttcccttgtccagtctgccgaaaaacaagccgatatcgcagtctccgtccaaataggcagctcgggagcatggtcgagatcgcaaaacagcttcaggcagtcaaacgtaaaatccgtgacgagagtctatgtccgcagcaccacgaggccttgtctctgttctgctatgaagatcaggaggctgtgtgtctcatttgtgcaatctcccacacgcaccgagctcacaccgtggtgccgctggattag

SEQ ID NO: 138878 - DNA, 684 bp, synthetic construct
  misc_feature 1..684: note = Description of Artificial Sequence: Synthetic coding sequence
  source 1..684: mol_type = other DNA
taaacatcccggtacagatccctcagacctaaccgccagcttggaagcatggtggaaatcgccaagcaactgcaagcagtaaagagaaagataagagacgagagtctctgcccacaacaccacgaggccctaagtctgttctgctacgaggatcaggaggctgtgtgtttaatctgcgccatctctcacacccaccgcgcgcacaccgttgtccccttggatgacgccacccaagagtacaaggaaaagctgcaaaagtgtctggagccgctggagcaaaagctccaggagatcacgaggtgtaaaagttccgaggaaaaaaaacctggtgaacttaagcggctggtggagtcgcggcgtcagcagatcttgcgggagtttgaggagctgcatcgcagactggacgaggagcagcaagtcttactcagtcgtcttgaggaagaagagcaggatatactgcagaggctgcgggaaaacgcagcacatctgggcgataagcggagagatttagcgcacctggccgcagaggtggaaggtaaatgcctgcagtccggtttcgagatgttgaaagacgttaaatccacacttgaaaagtgtgaaaaagtcaagactatggaagtcaccagtactactccttgcaccagccttcactctgagattaacgataacgtgaggggccgctag

SEQ ID NO: 138879 - DNA, 225 bp, synthetic construct
  misc_feature 1..225: note = Description of Artificial Sequence: Synthetic coding sequence
  source 1..225: mol_type = other DNA
atggctgagacgtccctgctagaagccggcgcctccgcagccagcaccgctgccgctcttgaaaatctgcaggtcgaggccagttgctcagtttgtctggaataccttaaggaacccgtgattattgaatgcggccacaacttctgtaaggcctgtatcactcgatggtgggaggatctggagagagattttccctgccccgtttgcaggaagacgtcaagatag

SEQ ID NO: 138880 - DNA, 1254 bp, synthetic construct
  misc_feature 1..1254: note = Description of Artificial Sequence: Synthetic coding sequence
  source 1..1254: mol_type = other DNA
atggtggagattgcaaaacagctgcaggccgtgaagcggaagatcagggacgaaagcttatgccctcaacaccatgaggcgctgtccttattttgttacgaggaccaagaggccgtctgtttgatttgtgccatctcccacacacacagagcccacacagtggttcctttggacgacgcaacacaagaatacaaagagaaactgcagaagtgccttgaaccgttggagcaaaagttgcaggagatcaccagatgcaagtcttctgaggaaaaaaagcccggtgagttgaagagacttgtagagtcccgccgtcagcagatactgcgcgaatttgaagagttgcaccgtcggctggatgaggagcagcaggtgcttttgagccgcctggaggaagaggagcaggacatcctgcagaggctgcgggagaatgctgcccacctgggcgacaagcgcagggatctcgcccatctcgccgctgaggtggaaggcaagtgtctgcagagcggatttgagatgctgaagcccgttttgtcggcgagggaggaatgcgaaaaagtgaagactatggaagtgacttctgttagtatagagctcgagaaaaattttagcaatttccccagacagtacttcgctctgaggaaaattctgaaacagctcattgcagatgtcaccctggatccagagactgcccacccaaatctggtgctatccgaagataggaaaagcgtaaaattcgtcgagacacgattacgcgacctgcctgacacccccagacgatttaccttttatccttgcgtgctcgcgacggaggggtttacttctggacggcattactgggaggtggaagcagctcactgtgtcctagctcaggatccagagaatcaagccctagccaggttttactgctataccgaaaggactatcgcgaaacggctggtgctcaggcgcgatccctcggttaagagaacactgtgcaggggttgcagctccttgctggtgccaggcctgacatgcactcagagacagcgcaggtgccggggacagcggtggaccgtgcaaacctgcctaacgtgtcaacgttcccagcggttcctgaacgaccccggccatctcttgtggggcgatcgcccggaggcgcagcttgggtcccaggcagacagcaagccccttcaaccattaccaaatacagcccatagcatctctgaccgcctgcccgaagagaagatgcaaactcaggggagttctaaccaatag

SEQ ID NO: 138881 - DNA, 1557 bp, synthetic construct
  misc_feature 1..1557: note = Description of Artificial Sequence: Synthetic coding sequence
  source 1..1557: mol_type = other DNA
atggcagagacaagcctcttggaagcgggtgcttcagcagcttctaccgccgccgcccttgaaaatttgcaggtggaggcctcttgtagcgtgtgcctggagtatcttaaggaaccagtcatcattgagtgcggacacaacttttgtaaggcctgtataacccgctggtgggaggatctggagagggactttccctgtcctgtgtgccggaaaacgtctagataccgttctctgcggcccaaccgccagctgggcagcatggttgaaattgcgaaacaactgcaagctgtcaaaaggaaaatccgggacgaatcactgtgcccgcagcaccatgaagccctatctctgttttgttacgaggaccaggaagcagtgtgtttgatctgtgctatcagccatacacatagggcccacaccgtcgtaccactggatgacgccacgcaggagtacaaagaaaaattgcagaaatgcctggagcccctggaacagaaacttcaggaaattaccagatgtaagagttccgaggagaaaaagccaggcgagctaaaacgcttggttgaatccaggcgccaacagatcctacgggaattcgaggaacttcatagaagactggatgaggagcagcaagtgctgttgagccggctggaagaggaggaacaggacattttgcaaagacttcgtgagaatgcggcacatttaggcgacaaacgtcgggatctggctcacctcgctgctgaggtagaaggcaaatgcctgcaatctggctttgaaatgcttaaggatgtcaaatctactctagaaaaaaatataccacggaagttcggagggtctctctctactatttgtccacgtgatcacaaggccctcctaggactcgtgaaggaaatcaaccggtgcgagaaagtgaagactatggaagtgacctcagtatccattgagctcgagaaaaacttttccaacttcccacgacagtacttcgcactgagaaagatcttaaagcaattaatcgctgacgtcaccctggatcccgagacagcgcacccaaatttggtcctgtctgaggaccgaaagtccgtcaaatttgtggaaacccgattgagagatctccccgacaccccccgccgatttaccttttacccctgtgtgttggccacggagggattcacaagtgggcggcattattgggaggtagaggtgggtgataagacacattgggcagtgggagtttgtcgtgatagcgtgtctaggaaaggtgagctgaccccattgccagagacgggatactggcgcgtgcggttgtggaacggggacaaatatgccgctaccaccacccccttcacacctctccacatcaaagttaagccaaagagggtgggcatcttcctcgactatgaggctgggacactgtctttttacaatgtcaccgataggtctcacatctacaccttcacggatacgtttaccgagaagctgtggcccctgttttatcctgggatcagggcaggccggaaaaacgcagcacccctcactatacgacctcctaccgattgggaatag

SEQ ID NO: 138882 - DNA, 1467 bp, synthetic construct
  misc_feature 1..1467: note = Description of Artificial Sequence: Synthetic coding sequence
  source 1..1467: mol_type = other DNA
atggctgaaacctctctcttggaagccggtgcttcagctgcaagcacagcagcggcccttgaaaatttacaggtggaggctagctgtagcgtgtgcctggaatatcttaaagaacctgttatcatcgagtgcggacacaatttctgtaaagcttgcattacccggtggtgggaagatttagaaagagacttcccctgcccagtgtgtaggaaaactagtagatatagatccctccgccccaatcggcagttggggtccatggttgaaatcgctaagcagctgcaagcagtgaaaagaaagatccgggatgagagcctgtgcccgcagcatcacgaggcactttcattattctgctacgaagaccaagaagccgtgtgtctgatttgcgccatttcccatactcacagggcccacacagtcgtgccattggatgatgctacccaggagtacaaggagaagctgcaaaaatgtctggaacctttggagcagaaactgcaggaaataacgcgctgtaaatctagtgaggagaagaaaccaggcgagctgaagcgcctcgtcgaaagtaggaggcagcaaatcctccgggagtttgaggagctgcacaggcggctggacgaagagcagcaggttctgctgtcccggctggaggaagaggaacaggacatcctccaacgtctaagggagaatgcagctcatctgggagataaaagacgcgatcttgctcatcttgccgctgaagtcgagggaaaatgtctgcaatcaggtttcgagatgctgaaagacgtcaagagtactcttgagaaatgtgagaaagtgaagacaatggaggtgacttccgtgtccatcgagttggagaaaaacttcagcaacttcccacgtcaatattttgccctgcgaaagattttgaaacagttaatcgcggacgttacactggaccctgagacggcgcatcccaatctggtgctgagcgaggatcgcaaaagcgtgaaattcgtggaaacacgattgagagacctgcctgataccccccgccggttcaccttctacccctgtgtacttgccaccgaaggcttcacaagcggtagacactactgggaggttgaggtgggggacaagacacattgggctgtgggagtttgcagagacagcgtgtctcgtaagggtgagctgacgccactgccggaaactggatactggcgggtgcgactgtggaacggtgataagtatgccgctactactacaccttttacacctctacacatcaaggttaaacccaaaagagtagggattttcctcgattacgaagcagggacactctcattttataacgttacagatcgcagccacatatacaccttcactgacaccttcacagaaaagctgtggcctctgttttatccaggtattagggcgggtcggaaaaacgcagcccctctcacaatccgcccgcctacagattgggagtag

SEQ ID NO: 138883 - DNA, 435 bp, synthetic construct
  misc_feature 1..435: note = Description of Artificial Sequence: Synthetic coding sequence
  source 1..435: mol_type = other DNA
atggcggaaacatctctgttagaggcaggtgcatcagccgctagtacagcggcagccctcgaaaacctccaggtcgaagctagctgctcagtgtgtctggagtatctgaaggaacccgtcataatcgagtgtggccacaacttttgcaaggcctgtattacaagatggtgggaagatctcgaacgtgatttcccttgcccagtctgtcgtaagacgagccgctacaggagcctgcggccgaacaggcagctaggtagcatggtggagatagccaagcaattacaggcagttaagaggaaaatccgggatgagtcgctgtgtccccagcaccatgaggccctgtcactcttttgttacgaggatcaggaagcggtatgtctgatctgtgccatctctcatacacacagggcacacaccgtggttcctctggactag

SEQ ID NO: 138884 - DNA, 225 bp, synthetic construct
  misc_feature 1..225: note = Description of Artificial Sequence: Synthetic coding sequence
  source 1..225: mol_type = other DNA
atggctgagacaagtctcctggaggctggggcctccgccgcgtctacggccgcggccctcgaaaacctgcaggtcgaagccagctgctccgtgtgcctggaatacctgaaggagcctgtgatcatcgagtgtggacataacttttgtaaagcctgcatcactcgctggtgggaggatctggagagggactttccctgcccagtgtgccgcaaaacgagtcgctag

SEQ ID NO: 138885 - DNA, 147 bp, synthetic construct
  misc_feature 1..147: note = Description of Artificial Sequence: Synthetic coding sequence
  source 1..147: mol_type = other DNA
atggcagagacttccctactggaggccggcgcttccgctgcatccacagctgccgcactggagaacctgcaggtggaggctagttgcagcgtctgcctggaatatctgaaggagccggtcattatcgagtgtgggcataacttttag

SEQ ID NO: 138886 - DNA, 1467 bp, synthetic construct
  misc_feature 1..1467: note = Description of Artificial Sequence: Synthetic coding sequence
  source 1..1467: mol_type = other DNA
atggcagagaccagcctgctcgaggccggggcgtctgccgcctctaccgccgccgcgctggagaacctgcaagtcgaagcttcatgcagcgtgtgcctcgaatacttaaaagaaccggtgattatcgagtgtgggcacaatttctgcaaagcttgcattactcgttggtgggaggatttagagagggactttccgtgtcccgtgtgccggaagacttctcgttatagaagcttgcggcccaatagacagctcggaagcatggttgaaatcgccaagcagctacaggcagtgaagcgaaagatccgggatgaaagtctgtgcccccagcaccatgaggctctgagtctgttctgttatgaagatcaggaggccgtgtgtctcatatgtgctatcagtcatacacaccgcgcccacactgttgtgcctctggacgatgcgacgcaggaatataaagagaaactgcagaagtgtttggaacccctggagcagaaacttcaggagataactagatgtaaatctagtgaagaaaagaagccgggtgagttgaaaagactcgttgaatctcgcagacagcaaatcttgcgcgagttcgaggaactccatcgccggttggatgaagagcagcaggtgctcctttcccgcttggaagaggaggagcaagacattctacagcgtctgagagagaacgcagcacacctgggggataagcggagagacctcgcacacctggccgcggaggtcgaaggcaagtgcctgcagtccggatttgagatgttgaaagacgtgaaatctacgctggagaaatgtgaaaaggtgaagactatggaggtgaccagcgtgagcatcgagctggagaagaatttctccaatttcccacgtcagtactttgcgctgagaaaaattctgaagcagttaatcgcggatgtgacactggatccagagactgctcatccaaacttggtactctcagaagaccgcaaatcagttaaattcgtggagactaggttgagggatctgcccgacactcctcgtagatttacattctatccctgtgtgttggctacagaggggttcacctctggtcggcattattgggaagttgaagttggagataagacccactgggccgttggggtctgccgcgactccgtttctaggaaaggggaactgacccctcttcccgagactggttattggcgcgttagactctggaacggagataagtacgctgccaccaccaccccttttacccccctccatatcaaagtgaagccaaaacgcgtgggaatcttcctggattacgaggcaggaacattatctttttataatgtcaccgacaggtctcatatctacacattcactgacacgtttacggagaagctttggccccttttctatcccgggatccgtgccgggaggaagaatgcagcgccgctgacaatccgtccacccacagactgggaatag

SEQ ID NO: 138887 - DNA, 684 bp, synthetic construct
  misc_feature 1..684: note = Description of Artificial Sequence: Synthetic coding sequence
  source 1..684: mol_type = other DNA
tgaacctccagatataggtccttgcggccaaatcgccaactgggtagtatggtggaaattgctaaacagctacaagcggtgaagcggaaaattcgggatgagagcctgtgtccccagcatcatgaagcactgtcactgttttgttacgaggatcaggaggcagtctgtctcatctgcgccatctcccatacacatcgggcccacaccgtggtgccactggatgatgcaacacaagagtataaagaaaaactccagaagtgtctcgaacctctggaacagaaactccaggaaatcactcgttgcaagtcaagtgaagagaagaagcccggagagctgaagcggctcgtagagagcaggcgtcagcagattctgcgggaattcgaggagctgcatcgcagactggacgaggaacagcaggtactactgtcccggttagaggaagaagaacaggacatcctgcaaagactgagagagaacgctgcccacctaggggataagagaagagatctggcccacctggccgcagaggtggagggaaaatgcctacagtcggggttcgagatgctgaaggacgtgaaaagtacactggaaaagtgcgagaaggttaagacaatggaggtgacatcaacgacaccctgcacaagcctgcactccgagattaacgacaacgtgcggggccgctag

SEQ ID NO: 138888 - DNA, 147 bp, synthetic construct
  misc_feature 1..147: note = Description of Artificial Sequence: Synthetic coding sequence
  source 1..147: mol_type = other DNA
atggccgagacatctttgctcgaagccggagcctcagccgcgagcaccgcagctgcgctagagaacctgcaagtggaggcctcatgtagcgtgtgtctggagtacctgaaagaaccagtgatcattgagtgtgggcacaacttctag

SEQ ID NO: 138889 - DNA, 147 bp, synthetic construct
  misc_feature 1..147: note = Description of Artificial Sequence: Synthetic coding sequence
  source 1..147: mol_type = other DNA
atggcggagaccagtttgcttgaagccggcgcaagtgctgcctccaccgctgccgccctcgagaatcttcaagtagaggcaagctgcagcgtctgtctcgagtacctcaaagagcctgtgattatagaatgcggccacaatttttag

SEQ ID NO: 138890 - DNA, 180 bp, synthetic construct
  misc_feature 1..180: note = Description of Artificial Sequence: Synthetic coding sequence
  source 1..180: mol_type = other DNA
atggctgagacctcactcctggaggcaggggccagcgctgctagcacggccgcagccctggagaatttgcaagtggaagcctcgtgctcggtgtgtttggagtacctcaaagagcctgtcatcattgagtgcggccacaatttttgcaaggcatgtatcacaagatggtgggaagattag

SEQ ID NO: 138891 - DNA, 180 bp, synthetic construct
  misc_feature 1..180: note = Description of Artificial Sequence: Synthetic coding sequence
  source 1..180: mol_type = other DNA
atggccgagacatctctcctggaagccggtgctagtgctgcgtccacagcagccgctttggagaacctccaggtagaggctagttgcagcgtctgcctcgagtacctgaaggagcccgtgattatcgaatgcggacacaacttctgtaaagcctgtattacacgctggtgggaagactag

SEQ ID NO: 138892 - DNA, 435 bp, synthetic construct
  misc_feature 1..435: note = Description of Artificial Sequence: Synthetic coding sequence
  source 1..435: mol_type = other DNA
atggcagaaactagtcttctcgaggctggcgcatccgctgcttctaccgcggcagcactggagaacctccaggttgaagcctcttgttctgtctgcctggagtatctcaaggagcctgtcatcatcgagtgtggtcataacttttgtaaggcttgcataactaggtggtgggaggacctggagcgggattttccctgtccagtgtgtaggaagacctcccggtaccgaagcttacgacccaacaggcagttggggtcaatggtcgaaattgcaaagcagcttcaggccgtcaagcggaagatcagagacgagtctttgtgccctcaacatcatgaagctctgtctctgttctgctacgaagatcaggaggcagtgtgtctaatctgcgccatctcgcacacccatcgggcccatacagtcgttccccttgactag

SEQ ID NO: 138893 - DNA, 1557 bp, synthetic construct
  misc_feature 1..1557: note = Description of Artificial Sequence: Synthetic coding sequence
  source 1..1557: mol_type = other DNA
atggccgaaacctccctcctggaagctggcgctagtgccgcctcaacggctgctgcgctggagaatctacaagtggaggccagttgcagcgtgtgtctggagtaccttaaagaacctgttataatcgagtgcggacataatttttgcaaggcctgcattacccgctggtgggaagatctggagagagactttccttgtcccgtctgcaggaaaacgagcagatatcgaagcctccgacctaaccggcagctgggttcgatggttgaaatagcaaagcagttacaggcagtaaagagaaaaattcgtgatgagagcctctgccctcagcaccatgaagcattaagcttattctgctacgaagatcaagaggccgtgtgcctgatttgcgccatctcccatacacaccgcgctcacaccgtggtgcccttggatgacgcaacccaggaatataaagaaaagctccagaaatgcctggagcctctggagcagaagttgcaggagatcacgcgatgcaaatcctctgaggaaaagaagcccggagagcttaaacggcttgtggaatcccgacggcagcagattctcagggagtttgaagagctgcataggcggctcgatgaagagcagcaagttttgttatctaggctggaggaagaagaacaagacattctgcagcgactgcgggaaaatgcagcccatttgggcgacaagaggcgggacctagcgcatctggccgctgaggtcgagggaaagtgcctgcagagtggctttgaaatgctcaaagatgtcaagtccacactagaaaagaatattcctagaaaattcggaggtagtctgagtactatttgcccccgggaccacaaggcactgctggggctggttaaggaaattaatcgctgcgagaaggtaaaaaccatggaggtcacttccgtcagcattgagctggaaaaaaacttctctaactttccccggcagtactttgcattacgcaagatactcaagcagctcatcgctgacgtcacgctggacccagagaccgcccatccaaacctggtcctgagtgaggacaggaagtcagtcaagtttgtggagacgcgcctgcgcgatcttcccgacaccccccgcagattcacattttatccctgtgtgttggctacagagggctttacttctggccgacactactgggaagtggaggtgggcgataagacgcactgggcagttggcgtttgccgggattcggtaagcagaaaaggggagcttacccccctgcccgagaccggctactggagagtgagactgtggaatggcgacaaatacgccgccacgacaacgcctttcactcctctccacatcaaggttaagcccaagagggtgggtatttttctcgattatgaggctgggaccttgtctttctacaacgtaacagatcgttctcacatttacacgttcaccgacacttttaccgagaagctctggcccctgttctacccaggtatccgtgccggacgaaaaaacgctgcacccttgacgattagaccgcctaccgactgggagtag

SEQ ID NO: 138894 - DNA, 684 bp, synthetic construct
  misc_feature 1..684: note = Description of Artificial Sequence: Synthetic coding sequence
  source 1..684: mol_type = other DNA
tgaacatctcgctatcgttccctccgccccaaccggcaattgggcagcatggtcgaaatcgccaagcagctgcaggccgtcaagaggaaaatcagagatgagtctctctgcccacaacaccacgaagcactatcactgttttgctacgaagatcaagaagcagtgtgtctaatatgcgctatctctcacacccacagagcgcatacagtggtacctcttgatgatgcaacccaggagtataaagaaaaactgcagaagtgtcttgagccgcttgagcaaaaactccaagaaattaccaggtgcaaaagtagcgaagagaagaaacctggagaactcaagaggcttgtggagtcaagacggcaacagatcctaagggagttcgaggagctgcacagaaggctggacgaggagcaacaagtgcttctttctcggcttgaagaagaagaacaagacatcctccaacgcttgagggagaatgctgctcacctgggagataagcggagagatctcgcccatcttgccgccgaggtagaagggaaatgccttcaatcaggctttgaaatgctgaaggacgtgaagagcacacttgagaagtgtgaaaaagtcaagaccatggaagtgacgtctacgaccccctgtacctctttgcatagtgagataaacgataatgtgcgtggacgctag

SEQ ID NO: 138895 - DNA, 684 bp, synthetic construct
  misc_feature 1..684: note = Description of Artificial Sequence: Synthetic coding sequence
  source 1..684: mol_type = other DNA
taaacaagccgttaccggtccctgcggcctaaccggcagttaggttcgatggtcgagattgcgaagcagctgcaggcagtaaaaagaaagataagggatgagagcctgtgccctcagcaccacgaggccctgtccctgttctgttatgaagatcaggaggcagtgtgtctaatctgcgccatcagccatacccaccgagctcatacggtggtgccccttgacgacgccactcaggaatataaagaaaagctgcagaaatgtctcgaaccactcgagcaaaagctgcaagagattactagatgcaagtcttcggaggaaaagaaacccggcgagctgaagcgcctggtagaaagcaggcgtcagcagattttgcgggaatttgaagagctgcatcggagattagatgaagagcaacaggttctgctctctaggctggaggaggaggagcaggacatccttcagcgtctgagagaaaacgcggcacatctgggcgataaaagaagggaccttgcccacctggccgccgaggttgaggggaagtgtctgcagtctggtttcgagatgctgaaggatgtcaaaagcactctggaaaagtgtgagaaggtcaaaactatggaagtcaccagcacaacaccttgcactagcctgcactccgaaataaatgataacgttaggggccgctag

SEQ ID NO: 138896 - DNA, 147 bp, synthetic construct
  misc_feature 1..147: note = Description of Artificial Sequence: Synthetic coding sequence
  source 1..147: mol_type = other DNA
atggccgaaacctctctgctagaggccggcgccagtgcagcaagcacagcggccgccctagagaatctgcaggtggaggcatcatgctcggtctgcttggagtatctcaaagagcccgttatcatcgagtgtggacacaacttctag

SEQ ID NO: 138897 - DNA, 1557 bp, synthetic construct
  misc_feature 1..1557: note = Description of Artificial Sequence: Synthetic coding sequence
  source 1..1557: mol_type = other DNA
atggctgagacctccctcttggaagcgggtgcctcagctgcctccacggccgcggcgttagaaaaccttcaggtcgaagcttcatgctccgtatgtttagaatacctgaaggaacccgttattatcgagtgcggccacaacttctgcaaggcttgcatcacccgatggtgggaagatctggagcgcgactttccctgcccggtatgtcggaagacatctaggtatcggagcctaaggcccaatagacagttaggctcgatggtggagatagcgaagcaactgcaggctgtaaaacggaaaatcagagatgaaagcctgtgtcctcagcaccacgaggctctgtctctgttctgttacgaagaccaggaggccgtatgtctcatctgcgccatcagccacacacacagagcccatacagtagtgcctcttgacgatgccacgcaggagtacaaggagaaactgcagaagtgtctggaaccactggaacaaaaactccaagaaatcacaaggtgtaagagctctgaagaaaaaaagcctggcgaactgaagagactcgttgaatctagaagacagcagatccttcgtgaatttgaggagctccaccggagactggacgaagaacagcaggtgctcctgagcagattggaggaagaggagcaagatatactccaaagattgagagaaaatgccgcccatttaggcgacaagcggcgtgatttggcgcatctagccgctgaagtcgaaggtaagtgtctacagtcgggcttcgaaatgttgaaagatgtcaaaagtacgctggaaaaaaacattccacgcaaatttgggggatccctctccactatatgccccagagaccacaaggcgcttctgggactggtgaaggaaataaatcggtgtgaaaaggttaaaactatggaggtgacttccgtctccatcgaactcgagaaaaacttcagtaatttcccaaggcagtacttcgcccttcggaagatcttgaagcagctgatcgccgatgtaaccctggaccccgaaaccgcgcacccaaatctagtcctcagcgaggaccggaaatctgtaaaattcgttgagactaggttacgcgatctccccgacacccctcggagatttactttttacccctgcgtgctggctaccgaaggattcacctccggccgacactattgggaagtggaggtaggcgataaaacccactgggccgtgggggtctgcagggacagcgtaagcaggaagggtgagcttactcctctgcctgagactggctactggcgagttcgcttatggaatggggataaatacgctgcaactacaaccccatttactccactgcacattaaagtgaagccaaaaagggtaggcatttttttagattacgaagctggtaccctctccttttataacgtcacagaccgtagccatatttacacatttacggacacttttaccgaaaagctttggcccttgttttatcccggaatccgcgcagggagaaagaacgccgctcctctgacaattcgtcccccaaccgactgggagtag

SEQ ID NO: 138898 - DNA, 225 bp, synthetic construct
  misc_feature 1..225: note = Description of Artificial Sequence: Synthetic coding sequence
  source 1..225: mol_type = other DNA
atggccgaaacttccttactggaggctggggcatcagccgccagtacggccgccgccctggagaatctgcaagtggaggcaagttgtagcgtttgtctcgagtatttgaaggagcctgtgattatcgagtgcggccataatttttgtaaggcttgcatcactaggtggtgggaggatcttgagcgcgatttcccgtgtccggtttgcagaaagacgagtagatag

SEQ ID NO: 138899 - DNA, 180 bp, synthetic construct
  misc_feature 1..180: note = Description of Artificial Sequence: Synthetic coding sequence
  source 1..180: mol_type = other DNA
atggcagagacctctctcctggaggccggagcgtccgctgcttctaccgcggcagccctagagaatttgcaggtggaagcctcatgcagcgtgtgtcttgagtatttaaaagagcctgtgattatcgagtgcgggcataatttctgcaaggcctgcattaccagatggtgggaagattag

SEQ ID NO: 138900 - DNA, 147 bp, synthetic construct
  misc_feature 1..147: note = Description of Artificial Sequence: Synthetic coding sequence
  source 1..147: mol_type = other DNA
atggcggaaacatccctgctggaggccggcgctagtgctgcttccactgccgctgcgttggagaacttgcaggtcgaggcctcctgtagtgtgtgtttagaataccttaaggagccagttattatcgagtgtgggcacaatttctag

SEQ ID NO: 138901 - DNA, 786 bp, synthetic construct
  misc_feature 1..786: note = Description of Artificial Sequence: Synthetic coding sequence
  source 1..786: mol_type = other DNA
atggcagaaaccagcttactcgaggctggagccagcgccgcctcgaccgctgcagccctggaaaatctgcaggtcgaggcctcctgttcggtttgcctggaataccttaaggaaccggtaataatcgagtgcggccataacttttgcaaggcctgcattacacgctggtgggaggacctagagcgagactttccatgcccagtctgccgcaaaacatctcggtatcgatccctgcgcccaaaccgccagctaggctctatggttgagatcgctaagcagctgcaggctgtaaagagaaagattcgggacgagtctttgtgccctcagcaccatgaagccctgagcctgttttgctatgaggatcaggaggctgtgtgtctcatctgcgcaattagccatactcacagagctcacactgtcgtgcccctggatgacgccacacaggagtataaagagaagcttcagaagtgcctcgagccgctggaacaaaagctgcaggagataactagatgcaaatcttctgaggaaaaaaaaccaggagaactgaaaaggctggtagagtctcggcgacagcagatcttacgcgagttcgaagaactacaccgccggttagatgaggagcagcaggtgctcctgagtcggctggaggaagaggaacaagacatcctccagcgcctgcgggaaaacgccgcccatcttggagacaaaagacgcgatctcgcccatcttgccgcagaagtggaaggaaagtgcctccagagcggatttgaaatgctgaaggtctag

SEQ ID NO: 138902 - DNA, 180 bp, synthetic construct
  misc_feature 1..180: note = Description of Artificial Sequence: Synthetic coding sequence
  source 1..180: mol_type = other DNA
atggccgagactagcctgctcgaggccggggctagcgcagccagcactgcagcagccctggagaatctccaggtcgaggccagctgctccgtatgtctcgagtacctcaaggaacctgttatcattgagtgtggccacaatttttgcaaagcttgcataacacggtggtgggaagattag

SEQ ID NO: 138903 - DNA, 435 bp, synthetic construct
  misc_feature 1..435: note = Description of Artificial Sequence: Synthetic coding sequence
  source 1..435: mol_type = other DNA
atggccgagacctctctgcttgaagctggagcatctgccgccagcaccgctgccgctctggagaacctgcaggtggaagcctcatgttcagtgtgcctggaatacctgaaggagcccgtcattattgagtgcggtcataacttctgtaaggcctgcatcacccgctggtgggaagatcttgagcgcgactttccttgcccagtgtgcagaaaaacttctcgctatcgttccttaagacccaatcgacagcttggctcaatggtcgaaatagcgaagcagctccaggctgtcaagagaaagatacgagacgagtccctgtgcccacagcaccacgaggctctaagcctgttctgttacgaggatcaagaggctgtctgtctgatctgtgcaattagccacactcaccgggctcacacagtggtgcctctggattag

SEQ ID NO: 138904 - DNA, 1467 bp, synthetic construct
  misc_feature 1..1467: note = Description of Artificial Sequence: Synthetic coding sequence
  source 1..1467: mol_type = other DNA
atggccgaaactagcctgctcgaggccggagcctcagccgcctctacggcagcagccctcgaaaatttgcaggtcgaagcgtcctgctcagtctgtctggagtacctcaaggagcccgtcatcattgaatgtgggcataatttttgtaaggcatgtataacaaggtggtgggaggaccttgagagagacttcccttgccccgtctgtagaaaaactagccgttatagatccctgcggccaaacaggcaattaggctccatggtggagatcgccaagcagttgcaagctgttaagcggaaaatacgggatgagagcctctgtccgcagcaccacgaggccctaagcctgttttgttacgaggatcaggaggccgtctgtctgatctgcgccatttcccacacccaccgcgctcacaccgtggtacccctagatgacgccactcaggagtataaagaaaagttgcagaaatgtctagagcccttggaacagaagctccaggagattacaagatgtaaaagctccgaggagaagaaacccggcgagctcaaacgattggtggaatctagacggcagcagattctgagagaatttgaagagctccacaggcgacttgacgaagagcagcaggtgctgctgtctaggctggaggaagaagagcaagacatcctccagcgccttagagagaatgctgcccacctcggggataagcgccgggatcttgcccatctggcagccgaggtggaaggtaaatgcctgcagtcaggattcgaaatgctaaaggacgtcaagagtacactcgagaagtgcgaaaaggttaagaccatggaagtgactagcgtgagcatagagcttgagaagaattttagtaactttccaaggcagtattttgcgctgagaaagattcttaagcagttaattgccgacgtgacattggatcctgaaaccgcccatccaaacctggtgctctcagaggatcgcaagagcgtgaagtttgtagaaactcgcctccgcgatctgcccgacacccctagacgttttaccttttacccatgcgttcttgcaaccgaaggcttcacctcaggaagacactattgggaggtagaagtgggcgataaaacacactgggctgtgggggtgtgtagagatagtgtttcccggaaaggcgaactgacgccactgcctgagaccggatactggcgagtgagattgtggaatggggacaagtacgccgctactacgactccatttacacctctccatatcaaagtcaagcctaagagagttggtatttttctggactacgaagcgggcacactgtccttctacaacgtgaccgaccgcagccatatatacactttcaccgatactttcaccgagaagctgtggcctttgttttatccaggaatcagagccggccggaagaacgccgcacccctgactatccgaccacctaccgactgggagtag

SEQ ID NO: 138905 - DNA, 1467 bp, synthetic construct
  misc_feature 1..1467: note = Description of Artificial Sequence: Synthetic coding sequence
  source 1..1467: mol_type = other DNA
atggccgagaccagtttgctggaggcgggggctagtgcggcatcaacggccgctgcgcttgagaacttacaggttgaagcatcatgcagtgtttgtttggagtatcttaaggaaccagtgatcatcgagtgtggtcacaacttctgcaaggcctgcattacccgctggtgggaggacctcgaaagagactttccttgtccagtgtgccggaaaacatcgcggtacagatctctgcggcccaatagacagctcgggagcatggtggaaatcgctaagcagttgcaggcggtgaaaaggaagattagagatgagagcctttgtccacagcatcatgaagctctgtcactcttctgctatgaggaccaggaggctgtttgcctcatctgcgcaataagtcacacccaccgtgcgcatacagtggtgccactagatgatgctactcaggaatataaggagaaattgcaaaaatgcctggaaccccttgaacagaaactgcaagaaattacccgttgtaagtccagcgaagagaaaaagccaggagaattgaaaagacttgttgaaagccgccggcagcagatcctaagggaattcgaagagctgcatagacgtctagacgaggagcagcaagtcctcctgtccaggcttgaggaggaagagcaagacattcttcaacggctcagggaaaatgctgcacatctgggagataagcgccgagacctggcccatctcgctgccgaagtggagggcaaatgcttacaatctggtttcgagatgcttaaagatgtgaaaagcaccctcgaaaagtgcgagaaagtgaagacaatggaagtcacctcggtgagtatagagctagagaagaacttttctaacttccccagacagtacttcgcccttcgtaagatactgaaacaactcatcgccgacgttacgttggacccagaaaccgcccatccgaatttggtgctcagtgaagacagaaaatctgtcaaatttgtggagaccaggctgcgagacctacccgacactcctcgtagattcactttctatccttgcgtactcgccaccgaaggcttcacaagtgggagacactattgggaagtggaagttggcgataagacccactgggcagttggcgtgtgtagagacagcgtgagccgcaaaggagagctgactccacttcctgagacgggctactggagggtccgtttgtggaatggtgataaatatgcagctaccacgacaccattcacaccccttcacatcaaggtgaagcctaaacgagtaggcatattcttagattacgaggctggcaccctctcattttataatgtaaccgatcgatctcatatctacacctttaccgatacttttaccgaaaaactgtggccgctgttctaccccggtattagggccgggcggaagaacgctgctccactcactatcaggcctcctaccgactgggagtag

SEQ ID NO: 138906 - DNA, 786 bp, synthetic construct
  misc_feature 1..786: note = Description of Artificial Sequence: Synthetic coding sequence
  source 1..786: mol_type = other DNA
atggcggagacctcacttctagaggccggcgccagtgcggcatctactgcggcagccctcgagaatttacaggtcgaagcttcatgctcagtgtgcctggagtacctcaaggagccagtgataattgagtgtgggcacaatttttgcaaggcctgcattactcggtggtgggaggatctcgaaagggatttcccttgtcccgtatgcaggaaaacatctcgctaccggtcactgaggcctaaccgccagcttgggtcgatggtagaaattgcgaagcagctgcaagccgtcaagcgaaagatcagagacgaatctctgtgtcctcagcaccacgaggctttatcgctattctgctatgaggatcaggaagcagtgtgtctcatatgcgcaatcagtcacacacatcgcgctcacactgttgtgcctctggatgatgccacgcaagagtacaaggagaaacttcaaaagtgcctcgagcctctagagcagaagctccaagagataaccaggtgcaaatcaagcgaggaaaaaaaacccggcgagctaaagagattggtcgagagtagaaggcaacaaattcttcgcgaatttgaggagttacacagaagattggatgaagaacagcaggttctccttagtcggctggaggaggaggagcaggatattctgcaaagactgagagagaacgccgcccatctgggtgacaagaggcgcgacttagcacaccttgccgctgaggtggaaggaaagtgcctacaatctggctttgagatgctgaaagtgtag

SEQ ID NO: 138907 - DNA, 1467 bp, synthetic construct
  misc_feature 1..1467: note = Description of Artificial Sequence: Synthetic coding sequence
  source 1..1467: mol_type = other DNA
atggccgaaacaagcctactggaagctggagcatcagccgcctctaccgcagccgccctggaaaacctgcaggtcgaggcctcatgcagcgtgtgtctggagtacctgaaggaaccggtaataatcgaatgtggccacaatttctgtaaggcttgcattacccggtggtgggaagatctcgagagggatttcccctgcccggtgtgcagaaagacaagcaggtaccggtcccttagaccaaacagacagttgggctcaatggtcgaaatcgccaagcagcttcaagccgtgaaaagaaaaatccgcgatgagagcttgtgtcctcagcaccacgaggccctgagtctattttgctacgaagaccaggaagctgtatgcctgatatgtgccatttcccacacccatcgggctcacacagtagttcccctggacgacgcgactcaagaatataaggagaagctacagaagtgcctggagcctcttgaacagaaactgcaggaaatcacaagatgcaaaagctcagaggaaaaaaagccgggcgaacttaagcggttggttgagagcaggcgacagcagattctgagggaatttgaagagctccataggcggctggatgaggaacagcaagtgctgctctctaggctcgaggaggaagaacaggacattctgcagagactccgcgagaacgctgctcatcttggagacaaacgcagagacctggctcacctggctgcggaagtagaaggcaaatgcttgcaaagcggcttcgaaatgctaaaggacgtgaaatcaacactggagaagtgcgagaaggtgaaaacaatggaggtaacgagcgtctccatagaactagaaaaaaattttagtaactttccacgccagtactttgccttgagaaagatcctgaagcaactgatagccgatgtaactttggaccctgaaaccgcccatcctaacctggtcctaagcgaggatcgcaagtcagtgaagtttgttgagactaggcttcgcgacctgcctgacacgccacggagattcacattttacccttgtgttctggctacagagggattcacatcaggaaggcattactgggaggtcgaagtaggtgataagacacattgggccgtgggcgtttgccgtgattcagtgagccgtaagggggagttgactcctctcccagagacgggatattggcgggtgcgtctctggaacggggacaaatacgcagccacaaccaccccctttaccccccttcacataaaggtgaaacctaagagagtggggatcttcttggattatgaagcgggcactctctccttttacaacgtcaccgataggtcccacatatacacattcaccgacacttttaccgagaagctgtggcccttgttctatcccggtatcagggctgggcggaagaatgctgcccccctgacaatccgcccaccaactgattgggaatag

SEQ ID NO: 138908 - DNA, 180 bp, synthetic construct
  misc_feature 1..180: note = Description of Artificial Sequence: Synthetic coding sequence
  source 1..180: mol_type = other DNA
atggctgagacatccctattggaagctggcgcatctgccgccagtacggccgccgcgctcgaaaatctgcaggtggaggcttcttgtagtgtttgtctcgagtacctcaaggaacccgtgatcattgaatgtggccataacttttgtaaagcttgcatcacgaggtggtgggaggactag

SEQ ID NO: 138909 - DNA, 180 bp, synthetic construct
  misc_feature 1..180: note = Description of Artificial Sequence: Synthetic coding sequence
  source 1..180: mol_type = other DNA
atggctgagacatctctgctcgaggcaggtgcttcagctgcaagtaccgccgctgcactggagaatctgcaagtcgaggcttcatgttctgtgtgccttgagtacctaaaggagccggttatcatagagtgcggacacaacttctgcaaggcttgcatcacgcgctggtgggaggattag

SEQ ID NO: 138910 - DNA, 684 bp, synthetic construct
  misc_feature 1..684: note = Description of Artificial Sequence: Synthetic coding sequence
  source 1..684: mol_type = other DNA
taaacttctcgctatagatctcttaggccaaacagacagctggggtctatggtcgaaattgccaagcagcttcaagcggtcaagcgtaagatcagagatgagagtctctgccctcaacatcatgaggctctttctcttttttgttatgaagaccaggaggccgtatgtctgatttgtgctattagtcacacacatcgcgcgcatacagtggtgccactcgatgacgcgacccaggaatataaggaaaagctccagaaatgtttggagccactggaacagaaactgcaggaaattacccgctgtaagagttccgaagaaaagaaacccggagaactgaaaagattagtggagtctagacgacagcagattctgagggaattcgaggagttgcaccggcggctagatgaggagcaacaggttctgttgtctagattggaggaagaggagcaggatattcttcagcggttgcgcgaaaatgcagcgcatctcggcgacaagcgcagggatctcgctcacctagcagcagaggtagaaggaaaatgtttgcaaagtggattcgaaatgttgaaagacgtgaaaagcacactcgagaaatgtgaaaaagtgaagaccatggaggttacgagcaccacaccatgcacaagcttgcactccgagataaacgacaacgtccggggcagatag

SEQ ID NO: 138911 - DNA, 1467 bp, synthetic construct
  misc_feature 1..1467: note = Description of Artificial Sequence: Synthetic coding sequence
  source 1..1467: mol_type = other DNA
atggcggaaaccagcttactcgaggcgggagcttcggcggccagcaccgccgccgcattagagaatctgcaagttgaggcctcatgcagcgtctgcctggagtatttgaaagagcctgtgattattgagtgtgggcataatttctgcaaagcatgcattaccaggtggtgggaggacctggaaagagatttcccttgccctgtctgtaggaagacaagtaggtatcggtctctcaggccgaatagacaacttgggtccatggtggagattgcaaagcagctgcaagctgtgaaacggaagataagggatgaatcattgtgccctcagcatcatgaagccctgtcccttttctgctatgaggaccaggaagcagtatgcctgatctgcgccataagccacacccaccgggcccacacagtcgtgccgctggacgatgccacccaagagtacaaagagaagctccagaagtgcctggaacctctggagcagaagctccaggaaattacccgttgcaagtcgtcagaagaaaagaagcccggcgagttgaagaggttggtggagtctcgtcgtcagcagatcctacgagagtttgaagaactgcacagacgcctggacgaggaacagcaggtgcttttgagcaggctggaggaagaggagcaggacatccttcagcgcttgcgcgagaatgcagcgcacctgggcgacaagcggagggacctggcacacctggccgcagaggtcgagggtaagtgtttgcagagcgggtttgaaatgctgaaagatgtgaagtctacactggagaaatgcgaaaaagtgaagacaatggaagttacctccgtgagtatagaactcgaaaagaatttctcaaactttcctcgccagtacttcgccctcagaaagatcctgaagcagttaatcgccgacgtcacattagaccctgagacagcccaccccaatctggttttgagcgaagaccgtaagtccgtaaagttcgtcgagacgaggctccgagatctgcctgatactcccagaaggtttacattctatccctgcgtgctggcaaccgaggggtttacatctgggcgccactactgggaagtagaagtgggagacaagacacactgggcagttggcgtctgcagggactcagtgtcccgcaaaggggaactaacaccactccccgaaacaggatattggcgcgtgcgactctggaatggcgataagtatgccgccacgacaactcccttcacaccgctacatatcaaggtgaagccaaagcgggtggggatctttctggactatgaggcgggaactctcagtttctacaacgtcacagacagatcccatatttatacttttacagatacttttaccgaaaaactgtggccactgttctatccgggcattcgagccggccggaaaaacgctgccccgttaaccatccgccccccgaccgactgggagtag

SEQ ID NO: 138912 - DNA, 225 bp, synthetic construct
  misc_feature 1..225: note = Description of Artificial Sequence: Synthetic coding sequence
  source 1..225: mol_type = other DNA
atggcggaaacctcactgctggaggccggcgcctccgctgctagcactgcggccgccctcgagaacctccaggtagaggcttcttgcagcgtgtgcctggagtacctcaaagaacctgtgattatcgagtgtgggcacaacttctgtaaagcatgcatcactcgctggtgggaggacttggagcgagactttccttgcccagtttgtcgcaaaacaagccggtag

SEQ ID NO: 138913 - DNA, 684 bp, synthetic construct
  misc_feature 1..684: note = Description of Artificial Sequence: Synthetic coding sequence
  source 1..684: mol_type = other DNA
taaacatctaggtaccgaagcctgagacctaatagacaattaggaagcatggtggaaattgctaagcagctgcaggccgtcaagagaaagatcagagatgagtctctctgtccacagcatcacgaagcgctcagcctcttttgctacgaagatcaggaagctgtgtgtctcatctgcgcaataagccacacacatagagcgcacaccgtggtgccccttgatgacgccacccaggagtacaaagagaagttgcagaagtgcctcgagccactagaacagaagctccaggagatcaccaggtgcaagagctcggaagaaaaaaagcccggcgaactgaagagactggttgagtcccggcgacagcagattctgcgggagttcgaagaacttcaccggcgcctggacgaagagcagcaagtcttgctgagccggttggaggaggaggagcaggatattctccagagactgagggagaatgcagcccatctgggcgacaagcgacgcgacctggcccatctagcagccgaagtggaaggaaaatgtctccagagtgggttcgaaatgcttaaggatgtcaagagcactctagaaaaatgtgaaaaagtcaagacaatggaagtcacctcaactactccgtgtacgtccttacattccgagattaatgataacgttcggggtcgctag

SEQ ID NO: 138914 - DNA, 1467 bp, synthetic construct
  misc_feature 1..1467: note = Description of Artificial Sequence: Synthetic coding sequence
  source 1..1467: mol_type = other DNA
atggcggagaccagtctgctagaagccggcgcctcagcagcctcaacagctgccgccctagaaaatctccaggtggaagcgtcttgctctgtgtgtcttgagtatttgaaggagcccgtgatcattgagtgcggacataacttttgtaaagcctgtatcacaagatggtgggaagaccttgagcgggatttcccttgcccagtatgtcggaagaccagccgttatagatcactgagaccaaatcgccagctagggagcatggtggagatagctaaacaactccaggcagtgaagagaaagatccgtgatgaatcgctttgtccgcagcatcacgaagctctatcgctgttttgttacgaggatcaggaggctgtatgtcttatctgtgctatcagccacacacatcgagcacatacggttgtgccattggacgatgccactcaggagtataaggagaaactccagaagtgtttggagcctctagagcagaaactgcaagaaattactagatgtaagtccagtgaagaaaagaagccaggagagctaaagagacttgtggagagccgcaggcagcaaatcttgcgcgagtttgaggagctgcataggcgcctggacgaggagcagcaagtgttgttgtccaggctggaagaggaggagcaagatattctgcagaggctccgcgagaatgcagcccaccttggagacaagcgacgggacctagcacacctcgccgccgaagtcgaggggaaatgcctgcagtctgggtttgagatgcttaaggacgtaaagtctactctggaaaagtgcgagaaggtgaagactatggaggtgacatcagtctcgattgaattggagaaaaacttcagtaactttcctcgccagtattttgctctgcggaaaatcttgaagcaacttatcgcagatgtgactttagatcctgagacagctcatcccaacctcgtgctttctgaggaccgtaaatccgtgaaatttgtggagaccagattgcgggatctccccgacaccccacggagattcactttctatccctgcgtgctggccactgagggctttacatcaggcaggcactactgggaagtcgaagtgggtgacaagacgcattgggctgttggcgtgtgcagagattccgtctcccgaaagggggagctcacaccgctgcctgaaaccggctactggagggtgagactatggaacggcgataagtatgctgccactactactccttttactccactgcacataaaagtgaaacctaaacgagtgggcatttttctggattacgaagccggcaccctcagtttttacaacgtgactgacaggtctcatatttacaccttcactgacacattcaccgaaaagctgtggcccttattttacccgggcattcgcgcagggagaaaaaatgccgctcccctgactattaggccaccaaccgattgggagtag

SEQ ID NO: 138915 - DNA, 1467 bp, synthetic construct
  misc_feature 1..1467: note = Description of Artificial Sequence: Synthetic coding sequence
  source 1..1467: mol_type = other DNA
atggccgagacgtctctcctggaggccggcgctagtgctgccagtacagctgccgccctggagaaccttcaggttgaggccagctgcagtgtgtgcctggagtacctgaaggaacccgtcatcattgaatgtgggcacaacttctgtaaagcgtgcatcacaaggtggtgggaggatttggagagagattttccttgccccgtgtgtagaaaaacttcccgttacagatctcttcgccctaaccggcagttaggttccatggtcgaaatcgctaaacagctgcaggcagtaaagcggaagattcgtgacgagtcactatgcccgcagcaccacgaagcactttctcttttttgctacgaagatcaagaggccgtttgcctgatctgcgctatatcccatacgcaccgagctcatacagtggtgcctctagatgatgcaactcaggagtacaaagaaaaactccagaaatgcctcgagcctcttgagcaaaaattgcaggagatcacgcggtgcaagtccagtgaggagaaaaaacctggcgagttgaaacgcctggttgaatccagacgccagcagattctcagagagtttgaggagttacatcgcaggctagacgaggaacagcaagtgttactaagcagattagaggaggaggagcaggacatcctgcagcgattacgtgagaacgccgctcacctgggcgataaacggagggatctggcccacctcgcagccgaggtggagggcaaatgcctgcaaagcggatttgaaatgctcaaagacgtcaagtccacactggagaaatgtgagaaggttaagaccatggaggttacgtcagtgagtatcgagcttgaaaaaaattttagcaatttcccgaggcagtatttcgctctcagaaagatcctcaaacagctcattgccgatgtgactctggatcccgagaccgcccaccccaacctcgttctgagcgaggaccggaagagtgtgaagtttgtggagacaagattgagagatctgcccgatactcctcgaaggtttacattctatccctgcgtgctggctaccgaaggctttacaagcggacgccattattgggaagtcgaggtgggggataaaacccactgggcagtgggggtatgccgcgattccgtgagtagaaaaggcgagttaactcccctgcctgagaccggctattggcgtgtccgtctctggaatggagataaatatgcagcaactactactccattcaccccattgcacatcaaggtgaaacccaagagggtcgggatcttcctggattacgaagctggcaccctgtccttctacaacgtgacggatcggagccacatatatactttcaccgatacatttacagaaaagttgtggcctctgttctatcctggaatcagggccggccgcaagaatgctgcacctctgactattcgaccacccaccgattgggaatag

SEQ ID NO: 138916 - DNA, 786 bp, synthetic construct
  misc_feature 1..786: note = Description of Artificial Sequence: Synthetic coding sequence
  source 1..786: mol_type = other DNA
atggctgaaacaagccttctggaggccggagcctccgctgctagcactgccgcagctttagagaacctgcaggtcgaagcctcttgctctgtatgcttggagtatctcaaggagccagttattatcgagtgcgggcacaatttctgcaaggcctgcataactcggtggtgggaagatctggagagggactttccgtgccccgtgtgccgcaagacgtctagatacaggagtctccgccccaacaggcaactgggcagtatggtggaaatcgctaaacagcttcaagccgtcaaaagaaagattcgggatgagagcctctgtccccaacaccacgaggctcttagcctgttctgctacgaagatcaggaggccgtgtgcctcatatgcgcgatttctcacactcatcgggcccacactgttgtgcctctggacgatgctacccaagagtacaaggagaaactgcaaaagtgtctagagcctctggaacagaaactgcaggagattacgcgatgcaagtctagcgaggaaaaaaaaccaggcgagctgaagagactcgttgagtcgagaaggcagcagattcttagagagttcgaggagctccaccgaaggctggatgaagaacagcaggtgctgttgagtcggttggaggaggaggaacaggatatcttacagcgtctgagagaaaatgctgctcacttaggagataaaagaagagacctggcccatctggcagctgaggttgagggaaagtgtttgcagagcgggttcgagatgttgaaggtatag

SEQ ID NO: 138917 - DNA, 225 bp, synthetic construct
  misc_feature 1..225: note = Description of Artificial Sequence: Synthetic coding sequence
  source 1..225: mol_type = other DNA
atggccgaaacatccctcctggaagccggggcctcagctgcatctacggccgctgcattggaaaatctgcaggtcgaggcctcttgtagcgtttgtctagagtacctgaaggaacccgtgattatagagtgcggacataacttctgtaaagcctgcataactcggtggtgggaggatctggaaagggactttccctgcccagtgtgccgaaagacgagccgttag

SEQ ID NO: 138918 - DNA, 180 bp, synthetic construct
  misc_feature 1..180: note = Description of Artificial Sequence: Synthetic coding sequence
  source 1..180: mol_type = other DNA
atggccgaaacttcattgctcgaagccggcgcttcagcagccagcacggcggcagcactggaaaatctgcaggtggaagcgtcgtgttctgtgtgcctggagtacctcaaagaacctgtcatcattgagtgcggccacaatttctgtaaagcctgtatcaccaggtggtgggaggattag

SEQ ID NO: 138919 - DNA, 786 bp, synthetic construct
  misc_feature 1..786: note = Description of Artificial Sequence: Synthetic coding sequence
  source 1..786: mol_type = other DNA
atggctgaaactagcctgctcgaagccggtgcatctgcagcctcaactgcagccgcattagagaacctccaggtagaagccagctgttccgtgtgcctggaatatctcaaggagccggtcatcattgagtgcggccacaatttttgcaaggcttgcattacgagatggtgggaagatcttgagagagacttcccctgtcccgtgtgtaggaagactagcagatacaggtctttgagaccaaacaggcagttagggagtatggtggagatagctaaacagttacaggctgtgaaacgaaaaatccgggacgagtccctttgccctcaacatcacgaagcgctgtccctgttctgctacgaagatcaggaagcagtgtgcctgatctgcgccatatcgcatacacatcgagcccacacggtagtaccactggatgatgccacccaggagtataaggaaaagcttcaaaagtgtctggagccccttgagcagaagctccaagagatcactcgctgtaaatcatctgaagagaaaaaacccggtgaactaaaaagacttgtggagtccagaaggcagcaaatcctacgggaattcgaggaattgcacaggcgactggatgaggagcaacaggtcttattgtctcgactagaggaagaagagcaggatatcttgcagagactcagggaaaatgcggcccaccttggagataaacgccgcgacctggcccacctggccgcagaggttgagggaaagtgtctccagagtggctttgagatgctgaaagtgtag

SEQ ID NO: 138920 - DNA, 1467 bp, synthetic construct
  misc_feature 1..1467: note = Description of Artificial Sequence: Synthetic coding sequence
  source 1..1467: mol_type = other DNA
atggctgaaacaagtttgctggaggcaggagcctcagctgcctcaacagccgctgctctcgagaacctgcaggtcgaggcatcatgctcagtatgtttagaatatctcaaggagcctgtgattattgaatgcggtcacaatttctgcaaggcgtgtattactagatggtgggaggacctggagagagactttccctgcccagtctgcagaaagacttcacgatatcgctccttaagacccaacagacaactgggctccatggtggaaatcgccaaacaactgcaggccgtgaagcgtaaaatacgcgacgaaagtctgtgcccacaacaccacgaggctctgtctctgttctgctacgaggatcaggaggctgtctgccttatctgtgcgatatcacacacccacagggctcacacggtggtgcctctggacgatgccacacaggagtacaaagagaagctgcaaaaatgcctcgaaccacttgagcagaagctccaagagataaccagatgcaaatcgagtgaggagaagaagccaggcgaacttaaacgtctggttgagtcccggcggcagcagatcctccgtgagtttgaggaactccatcggagactagatgaggagcagcaggtgctgctctccagactcgaagaggaagaacaagatatactgcagaggttgcgcgaaaacgcagcccatctcggggacaagcgcagagatctggcgcacctggctgctgaagtggaggggaagtgcttacagagcggcttcgaaatgcttaaggacgttaagtccaccctggagaagtgcgaaaaggtaaagacgatggaggtgacctcggtgtcaatcgagctggagaaaaatttttcaaatttcccacgccaatactttgcattgcgcaaaatactaaaacaactgatcgccgacgtaaccttagatccggaaactgcccatcctaatctggtgctgagcgaagatcgcaaatctgtgaaattcgtggagacacgattacgggacctgccggacacgcccagacgctttacattttacccatgtgttcttgccaccgaaggcttcacgagtggaagacactattgggaagtggaagttggcgacaagacccattgggcagtcggcgtgtgccgtgacagcgtgtctcgaaaaggggaactgaccccgctgcccgagaccggctactggagagtgaggctgtggaatggggataagtatgccgccacaacaaccccattcacacctctgcacatcaaggttaaacctaaaagagtgggtatctttttggattatgaggctggcaccctaagcttctacaatgtcaccgacagatcacacatctacacctttaccgacactttcacagagaaactgtggccactgttttacccgggcattcgagccgggcggaaaaatgccgcaccacttacaatcagacctcctactgactgggaatag

SEQ ID NO: 138921 - DNA, 1557 bp, synthetic construct
  misc_feature 1..1557: note = Description of Artificial Sequence: Synthetic coding sequence
  source 1..1557: mol_type = other DNA
atggccgagacaagtctcttggaggcgggcgcttctgcggcctctactgccgcagctcttgagaacctccaggttgaagcttcctgcagtgtttgtttggagtacctgaaagaacccgttataatcgagtgcgggcataacttttgcaaggcatgcatcacaaggtggtgggaggaccttgagagagattttccttgcccggtgtgccggaagacatcaagatatagatcactgagaccaaatcgtcagctcggaagcatggtggagatcgccaaacagttacaggccgtgaagcgcaaaattcgggatgagtccctgtgccctcagcatcatgaggctctgtccctgttttgttacgaggatcaagaggctgtgtgcctgatttgcgccatttctcatacccaccgggcccacactgtggttccattggacgatgccacccaggaatacaaagagaagctgcagaagtgtctcgagcctctcgagcagaagctccaggagatcaccagatgtaaatcctccgaagagaaaaaacccggcgagctgaaaaggttggtcgagagcaggaggcagcagatactccgcgaattcgaagagctgcaccgaaggttggatgaagaacagcaggtgctcctatctcgcctcgaggaagaggagcaggatatactgcagcgtctgcgggagaatgctgctcatctcggggacaagcggagagacctcgcccacctcgcggctgaggtggagggaaaatgtctgcaatccgggtttgagatgttgaaggatgtcaaaagcacacttgagaagaacattccacggaaattcggcgggagcttgagcacaatttgccctcgcgatcacaaggccttgctgggactggtcaaagagataaatcggtgcgaaaaggtgaaaacaatggaagttacaagcgtctccatcgagctggaaaaaaatttcagtaactttccacggcagtacttcgctctgcgaaagattctgaagcaactgatcgccgacgtgaccctagatcccgagaccgcccaccctaatctcgtgctgtcagaagaccgaaagagcgtgaagttcgtggagacccggctgagagacctgccagacacaccacgccgctttacattttacccctgtgtcctagccacggaagggttcacctctggtagacactattgggaggttgaagtgggggacaaaacacactgggccgtgggtgtctgtcgggatagtgtgtcaagaaaaggagaactgacacctctgccagaaacaggttactggagggtgcgcctgtggaacggagacaaatacgctgcgaccacaactcctttcaccccgttgcacattaaggttaaacctaaacgtgtgggaatcttcttggactacgaagccggcaccctgtctttctacaatgtcacagatagaagtcacatctacacttttactgatacattcacagagaagctttggcctctgttctaccctggcatcagggcgggtcgcaaaaatgcagccccgctgactattagaccacccacggactgggagtag

SEQ ID NO: 138922 - DNA, 1467 bp, synthetic construct
  misc_feature 1..1467: note = Description of Artificial Sequence: Synthetic coding sequence
  source 1..1467: mol_type = other DNA
atggctgagacatctctcctggaagcaggcgctagcgcagcctctactgccgctgccctggagaacctgcaggtggaggcgtcgtgtagtgtgtgcctggaatatctgaaggagccagtgattattgagtgcggccacaatttctgcaaagcatgcataacacgatggtgggaggatctcgaacgggacttcccttgtccagtgtgccggaaaacgagccgctatcgaagtctgaggcccaatcgtcagctggggtccatggtagagattgcaaaacagctgcaggcagtgaagcgaaaaatccgggacgagtcgttgtgtccccaacaccatgaggccctcagcctcttttgctatgaggaccaggaggctgtgtgccttatttgtgccatcagccatacccatcgcgcgcacacagtggtgccacttgatgatgccacccaagagtataaagaaaaattgcagaagtgcctggagcccctggaacaaaagctgcaggagatcacaagatgtaagtcctccgaggagaagaagccaggcgagctgaaaaggctcgtcgaaagccgccgtcagcagattttgagagagttcgaggaattgcataggcgccttgacgaggaacaacaagtgttgctgagccgccttgaagaagaggagcaagacattctgcagcgactgcgggaaaatgctgcacacctcggggacaaacgtcgggatctggcacaccttgccgcggaggtggaggggaagtgccttcaaagtgggtttgagatgctgaaagacgtcaagtctaccttggagaaatgcgagaaggtgaagactatggaggtgacctcagtgagcatcgaactggagaagaactttagcaacttccccaggcagtacttcgcccttcgaaaaatcctcaagcagctgattgcggacgtgactctggaccctgaaacagctcacccaaacctcgtgctgagcgaagaccggaaaagcgtaaagttcgtggagactaggctgagagatctacccgatacacctagacgctttaccttctacccatgtgttctcgcaactgaaggattcactagtgggcgacactattgggaggtcgaggtgggagacaaaacgcactgggccgttggggtgtgtagggactcggtttccagaaaaggagagcttacccccttgcccgagacaggctattggcgcgtccgcctgtggaacggagacaagtatgcggccaccactactcccttcacacctctccatatcaaggtcaaacccaagcgagtggggatattcttggactacgaggccggcacgctttccttctataacgttactgatcgaagtcacatttatactttcaccgataccttcaccgaaaagttatggccgctattctatcctggcattcgcgcgggccgtaagaatgcagcgccattgacaatcagaccccctacagactgggaatag

SEQ ID NO: 138923 - DNA, 786 bp, synthetic construct
  misc_feature 1..786: note = Description of Artificial Sequence: Synthetic coding sequence
  source 1..786: mol_type = other DNA
atggcagaaacctccctgctggaagcaggcgcgtcggccgcttctacagcagcagctttagagaatctacaggtggaagctagctgctccgtgtgcctggaatacctcaaagagcccgtgatcatcgaatgcgggcacaatttctgtaaagcctgcataactcgctggtgggaggacctcgagagggatttcccgtgccccgtgtgcagaaagacctctaggtatcgcagcctacggcccaacaggcagttgggttccatggtcgagatagccaaacaactgcaggctgtcaaaagaaaaatacgagacgaaagcctctgcccgcagcatcacgaggccctctctctattttgctatgaggaccaggaagccgtgtgcctgatttgcgcgatttcacacacacaccgagcccacaccgtggtgccacttgatgatgccacccaggagtataaggagaaacttcagaagtgtcttgagcctcttgaacagaagcttcaggagattaccaggtgcaagtcgagcgaggagaagaagccgggagagctcaagaggctcgtcgagtcccggcgccagcaaatcctgagagaatttgaagagctgcatagacgcttggacgaagaacagcaggtgctgctcagtagattagaggaggaggaacaggatatcctgcaacgccttagggagaatgccgcacacctgggggacaaacggagggacttggcccatttggccgcagaggttgaaggcaaatgcctccagagcggctttgaaatgctgaaggtgtag

SEQ ID NO: 138924 - DNA, 225 bp, synthetic construct
  misc_feature 1..225: note = Description of Artificial Sequence: Synthetic coding sequence
  source 1..225: mol_type = other DNA
atggcagagacttcattgctcgaggctggtgcctccgccgcttccacagcggccgctctagagaatctccaggttgaagcatcgtgctccgtatgcctggaatacttgaaggagccagttattattgaatgtgggcacaacttttgcaaagcttgcattacccgttggtgggaagacctcgagagagactttccctgccccgtgtgcaggaaaacctctaggtag

SEQ ID NO: 138925 - DNA, 1236 bp, synthetic construct
  misc_feature 1..1236: note = Description of Artificial Sequence: Synthetic coding sequence
  source 1..1236: mol_type = other DNA
atggccgaaacatctcttctggaggccggggcaagcgccgccagcactgccgcagcactggaaaacctgcaggtggaggcctcatgttcagtgtgtctggaatacctgaaggaacccgtgatcatcgagtgcggtcataacttctgtaaggcttgcataactcgctggtgggaagaccttgagcgcgattttccttgtcccgtttgcagaaagaccagccggtatcgctctctgaggcctaacaggcagctaggttccatggtcgagatcgcaaagcagctacaagctgtgaagcgcaaaatccgtgacgagtcactctgtccccagcaccacgaagcgctgagtctcttttgctatgaggaccaagaggcagtctgcttgatatgcgccatttctcatacacaccgagctcacaccgttgtacctctggatgacgccacccaagagtacaaggaaaaactccagaaatgtctggagcccctggagcagaagctgcaggagatcaccagatgcaaatcaagcgaggagaaaaagccaggtgagttgaaaaggctcgtagaaagtagaaggcagcagattctccgggaattcgaggaactgcaccgacgcctggatgaggagcaacaggtgctgctgtcaaggctggaggaggaagaacaggatatccttcagagactccgtgagaatgctgcacacttgggtgacaagcggagggatctggctcacctggccgctgaagtagagggtaaatgcctccagtccggctttgaaatgctgaaacctgtcttgtctgcacgcgaggaatgtgaaaaggtcaagacaatggaagtgactagcgtgtctatcgaactagaaaagaatttcagtaattttccgcgtcagtacttcgccctacggaaaattctgaagcagttaattgccgacgtcaccctggacccagaaaccgcgcacccgaaccttgttctctccgaggatcgtaagtctgtaaagtttgtggaaaccagactgagagatcttcccgatacgccccggcgctttacattctatccttgcgtcctggccaccgagggttttacctctgggcggcactactgggaggtggaagtcggagataaaacccattgggccgtcggcgtatgtcgcgatagcgtgtccaggaagggcggctgcggttacggtatggggactaacatgcagccgccccctcacctgctccctctctgtaccagtcggtag

SEQ ID NO: 138926 - DNA, 1467 bp, synthetic construct
  misc_feature 1..1467: note = Description of Artificial Sequence: Synthetic coding sequence
  source 1..1467: mol_type = other DNA
atggccgagacttctctgctcgaagctggcgccagtgctgcttcaacagctgctgcactggagaacctacaagttgaagcaagctgctccgtctgcttagagtacctcaaggaacccgtgattatagagtgcggccataatttttgcaaggcatgtattaccaggtggtgggaagacctggagcgggattttccctgcccagtgtgtcggaagacaagtaggtacagatccctccgcccaaaccgccagttaggtagtatggtcgagattgcaaagcagttacaggccgtcaagcgtaagatccgagatgaaagcctgtgcccgcaacaccacgaggctctgtccctgttctgttacgaagatcaggaagcggtgtgcctgatctgtgccattagccacacacacagagctcacactgtagtgccactggacgacgctactcaggaatacaaggaaaagttgcagaaatgtcttgagcccctggaacagaagcttcaggagattactcgctgcaagtcttccgaagaaaagaaaccaggggaactcaaacgattagtggagtcccgcagacagcagattctcagggagttcgaagaactgcacaggaggctggatgaggaacagcaggttctcctgagccgcctggaggaggaagagcaagacatcctccagcgcctccgcgagaacgcagcccacctgggtgataagaggcgggacttagctcacttagccgcagaagtcgagggaaagtgcttacagtctggcttcgagatgctgaaggacgtcaagagcacactggagaagtgcgagaaagtgaagaccatggaggtaacgtccgtctccatcgagttggagaagaacttctctaacttcccacgtcaatactttgccctgcgtaaaatcttgaagcagctgatagccgatgtgacactggacccagagactgcccatcctaacctcgttctatcggaagataggaagtctgtgaaatttgtggagacaaggctcagggatctgcccgacactccacgtcgatttacattttatccatgcgttctggcgaccgagggtttcacttccggcaggcactactgggaggtcgaagtaggagataagacccattgggccgtaggcgtatgtcgcgattctgtcagtcgaaagggagaactaacccctcttcctgagaccggatactggcgcgttagactgtggaacggagacaaatacgctgctacgaccaccccttttacaccactgcatatcaaggtgaaacctaagagagtcggaatcttcctcgattatgaagctggcaccctctcattttacaatgttaccgaccgcagtcacatttacacctttaccgacactttcacagagaaactatggccgttattctaccccggaattagagctgggcgtaagaacgcagctcctctgaccattcggccaccgacagactgggaatag

SEQ ID NO: 138927 - DNA, 786 bp, synthetic construct
  misc_feature 1..786: note = Description of Artificial Sequence: Synthetic coding sequence
  source 1..786: mol_type = other DNA
atggccgagactagccttctggaagcaggtgcctccgccgcctccacagccgcagccttagaaaatttgcaagtggaggccagctgctccgtatgcttagagtacttgaaggagcccgtgattattgaatgcggtcataatttttgcaaggcctgtatcacgcggtggtgggaggacctcgagagagactttccatgtcctgtctgcagaaaaactagtcggtataggagtctgagacccaatagacagcttggctccatggtggagattgccaaacagctgcaggcagtcaaacgaaaaatcagggatgaaagtctctgccctcagcaccatgaggccctgagcctgttctgctatgaagaccaggaggctgtgtgcttgatatgtgctataagtcacacacatagagcacatacagtggtgccactggacgatgctacccaggagtacaaagagaaactccagaagtgtctggagcccctcgaacaaaagctgcaggaaatcactcgttgtaaatcctctgaggagaaaaaacccggtgagttgaaacgtctcgtggaatcccgacggcagcaaatcctgcgcgagttcgaagagttacatcgacgcctcgacgaagaacaacaagtgctgctctcgcggctggaggaagaggagcaggatatcctccaacggctcagagagaacgccgcacatcttggggacaagcgccgggatctcgcccacctggctgcggaagtggaaggtaagtgcctccaatcaggattcgaaatgctgaaagtgtag

SEQ ID NO: 138928 - DNA, 147 bp, synthetic construct
  misc_feature 1..147: note = Description of Artificial Sequence: Synthetic coding sequence
  source 1..147: mol_type = other DNA
atggcagaaactagcctcctggaagcaggggcaagtgcggcctctactgcggccgcacttgaaaaccttcaggtggaggcatcctgctctgtgtgcctggaatacctcaaggaaccagtgatcatcgagtgtggacacaacttttag

SEQ ID NO: 138929 - DNA, 786 bp, synthetic construct
  misc_feature 1..786: note = Description of Artificial Sequence: Synthetic coding sequence
  source 1..786: mol_type = other DNA
atggcagaaaccagtctcctggaggcaggagcttcagccgcgtccactgccgcagctctcgagaacctgcaggtcgaggctagctgcagcgtgtgtcttgagtatctcaaggaaccagtgatcatcgagtgcggccataacttctgcaaggcttgtatcacaaggtggtgggaagaccttgaacgggacttcccctgccccgtgtgccgaaagacctctcgttatagaagtcttagacccaaccgtcagcttgggagcatggtcgaaattgcaaagcagctgcaagccgttaagaggaagatcagagatgaatccttatgccctcagcaccatgaggccctgtcacttttctgttacgaagaccaggaggccgtgtgtctgatctgtgcgatttctcatacgcatcgcgcacatacagttgtgcctctcgacgacgctacccaggaatacaaggaaaagctccaaaaatgcctagagcccctagaacaaaagttacaagagatcacacggtgcaagtcttctgaggagaaaaagcccggggagctcaagcgtctcgtcgagtcccggcgacaacagattttaagagaatttgaagaactacacagacggctggatgaagagcagcaagtcctgcttagtcgcctagaagaagaggagcaggatatactgcaaaggctgcgggaaaatgctgcacatttgggcgacaaaagacgcgatctagcacacctagctgctgaagtggagggcaaatgtctccagagtggttttgagatgctcaaagtttag

SEQ ID NO: 138930 - DNA, 1467 bp, synthetic construct
  misc_feature 1..1467: note = Description of Artificial Sequence: Synthetic coding sequence
  source 1..1467: mol_type = other DNA
atggccgagacgtcattactcgaagctggcgcgtcagccgcctcaacggctgccgccctcgaaaacctccaggtcgaggcgagttgctccgtgtgcctggaatatctgaaagagcccgtcatcattgaatgcggacataacttctgcaaggcctgcatcacccggtggtgggaggatcttgagcgggactttccttgccctgtgtgtcgcaaaactagcagatatcgaagcctgaggccaaatcgtcagctgggatctatggttgaaatcgccaaacagcttcaggccgtcaagcgaaaaatcagggatgagagtctgtgtccacaacaccacgaggctctgtcccttttctgttacgaggaccaggaggcagtctgcctgatctgtgccatcagccatacgcaccgggcacatacagttgtgcctctggacgatgccacccaggaatacaaggaaaagctgcaaaagtgcttggagcccctagagcagaagctccaagagataaccaggtgtaaatcatccgaagagaagaagcccggcgaactgaaacggctggtggagtcacgcaggcagcagattttgcgagagtttgaggagttgcatcgacgcctagacgaggagcaacaggtattgctcagtagattagaggaggaggaacaggatattctgcaacggcttagagaaaatgcagcccaccttggagacaaaagacgcgatctggcccacctggcggccgaagtggaaggcaagtgtctgcagagcggatttgaaatgctgaaggatgtcaaatccaccctggagaagtgcgagaaagtgaagacaatggaagtaacgtcagtctccatcgaattagaaaagaatttttcaaatttccctcggcagtactttgccctgcgaaagattctcaagcaattgattgccgatgtgactttagaccccgagacagcccatccgaatctggtgctgagcgaggatagaaagagtgtcaaattcgttgagaccaggctccgcgacttacctgataccccaaggagattcacattttacccctgtgtgctcgctactgaaggttttacctccggcaggcactattgggaggtggaggtgggagacaagacacactgggcggtcggagtctgccgagactccgtcagtcgcaaaggggagttaacccccttaccagaaacaggctactggcgcgttcgattgtggaacggggataaatatgcagcgactaccacaccgtttaccccactgcatattaaagtgaagccaaaacgggtaggaatattcttggattacgaggccgggacattgtcgttttacaacgtaacggacagaagtcatatctacacctttactgatactttcacagagaagctctggccactgttctaccctggaattcgggctggtcgtaaaaacgcagcaccactcacaatacgccctccaaccgattgggaatag

SEQ ID NO: 138931 - DNA, 225 bp, synthetic construct
  misc_feature 1..225: note = Description of Artificial Sequence: Synthetic coding sequence
  source 1..225: mol_type = other DNA
atggcagagacctccctactggaagcaggcgctagcgctgccagcactgcagcagctttagaaaatctgcaagtggaagctagttgttctgtatgcctggagtacctgaaagaaccagtcattatcgagtgcgggcacaatttctgcaaagcctgtataacccgttggtgggaagacctggaacgggactttccatgccccgtctgcaggaaaacaagtcgttag

SEQ ID NO: 138932 - DNA, 1467 bp, synthetic construct
  misc_feature 1..1467: note = Description of Artificial Sequence: Synthetic coding sequence
  source 1..1467: mol_type = other DNA
atggcagagacttcactcctggaagctggggcaagcgccgcgagcaccgccgctgctttagaaaatcttcaggtagaagcctcatgttcagtgtgcctggagtacttgaaagagcccgtgatcattgaatgtggtcataatttctgtaaggcatgtattacacggtggtgggaggacttggagagggacttcccatgcccagtctgtcggaagacatcccgctatcgatctcttcggcccaaccgccagcttggcagtatggtcgagatagccaaacaacttcaagctgtcaagcggaagatcagagacgaatctctgtgcccgcagcaccacgaggcgctttcgctcttttgttatgaggaccaggaggccgtgtgtctgatctgcgccatttctcacacccatcgagcacacactgtggtaccacttgatgacgcaacccaggaatataaggaaaaactccagaagtgtttggagcctctagagcagaagctccaggaaataacaaggtgtaagtcgagcgaagaaaaaaagcccggggaactgaagaggctcgtcgagtcccggcgtcagcagatactccgggaatttgaggaactgcataggcggctggacgaggaacaacaggttcttctgagccggcttgaggaggaagaacaggatattcttcagcgcctgcgggagaacgccgcccacctaggggacaagcgacgagacctggcccatttagccgccgaggtagaaggtaagtgcctgcaatcagggttcgaaatgttaaaggacgttaagagcactctggaaaagtgcgagaaagtgaagactatggaagtaacctctgtgtcaatagaactcgagaagaatttttcaaactttccacgccaatactttgccctgcgaaagatcctgaagcagctgatagccgacgtgacgttggaccctgagacagctcatcctaatctggtcctatccgaggataggaaatctgtgaaatttgtggagacgagattgcgggacttgccagatacaccacgcaggttcaccttctatccctgtgtgctggctacagaagggtttacatcaggaagacactactgggaagtcgaagtcggtgacaagacccattgggctgtcggcgtctgtcgagactccgtgtcaaggaagggtgaattgacgccgctccccgagaccggctactggcgtgtgcgcctctggaatggcgataaatatgcggccacaactacaccgttcacccccttgcacataaaggtgaaacccaagcgagtaggaatattcctggactatgaggccggtaccctgtcgttctacaacgtgacagaccggagtcacatctatacatttacagataccttcactgaaaaactgtggcccctgttttatcctggaattagagctggacgaaagaatgcggcaccgctaacaatccgccctcctacagactgggagtag

SEQ ID NO: 138933 - DNA, 1557 bp, synthetic construct
  misc_feature 1..1557: note = Description of Artificial Sequence: Synthetic coding sequence
  source 1..1557: mol_type = other DNA
atggcggagacaagtctgctggaggctggagcaagcgcggctagtaccgcagccgctctggaaaacctgcaagtcgaggcctcctgtagcgtctgtttggagtacctgaaggaaccagtcattattgagtgcggtcataacttttgcaaggcttgtattacaagatggtgggaagacctggaacgtgattttccatgtcccgtgtgccgcaagacttcacggtatcggtccctgagacctaaccgacagcttgggtctatggtggaaatagctaagcagttacaggccgtgaaaaggaagatccgagatgagagcctttgccctcagcatcacgaagcactgagtctgttttgttacgaggatcaagaggccgtgtgccttatttgcgccatcagccatacccacagggcccacaccgtggtcccgcttgacgacgcgacccaagagtacaaggagaagctgcagaaatgcctggagcccctggagcaaaagttacaggaaattactagatgtaagtcatctgaagaaaaaaaacctggagagctgaagagactggtggagagtagacgtcaacagatactgagggagtttgaagagctgcaccgccggttggacgaggagcaacaggtgttgctgtctagattggaggaagaagaacaggatattctgcaacgcctccgggagaacgctgctcatcttggagacaaaaggagggacctcgcacacctggctgcagaggtggaaggtaaatgtctccaatcaggcttcgagatgcttaaagatgtgaaatccacgctggagaagaacatcccacgtaagtttggaggcagcctaagtacaatttgccctcgtgatcacaaagcactgctgggcctggtgaaagaaatcaatagatgtgagaaagtgaagacaatggaagttacatctgtgtccatagagctggaaaagaacttctccaattttccacgccagtacttcgcactgcggaaaatcctaaaacagctcatcgcggacgtaacactagatcctgaaactgcacaccccaatttggtgctgtctgaagatcgcaaatccgtaaaatttgtggagactagacttagggacctccccgataccccaagaagatttaccttttatccctgtgttctggccactgagggattcacaagtggcaggcactattgggaggtggaggtgggggacaagacacactgggctgtcggagtctgcagagatagtgtgtcgagaaagggagagctgacgccactgccagagaccggatactggagggtgcgactgtggaacggagacaagtacgcagccaccactacacccttcacacctctgcatatcaaggtcaagccaaagcgagtgggcatcttcctggactacgaggctggaaccctgtcattttacaatgtgacagaccggtcgcacatttataccttcacggatacctttacagagaaactctggcctcttttctacccaggcatccgagccggacgtaaaaacgcagcgcctctgacaatcagacctcccactgattgggagtag

SEQ ID NO: 138934 - DNA, 1467 bp, synthetic construct
  misc_feature 1..1467: note = Description of Artificial Sequence: Synthetic coding sequence
  source 1..1467: mol_type = other DNA
atggctgagacttctttgttggaggccggcgccagtgcggcatctacagccgctgccctggaaaatctccaggtcgaggcgagctgctccgtgtgcctggagtaccttaaagaaccagtgataattgagtgtggacacaatttctgtaaggcctgcatcacccgttggtgggaggacctggagagggactttccatgtccggtctgcagaaaaacgtccaggtacaggtccctgcgacccaataggcagctcgggtcaatggtagagattgccaaacagcttcaagccgtcaaaaggaagatcagggacgaatctctgtgcccacagcaccacgaggcactttccctattttgttatgaggaccaagaagccgtgtgtttaatctgcgctatttcgcatacacaccgtgcccacactgtcgtgccattagacgacgcaacacaggagtataaggagaaactgcagaaatgcctcgagcccctggaacagaaattacaggaaattacacgttgcaagagctcggaggaaaagaagcccggcgagttgaagagattggtggagtcccgacgtcaacaaattttacgggagtttgaggagctacacaggcgattggacgaggagcagcaggtgttgttgagcaggcttgaagaagaagaacaggacattctgcagaggcttcgtgaaaatgccgcgcacctgggagataaaagaagagacctggcccatttagccgcggaggtcgaaggcaaatgcctccaatctgggtttgaaatgctgaaggacgtcaagtctacactggagaagtgcgaaaaagttaagacaatggaagtcaccagtgtatctatagaattagaaaagaacttttccaatttcccaaggcagtactttgcattacgcaagattctcaagcagttaatagccgatgtcacactggatccggaaactgcgcatcccaacttggtgctgagtgaagaccgaaaatccgtgaagttcgtggaaacacggctcagggatcttccagacacccctagaaggtttaccttttatccctgcgtgctggccacagaaggatttacaagtggccggcactactgggaggtggaagtcggcgataaaactcattgggccgtgggggtatgcagggattctgtcagccggaagggggagctcactccccttccagagactgggtactggagggtgaggttgtggaacggggataaatatgcagctaccacaacccccttcacccccctccacatcaaggtaaaacctaaaagggtggggattttcctggactacgaagcaggaacccttagtttctataacgtgaccgaccgctcccatatctatacatttaccgacacttttacagaaaagctttggccattgttctaccccggcatcagagccgggaggaagaatgcagcacccctgactatccggcctccaactgactgggagtag

SEQ ID NO: 138935 - DNA, 435 bp, synthetic construct
  misc_feature 1..435: note = Description of Artificial Sequence: Synthetic coding sequence
  source 1..435: mol_type = other DNA
atggccgagacgtctctgctggaagccggtgcgtctgcagcctctaccgcagcggctctggaaaacctgcaggtcgaagcctcctgctccgtttgcctggagtacctaaaggaacctgtcattattgagtgcggacataacttctgtaaggcttgtattaccaggtggtgggaggacctggagagggatttcccctgtcccgtttgtcgcaagactagccggtataggagtctgcggcccaaccgacaactcggctccatggtcgagattgctaagcagttgcaagcagtcaagcgaaaaattcgggatgagtcactttgtccacaacatcatgaggcccttagcctgttttgttacgaggaccaggaggccgtttgcctaatttgcgctattagccatacccatcgggctcatactgtggtcccactggactag

SEQ ID NO: 138936 - DNA, 435 bp, synthetic construct
  misc_feature 1..435: note = Description of Artificial Sequence: Synthetic coding sequence
  source 1..435: mol_type = other DNA
atggcggaaacctcattactcgaggccggggctagcgcagcgtcgacggcagcagccttggagaacctgcaggtcgaggcctcctgcagcgtgtgtctagaatatttgaaagagccagtgattatcgaatgtggccataatttctgtaaagcttgcattacccgctggtgggaagacctggaacgggacttcccatgcccggtctgtagaaaaacttctagataccggagtctgcgcccaaacagacagctgggctccatggttgaaatcgccaagcaattgcaggccgtcaaaagaaagatccgcgatgagagtctttgcccccaacaccatgaggccctgagcttattctgttatgaagaccaggaggccgtgtgtctcatatgcgccatatcacacacccatcgggcccataccgtagtacccctggattag

SEQ ID NO: 138937 - DNA, 684 bp, synthetic construct
  misc_feature 1..684: note = Description of Artificial Sequence: Synthetic coding sequence
  source 1..684: mol_type = other DNA
tgaactagtcggtatcgctcacttcggcccaaccggcagctggggtcaatggtggagatagccaagcagttacaagcagtgaagcgaaagattagggatgagtcactgtgcccccagcaccatgaagccctgagcctcttttgttatgaggaccaggaagccgtgtgtttaatttgtgccatcagccacactcatcgcgctcacaccgtagtcccactggatgacgccacacaagagtacaaagaaaagctccagaaatgtctcgaaccgctcgagcaaaagttgcaagaaatcacccgatgcaaaagctcagaggaaaagaagcctggagaactgaagcggctggttgaaagcagacggcagcaaatcctgcgagagttcgaggaactgcaccgtagattggacgaggagcaacaagtgcttttgtccaggctggaagaggaagagcaagacattttacaacggctgcgggaaaacgccgcacacctcggtgataagcggagagacctggcacacttggcggccgaagtggaagggaaatgcctccagtccggatttgaaatgttgaaagacgtgaagagtacactggagaaatgcgagaaggtgaaaaccatggaagtcacctccactacaccttgcacgagtctgcattcagaaataaacgataacgtgcgcggccggtag

SEQ ID NO: 138938 - DNA, 147 bp, synthetic construct
  misc_feature 1..147: note = Description of Artificial Sequence: Synthetic coding sequence
  source 1..147: mol_type = other DNA
atggctgaaacctcactattggaggccggcgcttctgccgcgagcaccgcagcagcccttgagaacctccaggtcgaggcgtcttgcagtgtgtgccttgaatatttgaaagaacccgtgatcatagagtgtgggcacaatttctag

SEQ ID NO: 138939 - DNA, 435 bp, synthetic construct
  misc_feature 1..435: note = Description of Artificial Sequence: Synthetic coding sequence
  source 1..435: mol_type = other DNA
atggcggaaacctccctcctggaggccggggccagcgctgcatccactgctgccgctctggaaaacttgcaggtggaagcctcatgctcagtttgcctggaatatttgaaggaaccggtgatcattgagtgcgggcataatttttgcaaagcatgcattacgcgctggtgggaggacctggagcgcgacttcccttgcccagtatgcagaaagacgagcaggtatcgcagtctgcggccaaatcggcagctaggttctatggtggagatcgctaaacaactccaggcggtgaaaagaaagatacgcgatgagtcactatgcccacagcaccacgaagcactgagtcttttttgctacgaagaccaggaagctgtctgcctgatctgcgctatcagccatacacaccgcgctcataccgtcgtaccgctagactag

SEQ ID NO: 138940 - DNA, 1467 bp, synthetic construct
  misc_feature 1..1467: note = Description of Artificial Sequence: Synthetic coding sequence
  source 1..1467: mol_type = other DNA
atggccgaaacaagtctgttggaggccggagctagcgctgcctctacagctgcagccctcgaaaacctccaggtggaagcatcgtgcagtgtgtgcctggaatatttgaaggaacccgtcataattgagtgtggtcataatttctgcaaagcctgtataacccgctggtgggaggacctcgagagggactttccatgccctgtttgccgcaaaacgagccggtaccgtagcctgcgtccaaaccgccaactcggcagtatggtggagattgctaaacaactacaggcagtcaaacgcaagatcagagacgagtccctgtgtccccaacatcacgaggccctatcactgttttgctacgaagatcaggaggcggtgtgcttaatttgtgctatttcacatacacacagagcacacactgtggtccccctggacgacgcgacacaggagtataaggagaaactccagaagtgtctcgagcctttggagcagaaactccaggaaattaccagatgtaagagctctgaggaaaaaaagcccggcgagctcaaaaggctggtcgagagccgccgccaacagatcctgcgcgaattcgaggagctccataggagactggatgaagagcagcaagttctgttgtcccggttggaagaggaagagcaggatatcctacaaaggctgcgtgaaaacgctgcccaccttggcgataagcgtagagatctcgctcacctcgctgcagaagtcgaaggtaaatgcctgcagtcaggatttgagatgctgaaagatgtgaaatccaccctggaaaagtgtgagaaagtaaaaacaatggaggttacatctgtgtctatcgagcttgaaaagaacttttccaatttcccaaggcagtacttcgcgctgcggaagatattgaaacaattgatagccgatgtgactctggatcccgagacagcgcacccaaacctggtcctgtccgaagacagaaaaagcgtcaaatttgtggagacaaggctgagggacctaccagatacccctagaagattcaccttctacccatgcgtcctagcgactgagggatttacatcaggccggcactactgggaggtcgaagtgggcgacaagacccattgggccgtgggagtctgtagggattcagtatccaggaaaggcgaactaaccccgctgcctgagacaggatattggagggttcgcctgtggaatggcgacaagtatgccgccactacaactccatttacacccctgcacattaaggttaagcccaagagagtaggaatcttcctggactatgaagcaggaactctctcattttacaacgtgaccgatagatcccatatatacaccttcacggacactttcaccgaaaagctatggcctcttttttaccctgggatcagagccggaagaaagaatgctgcccccttgacaatacgtccgcctaccgactgggaatag

SEQ ID NO: 138941 - DNA, 1467 bp, synthetic construct
  misc_feature 1..1467: note = Description of Artificial Sequence: Synthetic coding sequence
  source 1..1467: mol_type = other DNA
atggctgagacgtcgctgctagaggcaggcgccagtgctgcatccacggctgcggccctagagaatcttcaggttgaggcttcatgtagcgtgtgccttgagtatctgaaagaaccagtgatcatagagtgtggtcacaacttctgtaaagcttgcataacccggtggtgggaggatctggaacgcgatttcccctgcccagtttgtaggaagacctcgagataccgaagtctgcgccctaacagacagctgggcagcatggtcgaaattgcaaagcaactgcaggccgttaagagaaagatcagggacgagtccttatgtccccagcaccacgaagccttatccctgttctgttacgaggatcaggaagcagtgtgtctgatttgtgctatctcgcacactcacagggcgcacacagtcgtgccactggatgatgctacccaggaatacaaggagaaattacagaagtgcctggagccattggaacagaagctccaagagatcacaaggtgcaaatcctccgaagagaaaaagccaggcgaactaaaaaggctcgttgagagtagacgtcagcagattctgcgcgaattcgaggagcttcaccgaaggctcgacgaagagcaacaagttctgttgagcaggctcgaagaggaggaacaggacattctacagagactccgcgagaacgccgcccatttgggggataaacgcagagacttggcgcacctggctgccgaagtggagggaaagtgcctgcagtcaggctttgagatgttgaaacccgtcctctcagctcgtgaggaatgcgagaaagttaagaccatggaagttacatcagttagtattgagctggagaaaaatttttctaacttcccccgccagtattttgcactgcggaaaatcctgaagcaactgatcgccgatgtaacactcgacccagagaccgcacaccccaatctggtgctttccgaggataggaagagtgtgaagttcgtggagacaaggctccgagatcttccagatactccacgcagatttacattctatccttgtgtgcttgctaccgagggtttcacctctggacgacactactgggaggtggaggtaggagataaaacgcactgggcagttggagtctgtagagacagcgtttctcgtaagggagaactgacccccctcccagaaaccggatattggcgcgtaaggctctggaacggagacaagtacgctgcaacgactaccccctttactcccctccatattaaggtgaagccgaagagagtcgggatctttttagattacgaagcagggacattgtcattttataacgttaccgaccggagtcacatttacacgtttacagataccttcacagagaagctgtggcctttattttatccaggcatcagggccggtcgtaagaatgccgctcccctcactatccggccacccacagactgggagtag

SEQ ID NO: 138942 - DNA, 1557 bp, synthetic construct
  misc_feature 1..1557: note = Description of Artificial Sequence: Synthetic coding sequence
  source 1..1557: mol_type = other DNA
atggccgaaactagcttgctggaggccggggccagcgcagcatccaccgctgcagccctggaaaacctgcaggtggaggcctcgtgcagcgtatgtctcgagtacctcaaggagccagttataatcgagtgcgggcataacttttgcaaagcctgtattacacggtggtgggaagacctggaaagagactttccctgtcccgtatgcaggaagacttctcggtacagatcactccgcccaaacaggcagctgggttccatggtggaaatcgccaagcaactacaggcggtcaagcggaagatcagggacgaatcattgtgcccccagcaccatgaggccctgagcctattctgttatgaggaccaagaagcggtctgcctcatttgcgcaatctcccacacccacagagcacacacggttgtgcctttggatgacgccactcaagaatacaaggaaaagttacagaaatgtctcgagcctctcgagcaaaagttgcaggaaatcactaggtgcaagtccagtgaggagaagaagcccggtgaattaaagcgcctggtggagagtagaagacagcagatcctgagggaattcgaggagttgcataggcggttggatgaagagcagcaagtcctgctgtcccgtttagaggaagaggagcaggacatactgcaacgcctgagagaaaatgccgctcatctgggggacaagcggagggatctcgcccacttggccgccgaagtcgaaggaaaatgtctgcagagtggattcgaaatgctaaaacctgtgttgagtgcaagggagaaaaacatacctcggaagtttgggggcagcttaagtacgatctgtccccgtgatcataaggcgctgcttggattagttaaagagattaaccgatgcgaaaaagtgaaaactatggaagtgacatccgtatctatagaattggagaagaatttttccaattttcctaggcaatactttgccctgcggaaaatcttgaagcagctcattgccgatgtcacactggacccagaaaccgcacatcccaacctggtgctgagtgaggacagaaagtctgtaaaatttgtggagactcggctgcgagatttgccagataccccacgtaggttcactttttatccttgcgtactcgccaccgagggcttcactagtgggaggcactactgggaagttgaggtaggcgacaagacccactgggcagtgggagtgtgcagggacagcgtgagccggaagggggagttaaccccactgcccgagacgggatattggcgagtcagattgtggaacggcgataagtatgcagctaccactaccccattcacgccgttgcatatcaaagtgaaaccaaagcgagttgggatatttctcgattatgaggccggtacactctccttctacaatgtgacggatcgcagtcacatatacacctttactgacaccttcacagagaagttatggcctttgttctatccaggcattcgagccggaaggaagaatgcggcccccctgacaatccgcccaccaactgattgggagtag

SEQ ID NO: 138943 - DNA, 1236 bp, synthetic construct
  misc_feature 1..1236: note = Description of Artificial Sequence: Synthetic coding sequence
  source 1..1236: mol_type = other DNA
atggcagagacatcactgctggaggccggagctagcgccgcctctactgctgccgcactcgaaaacttgcaggttgaggcgtcttgctcagtctgcctcgaatatctgaaggaacccgtgataatcgagtgcggtcacaacttctgcaaagcctgcattactcgatggtgggaagatctagagcgtgacttcccctgtccagtttgccgaaagacttcccgctatcgctcactacggccaaatcgccagttaggcagcatggtggaaatagcaaaacagctgcaggcagttaagcggaaaatccgcgacgaatcactctgtccacaacaccacgaagcgctgagcttgttttgttatgaggaccaagaggcagtctgtttaatctgtgccatcagccatacacacagagcacatactgtggtgcccctggatgacgcaacacaggagtacaaggaaaaacttcagaagtgtctggaaccccttgagcagaaacttcaggaaatcacacgatgtaagtcgtctgaggagaaaaagccaggcgagctgaaacgtctggttgagtctcgacgacagcagattctgagggaatttgaagaactccatcggcgcctggatgaggagcaacaagtgctgttgagtcgcctcgaagaggaagagcaggacatcctgcaacgcctcagagagaatgcagctcacttgggcgataagcgccgggatctcgctcatctggccgcagaagtggagggaaaatgtctacaatcggggttcgaaatgctgaaaccagtgctgtcagcccgagaagaatgtgaaaaggtgaagactatggaggttacaagcgtgagcatagagcttgaaaaaaacttctccaattttccacgccagtattttgcactgcgcaagatcttaaaacagctgattgccgacgtcacacttgacccagagaccgcacatcccaacctggtgctcagtgaggacagaaaaagcgtgaagtttgtggagacaagactgcgcgacctccctgatacgcccagaagattcactttctatccatgtgtcctcgccacggaagggtttacctctgggaggcactattgggaggtggaggtgggggacaaaactcactgggccgttggagtgtgccgcgactctgtatctagaaagggcggctgcggctacggaatgggaactaacatgcagcccccccctcacctccttcctttgtgcacgagcaggtag

SEQ ID NO: 138944 - DNA, 1557 bp, synthetic construct
  misc_feature 1..1557: note = Description of Artificial Sequence: Synthetic coding sequence
  source 1..1557: mol_type = other DNA
atggctgaaacatcactcctggaagccggcgcctcagccgcctccaccgccgctgcccttgagaatttacaggttgaagccagctgttcagtgtgcttggagtacctgaaggaaccagttataatcgagtgcggccacaacttttgtaaggcctgtatcacccggtggtgggaagacctggaaagggactttccgtgtcctgtgtgcagaaagacctcaaggtaccgaagcctgcgaccaaacaggcagcttggcagcatggtcgagatcgcaaagcagttgcaggctgtgaaacgtaagatccgtgacgaatccctctgtccgcagcaccacgaggccctgagcctgttctgctacgaggatcaagaagctgtgtgtctgatttgtgccatttcgcatacacaccgcgcccacacggtggtgccgctggacgatgccacccaagaatataaggagaagctgcaaaaatgtttagagccgctagagcagaagcttcaggagatcacaaggtgtaagagctccgaggagaaaaaacctggcgaacttaagagactggtggaatctagacgacaacagatcctacgtgaattcgaggaactgcaccgacgactagatgaagagcagcaggtcctgctatcacgacttgaagaagaggagcaggatatccttcagagactacgggaaaatgctgctcatctgggagataaaaggcgggatttggctcacctggcagcagaggtggaaggcaagtgcttacagagtggtttcgagatgcttaaaccggtgctatcagctcgagagaagaatattcccagaaaatttggtggctcactgtctaccatttgtccaagagaccataaagctctcctcgggttagtcaaagagattaatcgttgcgagaaagttaagaccatggaggtcacctccgtgtccattgaacttgagaagaactttagcaattttccgagacagtattttgcactaaggaagatcctgaagcagcttattgcagatgtgacgctggatcctgagactgctcatcctaatttagtcctctcggaagaccggaagagcgtgaagtttgtcgagacccggctcagagacctgcccgacaccccgagacggttcactttttacccctgtgtgctcgccacagaggggttcacgtccggccgccactattgggaagtcgaagttggggacaagacccactgggccgtaggcgtttgcagggactcagttagcagaaaaggcgagctgacgccattacctgaaaccgggtattggagagttcggctgtggaacggcgataaatatgccgctacaactaccccatttacaccccttcacatcaaagttaagcccaagcgggtgggtatctttcttgattatgaagccgggaccttgtcattctacaacgtcaccgatagaagccacatctatactttcactgacactttcactgagaagctgtggccactgttctatcctgggatcagagccggcagaaaaaatgcagcacccctgactattagaccccccaccgactgggagtag

SEQ ID NO: 138945 - DNA, 1467 bp, synthetic construct
  misc_feature 1..1467: note = Description of Artificial Sequence: Synthetic coding sequence
  source 1..1467: mol_type = other DNA
atggcggagacctctctgctcgaagccggcgccagcgccgcttctacagccgctgccctagagaacctccaagtggaggccagctgttcagtgtgcctggaatacctgaaggaacctgtgatcatagaatgcgggcacaatttttgcaaagcgtgtatcaccagatggtgggaagacctcgagagggacttcccatgtccagtctgtaggaaaacctcccggtataggagtctgcgaccaaaccgccaacttgggagcatggtcgaaatcgccaaacagctgcaggcggtgaagcgcaaaatccgtgatgaatcactttgtcctcaacaccacgaggcgctgtccttgttctgctatgaagaccaggaggcagtatgcctgatttgcgccatttctcatacccaccgagctcataccgtggttccactcgacgacgccacacaggaatacaaagaaaaactgcagaaatgcctggaaccattggagcaaaagctccaggaaatcacccgatgtaaatctagtgaggagaagaagcctggcgaactcaaacgtctggtggaatcccggcgccagcagatcttgcgtgagtttgaggagcttcatcgccgcctcgatgaagaacagcaggttttgctgtcacgtcttgaagaggaagagcaggacattctgcaacgcctcagagaaaatgctgcccatttgggcgacaagaggcgggatctggcacacctcgccgccgaggtggaggggaagtgtcttcagtcaggttttgaaatgctgaaacctgtcctgagcgctagagaggagtgtgagaaagttaaaaccatggaggtgacctccgtgtccatagagctggaaaagaacttttctaatttcccccggcagtactttgctctcagaaagattctgaaacagcttatagccgatgtgaccctcgacccagagacagcacatcctaatctcgttctctcagaggacagaaaaagtgttaagttcgtcgagacacgactaagagacttacctgacacgcccaggcgattcacgttttatccttgcgtgttggcaacggaaggctttactagtggtcgccactattgggaggttgaagttggcgacaaaactcactgggcggtcggagtgtgtcgtgatagtgtatctcggaaaggtgaactgactcctcttccggagacaggatactggcgtgtgcgcttgtggaacggtgataagtacgcagccacaactacccctttcactcctctccacatcaaggtgaaacccaagcgagttgggatctttttggactacgaggctggcacattgagcttctataacgtcacagataggtcacacatctatacatttaccgatacattcactgagaagctctggccccttttttaccccggcatcagggccggcagaaagaatgccgccccgctgaccatccggccccccacagactgggaatag

SEQ ID NO: 138946 - DNA, 1557 bp, synthetic construct
  misc_feature 1..1557: note = Description of Artificial Sequence: Synthetic coding sequence
  source 1..1557: mol_type = other DNA
atggccgaaacttccctactggaagcaggagccagtgcagcttcaacagccgcagcgctcgaaaacctgcaggttgaggcctcatgctctgtctgtcttgaatacctgaaggaaccagtgattatcgaatgcggccacaacttctgcaaggcatgcatcacccgatggtgggaggatctcgagagagactttccatgccccgtgtgccgtaaaacaagtaggtaccgctccctacgcccaaaccgacagcttggtagcatggtggagattgctaaacagctgcaggcggttaaacgtaagattcgagacgagtctttgtgccctcaacatcatgaagccctttctctgttctgttatgaggatcaggaggcagtgtgcctcatttgcgccattagtcacacacacagagcacatacggtcgtgcctctggatgacgccacacaggaatataaggagaagttacagaaatgtctcgaacccttggaacagaaactccaggaaatcacacgctgtaaatcttccgaagagaagaaaccaggtgaactaaagcggttggtagagagcaggaggcaacagatcctgcgagagtttgaggaactgcaccggcgcctggatgaagagcaacaggttcttctttcccggttagaggaggaagaacaggatatcctgcagcgcctccgtgagaatgccgcccatttgggcgataagagaagggatctggctcatctggctgcggaggttgagggcaagtgcttacagtccggatttgagatgttgaaagatgtcaagagtacactcgagaagaatatacctaggaagttcgggggttctctgagcacaatttgtccccgcgaccacaaggccttgctggggctggttaaggagatcaatcgctgcgagaaagtgaaaaccatggaggtgacgtcagtgtctatcgaattagaaaagaatttcagcaattttcccagacaatactttgccttacggaagatactgaagcagctcattgccgatgtgaccctagatcccgagaccgcacaccccaacctggtgctgtcagaggaccgcaagtcagtcaagttcgtcgagaccagactgagggacttaccagatacgccacggagatttactttttatccttgtgtgctcgccaccgaggggttcacaagtgggagacactactgggaggtggaagtaggggataagacacattgggctgtcggcgtctgccgcgactctgtgtccaggaagggagagctgacccccctgcccgagacaggttattggagggtaagattatggaacggtgataaatatgccgcaaccacaacccctttcacgcccctacacatcaaggtgaaacccaagcgtgtcgggattttccttgactacgaagctgggacattatccttctacaatgtgactgatcgcagccatatttacacatttaccgatacatttacggaaaagctgtggccactgttttatccaggcattcgcgcggggcgcaaaaacgccgctcccttaaccattaggccccctactgactgggagtag

SEQ ID NO: 138947 - DNA, 1467 bp, synthetic construct
  misc_feature 1..1467: note = Description of Artificial Sequence: Synthetic coding sequence
  source 1..1467: mol_type = other DNA
atggccgaaacttccttgctggaagcaggtgctagcgccgccagtacggccgctgctctcgagaacctgcaggttgaggcaagttgcagcgtttgtctcgaatacttaaaggagccagtgattatagagtgtggacataatttttgcaaggcctgcatcacccggtggtgggaagatctcgaacgcgatttcccatgcccagtctgtcgtaaaacctcaagatacaggagtttgagaccaaatcgccaacttggctccatggtggaaattgctaagcagctgcaggccgtaaaacgcaagattcgtgacgagtctttatgcccacaacatcatgaagcgctcagcttgttctgctacgaggaccaggaagccgtgtgtctaatttgcgccatttctcacacccaccgcgcgcatactgtcgttcccctcgatgatgccactcaggagtacaaagagaaactgcagaagtgtctggagccattggaacaaaaactccaggaaattacacgttgtaagagctcagaggaaaagaagccaggagagctgaagagactggtagagagccggcggcagcagatcctcagagaattcgaagagttgcacagacgcttagatgaagagcaacaagttttactcagcaggcttgaagaggaggagcaagatattctccagaggctgcgggaaaacgccgcacatttgggagataaaagacgtgacctggcacacttggcggcagaggtggagggcaagtgcctgcaaagcggattcgagatgctaaaaccagtcctttcagccagggaagaatgtgagaaagtcaaaaccatggaggtcaccagcgttagcatagaacttgaaaaaaactttagcaactttccgcggcagtacttcgcattaaggaaaatcctgaaacagctgatagcagatgtcacacttgaccctgagacagcccatccaaatctggtcctgagtgaagatcgcaaatctgtaaagtttgtcgagacccggctgagagatctccctgatacaccacgccggttcaccttctatccctgtgtattggctacggagggcttcacaagtgggcgccactactgggaggtggaggtgggggacaagacgcattgggctgttggagtctgcagggactctgtgtccagaaagggcgaattgacgcccctcccagagacgggttactggcgggtgagactgtggaacggggacaaatacgctgccaccactacacccttcactccattgcatatcaaggtcaagcctaaacgcgttggcatctttctggactatgaggctggaacattatccttttacaatgtgacagataggagccacatttatacatttactgatacttttactgaaaagctgtggccactgttttaccctggaatccgggcaggtaggaagaacgccgcccctctgacgattaggccccccaccgactgggaatag

SEQ ID NO: 138948 - DNA, 1467 bp, synthetic construct
  misc_feature 1..1467: note = Description of Artificial Sequence: Synthetic coding sequence
  source 1..1467: mol_type = other DNA
atggcagagacctcactgctagaagcgggcgcatccgctgcgagcaccgcagcagctcttgaaaaccttcaagtggaggcttcctgcagcgtatgcctggaatatttaaaagagcctgttattatagaatgcggccataacttctgtaaggcttgtatcaccaggtggtgggaagacctcgagcgcgacttcccatgtcccgtctgtcgcaaaacttcacgctaccggtcactgcgaccaaaccgtcaactgggctcaatggtggagatcgctaagcagctccaggcagtgaagagaaagattagagacgaaagcctgtgtccgcaacaccacgaggcgctttcactattctgctacgaagaccaggaagccgtttgcctgatctgtgccatctcccacactcatagggctcatactgtggtgcctctggatgacgctactcaggagtacaaggaaaagttgcagaagtgccttgagcctttggagcaaaaactgcaggaaatcacaaggtgcaaatcttctgaggagaagaagccaggggaacttaaacgtctggttgaatcgaggcggcaacagatcctgcgcgagtttgaagagttgcatagacggctggacgaggaacagcaggttctgctgtctagacttgaagaagaagagcaagacatcctgcaacggctgagggaaaatgcggcccatctgggcgacaagagacgcgaccttgcccacctcgcggcggaagtggagggtaagtgcctccagagcgggtttgaaatgctcaaaccagtgttgagcgctagggaggagtgcgagaaagttaaaactatggaggtgactagcgtatctatcgagttggaaaagaatttttctaactttccgagacaatacttcgccctacggaaaattttaaaacagctaatagctgatgtgactctggatcctgaaacagcacatcctaacctggtcctgagcgaggaccggaaatccgtgaagtttgttgaaactagattgagagacttacccgatacacccaggcgtttcacattttacccttgtgtgctcgcaactgaggggttcaccagcggcagacactactgggaagtcgaagtgggggacaagacacactgggccgtgggagtttgccgtgactctgtgagcagaaaaggtgagctgacccctctgcccgaaacaggctactggagagtgagactgtggaacggcgataagtatgctgccaccactaccccgttcacgcctcttcacattaaggtgaaaccaaaaagagttggaatctttctggattacgaagctggcactctttccttttataatgtgacggaccgcagtcacatatacacatttaccgacacctttacagaaaaactgtggccgctgttttaccccggcatccgcgcgggtcgcaaaaacgccgcccctcttacaattagacctcccaccgactgggaatag

SEQ ID NO: 138949 - DNA, 1467 bp, synthetic construct
  misc_feature 1..1467: note = Description of Artificial Sequence: Synthetic coding sequence
  source 1..1467: mol_type = other DNA
atggctgaaaccagtctgcttgaagcaggcgcatccgccgcttcaaccgcagccgctctggagaatttgcaggtcgaagcgagttgctccgtctgtctggagtatctgaaggagcccgtcattattgagtgcggccacaacttctgcaaggcctgcataactaggtggtgggaggatcttgaaagggacttcccatgccctgtgtgccgaaagactagccgatacagatccctgcggccgaacagacagttggggtccatggtggagattgcaaaacagctccaggccgtgaaaaggaaaatccgcgacgagtctctgtgcccccagcatcacgaagcgctcagcctcttctgttatgaagaccaggaggccgtgtgtctcatctgcgccatctcccacacccatagagcacatactgtcgtgccattagatgatgccacgcaggagtacaaggagaaactgcagaagtgtctagagccccttgagcagaaactgcaggagatcaccaggtgtaagagctctgaagagaaaaagcccggagaactgaagcgactcgtggaatcgagacgacagcaaatcctgagagagttcgaggagctgcatagacggttggatgaagaacagcaggttcttttatctcggctggaggaagaggagcaagatatccttcagcggcttcgggaaaatgcagcacacctgggagataagaggagagatttggcgcatctcgcggctgaagtcgaagggaagtgtctgcagtctgggtttgaaatgttaaagcctgtgttatccgcccgggaggaatgtgaaaaagttaagaccatggaagtcacctcggtctctatcgagctggagaaaaacttttccaattttccccgccaatactttgccctgcggaagatcctaaaacagctgattgctgatgtgacattggatccagagacggcccatcccaatctggtactgagcgaagacagaaagtccgttaagttcgtggaaaccaggctacgagacctgccagacactccgcgccgctttacgttctatccatgcgtgttggcaaccgagggcttcacctctgggagacattattgggaggtggaagtaggagacaaaactcactgggccgtgggagtgtgccgggatagtgtgtcacggaagggcgagctcacaccactgccggagacaggatattggagagtgaggctctggaacggggataagtacgctgccaccaccacacccttcacccctctgcacattaaggtgaagcctaagcgtgtcgggatttttctcgactacgaggctggaacgctcagcttctacaatgtgaccgaccgaagtcacatctacacttttacagatacattcaccgagaaactgtggccacttttttatccgggcatccgggccggcaggaagaacgcagccccacttaccatccgccctcctacagattgggagtag

SEQ ID NO: 138950 - DNA, 1557 bp, synthetic construct
  misc_feature 1..1557: note = Description of Artificial Sequence: Synthetic coding sequence
  source 1..1557: mol_type = other DNA
atggccgaaacctcactgctggaggccggagccagcgcggcttcaaccgccgcggccctcgaaaacctccaggtggaagcaagctgttccgtatgtctcgagtacctcaaggagcccgtaatcatagaatgcggtcacaacttttgtaaagcttgtatcacacgctggtgggaggatttagaacgggactttccctgccctgtatgcaggaagacctctcgctaccggtcgctgcgaccgaatcgtcaactcggcagcatggtagaaatagcaaagcagctgcaggcggtcaagcgaaagattagagatgagtctttgtgccctcagcaccatgaagccctcagtctgttttgctatgaggatcaggaggcggtttgtttaatctgtgctattagtcacacccaccgagcccacaccgtggtccctctggacgacgcaactcaggaatacaaagagaagttgcaaaagtgtctggagcccttggaacagaaactgcaggagatcacacgatgcaaatcttcggaagaaaagaagcctggggagctgaaaagactcgtcgagagtaggcgacagcagatcttgagggagttcgaggagctgcaccggcgcctggatgaggaacaacaggtgttgctgagccgcctggaagaagaagaacaggacattctgcagagattgcgggagaacgctgcgcacctgggcgacaagagaagggacctcgctcatctggccgccgaagtcgaaggtaagtgtctccagtcaggttttgaaatgctgaaagacgttaagagcacactcgaaaaaaatataccccgcaagttcggtggaagtcttagcactatttgcccaagggatcataaagcgttgctgggattggtcaaagagattaaccgctgtgaaaaggtgaaaactatggaagtaacaagcgtaagcattgagcttgagaaaaatttctccaactttccccggcagtatttcgctctgaggaagatcctaaagcagttaatcgcagacgtgaccctcgatcctgaaacagctcacccaaacttagtactctcagaagatagaaagtccgtgaagtttgtggagaccaggctgagagacctccccgataccccccgcaggtttacattctacccatgcgtgcttgcaacagaagggttcacctcggggagacattactgggaggttgaagtgggagataagacccactgggctgtcggcgtttgcagggactcagtcagtcgaaaaggggagcttacaccactccctgagaccggatactggcgtgtaaggctgtggaacggcgataagtatgccgctaccaccacccccttcacccctctgcatattaaagttaaaccaaaacgggtcgggatttttttggactacgaagcggggacactgtccttttataatgtgacagatcgcagccatatttatacattcaccgacacctttacagagaaactttggccccttttctaccctggcatccgggccggacgaaagaacgctgcaccattaactatccgcccccctaccgattgggagtag

SEQ ID NO: 138951 - DNA, 1236 bp, synthetic construct
  misc_feature 1..1236: note = Description of Artificial Sequence: Synthetic coding sequence
  source 1..1236: mol_type = other DNA
atggcggagacatctctgcttgaggcgggagcaagcgctgcctccaccgccgctgccctggaaaacttacaggttgaggcctcatgtagcgtctgtctggaatacctaaaagaaccggtgatcattgaatgtggccataacttttgcaaggcttgcatcactcggtggtgggaggacttggagagggactttccttgccccgtgtgtcgcaagacctccagataccggtcattgcgtcctaaccgacagctcggttccatggtggaaattgctaagcagctgcaggccgtgaagcgcaaaattagagacgaatccttgtgcccacaacatcacgaggccctttcactattctgctacgaagaccaggaagctgtttgcctgatttgcgcaatttctcacactcaccgtgcacataccgtggtaccacttgacgatgccactcaagaatacaaggagaagctgcagaaatgtctggaacctctggagcagaagttacaggaaattacccgttgcaagtccagcgaagaaaaaaaacccggagaactgaagcgactcgtggaaagccgccgccagcagattctccgcgagtttgaggagttgcaccgccggctggacgaagagcagcaggtgttgctgtctcgtctggaggaggaggagcaggacatcttgcagcggctccgcgaaaacgccgctcatctgggggataagagacgggacttagctcacctcgccgcagaggtcgagggcaagtgtctacagtccggctttgaaatgctgaagcccgtgctctctgcccgggaagagtgcgaaaaagtcaaaactatggaagtgaccagcgtctcaattgagctggagaagaatttttctaattttcctcggcagtactttgcactgagaaagatcttgaaacaactgattgcagacgttaccctggatcccgagacggctcatcccaacttagttctgagcgaggatcgaaaatcggtgaaattcgtggaaacccggttgcgagatctccctgacaccccaagacgatttaccttttatccgtgcgtgctggccacggagggtttcactagcggtcgtcattactgggaagtcgaggtgggagacaaaactcattgggctgttggggtgtgcagagattctgtcagtaggaagggaggatgcggctatggaatggggaccaacatgcagccccccccacatctgctgcctctgtgtacctccagatag

SEQ ID NO: 138952 - DNA, 1557 bp, synthetic construct
  misc_feature 1..1557: note = Description of Artificial Sequence: Synthetic coding sequence
  source 1..1557: mol_type = other DNA
atggctgagacaagcctgttggaagccggcgccagcgccgcttccactgctgccgcactcgagaatttgcaggtggaagcttcctgctccgtgtgtttggaatacctgaaggagcctgtgattattgagtgtgggcataatttctgtaaggcttgcataactcgctggtgggaggacttggaaagggactttccatgtcctgtttgccgcaagacttctagatatagaagcctgagaccgaacagacaactcggctccatggtggaaatcgccaagcagctgcaagcagtgaaacgcaaaatcagggacgaatccctgtgtccccagcaccatgaagcgctgtccctcttctgctacgaggatcaggaagccgtctgtctgatatgtgcgataagccacacacatcgcgcacacacagttgttcccctggacgacgcgacccaggaatacaaagagaaactccagaagtgcctcgaacccctggagcagaagctccaagagatcactaggtgcaaaagcagcgaggaaaagaaacccggtgagttgaaaagacttgtagaatcgcgacgtcagcagattctccgcgaatttgaggagttacatcggaggctggatgaggagcagcaggtgctactctctcgactggaagaagaggaacaggacattttacagcggctccgggaaaatgcggcacacctaggggacaagcgccgtgacctcgcccacttggccgccgaggttgagggcaagtgtctgcagtccggctttgagatgctgaaaccagttctgtctgctcgggagaagaatatccctcgaaaatttgggggatcgctgagcacaatatgtcctagagatcacaaggctctcctgggccttgtaaaagaaatcaaccgatgtgagaaggtcaagacgatggaagtgacctcggtgagcatcgaactggaaaaaaacttctcaaattttccccggcagtatttcgccctcagaaagatcctgaaacaattgatcgcagatgttactttagaccctgaaacagcccaccccaacctggttctctccgaggataggaagtctgtgaagtttgtggagactcgactccgcgacttgcccgatacgccccggaggttcaccttctacccttgtgtccttgctacagagggcttcacctcaggccggcactattgggaggtcgaagttggagacaagacccactgggctgtgggtgtatgccgggactccgtgtctcggaaaggggagctgacacccctgccggagacaggatactggcgcgtaaggctgtggaacggcgataagtacgccgctaccactacgccttttactccactgcacattaaggtgaagccaaagcgggtgggtatctttcttgactatgaagcagggaccttatctttctataatgtgacagatcgatctcacatctatactttcaccgacaccttcacagaaaaattatggcccctgttttaccccgggattcgagcgggaaggaaaaatgccgctcccctgactattcgccctccaactgactgggagtag

SEQ ID NO: 138953 - DNA, 1236 bp, synthetic construct
  misc_feature 1..1236: note = Description of Artificial Sequence: Synthetic coding sequence
  source 1..1236: mol_type = other DNA
atggccgagacaagtctgttggaagctggagcttctgctgctagcacagctgcagcgctagaaaatctgcaggtcgaagcctcttgctccgtctgcctggagtatctgaaggagcctgtcatcatcgagtgcggccacaacttctgtaaggcttgtatcacaaggtggtgggaggacctggaacgcgatttcccctgtcctgtatgtaggaaaacaagtcgatacagaagtcttcgcccaaataggcagctaggctccatggtggaaatcgcgaagcagctgcaggccgttaagagaaaaataagggacgagagcctgtgtccccagcaccacgaagccctaagtctgttctgctacgaagaccaagaggccgtgtgtttgatttgcgccatctcacatacccaccgagcacacacagttgttccactcgatgatgcaacacaggagtataaggagaaactacaaaagtgccttgaacctttggagcagaagttgcaggaaattactcgatgcaaatcttccgaagagaagaaacctggcgagctcaaacgattggttgagtcacgtagacagcaaattcttagggaattcgaggaactgcacaggagactggacgaggagcaacaggttctgctatctagattagaagaggaggagcaggatattctgcagaggctgcgagagaatgctgcccacttgggggacaagagacgcgatctggcgcacctcgcggccgaggtggaaggcaaatgcctccaaagcgggttcgaaatgttgaagcctgtgctctccgcaagagaggaatgtgagaaagtgaagactatggaggtaactagcgtctcgatcgaactcgagaagaatttttctaactttccccgccagtacttcgccctccgaaaaatcctgaagcaactgatagcagatgtcaccttagatccggagactgctcatccaaatctggtgttgtccgaagacagaaaatcagtgaaattcgtcgaaacgagactcagggatctgccagacacgccacggcgctttactttctacccgtgcgtgctggccacagaggggttcacctctgggcgccactactgggaggtcgaggtaggcgataagacccattgggctgtgggtgtttgccgagacagtgtgtcaaggaaaggtggatgcgggtatggcatgggaactaacatgcagcccccacctcatcttctgcctctctgcacttcgagatag

SEQ ID NO: 138954 - DNA, 1236 bp, synthetic construct
  misc_feature 1..1236: note = Description of Artificial Sequence: Synthetic coding sequence
  source 1..1236: mol_type = other DNA
atggctgagacttccctgctggaagctggggcctccgcagcatccacagctgcagccctggagaatctccaggtggaagcatcgtgtagcgtctgtctcgagtatcttaaagagccggtcatcatagagtgtggacataacttttgcaaagcctgtattactcggtggtgggaggacctggagcgggactttccatgcccggtgtgtaggaagacaagtcgatacagaagtctgagaccaaaccgacagttaggcagcatggtggagattgctaagcagctccaggcagtaaaacgcaagattcgggacgagagcctgtgcccccaacaccacgaggcgttgtcacttttctgttatgaagaccaggaagccgtgtgcctgatctgtgccatcagtcacacacatagagcgcatacagttgtccccctcgacgatgccacccaggagtacaaggaaaaactgcagaaatgccttgagcctttggaacaaaagctacaagaaatcacccgttgtaaatcttccgaggaaaaaaaacccggcgagttgaaaaggctcgttgagagccggcgccaacagattctacgggagtttgaggagctgcacaggcgattggacgaggaacaacaggtgctgctgagtagactcgaggaggaagagcaggacatcttgcaaaggctacgcgagaacgccgcacatctgggggacaagcgtagagaccttgcccacttggccgcagaggtggagggaaaatgtctgcagagcggctttgagatgctcaagccagtgctgtcggccagggaggaatgtgagaaagttaaaactatggaggtgaccagcgtgagcatcgagttggaaaagaactttagtaattttcccagacagtatttcgccctgcgtaagatccttaagcagctgatcgccgacgtgacactcgacccggaaacggctcatcctaatctggttctgagcgaggataggaagagcgttaagtttgtggagacacggctgcgtgacttgcccgacaccccccgccgcttcactttctacccttgcgttctcgcaaccgaggggttcacctccggccgccactactgggaagtagaagtgggtgataaaactcactgggcagtcggcgtatgtagggattcagtctcccggaagggcgggtgcggatacggcatgggcaccaacatgcagcctcccccccatctgctacccctttgtacgtcgaggtag

SEQ ID NO: 138955 - DNA, 1557 bp, synthetic construct
  misc_feature 1..1557: note = Description of Artificial Sequence: Synthetic coding sequence
  source 1..1557: mol_type = other DNA
atggctgaaaccagcttgttagaggccggggcttccgcagccagcactgccgctgctttggaaaatctgcaggtcgaggctagctgcagcgtctgcctggagtatctcaaagaaccggtgatcatcgagtgcggccacaacttttgtaaggcctgcattacccgctggtgggaagatctggagagagatttcccgtgccctgtctgccgaaaaacatccagataccggagcttgcggccaaatcgccagctgggttctatggttgaaatagccaagcagctgcaggccgttaagcggaaaatcagagatgagtcattgtgtccgcaacaccacgaagccttgtccctgttctgctacgaggatcaggaagcagtgtgcttaatctgcgctatttcgcatacgcacagagcccacaccgtcgtgccactggatgatgcgacccaggagtacaaggagaagctccagaagtgcctggagccactcgagcagaaactgcaggagataacaagatgtaagagcagtgaggaaaaaaaacctggtgagctgaagcggttagtggagagcaggcgtcagcaaatcctgagagagtttgaggagctgcatagacgcctagacgaggagcaacaggtgttactgagccggttagaggaggaagagcaggatattttgcagagactccgagaaaatgctgcacacctcggagacaaaagacgagatcttgcccatctggctgccgaagtagagggaaagtgcttgcaaagcggcttcgaaatgctgaaggatgttaaaagtacactggaaaagaatattccgcgcaaatttggcgggtccttatcaaccatctgtccaagggatcacaaggcactgttgggcctggtcaaggagatcaaccggtgcgaaaaagtgaaaaccatggaggtaacaagtgtgagtatcgaattagaaaaaaactttagcaactttccccgtcagtatttcgcgctcagaaaaatccttaagcagctgattgcagatgtgacactggaccccgaaaccgcacaccctaatctggtccttagtgaagatagaaaaagtgtgaaatttgtggagactcggctgcgtgacttaccggacaccccacgtcgcttcactttctatccttgtgttctcgcaacagaaggcttcacttctggtcggcattactgggaagttgaggtgggcgacaagacccattgggctgtgggtgtctgcagagactctgtgtccaggaaaggtgaactgactcctcttccagaaacaggctattggagagtgcgcttgtggaacggcgataaatacgctgccaccaccaccccctttacccccctgcatatcaaagtgaaaccgaagagagtggggatcttcctcgactacgaggccgggaccctgagcttttacaatgttaccgacagatcacacatttacacatttacggacacattcactgaaaagctctggccattgttctatccaggcattagagcgggcaggaagaacgccgctcctctcaccatccggccaccaactgattgggagtag

SEQ ID NO: 138956 - DNA, 1557 bp, synthetic construct
  misc_feature 1..1557: note = Description of Artificial Sequence: Synthetic coding sequence
  source 1..1557: mol_type = other DNA
atggctgaaacgtccctcctcgaagctggagctagcgcagcatcaactgctgctgcattggaaaatctacaggttgaagctagctgctctgtgtgtctggaatatctgaaggagcctgtgatcattgagtgcggacacaacttctgtaaggcctgcattacacgctggtgggaggatttagaacgggactttccatgcccagtttgtcgaaagacttcacgctacaggtccctacggccaaaccggcagcttggttctatggttgaaatagcgaagcaactgcaggccgtaaagaggaaaattcgagatgaatcactgtgcccgcaacatcatgaggccctgtccttattttgctacgaagaccaggaggctgtttgtctcatctgtgcaatcagccacacccatagggcgcatacagtagtgccgcttgacgatgctacacaggagtacaaagagaagctgcaaaaatgcttggagcctcttgagcagaaactacaagaaatcaccagatgcaaaagttctgaagaaaaaaaaccgggggaactcaagaggctggtggagagcaggaggcagcagatccttcgggagtttgaggagcttcatcgaagactggatgaagaacagcaagtcttactgtctcgccttgaggaagaggagcaagacatactccagcggcttcgggaaaatgctgcccacctcggtgataagcgcagagacctggcccatctggcagccgaagtcgaaggcaagtgcctccagtctggtttcgagatgctgaaacccgttctctctgcccgggaaaaaaatatccctaggaagtttgggggttcactcagcacaatttgcccacgggatcacaaggccttgctggggttggtgaaggaaataaacagatgcgagaaagtgaagaccatggaggtcacttcagtctcaattgaactagaaaaaaacttctccaacttccctagacaatatttcgccctccgcaaaatcttgaagcagctaatcgcagatgtgactctcgatccagagactgctcaccctaatctcgttctgtctgaggacaggaaaagcgtaaagttcgtggagacacggcttcgcgacctccctgacacgcccaggcgttttacgttttatccttgcgtgctagcaacagaggggttcacctcggggaggcactattgggaagtcgaagtgggcgacaaaacccattgggcagtgggtgtgtgtcgggattctgtgtctcggaagggcgaattaacaccgctgcccgaaacggggtactggagagtcagactgtggaacggcgacaagtacgcagctactaccactcccttcacacctctccacattaaggtaaaacctaagagagtgggtatcttccttgactatgaagctgggacactgtctttctacaatgtgactgatcgaagtcacatctacacctttacggatactttcaccgaaaagttatggccattgttttatcccggcatccgcgccggacggaagaacgccgcccccctgaccattcggccacccacagactgggagtag

SEQ ID NO: 138957 - DNA, 1557 bp, synthetic construct
  misc_feature 1..1557: note = Description of Artificial Sequence: Synthetic coding sequence
  source 1..1557: mol_type = other DNA
atggcagaaacctctctgctggaggccggtgccagtgccgctagtacagccgctgcactggagaacttgcaggtcgaggctagctgcagtgtgtgccttgagtatctgaaagagcctgtgataatcgaatgcggtcacaacttttgcaaagcctgcatcacgagatggtgggaggaccttgagagagatttcccctgtccagtgtgtaggaagacatcccgttatcgctcactgaggcctaatcgccaactgggctccatggtagagatcgccaagcaattacaggccgtgaagcgaaaaatccgagacgagtccttatgtccccagcaccacgaggctctttccctgttctgctatgaggatcaggaagccgtatgcctcatctgcgcaatctcacatacgcatagagcccacacagtggtacctctggacgatgccacccaggaatacaaggaaaaacttcaaaagtgcctcgagccccttgagcagaaactgcaggaaatcacccgttgcaagagttccgaggagaaaaagcccggagaactgaagaggctggttgagagccgtaggcagcagatcctccgcgagtttgaggagcttcaccgacgtcttgacgaggaacagcaagtcctcttaagccgcctcgaggaagaggaacaggacattcttcagcgcctcagggaaaatgccgcgcacctcggggataaacggcgggaccttgctcatctggccgctgaggtagaaggtaaatgcctccagagcggatttgagatgctgaagcccgttctgtctgccagggagaaaaacatccctcgcaagttcggaggctcactgtcgacaatctgccctagagaccacaaggccctcctgggccttgtgaaagaaattaacagatgcgagaaggttaaaaccatggaggtgacgtctgtgagcatagagctggaaaaaaatttcagcaacttcccccggcaatattttgccttgcgtaaaatcctgaaacaacttatcgcggatgttacactcgaccctgagaccgctcacccaaacttggttttgtccgaggacaggaaatccgttaaatttgttgagacacgtttgagggatctccctgatacgccgcgtcgctttaccttctacccctgcgttcttgcaactgagggcttcacatcggggagacattattgggaggtagaggtgggtgacaagactcactgggcagttggggtatgtcgggatagtgtgtctcgaaaaggcgaactgacccccttaccagagactgggtattggagagtaaggctgtggaatggcgacaagtacgccgcaacgacaaccccctttacacccctgcacatcaaagtgaagccaaaacgggtgggcatttttctcgactacgaggcaggtacactgagcttttacaatgttacggaccgctcacacatttatacctttactgacactttcactgaaaagttgtggccacttttctaccccggcattcgagctggtcggaagaacgcagcgccattgaccatccgaccacccaccgattgggagtag

SEQ ID NO: 138958 - DNA, 1557 bp, synthetic construct
  misc_feature 1..1557: note = Description of Artificial Sequence: Synthetic coding sequence
  source 1..1557: mol_type = other DNA
atggccgaaacatccctgctggaagcaggcgcatcggctgcaagcacagctgccgctcttgagaacctccaggtcgaggcttcatgcagcgtctgcctggaatatctgaaggaaccagtgattattgagtgcggacacaacttttgtaaagcctgcataacgcgctggtgggaggatctggaaagagacttcccatgccccgtatgtaggaaaacgtctcgttatcggagcctaagacccaatcggcagttagggtctatggtcgaaatcgcaaagcaattgcaagcagtgaagcgaaagataagggacgagtccttatgtcctcagcatcacgaggctcttagcctcttttgttacgaggaccaggaggccgtgtgcctgatctgcgccatcagccacacccatcgagcccacactgtggtcccgctcgatgacgccacacaggaatataaagaaaagctccaaaagtgcctcgaacccctcgaacagaagctgcaggagataacacgctgtaaaagcagcgaagaaaaaaagcccggagaacttaagaggttggtcgagtccagacgccagcagatcctgagggagttcgaggaactacaccgccgcctggatgaggaacagcaggtgctcctctcccgacttgaggaggaagaacaagatatcctgcagcgtctccgcgagaatgccgcacacctcggcgacaagcgcagggatctggcacacttagccgcagaggtcgagggcaaatgtctgcagtctggttttgaaatgctgaaagatgtgaagtccaccttggaaaagaacattccccggaaatttggggggtcactctctacgatctgtcctagggaccacaaagctttgctggggctggtgaaggaaatcaataggtgtgagaaggtgaaaaccatggaggtcacctcagtctcgatagaactggaaaagaattttagtaattttcccagacagtactttgcattaaggaaaattctgaaacaactgattgccgatgtgactctcgatcctgaaacagcccaccccaacctggtgctgtccgaagacagaaaatccgtcaagttcgtcgagacacggctccgggacctccccgacacgccccggcggtttaccttttatccatgcgttctggcgaccgaaggcttcacaagtggccggcactactgggaagtcgaggtaggcgacaaaacccactgggctgtgggagtgtgcagggactctgtttcaagaaagggggagctgacccctctgcccgaaacagggtactggcgtgtgcgcctgtggaacggagacaaatacgccgctacaaccacaccattcacacctcttcatattaaggtgaaaccaaagagagtgggcatttttctggattacgaggccggtactttatccttttacaacgtcacagacaggagtcacatttatacttttaccgacaccttcaccgaaaagttgtggcccctcttctaccctggcatccgtgccggaagaaagaacgctgctccactcaccattcgccctcctaccgattgggagtag

SEQ ID NO: 138959 - DNA, 1557 bp, synthetic construct
  misc_feature 1..1557: note = Description of Artificial Sequence: Synthetic coding sequence
  source 1..1557: mol_type = other DNA
atggccgaaacctctcttttggaagcaggagccagcgcagcttctactgctgccgccctggagaacttacaagtcgaggcctcctgctcggtctgcttggagtatctgaaggaacctgtgattatcgagtgcggccacaatttttgcaaggcatgcatcactagatggtgggaggacttggagagggactttccgtgtccagtttgtaggaagacatcgcgctatagatctttgcgccccaatcggcagctggggtccatggtcgaaatcgctaagcagttgcaggcggttaagcgcaaaatccgcgatgagagcctttgtccccaacatcacgaggccttgtccctgttttgttatgaggaccaggaggctgtgtgtctcatctgcgctatctctcacacccatcgcgcacacacagtggttccattggatgatgctacgcaagagtacaaggaaaagctgcagaagtgtctagagccgctggagcagaaactccaggagatcacccgttgcaagagctctgaggagaagaaacccggggaactgaagcgcctcgtggaaagccggagacagcagatactgagggagtttgaagagctacatcgtcggttagacgaggaacagcaggtgctgctgagtaggctggaggaggaggaacaagacattctgcaacgtctgagggaaaatgctgcacatctgggagacaagagaagggatctggcccatttggctgcggaagtggaaggcaagtgtctgcagagtggattcgaaatgctcaaacctgtgctctcggcaagggagaaaaatatccctcggaaattcggagggagcttgtctactatatgtcctcgagatcacaaagccctgctcgggcttgttaaggaaataaatcggtgtgaaaaggttaaaacaatggaagtgacatccgttagtatcgagctggaaaaaaacttctctaattttcctcgacaatatttcgccctgcggaagatacttaaacaactgatagcggatgtgaccctggatcctgagactgcacacccaaacctagtgctgtcagaggaccgcaaaagcgtgaaattcgtagagaccagactcagggacctgccagacacaccacggcggtttacattctacccctgcgtgctggccaccgaaggcttcacaagcggacggcactattgggaagtggaggtcggcgataagacccattgggcggtaggcgtgtgcagggatagtgtttcccggaagggggaactgaccccactcccggagaccggctactggcgggttcgtctttggaacggtgacaagtacgccgccacaacgaccccgtttaccccgctgcacatcaaagtaaaacctaagcgggtaggcattttcctggattacgaggcaggcacccttagtttctataatgtcacagacagaagccacatttatacatttacagatacctttaccgagaagctgtggccgctcttttacccaggtatccgggccggacgcaaaaacgctgcccccctgacgatccgcccccccactgattgggagtag

SEQ ID NO: 138960 - DNA, 1254 bp, synthetic construct
  misc_feature 1..1254: note = Description of Artificial Sequence: Synthetic coding sequence
  source 1..1254: mol_type = other DNA
atggtggagatagccaaacagttacaggccgtgaaacgtaagatccgggacgaaagtctttgtccacaacaccacgaagcgctctcgctgttctgttacgaggaccaggaggctgtatgcctcatctgcgcgatttctcacacccatagggcccacactgttgtcccacttgatgatgcaacacaggagtataaagaaaagctccaaaagtgcctcgaacctctggagcaaaagttgcaggagatcacacggtgcaagagcagtgaagagaagaagccaggggagttgaagaggctcgttgaaagcagaagacagcagatactgagggaatttgaagaactgcaccgaaggctggacgaagaacagcaggtgctgttgagcaggctggaggaagaagagcaggacatcctgcagcggcttagggaaaacgcagcacacctaggcgataaacgaagggaccttgcgcatctcgcagccgaagttgaggggaaatgcctgcagagcggcttcgaaatgcttaaacccgttctgagtgctcgcgaagaatgtgaaaaagttaagacaatggaggtgacttcagtttcaatcgagcttgaaaaaaacttctccaacttccccaggcagtatttcgcactccgcaagattcttaaacagctgatcgctgatgtgacgctcgatcccgaaacagcccacccgaacctggtgctttcagaggacaggaaatcagtcaaattcgttgagacccggcttcgcgatttaccagatacaccccgcaggttcacattttacccctgcgtcctcgctacggagggattcacctcgggacgccactactgggaggtcgaagcggcccattgcgtgctggcacaagaccccgaaaaccaggctctcgcgcgcttctactgctatactgagagaaccatcgccaagcgtctcgtcctgaggagggacccatcggtgaagcggaccctttgcagaggatgctcatctctgttggttcctggcctcacttgtacacatcgccagcgacggtgcagaggccaaagatggactgtacagacctgtctcacgtgtcaaagatcgcagagatttctgaacgacccaggacacttgttgtggggtgacaggcctgaggcccagctcggttcacaagcagatagtaagcctttgcagcctttaccgaacacagcccatagcatcagcgatcgtttgccggaagaaaagatgcagacacaaggcagttcaaatcagtag

SEQ ID NO: 138961 - DNA, 1254 bp, synthetic construct
  misc_feature 1..1254: note = Description of Artificial Sequence: Synthetic coding sequence
  source 1..1254: mol_type = other DNA
atggttgagattgccaagcagttgcaggccgtgaagcgaaaaatccgcgacgaaagtctctgcccccagcatcatgaagcccttagcctgttctgttatgaagaccaggaggcagtgtgtctcatttgcgccatcagccatacacaccgcgctcatacagtggtgcccctggatgacgctacgcaggaatacaaggagaaactgcagaagtgcttggagcctctggagcagaaactgcaggagatcacccggtgcaagtcgagtgaagagaagaagcccggggaacttaagcggctagtggagagtcgcagacagcaaattcttagggagttcgaggagctacaccggaggcttgacgaggagcagcaggtgctgctgtcgcggttggaggaggaggagcaagacattctgcagagactgcgtgagaacgccgcacatcttggtgacaagcgacgggatctagcacatctggccgctgaagtagaggggaaatgtctgcaatccggctttgagatgctcaagcccgtgctgtcagcccgcgaagagtgtgagaaggtgaaaacaatggaggtgacttccgtgagtatcgagctcgaaaagaatttcagtaactttccacgacagtatttcgcactgaggaaaatcctgaaacaactgattgccgacgtgactctcgacccagagacagcccacccaaatctggtactgagcgaagatcggaaatctgttaagtttgttgaaaccaggttacgggacctgccagacacaccgaggaggtttacattctacccatgcgtgctagcaaccgaaggctttaccagtggacgacattactgggaagtcgaagcggctcattgtgtgctggcccaggaccctgaaaatcaggctctcgcgcgcttctactgctatactgagaggaccattgccaaaagattagtccttcgacgagacccctcagttaagagaactctatgtcgtgggtgcagctcgcttcttgtacccgggctcacatgcactcatcgacagcgccgctgcagaggtcaaaggtggactgtgcagacatgcctgacgtgccagaggtcccagaggttccttaatgatccgggccacttactctggggcgataggcccgaagcacagctaggatcacaggccgatagcaaacccctacaacccctgccaaacaccgcacactctatctctgaccgcctgccagaggagaaaatgcagacacagggctccagtaaccagtag

SEQ ID NO: 138962 - DNA, 1236 bp, synthetic construct
  misc_feature 1..1236: note = Description of Artificial Sequence: Synthetic coding sequence
  source 1..1236: mol_type = other DNA
atggcagagacatccctgctggaagccggcgcaagcgccgcatctaccgctgctgccttggagaatctgcaggttgaggcttcctgtagcgtgtgtctggagtatcttaaggagcctgtgattatcgagtgtggccataatttctgtaaggcctgtataacccggtggtgggaggacctagagagagatttcccatgtcccgtgtgcagaaaaacatctcgatacagatccctaaggccaaatagacaattgggtagtatggtggagattgcaaagcaactgcaagccgtcaaaagaaagatcagggatgagtcactgtgccctcaacatcacgaggcactctccctgttttgctacgaggaccaggaagccgtgtgtttgatttgcgccatttcccatactcaccgagcccacactgtagtgcctctggacgatgcgactcaagagtacaaagaaaagcttcagaaatgcctcgagcctctcgagcagaagctacaggaaatcacaagatgtaagagctctgaggaaaaaaagccaggcgagcttaagcgactggtagagtctcgcagacagcagatactgagggagttcgaggagctccaccgcaggctcgacgaggagcaacaggtgctgttgtcacggctggaagaagaagagcaggatatcctgcagcggcttagggagaacgcagcccatctcggggacaagaggcgggaccttgcgcacctggccgccgaagtcgaaggtaagtgcctgcagagcggtttcgagatgctgaaaccagtgttaagcgcgcgcgaggaatgcgaaaaagttaagaccatggaggttacatcagtcagcattgaacttgaaaaaaacttctccaatttcccacgccagtatttcgcactccggaagatccttaaacagcttatcgctgacgtgaccctggacccagagaccgcacatccaaatctggtgcttagcgaagacaggaagagcgtcaagtttgtggaaacacgtctacgggatttgccggacactccacggcggttcaccttctatccctgtgtgctggcgaccgaggggttcacgtctggccggcactactgggaagttgaagtgggggataaaactcactgggccgtaggcgtgtgtcgcgattcagtgtctagaaagggcggatgcggatatggtatgggcacaaacatgcagccacctccacatttactgcctctttgtacctcaagatag

SEQ ID NO: 138963 - DNA, 1254 bp, synthetic construct
  misc_feature 1..1254: note = Description of Artificial Sequence: Synthetic coding sequence
  source 1..1254: mol_type = other DNA
atggttgaaatcgcaaagcaactgcaggctgtgaagaggaagatccgtgatgagtcgctgtgcccgcagcatcatgaggctctttcactgttttgctatgaggaccaggaggctgtgtgcctgatttgtgctatctcacatacccatagagctcacacggttgttcccctggacgacgctacccaggagtataaggaaaagctccagaagtgtctcgagcccctggaacagaaactgcaggagatcacacggtgcaagtcctctgaggagaagaagccaggcgaattgaaacgcctggtggaatcccgacggcaacagatcctgagggagttcgaggagctccatcgcaggctggacgaagaacaacaagtgctcctgtctaggctcgaagaggaggagcaggacatcctgcaacgattacgcgaaaatgccgcacatctgggtgacaaacggcgggacctggcgcatctggcagctgaggtggagggcaaatgcctgcagagcggattcgagatgctaaagcctgtgctgtcagctagagaggagtgcgaaaaggtgaaaaccatggaagtgacctcagtgtctattgaactcgagaagaatttctcaaattttccccgccagtattttgccctccgaaagatcttgaaacagcttatcgctgatgtgaccctggaccccgagaccgctcaccccaatctggttctctcggaggacaggaaatctgttaaatttgtagaaaccaggttacgggacctaccagacaccccacggcggtttacgttttacccatgtgtgctggccactgaaggatttacttccggtcgccattactgggaagtcgaggccgcgcattgcgtactggcccaggatcccgagaatcaggcgctcgctaggttttattgttataccgagaggactatcgccaagcgcttggtgctgagaagggatccaagtgtgaagagaactctgtgcaggggctgcagttccctgttagtgcccggtctgacctgcacacatcgccaacgtcggtgtcggggacagcggtggacagtgcaaacctgcttaacgtgccaaagaagccaacgattcttaaacgacccagggcatctgctctggggtgatcgccctgaggcccaattaggtagccaggccgacagtaaacccctgcagcctctgcccaacacagcccactccatctctgaccgattaccagaggagaagatgcagacacagggtagttctaaccagtag

SEQ ID NO: 138964 - DNA, 1557 bp, synthetic construct
  misc_feature 1..1557: note = Description of Artificial Sequence: Synthetic coding sequence
  source 1..1557: mol_type = other DNA
atggctgagacatcccttttggaggctggtgcctccgccgcttcaactgccgctgcattagaaaacctccaggtcgaggcaagctgtagcgtctgtttagaatacttaaaagagccagtaatcatcgagtgtggccataacttctgtaaggcttgcatcacccgatggtgggaagatcttgagcgcgatttcccctgtccagtctgtcgaaagactagtcgctatagatccctgcgacccaaccggcagttgggctccatggtagagatcgctaaacaactccaggcagttaagagaaagatcagggatgagagtctatgtccccagcaccatgaagcactatcattgttctgctacgaagatcaggaagccgtttgtctgatatgcgcgatttcgcatacacacagggcccataccgtggtccccctcgatgacgctacccaggagtataaagaaaaattgcagaaatgccttgagccactcgagcagaaattgcaggaaatcacccgctgcaagtcatctgaagagaagaagcccggagaactgaaaaggctcgtggaaagtcgccgtcagcagattctgagagagtttgaggagctgcaccgcaggctggatgaggagcagcaagtgctactcagcaggctagaagaagaagagcaggacattctccagagactgagggaaaacgccgcacatctcggagacaagaggcgtgatctagcacacctcgcagcagaggtggaaggaaagtgtctgcagtcagggtttgaaatgctaaaacccgtgttaagtgcccgcgagaagaacatcccaaggaaattcggtggctcgctgtccacgatttgccctcgggatcacaaagcgctcctgggtctggtcaaagagattaaccggtgcgagaaagtgaagacgatggaagttaccagcgtttctatcgagcttgaaaagaacttttccaattttccacgtcagtacttcgctcttaggaaaatcttgaagcagcttatcgccgacgtcactctggatccagaaacagctcatcccaacctcgttctgtcagaagataggaagagtgtgaagtttgtagaaacacgcttacgggatctccccgatacgccgcggaggtttaccttttacccttgcgtgctggctaccgagggcttcacctcagggagacattactgggaggtcgaagttggtgacaagactcactgggccgtgggggtgtgccgggacagtgtaagccgaaagggagagctgacgcccctgccagagaccgggtattggcgggtgaggctgtggaatggcgataaatatgccgccacaactacaccgttcactcccctgcacattaaagtgaagcctaagagagtcggaatcttcctggattacgaggcgggtaccctgtccttctataacgtgaccgacaggagtcacatctacacttttactgacacatttactgagaaactatggcccctgttctatccaggaatcagagccggaagaaagaacgcagccccactgactatacgacctccgactgattgggaatag

SEQ ID NO: 138965 - DNA, 1254 bp, synthetic construct
  misc_feature 1..1254: note = Description of Artificial Sequence: Synthetic coding sequence
  source 1..1254: mol_type = other DNA
atggtcgaaatagctaaacagctgcaagccgtcaagagaaaaatccgagatgaatctctgtgcccccagcaccacgaggccctgagtctgttttgctacgaagaccaagaggcagtgtgtcttatttgcgccataagtcacacacaccgtgctcacaccgtggtgcccttagatgatgccactcaagagtacaaagaaaaattgcaaaaatgcctggaacctctcgaacagaaactgcaggagatcactagatgtaaaagcagtgaagagaaaaagccaggagagttgaaacgcctggttgaaagccggaggcagcagatcctgcgcgaatttgaggagctgcataggcgcttggacgaagagcagcaggtgttactgtctcgcctcgaagaggaagagcaggacatattgcagagactgcgagagaatgcagcccacttaggagataagagaagagacctcgcccacctcgccgctgaggtagaaggaaaatgcctccagtccggctttgaaatgttgaaacctgtgctttcagcccgcgaggagtgcgagaaagtgaagactatggaggttacgtccgtgtctatagagctggagaagaacttttccaactttcccaggcagtattttgccttacggaaaattctcaagcagctgattgccgatgtgacgttggatcccgaaacagcacaccctaacttggtgctgtccgaagatagaaagagtgtcaaattcgtcgaaacacgactgcgtgatctaccagatacgccacgcagattcaccttttacccatgcgtgctggccacagaggggtttacaagtggtaggcattactgggaggtcgaggcggcacactgcgttttggcacaggatcccgaaaaccaggcactggctcgcttttactgctataccgagcgaaccatcgcaaagcgcctggtgctacgcagggatccttcagttaagcgcaccctgtgccggggttgctcatcccttttggtgccagggttgacatgcactcagcgccagcggcgctgtcggggccagcgttggacagtgcaaacttgcttaacctgtcagcggagtcagcggtttttgaacgaccccgggcacctgctgtggggtgatcggccagaggctcaactggggagtcaggccgacagcaaaccgctgcagcctctgcccaatactgctcatagtatcagcgacaggctgcccgaggagaagatgcagaccaagggctctagcaaccaatag

SEQ ID NO: 138966 - DNA, 1236 bp, synthetic construct
  misc_feature 1..1236: note = Description of Artificial Sequence: Synthetic coding sequence
  source 1..1236: mol_type = other DNA
atggccgaaactagtctgctggaagctggcgcttccgctgcgtctaccgccgctgcccttgagaacctacaggtggaggccagctgtagtgtttgtttagagtacctgaaggagccagtcataatcgagtgcggacacaacttttgtaaagcgtgtataactagatggtgggaggacctggagcgggactttccttgtccagtctgccgaaagacctcgcggtaccggagtttaagaccaaacagacagctcggcagtatggtggagattgccaaacagctacaggcagtcaagagaaaaatcagggacgagagcctgtgtcctcagcatcacgaggctctaagcttgttctgctacgaggatcaggaggccgtgtgcctcatttgtgcaattagccacacccatcgagcacataccgtagtgcctttagacgatgcgacacaggagtataaggagaaactacagaagtgtctcgagcctctggagcaaaagctccaggagattactagatgtaaaagctcagaagaaaaaaaaccaggcgagcttaaaaggctggttgagtcaagacgccaacagattctgcgggagtttgaggagctccataggaggttggacgaagagcagcaggtgctcctcagccgcctcgaggaagaagaacaggacattcttcagcgcctgcgcgagaacgctgctcatcttggagacaagcgtcgcgacctggcgcacctggctgcagaagtcgaggggaagtgtttacaatccggcttcgagatgttaaagcctgtcctgtccgcacgtgaagaatgcgagaaggtgaagacaatggaagtgacgtccgtctctatagagctggaaaaaaactttagtaacttccctcgccagtactttgctctgcgaaaaatcctcaagcagctgatcgcagacgttacactcgatcccgagacagcccatccaaacctcgtgctctctgaggatagaaaatccgttaagtttgtggagacacgcctgagggacctgcctgacacaccgaggcgctttactttctatccttgtgtgctggccaccgaaggcttcacatccggccgtcactattgggaagtcgaagtcggcgataaaacacattgggccgtgggcgtgtgtcgagactcagtctcacgaaagggggggtgtggttacggaatgggtaccaatatgcagccacccccccacctgctcccactgtgcacaagccggtag

SEQ ID NO: 138967 - DNA, 1254 bp, synthetic construct
  misc_feature 1..1254: note = Description of Artificial Sequence: Synthetic coding sequence
  source 1..1254: mol_type = other DNA
atggtcgaaatcgcaaagcaactgcaagccgtcaagcgcaagatccgcgatgagtcgttgtgtcctcagcatcacgaagctctgagtcttttttgttacgaggaccaggaagctgtgtgccttatatgcgctatatcccatacccatcgggcacacaccgtggtgcctctggatgatgcaacccaggagtataaagagaaattgcagaaatgtctggaaccgctcgagcagaagctgcaggaaatcacccgctgtaagtcatctgaggagaaaaagcctggagagctgaaaagactggtggaatctaggcgccagcaaatattgcgggaatttgaggaactgcatcgcaggctggatgaggaacagcaagttctgttgagtagactggaagaggaagagcaagatattttgcagaggctgagggagaacgccgctcacctgggggataaaagaagagacctagcgcatttggcagctgaagtggaaggtaagtgccttcaatccggttttgagatgctgaaacccgtccttagcgcaagggaggagtgtgagaaggtaaaaaccatggaagtgacatctgtgtccattgagcttgagaagaatttctcaaatttcccgcgccagtatttcgccctgcggaaaattctcaagcagctgatcgccgacgtgacactcgatcccgagactgcacatccgaacttagtgcttagcgaggaccgtaaaagtgtgaagtttgttgaaacccggctgagggatttgccagacacaccccggagattcaccttttacccttgcgttcttgcaacagaggggttcacatcaggccgtcattattgggaggtggaagccgcacattgtgtgctggctcaggatcctgaaaaccaagcgttggctaggttctattgttatacagagcggactatcgccaaaagactggttctcagaagagaccctagcgtaaagcggaccctctgtcggggatgctccagcttactggtccctggtttaacgtgtacccagcgacaaagaaggtgtcggggtcagagatggaccgtccagacgtgccttacttgccaacgctcccagagatttcttaatgatccaggacaccttctgtggggagatagacctgaagcacagctcggctctcaggccgatagtaagccactacagcccctcccaaatacagcgcacagtataagtgacaggttgccggaagaaaaaatgcagactcaggggtcatctaatcagtag

SEQ ID NO: 138968 - DNA, 1557 bp, synthetic construct
  misc_feature 1..1557: note = Description of Artificial Sequence: Synthetic coding sequence
  source 1..1557: mol_type = other DNA
atggccgaaacctcgctcttggaagcaggagcaagcgcagccagcactgcggccgcactcgagaatctgcaggtggaggcttcctgcagcgtgtgtctagaatatttgaaagaacctgttatcatcgaatgtggacacaacttctgcaaagcctgcatcacacgctggtgggaggacttagagcgggactttccttgcccggtctgccgcaaaactagccggtacaggtctttacgccctaataggcagctgggttcaatggtggaaatagccaaacagcttcaggctgttaagcggaaaattcgcgatgagagcttatgtccacaacatcacgaggctttatctttgttttgttatgaggatcaggaagctgtttgcctcatctgcgcaatctcacacactcaccgggcccacaccgttgtgccgctcgacgacgcgactcaagagtataaggaaaaactgcagaaatgtcttgagcccctggaacaaaaacttcaggaaatcacacgctgcaagtcctctgaagagaagaaacccggcgagctgaagagactcgtcgagtcacgacgccagcagatattgagagagttcgaggagctgcatcgccgtctggatgaagaacagcaggtattactctctaggctggaggaggaggaacaggacattctccagcgcttgagagagaatgcagcacacctgggtgacaagagaagagatctggcacatctggcggctgaggttgagggcaagtgtttacagagtgggttcgagatgctaaaggacgttaaatccacactggaaaaaaacatccctcggaagtttggagggtccctgtcaactatctgtcccagggatcacaaggccctgctgggtttggtgaaagaaataaataggtgcgagaaagtcaaaacaatggaagtgacttcggtatcaatcgaactggagaaaaacttctccaactttccacgacagtacttcgctctcaggaaaatactcaagcaactgatagccgatgtgaccttggaccctgagacagcccatccaaacctcgttctgagcgaagataggaaatcggtgaaatttgttgagacaagactcagagacctacctgatacacccagaagatttacattttacccttgcgtactagctaccgaagggttcaccagcgggcggcactactgggaggtcgaagttggagacaagacccattgggcagtcggggtgtgtcgagattctgtatcccggaagggtgagttaacccctctgccagagacaggctattggcgcgtcagactgtggaatggtgataaatatgcagcaacaaccacaccattcacaccattacatatcaaggtgaaaccgaagagggtgggtatcttcctggattacgaggccgggaccctttctttctataacgtgaccgaccggtcccacatatacacgtttaccgacacctttactgagaagctttggcctctattttatcccggaattagagcagggagaaagaatgcagctcctctgaccatccgtccccctacagactgggagtag

SEQ ID NO: 138969 - DNA, 1557 bp, synthetic construct
  misc_feature 1..1557: note = Description of Artificial Sequence: Synthetic coding sequence
  source 1..1557: mol_type = other DNA
atggctgagacgtcactcttggaggccggggctagcgcggcttctaccgccgcggctctggaaaacctgcaagtggaggcgtcatgttcagtctgcctcgaatatctcaaggagccagttatcattgagtgcggacataacttttgtaaggcttgcatcacccggtggtgggaggatctggaaagggacttcccctgtcccgtttgcagaaagaccagtagatataggtcactgagacccaatcggcaactgggcagcatggtcgaaatcgctaaacagttacaggccgtcaaaaggaaaataagggatgagtctctatgtcctcagcaccacgaggccctcagtctgttctgttatgaggatcaggaggccgtgtgtctgatttgtgcgatctcccacacccacagggcccataccgttgttccgctggacgatgccacgcaagaatacaaagagaagctgcagaaatgtctagagcctctagagcagaagttgcaggagatcacgcggtgcaagtcttccgaagagaagaagcccggggagttaaagcgcctcgtagagagcagacgacagcagattttgcgggaattcgaggagctgcatcggaggctcgatgaggaacagcaggtgcttctcagccgtttggaagaggaagagcaggacatcctgcaaagactcagggagaatgcggcccacctgggggacaaacgtcgggatctggcacatcttgctgcagaagttgagggcaaatgcctgcaatccggcttcgagatgctgaaggacgttaaaagtaccctggagaagaacatcccaaggaagtttgggggtagcttatcaaccatctgcccaagggaccataaggctttactcggacttgtgaaggagataaatcgctgcgagaaggtcaagactatggaggtgacttccgtttccatcgagctcgaaaaaaacttctcgaacttcccgaggcaatattttgccctgcgcaagatattgaaacaactgattgcagatgtgactctggacccagagacagcccaccccaacctggtgctctcagaagatcgcaaaagtgtcaagtttgtggaaacccgtctaagagacctgccggataccccacggcggtttaccttttacccctgcgtccttgcaactgagggtttcaccagtggccgccattattgggaggtggaggtcggcgacaaaacccactgggccgtaggcgtctgtcgagattctgtgtctagaaagggtgagctgacccctctaccagaaactgggtattggagggtgcgactgtggaacggagataagtacgccgctacaacaactcctttcactcctctccacattaaagtgaagcctaaaagggtgggaattttcctggactatgaagcgggcactttatctttctataacgttacggatcgatcccatatctacactttcaccgatactttcacagaaaaattgtggccgctgttttatcctggcatcagagccggccgtaagaatgcagctccgctgacaatccggccaccaaccgattgggaatag

SEQ ID NO: 138970 - DNA, 1467 bp, synthetic construct
  misc_feature 1..1467: note = Description of Artificial Sequence: Synthetic coding sequence
  source 1..1467: mol_type = other DNA
atggccgaaacaagtctgttggaggccggcgcctctgcagcctccactgccgctgcccttgagaatctccaggtggaagcctcctgcagcgtatgcctggaatacttgaaagagcctgtcatcattgagtgtggccataatttctgcaaagcttgcattactaggtggtgggaagatctggaacgggatttcccatgccctgtctgtcgcaagactagcagatacagatccctgagacctaatcgtcaactggggagcatggtggagattgctaaacagttacaagccgtgaagcgcaaaatcagagatgagagtctctgtcctcagcatcatgaagcactgagcttgttttgctatgaggatcaggaggccgtctgcctcatttgtgccatttctcacacacatcgtgcacataccgtcgtgcctctggacgacgcgacccaggagtacaaagaaaagctccaaaagtgcttggagcccctcgagcagaaactgcaggaaattactaggtgcaagtcttctgaggagaagaagccaggtgagctgaagagacttgtggaatctcgaaggcagcagatcctccgggagtttgaggagctccatcggagactggatgaggagcagcaggtgctcttgtctcgcctggaggaggaggaacaggatatcttacagcgcctgcgcgaaaatgccgctcaccttggagataagcgcagagacctggcccatctggcagccgaagttgaggggaaatgccttcagtccggcttcgagatgctcaaaccggtgctgagcgcgagggaggagtgtgagaaggtcaagactatggaggtgactagtgtgtctattgagcttgaaaaaaattttagcaattttccacgccagtacttcgcccttcgtaagatactgaaacagctgatcgccgacgtaaccttagatccagagacggcccatcctaatttggtactctcagaagaccggaagtccgttaaatttgtagagacaagactacgcgatctgcctgatactcctagacggttcactttctatccttgcgtgttagcaacagagggtttcacctccggtagacactattgggaagtcgaagtgggagacaagactcactgggccgtgggcgtgtgcagggatagcgtgtctagaaaaggcgaattaactcccctaccagagaccggctactggcgggtacgtttatggaatggcgataagtacgcggctaccactacaccatttacccctctgcacatcaaggttaaacctaagcgtgttggaatcttcttggactacgaggccggaaccttgtccttctataatgtcaccgatcggtctcacatttacacttttacagacacgttcactgagaaactgtggcccctattttaccctggtatccgcgcgggtcggaagaatgcagcccccctgacaatccggcctcctaccgattgggaatag

SEQ ID NO: 138971 - DNA, 1467 bp, synthetic construct
  misc_feature 1..1467: note = Description of Artificial Sequence: Synthetic coding sequence
  source 1..1467: mol_type = other DNA
atggccgagactagcctacttgaagcgggcgcatccgcagcgtcaactgccgctgccctcgaaaacctccaggtggaagcttcctgcagcgtttgcctagaatatcttaaggagccagtcatcattgagtgcgggcacaatttttgcaaggcttgcattacccgttggtgggaagatctggaacgagacttcccttgtcctgtgtgtcggaaaacttccagataccgctctcttcggcccaaccgccagttgggctctatggtagaaattgccaagcagcttcaggctgtgaagagaaagattagggatgaatcactgtgtccccagcatcacgaggcgctaagtttgttttgttatgaagaccaggaggccgtatgcctgatctgtgctatctctcatactcacagagcccacactgtcgtgcctctggacgacgctactcaggagtataaagagaagctgcagaagtgcctcgaacccctggaacagaagttgcaagagattacccggtgcaaatcctcagaagagaagaagccgggcgagctcaagcgactggtagaaagcaggcggcaacaaatacttcgggagttcgaggagctgcatcggcgactggacgaggagcagcaagtgttgctaagtagactggaagaggaagagcaagatatcttgcagcggctgcgtgagaatgcagcccatttgggggacaaaaggcgcgatcttgctcacttagcagccgaggtggaggggaagtgcctacaatcaggctttgaaatgctgaagccagtgctgtccgcaagggaagagtgcgagaaggtgaagacaatggaggttacatccgtaagtatcgaattggaaaagaatttttctaattttccccgccagtactttgcattgcgtaaaatactcaaacagttgatcgccgatgtgactctggacccggagacggcccatcccaacctggtcctgagcgaggaccgaaaatccgtaaaattcgtggagacccggctgcgcgacctgcctgacacaccaaggcgctttactttctatccttgcgttttggctacagaaggatttacctctgggaggcactactgggaggtagaagtgggtgacaagacacactgggccgtcggagtttgccgagactcagtaagcagaaagggagagttgactcccctgccagagactgggtactggagggtgagactttggaacggggacaagtatgccgcgacaactacaccttttacacctctgcacattaaagtgaagcccaaaagagtcggaatctttctagattacgaggccggtaccctgagcttctataacgtcactgacagatcacatatctacactttcacggacacattcacggagaagctgtggcctctgttctacccgggcattagggctggcaggaaaaacgccgctcctttgactataagacctccgacagattgggaatag

SEQ ID NO: 138972 - DNA, 1254 bp, synthetic construct
  misc_feature 1..1254: note = Description of Artificial Sequence: Synthetic coding sequence
  source 1..1254: mol_type = other DNA
atggtggagatcgccaaacagctccaagccgtcaaaaggaaaatcagagatgaatccctgtgcccacaacaccacgaagcgttgtccctgttttgctacgaggatcaggaggccgtgtgtttgatatgtgcaatttcccatacccatcgcgcccacaccgttgtgcccctcgatgacgccactcaggaatacaaggaaaagctccaaaaatgtctcgagccactagagcaaaaactgcaagaaatcacacggtgcaaaagctctgaagaaaagaagccaggcgagcttaagcggctagtggagtccaggagacagcagatcttacgcgaattcgaggagctgcatcggagactcgatgaggaacagcaagtcctgctctccagattagaggaggaggagcaggacattctgcagcgacttcgcgaaaacgctgcacacctcggggataagcggcgggacttggcgcatcttgctgccgaagtcgagggcaagtgtttgcagtcaggcttcgaaatgcttaagcctgtcctttctgccagagaagagtgcgagaaggtgaagactatggaagtgactagcgtgtcaatagaacttgagaagaacttttccaactttccacggcagtacttcgctttacggaagatcttaaaacagttaatcgctgacgtgactctggaccctgaaactgcacatccaaacctcgtgctgtccgaagatagaaaatcagtgaagtttgtggagacgaggctgagagacctcccagacacccccagacgatttacattctatccctgcgttctggcaaccgagggatttacatctggacggcactactgggaagtcgaggctgcccactgtgtcctggctcaggatccagagaaccaagccttggcccgcttttactgctatacagagaggacaatcgccaagcggctcgttctgaggcgcgacccctccgtgaaaaggacactgtgtcgagggtgctcctctttactggtgccaggactaacctgcacgcagcgtcagagaaggtgtcggggccagcgctggacagtgcagacctgtttgacgtgtcaacgatctcagcgctttctgaatgaccccggtcatctgctgtggggagatcgaccggaagctcaactggggtcacaggcggacagcaagcccctccagcctctcccaaatacggcgcattccataagcgacaggcttccagaagaaaagatgcagacacaggggtcgtccaaccagtag

SEQ ID NO: 138973 - DNA, 1893 bp, synthetic construct
  misc_feature 1..1893: note = Description of Artificial Sequence: Synthetic coding sequence
  source 1..1893: mol_type = other DNA
atggcagctgtcgctatgaccccgaacccagtgcagaccctccaggaggaagctgtatgcgctatttgcctggattattttaccgatccagtatctatcggatgtggtcacaacttttgcagagtttgcgtcactcagctttggggtggtgaagacgaggaagatcgcgacgaactggatcgtgaagaggaggaggaggacggggaagaggaagaggttgaggcagtcggagccggcgcggggtgggacacacccatgagggatgaggattatgagggcgatatggaagaagaggtggaggaagaggaggagggagtattctggacatcaggcatgtcacgcagtagctgggataacatggactacgtctgggaggaagaagacgaggaggaggatctcgattactacttgggcgacatggaggaggaggacctgcggggagaggatgaggaggatgaagaggaggtgcttgaagaagtggaggaggaagacctggacccagtcacacctctccctcctcccccagctccccgtcggtgtttcacatgtcctcagtgtaggaagtctttccctcggcgctcatttaggcccaatctacagctagcaaacatggttcaggtcatcaggcaaatgcatcccacccctggccgcggctctagggtcacagaccagggcatatgtccgaagcaccaggaggctctcaagttgttctgcgaagtggacgaagaagcaatttgtgtcgtctgtcgggaaagcaggtcacacaaacaacatagcgtggtgcccctagaggaggtggtgcaggagtacaaggctaagttgcagggtcacgttgaacctttacgcaagcaccttgaagcagtgcagaagatgaaagccaaagaagagagacgagttactgagctgaagtctcagatgaaatccgaactggctgccgttgcctctgagttcggtagactgacacgtttcctggccgaggaacaggctggactagagagacggttaagggagatgcatgaggcacagctggggcgggccggtgctgcagcatctaggctggctgaacaggccgcacagctgtcaaggttgctggctgaggcacaagaaaggagccagcagggagggctgcggctccttcaggatataaaggagaccttcaaccgatgcgaagaggtacagttgcagccccctgaggtttggtcaccagatccatgtcagcctcacagtcacgactttctgacagacgcaatagtgagaaagatgtcaaggatgttctgccaagccgcccgggtcgatctgacactagaccccgatacggcacaccctgccctgatgttgagcccagataggagaggcgtcaggctcgcggaaagacgccaagaggtcgcagaccaccctaagcgtttctccgctgactgttgcgttcttggcgcccagggctttagaagcggacgccattactgggaagtggaagtcggggggcgtaggggatgggctgtcggcgctgctcgggaatcaacccatcacaaggagaaggtgggtccaggaggaagtagcgtcggctccggcgatgcttcttccagccgccaccaccaccggagacggagactacatttaccgcagcagcctttgctgcaaagggaagtctggtgtgtgggaacgaacgggaaacgctatcaggctcagagctctaccgagcagaccctcctgtcccccagtgaaaaaccaagaagattcggagtctacctggactatgaggcaggtaggctgggcttctacaatgcagaaacgctcgcccatgtacataccttctccgcggcatttctgggtgaacgggtgtttcccttcttccgcgttctttccaaggggactagaatcaagctctgtccatag

SEQ ID NO: 138974 - DNA, 1557 bp, synthetic construct
  misc_feature 1..1557: note = Description of Artificial Sequence: Synthetic coding sequence
  source 1..1557: mol_type = other DNA
atggccgctgtcgcaatgacaccaaacccggttcagaccttgcaggaagaagcggtctgcgccatctgcctggactatttcactgaccctgtaagtattggctgcgggcacaacttttgtcgtgtttgcgttacacagctttggggcggagaagacgaagaggacagggacgagctggaccgggaagaggaggaggaggacggggaggaagaggaagttgaggcggttggcgccggggccggttgggacacgcccatgagggatgaggactatgagggggacatggaagaagaagtggaagaggaagaagagggcgttttttggactagcggcatgtctcggtcatcttgggacaacatggactacgtctgggaggaagaggacgaagaggaggacctcgactattatctaggggacatggaagaggaagacttaagaggggaggatgaagaggacgaagaagaggtgttggaagaggtggaggaggaggatcttgatccagttaccccactgcctccgccgcctgcgcctaggcggtgtttcacatgtccccagtgcaggaagtctttcccccggcggagctttcggcccaatttgcagctggccaatatggtgcaagtcatccggcaaatgcatcctactccgggacggggctcgagggtgaccgatcagggaatctgcccaaagcatcaggaggctttaaagctattctgcgaagttgacgaggaagccatttgcgttgtatgtcgggagtcacgaagtcataaacaacattccgtcgtgccgctggaagaggttgtgcaggaatacaaagccaaactccagggccatgtagagcctctgaggaagcacttagaagctgtccagaaaatgaaagctaaggaggaaaggcgagtcaccgaactgaagagccaaatgaagagcgagctcgctgccgtggctagtgagtttggcagactcacacgatttcttgcagaggagcaggccggtctggagcggagactccgggagatgcacgaagcccagctcgggagagctggagcagcggcctccagactagccgaacaagcagcccagctgagccgacttctcgctgaagcccaggaacggagtcagcaggggggacttcgactcctgcaggatataaaagagacatttaatagatgtgaagaagtgcagcttcagccaccagaggtatggagccctgatccctgtcagccccactcacacgattttctgacagatgccatcgtgcgcaagatgtcacgaatgttctgccaggccgccagggtggacctgactttggatcctgacaccgcacacccagctttgatgctatcccctgaccgcaggggtgtgaggttagccgagcggaggcaggaggtggccgatcatccgaagcgcttcagcgccgattgttgtgttctgggagcccaaggctttcggagcggacgccactattgggaagagccgaaggagcctagctggcctccggctcagcccagcctcacatattatgtgtgtccgactgaccgtcctgagttttcttttacctag

SEQ ID NO: 138975 - DNA, 453 bp, synthetic construct
  misc_feature 1..453: note = Description of Artificial Sequence: Synthetic coding sequence
  source 1..453: mol_type = other DNA
ctgcaggaggaggccgtatgcgccatttgtctggattactttaccgaccctgtttctataggctgcggccacaacttctgtcgggtgtgtgtcacacaactgtggggccgccgcggaggtggatctggaggctacccggtaacccctttgcccccacccccagccccacggcgttgcttcacgtgtcctcagtgtagaaagtccttcccccgaagatctttccggccaaacctccagctcgccaacatggttcaggtaatccgccagatgcacccgactccaggacggggctccagagtcacagaccagggcatatgtccgaagcaccaagaggcattaaagttgttctgtgaggtggacgaggaggccatctgcgtggtttgcagagaatcccgaagtcataagcagcatagcgtggtgcctctcgaagaggtcgtgcaggaatataaatag

SEQ ID NO: 138976 - DNA, 948 bp, synthetic construct
  misc_feature 1..948: note = Description of Artificial Sequence: Synthetic coding sequence
  source 1..948: mol_type = other DNA
atgaaagccaaagaagagcgtagggtgacagagctgaaatcacagatgaaaagtgagctggctgctgtagccagcgaattcggacgccttactcgatttcttgccgaggaacaggcgggcctggaacgacgacttagggagatgcacgaggcccagttaggacgcgcaggagccgcagcctctagattggccgagcaggcagctcagctgagtcggctgctagctgaggctcaagaaaggagccagcagggggggctaaggcttctccagcaagatattaaagaaacttttaacagatacgcaatcgtccgcaaaatgtcccggatgttctgccaggcagccagagtggatttaacactcgaccccgataccgctcatcccgcgctgatgttgagccctgaccgcagaggtgttcgtctggcggagagaaggcaggaagtcgctgaccacccaaagaggttttcggccgattgttgtgtgctgggcgcccaaggctttagatctggcagacattactgggaagtggaggttggcggcagaagagggtgggccgtgggtgctgctagagaatctactcaccataaggaaaaagtcggccctggcggttccagcgtggggtctggggacgcttccagctcacgacaccaccacaggcgtcgccgcctacatttgccccagcaacccctgctgcagcgtgaagtctggtgtgttggcactaatggcaaacgttatcaggcccagagctcaacggagcagaccttactttcgccttccgaaaagcccagacgcttcggagtgtacctggactacgaggctggtagacttggattctacaatgccgaaacgctggcccacgtgcacaccttttccgccgcatttctaggagaaagagtattcccattttttagggttttgtccaaaggcaccagaataaaactgtgcccttag

SEQ ID NO: 138977 - DNA, 1035 bp, synthetic construct
  misc_feature 1..1035: note = Description of Artificial Sequence: Synthetic coding sequence
  source 1..1035: mol_type = other DNA
atggcttctggagtgggggccgcttttgaagagctcccgcacgacggcacctgtgacgagtgcgagcctgatgaggctcccggggctgaggaggtgtgccgcgaatgcgggttttgctattgcaggcgacacgctgaggcccatcgacagaagttcctgagccatcacctcgccgagtacgtgcacggcagccaggcctggacacctcctgccgacggcgagggggctggaaaggaagaagctgaggtgaaagttgagcaagagagggagattgagagcgaggcaggagaggagtctgagagtgaggaggagagcgagtctgaagaggaaagcgaaactgaagaggagtccgaggacgagagcgacgaggaatccgaagaggatagcgaggaagagatggaggacgagcaggagtcagaagcggaggaggataaccaggaagaaggggagtccgaggctgagggggaaacagaggccgagagtgagtttgacccagagattgagatggaagccgagagagtggccaagcggaagtgccccgatcacggcttggacttgagcacatactgtcaagaagatcgacagcttatctgcgtgctgtgccccgtaatcggggcccaccaaggtcaccagctaagcactcttgacgaggccttcgaggagttaaggtctaaggatagtggggggttgaaagcggctatgattgagctggtggagcggttaaaattcaagagctctgaccccaaggtaacacgcgatcaaatgaagatgttcatccagcaggaattcaagaaggttcagaaggtgatagccgacgaggaacagaaagccctgcatttagtggatatccaagaggcaatggccaccgctcacgtgaccgagatacttgccgacatccagagccacatggaccgattgatgacccaaatggcacaagctaaggaacagcttgatacatctaacgaatcggccgagccaaaggccgagggtgatgaggaaggcccaagtggggcttcagaggaggaggacacatag

SEQ ID NO: 138978 - DNA, 1743 bp, synthetic construct
  misc_feature 1..1743: note = Description of Artificial Sequence: Synthetic coding sequence
  source 1..1743: mol_type = other DNA
atgtctgagaaccggaaacctctgctcggtttcgtgtctaagctcacgagcggaacggccctaggcaattctggcaagactcattgcccactgtgtctgggactgttcaaggccccgagactcctaccatgcttgcatacagtgtgtaccacctgcttggaacagcttgaaccattctccgtagtagatatccgggggggtgacagcgacacaagctctgaaggcagtatcttccaggagcttaagccgcgtagcctgcagtcccagattggcattctgtgcccggtctgcgatgcccaagttgacctgcctatgggtggcgtgaaggctttgacaattgatcatctggcagttaacgacgtgatgctggagtcattaaggggggaggggcaggggctggtatgtgatttatgcaacgatagagaagtcgagaaaagatgtcagacctgcaaagccaacctttgtcacttttgttgtcaggctcaccgtcggcagaagaaaacgacctaccacactatggtcgacctcaaagacctgaaaggatattctcgtatcggtaagccaatcctgtgcccagtgcaccctgccgaggagcttaggttgttctgcgagttctgcgatcggcccgtgtgtcaggactgtgtagtgggcgaacaccgagaacatccgtgcgactttacatccaacgtcatacataagcacggcgattccgtatgggaattgctgaagggaacacaaccccacgtggaggccctggaggaagcactcgcacaaatccatattattaactccgccctgcaaaagcgggtggaggcggttgctgccgatgtgagaacgttctcggaaggatatattaaagcgatcgaggaacaccgtgacaagctccttaagcaactcgaggatatcagagcgcagaaagaaaattccctgcagttgcaaaaggcccagctggaacaattacttgcagacatgcgaacaggtgtggagttcaccgagcatctgctgacctccggctccgatttggaaattctcatcaccaagagagtcgtggtggaacgactgcgcaaactgaacaaagtacaatattccactagacctggcgtgaatgataagataaggttctgtccacaagagaaggccggccagtgccggggatatgaaatatatggcacaatcaacacaaaggaagtggatcccgccaaatgtgttctgcagggagaggatctgcaccgggcccgtgaaaagcagaccgcgagctttactcttctgtgcaaggacgccgctggcgaaatcatggggagggggggggataatgtccaggtggccgttgtgccaaaagacaagaaggactcccctgtgaggacgatggtgcaggacaataaggatggcacctactacatttcctacacccccaaggaaccgggggtgtacactgtatgggtctgtatcaaggagcaacacgtccaggggtcgccttttacggttatggtgaggagaaagcatagaccgcactccggagtattccattgctgcacattctgcagtagcgggggccaaaagacagctcgatgcgcatgcggcggaacaatgcctggaggctatctgggttgcgggcacggccataagggacaccccggacatccccattggtcatgttgcgggaagtttaacgaaaaaagcgagtgcacatggactggaggacagtctgcccctcgttctctcctgcgtacggtggccctctag

SEQ ID NO: 138979 - DNA, 1572 bp, synthetic construct
  misc_feature 1..1572: note = Description of Artificial Sequence: Synthetic coding sequence
  source 1..1572: mol_type = other DNA
atgctctccggggtgacacttgagggcggcggagcacgttccggcgaggggcggcggtcacgcaccgagctaaagcctagatcacttcagtcacagatcggcattttatgcccggtctgtgatgcacaggtcgaccttccaatgggaggcgtgaaggccttgactatcgaccaccttgcagtgaacgatgtcatgctcgaaagtcttcgcggagaagggcagggactggtttgcgatttgtgtaatgatagggaggttgagaaaagatgccagacttgtaaagccaacttgtgccatttttgttgtcaggctcatcgaagacaaaagaagacgacataccacacgatggtcgatttaaaagacttaaaaggctactctaggattggtaagccaatcctgtgcccagtgcatcctgcagaggagctccgactgttctgcgagttttgtgaccgccccgtctgtcaggattgcgtagtcggggaacaccgggaacatccctgtgattttacatctaatgttatacacaaacatggcgattccgtgtgggagcttcttaagggcacacagccgcacgtcgaagcactggaagaggccctcgcccagatccacatcatcaacagcgccctgcagaaacgcgtggaagccgtggctgcggatgtgaggactttttctgaggggtacattaaggctattgaggagcaccgggacaaacttctcaaacagctcgaggacatcagggcgcaaaaggagaacagtctgcagctgcaaaaggcgcagctagagcagctgctggcagacatgcgtaccggtgttgagttcactgaacacttgctaacctcaggcagtgacttggaaatcctgattaccaagcgggtggtcgtggagagacttcgcaagctgaataaggtccagtactccactagacccggcgttaacgacaaaattagattttgcccgcaggaaaaagctgggcagtgcagaggctatgagatctacggcactattaacactaaagaggtcgatccagcaaaatgtgtcctgcagggggaggacctccatcgggcaagggagaagcagactgcctcatttactttgttatgcaaggatgctgctggcgaaatcatgggtcgtggcggagataacgtgcaggtggcagtggtacccaaggacaagaaagacagtccagttcgcaccatggtacaggataacaaggacggcacgtactatattagctacactcctaaggagccgggggtgtacacagtctgggtctgtatcaaggaacaacatgtgcagggtagtcccttcactgtcatggtgagaagaaagcatcgcccccattccggggttttccactgttgtaccttctgctcatctggcggtcagaaaacggcccgctgcgcatgcggcggaaccatgccaggcggttatctgggctgtggtcatggccataaaggtcaccccggccaccctcattggagctgctgcggcaagttcaacgagaaatctgagtgtacctggaccggcgggcagtctgcccctagatctttgttgcgcaccgtcgccctgtag

SEQ ID NO: 138980 - DNA, 1689 bp, synthetic construct
  misc_feature 1..1689: note = Description of Artificial Sequence: Synthetic coding sequence
  source 1..1689: mol_type = other DNA
atgtccgaaaatcgtaaaccgcttctaggcttcgtgagcaaactaacgtccggaaccgccctgggcaattcaggaaagacccactgccctctgtgcctggggctgtttaaggctccgagactgttgccatgtctgcataccgtctgcactacttgccttgagcaactggagcctttttccgtggtagacattcgggggggcgacagtgatactagttccgagggctctatttttcaggagctaaaacccagatctctgcagtcacagatcggcatcttgtgtcccgtgtgcgatgcgcaagtagatcttcccatgggaggggtcaaagcgctgacaatcgaccatctggctgtgaatgacgttatgttggaatcactaaggggcgaaggtcaagggctggtttgcgacctgtgcaatgaccgcgaggtcgagaaaagatgtcagacctgcaaggcaaacctgtgccacttttgctgtcaggcccatcgacgtcagaaaaaaacaacgtaccacaccatggttgatctgaaggacctgaaaggatattcacgcatcggtaagccaatattgtgtcctgtacatcctgcggaggagttacgtctcttttgcgagttctgcgatagacctgtgtgccaggactgtgtggtgggcgaacacagggagcatccatgtgactttaccagcaatgtgatacataagcacggcgactccgtgtgggagcttcttaaagggacccaacctcacgtagaggcgctggaagaggcattggcgcagattcatataatcaatagcgcccttcagaaaagagtggaagcagtggccgctgacgtgaggactttttccgagggctacatcaaagccatagaagaacaccgtgacaagcttctgaaacaattggaagacatcagagcacagaaggaaaactctctccaattgcagaaagcccagctggaacagctgctggctgacatgagaacaggcgtggagtttactgaacacctactcacgtccggttcagatctggagattttgattacgaaaagggtggttgttgagaggctcaggaaactcaacaaggttcagtattcgacacgccctggagtcaacgataaaattcggttttgtccacaggagaaggccgggcaatgtagggggtatgagatatacgatctgcatagggctcgagaaaagcaaaccgcttcctttacactgctgtgcaaggacgccgcgggagaaatcatgggcaggggcggggacaatgtgcaagtcgctgtggtgcccaaggataaaaaagactctccagtccggactatggttcaggacaacaaggatggtacatactacattagttatacccccaaggagcctggggtctataccgtgtgggtctgcataaaggaacaacatgtgcaggggtcccccttcactgtcatggtgcgaagaaagcaccgaccacatagcggtgtctttcactgttgcacattctgtagtagcggagggcaaaaaaccgctaggtgtgcctgtggcgggactatgcccggggggtatcttgggtgcggccatggacacaaagggcatccaggtcatccccattggtcctgttgcggtaaatttaacgagaaaagtgaatgcacttggactgggggtcaatctgccccccgctcgctgttaaggacggtagcactgtag

SEQ ID NO: 138981 - DNA, 1917 bp, synthetic construct
  misc_feature 1..1917: note = Description of Artificial Sequence: Synthetic coding sequence
  source 1..1917: mol_type = other DNA
atggatgggtccgggccttttagctgtccaatctgtcttgagcctctgcgtgagccggtcacactcccatgcggtcacaacttttgtctggcctgcctgggagcattgtggccccatagaggagccagtggcgctgggggaccgggaggggccgcccggtgtccattatgtcaggaaccatttccagacgggctccagctaaggaagaaccacacgctgtccgagctcttgcagctgcggcagggttctggacccggttccgggcctgggcctgcccctgctctcgcaccagaacctagcgccccttctgctctcccaagcgtaccagagccttccgcaccttgcgccccagaaccctggccagcaggggaggagccggtgcgatgtgacgcgtgtcccgagggtgcagctcttcccgccgcgttgtcttgtctgtcttgtctcgcatcgttctgcccagcgcatctgggtccccacgaacgcagccccgccttgcggggacatcggcttgtacctccgctgcgccgtctcgaggaatccctgtgtccccggcacctccgccctctcgagaggtactgtcgtgccgaacgcgtgtgcctgtgcgaggcgtgcgcagctcaggagcatcgggggcatgagcttgtgcctttagagcaagagagagccctgcaggaagcggagcagagtaaggtgttgtccgctgtggaagatcggatggatgagctcggcgccggtatcgcgcagagtcgaaggaccgtggcccttatcaaatctgccgccgtggcggagcgggagagagtctctcgattattcgctgacgccgctgcagccctccaggggtttcagacccaggtgctcgggtttatcgaggagggtgaggctgctatgttgggaaggagtcagggtgacctgagacgccaggaggaacaaaggtcaaggttgtctcgggctcgtcaaaacttgtcccaggtgcccgaggcagactcagtctcctttctgcaggaactgctggcattgcggctcgccttagaagatgggtgtggacctggcccaggcccacctcgggaactatcttttactaagtcatctcaggcagtcagagcggtcagagacatgctggctgtcgcatgcgtaaatcagtgggaacagttgagaggccctggaggcaatgaagacgggccccagaaactggacagcgaagctgacgctgaaccacaggacctggagtccaccaatctgcttgaaagcgaagcaccacgcgattatttcctgaaattcgcctatattgtagatctagactctgacacagcagataaattcctgcagctgtttggcacgaagggggttaaacgcgtgctctgtcccataaattaccctctgagcccgacaagatttactcactgcgagcaagtcctgggcgagggtgcacttgaccggggcacctactactgggaggtggagataatcgaaggttgggtttctatgggtgtcatggcggaagatttcagtccacaggaaccctacgatagggggcgcttgggccgaaatgctcacagttgttgcctgcagtggaatggacggtcgttctccgtgtggttccacggtctggaggcacccttgccccacccgttctccccaaccgtgggagtctgcctggaatatgcagatagggctctcgccttttatgcagtgagggacggtaaaatgtctttactgcgtaggctcaaagcttcaaggcctcgtcggggagggatacctgcatctccaatcgaccccttccagtctcggctggattcccacttcgcaggtctcttcacacatcggctgaagccagctttcttcttggagtccgtggacgcccacctccaaatcggacctctaaaaaaatcttgcatatcagttttgaagcggcgttag

SEQ ID NO: 138982 - DNA, 1482 bp, synthetic construct
  misc_feature 1..1482: note = Description of Artificial Sequence: Synthetic coding sequence
  source 1..1482: mol_type = other DNA
atggccagtggtatactcgtgaatgtgaaggaagaggttacctgccccatttgcttagagctcctcacacagccactgagccttgactgtggtcactccttctgtcaggcatgtttgaccgcgaatcataaaaagagcatgcttgacaaaggtgaaagctcttgcccagtgtgcagaatctcataccagcccgaaaacattcgacccaaccgccacgttgctaacatagtggagaaactccgtgaagtgaagttgtccccagagggccagaaagtcgatcactgtgcacgacacggtgagaaactgctcctattctgtcaggaggatggcaaggtgatttgttggctctgcgaacgcagccaggaacaccgcggacaccacacattcttgacagaagaagtggcccgagagtaccaggtgaaactgcaggccgcactggaaatgctacgtcaaaagcagcaggaagctgaggaactcgaggcagacatccgcgaggaaaaggcttcttggaaaactcagatacagtacgataagactaacgtactggcagattttgagcagctgcgggacattctggattgggaggaatccaatgagctacaaaatttagagaaagaagaggaagacattctcaagtcattgacaaattcagaaactgagatggttcagcagacacagtctctaagagagcttattagtgatcttgagcatagacttcaaggttctgtaatggagttgctccaaaaggttagcgggaaaattctccggaccgaaaatgtgaccctcaaaaaaccagagaccttccctaaaaatcaaaggcgcgtgttccgcgccccagatcttaaagggatgcttgaggtgtttcgcgagctgactgatgttcggcgatattgggtggacgttactgtggcccccaacaatatcagttgtgctgtaattagcgaagataagagacaagtatcatctcctaaacctcaaattatatatggggctagaggaacacgctaccagacctttgtgaattttaattactgtactggaatactcggcagccaaagcattacaagcggcaagcactactgggaggttgatgtgagcaagaaaacagcatggatactcggggtttgcgctggttttcagcctgacgctatgtgcaatatcgagaagaacgagaattaccaaccgaaatatggatactgggtgatcggcctggaagagggtgtcaagtgtagcgctttccaggattcctccttccacactccgagtgtcccctttattgttcccttatcggtcatcatatgccccgatcgtgtgggcgtgtttctggactacgaggcttgcacagtatccttttttaatattacgaaccatggctttctcatctataagttctctcattgctcattctcacaacccgtcttcccctatctgaacccccggaagtgcggagtccccatgacactttgtagcccttccagttag

SEQ ID NO: 138983 - DNA, 981 bp, synthetic construct
  misc_feature 1..981: note = Description of Artificial Sequence: Synthetic coding sequence
  source 1..981: mol_type = other DNA
atggcgtcggggatattggtgaatgtgaaagaggaagtcacctgtcccatctgcctcgagctgctgacccagcccttgtcattggactgtggtcatagcttctgccaggcgtgtctcacagccaaccataagaaatccatgctcgacaagggagaatcatcatgccctgtttgcaggatttcataccagcccgaaaatattcgtcctaatagacatgtggctaacatagtcgagaaacttcgggaagtcaagttgtcccctgagggtcaaaaggtggaccattgtgcaaggcacggcgagaagctcctccttttctgccaagaggatggaaaggtgatctgctggctttgcgagagatcccaggaacatcggggtcatcatacatttctgaccgaggaggtcgctcgcgagtaccaggtgaaactgcaagccgcattagaaatgttgcgacagaagcagcaagaggccgaagagttggaagctgacatccgagaagagaaggcgtcttggaagactcagatccagtacgataaaacgaacgtgctcgccgattttgagcagcttagggatattctggattgggaagagtcgaacgaactgcagaatctggaaaaagaggaagaagacattctgaagtctctgactaactcggaaactgaaatggtgcaacagacccagtcactacgcgagcttatctccgacctcgagcacagactgcagggcagtgtcatggaacttctgcagggcgtggacggtgtgattaagaggactgagaacgtaactttgaaaaagcctgaaacttttcctaagaaccaacggagagtgttccgtgctcccgacctgaagggcatgctggaggtgtttcgggaactgaccgacgtacggcggtattggggctggtccgccatggcgagaagccgcttcactgcgacatccaccagccagatccaggctattctcctcccacagccccctaagtag

SEQ ID NO: 138984 - DNA, 1482 bp, synthetic construct
  misc_feature 1..1482: note = Description of Artificial Sequence: Synthetic coding sequence
  source 1..1482: mol_type = other DNA
atggcctcaggaatcctggttaatgttaaagaagaggtgacctgccctatctgcctggaacttctaactcaaccactcagtctggattgcggccactccttctgtcaggcatgtcttacggcaaatcataagaagagcatgttggacaagggagaaagctcctgtcccgtatgcagaattagctatcaaccagagaacatccgccccaacaggcacgtggctaacatcgtcgagaagctccgcgaagtaaagctttccccggagggtcaaaaggtcgatcactgtgctaggcatggcgaaaagctgttattgttttgtcaagaagacggcaaagtgatatgttggttgtgtgagcgatcacaagaacaccgcgggcaccacacattcctaactgaggaagtggctcgcgaatatcaggtaaagctccaggctgcactggagatgctccggcagaaacaacaggaagctgaagagctggaggcggatatcagagaagagaaagcctcctggaaaactcaaatccagtacgataagaccaatgtcctggccgactttgagcaacttagagatatactggattgggaggagagcaacgagttgcagaacctggagaaggaggaggaagacattctgaagtccctgactaacagcgaaaccgagatggtgcagcaaactcagtctcttagagagctcatctctgacctggaacaccgactacaggggagcgtgatggaactgctgcaaggggtggacggcgtcataaaacgtaccgagaacgtgacactgaagaagccagaaactttcccaaagaaccaacgacgtgtgtttcgtgcccccgatctgaaaggaatgctggaggtgttccgagaactcaccgatgtccgccgatattgggttgatgttactgtggcccccaacaacattagttgcgccgtgatttcggaggataagcgtcaggtgtcttcacctaagcctcaaataatctatggagcaagaggcacaaggtaccaaacttttgtcaacttcaattactgtaccgggatcctgggctcacagagcataacctctggcaaacattattgggaggtcgatgttagcaagaagacagcgtggattttgggcgtgtgcgctggatttcaacctgacgccatgtgcaatattgagaaaaatgaaaactatcagcccaagtatggctattgggtaatcggcctggaggaaggggtcaaatgctctgctttccaggattcaagttttcatactccctcagtaccttttatcgttccattatccgtgatcatttgccccgatcgggttggtgtgtttctcgattacgaagcctgtaccgtttccttctttaacatcactaaccacggattcttgatctataagtttagccactgttcattcagccagccagtgtttccatacctgaatccaaggaaatgtggggtccccatgacattgtgctccccatcgtcttag

SEQ ID NO: 138985 - DNA, 1044 bp, synthetic construct
  misc_feature 1..1044: note = Description of Artificial Sequence: Synthetic coding sequence
  source 1..1044: mol_type = other DNA
atggcatcgggaatactcgttaacgtgaaagaggaagttacctgcccaatttgtctggaactgcttacccagcccctgagtttagactgtggccattctttctgccaggcatgccttacagcaaaccataaaaagtcaatgctcgacaagggagaatccagttgccctgtgtgtcggatctcctaccagcccgaaaacattcgcccaaacagacatgtcgccaatatcgtcgaaaagcttcgggaggtgaaattaagccccgagggacagaaagtcgaccattgcgcccggcatggggaaaaactgttgttattttgtcaggaggacggcaaggtgatatgttggctttgtgaaagatcacaggagcaccgcggtcaccacacatttttaactgaagaggttgccagggaataccaggtgaaactccaggctgccctggaaatgttacgccagaagcagcaggaagccgaagagctggaagcagacataagggaggaaaaagctagctggaagacccagatccagtatgataaaacgaacgtactcgccgatttcgagcagctgagggatatcttagactgggaagaaagcaatgaacttcagaaccttgaaaaggaagaggaagatatcctgaaatctttgacaaactccgagaccgagatggtccaacagacccagtcactgagggaattgataagcgatctcgagcaccgtttacagggctctgtcatggagctcttgcaaggcgtggacggagtgatcaagaggactgagaatgtgacgctgaagaaacccgagacatttcctaagaatcaacgacgagtgtttcgagccccggacttgaagggaatgctcgaggtgtttagagagttgacggacgtgcggaggtattgggggaaggagaagagtcactaccacaaacctccatgcggactctcactcctgctgtctctatctttcaggattctatgctccttgttgggtagttgcttcaaaatatacgacagtcccagcaaaacacatataacatatccttctctgtag

SEQ ID NO: 138986 - DNA, 984 bp, synthetic construct
  misc_feature 1..984: note = Description of Artificial Sequence: Synthetic coding sequence
  source 1..984: mol_type = other DNA
atggcttccggcatattagttaacgtgaaggaggaggtgacttgccccatctgtttggaactgctcactcaacctctttcattggattgcggtcactctttttgccaggcgtgcctgaccgccaatcacaaaaagagcatgttagataaaggcgagtcttcttgccccgtgtgccgtatctcctaccagcctgaaaacatacgccccaacagacacgtggcgaacattgtcgaaaagctgcgggaggtcaagctctcccccgagggtcaaaaagtggatcactgtgcccggcacggcgagaagctgctgctcttctgtcaggaggacggaaaggtcatttgttggctttgcgagagatctcaggaacacagaggtcatcatacattcctgacagaggaagtggcaagagagtatcaagttaaacttcaagcggccttagagatgctacgccaaaaacagcaagaggcagaggagttagaagctgacatccgtgaagagaaagcttcatggaagactcaaatccagtacgacaagacgaatgtgctcgcggattttgaacagcttagggatatcctcgattgggaagaatccaacgagctccagaacctagaaaaagaagaggaggacattctgaaaagtctgactaattccgagaccgaaatggtgcagcagacccagtccctaagagaactgattagcgacctggagcatcgcctgcaaggatctgtgatggagcttcttcaagccggagtgcaatgcctcatcctccggactgagaacgttaccctgaagaagccggaaaccttccccaaaaaccagaggcgggtttttcgcgcccccgacctgaaagggatgctcgaggtctttcgtgagcttactgacgtcagacggtactggggctggagtgctatggctagatctcggtttacagctacctccaccagccagattcaagcaatcctcttgccacagcccccaaagtag

SEQ ID NO: 138987 - DNA, 981 bp, synthetic construct
  misc_feature 1..981: note = Description of Artificial Sequence: Synthetic coding sequence
  source 1..981: mol_type = other DNA
atggcaagcggcattctcgttaacgtgaaggaagaggtgacatgtcccatttgcctggagctgttgacccagcctctcagtctcgattgtggccactctttctgtcaagcctgcctcacagccaatcacaagaagtcgatgctggacaaaggcgaatcctcctgtccggtctgccgcatttcgtaccagcctgagaatatcaggcctaatcggcatgtcgccaatattgtggagaagctgcgggaggtgaagctaagccctgagggacagaaagtggaccattgcgcccgtcacggggagaaactgctgctgttctgtcaggaggatggcaaggtgatatgctggctgtgcgaacgcagccaagagcatcgcgggcaccacacttttttgacggaagaggttgcacgggaataccaggttaagcttcaagctgctttggaaatgctgcggcagaaacagcaggaggccgaagagttagaggccgacattcgcgaagaaaaggcttcctggaaaacccagatccagtacgataaaacaaacgtgctcgcagatttcgagcagctgagagatattctggattgggaggaatcaaacgagctccagaacctggagaaagaggaggaagacatcctgaagtctctgacaaattccgaaaccgagatggtgcagcagacccagagtctccgggagctgatatccgacctcgagcatcgtctacaaggctccgtcatggaactgctgcaaggagttgatggcgtcattaagaggacagagaatgtcacattaaaaaagccagaaaccttcccaaagaatcagagacgggtcttccgggcccctgatcttaagggcatgctggaagtcttcagggagctcacagatgttagaaggtactggggctggtccgctatggcccgctcacggtttacggccacttctacctcacaaatccaggccatcctgctgcctcagcctccaaaatag

SEQ ID NO: 138988 - DNA, 630 bp, synthetic construct
  misc_feature 1..630: note = Description of Artificial Sequence: Synthetic coding sequence
  source 1..630: mol_type = other DNA
atggccagtgggattctggtgaacgtgaaggaggaagtgacttgtcctatttgcctggagctccttacccaacctttatctctggactgtggccattctttttgtcaagcatgtctcaccgccaatcataagaaatccatgctagataagggcgagtcttcctgtcctgtgtgcaggatttcttaccaacccgaaaatatccggccgaaccgccatgttgccaacatcgttgagaaactcagggaagtgaagctctctccggagggacagaaggtcgaccattgcgccagacacggggagaagcttttgttattctgtcaggaagacggtaaagtcatctgctggctttgtgagcgctcacaggaacacaggggtcatcacacgtttctcactgaggaggtagcaagagaataccaggtcaaattgcaggccgctctggaaatgctcaggcagaaacagcaggaggccgaggagctcgaagctgatatccgcgaggagaaagccagttggaaaactcagatacagtacgataaaaccaacgttctcgccgactttgaacaactccgcgacattcttgactgggaagaatccaatgaactgcagaacctggagaaggaagaagaggactag

SEQ ID NO: 138989 - DNA, 219 bp, synthetic construct
  misc_feature 1..219: note = Description of Artificial Sequence: Synthetic coding sequence
  source 1..219: mol_type = other DNA
atggctagcggaatcctagttaatgtcaaggaggaggtaacatgccctatctgcctggaacttctaacacagcctctgagccttgactgtggacactcattttgccaggcctgtcttaccgccaaccacaagaagtcaatgctggataaaggggaatcatcctgtcccgtttgtaggatctcctaccagccagaaaacatccggcctaaccgacactag

SEQ ID NO: 138990 - DNA, 816 bp, synthetic construct
  misc_feature 1..816: note = Description of Artificial Sequence: Synthetic coding sequence
  source 1..816: mol_type = other DNA
atggcttctggtatcctggttaacgttaaagaggaggttacttgcccaatctgtctggaactgctcacccagccgttgagtcttgactgtgggcactcattttgccaggcgtgccttaccgcaaatcataagaagtctatgcttgacaaaggagaatcctcgtgccccgtgtgcaggattagttaccagcccgaaaacataaggcccaatcgtcatgtggctaacatcgttgagaaactgagagaagtgaagcttagtccggagggccaaaaggtcgaccattgtgcaagacacggtgagaaattgctgcttttttgtcaggaggatggcaaggtgatttgttggttgtgcgagcggtcacaagaacaccggggtcaccacacgttccttacagaagaggtagcgcgcgaataccaagtaaagctgcaagctgctctagaaatgctccgccaaaagcagcaggaggctgaggaacttgaggctgacatccgggaggagaaggcctcctggaagacccaaatccagtatgacaagaccaatgtgttagctgacttcgagcagttacgggacattctcgactgggaggaatccaatgaattgcagaacttagagaaagaggaggaggatatcctgaagagcctgaccaacagtgagaccgaaatggtacagcaaacccagtcactacgcgaactgatttcagatctggaacatcgcctgcagggctctgtgatggaattactccaggacggcgagcgtgacctggaagaagcaaggaatttttctaaaaaatccaaggagtccgtttcctccagctag

SEQ ID NO: 138991 - DNA, 1464 bp, synthetic construct
  misc_feature 1..1464: note = Description of Artificial Sequence: Synthetic coding sequence
  source 1..1464: mol_type = other DNA
atggcctggcaagtgagcctcctggaactcgaggattggctgcagtgtccaatctgcctggaggtcttcaaggagccacttatgttacaatgcggtcactcatattgtaagggatgtttggtgtcactctcatgccatttagacgccgagctgaggtgtcctgtctgccgccaagctgtcgacggttcttcttctttacctaacgttagcctcgctagagtcatcgaggctctgaggctgcctggcgacccagagcccaaggtctgtgtgcatcacagaaatccgcttagtctattttgcgaaaaggatcaagaactcatctgcggactatgtgggctcttgggtagccatcagcaccatcctgttaccccagtgagcaccgtgtatagtaggatgaaagaagaactcgccgcacttatatcggagctgaagcaggagcagaaaaaggtcgatgagctcatcgctaagcttgttaataatagaactcgcatcgtaaatgagagtgatgtgttctcctgggttatcaggagggagtttcaagaactgcaccacctggtggatgaggagaaggcccgatgcctcgaggggataggcgggcacacacgtgggttggtggccagtctggacatgcaattagaacaggctcagggtacaagagagagactggcccaggcagagtgcgtgcttgaacagtttggtaatgaggatcaccacaagttcatccgaaaattccatagtatggcctcccgggcagaaatgccccaggcgcggccccttgaaggggccttttctcctatctccttcaagccaggtctccaccaggccgacattaagcttaccgtgtggaaaaggctcttcagaaaagtgctgcccgcaccagaacctctgaaactcgacccagcaaccgcgcaccccctactggagctgtctaaaggaaatactgttgtgcagtgtgggttattggcccagcggcgcgcatcccaacccgagagattcgattacagcacatgcgtactggcctcaaggggattcagttgcggacggcactactgggaagttgtagtggggagcaagagtgactggcggttgggcgtgatcaagggcaccgcaagccggaaggggaaattgaaccgctcaccagagcacggagtgtggctgataggattgaaggaaggacgggtgtatgaagctttcgcttgtccacgtgtccccttaccagttgctggtcatcctcataggatcggtctctatctccattacgagcagggcgagctgacattcttcgatgctgacaggccagatgacctaagacctctttacacatttcaagccgactttcagggaaaactgtatccaatcttagacacttgctggcatgagcgtgggtctaacagtctacccatggttctgcctccccccagtgggcccgggcccctttcccctgagcagcccacgaaactgtag

SEQ ID NO: 138992 - DNA, 1464 bp, synthetic construct
  misc_feature 1..1464: note = Description of Artificial Sequence: Synthetic coding sequence
  source 1..1464: mol_type = other DNA
atggcatggcaagtgtctctgcttgagctggaggactggctgcagtgtcctatttgcttagaggttttcaaagagccactcatgctccaatgtggtcattcctactgtaaggggtgcctagtgagtctgagctgtcacctggacgctgagctgcgttgtcccgtctgtcgacaggcagtggatggctccagctcactccctaatgtgtccctcgccagggttatcgaagcactccgtcttcctggggaccctgaacccaaggtgtgtgtccaccatcggaatccactgagcttgttctgcgagaaggaccaagaactaatatgcggactatgcggcttgctgggcagtcaccagcaccaccccgtcacccctgttagcactgtttattcaaggatgaaagaggagctcgccgccctgattagcgagttaaagcaagagcagaagaaagtggatgagttgattgcaaagctggttaataacaggacacgaatagtgaacgaaagcgatgtgttttcatgggtaattagacgggaattccaagagctccaccacctggtggacgaagagaaggcaaggtgtttggaggggatcggcggacataccaggggtttggtggcctccttggacatgcagctggaacaggcacaaggaacacgcgaaaggttggcacaggctgaatgtgtactggagcagtttggaaatgaagatcatcacaagtttattaggaaattccactctatggctagccgcgccgagatgccacaggctcggcccctcgagggcgcgttttcccccatcagtttcaagccgggtttgcaccaggctgacatcaagctcactgtgtggaaacgcctgttccgcaaagtgcttccagctcccgaacctttgaaactagaccccgccaccgctcaccccctgcttgagctgtctaaaggcaacactgtcgtgcagtgcgggttgctggcacagagaagagcctcacagccggaaaggttcgactactctacttgcgtgttggcatctcggggtttttcttgtggaaggcattattgggaggtggtagtaggaagcaaaagcgactggcgactcggcgtaataaaggggacagcctctagaaagggcaaactcaacagatcacccgagcacggcgtgtggttaattggactgaaagaaggccgcgtctatgaagcatttgcctgcccaagggtgcctctgcccgtggcgggccacccacacagaataggcttgtaccttcactatgagcaaggcgagctgacctttttcgatgctgataggccagacgacctgcgtcccctgtacaccttccaggctgacttccagggaaaactctatccgatcctggacacatgttggcacgaacgcggcagcaatagcctgcctatggtgttgccacccccaagcggaccagggcctttgtcgccggaacaacccactaagttgtag

SEQ ID NO: 138993 - DNA, 1467 bp, synthetic construct
  misc_feature 1..1467: note = Description of Artificial Sequence: Synthetic coding sequence
  source 1..1467: mol_type = other DNA
atgacatcacctgtcctcgtagatatcagggaggaggtgacctgccctatttgcctggagctgctgactgaaccactgtccatcgattgcggccacagcttttgccaggcctgtatcactccaaatggaagggagagcgttatcggtcaagagggcgaacggagctgtcccgtgtgccagacctcttatcaacctggaaatctcaggcccaaccggcatctggctaatattgttcgccgcctgagagaagttgtactcggcccgggtaagcaactgaaggcagtcctgtgcgctgaccacggtgagaagctgcagctgttttgccaggaagatggcaaggttatttgctggctatgcgagagatcacaagagcacagaggtcatcatacgttcctcgtggaggaagttgcccaggaatatcaggaaaaattccaggaatcacttaagaaactcaaaaatgaggaacaagaggcagaaaaactaaccgcttttatcagagaaaaaaaaacttcttggaagaatcagatggagcccgaaaggtgcaggatccaaaccgagtttaatcagctcagaaatattttagatagggtggaacaaagagagcttaaaaagttggaacaagaagagaaaaaggggctaaggatcattgaggaagctgaaaacgatcttgtgcaccagacccaaagtcttcgcgaactgatctccgatttggaacggaggtgtcaaggcagcacgatggaattgcttcaggatgttagcgatgttactgagaggagcgaattctggactctccgtaaaccagaagcgcttccgaccaaactgagatctatgttccgggcccctgacctcaagagaatgctgcgcgtgtgcagggaactgactgatgttcagtcgtattgggtggacgtcaccctgaatcctcataccgcaaatttaaatttggtgctagctaagaatcgccgtcaggtaaggtttgttggcgccaaagtgtctgggccctcctgcctggaaaaacactatgactgcagcgtcctggggagtcagcatttttctagcggcaagcattactgggaggtggacgtggcaaagaaaactgcatggatcctcggtgtctgttctaattcactcggacccacattcagttttaaccacttcgcccaaaatcactccgcctacagtcggtatcagccccagagcggctattgggtgatagggttgcaacacaaccatgagtaccgtgcttacgaggactctagcccctctctccttctgtctatgacggtccccccacgcagggttggcgtgtttctggactacgaagccgggactgtgagtttctacaacgtgactaatcacggcttccctatctatactttctccaagtattatttcccaacaacattatgtccttattttaatccatgtaattgcgtgattcccatgaccttacggcggccctcttcctag

SEQ ID NO: 138994 - DNA, 1551 bp, synthetic construct
  misc_feature 1..1551: note = Description of Artificial Sequence: Synthetic coding sequence
  source 1..1551: mol_type = other DNA
atgtgtggctccgaaagaatacttcaggcagggaatattctggagataagagtggggcaggcgggagcaaggcgggtggctaccatgacgagtcccgtactagtcgatatccgggaggaggtaacatgtcctatatgtctagagctcctgaccgaaccactgtccatagattgtggtcactccttttgtcaggcatgcatcacccctaatggccgggaatcagtgatcggccaggaaggggaacgctcctgccctgtgtgtcagacctcctatcaacctggcaacttacggcccaatcggcatctggccaatatcgttcgtaggctacgcgaggtggttttggggcccggtaagcagctgaaggctgtcctgtgtgccgaccacggggaaaagcttcagctattctgccaagaggacggcaaggtcatatgctggctgtgcgaaaggagccaggaacacagaggacaccatacatttctcgttgaagaggtcgcgcaggagtatcaggagaaatttcaggagagcctcaaaaagttaaaaaacgaagagcaggaagctgaaaagttgaccgctttcataagggaaaaaaagaccagctggaagaaccagatggagccagagcggtgccgcatccagactgaatttaaccaactccgcaatattcttgatcgagtggaacagagagaactcaaaaaactcgagcaggaagagaagaagggcctgcgaatcatcgaggaagccgagaacgacctcgttcaccagactcagagtctgcgggaattaatctctgatctggagagacggtgccaggggagtaccatggaactgctccaggatgtgagtgatgtgacagagaggtcagaattttggacgctgcgtaagcccgaggcattgccaacgaagttaaggtctatgttcagagccccagacctgaagaggatgctgagggtgtgtcgcgaactaaccgatgtacagtcttattgggtggatgtgactctgaacccccataccgcgaacttgaacctggtccttgctaagaatcgcagacaagtgcgattcgtcggggctaaggtgtccgggcctagctgcctagagaagcactacgattgctccgtgttgggatcgcaacacttcagtagcggcaaacattactgggaggtagacgtggccaaaaagactgcctggattttgggtgtctgcagtaatagcctggggcccaccttcagctttaatcactttgctcagaaccactcggcctattcccgctatcagcctcagtcaggctattgggtaatcggcctacagcataatcacgagtaccgcgcatacgaagactctagcccgtctctgctcctttcaatgacagtgcctccaagacgcgtgggagttttcctggattacgaagctggaaccgtgagtttctacaatgtaaccaaccatggtttcccgatttacactttctccaagtactatttccccacaacactgtgtccatactttaacccttgtaattgcgtgatccctatgaccttgagaaggccaagtagctag

SEQ ID NO: 138995 - DNA, 1389 bp, synthetic construct
  misc_feature 1..1389: note = Description of Artificial Sequence: Synthetic coding sequence
  source 1..1389: mol_type = other DNA
atgacctctcctgtgttggttgacatccgggaggaggtgacctgccccatttgtctcgagctgctcactgagccactcagtatcgactgcggacactccttttgccaggcctgtataaccccaaatggacgggaaagcgtgatcggacaggaaggagaaagatcctgccctgtctgccaaacttcctatcagcccggaaacctgcgccccaatagacatctggctaacatagtgcgtcgactcagggaagaggatgggaaggtgatttgttggctatgcgaacggagccaagagcacaggggacaccatacttttctggttgaggaggtggcacaggagtatcaggagaagtttcaagagtcgctgaagaaactcaaaaatgaggaacaagaggccgagaagctcaccgcttttattagggaaaaaaaaacctcttggaagaatcagatggaaccagagagatgtagaatccagaccgagtttaatcaactgcggaacatcctggatcgcgtcgagcagcgagagctgaaaaagctcgagcaagaagaaaagaagggcctgcgcattatagaagaggctgaaaatgatctagtgcaccaaacacagagcctgagagagctaattagcgatttggaacgccgctgccagggaagcactatggaacttctccaggatgtctccgatgtgacagaaaggagtgagttttggactttgcgcaaaccagaggctctgccaacgaagctgaggagtatgtttagggcccctgatctcaagcgtatgttgcgagtgtgcagggagctgacagatgttcaatcctactgggtcgacgtgacacttaatccccatacagcaaatctgaatttagtgctcgctaagaataggcgtcaagtcagattcgtcggagccaaggtgagtggcccttcttgcttggaaaaacactacgactgcagcgtcctggggtcccagcactttagtagtggcaagcactactgggaggtggatgtcgccaaaaaaaccgcatggattctgggcgtctgcagtaatagtctcgggcctacgttctcctttaatcacttcgcccaaaatcactccgcctattctcgctaccagccacagagcgggtattgggtgattgggttgcaacataatcacgagtacagagcctacgaggatagctcgcctagcctccttctgtctatgactgtgccgcctcgaagggtcggggttttcttggattatgaggctggaactgtgtcattttacaatgtgaccaaccatggattcccaatctatacattttccaagtactactttccaacaaccttgtgcccctatttcaatccctgcaactgtgtgatcccgatgacccttaggcgcccttcatcctag

SEQ ID NO: 138996 - DNA, 1188 bp, synthetic construct
  misc_feature 1..1188: note = Description of Artificial Sequence: Synthetic coding sequence
  source 1..1188: mol_type = other DNA
atgtgtggatccgaacggccttggcggaaaaccgcagccctgctgtctggcggctgggaaggccacctgctcgcttgcgagaggagccaagaacacagaggccatcacacattcctggtggaggaggttgcacaggagtatcaggaaaagtttcaagagtcactgaagaaattgaagaatgaagaacaggaggccgagaaactcacagcattcattagggaaaagaaaacgagctggaagaaccagatggagccggaaaggtgtaggatccagaccgagttcaaccagctcagaaacattctcgacagagtcgaacagagagagctgaagaagttggaacaggaagaaaaaaagggcctccgcatcattgaagaagcagagaatgacttggtacaccagacccagtccctccgcgaactcatttctgaccttgagagaaggtgtcagggcagcacgatggagctgctccaggacgtgagtgacgtgaccgagaggagcgagttctggactctccggaagcccgaggctctgcctaccaagctccgtagcatgtttcgggctccagatctgaaaagaatgttgcgcgtgtgtagagaactgaccgacgtgcagtcttattgggtcgacgttactttaaacccacatactgctaatttaaacctcgtcttggcaaagaatcggcgccaagtgcgatttgtgggcgccaaagtaagcggaccaagctgtctggagaagcattacgattgcagtgttctgggctcgcagcactttagcagcggcaagcactattgggaagtcgatgtggccaagaaaaccgcctggatcctcggagtgtgctcaaattcgcttggacccactttttcctttaaccatttcgcacagaatcactcagcatattcacgctatcagccccaatccggatattgggtgattggcctgcagcacaaccacgagtatagagcctacgaggattcctctcctagcctgctgctgtccatgaccgtcccaccacggagagtcggcgtgtttttagattatgaggccggaaccgtttccttctataacgttactaatcacggcttccctatctacacctttagtaagtactattttcccaccaccctctgcccctattttaacccttgtaactgtgtcatccctatgacactgcgccgcccctcatcttag

SEQ ID NO: 138997 - DNA, 942 bp, synthetic construct
  misc_feature 1..942: note = Description of Artificial Sequence: Synthetic coding sequence
  source 1..942: mol_type = other DNA
atggaaccggaaaggtgccggatacagactgagtttaatcagcttcgtaatattctggaccgggtcgaacaacgcgaactcaagaaactcgagcaggaggagaaaaagggactgagaattatcgaggaagcggaaaatgacttggtgcaccaaactcagagtctccgggagcttatctccgatctggagcgacgttgtcagggaagcacaatggaattgctccaggatgtgagtgatgtgacggagcgttctgaattttggactctgagaaagcctgaagctctgcctaccaaactcaggtccatgttccgggcaccagatctgaaacgaatgttgcgcgtatgccgcgaactaactgatgtgcagtcatactgggtggatgtcacactgaatccccatacagcaaacttaaatcttgtgctcgcaaagaataggaggcaggtgcgcttcgttggcgctaaggtatcaggaccctcatgcctcgagaagcactatgattgctctgtcctgggatcccagcatttctcatccgggaagcattactgggaagttgacgtggccaagaagacagcatggatactgggcgtgtgctctaatagcctgggtcctaccttctcatttaaccacttcgcacaaaatcacagcgcttatagtcgataccaacctcaatcgggatactgggtgattggactacagcataaccacgagtacagggcttacgaggattccagcccatccttgctgctgagtatgacagtgcctccccggcgcgtgggggtctttctcgactacgaggctggaaccgtgagtttttataatgtaactaatcacggatttcctatttataccttcagtaagtactatttccctacgacgctgtgcccctactttaatccctgcaactgcgtgatccctatgactctacgcaggccaagtagctag

SEQ ID NO: 138998 - DNA, 942 bp, synthetic construct
  misc_feature 1..942: note = Description of Artificial Sequence: Synthetic coding sequence
  source 1..942: mol_type = other DNA
atggaacctgaacggtgtaggatacaaaccgaattcaatcagttgcgcaacatcctggacagggtcgagcaaagagaactgaaaaagctggagcaagaagaaaaaaaggggcttaggatcatcgaggaggccgagaatgaccttgtccaccagacgcagagtctgcgggagctgatctctgatctggaacgacgctgtcaagggagtacaatggagttactgcaggacgtgagcgatgtgacagaacggagcgagttttggacacttaggaaacctgaggccctgcccactaaattgaggagcatgtttcgggcacctgatttgaagcgtatgttgagggtgtgcagggaactcacagatgtccaatcttattgggttgacgtaacgcttaatcctcacactgcaaacctgaatctggtgcttgctaaaaacaggcgccaggtccggtttgtaggagccaaggtgtctgggccctcctgcttggagaagcattatgactgttcagtgttgggatctcagcactttagctccgggaagcattattgggaggtggacgtcgctaaaaaaacagcctggattttgggggtgtgctcgaacagcctgggccccaccttctctttcaatcatttcgcacagaaccactctgcatacagtaggtaccagccccaatctggttattgggtgatcgggctacagcacaatcacgagtatagagcttacgaagattcctcaccgtctctgctattgagcatgactgtgcccccacgaagagtgggggtgtttctcgattatgaggctggcactgtgtctttctataatgtgaccaaccacgggttccctatttataccttctccaaatactattttcccaccaccctctgtccttatttcaacccttgcaattgcgtcattcccatgacgctgagaagacctagctcctag

SEQ ID NO: 138999 - DNA, 942 bp, synthetic construct
  misc_feature 1..942: note = Description of Artificial Sequence: Synthetic coding sequence
  source 1..942: mol_type = other DNA
atggagccagagcgctgcaggatacagaccgaattcaaccagctgcgtaacatactggatcgtgttgagcaaagagagcttaagaaactggaacaggaggagaaaaaaggactacgcattatagaagaggccgagaacgatctggtgcatcagacacaatcactgcgggagctcattagcgatttagagaggcggtgccagggtagcacgatggaactgcttcaagacgtatcggacgtcactgagagatctgaattttggacactacgcaagcctgaggctctgcccacgaagcttagatctatgttcagagcccccgacctcaaaaggatgctccgggtatgccgggagcttactgatgtgcagtcctactgggtggatgtcactctgaaccctcatacggcgaaccttaatcttgtgctcgccaagaataggagacaagtcagattcgtgggagcgaaggtgtctggtccctcatgcctcgaaaagcactatgactgcagcgttctcgggtctcaacactttagtagcggcaagcactactgggaggtcgacgtcgcaaaaaagaccgcctggattctaggggtctgctccaatagcttaggccccacattctctttcaaccactttgctcagaatcactccgcgtactctagataccagccacagtccgggtattgggtaattggccttcagcacaaccatgaataccgtgcttacgaggactcatccccttccctgctgctgtccatgactgtgccccctcggagggtcggtgtgtttcttgattacgaagccggaacggtaagcttttataacgtcactaaccatggatttcctatttacaccttttctaaatactactttccgactacactgtgtccctactttaatccctgtaattgcgtcatcccaatgaccctaagaagaccgtcgtcttag

SEQ ID NO: 139000 - DNA, 942 bp, synthetic construct
  misc_feature 1..942: note = Description of Artificial Sequence: Synthetic coding sequence
  source 1..942: mol_type = other DNA
atggagccagagcggtgtagaatccagacagagtttaaccagctccggaacattctcgacagagtggaacaaagggagttgaaaaagctcgagcaggaggagaagaaggggcttcggattatcgaggaggccgaaaatgatctggttcatcagacacaatctctgcgcgaactgatcagtgacctggaacgcagatgccagggttctacaatggagctgctccaggatgttagtgatgtgaccgaacgatcagagttctggactctgcggaaacccgaggctctgcctaccaaactgaggagcatgttccgagcccccgatctgaagcgcatgcttcgtgtgtgccgtgagctcaccgatgtgcagtcatactgggtggatgtcaccttaaatccacatacagctaatctgaatttggtcctcgcaaagaataggaggcaggtcagatttgtcggggccaaagtatccggtccgtcatgtctggagaaacattacgactgtagtgtgctggggtctcagcattttagcagcggaaagcattactgggaggtggacgtagctaaaaagacagcatggatcctcggggtgtgtagtaatagcctgggccccactttttcttttaatcacttcgctcaaaatcactctgcctattcaagatatcagccccagtccggttattgggtgatcgggttacaacacaatcacgaataccgcgcctacgaagacagtagcccatcattgttgctgtctatgacagtaccgccgcgccgcgtcggagtttttctcgattacgaagccgggacagtgagcttctacaatgtgacgaatcacggcttccccatatacactttttcaaagtattacttccccacaacattgtgcccatattttaacccttgcaattgtgttatccctatgacacttcggcgaccttcctcttag

SEQ ID NO: 139001 - DNA, 3651 bp, synthetic construct
  misc_feature 1..3651: note = Description of Artificial Sequence: Synthetic coding sequence
  source 1..3651: mol_type = other DNA
atggcccgcaattgctccgaatgcaaggaaaaacgggccgcccatatcctgtgtacctactgcaatagatggctttgtagcagttgcacagaagagcaccggcattctcccgtacccggaggcccgttctttccacgagcacaaaagggctccccaggggtaaatggcgggccaggcgacttcacgctatattgtcctttgcacacccaggaggtgctgaaactgttctgcgagacatgcgacatgctcacgtgtcatagctgcttggttgttgaacacaaagagcatcgatgtcgacatgtggaggaggtgttgcaaaatcagcgaatgctgctagaaggcgtcacaacccaggtagcgcataagaaaagctcgctgcagacatcagccaagcaaattgaggatcggatattcgaggtgaaacaccagcatagaaaggtagagaaccagatcaagatggcgaagatggtacttatgaacgaactcaataaacaagccaacggcctcatcgaagagctggaaggcataacaaatgagaggaaacgtaaattggagcagcagctgcagagcattatggtcctcaatagacagtttgagcacgtccagaatttcattaattgggccgtatgctctaagacctcagtgccatttctgttcagcaaagaactgatcgtgttccagatgcagcggctgcttgagacctcctgtaatactgaccccgggtctccctggtcaattaggtttacttgggagcccaacttctggactaaacaattggccagcctcgggtgcatcacaaccgagggtgggcagatgagccgagccgacgctcccgcgtatgggggcttgcagggaagcagcccgttttaccagtctcaccagagtcctgtcgcccagcaggaggccttgagtcacccatcgcacaaattccagagccctgctgtttgcagctcttcagtgtgttgttctcactgcagccctgttagcccatcccttaaaggccaagtcccgcccccatctatccacccagcacattcctttcgacagcccccagaaatggtgccccaacagcttgggagtctacaatgtagcgcactactccctcgggagaaagaactggcttgcagccctcacccgcctaagctcctgcagccgtggctcgaaacccagccacccgtcgagcaggagtcaacatcccaaaggctggggcagcaattaacctcacaacccgtgtgcattgtgccaccacaagatgtccagcagggcgctcatgcacaaccaactctccagaccccaagcatccaggtccagttcggtcaccatcaaaagctgaaactttctcattttcagcaacagccgcagcagcagctccccccgccgcctccacccttgccccaccccccaccgcccctacctcctccaccccagcagccccacccacccctcccgccgtcacagcacctcgcgtcttcacagcacgagtctccaccgggccccgcctgtagccagaatatggatatcatgcaccataagttcgagctagaggagatgcagaaggatctagagctcctcctacaagcacagcaaccctctttacagctttcccagaccaaaagtccccagcatctgcagcagacgatcgtgggccaaatcaattacatcgttcgccagcccgcacctgtgcagagtcagagccaggaagagactctccaagcaactgacgagcctccagctagtcaggggagcaagcccgctttacccctggacaaaaataccgccgccgcgttgcctcaagcctcaggcgaggagacccctctgtcggtgccccctgtagactctactatccagcattcttcccccaacgtggtgagaaagcactcaaccagcctttctatcatgggatttagcaacacgcttgagatggaactgtcctctacaaggttggaaaggcctttagagccgcagatccagagtgtgagcaatcttacagccggagcaccacaggccgtgcctagtctgttgtcagctcctcccaaaatggtgagtagcctaaccagtgtacagaaccaggctatgccaagcttgactacttcccacttacagaccgtgcctagtctggtgcacagtacgttccagtcaatgccgaacctaatctccgatagcccgcaggccatggcctcacttgcgtcggaccatcctcaggccgggccatctctgatgtctggtcacacacaggcagtgccttccttggccacctgtccactacagtctattcctcccgtgtcggatatgcagccagaaactggatcatcatcctcatctggacgcacctcgggctctttgtgtccccgagacggcgctgatccaagtctggagaatgctctgtgcaaagtcaagctggaagaaccaatcaatctcagcgtgaagaaacctcccctagctcctgtggtgtctaccagcactgctctgcagcaataccagaacccaaaggaatgcgagaactttgaacagggagccctggagctggatgccaaagaaaatcagagtatcagggcatttaacagcgagcacaagatcccttacgtaaggctggaacggctcaaaatatgcgccgcctcctctggcgagatgcccgtctttaagctcaaaccacaaaagaatgatcaggacggtagctttttgctaataatcgagtgcggaacggagagctcctcgatgagcattaaagtctctcaggaccgactgagcgaggcgacacaagcacccggtctcgagggacgtaaggtgaccgtaaccagcctggcaggccagaggcccccagaagtggaggggacctctcctgaggagcaccggttgatcccaagaacacctggagctaaaaaagggccaccagcgccaattgagaacgaggatttttgcgcagtgtgtctgaacggaggagaactcttatgctgcgatagatgtcccaaagttttccatctgtcctgtcacgtgcccgccttgctgagcttcccaggcggcgaatgggtttgcactctctgccgcagcctgacccaaccggaaatggaatacgactgcgagaacgcttgttataatcaacccggcatgagggcttcacccggactgagtatgtacgatcagaagaagtgcgaaaaacttgtgctgtctctgtgctgtaataatctctctttaccattccacgaacctgtctcccctctcgcccgccactactatcagattatcaagaggcccatggacctgtctataattagacggaaacttcagaagaaagatccagcacattacaccacaccggaagaggtggtctcagatgtcagactaatgttctggaactgcgcgaagtttaactaccccgattcagaagtggctgaggcaggccggtgcctggaggttttttttgagggctggctcaaggagatttatcctgagaaacgatttgcccagccaaggcaggaagattctgactctgaagaagtttcatcagagagcgggtgcagcaccccacagggattcccgtggccgccctatatgcaggaaggtattcaaccaaaaaggaggagaagacacatggaaaacgagcgcgccaagcgcatgtcttttaggcttgcaaactctatttcgcaagtgtag

SEQ ID NO: 139002 - DNA, 1458 bp, synthetic construct
  misc_feature 1..1458: note = Description of Artificial Sequence: Synthetic coding sequence
  source 1..1458: mol_type = other DNA
atggatcctactgccctggtggaggctattgtggaagaagtggcttgtcctatctgcatgacttttcttcgtgagcccatgtcaatagactgtggacactccttttgtcactcttgcctcagtggcttgtgggaaattcctggagaatcccagaactgggggtacacatgtcctctgtgtcgcgccccagtgcagcctagaaacctccgaccaaattggcaactcgccaatgtggtggagaaagtgcggcttctgcgcctgcatcccggaatggggctgaagggagacctgtgcgaaagacacggggaaaaactgaaaatgttctgcaaggaagatgtgcttataatgtgcgaggcctgttctcagagccccgagcatgaagcccactctgtggtgcccatggaagatgtcgcttgggaatataagtgggagctgcacgaagcacttgaacatctgaagaaggagcaggaggaggcctggaaactggaggtgggggagcggaagcgtacagccacttggaaaattcaagtagaaacaagaaagcagtctattgtttgggaattcgagaagtatcagcgactcctggaaaaaaaacagcctccacaccggcagctgggggcggaggtcgccgcggctctcgccagcttacagcgggaagctgctgaaacaatgcagaagctcgaactgaaccattccgaactgattcagcagtctcaagtgctgtggagaatgatcgccgaattgaaggagcgctcccagaggcctgtcaggtggatgctccaagacatccaggaagtcctaaacaggagtaaatcctggagtctgcagcaaccagaaccaatatccttggagctgaagacagactgcagagtgcttggactgagagaaatactgaagacatacgccgctgatgtccgtctagatcctgataccgcctactcgagattaatcgtgtcagaagatcggaaacgggtacactatggcgacaccaatcaaaaactccctgacaatccggaacgcttttaccggtataacatcgtcctgggttctcagtgtataagcagcggacggcattattgggaggtcgaagtaggtgatcggtctgagtggggactcggcgtctgtaagcagaacgtagacagaaaagaagtggtctatctatctccccactacgggttctgggtgattagacttcggaaaggaaacgaatatcgcgcaggcacagatgagtacccaatcctatcgttacccgtgcccccccgccgcgttggaatcttcgttgactacgaggctcatgacatttccttctataacgttacagactgcgggtcacacatctttactttccccagataccccttccctgggaggctgctcccctatttctccccctgttactccatcggaacgaacaacacagccccgttggcaatctgctcgctggacggcgaggattag

SEQ ID NO: 139003 - DNA, 621 bp, synthetic construct
  misc_feature 1..621: note = Description of Artificial Sequence: Synthetic coding sequence
  source 1..621: mol_type = other DNA
atgcagaaactagagctgaaaaccgattgccgggtgctgggattgcgcgaaatcctgaaaacttacgccgcagacgttagactggatcccgatacagcatactctcggctcatcgtgtccgaggaccgtaagagggtccactatggagacaccaatcagaagctgccggataacccagaaagattttacaggtacaatattgtgctgggatcccaatgcatcagttccggtcggcactattgggaggtagaggtcggagacaggtcagagtgggggcttggagtctgtaagcagaatgtcgatagaaaggaggtggtatacctttctcctcattatgggttctgggttataagactgcggaaagggaacgaatacagggccggtaccgatgaatacccaatcctctccttgcctgtgccacctagacgagtgggcatattcgttgactatgaagcacatgatatatccttttataacgttacggactgcggcagccacatcttcacctttccaagatatccgttccctggacgactcctgccctatttctcaccctgctactccatcggaaccaacaacacagcgccattggccatatgctcccttgacggcgaagattag

SEQ ID NO: 139004 - DNA, 1536 bp, synthetic construct
  misc_feature 1..1536: note = Description of Artificial Sequence: Synthetic coding sequence
  source 1..1536: mol_type = other DNA
atggcggctgtcgggcccagaacaggcccaggcaccggagctgaagccctggcccttgccgcagagctgcagggcgaggcgacctgtagtatttgcttagagctctttcgcgaacccgtatcggtggaatgcggacatagtttttgtagggcctgcatcggtcggtgctgggaaaggccgggtgctgggtctgttggcgctgccacgcgagctcccccgttccctcttccttgtccccagtgccgagaacccgcacgtccttcacagcttaggcctaatagacagctggcggccgtcgctaccctgcttagaagattttctctcccagcggctgctccaggcgaacacggctcacaggcagcagcagcgcgggctgctgccgctcggtgtgggcagcacggtgagccctttaagctatattgtcaggacgacggtcgcgctatctgcgttgtctgtgatcgcgcccgggaacatcgcgaacatgcagtgcttcccttagatgaggctgtgcaggaggcaaaggaactgttggaaagccgtctgagggtgctgaagaaagagttagaggattgcgaagtgttcagaagcaccgaaaagaaagagagcaaagaactcctgaagcaaatggccgcagaacaggaaaaagtaggcgcagagttccaggcactgcgagccttcctggttgagcaggagggacgcttacttgggcgactcgaggagttatccagggaagtggcccagaagcagaacgagaatctggcccagttaggtgttgaaattacccagctctctaagttgtcttcacagattcaggaaacagcccagaaacccgaccttgactttctgcaggaattcaaaagcactctttctcgctgcagtaatgttcccgggcccaagcctacaaccgtttcttctgagatgaagaacaaggtgtggaatgtctcgctgaagacctttgtccttaagggaatgcttaaaaagttcaaggaggacctgagaggcgagctcgaaaaagaggaaaaggtcgagttgacacttgaccctgatacagctaacccccgcctcatactctctttggacctcaaaggggttcggttgggtgagcgcgcccaagacctgcctaaccatccttgccggttcgacaccaacactcgagtgttggccagctgtggcttttcgagcggacggcaccattgggaggtggaggtggggagcaaagatgggtgggcttttggagttgcacgagaaagtgttcggcgtaaagggctgaccccattcactcccgaggagggggtatgggcgttgcagctgaatggtggccagtactgggccgtaacctccccagaacggagccctctctcatgtggacacctgtcgagagtaagggtcgcattagacctcgaagtgggtgccgtctctttttatgctgtggaggatatgagacatctgtatacttttcgggtcaacttccaggagcgcgtgtttcctctattcagcgtgtgctcgaccggtacttatctacggatatggccttag

SEQ ID NO: 139005 - DNA, 666 bp, synthetic construct
  misc_feature 1..666: note = Description of Artificial Sequence: Synthetic coding sequence
  source 1..666: mol_type = other DNA
atggcggccgtgggcccgcgaacagggcctggtaccggagccgaggccctcgccctggccgcagaactgcagggagaggccacatgcagcatctgcctggaacttttcagggaacccgtatctgtggaatgtggacactctttctgtcgggcctgcattggccgctgttgggaaagacccggggctgggtcagtgggcgcagccacccgagctccacctttccctctgccctgcccacaatgccgggaacctgctcgcccctctcagctccgccctaataggcagctcgccgccgttgccacactgctgcggaggttttcactaccagcagccgcccccggggaacatggctcgcaggccgctgctgctcgcgcagcggccgctagatgtggacagcatggcgagccatttaagctctattgccaagacgatggcagagcaatttgtgtggtctgtgatcgcgctagggagcatcgcgaacacgccgtgctcccacttgacgaagcggtccaggaagccaaggaacttctcgaaagtaggttgcgcgtattgaagaaggagctggaagactgcgaagtctttaggtcaaccgaaaaaaaggagagcaaagaactgcttgtgagccaggcacccgcgggccccccctgggacatcacagaggcttag

SEQ ID NO: 139006 - DNA, 912 bp, synthetic construct
  misc_feature 1..912: note = Description of Artificial Sequence: Synthetic coding sequence
  source 1..912: mol_type = other DNA
atggcagcagaacaggagaaggtgggagccgagttccaggccctccgagccttcttggtagaacaggagggcagattactgggccggctggaggagctgagtcgcgaggtcgcacagaagcaaaacgaaaacctggctcagcttggcgtggaaattacgcagctgtctaaactgtcttcacagatccaggaaacagcccaaaagccagatctggatttcctgcaggaattcaaatccacactatctcgatgctccaatgtgcccgggcccaaacccaccactgtgagctcagagatgaagaataaagtgtggaatgtttcactgaagaccttcgttcttaagggaatgctgaagaagtttaaggaggatctgcgtggcgaactagaaaaagaggagaaggtcgagttgacactggatccagataccgcaaatccaagattgattctgagcctggatctcaagggcgtgaggctgggagagagagcccaggatctccccaatcatccctgtagattcgacacaaatacccgagttctggccagttgcggcttctcatctggacgccaccattgggaggtcgaggtgggatcgaaggacggatgggcatttggggtcgcacgggagtccgtgagacgcaagggactaactccatttacacctgaggagggcgtctgggcgctccagttgaatggaggccagtactgggccgtgacttcacctgagaggtcaccactgtcctgtggtcacctctcccgcgtgagggttgctcttgacctagaggtgggcgccgtctcattttatgcagttgaagatatgcgacatctctatactttcagagtgaatttccaggaacgagtgttcccgctctttagcgtgtgtagcactggcacttatctccgtatctggccttag

SEQ ID NO: 139007 - DNA, 912 bp, synthetic construct
  misc_feature 1..912: note = Description of Artificial Sequence: Synthetic coding sequence
  source 1..912: mol_type = other DNA
atggccgcggaacaggaaaaggtgggagccgagttccaggcccttagggcattcttagtggagcaagaaggacggctgcttggcagacttgaagaactgtctcgggaggttgctcaaaagcagaacgaaaatctggcccagctcggtgttgagattacccagctgtccaagcttagcagtcagattcaagaaacagctcagaaaccagaccttgattttcttcaagagttcaagagcaccttgagtagatgcagcaacgtgcccggtccaaagcccacgaccgtttcaagtgaaatgaagaataaagtctggaacgtgtctcttaaaacgttcgtgcttaagggaatgctcaaaaagttcaaggaagacttgagaggtgaacttgagaaggaagagaaagtcgagttgacacttgatcccgatactgccaatccccgattgattctgagcctcgacctgaaaggcgtccgcctcggcgaaagggcacaggatctcccaaaccatccatgccggtttgacaccaacacaagagttttagccagttgtggcttctccagcgggagacatcactgggaggtcgaggtaggaagtaaggacggttgggccttcggtgtagcgcgtgagtccgtccgacgcaagggcctcacccccttcaccccagaggaaggtgtgtgggcactgcaactgaacgggggccagtattgggccgtgacaagccctgagcgctctcccctgagctgtggccatctctcaagggtgagagtggcactggacctggaagtgggtgccgtgtcattttacgcagtggaggatatgcggcacttgtacaccttccgggtaaatttccaggagagggtgttccccttattttctgtctgcagcaccggtacatatctcagaatctggccctag

SEQ ID NO: 139008 - DNA, 990 bp, synthetic construct
  misc_feature 1..990: note = Description of Artificial Sequence: Synthetic coding sequence
  source 1..990: mol_type = other DNA
atgacccaagcaaccggtcaaatgctctgtctgcatgttcaggttcccttacagctgctgcttctcggtcagaaacaaatggccgctgaacaggagaaagttggcgccgagtttcaggcgctgagggcattccttgtggagcaggagggtcgactgctgggtcgcctcgaagaactcagcagggaggtggcacagaagcagaacgagaacttagcacagctcggagtcgaaataactcagctttccaaactcagctctcagattcaggagaccgcccagaagcccgatctcgacttcttgcaagaattcaaaagcaccctgagccgatgttccaacgtcccaggacccaaacccaccaccgtttcctctgaaatgaagaacaaagtttggaacgtctccctgaagactttcgtgttaaagggcatgctgaaaaagtttaaggaggacctcaggggtgagctcgagaaggaagagaaagtggagttgacactagatccagatactgcgaatccacgcttaattcttagccttgacctgaagggtgtgcgcttaggagaacgcgcgcaggacctgcccaatcacccttgtcgatttgacaccaataccagagttctggcaagctgtggattctcgtctggtaggcaccactgggaggttgaagtgggtagtaaagatggttgggcattcggggtggctcgggagtcagttaggaggaagggcctgacccccttcacaccagaagagggagtctgggccttgcaactcaacggcggccagtattgggccgtgacctctcccgagcgtagtcccttatcatgtggacatttgagtcgggtcagggtggctctggatttggaagtgggtgctgtaagtttttacgccgtggaagacatgcggcatctctatacattccgcgtgaatttccaggagcgggttttcccgctctttagtgtctgctccactgggacgtatcttcgcatctggccgtag

SEQ ID NO: 139009 - DNA, 912 bp, synthetic construct
  misc_feature 1..912: note = Description of Artificial Sequence: Synthetic coding sequence
  source 1..912: mol_type = other DNA
atggcggccgagcaggaaaaggttggcgcggagtttcaggcattacgtgcattcctagtggagcaggaggggcgcctactgggcagactggaggagctgtcccgcgaggtggcccaaaagcagaacgaaaatttggcccagctcggcgtggagattacccagctaagcaaactgtcctctcaaatccaagaaaccgcgcagaagccggatctcgatttcctgcaggagtttaagagcaccctttctaggtgctccaatgtgcccggccctaaacccactacagtgtcttccgagatgaagaataaagtctggaatgtctcattgaaaacattcgtcctgaagggcatgttaaagaagttcaaagaagatttaagaggtgaattagaaaaggaggagaaagttgaattaaccttagaccctgatacagctaacccaaggcttatcctctctctggatctgaaaggcgtacgcctgggagagcgcgctcaagatttacccaaccatccttgtaggttcgacaccaacacccgggtgttagccagctgcggcttcagttccggccggcatcattgggaagtagaagttggctctaaggacggatgggcattcggagtggcccgggaatccgtacgcaggaagggtcttactcccttcacacctgaggaaggcgtctgggcactccagcttaacggaggccagtattgggcagtgacatcaccagaacggtctccgttatcttgcggccatctgagccgggtaagggtcgctctcgatctggaggtcggtgccgtttccttttacgccgtcgaggatatgcgacacctgtacacttttcgagtcaactttcaggaacgcgtctttcccttgttctccgtgtgttccacaggaacttatttaaggatctggccctag

SEQ ID NO: 139010 - DNA, 1434 bp, synthetic construct
  misc_feature 1..1434: note = Description of Artificial Sequence: Synthetic coding sequence
  source 1..1434: mol_type = other DNA
atgtctgcggcccctggtcttctgcatcaggagctttcttgcccactctgtcttcagctctttgacgccccggtgacagctgagtgtggtcattcattctgtcgcgcctgtcttggcagagtcgccggcgagcccgctgctgacgggacagtgctttgcccctgctgccaggcgccgactcggccccaggccctgtccactaaccttcagcttgccagactggtggaggggctcgcacaggtgccccagggacactgcgaggaacatctcgacccactgagcatttactgtgaacaagatcgcgcactagtgtgcggtgtgtgcgcatcacttggcagccatcgaggacaccgactgctgcctgcagccgaagcccacgctcgactaaaaacacagctgccccagcagaagctccagctgcaggaggcctgcatgcgcaaggaaaaatctgtcgcggtgctcgaacaccagctggttgaagttgaggagactgtaagacaattcaggggagcggtgggcgagcagctgggcaaaatgcgggtcttcctggctgcactggaaggatcgctcgatagggaggccgagcgggtccggggcgaagccggagttgccttaaggcgcgagcttggcagcctaaacagctaccttgagcagctgaggcagatggaaaaagtcctcgaggaggtcgccgacaagcctcagacggagtttctgatgaagtactgcctagtgaccagccggctacagaagattctcgcggagtccccccctcccgcccgccttgatatccagctgccaataatttcagacgactttaaattccaggtctggagaaagatgtttcgggcgttaatgcctgcgttagaggagctgactttcgatccctcctccgctcatccatccctcgtggtgagctcgtctggcaggcgagtggagtgctccgaacaaaaagccccgccagccggggaggatccacggcagttcgataaggcagtggccgtcgtggcccaccagcagctcagtgagggggaacattactgggaggttgatgtcggagacaagccaaggtgggccctgggggttattgccgcagaggcaccaagacgaggccgccttcatgcagtgccatctcagggcctatggctgctcgggctgagagaaggcaagatcctggaggcccatgtagaagcgaaagagccccgggcccttaggtcaccagagcgacgccctacgcggatcggcttgtacctgtcttttggggacggcgtgctgtcattttacgatgcgtccgacgcggacgctctagtgcctctgtttgccttccatgagagactgccacggccagtatacccattctttgatgtgtgttggcacgacaaggggaaaaacgctcagcctctgctcctcgtggggcctgaaggtgcggaggcctag

SEQ ID NO: 139011 - DNA, 753 bp, synthetic construct
  misc_feature 1..753: note = Description of Artificial Sequence: Synthetic coding sequence
  source 1..753: mol_type = other DNA
atggcctggcaggtcagcctacttgaacttgaggaccggttacaatgccctatatgtctagaggtttttaaggaaagcttaatgctgcagtgcggacactcttactgcaaggggtgcctggtgtccctctcttaccacctggataccaaagtcagatgtcccatgtgctggcaggttgtcgacggctccagttcgctaccgaacgtatccctggcgtgggttatcgaggccctgaggctccctggtgaccccgagccaaaggtttgcgttcaccatcgcaaccccttgagcctgttttgcgagaaggatcaggaattaatatgcggattgtgcgggttgctgggctcgcatcaacaccatcctgtcacccccgtgtccaccgtgtgttccagaatgaaggaggagctcgccgcattgttctctgagttgaagcaggagcaaaagaaagttgacgagcttatcgcgaaactggtgaaaaataggactcggattgttaacgagtcggatgtgttctcgtgggttatccgaagggaattccaagaacttcgacatcctgtggatgaagagaaggcaaggtgcctggaaggaatcggaggccatactcgagggttggtcgcaagcctcgatatgcagcttgaacaagcacaggggacaagggaaagacttgcacaggcagaatgtgtcctcgagcaattcggaaacgaagatcaccatgaattcatatggaaattccacagcatggcgtctcgttag

SEQ ID NO: 139012 - DNA, 849 bp, synthetic construct
  misc_feature 1..849: note = Description of Artificial Sequence: Synthetic coding sequence
  source 1..849: mol_type = other DNA
atggcttggcaggtcagtctgctggagctcgaagaccggctacaatgtccaatctgtctggaagtgttcaaagagtctctgatgctacagtgtgggcattcttactgtaagggctgcttggtgtccctcagctaccaccttgataccaaggtgcgatgtccgatgtgttggcaagtagtggatggttcaagcagtttaccaaacgtgagtctggcttgggtgatcgaagcgctgcggctccccggcgatcccgagcctaaggtttgcgtgcaccaccgcaacccactgtccctgttttgcgagaaggatcaggagctcatctgcggcctctgtgggctgctgggctcccaccagcaccacccagtgaccccagtctccaccgtctgttccaggatgaaggaggaattagccgcgttattctccgaacttaagcaggaacaaaagaaggtcgacgagctgatcgctaagctggtcaagaataggacccgaatcgtcaatgagagcgacgttttctcgtgggttattcgtagggagttccaggaacttaggcatcccgtcgatgaagagaaagcaagatgccttgagggcattgggggccatactcgtggcctcgtggcctctctggatatgcagttggaacaggctcaggggactcgtgagagactggcacaggccgagtgcgtcttggagcagttcggtaatgaagaccaccatgaattcatctggaagtttcactctatggcaagcagattaaccaaaaccgaagaacttgagaaaaagtggcggaacggcctggctgcctcccattctctcccacaacaggtccgcccccagaggcgcacaccatag

SEQ ID NO: 139013 - DNA, 753 bp, synthetic construct
  misc_feature 1..753: note = Description of Artificial Sequence: Synthetic coding sequence
  source 1..753: mol_type = other DNA
atggcatggcaggttagcctgcttgagcttgaagaccggttgcagtgtccgatctgcttagaggtgtttaaggaatccctgatgcttcaatgtgggcactcttactgtaagggttgtctcgtcagtctgagctaccacctggatactaaggttagatgcccaatgtgctggcaagtggtagatgggtctagctctttgcccaacgtgagtctggcctgggtaattgaggccctacgcctgcctggggaccccgagcccaaagtttgtgtgcaccatagaaatccgctttcgctgttctgtgagaaggaccaggaactgatctgcggcctatgcggcctcctgggttcccaccagcatcaccccgttacaccagtctccacagtgtgttcccgcatgaaagaggagttagccgcactgttcagcgagctcaagcaagaacagaagaaggttgacgagttgattgccaagcttgttaaaaaccgcaccagaattgtgaatgagtctgacgtttttagctgggtgatacgtagagaatttcaagagctgaggcacccggtggacgaagaaaaggctagatgcttagaaggcatcggcgggcacacccgtggcttagtggcttctctcgatatgcagctggaacaggcacagggaactagggagcgactggctcaggcagagtgcgtgttggagcagttcggcaacgaggaccaccacgaatttatctggaaatttcatagcatggctagcagatag

SEQ ID NO: 139014 - DNA, 750 bp, synthetic construct
  misc_feature 1..750: note = Description of Artificial Sequence: Synthetic coding sequence
  source 1..750: mol_type = other DNA
atggcttggcaagtaagtctgttagaactggaggacaggttgcaatgccctatatgtcttgaagtttttaaagagagtctcatgttacagtgcggtcattcctactgtaagggatgcttggtgtccctgagttaccatctcgatacaaaggtgcgatgcccaatgtgctggcaggtcgtcgacggcagctcctcgcttccgaacgtctcacttgcctgggtaatagaggctctccgcttgccgggagatcctgagcctaaggtgtgtgtccaccaccggaatccactgtccttgttttgcgagaaagaccaggagctgatatgtggcctgtgcggactgttgggatcccatcagcaccatcccgtgactcccgtatccaccgtctgtagtaggatgaaagaggagttagccgcgctgttcagtgagctgaagcaggaacagaagaaggtcgacgaattgattgcgaagctggttaagaaccgaacccggattgtcaatgagagtgacgtctttagctgggtcatccgtagggaattccaggagctgcggcatccagtcgacgaggagaaggctcggtgcctggagggaatcggcggccacacaagaggccttgtggcaagcctcgacatgcagctggagcaggcccaggggacacgcgagcgtctggcgcaggccgagtgcgtgctggagcagttcggtaatgaggatcaccatgagttcatctggtttcatagcatggccagcagatag

SEQ ID NO: 139015 - DNA, 753 bp, synthetic construct
  misc_feature 1..753: note = Description of Artificial Sequence: Synthetic coding sequence
  source 1..753: mol_type = other DNA
atggcctggcaggtatctcttctggaactggaagattggcttcagtgccctatctgcctggaggtgtttaaagagtcccttatgctgcagtgcggacattcatattgtaagggatgtctggttagcctctcgtaccaccttgacaccaaagtgcggtgccccatgtgttggcaggtggtggacggatcctccagcctgcctaacgtgtccctcgcctgggtcatcgaagcactgagactccctggtgaccccgaacccaaggtttgcgtgcaccataggaacccccttagtctgttttgcgaaaaagaccaggaattaatttgcggcctgtgtgggctcctcggctcacaccagcaccatccggtgactcctgtgagtactgtgtgttctagaatgaaggaagagctcgccgctttgttctctgaactgaaacaagaacagaaaaaggtggacgagctcatagcaaaactggtaaagaaccggacgcgcatcgtgaacgagagcgatgtgtttagctgggttattcggcgcgagttccaggagctcaggcacccagtggacgaggaaaaggctcggtgcttagagggaattggaggccacacccggggactggtggcatccttagacatgcagctagaacaggcccaaggtacccgcgagcggctcgcccaagcagagtgtgtgttggagcagttcgggaacgaagaccatcacgaattcatctggaaattccattccatggccagccggtag

SEQ ID NO: 139016 - DNA, 750 bp, synthetic construct
  misc_feature 1..750: note = Description of Artificial Sequence: Synthetic coding sequence
  source 1..750: mol_type = other DNA
atggcatggcaggtgtccctgttggaacttgaggattggctccagtgtccaatatgcttagaggtgtttaaggagtccctgatgcttcagtgtgggcactcttattgcaagggatgtttggtttccctcagttaccatcttgacacaaaggtgaggtgtcccatgtgctggcaggtggtagatggctcttcttcactgcccaacgtgtcactagcttgggtgatcgaagcacttaggctccctggagaccctgagcccaaggtctgcgtacaccacagaaatccacttagcctcttttgtgagaaagaccaggaactgatttgcggcctctgcggtctgctggggtcacaccagcaccatcccgttactcctgtgagcaccgtgtgttctcgaatgaaggaggagctcgccgcactgtttagtgagctcaaacaagagcagaaaaaggtagacgagcttattgctaaactggtaaagaacagaaccagaatcgtcaacgaaagtgatgttttctcctgggtcattcggcgggaatttcaagagctgcggcacccagtggacgaagaaaaagctagatgtctcgaaggaatcggaggccacacacgtgggctggtggcaagcctcgacatgcaactggaacaggcccagggaacgcgagagagactggcacaggcagagtgtgtcttggagcagttcgggaatgaagatcaccacgagtttatctggtttcatagtatggcctccaggtag

SEQ ID NO: 139017 - DNA, 1656 bp, synthetic construct
  misc_feature 1..1656: note = Description of Artificial Sequence: Synthetic coding sequence
  source 1..1656: mol_type = other DNA
atggccgaaaattggaaaaattgtttcgaagaggaacttatctgcccaatctgcttgcatgtcttcgtggagcctgtgcagctaccatgcaaacacaacttttgcaggggctgtataggtgaggcctgggccaaggacagcgggctggtgaggtgtccagaatgtaatcaggcctataaccagaagcctggccttgagaagaacctaaaactgaccaacattgtggagaaattcaatgccttgcacgtggaaaaacctcctgccgccctacactgcgtgttctgccggagaggcccgcctctgcccgcacagaaggtgtgtcttaggtgcgaggctccctgttgtcagtctcatgtacagacccatcttcaacagcctagtactgcccgcggccatttgctggtcgaagcggacgatgttcgagcctggagctgcccacagcataacgcctatagactctatcactgtgaagccgagcaagtggctgtgtgtcaatattgctgttattattccggagctcaccagggccactctgtgtgcgatgttgagattcgcagaaacgagatccgtaagatgctgatgaagcagcaggaccggctagaggagcgtgagcaagacatagaagaccaactgtataagcttgaaagcgataaacgcctcgtggaagaaaaagtgaaccagcttaaggaggaggttcggcttcagtacgaaaaactgcaccagctgctcgatgaggatctcagacagaccgttgaggtgctagacaaagctcaggccaagttctgtagtgaaaacgccgctcaggcccttcacctcggagagcgcatgcaggaagcaaagaagctcctcggttctttgcagttattgtttgacaagaccgaggatgttagcttcatgaagaatacaaaatcagtgaaaatcctgatggacagaactcagacctgtaccagttccagcttgtcccccactaaaattgggcacttgaatagcaagttgttcctgaatgaagtggctaagaaagagaagcaactgagaaagatgctggagggaccgtttagtacgccggtgccgttcttgcagtcggtgccactctatccttgcggagtgtcatcttccggagcagagaagcggaagcacagtactgcattccctgaagcctcgtttctggaaacctcctccgggcccgtcgggggccaatacggagccgccgggacagcatcgggcgaaggccagagcggacaaccactggggccatgctcctcaacccagcaccttgttgcgttgcctgggggcgcgcagcctgtgcatagtagcccagtgtttcctcccagccagtacccgaacggttccgcagcccaacagccaatgctgcctcagtacgggggcaggaagattctcgtgtgttctgtagacaattgttactgctccagtgtggcaaaccacggcggccaccagccataccctagaagcggacattttccgtggactgtgccctctcaggagtatagtcatcctctgcctcccactccctcagtgccccagtcattaccttctctggcagtgagagactggctggacgcctcccaacaaccgggtcatcaagatttctacagggtgtacggacagccgtcaactaagcactatgtgacctcttag

SEQ ID NO: 139018 - DNA, 1653 bp, synthetic construct
  misc_feature 1..1653: note = Description of Artificial Sequence: Synthetic coding sequence
  source 1..1653: mol_type = other DNA
atggctgaaaactggaaaaattgttttgaggaggagctgatttgcccaatctgcctgcacgtgtttgtcgaacccgtgcagctaccatgtaaacacaacttttgtagaggctgcatcggtgaggcctgggctaaggatagcgggctggtgcgctgccctgagtgcaatcaggcctataatcagaagccaggtctggagaagaacctcaagttaacaaatattgtggaaaagttcaatgccctgcacgtggaaaagccaccagctgcattgcattgcgtgttctgccggaggggcccaccattgcccgcccaaaaggtatgtttgcggtgcgaggcaccctgttgtcaaagccatgtgcagacccaccttcagcagccctcaacggcacgggggcatctgcttgtcgaagcggatgatgtgagagcatggtcctgtccccagcacaatgcataccggctctatcattgcgaggccgaacaggtggccgtttgccaatactgctgctattactccggggctcatcaagggcattccgtctgtgatgttgagattaggagaaatgagattcggatgctgatgaagcagcaggacaggttagaagagcgcgaacaggatattgaggaccagctatataaacttgaatccgataagcgcttagtggaagagaaagttaaccagttgaaagaagaagttcgtctacagtacgaaaaactccatcaactgctggatgaggacctccgccagactgtggaagtcttagacaaggcgcaggcgaagttttgctcagaaaacgcggctcaggctctgcacttaggagagcggatgcaagaagctaaaaagttgctgggttctctccagttgctctttgataaaacagaggatgtgagcttcatgaaaaatactaagtccgtcaagattctgatggaccggactcagacgtgcacgtcctctagtttaagcccaacaaaaatcgggcatctgaatagcaaacttttcctcaatgaggtagctaagaaagaaaagcagctgcggaaaatgctggaaggcccgttctccaccccagttccgttcctgcagtctgttcctttatatccctgcggcgtaagcagctcaggcgctgaaaagcgaaaacattctacagcattccctgaggcgtcatttctcgagaccagttctggccctgttggaggacagtacggtgcagcaggcaccgcttcgggggagggtcagagtgggcaaccactcgggccctgcagcagcacgcagcacctggtggcacttccgggcggggcccagcctgtccatagctctccggtgttcccgccaagccagtatccaaacggctccgctgctcagcagccaatgcttccgcagtacggcgggcggaagattctggtgtgcagcgtcgataattgctactgtagctcagttgctaatcatggcggacaccaaccttacccccggtctgggcattttccttggacagtgccctctcaggagtactctcaccccctgccccccacgccttcggtgccccaatctctgcctagcttggccgtgcgggactggttggatgcctcccagcaaccggggcaccaggatttttacagggtatacgggcaaccctctacaaaacattatgtgacctcatag

SEQ ID NO: 139019 - DNA, 2133 bp, synthetic construct
  misc_feature 1..2133: note = Description of Artificial Sequence: Synthetic coding sequence
  source 1..2133: mol_type = other DNA
atggaggaaatggaggaggaactgaagtgtccagtttgcggttccttttatcgcgagcccatcatcctgccttgctcccataacctttgtcaggcttgtgctcgcaacatcttggttcagactccggaaagcgaaagccctcagagccatagggcggccggtagtggggtcagtgactatgattatcttgacctggacaaaatgtctttgtacagcgaggcagattccggctacggctcctacggcggctttgcatccgcacccactacaccctgtcagaagtctcccaatggcgtgcgggtgttccctcccgcaatgccacctcctgcaactcatttgtctcccgcactcgccccagttccgcgaaattcctgcattacatgcccgcagtgtcatcgctccctgatcctggatgaccgaggtttgagaggattcccgaaaaacagagtcttagaaggggttattgaccggtaccagcagtccaaggcggccgccttgaagtgtcaactgtgcgaaaaagcccctaaggaggctaccgtcatgtgcgagcagtgcgacgtattctattgtgatccctgcaggctgcgctgtcaccctccacgtggcccgctagctaagcacaggctcgtcccaccagcccaaggaagggtgtcaaggaggctgtcacccaggaaagttagcacatgcaccgatcacgaattagagaatcacagtatgtactgtgtgcagtgcaagatgccggtctgttaccagtgtctggaggagggcaaacacagtagtcatgaagtcaaagctctcggggccatgtggaaactccataaatcgcagctgagccaagctttgaatggcttgagcgacagggcgaaggaggctaaagagtttctcgtgcaactcagaaatatggtccagcagatccaggagaattctgttgagtttgaagcctgcctggtggcgcaatgcgatgccctgatcgacgcactgaaccgtcgtaaagcacagcttctcgcacgcgtgaacaaggaacacgagcacaagttaaaagtggtacgggatcagatctctcactgtacggttaagctcaggcagactactgggctgatggagtattgcctggaggtgattaaggaaaacgacccaagcggtttcctgcagattagcgacgcactaatcaggagggttcacctgaccgaggatcagtggggaaagggcactttgacccctaggatgactactgacttcgacctgagcctggacaactctccccttctccagagtattcatcagcttgatttcgtgcaagtgaaggcttctagccctgtgcccgcaactcccatcctgcagctggaagaatgctgcacgcacaacaattccgctaccctgtcctggaaacaaccccctctttctactgttcctgctgatgggtacattctggagcttgacgacgggaacgggggacaatttagggaggtgtacgtaggtaaagagactatgtgcactgtggatgggttgcattttaactcgacctataacgcgcgggttaaggcttttaataagacgggcgtgtctccctacagtaagacccttgtcctccagaccagcgaggtcgcatggttcgcattcgaccctgggtcagctcactccgatattatcctgagcaatgataacctcaccgtgacctgcagctcctacgacgatcgggtagtactcggcaaaaccggtttctctaaggggatccattactgggagctcacagttgatagatacgacaatcaccccgatccagcattcggagtagcacggatggatgtaatgaaggacgttatgttggggaaggacgacaaggcttgggccatgtacgttgataacaaccgttcatggtttatgcacaacaattcccatacaaaccgcactgaggggggtatcactaagggggcaaccatcggcgtcctgctggacctgaatcgtaagaacctgacattcttcattaatgatgagcagcagggtcctatcgcattcgataatgtcgaggggctattctttccggcagtttcccttaaccgcaatgttcaggttacactccacactggccttccagtgccggacttttactccagtcgtgcaagcatcgcttag

SEQ ID NO: 139020 - DNA, 2409 bp, synthetic construct
  misc_feature 1..2409: note = Description of Artificial Sequence: Synthetic coding sequence
  source 1..2409: mol_type = other DNA
atggaggagatggaggaagaactcaagtgtcctgtgtgtggcagcttctatcgggagcccatcattctaccgtgctctcacaatctatgccaggcgtgcgcccggaatatcttggtgcagacccctgaaagcgagagcccccagagccatagagccgccgggtccggggtcagcgattatgactacttggatcttgacaagatgtcactgtacagtgaagcagactctggctatggatcgtacggcgggttcgcctctgcaccgaccacaccctgccaaaagtccccaaatggcgtgagggtgttcccacctgctatgccaccccctgccacccacctttcacccgccttggcccctgtcccaaggaattcctgcattacttgtccgcagtgtcatcgatctcttatcctggacgaccgtggtctaagaggcttcccgaagaaccgggttttggagggggtgatagaccgctaccaacagtccaaagcagccgccctgaagtgtcagctctgcgagaaagcacctaaggaggctacagtgatgtgcgagcagtgcgacgtgttctactgcgacccctgtaggttgagatgtcatcccccaagaggtcccttagcaaagcatcgactggtcccacccgcccagggtcgcgtcagccggcgtctgtcaccacgcaaggtgtctacgtgcacagatcacgaattagaaaaccattcgatgtattgcgtgcagtgtaaaatgccggtttgttatcaatgcttagaggaaggtaagcattcttcgcatgaggtcaaggcgctgggagcaatgtggaagttacataagtctcagctgagccaggcccttaacggcctctctgaccgcgctaaggaagccaaagaatttctcgtccagctgagaaatatggtgcagcagatccaggagaattcggtggaattcgaagcctgcctggttgcgcagtgcgacgccctaatcgatgcattaaatcgacgtaaagctcagcttctggcccgcgtaaacaaagaacatgagcacaagctgaaagtagtgagggaccaaatatctcactgtactgtaaaattaagacagactacaggactgatggagtactgcctggaagtgatcaaagaaaacgaccccagcggcttcctgcagatcagcgatgccttgatcaggcgcgtgcatctgaccgaagatcagtgggggaaggggaccttgactccacgaatgaccactgatttcgacctctcacttgacaactcccccctgttgcagtctatccaccagttggacttcgtgcaggtcaaggttcctgcaacccctatcttacagctggaggaatgctgtacacataacaattccgccacactgtcctggaaacagccacctctctccactgttcctgccgacggctatatcttagagttggatgatggaaatggaggccagtttcgcgaagtgtacgttgggaaggagacaatgtgcactgtggacggcctacactttaattctacgtataacgcacgggtcaaagcctttaataaaactggagttagcccttattctaagactctcgtccttcaaacctctgaagacacagatagcgaggagcagacactcccctttcctgtgccatccgaacgcttgccgcttcgaaggatgagcccatttagttccactctgaacttgcagccttctttccctgggcgctcctattttgattttaggagttccccacatcaactctctttgcactcatccttgcagagtctgaatgctcccggttgtaacttcgagacacagagcgccccctactcacagctggtcgacatcaagaaactgctcgccgttgcctggtttgcgttcgaccctggatctgcccactctgatatcattctgtccaacgacaacctgacagtgacctgtagctcgtacgacgatcgtgtggtcctgggaaagacaggattttccaagggcattcactactgggaactcacagttgatcgctacgataatcatccagatccagcttttggggttgcgcgtatggatgtgatgaaagacgtgatgttggggaaggatgacaaagcatgggcaatgtacgtggacaacaacagatcctggttcatgcacaataatagccatacaaaccgcactgagggcggaatcaccaagggcgccactatcggagtgttgcttgatcttaacaggaaaaatctaaccttcttcataaatgacgagcagcagggccctatcgcatttgacaacgtagagggccttttcttccctgccgtgagcctgaataggaacgtgcaggtctctactctgccgctgagactgaacagctgctgttggctgccagtgcagcgtctgccacgggccgtccaatcgaatcgacgggaaggctcttag

SEQ ID NO: 139021 - DNA, 1653 bp, synthetic construct
  misc_feature 1..1653: note = Description of Artificial Sequence: Synthetic coding sequence
  source 1..1653: mol_type = other DNA
atggaggagatggaagaagagctgaagtgtcctgtctgcggatccttctacagagaaccaattatcctgccatgctcccataacttgtgtcaggcctgtgcacggaacatattggttcagacccctgaatctgagtcaccccagagccaccgcgcagcaggaagcggggtgagcgactacgattatctcgacctggataagatgtcattgtactctgaggccgactccgggtacggatcctacggaggcttcgcttccgccccaaccacgccctgccagaaatcgccaaatggcgttcgagtgtttccccctgccatgcccccccccgccacacacctgtcaccagctttggcgcccgtgcctagaaacagttgtatcacctgtccacagtgccacaggtctctgattctggacgacaggggcttaaggggatttcctaagaacagagtcttggagggcgtcatcgaccgttatcaacaaagcaaagcggcggcattgaaatgtcagctctgcgagaaagcaccgaaagaggctaccgtgatgtgtgaacagtgcgacgtcttctactgtgacccctgtcggctccgatgtcacccaccccggggtcctttggccaaacacaggttagtgccccccgctcaggggcgagtttcccgacggctgagccctaggaaagtctccacatgtacagatcacgagctggagaatcactctatgtactgtgtacagtgtaagatgcccgtgtgttatcagtgcctggaagagggcaaacactccagccacgaggtgaaggccctgggagccatgtggaagctgcacaaaagccagctctctcaagccttgaatgggctgtccgatcgcgctaaggaagcgaaggaattcctcgtgcagcttaggaatatggtgcagcaaattcaagagaattccgtggaattcgaggcttgcctcgtggcccagtgtgatgccctgatcgacgccttaaatcgtcggaaagcccagttactggctcgggtgaataaagagcatgaacataagctcaaggtcgtcagggaccagatctctcactgcacggtcaaattacggcagacaaccggattaatggaatactgtttggaggtcatcaaagagaacgatccaagcggattcctgcaaatcagcgacgcattgattcggcgcgtgcatctgacagaagatcagtggggcaaaggcacgcttactccacgcatgacaacggactttgatctcagtttggataactcacccctgctgcagtccatacatcagctcgactttgtacaagtgaaggcttcttccccggtgcccgccacaccaattctgcagctcgaggagtgttgtacgcataataactccgccacactaagctggaagcagccgcctctttcaaccgtgcctgcggacggctacatcctcgaactcgatgatggtaacggcggtcagttcagggaggtctacgtggggaaggagactatgtgcaccgtcgacggacttcattttaatagcacttacaacgcaagggtgaaagctttcaacaaaacaggcgtgagtccatacagtaaaacgctcgttctgcagacttcagagggcaaagcgctacagcagtacccatctgagcgtgagttgcgcggcatctag

SEQ ID NO: 139022 - DNA, 3750 bp, synthetic construct
  misc_feature 1..3750: note = Description of Artificial Sequence: Synthetic coding sequence
  source 1..3750: mol_type = other DNA
atggccactgccgctaccgaggaaccttttccgttccacggactcctgcctaagaaggagaccggagccgccagcttcctttgtcggtatccggagtatgatggtaggggagttttgatcgctgtcctggatactggtgtggatcccggggctcctggtatgcaggtcacgacagacgggaagccaaaaatcgtggacatcattgacacaaccggttccggggacgtaaatactgccacagaggtcgaacccaaggacggggagatcgtcggcctaagtggacgggttctgaagatcccggcatcctggacaaatccctccgggaaatatcacatcggcattaagaatggctacgatttctaccctaaggccctgaaggagcgaattcaaaaagagcgtaaggagaaaatttgggacccggtccacagggtagccttggctgaggcatgtcgaaagcaggaggagttcgacgtcgccaataacggatcctcccaggcaaacaaactgattaaggaagagctccagagtcaagtggagctgctgaactcattcgagaagaaatattctgatcctgggcccgtgtacgactgtctggtctggcatgacggcgaggtttggcgggcttgtatagacagcaatgaagacggagacctgtcgaagagtaccgttttgaggaattacaaagaagctcaggaatacggatctttcggcacagctgagatgctaaattattccgttaatatttatgacgacggcaatctgctctccatcgttacgtctggcggagctcacggaacccacgtggcatctatcgcagcaggccacttccctgaggagccagagcggaatggagtggctcctggggcccagattctgagtatcaagatcggagatacccggctctcaaccatggagacaggtaccggtcttatcagagctatgatcgaagtgatcaatcacaagtgtgatctggtgaactatagttacggcgaggccacccattggccaaattccggcaggatctgcgaggtgataaacgaggcagtttggaagcacaacataatatacgtcagttccgctgggaacaatgggccctgtcttagcaccgtgggttgtcctggcggcacaacatctagcgttattggagtgggcgcctatgtctcccccgacatgatggttgccgagtatagtctgcgggagaagctccctgccaaccagtacacctggtcctcacgaggccctagcgcagatggggcactgggcgtatcaataagcgcccccggtggagccatagcttctgtccccaactggacactgcgaggtacacagctgatgaatggcaccagcatgtcctctcccaatgcctgcgggggcatcgccttgatcctctctggactgaaggctaacaatatcgactacaccgttcacagcgtgcgcagggcactcgaaaatactgctgtcaaggccgataacattgaagtgttcgcccagggacacggtatcattcaggtggataaggcgtatgattatctcgtgcagaacaccagcttcgcgaacaaactgggctttacggtcactgtcggaaacaatcgcggtatatatctgagggatcctgtccaggtggcagccccttcagaccatggcgtgggaattgagccagtctttcctgaaaacactgaaaactccgaaaagatctcactccagttacacctcgctctgacttcaaactcgtcttgggtgcagtgcccaagccatttggaactgatgaatcagtgcagacacattaatatccgcgtggacccacgggggctgcgcgaagggctccactatactgaggtttgcggatacgacatcgcgtcacctaacgccggacctctgttccgggtacctatcaccgccgtcattgctgctaaagtgaatgagtcttcccactacgatctggcattcacagacgttcatttcaaacctggccagattcgacgacacttcatagaggtccccgaaggtgccacatgggctgaggtgacagtgtgcagctgctcgtcagaagtcagtgcaaagttcgtactgcacgccgtgcagttagtgaagcaaagggcctatcgttcccacgagttctataagttctgcagtctgcctgaaaagggtacgctgaccgaagcctttcctgttcttgggggcaaagctatagaattctgcattgctagatggtgggcctccctatcagacgtgaacatagactatactatcagcttccacggtatagtctgtactgcaccacagctgaacatacacgcatccgagggcattaatcggtttgatgttcagtctagcctaaagtacgaagacctggccccttgcataactctgaaaaactgggtccagaccctaaggcccgtatctgccaaaactaaacctctgggctcacgggacgtccttcctaacaacagacagctctacgagatggtcctgacctacaactttcaccagcccaagtcaggggaagtcacgccatcatgtcctctgctgtgcgaacttctctacgagtcagagttcgacagccagctttggatcatattcgatcaaaacaagcgacagatggggtcgggggatgcctacccacatcaatactcactgaagctagagaagggcgattacacaatcagactgcaaatcagacacgagcagatctcagacctggagagactcaaggatctgcccttcatcgtatcacaccgcctgagcaacactctgtcactagacatccacgaaaaccattcgttcgctctactggggaagaagaaatctagtaatctaaccttacccccaaagtataaccagcccttcttcgtgacttccctgccagacgataaaatacccaagggagctggacctgggtgttatctggcagggagtctgacactgtcgaagaccgagcttggcaaaaaggcagacgtgatacccgtccattactacctgatccctcctcccactaagacgaagaatgggtctaaggacaaggaaaaagattctgaaaaggagaaagatttgaaggaggaatttaccgaggcactgcgcgatctgaagatacagtggatgacgaagctcgattcctccgacatttataatgaactcaaggagacataccctaactacttgcccctgtacgtcgctaggcttcaccagctggatgcagagaaagagaggatgaagcgtttgaatgagatcgtcgatgccgcaaatgcggtcatcagccacatcgatcagaccgctctggcggtgtacatcgccatgaagaccgacccaagacctgatgcggctactatcaaaaatgatatggataagcaaaaatctactctcgtggacgctctttgtcgcaagggctgcgccctggccgaccacctgttacacacccaagcacaggatggtgccatatccactgacgccgagggtaaagaagaggagggtgaatccccacttgattcactggccgagactttctgggagacaaccaagtggactgaccttttcgataataaggttctgactttcgcttataagcacgctctggtgaacaaaatgtatggacgcggtctaaaatttgctaccaagcttgtggaggaaaaacctacaaaagaaaactggaaaaattgcattcaactcatgaaactcctgggctggacacactgcgcttccttcacagagaactggctgcccattatgtatccacccgattactgtgtgttttag

SEQ ID NO: 139023 - DNA, 1791 bp, synthetic construct
  misc_feature 1..1791: note = Description of Artificial Sequence: Synthetic coding sequence
  source 1..1791: mol_type = other DNA
atgctgccttctcaggctcagggacttctttggtgggtctttcccctgttccctgcatcttctctctcttacccccccgtgtcctatagagctgacggcctggccagaaataccttcctgaaggcatgcagtgaatcctctagttcatctaatatctccactatgctggtgacacatgattatactgctgtgaaagaggacgaaataaacgtctaccagggcgaagtggtgcagattctcgccagtaatcaacagaacatgttcctcgtcttccgcgccgctacagaccagtgtcctgccgctgagggctggatccctggctttgtcttggggcatacttcagccgtgatcgtggagaacccagacgggacgcttaagaaatccacaagctggcacaccgccctaagactccggaagaaatcagaaaagaaggataaagacgggaagcgggagggaaagctggagaatggctatagaaaatcacgcgagggattgagcaataaagtctctgtgaagctgctcaaccctaattatatctacgacgttccaccggaattcgttataccattgtcggaggtgacttgtgaaactggggagaccgtagtcctgaggtgtcgggtgtgcggccgtccaaaggcttcaattacctggaaaggccctgagcataatactctcaacaacgacggtcattacagtatttcctactcagatttaggtgaggccactctgaagattgtcggcgtcactactgaggatgacgggatttatacttgtattgcggttaatgatatgggaagcgctagcagctctgcctccctgcgcgtgctcggacctggcatggatggcatcatggtgacctggaaggataactttgactcgttctactctgaggtggccgaactgggtcgcggtagattcagtgttgtgaagaagtgtgaccagaaaggaacgaagagagccgtagccaccaagtttgtgaataaaaagctgatgaagagggatcaggtgactcatgagctgggaatccttcagagtcttcagcaccctctgctagtcggattgctggatacatttgagacgccaacaagctatattctcgtgctagagatggccgaccaggggcgactgttggattgcgtggtgcgatggggctctttaacggagggaaagatccgggcacatttgggtgaggtgctagaggcagtgcggtacctgcataactgcagaatagctcacctagatctgaagccggaaaatatcctagtggatgagtcgctggccaaaccaactatcaaactagcagattttggggatgccgtgcagctgaacactacatattatatccaccagctgctcggcaacccggagttcgctgcacctgaaattatcctggggaatcccgtatccctgacatcagacacatggtccgtgggagtactgacatatgtgttactttctggtgtgtctcccttcctcgatgactccgtggaggagacatgtctgaacatctgccgcctagatttctcatttcccgatgattacttcaagggcgtaagccagaaagcaaaggagttcgtgtgcttcctgctgcaggaagatccagccaagagacccagcgctgccctcgccctgcaagaacaatggcttcaggcggggaatggtaggtctaccggcgtcctggatactagccgtctgacgtcgtttattgagcgccgtaaacatcagaacgatgtgcgaccgattaggtcaatcaagaattttctgcaatctcgtctcctaccgagggtttag

SEQ ID NO: 139024 - DNA, 9294 bp, synthetic construct
  misc_feature 1..9294: note = Description of Artificial Sequence: Synthetic coding sequence
  source 1..9294: mol_type = other DNA
atgtcggggtctagtggaggcgcggccgcccccgccgctagcagtggacccgctgccgcagcgtctgctgccggtagtggatgcggcgggggggctggcgaaggggcagaagaggctgcaaaggacttggccgatatcgctgccttctttcgttctgggttccgtaaaaacgatgaaatgaaagccatggatgtcctcccaatattgaaggaaaaggttgcctatctgagcggtggcagggataagcgagggggccctatccttactttccctgctaggtcaaatcacgacagaataagacaggaagacctcagaagattgatcagttatctcgcttgtatcccaagtgaagaggtatgcaaaagagggtttactgtaatcgtggatatgagagggtctaagtgggacagtatcaagcctctacttaagatcctgcaggagagcttcccctgttgtatccacgtcgccttgatcattaagcccgacaatttctggcagaagcagcgtaccaacttcggttcctcaaaattcgagttcgaaacaaacatggtgtccctcgagggactgaccaaggtggtggatccgagccaattgactcctgaatttgacggctgtctggagtataatcatgaagagtggattgagatacgggtcgcattcgaagactacatcagcaatgctacccatatgcttagccgcctggaagagttgcaagacattctcgccaaaaaggaactcccgcaggacctagaaggagctaggaacatgatcgaggaacacagccagcttaaaaagaaagtgattaaggcccctattgaggacctcgatttggagggccagaagctgttgcagcgaattcaaagctctgaatccttccctaaaaaaaacagcggctctggaaatgccgatctgcagaatttgctcccaaaggtttccacaatgctggacagacttcacagcaccagacagcatctgcatcagatgtggcacgtgagaaaacttaagctggatcagtgtttccagctccgcctttttgaacaggacgctgaaaagatgtttgactggattacacataacaagggcttattccttaatagttatactgaaataggtacatcccacccacacgccatggagcttcagacccagcacaatcacttcgccatgaattgcatgaacgtatatgtcaatatcaaccgtattatgagcgttgcaaaccgcctcgtggagtctggacactacgcttcccagcagattcgtcagatagcatcccaactggagcaggaatggaaggcattcgcggcagctctggacgagcgcagtactctgctagatatgtccagcatatttcatcagaaagcagagaagtacatgtcaaacgttgattcctggtgcaaagcctgtggggaagtagatctcccatccgagctgcaggatctcgaggacgcaatccaccatcaccaggggatttacgagcatattaccctggcgtattcagaggtatcccaggatggaaagtccctgttagataagctgcagcgacccttgaccccaggctcctccgacagtctaactgccagcgcaaactacagcaaagcggttcaccatgttctagatgtaatccatgaggtactgcatcatcagcgccagctcgaaaatatctggcagcaccgcaaagtaagactccatcaacgccttcaattgtgtgtgtttcagcaggacgtgcaacaggtgttggactggatcgaaaaccacggggaagcttttctgagcaaacacactggagtaggtaagtccctccacagagcaagagccctgcagaaacgacacgaagactttgaagaggtggcacagaatacttacaccaacgctgataagctcctcgaggccgctgaacagcttgctcagaccggggaatgcgaccccgaagagatttaccaggctgcacaccaattggaggaccgcatacaggatttcgtgcgccgggtggagcagaggaagatacttctggatatgtcagtctcctttcatactcacgtcaaggagctctggacatggcttgaggaattgcagaaagagctgctggatgatgtctatgccgagtctgtagaggctgttcaagacttaatcaagcgctttggtcaacaacagcagaccacacttcaggtgaccgtgaatgttataaaggagggggaggacctcatccagcagttgcgggacagcgcaatctcctcgaataagaccccccataacagcagcatcaaccacattgagactgtgctgcagcagttagatgaggctcaaagccagatggaagaactgtttcaggagcgtaagatcaagcttgaactgtttctgcagctccgcatcttcgaacgcgatgcaattgacatcatctccgatttggaatcatggaacgacgaactgtctcaacagatgaatgatttcgacactgaagatttgactatcgctgaacagcgactccaacaccatgccgataaggctctcaccatgaacaatctcacgttcgacgtaattcatcaagggcaggaccttcttcagtacgtcaatgaagtgcaagcctcgggggttgagctactgtgcgaccgggatgtagatatggctacaagggttcaagacctcctggagtttttgcacgaaaagcagcaggaacttgacctagccgctgagcagcaccgaaagcatctagagcagtgcgtccaattaagacacctccaggccgaggtcaagcaggtcctaggctggatccggaatggcgagagcatgctgaatgctggactgatcacggcgagcagccttcaggaagccgagcagttgcagcgagagcacgaacagttccagcacgccatagaaaagacccaccagagcgctctccaagtgcagcagaaagccgaagccatgctacaagcaaaccattatgacatggacatgattagagactgtgctgagaaagtagctagccactggcagcagctcatgcttaagatggaagaccgcctgaagttggtgaacgctagtgtagccttttacaaaacatcagaacaggtgtgtagtgtgctcgaatcacttgagcaggaatataagcgggaggaagactggtgcggcggagccgacaagctcggccctaactctgaaactgatcacgttacaccaatgatttccaaacacctcgaacagaaggaggcctttcttaaggcctgtaccctcgcaaggcgaaatgccgatgtgttcctgaaataccttcatcggaattctgttaacatgccaggcatggtaacacatatcaaggcaccagagcaacaagtcaagaacatactgaatgagctgtttcaacgggaaaacagggtgctgcactactggactatgcggaagcgcagactggatcagtgtcaacagtacgttgtgttcgagcggagcgcaaaacaggctctcgagtggatacacgataacggggaattctatctgagcacacacacctccactgggtcatccatccagcatacccaagaactgcttaaagagcatgaagagttccagattaccgccaaacagactaaggaaagagtgaagttgctcattcagctcgcagatggcttttgtgagaaaggccacgcccacgccgccgaaatcaagaagtgcgttacagcggtcgacaagaggtaccgcgacttctctctccgcatggagaagtacaggacctctctcgaaaaagcactgggaatctcatctgattctaacaagtccagcaagagtctgcagctggatattattcctgcgagcatccctggaagtgaggtcaagctgagagacgccgctcatgagctcaacgaggagaagaggaagtccgcgcggaggaaggaatttattatggccgagcttatacagaccgagaaagcctacgtgagggatctgagagaatgcatggatacatatctctgggaaatgacatccggagtcgaggagattccccccggcattgttaacaaggagctgatcatttttggtaacatgcaggaaatttacgaattccacaataatatcttccttaaggagctggagaaatatgaacagctgccagaggatgtcggccattgcttcgtgacgtgggcagataagttccagatgtacgtcacatattgcaaaaataagcccgactctacccagctgatactcgagcatgcaggatcctatttcgacgaaattcagcagagacacggcctggccaacagtatctcctcctatctgatcaaaccagtgcagcgaattaccaagtaccagttacttctgaaagagctgcttacctgctgtgaggagggcaaaggtgagatcaaggacggtctggaggttatgctctcagtgcccaaacgtgctaacgacgctatgcacctgtcgatgctagaagggttcgacgaaaacattgagtctcagggagaactgattctacaggagtccttccaggtatgggatcccaaaaccctcatccggaagggacgtgaacgccatctatttttattcgagatgagcctggtctttagtaaggaggtcaaagacagcagcgggcgatctaaatacctttataaatccaaactgtttacctcggagctcggcgtgacagaacatgttgagggagacccctgtaagtttgccctgtgggtggggcgaaccccgacttccgacaataaaattgtgctgaaggcctcctctattgaaaacaaacaagactggattaagcacatccgcgaggttatccaggaacgcacaatccacttaaaaggcgcactcaaggaaccaatccatattcccaagaccgctcccgcaactcggcagaagggacgcagggacggggaggatctggacagtcagggcgacgggtcaagtcagccagataccatctctatcgcctctagaacatctcaaaacaccctggactccgacaaactgtcaggggggtgcgaattaaccgtggtcattcatgacttcaccgcatgcaactctaacgaactcaccatccgccgaggacagaccgtcgaggtgctggagaggccccatgacaagccagactggtgtctggtaagaactactgacagaagcccagccgcagagggactggtcccgtgtggtagtctgtgtattgcccactctaggtccagcatggaaatggagggaatcttcaaccacaaggacagtttgagcgtcagttctaacgatgctagtccaccagcctccgtggcttcattgcaaccccacatgattggtgcccagtcttcccccggcccaaaacgcccaggcaacaccctccgcaagtggctgacgtcgccagttcggaggctgagtagcgggaaggccgatggccacgtgaagaagctggcccataaacacaagaagagccgcgaggtgaggaaatctgctgacgccggttcacaaaaagatagtgacgatagcgctgccactccacaggatgagaccgtggaggagaggggtaggaatgaggggttgtcatccggcacgttgtccaaatcaagctccagcggaatgcaaagttgcggtgaggaggagggggaagagggagccgacgctgtacccctccctcctcctatggcgatccagcagcacagcctccttcaacctgattcacaagacgacaaagcaagctcccgccttcttgtgagacccacctccagcgaaactcctagcgccgctgagctggtgagtgccatagaagaattggtaaaaagcaagatggctttagaggatagaccatcttcactccttgttgatcagggagactcctcatccccctcctttaacccttctgataattcgcttctttcctcctcttccccaattgacgagatggaggaaaggaagtccagttctttgaagaggagacactacgtgctgcaggagctggttgagactgagagagattacgtgagggacctcggatacgtggtcgaagggtatatggctctgatgaaagaggacggcgtgcccgatgatatgaaagggaaagataaaatcgtttttggcaacatccatcagatctatgattggcatcgcgatttttttttgggcgagctcgagaaatgcttagaggacccggaaaagctgggatcactgttcgtgaagcacgagcggaggctgcacatgtacatcgcttactgccagaacaaacccaagagcgagcacattgtttctgaatacattgataccttcttcgaggatcttaagcaacgcttgggacatcgcttgcagctgaccgacctcctgattaaaccagtccaacgtataatgaagtaccagctcctgttaaaggattttctgaagtacagcaaaaaagcctcactggacactagtgaactagaacgtgcagtcgaggttatgtgcatcgttccacgccgatgtaacgacatgatgaatgttggacgccttcaggggttcgatggtaagatagtggcccagggaaagcttcttctgcaagatacctttctggtcactgaccaagatgctggattattgccaagatgtagagaacgacgaatatttctgttcgagcagatagtgatctttagtgagccgcttgacaagaaaaaaggtttcagcatgcccgggtttctgtttaagaactccattaaggtgagctgtctgtgtctagaggaaaacgttgagaacgacccatgtaagtttgctctgactagtagaactggcgacgtcgtggaaacgttcatactgcacagcagcagtcccagtgtccggcagacctggatccacgaaattaaccagatactagagaaccagcgaaattttttaaacgctctgacgtctcccatcgagtatcagcgtaaccatagcggggggggaggggggggaggctctggcggatctggtggcggaggtggttctggcggcggtggtgcgccgtccggcgggtccgggcacagcggaggtccatcctcctgcgggggggccccatctacctcgagatcccgcccctccaggatcccacaacccgtgcgtcatcacccacccgtcctggtgtctagcgctgcctccagtcaggcggaggccgacaaaatgtccggaacgagtacccctggcccctcactgcctcccccaggggcggcaccggaagccggacccagcgcgccgagtagacggccccccggagccgacgctgaggggagtgagcgagaggcggagcctattcctaagatgaaggtcctcgaatcgccccggaagggagccgccaatgccagcggctccagcccagacgctcccgccaaagacgccagggcctcccttgggacactgcccttgggcaaaccccgggcaggtgctgcctcaccgctgaattctcctctaagttctgccgtgccgagcctggggaaggagccattcccaccgtcgagccctcttcagaagggagggtctttttggtcctcaattcccgctagtcctgcttctcgcccaggaagttttaccttcccgggggacagtgattctttacaaaggcagactcccagacacgccgcccccggcaaagacaccgatagaatgagcacctgttcctcagctagtgagcagtccgtccaatcaacccagagtaatggaagtgaatctagcagtagtagcaacatttctacgatgttagtgacgcacgactacacggctgtgaaagaagatgaaatcaacgtctatcagggggaagtggttcagatcctggcatctaaccagcaaaatatgtttctggtgtttagggcagcaaccgaccagtgtcccgcagcagagggctggatcccaggttttgtcctcggacacacttcagctgtgatagtggaaaatccggatggtaccctgaagaaatccacgtcctggcacacggccctgaggctccgcaagaaatcagaaaagaaggacaaagatggcaagagagagggaaagctggaaaacgggtacaggaagtctagggaaggccttagtaataaagtttccgtcaagttgctgaatcccaactacatctatgacgttccacctgaatttgtgatccccctcagtgaagttacatgcgagaccggggaaactgtggtgctgcgctgtagggtgtgcggtcggccaaaggcaagcattacatggaagggtccagagcacaacacgctcaacaatgatggacactattccatctcatacagcgatctgggtgaagcaacccttaaaatcgtcggcgtgaccaccgaggatgacggaatatacacatgcatagctgttaacgatatgggaagcgcctccagttcagcgtcactccgggtcctaggcccaggtatggatggaattatggtcacctggaaggacaatttcgatagtttctattccgaggtggctgaactaggccgggggaggttctctgtggttaagaagtgtgatcagaagggtacaaagcgtgctgttgccaccaaatttgtcaataagaagctgatgaagagggaccaagtgacccatgagcttggtattctgcagtcactgcaacatccgttgctcgtgggtttattggacacattcgagactcctacctcctacatcctggttctggagatggcagatcagggtagactgttagactgcgtagtaagatggggaagtttaactgaagggaagatcagggcccacttaggtgaagtgttggaagcagtgcggtacctccataactgtcgtatcgcacacctggacctgaaaccggaaaatatcctggtcgatgagtccctggccaagccaacaattaaattggccgatttcggcgatgcagtgcaactgaataccacgtattacatacatcaactcctgggaaacccggagttcgctgcccccgaaatcatcctgggaaaccctgtcagtttgacaagtgatacctggagtgtgggagtacttacctacgtgctcctgagcggtgttagcccctttctggacgattccgtcgaagaaacttgtctaaatatttgccgtctggacttctcgttccccgatgattattttaagggagttagccagaaagccaaagagtttgtgtgtttcctgcttcaggaagaccccgctaagcgcccttcagctgcgttggcacttcaggaacagtggctacaggcgggcaatggcagatccaccggagtccttgatactagccgcctcaccagcttcattgagcggaggaaacaccagaatgacgtgcgaccgattaggtccattaaaaatttcctgcaatccaggttgcttcctagagtttag

SEQ ID NO: 139025 - DNA, 7503 bp, synthetic construct
  misc_feature 1..7503: note = Description of Artificial Sequence: Synthetic coding sequence
  source 1..7503: mol_type = other DNA
atgctcgataggttgcattctacccgacagcatctgcaccagatgtggcacgtgcgcaaactgaagctggatcagtgcttccagttgcggctcttcgagcaggacgcagaaaaaatgttcgattggataacccataacaaagggctgttcctgaacagctatacagagattggaacctcacaccctcatgccatggaacttcaaacccaacacaaccacttcgctatgaattgcatgaacgtgtacgtgaacatcaaccggataatgtctgtggccaatcggctggtcgaatcagggcactatgcttctcagcagattagacagatagctagtcaattggagcaagagtggaaggctttcgccgctgcccttgacgagaggagcaccctgctggatatgtcatccatcttccaccagaaggcagagaaatacatgtctaatgttgatagctggtgcaaggcttgcggcgaggtggaccttccttctgagctacaggacctagaggacgctatccatcatcaccagggaatctacgaacatattactctggcgtacagcgaggtgtctcaggacggcaaaagtctgttggacaaattacaaaggccactgactcctggcagctccgactcccttactgcttctgccaactactccaaagctgtgcatcatgtgctggacgtgatccacgaagtgctccatcatcagaggcaactagaaaatatatggcagcaccggaaggtacgtctgcatcaacgcttacagttgtgcgtgttccagcaggatgtgcagcaggttctagattggattgagaatcatggcgaggctttcttatctaaacacactggggtcgggaaatccctgcatagggccagagctcttcagaagcgccatgaagactttgaggaagtcgctcaaaacacttacactaacgcagacaagttgctggaggctgctgagcaacttgcccagactggagagtgtgatcctgaagagatctatcaggcagcccatcagctggaggataggatccaggatttcgttagacgcgtagaacaacgcaaaatactgttggatatgtcagtcagcttccacacacatgtgaaagagctctggacgtggctggaagaactccaaaaggaactactggacgacgtgtacgctgagagcgtagaagcagtccaggacctcatcaagagatttgggcagcagcagcagaccactctccaagtaaccgtgaacgtgatcaaagaaggtgaagacctgattcaacaactgcgcgattccgccatatcaagcaataagaccccacacaattcgtccattaaccatatagagacagttctccagcaacttgatgaagcacagtcacaaatggaggagcttttccaggagaggaaaattaagctagagctgttcctgcagctccgtattttcgaaagggacgccatcgatattatctcagacctcgagtcttggaatgatgaattgtcccagcagatgaatgatttcgatactgaagacctaaccattgctgaacaaaggctccagcatcacgcagataaagcacttacgatgaacaacttaactttcgatgtgatccaccagggccaggatctgctacagtatgtgaatgaggttcaggcctccggcgttgagttgctatgcgaccgggacgtggacatggccactagggtccaggatctcctggagttcctgcacgaaaagcagcaagagcttgatctggccgctgagcagcaccgcaagcatctcgaacagtgtgtacagctccgtcatctgcaggctgaggtcaaacaggtcctggggtggattagaaatggggagtcaatgcttaatgccggtctgatcacggccagttcactgcaagaggctgaacaattacaaagagaacacgaacaatttcaacatgccattgagaaaacgcaccaatccgccctgcaggtgcagcaaaaggcagaagcgatgctccaggccaaccattatgatatggacatgattagggattgtgcggagaaggtcgctagccattggcagcaactaatgctcaagatggaggatagactcaaattggtaaacgcatcagtggcattctataaaacctcagagcaggtctgcagcgttttggagtctcttgaacaggagtataaacgcgaagaagattggtgtggcggggcggacaaattggggcccaacagcgaaaccgatcacgtgaccccgatgatctcaaagcatctggagcagaaggaagcattcctcaaggcttgtacactcgctaggcgaaacgccgacgtgttcctcaagtatttgcatagaaatagtgtgaatatgcccggtatggtaacacacatcaaagccccagagcagcaggtgaagaatattcttaatgagttattccagcgggagaatcgagtacttcattattggacaatgaggaaaagaaggttggatcagtgccagcagtatgtggtcttcgaacgatccgcgaaacaagccctggagtggattcacgacaatggggaattctatctgtcgacccatacatctaccggttccagtatacagcatacgcaggagctacttaaagaacatgaggagttccaaatcaccgccaagcagaccaaagagcgagtcaaacttctcatccagctggctgatggcttttgtgagaaaggtcacgcccacgctgccgaaattaaaaagtgcgtgaccgcagttgataaaaggtaccgcgacttctctcttagaatggagaagtatcgtacctccctggaaaaagcactgggaatctcatctgatagtaacaaatcttcaaagagcttgcagcttgatattattcccgcatccattcctggcagcgaggtcaagctccgggacgcggcccatgagttaaacgaggagaagcgtaagtcagccagacggaaagagttcataatggccgagcttatacagaccgaaaaagcttacgtccgagacctcagagaatgcatggatacctacctgtgggaaatgacaagtggggttgaggaaatacctcctggtatcgtgaataaagaattaattatctttggcaacatgcaagagatctacgaattccataacaatatatttctgaaggaactagagaagtatgaacagcttcctgaggacgtgggacattgcttcgtcacatgggccgataaattccagatgtacgtgacttactgtaaaaacaagccggattcaacacaactcatcctagagcatgctggtagctactttgatgaaatccaacagcggcacggactggccaatagcatatcctcatatctgattaaaccagttcagcggattactaaataccaactcctgctgaaggaactcctgacctgctgtgaagagggcaaaggagagataaaagacggactagaagttatgctgtcagtgcccaagcgcgcaaacgacgctatgcatctatctatgttagaggggttcgatgaaaacatcgagtcgcaaggagaactcatcctccaggagtcctttcaagtttgggaccccaaaaccttgatcagaaaaggacgggagcggcatttgtttttgtttgagatgtcactggtattttccaaagaagtcaaggactcatccggccggagtaagtatttgtacaagagcaagttgtttaccagcgaactgggggtgactgagcacgtcgagggcgatccttgtaagtttgccctgtgggtgggccgaacccccacatcagataataaaatagtgctgaaggcctccagcattgagaacaagcaggactggatcaaacacattagggaagttattcaggaacgaactattcacttaaagggggctttgaaggagcctatacatataccaaagacagctcctgcgaccagacagaagggacgtcgcgacggcgaagacttggactcccagggggacgggtcttcacaaccggacacaatctccatagcgtcccggacttcccaaaacactctggactctgataagctgtcaggcgggtgtgaattaacggtcgttattcacgactttacggcctgcaactctaacgagctgaccattcgaagaggtcagactgtcgaggttctcgagcgcccccacgacaaaccagactggtgtcttgtgaggaccaccgacagatcaccagctgcagagggcctcgttccttgcgggtctctgtgcattgctcactctcgtagcagtatggagatggaaggcatcttcaatcacaaggactcactgtctgtatcatcaaacgacgcaagcccccccgccagtgtcgccagtctgcagccccatatgatcggtgctcagagcagcccaggacccaaaagaccagggaataccctccgcaagtggctgacctctccggtgagaaggttgtcctcaggtaaagcagacggccacgtgaagaaactagcccataagcataaaaagagccgagaggtccggaaatctgccgacgctggcagccagaaggattccgatgatagtgcagcgaccccccaggacgagaccgttgaagagagaggcagaaatgagggcctgtcctccggaaccctctctaagagctcttcctctggcatgcagtcctgcggcgaggaggagggagaggagggcgccgacgcggtccctttgcctcccccaatggctattcagcagcattcccttcttcagccagactcccaagacgacaaggccagctctcgactgctggtgcggcctacaagttcagagacccccagcgcagcggaactggtgagtgccatcgaggaactggtgaaatcaaagatggccttagaagaccgcccctcctcattgcttgtggaccaaggcgatagttcttctccttcgtttaaccctagcgataattctctcctgtcttctagttcccccattgacgaaatggaagagcggaaatcctctagcctaaaacgccggcactacgtgctgcaagaactcgttgagaccgagcgggattacgtgagggacctcggatatgtggtggaaggatacatggccctgatgaaagaggatggagtccctgacgatatgaagggcaaggacaaaatcgtattcggcaatattcatcaaatttacgactggcacagagacttttttctcggggaactagagaagtgcttggaggatcctgaaaagctcgggtctctgttcgtgaagcatgagcgcagactacatatgtatattgcgtactgccagaataaaccgaaatcagagcatatcgttagcgaatatattgacaccttcttcgaagaccttaaacagcgactcggacaccgcctgcagctgaccgacttgctgattaagcctgtccaacgtataatgaagtaccaactgttgctgaaggatttcctgaagtacagcaaaaaggcttcactggacactagcgagctcgaaagggccgtggaggtgatgtgcatagtgccacggaggtgcaacgacatgatgaatgtcggcaggttacaaggctttgacggcaagattgttgcccaaggtaagctgctattacaggataccttcctcgtcactgaccaggacgctggtctgttgcccagatgccgagaacgcagaatcttcctgtttgaacagatcgtcattttctctgagcctctggacaaaaaaaaggggttttccatgcctgggtttctgttcaaaaactcaattaaagtaagctgcctctgtctggaagaaaatgtggaaaacgatccatgcaagttcgccttgacatcacggacgggggatgtggtcgaaacctttatcctccattcttcatccccttctgtgaggcagacctggatccatgaaatcaaccagattctggagaaccagaggaacttcttgaacgctttgacaagccccattgagtaccagaggaaccatagcggcgggggtggtggtggcggtagcggaggcagcggcggggggggcggttcaggcggcggcggcgctccttctgggggtagtggccactcaggaggaccctccagttgtggtggagctccaagcacttcccgaagccggccttcgagaattcctcagccagtccggcaccaccccccagtgctggtgagcagcgcagccagcagccaggctgaggcggataagatgtctggcacctctactcctggcccttctctcccccctcccggcgccgctccagaagccggaccctcggctccaagtaggcggccaccaggtgcagacgccgaaggttcagagagagaggccgagccaatccctaaaatgaaagtcttagagtctccccgcaaaggcgccgccaacgcatcgggctcatcacccgatgcccccgctaaggacgcgcgcgccagtctgggaaccctgcctctggggaaacccagagctggcgcggcaagccccctaaatagtccactttcctctgcagtaccaagtcttggcaaggaaccattccccccttcttcgccattacagaaaggcggatcattttggtctagtatccctgcttcacctgcatcaagaccaggcagttttactttccctggggattcagactctctgcaaaggcagacgccacgacatgccgcacccggtaaggatactgacagaatgtcaacctgtagttcggcaagtgagcaatctgtgcagtcaacacagagtaatggctctgagtctagctcttctagtaacatcagcaccatgctggtgactcacgactataccgccgttaaagaggatgaaatcaatgtgtatcagggagaggttgttcagatactggcctccaatcagcagaacatgttcttggtgtttagggcagccaccgaccagtgtcccgccgcagagggctggatacccggtttcgtgctgggccacacctccgcagtgatcgtggagaatcctgacggtaccctcaagaaatccacatcatggcacacggctctccgcctgaggaagaagagtgaaaaaaaagataaagatggtaagagagaaggtaagttggagaacggctaccgaaagagtcgagaaggtctatcaaataaagtcagtgtcaaattgctgaatcctaattacatctacgacgtacctcccgagttcgtcataccgctttctgaggttacctgtgagaccggtgaaacagtcgtgctccgctgtcgggtgtgcggacgtccaaaagcatctattacatggaagggacctgagcacaacactctaaacaacgatggccactatagcatctcgtattccgatctgggggaggccacactgaagattgtaggcgtgactaccgaagatgatgggatttatacctgcatcgctgtgaatgacatgggctcagcgtcttcctcagccagcctgagagtgctgggaccgggcatggacggaattatggtcacatggaaggacaatttcgactccttctattccgaggtggccgagttgggacgggctaattggaacaattggtcaccgtattag

SEQ ID NO: 139026 - DNA, 8766 bp, synthetic construct
  misc_feature 1..8766: note = Description of Artificial Sequence: Synthetic coding sequence
  source 1..8766: mol_type = other DNA
atgtcgggatcctctggaggggcagctgcgccagcagcaagttccgggcctgctgcggcagcatctgccgcaggttctggctgcggtgggggggccggcgagggtgccgaggaagccgccaaagacctggccgatattgccgcattctttagatctggcttccgtaaaaacgacgaaatgaaagccatggatgttctccctatcttgaaagagaaggtcgcctatctaagcggcggcagagataaacggggagggccaatcctgactttccctgctcggagcaaccacgacaggatcagacaggaggatttacggcgcctgatctcctacctcgcgtgtatcccctcagaagaggtgtgtaagcgggggtttaccgtcatcgtggacatgcgaggatccaaatgggactcgatcaagcctttgcttaagattctccaggaaagtttcccttgctgcatccatgtggccctgatcataaaacccgacaatttctggcaaaagcagcgcacaaacttcggatctagcaagtttgagtttgagacgaatatggttagtctcgaaggcctgacaaaggtggtagatccaagtcagctgacgccagagttcgatggttgtctggagtataaccacgaggaatggatagaaattcgcgtggcattcgaggactacatctcaaacgccactcatatgctgagtagattggaggagctgcaggacattctcgcgaagaaagaactaccacaggacttagaaggcgcccggaacatgatagaggaacatagccagctcaagaagaaggtgatcaaagcccccatagaggacctggacctggaggggcagaaactcctgcaaaggatacagtccagtgagagcttcccaaaaaagaacagtggcagcggtaatgccgaccttcagaatctgctgccgaaggtgagcacaatgcttgatcgcctacactccacaagacagcaccttcatcagatgtggcatgtgcgcaaactgaagctggaccagtgttttcagttaaggctgtttgagcaggatgccgagaaaatgtttgactggattacccataataagggcctctttctcaatagttatacagagatcgggacatcccacccccacgctatggagctgcagacacagcacaaccacttcgccatgaactgtatgaacgtttacgtgaacatcaatcggatcatgagtgttgcgaacagacttgtggagagcggacactatgctagtcagcaaattcggcagattgctagccagctcgaacaagagtggaaagcctttgcagccgccttggacgagcggtctaccctcctcgacatgtcctcgatctttcaccagaaggccgagaaatacatgagcaatgtcgattcttggtgtaaagcctgcggagaagtagatctacctagcgagctccaagacctggaggacgctatccatcatcaccagggcatatacgagcacatcactttagcctacagcgaagtcagtcaagatgggaagagcttgctggataaattgcagcggccactgacaccaggatcctcagactctctcaccgcttcagctaactacagtaaagcagtgcaccacgtgctggacgtcatccatgaagtcctccaccaccagaggcagttggagaatatatggcagcaccgcaaggtgcgtttgcaccaaaggttgcagttgtgcgtatttcagcaggatgtgcagcaggtgctggattggattgagaaccacggcgaagcgtttctgagcaagcacactggggtcgggaagagcctccatagggcgagggctctccagaaacggcacgaggactttgaggaggtcgcgcaaaatacctacaccaacgccgataaactgctggaagcagctgagcagctggcgcagactggagaatgtgacccggaggaaatttatcaggccgcacaccaactggaagatcgaatccaggattttgtgagacgagttgagcagcgaaagatcctgttggacatgtcggtatccttccatacacacgtgaaagagctgtggacctggttggaagagttacaaaaagagcttttggacgacgtgtacgcggaatccgttgaagctgtgcaggacctaatcaagagatttggccagcagcagcagaccaccctgcaagtaaccgttaatgtgataaaggaaggggaggacttaatacagcagcttcgagattccgccatcagctctaataaaacacctcacaacagttctatcaatcacattgagactgtgttgcagcaactagacgaagcacagtcccagatggaggagttattccaagagagaaagatcaaactagagctgtttttgcagctgcgcatatttgaaagggatgcgattgatattatatccgatttggaatcctggaacgatgaacttagccagcagatgaacgatttcgatacagaagacctaacaatcgcagaacagcgtctccagcatcacgcagataaggccctcacaatgaacaatctcacattcgacgtcatccaccaaggccaggatctgttgcaatacgtgaatgaagttcaggcctcaggagtggagctgctgtgcgaccgcgatgtggatatggccacaagggtccaggatctgctggagttcctgcacgaaaagcagcaggagctcgatctggcggccgagcagcatcgaaagcatttagaacagtgcgtccaactgcgacatttacaggccgaggtcaaacaggtgctcggctggatcaggaacggcgagagcatgctaaacgccgggctcataactgcctcttcgcttcaagaggctgaacaactgcagagagagcatgagcagttccaacacgccattgagaagacccaccagtctgctctgcaagtccagcagaaggccgaggccatgttacaggcaaaccattacgacatggacatgatccgtgactgtgctgaaaaagtcgcttcccactggcaacagttgatgttaaaaatggaggacagattgaaactcgtgaatgcttctgtcgctttttacaaaacatccgagcaggtctgcagcgtactggagagcctggagcaggagtacaagcgggaagaggactggtgtggaggggctgataagttagggccaaactcggagaccgaccacgtgacccctatgatcagcaaacatctcgaacagaaagaagcattcttgaaggcctgcacccttgccaggaggaatgccgacgtgtttttgaagtatctacaccggaactcggtgaacatgccaggcatggtgactcatatcaaggcaccggagcagcaggtgaagaacattctaaatgaacttttccagcgcgaaaatagggtactccattattggaccatgaggaagaggagactcgaccaatgccaacaatatgtggtatttgagagaagcgcgaaacaagccctggagtggatccacgataatggcgagttctacctctcgacccacactagcactgggagttctatacagcacacccaggaattattaaaggagcacgaggaatttcagattacggcaaagcagacgaaggaacgagtcaagctcttaattcagctggccgacggcttttgtgagaaaggccatgctcacgcagccgaaatcaagaagtgcgtaactgccgtggacaagcgctaccgcgacttctcccttaggatggagaaatatcgcacatccttagaaaaagctctgggcatctcaagcgatagcaataaatcaagcaagtccttacagcttgatattattcccgctagcatacctggttctgaagtgaaactgcgggatgcagcgcatgagctgaacgaggagaagagaaaatctgcccggcgaaaggagtttattatggcagagttaattcagaccgaaaaagcctacgtgagagatctacgggagtgtatggacacctatctttgggaaatgacatcaggcgtcgaagaaatccccccaggtatcgttaataaggagcttattatctttggcaacatgcaggaaatttatgagtttcacaataacattttcctcaaagagttggaaaaatacgagcagctaccagaagatgtgggacactgctttgttacctgggccgacaaattccagatgtatgtcacttactgtaaaaacaagcctgactcaacgcagctcatcctggagcacgctggctcttatttcgacgaaatccagcagagacatggcctcgcaaacagcatctcctcctacttaattaaaccagtccagcggatcaccaagtaccagctgctgctgaaggaacttctgacatgctgtgaggagggcaaaggggagattaaagacggcctggaagtcatgctatcagtgcccaaaagggccaatgacgctatgcatctctctatgctggagggcttcgatgagaacatcgagtctcaaggtgaactgatcctgcaagagtcatttcaggtatgggatccaaagacactgataagaaaaggtcgagagaggcatctgtttctgttcgagatgtctcttgtgttttccaaggaggttaaagacagcagcgggcgatccaagtacctgtataaatccaaactgtttacctccgaactgggcgtgaccgagcacgtggagggagatccctgcaagttcgctctctgggtcgggaggactcccacgagcgacaataaaattgtcctcaaggctagttccatcgagaataagcaagattggattaagcacatccgagaagttatccaggaaagaacaatccatcttaagggcgccctcaaagagccaatccacatccccaagactgctcccgctacccggcagaaggggcggagggatggggaggacctggacagtcagggagatgggtcaagccagccggacaccatatctatcgcttccagaaccagtcagaacaccctcgacagcgacaaactctccggaggctgtgaactgaccgtggtgattcacgattttacagcctgtaatagtaatgaactgacgataagaagaggacaaactgttgaggttctcgagcgccctcatgataagccggactggtgtttggtacgaactactgaccggagccccgcggccgagggacttgtgccatgtggctccctgtgcatcgctcacagcagaagttctatggaaatggaaggcatctttaatcataaggactccctgtctgtgagctccaatgacgcctctcctcccgcttccgtcgcatctttgcaaccccacatgattggcgctcagtcgagcccgggccctaagcggccaggtaataccctccgaaagtggctaacttcccctgttcgcagactctcatccggcaaggccgacggccacgtcaaaaagctggcccataagcataagaagtcccgggaggtacggaaatcagccgatgctggatcccagaaagatagcgatgactcagcggctacgcctcaggacgagactgtggaggagagagggcgcaatgagggattaagcagtggaacgctgtcaaagagtagtagctcgggcatgcaatcatgcggcgaggaggagggtgaagagggagccgacgctgttccactccctccaccaatggccattcagcagcatagtttgttgcagcccgactcccaagacgacaaggcttccagccggctgctcgtgaggccaacttcttccgaaacgccatctgcagcagagttggtgtccgcaatcgaggaattggtgaagagcaaaatggcgctcgaggatcgtcctagcagtttgctggtcgatcagggcgatagttcctctcccagctttaaccccagcgacaattcactgctttcatcctcctctcctatcgacgaaatggaggagagaaagagcagctcactcaaaaggaggcactacgtgcttcaggagctggtggagacagagagggactacgtccgcgatcttgggtatgtcgtggaaggctacatggccttgatgaaggaggatggagtgcccgacgatatgaaggggaaggacaagatagtgtttggcaacatacatcagatctacgattggcacagggatttctttcttggagagctggagaagtgtctcgaagatccagagaagcttggaagcttgtttgtaaagcatgagcgaagactgcatatgtatattgcgtattgtcagaataaacccaagtcagaacatatagtgtctgaatacattgatacattcttcgaggacctgaagcagaggctcggacatagactccagctaaccgatctgctgattaagcctgtccaacgcatcatgaagtatcagctcctcctaaaggattttcttaagtactccaaaaaggccagccttgacacttctgaattggaacgcgcggtcgaagtgatgtgtatcgtgccccggcgctgcaatgacatgatgaatgtcggccgccttcaggggtttgacggcaagatcgtcgctcaggggaaactacttctgcaggacacattcctggtgacagaccaggacgctggccttctgcctagatgtcgggagcggaggatctttttatttgaacagatcgtcattttctctgaaccgttagacaagaaaaaaggcttctccatgccgggctttctctttaagaattcaatcaaagtgtcctgcctttgccttgaggagaacgttgagaatgatccctgcaaatttgcgttgacctctcggacgggcgatgtggtagagacttttatcctgcactcctcaagcccatccgtcagacagacgtggatccacgagattaaccagatcctcgagaaccaacgaaatttcttgaacgcactgacgtcacccatcgagtatcagagaaatcattccggaggaggcggtggcgggggatccgggggctcaggcggcgggggaggtagtggcggaggaggcgccccatccgggggcagcgggcattctgggggcccatcttcatgtggcggagcccccagcacttctaggagtcgcccttctaggattccccagccagtcaggcaccatcctcctgtcctcgtgtccagcgctgccagcagtcaggcagaagctgataagatgagcgagagcgaaagtagctcctcctccaacatctcaacgatgctggtaacccacgactatacagctgtgaaggaggatgaaatcaatgtgtatcagggggaggtcgtgcaaatcctcgcttccaaccagcagaatatgttcctggtctttcgggccgccacagaccaatgccctgctgccgagggatggattcccgggtttgtgctgggccatacttccgcagtcatcgtggagaatccagatggaacgttaaagaaaagcactagttggcatactgctttacgccttagaaaaaagtcggagaagaaggacaaggatgggaagagggagggcaaactcgaaaacggctatcggaagtctagggagggattaagcaataaggtgtctgttaaattgttgaaccccaactacatctatgatgttccacccgagttcgtcattcccttaagcgaggtgacctgtgaaacaggtgagactgtcgttctgagatgtcgtgtgtgtgggcgtcccaaagcttctattacgtggaagggaccagagcacaacactcttaacaatgacgggcattatagcatttcatattccgatttgggcgaggcaaccctgaaaatcgttggcgtgacaacggaggacgatggtatctacacatgtattgccgtgaacgacatgggcagcgcatccagctcggcaagtctacgggtactggggccgggtatggacggcatcatggtgacttggaaggacaatttcgattcattttatagtgaggtcgccgagctggggcggggacgattctcggttgtgaagaagtgtgaccaaaaaggcactaaacgagctgtggctaccaagttcgtgaataagaagcttatgaagcgggatcaagtgactcacgagttggggatcctgcagtccttacagcaccctctgttagtggggctcctggacacttttgagaccccgacttcttacattcttgtcttggaaatggctgatcaggggagactcctcgactgcgtggtgaggtggggctctctgaccgaagggaaaatcagggctcatttgggcgaagtgttggaagccgtaaggtacttgcataactgccgcattgctcatctggacctgaagccagagaacatactggtggacgaatccctggcaaaaccaaccataaagctggcggattttggtgacgctgtccagcttaacaccacgtattatatacatcaactactgggaaatcccgaattcgcagcccccgagatcatcctgggcaatcctgtttccctcacttctgatacgtggagtgttggggtgcttacatacgtgctactgtctggcgtgtcaccatttctcgatgactccgtagaggagacgtgtctgaatatatgccggctcgacttcagctttcccgacgattactttaaaggagttagtcagaaagctaaagagtttgtttgttttctgctgcaggaagacccagccaaacggcctagtgctgcgctggccctccaggagcagtggctgcaggccggaaacggcagaagtactggtgtcctcgatacatcaaggttgactagctttatcgaacgacgaaagcaccagaacgacgtgagaccgattagatctatcaagaattttctccagagtcggctgctcccaagggtgtag

SEQ ID NO: 139027 - DNA, 768 bp, synthetic construct
  misc_feature 1..768: note = Description of Artificial Sequence: Synthetic coding sequence
  source 1..768: mol_type = other DNA
atggccctagaagataggccttccagcctgctggtggatcagggtgatagcagctcgcctagtttcaatcccagtgacaatagcctgctcagcagtagctctccaattgacgagatggaggaaaggaaatctagctctctcaagcgaaggcactatgtgcttcaggagctggttgaaacggaacgagattatgtaagagatctgggctatgtagttgaaggctatatggctctcatgaaggaggacggagtgccagatgatatgaagggaaaagataagatcgttttcggcaatatccatcaaatctacgactggcatcgggacttctttctcggtgaactggaaaaatgcctggaagacccggaaaagctaggatccctgtttgtgaaacatgagaggcgactccatatgtacattgcctactgccagaacaaacctaagtccgaacacattgtttcggagtacatagatacctttttcgaagatctgaaacagagacttggccacaggttgcaactcactgacctcctgatcaagcccgtgcaaagaataatgaaataccagctgttacttaaggactttctgaaatacagcaagaaggccagtttggacacaagcgagctggagagggccgtcgaggtcatgtgtatcgtacctcgccgctgcaatgacatgatgaacgtcgggaggctgcagggatttgatggacgggtggtcgccctgtgtcatcgctttaaggaaacgttccgcgagatctgctggttctag

SEQ ID NO: 139028 - DNA, 1203 bp, synthetic construct
  misc_feature 1..1203: note = Description of Artificial Sequence: Synthetic coding sequence
  source 1..1203: mol_type = other DNA
atgaacggtcagctggacctttccgggaaactgatcatcaaggcccagctcggggaggacattcgccgaatcccgatacataatgaggacataacctacgatgaactggtgctgatgatgcaaagagtattccgtggcaagctgctctctaacgatgaggtcaccataaagtataaggatgaggacggggatctgatcaccattttcgacagtagcgacctgagcttcgcaatccagtgttcaagaattttgaaattaaccctgtttgtgaacgggcaaccaaggcccctcgaatcctcccaggttaaatatctgcgcagggagctaatcgaacttcggaacaaagtaaatcggctgctcgactctcttgagccccctggagagcccggcccctccaccaacattcctgagaacgacacggtggacggcagagaggaaaaatccgccagcgatagctctggaaagcagtcaacacaggtgatggcagccagcatgagtgcattcgaccccctgaagaatcaggacgaaataaacaaaaacgtgatgagcgcctttggtctgactgatgatcaggtctcaggcccaccatcagcgcccgctgaggatcgctcaggcacacccgattcaatagcttcaagcagtagcgccgcacatccaccaggagtccagcctcaacagcctccctacaccggagcccagacacaggcaggtcagattgagggacaaatgtatcagcagtaccagcagcaagctggctacggcgcccagcaaccccaggcaccacctcaacaaccacagcaatatggtatccagtacagcgcttcatactctcagcagacaggtccacaacagcctcagcaattccaggggtacggacagcagccgaccagtcaggcccccgcccccgctttttctgggcagcctcaacagcttccagcgcagcctccacagcaatatcaggcaagtaactatcctgctcagacctacactgcccaaaccagccagccaaccaactatacggtggcaccggcatctcaaccaggcatggccccctcgcagcccggtgcctaccagccacgcccagggtttaccagccttcccggctccactatgacccctccaccatccgggccaaatccgtacgccaggaatagaccccccttcggccaggggtacactcaacctgggccaggctacaggtag

SEQ ID NO: 139029 - DNA, 1101 bp, synthetic construct
  misc_feature 1..1101: note = Description of Artificial Sequence: Synthetic coding sequence
  source 1..1101: mol_type = other DNA
atgaatggccaattagacttatccggtaagctaattattaaggcacagctgggcgaagacattcggcgcatccccatccacaacgaggatatcacctacgatgagcttgtgttgatgatgcaacgcgtcttccgcggcaaactcctgagcaatgacgaggtcaccataaagtacaaagatgaggatggggacctgatcacgatatttgattcctccgacctgtcttttgcaatccaatgctcaaggatcctcaaattgaccctgtttgtgaacggccaaccccgaccgctggagagcagccaggtgaaatatctgcggagagaactgatagaactgcgcaacaaggtgaatcgactgctggattcactggaaccccctggtgagcctggaccaagcacgaacatccccgaaaacgatacagtagacggccgcgaggagaagagcgcctcagacagttccggcaaacagtcaacacaggtgatggccgcctctatgtcagcttttgaccccttaaagaatcaagacgagattaacaaaaacgtgatgtccgctttcggtctaactgacgatcaagtctcaggaccacctagcgctcccgctgaggatcggtccggcaccccagattctattgcctcgtcatcatccgcggcccacccgccaggggttcaaccacaacagccgccatatactggcgcccaaacccaggccggccaaatgtatcaacagtacagcaatagacctgccatggtccattccagccgaaggctgcacttatcttcactcaatagtatggttttctctatccaacaagccattgtctcccgcctggacctaaacaatctgtcctcatcacgggacatggcgagcaatcagctgcctagacatcaactgctccctttcttagtgtcattgaacaattgtctactgtctcggcattcctccactcggcgagctattatcctgcacaagctaacgcttcctaaactgctttccctcctgatcatcctgtggttgctgcccttgaatctcgaatggctgcaggccaacttgggtcctatcaaccaggatcaagtgctcctgcatttcctggaagttccttag

SEQ ID NO: 139030 - DNA, 474 bp, synthetic construct
  misc_feature 1..474: note = Description of Artificial Sequence: Synthetic coding sequence
  source 1..474: mol_type = other DNA
atgaatggtcaacttgacctgtctgggaagcttataatcaaggcccagttaggcgaagacatacgccggatcccaatccacaacgaagatataacttacgatgagctggtcctgatgatgcagcgggttttcagaggaaagctgctgagtaatgacgaagtgacaatcaagtataaggacgaagacggtgacctgattactatatttgacagctccgacctgtcgttcgcaatccagtgctcccgtattcttaagctgacactgttcgttaacggccagccccggcctttagagagttcccaggtgaaatatctcagaagagagcttatcgagttgcggaacaaggtcaacaggctactggacagccttgaacctcccggagagcctggaccctccacgaacattcctgaaaatgatactgttgatggtcgtgaggagaagagcgcctcagactcaagcggtaaacagtcgtag

SEQ ID NO: 139031 - DNA, 387 bp, synthetic construct
  misc_feature 1..387: note = Description of Artificial Sequence: Synthetic coding sequence
  source 1..387: mol_type = other DNA
atgaatggacagcttgatctgtctgggaagttaattattaaggcccagctcggcgaagatattagacggatcccaatccataatgaggatatcacctacgacgagctggtgctcatgatgcagagagtgttcagagggaagctcttgagcaatgatgaggtaactatcaagtacaaggacgaagatggcgatttaattaccatttttgatagcagtgacctcagctttgctattcagtgtagcagaattttgaaattgacactgtttgtcaacgggcaaccacggcctctggaatcctctcaggtcaaatatctccgccgagaattgattgaattgcgaaacaaagtgaacaggctgctcgactccttggagccgccaggggaatag

SEQ ID NO: 139032 - DNA, 546 bp, synthetic construct
  misc_feature 1..546: note = Description of Artificial Sequence: Synthetic coding sequence
  source 1..546: mol_type = other DNA
atgaatgggcagctggatctgagtgggaaactaatcatcaaggcccaattgggggaggatatccgtcggattccgatccataatgaggacattacatatgacgagctggttctgatgatgcagcgtgtgtttcgaggcaagctgttatctaacgacgaggttacaatcaagtacaaagacgaggacggcgacctgatcacgatcttcgactcatcagatctgtccttcgcgattcagtgttccagaattctcaaacttactctgttcgtcaatggacagccccggcctttagaaagtagccaggttaaatatctacggcgggagctgattgagctgaggaacaaagtgaatcggctacttgactcactcgaacccccaggcgaacctggcccaagtactaacatccctgagaatgacactgtagacgggcgagaggaaaagtcagctagcgacagttccggtaaacagtccacgcaggtcatggccgcttccatgtccgcctttgacccgctcaagaaccaagatgagattaacaagaatgtctag

SEQ ID NO: 139033 - DNA, 1203 bp, synthetic construct
  misc_feature 1..1203: note = Description of Artificial Sequence: Synthetic coding sequence
  source 1..1203: mol_type = other DNA
atgaacggtcagctggatctgtcaggaaagctgatcatcaaggcgcagctgggagaggatatcaggcggattccaattcacaatgaagatattacctatgacgagctggtgctcatgatgcaacgggtgttccgggggaaactactatctaacgatgaggtcactattaagtacaaggatgaggatggtgatctaatcactatcttcgactcatccgatctgtcctttgccatccagtgctctaggatcctgaagctgactctctttgttaacggacagcccagacctctcgaaagttcccaggtaaaatatcttcgaagagagttgatcgagctaaggaataaagtgaataggttgttagactctctggagccacccggggagcccggccccagcacgaatatcccagagaacgacacggtcgacgggcgggaggaaaagtcagcctcagactcatccgggaaacaaagcacacaggtgatggcggcaagcatgtcagctttcgacccactgaagaaccaggacgagataaacaagaatgtgatgagcgccttcggattaaccgacgatcaggtcagcggaccaccatccgcacccgcagaggatcgtagcgggactccagatagcatagcttcatccagcagcgcagctcaccccccaggggtccaacctcagcagccaccttatacgggcgcccaaactcaggcggggcagattgaggggcagatgtaccagcagtaccagcaacaagccgggtacggggcccaacagcctcaggcacctccccagcagccacagcagtatggcattcaatattcagcctcatatagccagcagacagggccccagcaaccacagcagttccaggggtatgggcagcagccaacctcccaggcccccgcgcccgctttttctgggcagccacagcaactccccgctcagccgccccaacaatatcaggcctccaattaccctgcccagacctatacagctcagactagccagcctactaattatacagtagctccggcctcccaaccaggcatggctccatcccagcctggcgcctatcagcctagaccaggatttaccagcttgcccggcagtaccatgacacccccgcctagcggccctaacccctacgctcgcaaccgccccccctttggacagggttacacccagccgggacccggctacaggtag

SEQ ID NO: 139034 - DNA, 1191 bp, synthetic construct
  misc_feature 1..1191: note = Description of Artificial Sequence: Synthetic coding sequence
  source 1..1191: mol_type = other DNA
atgaatggccaactggatctgagcggaaaattaattattaaagcacagctcggcgaggacattaggagaattcctattcacaatgaagatatcacatacgatgagcttgttctcatgatgcagcgggtctttaggggtaaactcctgagcaatgacgaggtcaccattaagtacaaggacgaagatggggacctcatcaccatcttcgattcctccgatctcagttttgccatccaatgttctcggatacttaaactcaccctatttgtaaacgggcagcctcgacctctggagtcatcacaggttaaatatcttaggagggagctcatagaattaaggaataaggtgaatcgtcttcttgactccttggagcctccaggggagccaggtccttctactaacatacctgagaatgacactgtggacggaagggaggagaagtctgctagcgactccagcgggaagcagtcgacacaagtaatggccgccagcatgtcagctttcgatccactgaaaaatcaggacgagattaacaaaaatgtcatgtccgcattcggactgaccgacgaccaggtttcaggccccccttctgcacccgcagaggaccggtccggtacaccggacagcattgcttcctcgtcctcagccgctcaccccccgggcgtgcagccacagcaacctccatacacaggcgcccagacccaggccggccagatgtatcagcaataccagcagcaggctggatacggtgcccagcagcctcaggcccctccccaacagccccagcagtacggcatccagtactcagcgagttattcccagcagacgggcccgcagcagccacagcagttccaggggtatgggcaacagccgacatcccaggccccagcccctgcatttagtggacagccacaacagctgccggcccagccacctcagcagtaccaggcatcgaattaccctgctcagacttacaccgcgcagaccagtcagccaactaactacacagtcgcacctgcctcacagccaggcatggccccctcccaacctggtgcatatcagccccggcccggctttacgtccctcccaggatccaccatgacccctcctccttctggccctaacccctacgcccgtaataggccaccctttggccagggctacactcagcccgggccggggtataggtag

SEQ ID NO: 139035 - DNA, 729 bp, synthetic construct
  misc_feature 1..729: note = Description of Artificial Sequence: Synthetic coding sequence
  source 1..729: mol_type = other DNA
atgggggaagcctcccccccggcaccagcccggaggcacttgcttgtgctgttactgctgttaagcactcttgtcatccccagcgccgcagcgcccatccatgacgctgatgcccaggagtcctccctgggtctaaccggcctgcaatccctgctgcagggtttttctcggttgtttctgaaagggaatctgctgaggggtattgattcacttttttctgctcccatggattttaggggactgcccgggaactaccataaggaagaaaaccaagagcatcagttgggcaacaatactttgagcagccatctccagattgacaaaatgaccgataacaagactggcgaggtgctcatctctgagaatgtcgtagcatccatccagcccgctgagggctcattcgagggggacctgaaggtgccacgcatggaagagaaggaggccctggtgcccatccagaaagccacagattcctttcacaccgagctgcacccacgcgttgccttttggatcattaagctgccaaggagaaggtcacatcaggacgccctcgagggcgggcattggctgtcagaaaaaaggcaccgcctccaggcgatccgagacggacttaggaaggggacccacaaggacgtgttggaagaagggacagaaagttcttcgcattcccggctttctcccagaaaaacccacctgctatacatcttgcgacccagtagacagctatag

SEQ ID NO: 139036 - DNA, 1980 bp, synthetic construct
  misc_feature 1..1980: note = Description of Artificial Sequence: Synthetic coding sequence
  source 1..1980: mol_type = other DNA
atgcaggggagcagcctgtggctgtccttgaccttcagatcagccagagtgctttctcgcgcccgcttcttcgaatggcagtctcctggcttacccaacaccgctgccatggagaatggtaccggcccttacggtgaagagaggccacgggaggtgcaggagaccaccgtgaccgagggggccgcaaaaatcgcctttccaagtgccaatgaggtgttttacaatcctgtgcaggagttcaatcgggacctcacttgtgccgtcattaccgagttcgcccgaatccagctgggtgcaaagggcattcagattaaggtgcctggagagaaggatacccagaaagttgtggtggatctcagcgaacaggaggaggagaaagttgagctgaaggagtctgagaacttagcaagcggagatcagccacgcactgctgctgtcggagagatctgcgaggaaggcctccatgttctggaaggcctggccgcaagtggactccgaagcatcagattcgcactggaggtcccggggctgcgtagtgttgtcgcgaacgatgcctccacacgcgcggttgatctgatccgacgaaatgtccagctaaatgacgtggcccacctagtgcagccctcccaggccgatgccaggatgttaatgtaccagcaccagagagtgtccgaacgcttcgatgtcattgaccttgacccatatggatctcccgccacctttctggatgctgccgtgcaagctgtgtcagagggaggactgctgtgcgtaacatgtacagatatggcggttttggcaggtaattctggtgaaacttgctattcgaagtacggagccatggccctcaagtctagggcatgtcatgagatggcactgaggatcgtactgcattccctcgacctccgagcaaattgttatcagagattcgtcgtgccactcctcagcatcagtgccgacttctacgtgagggtgttcgtccgagtgttcacaggccaagcgaaagtgaaggcctccgcatctaagcaggcgcttgtatttcagtgtgtcggctgtggcgcatttcatctgcagcggctgggaaaggcaagtggtgttcctagtgggcgcgctaagttttctgccgcatgtggacctcctgtgactcccgagtgtgaacactgcggccaaagacaccagctgggcggaccgatgtgggctgaaccaatccacgatctggatttcgttggtagagtcctcgaggcggtttctgcgaatcccggtcgtttccatacctcggagagaatccgcggagttctcagcgttataaccgaagagctaccagacgtgcctctttattataccttggaccagttgtcctccaccattcattgtaacacaccgtcgctcctccagctgagatccgctctgcttcacgctgactttcgagtgagtctcagtcatgcatgcaaaaacgcagtcaagacagacgctccggcatccgccttatgggacattatgcgctgctgggaaaaagaatgtccggtgaagcgagaacgcttatcggagacaagtcctgctttccgcatactgagtgtcgagcctagactgcaggccaacttcactataagagaggatgccaacccatctagccggcagaggggtctgaaaagatttcaggccaaccctgaagcgaactggggaccacgaccccgtgcccggccgggcggaaaagcggctgatgaggccatggaggagaggaggcggctattacaaaacaagaggaaggagccgcctgaggacgtcgcccagcgggccgcacgcctcaagacattcccatgtaagcggtttaaggaggggacgtgtcagcgcggcgaccagtgctgctactcccatagtcctcctaccccaagagtatccgcggatgccgctccagactgcccggaaactagcaaccagacaccaccaggcccaggtgccgccgccggccctgggatcgactag

SEQ ID NO: 139037 - DNA, 1980 bp, synthetic construct
  misc_feature 1..1980: note = Description of Artificial Sequence: Synthetic coding sequence
  source 1..1980: mol_type = other DNA
atgcagggcagtagcctgtggctgtcattgacattcagatcagcgagggttctgtcgagagcacgctttttcgaatggcaatctcccggactcccaaatactgccgctatggagaacgggacgggaccctacggcgaggagaggcctagggaggtgcaggaaacaacagttacagaaggcgctgctaaaattgcctttccgtctgccaacgaagtgttctataatcccgttcaggaattcaatcgggatttgacctgcgccgtgatcacagagttcgctcggattcagttaggcgccaaaggaattcagatcaaagtacctggcgagaaggatacccagaaggtggttgtggatttgtcggagcaggaggaggaaaaggtcgagctcaaggagagcgagaaccttgcctctggcgatcagccacggacagctgctgtgggagaaatttgcgaagagggacttcatgtgctcgagggtttggcagcctctgggctcaggagcataaggttcgcactcgaagtgcctgggctgcggagcgtggtcgcgaatgacgccagcacccgggcagtcgatcttatccgaaggaatgtacagctgaacgatgtagcccatctcgtacagcccagccaagccgatgcacgaatgctcatgtaccagcatcagagggttagcgagcgcttcgatgtgatagacctcgacccatatggttctcctgctaccttccttgatgctgctgtgcaagcagtgtcagagggaggcctactgtgcgtcacatgcacggatatggctgttcttgctggcaattccggagaaacttgctactctaaatatggggccatggccttgaagtcaagggcttgtcacgagatggccctgcgaatcgtcttacattcccttgatctgcgcgccaactgttaccaaaggttcgtcgtgccgctcctaagtatttcagccgacttctacgtgagagtctttgtgagggttttcactggtcaggccaaggtgaaggccagcgcaagcaagcaagcactggtctttcagtgtgtaggatgcggagcgttccacttgcaacgactgggcaaggcatccggcgttccatctggacgggccaaattctctgccgcatgcgggccccccgtcacaccagaatgcgagcactgtggccagaggcaccagctcggggggccaatgtgggccgagcctatacatgacctggatttcgtcggcagggttctggaggctgtgtctgccaatcccgggcggtttcacacaagtgagcgaatccgcggggtgctctctgtcattaccgaggagttgcccgatgtcccactgtactatacgctggaccagttgtcttcaacaattcactgtaacacgccaagccttcttcagttgagaagcgctcttctccacgccgactttcgtgtctctttgagtcatgcttgtaaaaatgccgtgaagactgatgcacctgcatcagcactctgggacattatgaggtgctgggagaaggagtgccccgtgaaaagggaaaggcttagcgaaacatcccctgcatttcggatcctatcggttgaaccgaggctgcaggccaactttaccataagagaggacgctaatccaagttccagacaacgcgggctgaaacgctttcaggccaatcctgaggctaactgggggcctcgcccaagggctaggccggggggcaaggctgcagatgaagctatggaggaaagacggcgtctgcttcagaataagaggaaggaaccacccgaagatgtggcccagcgcgcagcaaggctgaagacctttccatgcaagcgatttaaagaaggcacttgtcaaagaggggatcagtgctgttattctcattcccctcctactccacgggtctctgccgatgcggcccctgactgtcccgaaacctctaaccagacgccgcccggacctggagcagcggctggacctgggatagactag

SEQ ID NO: 139038 - DNA, 1878 bp, synthetic construct
  misc_feature 1..1878: note = Description of Artificial Sequence: Synthetic coding sequence
  source 1..1878: mol_type = other DNA
atgtccgagaatctggacaatgagggaccgaaaccaatggagtcttgcggacaagaaagtagtagcgccctttcatgccctaccgtgtctgtgccacctgctgcccccgccgcccttgaagaggtggaaaaggagggggctggcgctgcaacaggacctggtccgcaacctgggctttattcctatatccgcgacgacctatttacgagcgaaatatttaaattagagctgcagaacgtgcctagacacgcttcattctctgacgttagaaggtttctggggcgcttcggtttacaaccacataaaactaagctcttcggacagcctccatgcgcgtttgtcacttttcgatccgccgctgaacgggataaagctctccgagtgctgcatggagctctctggaaaggcagacctctgagcgtgaggttagctagaccaaaagcagatccaatggcgcgacggcggcgccaggagggggagagcgagccacccgttaccagagtcgccgatgtcgtgacacctctgtggacagtgccgtacgctgagcaactggagagaaagcagctcgagtgcgagcaggttctgcagaaactcgcaaaggagattggatcaaccaacagggccctgctgccctggctcctggagcaacggcacaaacataacaaagcatgttgccctctggaaggagtccgcccctcacctcagcagacagagtaccgaaacaagtgcgagttccttgtcggagtgggcgtggatggcgaagataacactgttgggtgccgactgggcaagtacaaggggggcacatgcgctgtggccgctcccttcgacactgttcatatccccgaagcgacaaagcaggtggtcaaggcctttcaggaatttatcaggagcacgccatactctgcctacgatcccgagacatacactgggcactggaaacaactgacagtacgcacaagtagacgacaccaagcaatggcaatcgcatacttccacccccaaaaactctcccccgaggagctggcagaattgaagacttccttggcccagcactttacagccggcccaggccgtgccagcggagtaacctgcctgtactttgtggaagaaggacaacgcaagacgccttctcaggaaggactccctcttgagcatgtagccggggaccgctgcatccatgaggatctcctgggcttgactttccgaattagccctcacgctttcttccaggtcaatactcccgccgctgaagtgttgtacaccgtgatccaagactgggcgcaactggatgcaggatccatggtgttggacgtgtgttgcggaactgggactattggcctggcactcgcacgcaaggtgaaacgcgtgatcggagtggagctgtgcccggaggccgtggaagatgccagggtgaacgcgcaggataacgagctctccaacgtggagtttcactgcggcagggctgaagacttggttccgacactggtatctagactggcatcccagcacctcgtcgctatcttagatccgccccgtgctggcctgcactccaaagtgatcctcgccattaggagggccaagaacttgcgccgacttctgtacgtgtcctgcaatccccgggcagccatgggcaattttgtcgatttatgccgggccccctcaaatcgggtcaagggcatcccattccgcccagttaaggctgtggcggtcgatctgtttcctcagactccacattgtgagatgctcatcctgttcgagcgggtggaacatcccaatggtaccggcgtcctgggacctcacagccctccagctcagcccacccctggcccccctgacaatacactccaggagacgggtacattcccatcatcctag

SEQ ID NO: 139039 - DNA, 1878 bp, synthetic construct
  misc_feature 1..1878: note = Description of Artificial Sequence: Synthetic coding sequence
  source 1..1878: mol_type = other DNA
atgtcggagaatttggacaatgaggggcccaaaccaatggaaagttgcgggcaggagagcagcagtgcacttagctgccctacagtttccgtgccccccgcagcccctgcagcactggaggaagtcgagaaagaaggtgccggcgccgcaaccggaccaggccctcagcccggcctgtactcttacattagggatgaccttttcacctcagagatctttaaactggaactgcaaaatgttccgcgacatgcctcattcagcgacgttagaaggtttctgggtcggttcggcctccagcctcacaaaaccaagctgtttgggcagcccccctgtgcctttgtaacattccgtagcgccgccgagcgggacaaggccctgcgcgtcctgcacggtgctctgtggaagggaagacccctttctgtgcggctggctagacccaaggccgatccaatggcccgaagacgccgtcaggaaggcgaatccgaacctcctgttacgagagtggctgatgtggttacccctttgtggacagttccatacgctgaacagcttgaaaggaagcaacttgagtgcgagcaagtgctccagaagctggcaaaagaaattggatcaaccaatagggccctgttaccctggttgctggaacagcgtcataagcataacaaagcgtgctgccctcttgagggtgtccgaccatcaccgcaacagactgagtacaggaataaatgcgagtttcttgttggcgttggggttgacggagaagataacacagtgggctgtcgtttggggaagtacaagggcggaacctgcgccgtcgccgcgcctttcgatacagtccatatacccgaagctaccaaacaggtggtaaaagctttccaggaatttatccggagtacgccttacagtgcttatgatcctgagacatataccgggcattggaagcagcttacagtgcggacgagccgtaggcatcaggccatggcgattgcttacttccatccccagaaactgtctcctgaggagctggctgagctcaagacgtcactagctcagcattttacggctggaccaggacgggcttctggggtcacatgcctgtatttcgtcgaagagggtcagcggaagaccccctcccaagaagggctgcctctggaacacgtggctggggaccggtgcatacacgaagatctgctcggcctgaccttcaggatctcacctcatgccttctttcaagtaaacacccctgccgcagaggtgctctacacagtgattcaggattgggcgcaactggacgcaggcagcatggtgctggatgtgtgctgtggaacgggcaccattgggctggcgctggcacgcaaagtgaagcgtgtgattggggtcgagctgtgcccagaagcggttgaagacgcaagagtgaatgcacaagacaatgaactgtcaaatgttgaatttcactgcggacgtgcggaggacttggtgcccactcttgtctcccggctcgcctctcaacacctagttgctatcctggatcctccgcgagctgggctccattcgaaggtcattctagctataaggcgcgccaaaaatttgcggcgcttgctctatgttagctgcaaccctagggccgcgatgggaaattttgttgacctgtgccgagccccatccaatcgagtgaaggggattcctttccgcccagtcaaagcagtggcagtggatctgtttccccagactccccattgcgaaatgctgatactatttgagagggtggaacaccctaatggtactggtgtacttggacctcactccccacctgctcagcctaccccaggacctccagacaatacgctacaagagactggaacgtttccatcgagctag

SEQ ID NO: 139040 - DNA, 1689 bp, synthetic construct
  misc_feature 1..1689: note = Description of Artificial Sequence: Synthetic coding sequence
  source 1..1689: mol_type = other DNA
atgagcgaaaatctcgacaatgagggccccaaacccatggaatcgtgtggacaggagtcatcatctgccttatcttgtcctaccgtatcagtgccacctgctgctcctgccgccctggaagaggttgagaaagagggggcaggcgccgcaactggccccggaccgcagccaggtctgtactcctatatccgggatgatctcttcacctctgagatcttcaagctggaactgcagaacgttcccaggcacgcctcattcagcgacgtgcgccggttcttagggcggttcggacttcagccccacaaaacgaagctgttcgggcagcccccctgcgccttcgtgacattcagaagtgctgctgagcgcgataaggcactgcgggtactccatggtgccttgtggaaaggccggccattgtcggttcgcctggctcgtcccaaagccgaccctatggcccgacggcgccgccaggagggggagtccgagccccccgtcacgcgggtggccgacgtggtgacacctctttggactgtaccttatgccgagcagctcgaacgaaaacaactcgagtgtgaacaggttctgcagaagttagccaaagaaatcggctcaacaaatcgagccctgctaccctggcttttggagcagcggcataagcacaacaaggcctgttgtcccctcgaaggggttcgcccctcaccccagcagacagaataccggaacaagtgcgaattcctagttggagtgggagtggatggggaggataataccgtgggctgtaggctcgggaagtataaaggcggcacctgcgccgtcgccgccccattcgatacagtgcacatccccgaagccactaaacaggttgtgaaggccttccaggaatttattcggagtaccccttatagcgcctatgatcctgaaacctatactggccactggaagcagttgaccgtgcggacaagccgccgacatcaagccatggctattgcttatttccaccctcaaaagttgagtccagaagagctggccgaactgaaaaccagtctcgcgcagcattttacagcgggtcctgggagagcgtcaggtgtgacatgcctgtacttcgtagaagagggtcagaggaaaacaccctcccaagaggggttgcccctggaacacgtggccggggaccgttgcatccatgaagatctcctgggtctcacctttcggatctctccgcatgctttcttccaggttaatacacctgctgccgaggtgctgtatactgtgattcaggattgggcccagttagatgccgggtctatggtgttggacgtttgctgtggaactggcactatcggccttgcgctggccagaaaagtaaaacgtgtgataggcgtagagctgtgtccagaggcagtggaagacgctagggtcaacgcgcaggacaacgagttatctaacgtggaatttcactgcggaagagctgaagatctggtaccaacccttgtatcccggctagcatcgcagcatctggtagctatccttgaccccccccgagctggcttacactcaaaagtcattctggccatccggcgcgccaaaaacctgaggaggttactttacgtgagctgtaaccccagggctgctatggggaatttcgtcgatgccccgctctttccaccacaacctcttcaatctccaatctag

SEQ ID NO: 139041 - DNA, 1530 bp, synthetic construct
  misc_feature 1..1530: note = Description of Artificial Sequence: Synthetic coding sequence
  source 1..1530: mol_type = other DNA
atggtgctctggatcctatggcgacctttcggcttttcgggccggttcctgaaactggagagtcatagcatcactgagtcaaagagcctaattcctgtggcatggacatcgctgacacagatgctgttggaagcccctggtatcttccttctcgggcagagaaagagattctcaaccatgcctgagactgagactcacgaacgggaaaccgagttattcagtcctccatcggatgttagagggatgacaaagctggatcgaactgcttttaaaaagactgttaacattccggtgctgaaggtgcgcaaggagattgtgtcgaagctcatgaggtctctgaagcgggctgctctccaaaggcccggcattaggagggttatcgaggaccccgaagacaaagagagcaggctcatcatgcttgatccatataagatctttacccatgacagctttgagaaagcagagctgtcagtgctggaacaattaaacgtgagtcctcagatctccaaatataatctggaactcacgtacgaacacttcaaatccgaagagattttacgcgccgttctgcccgagggacaagatgtcacctccggatttagccgaattgggcatatagcacacctcaaccttcgcgaccatcaattgagcttcaagcatctaatcggccaggttatgatcgacaagaacccaggaattacaagcgcagttaataagattaataacatagataatatgtaccggaattttcaaatggaagtgctctctggtgagcagaacatgatgactaaggtccgagagaacaattacacctatgagttcgacttctcgaaggtgtactggaatccccgcctgtctacggaacacagtaggatcaccgagctcctgaagcccggagacgttttgtttgacgttttcgctggagtgggcccatttgccatccctgtcgctaagaagaattgtaccgtgtttgcaaacgatctaaacccagagagccataagtggttgctctataattgtaagctgaacaaggtggaccagaaagtaaaagtgtttaatttggacgggaaggatttcctgcagggtcccgtgaaggaggagttgatgcaactcctcgggctatccaaggagcggaagcctagtgtgcacgtggtgatgaacctgccagctaaggctattgagttcctcagtgctttcaagtggctccttgatggccagccatgtagcagtgaattcttaccgattgtccattgttactccttcagcaaggatgcaaaccctgcagaagatgtgcgtcagagggccggcgccgttctgggcattagtctcgaggcttgtagttccgtgcacctggtgaggaacgtggctcccaacaaagaaatgctttgtatcactttccaaatccccgccagtgtgctatataaaaatcaaacacgcaatcccgaaaaccatgaggatccccctttgaaacgccagcggaccgcggaggcattctctgacgaaaagacgcagattgtttctaatacctag

SEQ ID NO: 139042 - DNA, 1266 bp, synthetic construct
  misc_feature 1..1266: note = Description of Artificial Sequence: Synthetic coding sequence
  source 1..1266: mol_type = other DNA
atgcaggcccttagacatgttgtttgcgctctgtccggaggcgtggattccgccgtcgcagctctcttgcttagaaggcgaggctaccaggtgaccggtgtgtttatgaaaaattgggactcactcgatgagcacggagtttgtacggctgataaggactgtgaagatgcctacagggtttgccagatattggatattccctttcatcaggtgtcctacgtcaaagaatactggaacgacgttttttccgatttcctgaacgagtatgagaagggacgaacaccgaatcctgacatcgtttgtaacaagcacatcaaattttcctgtttttttcattacgctgtggataatctgggagccgacgcaatcgctactggtcactacgctagaacttcgcttgaggacgaggaagtgttcgagcaaaaacacgtcaagaagccggagggtttgtttagaaatcggtttgaggtcaggaatgccgtgaagctattgcaggcagccgatagcttcaaggaccagaccttttttctgtcgcaggtttcgcaggacgcattacggaggactatttttccactgggcgggcttaccaaggagtttgtaaagaagattgccgccgagaacaggttgcaccacgtgttgcaaaagaaggagagtatgggaatgtgtttcattgggaagcgcaacttcgaacactttctgctgcaatatctgcagccacggcctgggcactttatttccatagaggataataaggtcctgggaacacacaagggctggtttctgtatacactcggacagagagcgaatatcggcgggctgagggaaccctggtacgtcgtggaaaaggacagcgttaaaggagacgtgttcgttgccccccgcactgatcaccccgccctgtatcgagatctactgcgaacctcaagggtacattggatagccgaagagccgcctgcggcactggtgagggataagatgatggagtgccacttccggttccgccaccaaatggcgctggtaccatgcgtcctcactctgaatcaggatggtactgtgtgggttaccgccgtccaagccgtgagggccttagccacaggacagtttgccgtgttttataagggggatgagtgcctcggctccggtaagatcctacgtttaggcccatccgcttataccttacagaagggacaaagaagggcaggtatggccaccgaatctccctcagacagtcctgaagacggacctggcttgagtcctcttttgtag

SEQ ID NO: 139043 - DNA, 300 bp, synthetic construct
  misc_feature 1..300: note = Description of Artificial Sequence: Synthetic coding sequence
  source 1..300: mol_type = other DNA
atgcaggcgctcaggcacgtggtgtgcgcactttccggcggtgtggatagcgctgttgccgccctgcttctgagaaggaggggctaccaggttacaggcgtcttcatgaagaattgggatagcttagacgagcacggagtgtgcaccgccgacaaagactgcgaggatgcttatagggtgtgccaaatactggacatccccttccaccaggtttcctacgtgaaggagtactggaacgacgtgttccggggacggtgtcattgtcatcgatccctgtgcaagaattttcccggccggtag

SEQ ID NO: 139044 - DNA, 396 bp, synthetic construct
  misc_feature 1..396: note = Description of Artificial Sequence: Synthetic coding sequence
  source 1..396: mol_type = other DNA
atgaagaattgggattcgttggatgaacatggtgtatgcacggccgataaggattgtgaagacgcttaccgtgtgtgccaaatcctggatattccattccatcaggtaagctatgtcaaagagtactggaacgacgttttttcagacttcctgaacgagtatgaaaagggtcggacgccaaatcccgacatcgtgtgcaacaagcatatcaaattttcctgcttttttcactatgctgtggataatttgggcgccgatgccatcgctactggccactacgcaaggacgtccctagaggacgaggaggtgttcgaacagaaacacgtgaagaaacctgagggcctgttccgcaatcggtttgaggttcgcaatgccaggttccctcgcatgccctag

SEQ ID NO: 139045 - DNA, 300 bp, synthetic construct
  misc_feature 1..300: note = Description of Artificial Sequence: Synthetic coding sequence
  source 1..300: mol_type = other DNA
atgcaggcgctgaggcacgtggtttgtgcactgtctggcggcgtcgattccgcagtcgccgctctgctcctccggcgacggggctaccaagtcaccggcgtgttcatgaagaattgggattccttggatgaacacggcgtgtgcaccgccgataaggattgcgaggacgcatatagagtgtgtcaaatcttggacatcccattccaccaggtgtcctacgtcaaggagtattggaacgatgtatttcgcgggcggtgccactgccaccggagcctctgtaagaactttcctggcaggtag

SEQ ID NO: 139046 - DNA, 300 bp, synthetic construct
  misc_feature 1..300: note = Description of Artificial Sequence: Synthetic coding sequence
  source 1..300: mol_type = other DNA
atgcaggcattaaggcacgtggtgtgtgctctgtcagggggcgtggacagcgctgtggctgctctgctgcttcggcgtagaggctaccaagtaacgggcgtctttatgaagaactgggatagcctggatgagcacggtgtttgcacggccgacaaggattgtgaagacgcgtacagagtgtgtcagatcctcgacatacccttccatcaggtctcttatgtgaaggagtactggaatgacgttttccggggccggtgccactgtcaccgtagcctctgcaaaaattttccagggagatag

SEQ ID NO: 139047 - DNA, 300 bp, synthetic construct
  misc_feature 1..300: note = Description of Artificial Sequence: Synthetic coding sequence
  source 1..300: mol_type = other DNA
atgcaggccttgcgccacgtggtttgcgcgctctctggaggagttgattctgccgtggctgcgctcttgcttcggagaagaggatatcaagtgactggcgtctttatgaagaattgggacagtttagacgaacacggcgtgtgtactgccgacaaggactgcgaagacgcataccgtgtgtgtcagattctggacattccgttccatcaggtgagttacgttaaggagtattggaacgacgtgttccggggacggtgtcactgccatagatccctgtgcaagaatttccccggtcgctag

SEQ ID NO: 139048 - DNA, 501 bp, synthetic construct
  misc_feature 1..501: note = Description of Artificial Sequence: Synthetic coding sequence
  source 1..501: mol_type = other DNA
atgcaggccctgaggcatgtcgtctgtgctctcagtggcggcgtggattcagccgtcgcagccctgctactcagaaggcgaggctaccaggtgaccggagtctttatgaagaattgggatagcctggatgaacacggggtgtgcactgcggacaaagactgcgaggatgcctaccgcgtgtgtcaaattctggacatcccttttcatcaggtgagctatgttaaagagtactggaatgacgtcttctcggactttctgaatgaatacgagaagggcagaacccctaaccccgatattgtgtgtaataaacacattaaattctcttgcttcttccactatgcggtcgacaacctgggagccgacgcaattgctactggccactatgcaaggacgtcgctagaggatgaagaggtctttgaacagaagcatgtcaagaaaccagaggggttgttcagaaatcggttcgaagttaggaatgccagatttccacgcatgccttag

SEQ ID NO: 139049 - DNA, 1038 bp, synthetic construct
  misc_feature 1..1038: note = Description of Artificial Sequence: Synthetic coding sequence
  source 1..1038: mol_type = other DNA
atggaaccactccgagtgctagaactgtactccggtgttggcggaatgcaccatgctctgcgcgagagctgtatccccgcacaggttgtcgccgctattgacgtgaatacagtggctaatgaagtgtataaatacaacttccctcatacacagctgcttgctaagactatcgaggggatcacgctcgaggagtttgacagattgtcattcgatatgattctgatgtccccgccttgtcaaccgtttacacgggacctcctcatacaaacaatcgaaaactgcggattccagtaccaggagttcctgcttagtccaacaagtctaggaatccccaactccaggctgcgctacttcttgattgctaagctccagtcagagccactaccttttcaggctccagggcaggtcctgatggagtttccaaagatcgagagcgtacacccccagaaatacgcaatggacgttgagaacaagattcaggaaaagaacgttgagccgaacatcagctttgacggctccatccagtgttcaggtaaggatgctatattatttaagcttgagactgccgaagaaatccaccggaaaaatcaacaggactcagacctgagcgtgaagatgttgaaggattttttagaggacgataccgatgtaaaccagtatctactgccaccaaagtcccttttgagatacgccctgctgctggatattgtacagcctacttgccgacggtccgtgtgcttcacaaagggatacgggtcttacattgaaggaaccggttccgtgcttcagacagctgaggatgtacaagtcgagaatatatacaagtcgttgaccaacttatcgcaggaggaacaaattacaaagctcctgatactgaagctccggtattttacgcccaaggagatcgctaatcttctgggattcccaccagaattcggattccccgagaagattacagtaaagcagcgctacaggctcctcggtaactcactcaatgtgcacgtggtggccaagttgatcaaaattctgtacgagtag

SEQ ID NO: 139050 - DNA, 216 bp, synthetic construct
  misc_feature 1..216: note = Description of Artificial Sequence: Synthetic coding sequence
  source 1..216: mol_type = other DNA
atggaacccctccgggtactggaattatactcaggagttggcggaatgcaccacgcccttcgtgagtcttgcataccagcccaggttgtcgctgccatcgatgtgaatacggtggcaaatgaggtgtataagtataatttcccacacacccagctgcttgccaagactatcgaaataactaaaataacaaaggtgtatagtttcggaaaatgctag

SEQ ID NO: 139051 - DNA, 354 bp, synthetic construct
  misc_feature 1..354: note = Description of Artificial Sequence: Synthetic coding sequence
  source 1..354: mol_type = other DNA
atggaacccctgagggtcttagaactgtacagcggggtgggaggcatgcatcacgcactcagggagagctgtattccagcccaggtcgtcgcggccattgatgtgaataccgtggccaatgaagtgtacaagtataactttcctcacacccaactcctggccaagacgattgaaaggccacttgatactaacaatcgaaaactttggctgtctgtgccccgggtaagcattatctctaatctttcctggcacagcaagtttaaagccactatcttctcatattgcaaagcctccgtcagagccatcaccctgtcaagtccttggtccggcacggacggtgtcccacagaactag

SEQ ID NO: 139052 - DNA, 1176 bp, synthetic construct
  misc_feature 1..1176: note = Description of Artificial Sequence: Synthetic coding sequence
  source 1..1176: mol_type = other DNA
atggaacctctgcgcgtgctggaattgtactcaggcgtgggtgggatgcaccacgctctgcgcgagagttgtatacccgcccaagtggttgcagccatcgatgttaataccgttgccaacgaggtgtataagtacaacttcccccacactcaattattagcaaaaactatcgagggcatcacgttggaagagtttgaccggctctcttttgacatgatcctcatgagtcctccttgccaacccttcacaaggattgggcggcagggtgacatgactgatagcaggaccaacagctttcttcacatcctggacatcctaccacggctgcagaagctgcccaaatacatactcctcgagaacgtcaaaggtttcgaggtgtcatcaacaagagatctcttgatacagacaatagagaactgtggttttcagtatcaggagtttctgctctcgcccacttctctgggaattccaaatagtaggttgaggtactttctcattgccaagttgcagagtgagccactacccttccaagcccctggtcaggtgctgatggagttcccaaagatcgaaagtgtccacccccagaagtacgccatggacgtcgagaataagatacaggaaaagaacgtcgaacccaacattagttttgatggctctatacagtgcagcgggaaagatgcaatcctctttaagctggagactgccgaggagattcatagaaagaaccagcaagattctgacctcagcgtaaagatgctgaaagactttctggaagacgacacagacgtgaatcagtatctgctaccgccaaagtctctgctgcgttatgccttacttctagacatcgttcagcccacttgtcgccgttcagtttgttttaccaaggggtatggtagctatatcgagggcacaggctccgtgttgcagacggcggaggatgtgcaggtggagaatatttacaagagtctcactaacttatcgcaggaggagcaaatcacaaaactcctaatcctgaaactcagatatttcacacccaaggagatcgccaacctcctgggttttccacccgaattcggctttccagagaaaatcactgtgaaacagcgatatcgccttttgggtaactccctgaatgtgcacgtggttgcaaagctgattaaaatcttatacgagtag

SEQ ID NO: 139053 - DNA, 1104 bp, synthetic construct
  misc_feature 1..1104: note = Description of Artificial Sequence: Synthetic coding sequence
  source 1..1104: mol_type = other DNA
atggagcctctcagggttctggaattatatagcggcgtcggaggtatgcatcacgctttgcgtgagtcctgtattcctgcacaggtcgtcgcagcaattgatgtgaatactgtcgcgaatgaggtgtataagtataacttccctcatacgcagctcctggcaaagacgatcgagggcatcacactcgaggaattcgacaggctctccttcgacatgatactaatgtcgcctccttgccaaccttttactcgcctgcagaaactgcctaagtatattctccttgaaaatgtgaaaggtttcgaggtgtcttcaaccagagatttacttatccaaacaattgaaaactgcggcttccagtaccaagagttcctactgtcaccaacctccctgggtatcccaaactcacgcctgcgctacttcttaatcgcaaagctccagtccgaaccactgccatttcaagccccaggacaggtactgatggaatttcccaaaattgaaagtgtgcatccacagaaatatgctatggacgtggagaacaagatccaggagaagaacgttgaacctaatatttcttttgacgggagcattcaatgttccggtaaagacgcaatcctgttcaagctggagacagccgaggagatacaccgaaagaaccaacaagattccgatctgagtgtcaagatgctgaaagacttcctcgaagatgacaccgatgtgaatcagtacctgctgcctccaaaatctctgctgaggtacgcactcttgttagatatagtgcagcctacctgcaggcgttcggtgtgttttaccaagggttacggatcctacatcgaagggacgggaagtgtgctgcagactgccgaagatgtacaggttgagaacatttacaagagtctgactaatctgtcacaggaggagcagatcaccaaattgttaatcctcaaactaaggtatttcactcccaaggaaattgccaacctgctgggcttcccccccgaatttggctttcccgagaaaatcacagtgaagcagcgctacagactcctcggtaattcattgaatgtgcacgttgttgctaaattaatcaagatcctgtatgagtag

SEQ ID NO: 139054 - DNA, 933 bp, synthetic construct
  misc_feature 1..933: note = Description of Artificial Sequence: Synthetic coding sequence
  source 1..933: mol_type = other DNA
atgtccacgctctccctgatgaaatacacctcaatcattttcttgactcacagctacctgccacgcagattaaagatcgggcggcaaggcgacatgacagacagccggaccaacagcttccttcacattcttgacatcctgccccgagatttactcattcagacaatcgaaaattgcgggtttcagtaccaggaattcctgctgtctcctacgagtctggggatccccaattccaggctccgttacttcctaatcgctaagcttcagagcgagccccttccgttccaagcacccggacaagttttgatggagttcccaaagatcgaaagcgtacatccgcagaaatacgccatggacgtcgaaaacaagattcaggaaaaaaacgtcgagcccaacatcagttttgatggaagcatccagtgctctggtaaggatgctattttgttcaaactggagactgcagaggagattcataggaaaaaccagcaggactcggacttaagcgttaagatgctgaaagatttcttggaagatgatacagatgtaaatcagtatttattgccaccgaagtctttgctccggtatgccctgctcctggatattgtgcagccaacatgcaggcgatcagtgtgcttcacaaaaggatacgggtcctacattgagggtactggctccgtgctacaaacggccgaagacgtccaggtggagaatatatataaatctctgacaaatctgagtcaggaagaacaaattactaagctactgatactcaagctgcgctacttcacaccaaaagagatcgccaacctgctcggctttccccccgagttcggtttcccagaaaagatcaccgtgaaacagcgctaccgcttgctcggcaacagcctcaacgtgcacgttgtggccaaactcataaaaatcctgtacgaatag

SEQ ID NO: 139055 - DNA, 1305 bp, synthetic construct
  misc_feature 1..1305: note = Description of Artificial Sequence: Synthetic coding sequence
  source 1..1305: mol_type = other DNA
atgttaagatgcctctaccactggcatcggccagtgttgaaccggcgatggtcccggctgtgcctgcccaagcagtacctattcactatgaagctccagtctcctgagttccagagtctgtttacagagggcctgaaaagcctgaccgagctgttcgtcaaggagaaccacgagctgaggatcgcgggcggggcggtgagggacctgttaaacggcgtgaagcctcaagacatcgactttgccaccacagccacacctactcaaatgaaagaaatgttccagtctgccggaattcggatgataaataaccgcggcgagaagcacggcactatcacagccagattacacgaagagaattttgagatcactaccttacggatcgacgtcaccactgatggcaggcatgcagaggtcgagttcacgactgattggcagaaggatgccgagaggagggatcttaccatcaacagcatgtttctcggcttcgacggaacactcttcgactacttcaatgggtatgaggacctgaaaaataagaaagtgaggttcgtcggacacgcaaagcagcggatccaagaggactatctccggatactgcgatacttcaggttttacggtcgtattgtggataaacctggtgatcacgatcctgaaacactggaggccattgctgaaaacgccaagggtctggccggcatcagtggcgagcggatttgggtggagctgaagaaaatcctggtgggtaatcatgtgaatcacctgatccatctgatctacgatttggacgtggctccgtacattggattacctgcgaacgcaagtcttgaggaattcgataaggtgagcaagaatgtggacggattttcacctaaacctgtcacactgttggcatcactgttcaaggtgcaggacgatgtaacgaaactcgatctgcgcctgaagattgctaaggaggaaaagaatttggggctgttcattgtcaaaaatcggaaagatctgattaaggctactgactctagtgaccccttaaaaccttaccaggacttcatcattgatagtcgcgagcctgacgccactacaagagtctgcgaactcctgaagtaccagggcgaacattgtctcttgaaagaaatgcaacagtggtccatcccccctttcccagtctctgggcacgacataaggaaggtaggaatctcgagtggaaaggagattggcgccctcctgcagcagctgagagagcagtggaagaaatcggggtaccagatggaaaaggatgaattgctcagctatataaaaaagacatag

SEQ ID NO: 139056 - DNA, 1245 bp, synthetic construct
  misc_feature 1..1245: note = Description of Artificial Sequence: Synthetic coding sequence
  source 1..1245: mol_type = other DNA
atgctgagatgcctttatcactggcatcgtccagtgctgaatagaaggtggagccgtctatgcttacctaaacagtatctatttacaatgaagctacaatctcccgaattccagtcactcttcactgaggggcttaagtccctcacggagctttttgtaaaagagaatcatgagttgcgcatcgctgggggtgcagtgagggatctactgaacggcgtgaagccacaagacatagatttcgctactaccgcgacacccacccagatgaaggagatgttccaatccgccgggatcagaatgatcaataacagaggggaaaagcatggcacaatcacagccaggttacacgaagaaaatttcgaaatcacaacacttaggatagatgtgactacagatggaaggcacgccgaagtagagttcacaacagattggcaaaaagatgctgaaaggcgggatctgaccattaattccatgtttcttggatttgatggcactctgttcgactactttaatggctacgaggaccttaaaaacaaaaaggtgcggttcgtgggccatgcaaagcagaggattcaagaggattaccttagaatcctgagatacttcagattttatggaagaatcgtcgataagccaggggaccatgatccagagaccctggaggcgattgccgaaaacgccaagggactcgctggtatctctggcgaacgaatctgggtggagctgaagaaaattctggtgggtctgcccgcgaacgcctcactggaagagttcgataaagtgtccaagaacgtcgacgggttctctcctaagccagtgacgctcctggcgtcgctgtttaaggtgcaggacgatgtcaccaaactggacctcaggctgaagatcgctaaggaagagaagaatctcgggctgttcattgttaaaaacaggaaagacttaatcaaggccacggactcttccgaccctctaaagccataccaagacttcataattgattcccgggaaccagatgccacgactcgagtgtgtgaacttctgaaatatcagggggagcactgcctgttaaaagagatgcagcagtggagcattccacctttccctgtgagtggtcatgacatccgcaaggtcggtatctcatcggggaaggaaataggggcgctactgcagcagttgagggaacagtggaagaaatccggctatcagatggagaaggacgaacttctatcatatataaagaaaacctag

SEQ ID NO: 139057 - DNA, 174 bp, synthetic construct
  misc_feature 1..174: note = Description of Artificial Sequence: Synthetic coding sequence
  source 1..174: mol_type = other DNA
atgctgcgatgtctgtatcactggcaccgtcctgtgctcaatagacggtggtccagactgtgcctgcctaagcagtatcttttcaccatgaagctgcaaagtccagaatttcagagtctgttcacggagggcctaaagagcctcaccggcattaatgcctttcacgagaactag

SEQ ID NO: 139058 - DNA, 174 bp, synthetic construct
  misc_feature 1..174: note = Description of Artificial Sequence: Synthetic coding sequence
  source 1..174: mol_type = other DNA
atgctaaggtgtctataccattggcacaggccagtgttgaatcggaggtggtcccggttgtgtcttcctaaacaatatttatttacaatgaagctgcagagtccagagtttcagagtctgttcactgaggggctgaagagccttacaggaatcaacgccttccacgaaaactag

SEQ ID NO: 139059 - DNA, 189 bp, synthetic construct
  misc_feature 1..189: note = Description of Artificial Sequence: Synthetic coding sequence
  source 1..189: mol_type = other DNA
atgctgaggtgtctttaccactggcaccgtcctgtcttgaatcgtagatggagtcgactgtgtctgcccaagcagtacttgttcactatgaagctgcagtctcccgagtttcagagcctgttcacggaaggcctcaagagcctgaccgaactctttgtgaaagaaaatcacgagctaagaatagcctag

SEQ ID NO: 139060 - DNA, 174 bp, synthetic construct
  misc_feature 1..174: note = Description of Artificial Sequence: Synthetic coding sequence
  source 1..174: mol_type = other DNA
atgctgcgatgtctttaccattggcaccggcctgtcctgaataggcggtggagcagattgtgcttacccaagcagtaccttttcaccatgaaactccagagtcctgagttccaaagcctatttacggagggtctcaagagtttgacagggatcaatgcctttcacgagaattag

SEQ ID NO: 139061 - DNA, 1305 bp, synthetic construct
  misc_feature 1..1305: note = Description of Artificial Sequence: Synthetic coding sequence
  source 1..1305: mol_type = other DNA
atgctccgctgcctgtatcactggcatcggcctgtcctgaacaggcggtggtcgcggctatgcttgccgaagcagtacctatttaccatgaaacttcagagccctgaatttcaaagcctgtttaccgagggcctgaagtccctgacagagctattcgtaaaggagaatcatgagctgaggatcgctggtggggccgtgcgggatttgttgaacggtgtcaaaccacaggacatcgactttgcgaccaccgcaacccctacccagatgaaggagatgtttcaaagcgcgggcattcggatgattaataaccgtggggagaaacacggcaccatcacggctaggctccatgaagagaacttcgaaattacaactctcagaatagatgtgaccactgatggcagacacgcagaggtggaatttaccaccgactggcagaaagacgcggaaaggagggatctgactatcaacagcatgttcctcgggttcgacggcacgctcttcgactacttcaatggctacgaggatctgaagaacaagaaagtcaggttcgtgggtcatgccaaacaaagaatccaagaggattacctccgaattctcaggtattttagattctatggacggattgtcgacaagcccggggaccacgacccagagacacttgaagctatcgccgagaatgctaaaggactcgctgggatcagtggagagcgaatctgggttgagctcaagaaaatattagtggggaatcacgtaaatcacctgatccacttaatctacgacttagatgtcgcgccttacatcggcctgcctgcaaatgcctcgctcgaagaatttgacaaagtctctaagaacgtggatggtttcagccccaaaccagtgacgctgcttgcaagtctattcaaggtccaagacgacgtgacaaagcttgaccttcgtctgaaaatcgctaaggaagagaagaacttgggactgttcatcgtgaagaaccgcaaggatctgattaaggcaactgactcaagtgacccgctaaagccgtaccaagactttattatagacagcagagaaccggacgccactaccagggtctgtgaactgctgaagtaccagggggagcattgtcttttgaaggagatgcagcagtggagtatacccccatttccagtgtccggacacgacattcgcaaggtgggtatcagctccggcaaggaaatcggagcgctgctgcagcagctccgggagcaatggaagaaatctggctatcagatggaaaaagatgagttactctcatatataaaaaagacttag

SEQ ID NO: 139062 - DNA, 762 bp, synthetic construct
  misc_feature 1..762: note = Description of Artificial Sequence: Synthetic coding sequence
  source 1..762: mol_type = other DNA
atgaacttcagcggtgggggacgacaggaggctgccggtagtcgggggaggagggccccccgaccccgtgaacaagacagagacgtacaactctcaaaggccttgtcatatgccctgcggcacggagccctgaagctcgggctgcccatgggagctgacggctttgtgcctctggggacacttctgcagctgccccaattccgcggatttagtgccgaggatgtgcagcgagttgttgataccaatagaaagcagaggtttgctctgcagctaggcgacccctccacagggctgttgatccgggccaatcagggccatagtctgcaggtccctaagctggagcttatgcccctggagacccctcaggcattgccacctatgctcgtacatggtacattttggaagcattggcccagcatccttttgaaaggtctgtcctgtcaggggaggacccacattcacctagctcctggcctgccaggtgatcctggtatcatctccggaatgagaagtcattgtgagatagcagtatttatagacggccccttggctttggcagacggtattcccttttttaggagcgccaacggtgtcatactcacccctgggaatactgacgggttcctgctcccaaaatacttcaaggaagctttacaacttcgacccacccgcaagcccctttctttggccggcgatgaagaaacagaatgccaaagtagtccaaaacattcgagtcgggagagacgacgaattcaacagtag

SEQ ID NO: 139063 - DNA, 768 bp, synthetic construct
  misc_feature 1..768: note = Description of Artificial Sequence: Synthetic coding sequence
  source 1..768: mol_type = other DNA
atgaacttttctgggggtggaaggcaggaggccgcaggctcccgcggccggcgggctccaagaccaagagagcaagaccgagacgttcaactcagtaaagctctgtcctatgcactacgccatggagctctgaagttaggactgcctatgggagctgacggattcgtccctcttgggactctcttgcagctgcctcagtttaggggattttccgcagaggatgtccagcgggtggtggatacgaaccgaaaacagcgatttgctctccagctcggcgatccatcaaccggtctgctgataagagctaaccagggccattcgctgcaggtgggggtacccaagctcgagctgatgcctttggagactccacaagcactcccccctatgcttgtccacggcaccttttggaaacattggcccagtatcctcctgaagggcctctcatgccagggcaggacccatatccacctggcaccaggtctgccgggagatccaggaataatctctggaatgcggagtcattgcgaaatagccgtatttatcgatggcccattggctctggccgacggcatacctttctttcgttcggccaatggcgtcattcttaccccagggaacacagacgggtttctcctccccaagtatttcaaagaagcgttgcagctgagacctacgagaaagcccctttccctggcaggggatgaggagactgaatgccagagttccccaaagcatagtagccgagaaaggcggcggatccagcagtag

SEQ ID NO: 139064 - DNA, 615 bp, synthetic construct
  misc_feature 1..615: note = Description of Artificial Sequence: Synthetic coding sequence
  source 1..615: mol_type = other DNA
atgggcgccgacgggttcgtgccccttgggacattattgcagcttccacagtttcgaggcttctctgccgaagatgtacagcgcgtggtcgacactaatcgaaagcagcggtttgccctccagctgggtgatccatctaccggactcttgatcagagcaaaccagggtcatagtctgcaggtgcctaaactggaacttatgcccttggagacgcctcaggccctcccacccatgctggtgcacggcaccttctggaagcactggccgagcatcctcctcaaagggctgtcctgtcagggcagaacccatatccatctcgctccagggctgcctggagacccgggcatcataagtgggatgagatcacactgtgaaatcgctgtgttcattgacggaccgttggctcttgctgatggaattccgtttttcaggtccgcgaacggggtgatcttaacccctgggaatacagatggatttctactgcctaagtacttcaaggaagccctgcagctcaggccaacaagaaagcccctcagcctcgctggggacgaggaaacagaatgccagagtagccctaagcactctagccgagagcgtagacggatccaacaatag

SEQ ID NO: 139065 - DNA, 651 bp, synthetic construct
  misc_feature 1..651: note = Description of Artificial Sequence: Synthetic coding sequence
  source 1..651: mol_type = other DNA
atgaattttagcggcggtggtaggcaagaagccgccggctcaaggggccggagggcacccagaccacgagagcaagatcgagacgtgcagctgtccaaggccctgtcctacgccctgaggcacggcgccttgaaactggggcttcccatgggcgccgatggtttcgtgccactcggaacgcttctccagctgcctcagtttcgaggcttttcggccgaggatgtgcagagagttgtcgacactaacaggaagcagagatttgctctacaattgggagatccttctactggcctgttaatacgggccaatcagggacacagcttacaggtgcctaaattggaactgatgccgcttgaaactcctcaagctctgcctcctatgctcgtccacggcaccttttggaaacattggccatcaatcctgctcaaagggctcagctgccaggggcggacccatatccacttggctccggggcttcccggcgaccctggtatcatctccggtatgagatcccactgcgaaattgcagtgttcattgacggaccacttgcccttgccgggaaacccctatcgctggccggagacgaagagactgagtgccaaagcagccctaagcatagcagtcgcgagaggcggagaatccagcagtag

SEQ ID NO: 139066 - DNA, 504 bp, synthetic construct
  misc_feature 1..504: note = Description of Artificial Sequence: Synthetic coding sequence
  source 1..504: mol_type = other DNA
atgggtgcagacgggtttgttccattgggcaccttgttacagctgcctcagttcaggggctttagtgccgaagatgtgcagcgcgtggtagataccaatcggaagcagcggtttgctctacagttaggagatccatctaccgggcttcttattagggctaatcagggacattcactgcaagtgcccaaattggagttaatgcctctggagacaccccaggcgttgccccccatgctggtgcacggtacattctggaagcattggcccagtattctcctaaaaggcttgtcttgccagggcaggacacatatccacttggccccagggctgcccggcgacccagggatcatatctggtatgcgctcccactgtgagattgccgtctttatcgatggcccacttgccctagcggggaaacccctgagcctcgccggtgatgaagaaaccgagtgccagtcgtcgcccaagcacagctctcgagagcgccgccgcatccaacagtag

SEQ ID NO: 139067 - DNA, 516 bp, synthetic construct
  misc_feature 1..516: note = Description of Artificial Sequence: Synthetic coding sequence
  source 1..516: mol_type = other DNA
atggaagaaaggggcgactcagaacccacaccaggatgctctggactgggtcccggcggcgtgagaggcttcggggacggaggaggggccccatcatgggctcccgaggacgcttggatgggtacgcatcccaaatacctcgagatgatggagctggatatcggcgatgccacgcaggtttacgttgcctttctggtgtacctggacctgatggaaagcaagtcctggcacgaagtcaactgtgtggggttacctgaactgcagctgatatgcctcgttggcaccgaaatcgagggggaggggttgcagacagttgtgccaaccccgatcacagcctcattatcgcacaatcggatacgggagatccttaaagcatcccgcaaactccagggagatcctgatctgccaatgtctttcactctggcgattgtcgaatccgactcaaccatcgtgtactacaagctgactgacggattcatgttgccagatccccagaatatcagtctgaggcgttag

SEQ ID NO: 139068 - DNA, 390 bp, synthetic construct
  misc_feature 1..390: note = Description of Artificial Sequence: Synthetic coding sequence
  source 1..390: mol_type = other DNA
atggaggagcggggtgacagtgaaccgactcctgggtgctctggactgggtcccggcggagtgcgggggtttggggatggcggcggtgccccctcatgggcacccgaagacgcttggatgggcactcaccccaagtatctagagatgatggaactagatattggcgatgcaacccaggtttatgttgccttcctggtgtacctggatctgatggaaagtaagagttggcacgaagttaactgcgtggggctgccagagctccagctgatctgtctagtcggcaccgaaatagagggggaaggtctgcagaccgtcgtgccaactcccattaccgccagtctgagtcataatcgtatattcttgctggaggatgatatccacgtctcttag

SEQ ID NO: 139069 - DNA, 1398 bp, synthetic construct
  misc_feature 1..1398: note = Description of Artificial Sequence: Synthetic coding sequence
  source 1..1398: mol_type = other DNA
atggctgaggccgtttttcacgctcccaaaaggaaaaggagagtgtatgaaacttacgagagtcccttgccaatcccctttggacaagaccatggccctctgaaggaatttaaaatttttagagcggagatgatcaacaataatgtgattgtgagaaacgctgaagatatcgaacagctctacggaaagggctattttgggaaaggtatcctgagtagatccaggccctctttcacaatctcagacccaaaactggtggcaaagtggaaggatatgaagacgaacatgcccattattacatctaaaaggtatcagcacagcgtcgagtgggcggccgagctcatgagacggcagggccaggatgagtctacagtgaggagaattctgaaggactataccaagccccttgagcacccaccagtcaaacgaaatgaggaggcgcaggtacacgacaaattaaattccggaatggtcagcaatatggaggggactgctggaggcgagaggcctagcgtggtgaacggtgactccggcaagtccggtggagtgggagatcctcgtgaaccactgggatgcttacaggagggtagcggctgccatcccaccaccgagtccttcgaaaagagcgtgcgcgaggatgcctccccccttccacacgtgtgctgttgtaagcaagatgcgctgatcctgcaaagaggcctgcaccatgaggatggctcgcagcacatcggacttttgcatcccggcgaccgcggcccagatcatgaatacgttctggtggaggaggcagaatgtgcaatgtcagaacgggaggctgctcccaacgaagagctcgttcagaggaatcgcctcatatgtaggagaaatccatatcgcattttcgaatatctccaacttagcctggaggaggcatttttcttggtgtacgcacttggatgcctgagtatctactacgaaaaagagccactcacaatagtgaaactgtggaaagccttcacagtggtacagcctacattccggacaacctacatggcttatcactactttaggtccaagggttgggtgcccaaagtaggtctaaagtatggcactgacctgttgctttatcgtaaagggcctccattctaccacgctagctactcggtgattatcgaacttgttgacgatcactttgagggaagcctaagaaggccactgtcctggaaatcactggccgcattgagtagggtttctgtgaatgtgtctaaggaactcatgctgtgctatctgattaagccgagcacaatgacagacaaagaaatggagtcccctgaatgcatgaagaggattaaggtgcaagaagtaattttgtcccgctgggttagttcccgggaacgaagcgatcaggatgacctgtag

SEQ ID NO: 139070 - DNA, 1320 bp, synthetic construct
  misc_feature 1..1320: note = Description of Artificial Sequence: Synthetic coding sequence
  source 1..1320: mol_type = other DNA
atggctgaagccgtgttccatgcccccaaaagaaagcgccgcgtgtacgaaacctacgagagcccgttgcctatccctttcgggcaggatcatggaccactgaaggagtttaaaatttttcgtgctgaaatgattaacaataatgtaattgtccggaatgcagaggacatcgaacagttatatgggaaaggatattttgggaagggtatcctgtcccgttcaaggccctcgtttacgatctctgacccgaaactggttgccaagtggaaggatatgaaaaccaacatgcctattatcacatccaagcggtatcaacattctgtcgaatgggctgccgaactgatgcgcagacaggggcaggacgaaagtacagtgcgccgcattctgaaagattacacgaaaccattagagcaccctccagtgaagcgaaacgaggaagcacaggtccatgacaagctgaactccggaatggtcagcaatatggagggtaccgccgggggcgaacgccctagcgtggttaatggcgactccggtaagtccggaggcgtcggggacccaagggagccactgggttgccttcaggaaggcagtgggtgccacccaaccaccgaatcattcgaaaagtctgtgcgggaagacgctagccccctccctcacgtctgctgctgtaagcaagatgctctgatcctccagagggggctccatcacgaggatggctcccagcacataggactgctgcatcccggcgatcgggggcctgatcacgagtacgtcttggtagaggaggctgagtgcgctatgtctgagagagaagccgccccgaatgaggaagcctttttcctggtctacgctctaggatgcctgagtatctactacgaaaaagaacctttgaccatagtaaagttgtggaaagcgtttactgttgtgcagcccacatttcgtacgacatacatggcatatcactacttccggtccaagggttgggtgccgaaagttgggttgaaatatggaacggatctgctcctataccggaagggaccacctttctaccacgcttcgtattctgtgataatagagctcgtggatgaccactttgaaggctccctgcggcgccccctcagctggaagagcctcgctgcgctgtctcgagtcagcgtgaatgttagtaaagagctgatgctttgttatctgattaaaccctctaccatgaccgacaaggaaatggaatcaccagaatgcatgaagcgcatcaaagttcaggaggtgattctgtctcgatgggtgtcatcccgcgagcgttccgaccaggatgatctgtag

SEQ ID NO: 139071 - DNA, 1347 bp, synthetic construct
  misc_feature 1..1347: note = Description of Artificial Sequence: Synthetic coding sequence
  source 1..1347: mol_type = other DNA
atggccgaagccgtgtttcacgcgcctaaacgcaaacgccgcgtttatgagacttacgagtctccgttaccgattcccttcggccaggaccatggacctttgaaggaattcaagatattcagagcagagatgatcaacaacaacgttatcgtgcgcaatgccgaagacatcgagcaactctatgggaagggctactttggcaaaggaatcctctcgagaagtagacccagctttacaatttctgatccaaaactcgtggcgaaatggaaggacatgaaaaccaacatgcctattatcaccagtaagcgctatcagcacagcgtcgaatgggctgcagagttgatgcgccgacaaggtcaggacgagtctactgtccgcaggatcttgaaggattatactaaacctttggagcatccccccgtcaagcggaatgaggaggcccaggtgcatgacaagctgaacagcgggatggtatcaaatatggaaggaaccgccggaggcgagaggcccagcgtcgtcaatggagattcggggaaatcggggggcgtcggagatccaagggagcccttaggttgcctccaagaggggtcaggatgtcatccgactactgaatcatttgagaaatccgtacgcgaggatgcatccccactcccacacgtgtgttgttgcaagcaggatgcccttatcctgcagaggggcctgcatcatgaggatgggagtcaacacattggtctgttgcatccgggcgaccgagggcccgatcacgaatatgtgttggttgaggaagccgagtgtgctatgtcagagcgggaggccgcccctaacgaagaactcgtgcaacgtaacagattaatttgcaggcgcaatccatacagaatattcgaatacctgcaactgagcctcgaggaggagcccttgacaatcgtcaagctctggaaagccttcaccgtggtccaacctacatttagaacgacttatatggcataccactacttcagatccaaaggctgggtgcctaaggtggggctgaaatacggcacggatctcctgctgtatcgaaaaggccctccattctatcacgcgtcttactccgtaattattgagctggtggatgatcactttgaggggtccctgaggcggccgttgagctggaaatcactggcagcgttaagtcgggtttccgtcaatgtgtcaaaagaactaatgttatgctatttgattaagccaagcacaatgaccgacaaggagatggaatcacccgaatgtatgaaaagaattaaagtccaggaggtgatcctttccagatgggtgtcaagccgggagcgctccgaccaagatgacctttag

SEQ ID NO: 139072 - DNA, 1398 bp, synthetic construct
  misc_feature 1..1398: note = Description of Artificial Sequence: Synthetic coding sequence
  source 1..1398: mol_type = other DNA
atggctgaggccgtgttccatgcgcccaagcgaaaacgtcgggtgtacgaaacttatgagtctccactgccaattccgttcggccaggatcatggaccgctaaaggaatttaagattttccgcgctgaaatgatcaataacaacgttattgtgcgaaatgccgaggacattgaacaactgtatggcaaaggctactttgggaaaggaatcctctctagatcacgaccctctttcacaatttcagaccccaagctagtggctaagtggaaggatatgaaaaccaatatgccaataatcacatcaaagcgttatcagcacagtgtggaatgggcagctgaactgatgcggcgacaggggcaggacgaatcaactgtcaggcggattcttaaggattataccaagccattggaacaccctcctgtgaaaaggaacgaggaggcccaggttcacgataaactgaattccggtatggtctctaatatggaaggaacagccggtggcgagcgaccttccgtagtgaacggcgatagcggaaagagcggcggtgtcggtgacccgagggaacccctgggatgcctgcaggagggttctgggtgccacccaacgactgagagctttgagaagagcgtaagggaggacgcaagtcccctgcctcatgtgtgttgctgcaagcaggacgctctcatcctacagcgcggactgcaccatgaggatgggagccagcatattgggttgctgcaccctggagacagaggcccagaccatgaatatgtgcttgtggaagaggcagagtgcgcgatgtcagagcgcgaggcagctccaaatgaagagcttgttcagagaaaccgcctgatttgccgtcgcaacccataccgcatcttcgagtaccttcagctgtccctagaagaagccttctttctcgtttacgccctggggtgcctgagcatctattacgaaaaggaacccttaacaatagtgaagctatggaaggccttcacggtggtgcagcctacatttagaaccacctacatggcctatcattactttagaagcaaaggttgggtgcctaaagtgggccttaagtatggcaccgacctgctgctctataggaaaggtcctccattttaccatgccagctactccgtgattatcgaactggtggatgaccactttgaagggtcgctgcgccggccgctgagctggaagtctctggctgccctttcccgagtgagtgtgaacgtgagcaaggaactgatgttgtgctacctgatcaagcctagcacaatgacagataaggaaatggaatcccccgaatgcatgaaaaggatcaaagtccaggaggtcatcctcagcagatgggtctctagtcgcgaaaggagtgatcaggatgatctgtag

SEQ ID NO: 139073 - DNA, 1320 bp, synthetic construct
  misc_feature 1..1320: note = Description of Artificial Sequence: Synthetic coding sequence
  source 1..1320: mol_type = other DNA
atggccgaggccgtgttccacgccccaaagcgaaagcggcgagtttacgagacgtatgaaagcccattgccaataccatttgggcaggaccacggtcctctgaaggagttcaagatttttcgggcagagatgatcaacaacaatgtgattgtccggaacgcggaagacatagaacagttgtacggtaaagggtacttcggcaaaggtatcctatctaggagccgcccaagctttaccatctcagatccaaaattggtggcgaaatggaaggacatgaaaacaaatatgcctatcatcacctcaaagcggtaccagcattccgttgaatgggcagcagagcttatgcggagacagggtcaggacgagtcgaccgttcgaaggattttgaaagactacaccaagcccctcgagcatcctccagtcaaacgaaatgaggaggcccaggtgcacgacaagctgaattcagggatggtgagtaatatggaaggcactgcgggtggcgagcggccttcagttgttaacggagacagcggaaagagtggtggagtcggggacccaagagaacccctgggttgcctccaggaggggtctggatgtcacccaaccacagaaagtttcgagaaatctgttagggaagatgcatctcctctccctcacgtctgctgttgcaagcaggatgctctgatactacaacgagggttacatcatgaagacggttcccagcatatagggctgctccatcccggcgatagagggcccgatcatgaatacgtcctggtagaggaggcggagtgcgcgatgtcggagagggaggccgcacccaatgaagaggccttcttcctggtgtatgcactaggatgtctgagtatatactatgagaaagagcctctaacgattgtgaagctgtggaaggccttcaccgttgttcagcccacgttcagaaccacatacatggcctatcactactttcgaagcaaggggtgggtgccaaaggtgggtctcaagtatgggacagatctgctactataccgtaaaggtcctccgttctaccacgctagctattccgttattatcgagctggtcgacgaccactttgagggttccctccgccgtcctttgtcatggaaatccctggccgctttgtcccgggtcagtgtaaatgtgtccaaggagctgatgctgtgttatctgataaagcctagtacgatgactgacaaggagatggagagcccagagtgcatgaaacggatcaaggtgcaggaggtcatcctgtcccgctgggtgtcctctcgagaacgatcagaccaagatgacctttag

SEQ ID NO: 139074 - DNA, 1209 bp, synthetic construct
  misc_feature 1..1209: note = Description of Artificial Sequence: Synthetic coding sequence
  source 1..1209: mol_type = other DNA
atggccgaggcagtgtttcacgcaccaaaacggaagagacgagtgtacgaaacttatgaaagtcccctgcctatccctttcggacaggaccacggccccctaaaggagttcaagatttttagggcggagatgatcaataacaacgtgatagtaagaaatgcggaggatatagaacagctgtatggaaagggatacttcggaaaaggaatcttaagcaggagccggcccagtttcaccatctctgacccgaagctggtggccaaatggaaggacatgaagactaacatgcccatcatcacctccaagaggtatcagcactctgtcgagtgggccgcggagctgatgagacgacaggggcaggacgagtcaactgtgcggaggattcttaaagattatactaagccactggagcatcccccggtgaagcggaatgaagaggcccaggttcacgataagctaaattccggcatggtgagcaatatggagggtaccgcgggcggtgaaagaccgtcggtggttaacggagattctgggaagtccggcggtgttggcgacccacgggaacctttgggatgtcttcaggagggctcaggatgccaccccactacggagtcttttgagaaaagcgttcgagaagacgcctcacctctgccccatgtgtgttgctgtaagcaagatgctctgatacttcaacgtgggctgcaccatgaagacggtagtcagcacataggcttactgcatcctggcgacagaggccccgaccatgaatacgtgctcgttgaggaagcagagtgcgcgatgtccgagcgtgaggctgcacccaatgaagaagccttctttctggtgtacgccctcggctgcttatcgatctattatgagaaggagcccctcaccatcgtcaaactctggaaagcattcactgtggtgcaaccaaccttcagaactacttatatggcctaccattatttcaggtcaaaaggctgggtccctaaagtggggctgaagtacgggacagaccttctgctgtaccgaaaaggacctccgttctatcacgcatcatactccgtgatcatcgaattagtggacgaccatttcgagggcagcctgcggaggcccctgagttggaagagcttggccgcactgagcagagtgtccgtgaacgtgtccaaggtgacacagcatcagttatgtcattggagtgtcacttag

SEQ ID NO: 139075 - DNA, 1137 bp, synthetic construct
  misc_feature 1..1137: note = Description of Artificial Sequence: Synthetic coding sequence
  source 1..1137: mol_type = other DNA
atggcagaggctgtcttccacgcccccaagcgtaagagacgggtttacgagacctatgagtccccactccccatacctttcggccaggaccacggccctttgaaagagtttaagatcttccgcgctgagatgattaataacaacgtcatcgtccgaaacgcggaggacatcgagcagctgtatggaaagggctactttgggaaggggattctttcaagatcccgcccctccttcacaatctccgaccctaaacttgttgcgaaatggaaggacatgaagactaacatgccaattattaccagcaaaaggtaccagcactctgttgaatgggcagccgagctgatgcggcgccaaggtcaggacgaaagcaccgtgcggaggatacttaaagactacaccaaacccctggagcacccccctgttaagagaaacgaagaggcgcaagtgcatgataagctcaatagtggcatggtgtccaacatggaaggcactgcgggaggggagagaccctctgttgttaacggagatagcggaaaaagcgggggcgtaggggatcctagagaaccacttggctgtctgcaggagggctccggctgtcatccaacaaccgagtccttcgaaaagtccgtccgtgaggatgcttcccccctcccccacgtttgctgctgcaagcaggacgcactaatccttcagaggggcctgcaccacgaggacgggagccagcacattgggttgctccaccccggcgatcgagggcccgatcacgaatatgtgctggttgaagaggccgagtgcgctatgtccgagagggaagctgccccaaatgaggaactggtgcagcggaaccggcttatttgcaggcggaatccgtaccgcattttcgaatacctgcagttgtcactcgaagaggcgttcttcctagtgtacgccctaggctgtctgagtatctattacgagaaggaacctctcactattgtgaagctctggaaggcgttcacggtagtgcaaccaacatttaggacaacatacatggcataccattatttccgatctaagggatgggtgccaaaggtgggcctcaaatatgggaccgatctgcttttgtatcgtaaaggaccacctttctaccatgcttag

SEQ ID NO: 139076 - DNA, 1317 bp, synthetic construct
  misc_feature 1..1317: note = Description of Artificial Sequence: Synthetic coding sequence
  source 1..1317: mol_type = other DNA
atggccgaggccgtattccacgcacccaaaagaaaaagaagggtatacgaaacatatgaaagccccctcccaatcccctttggacaggaccacggtcctttgaaggagtttaagatttttagggccgaaatgattaataataacgttattgtgcgaaatgcagaggatatcgaacagctctacggcaaggacatgaaaaccaatatgccaatcataacatccaagagatatcagcactccgttgagtgggcggctgaattgatgcggcgacagggccaggacgagagcacagtacgacggattttaaaggactacacgaagccattggaacatccgcccgtgaagagaaatgaggaagcacaagtccacgacaagctaaatagcggaatggttagcaatatggagggcaccgctgggggagaacgcccatccgtcgtcaacggcgactcaggtaaaagcggcggggtgggcgaccccagggagccactgggatgtctgcaggaaggcagcgggtgccaccccacaacggagtctttcgagaaatcagtgcgggaggatgcttctcctctcccccatgtctgctgctgcaagcaagatgcacttattttgcagaggggcctccaccatgaagatggatcacagcacatcgggcttcttcaccccggcgatcgcggccctgaccacgagtacgtcctggtggaagaggcagaatgcgccatgtccgagagagaagctgcgcccaatgaggaactggttcagagaaatcggctgatctgcagacggaatccgtacaggatctttgaatacttgcagctcagcctcgaggaggctttcttcctggtatacgcgctcggttgcctcagcatttactatgagaaggagcctttgaccatagttaaactatggaaggcgtttactgtcgtacagcccacctttcgtaccacctacatggcatatcactactttcgatcaaagggctgggtgcccaaggtgggattgaagtacggtacagacctgctcctgtatcgtaaagggccacctttttaccatgccagctactccgttatcatcgagctggtggatgaccactttgaggggagccttaggaggccacttagctggaagtcgctggcagccctgagtagagtgtctgtaaatgtctccaaagagttaatgctgtgttacctaattaagccgtccaccatgaccgataaggagatggagtcccctgaatgtatgaagcgcatcaaggtccaagaggtaatcctgagccggtgggtgtcctcaagggagcgaagcgatcaggacgatctgtag

SEQ ID NO: 139077 - DNA, 1221 bp, synthetic construct
  misc_feature 1..1221: note = Description of Artificial Sequence: Synthetic coding sequence
  source 1..1221: mol_type = other DNA
atggccgaggcagtgtttcacgcgcccaagcgcaagcggcgtgtgtacgaaacctacgaatcaccacttcccattcctttcggtcaggaccatgggccgttaaaagagttcaaaattttcagagcagaaatgataaacaataacgtaatcgtgagaaatgctgaggacattgagcagctctacggaaagggctatttcggaaagggcattctctctcgatccaggccgagtttcaccatctcagacccaaagctggtggctaagtggaaggatatgaaaaccaatatgccgataatcactagcaagcggtaccaacacagcgtggagtgggcggccgagctgatgagacggcagggccaggatgaatctacagtgcgcagaatactcaaagactataccaagcccctggaacacccaccagtgaagcgaaacgaagaggctcaagtgcacgacaagcttaacagtggcatggtgtcgaacatggaaggaactgctggcggggagcggccctcagtaagggggctccaccatgaagacgggagccagcatatcggcctcctccatccaggcgacagagggcctgatcacgaatatgtacttgtggaagaagctgaatgtgctatgagcgaacgggaggcagctcccaatgaggaattagtgcagcggaatagactcatctgcaggagaaatccctacagaatcttcgagtatttgcagctgtctctggaggaggcttttttccttgtgtacgctctgggctgtctgagcatctattatgagaaggaaccactgaccatcgtgaaattatggaaggcatttactgtggttcagcctacattcagaaccacctacatggcttaccattattttcgaagcaaggggtgggtgcctaaagtcggcttaaagtacggcacggatctgttactgtaccgaaaaggacctcccttctatcacgcatcttactcagtgatcatcgagttggtggatgatcactttgagggatcgctcaggcggcccctgtcctggaagtccctcgcggctttgtctagagtgtctgtaaacgtcagcaaagaattaatgttgtgttacctgatcaagcctagtacaatgacggacaaggagatggagtccccagaatgtatgaaaaggataaaggtccaggaggtcatcttgtcacggtgggttagcagccgggagagaagcgatcaggatgacttgtag

SEQ ID NO: 139078 - DNA, 933 bp, synthetic construct
  misc_feature 1..933: note = Description of Artificial Sequence: Synthetic coding sequence
  source 1..933: mol_type = other DNA
atgctggtagtggaggtggccaatggtagaagcctggtatggggtgccgaggcagtccaggccctgcgtgaacgtctaggggtcggtggcagaacggtgggggcactgcccagaggcccacgtcagaatagcaggctcggactgcccctcctactgatgcccgaggaggctcggctgcttgcagagatcggcgctgtgactctagtttctgccccacgcccagacagccgtcaccacagcctggccctgacctctttcaagagacagcaggaagagtccttccaagagcaatcagcactcgccgccgaggctcgcgagacccggcgccaagaattactcgaaaagatcaccgaggggcaggctgccaaaaaacagaagctcgaacaggcaagtggtgcctcctcaagccaagaggcagggagttcgcaagccgctaaagaggacgaaacatcggacggccaggcaagcggcgaacaggaggaggccgggccatcttcaagtcaggctgggccatctaacggcgttgcaccgctgcctcggagtgctcttctggtgcagctcgccaccgcaaggcctcggccagtaaaagctcgtccactcgattggcgagtgcagtctaaggattggccacacgccggacgacctgcccacgaattacggtatagtatctatagggatctgtgggagcgcggcttctttctgagcgctgctggcaagttcggcggcgattttctggtgtatcccggtgaccccctccgcttccacgcccactacatagcgcaatgttgggcacctgaggatactatccctctgcaagacctagtcgctgctggcaggctgggcacgagcgtgcgcaaaacgttgttgctctgcagtccacagcctgacggaaaggtggtgtacactagcctccagtgggctagcttacagtag

SEQ ID NO: 139079 - DNA, 933 bp, synthetic construct
  misc_feature 1..933: note = Description of Artificial Sequence: Synthetic coding sequence
  source 1..933: mol_type = other DNA
atgctcgtggtggaagtggccaacggaaggagcctagtttggggagctgaggctgtccaagctctgcgggagcggctcggagtgggcggacggacagtcggcgctctgcctcggggcccccggcagaactctcgcttaggactgcccctgcttttgatgccagaggaagccagacttctggccgagattggagctgtcaccctggtttctgcacctcggcctgattcgagacaccactcccttgccctgacaagctttaagagacagcaagaggaatcattccaggagcagagcgccctggccgccgaggctagggaaacacggcgacaagagttgctcgagaagattacagagggtcaagctgccaaaaaacaaaagctggagcaggcctcgggcgcctccagtagtcaggaagccggctcgtcacaggcggccaaagaggatgagaccagcgatggacaggcgagtggagagcaagaagaagccggaccttcctcaagtcaggcagggccgagcaatggcgtggcaccattacctcggagcgcactcctggtgcaactggcaaccgctcgccctcgacctgtaaaggcgcgccctctagactggagagtacaatccaaggactggcctcacgccgggagaccagcccatgaactgaggtatagcatctacagagacctctgggagcgcggttttttcctcagcgcggcaggcaagttcggtggagacttcctcgtctatcctggagaccctctgcggttccatgctcactatatcgcccagtgctgggcgcccgaggataccataccactgcaggacctggtggccgcaggcaggctgggcaccagtgtgaggaaaactcttctcctgtgtagtccacagccagatggaaaagtcgtttataccagtctgcaatgggccagcctgcagtag

SEQ ID NO: 139080 - DNA, 933 bp, synthetic construct
  misc_feature 1..933: note = Description of Artificial Sequence: Synthetic coding sequence
  source 1..933: mol_type = other DNA
atgttggtcgtagaggtggccaacggccgaagcttagtttggggtgcagaggccgtgcaggcgttgcgggagcggcttggagtgggtggtcgaaccgtaggcgcactcccgagaggcccccgtcagaattcacgcctcggtctcccactgctgctgatgccggaagaggcccggctgctagcggaaatcggggccgtgactctggtctcggcaccaagaccagactctcgtcaccacagcttggctttaactagttttaagaggcagcaggaggagtcctttcaggagcagtcagcgcttgcagcagaagcccgcgagactcggcgtcaagaactgcttgaaaagattacggagggacaggctgccaagaagcagaaactggaacaggcctctggcgcatcttcttctcaggaggccggaagctcacaggccgccaaggaggatgagacctcagatggccaggcgtccggagaacaagaagaggcaggcccctcatcttcccaagcagggcccagcaatggcgtggccccactcccaagaagcgcattgctagtccagctggcaacggcccggcctaggccagtgaaagctcggcccttagattggcgggtccaatcaaaagattggccccacgctggccgaccagcacacgagctgcggtattcaatttaccgtgatctctgggaacgcggtttctttctgagtgctgccgggaagttcggaggcgactttctggtctaccccggcgatcccctgcggtttcacgcccattatattgcacagtgttgggcaccggaagacaccatacccctccaggatctcgttgccgctgggagactcggaactagcgtgcgaaaaaccctcctgctgtgcagcccacaacccgacggtaaagtggtctatacatctctccagtgggctagccttcagtag

SEQ ID NO: 139081 - DNA, 939 bp, synthetic construct
  misc_feature 1..939: note = Description of Artificial Sequence: Synthetic coding sequence
  source 1..939: mol_type = other DNA
atgctggtagtcgaggttgcgaacggccgctctcttgtgtggggagccgaggccgtgcaggcccttagggagcggctaggagtgggtggtaggaccgtaggtgctctgccacgtgggcctcgacaaaattccagattaggtctgcccctacttcttatgccagaggaagcaagactcctggctgaaattggggcggtgacattggtgtcagcaccgaggcccgattctagacaccatagtttggccttgactagctttaagcggcagcaggaagagtcatttcaggagcagtccgcactcgccgcagaagccagggagacgaggagacaggagctgctggagaaaatcacagaggggcaggccgcaaagaagcaaaagctggagcaggcttccggagctagcagctcccaggaggcagggtcatcacaggctgcgaaggaggacgaaaccagcgacgggcaagcctccggagagcaggaggaggctggcccgagcagttcccaggccggtccatccaacggcgtggccccacttccccggagcgcactgttggttcagttagccacagccagacctaggcccgtgaaggctaggcctcttgattggcgcgtgcagtcaaaagattggccccacgccggtcgcccagcgcacgagcttaggtactctatttatcgcgatctgtgggaacgcggcttctttctgagtgcagcagggaagttcggtggtgactttctcgtctaccccggagaccctctccgttttcacgctcactatatcgcacagtgctgggcccctgaagatacaattcccctccaggatctagtggccgctgggaggctaggtacttccgtgcggaaaacactgctactgtgtagtcctcagcctgacggttttaaatcacaggaagtgagcatcaatctggtgtacaaatgcagctag

SEQ ID NO: 139082 - DNA, 729 bp, synthetic construct
  misc_feature 1..729: note = Description of Artificial Sequence: Synthetic coding sequence
  source 1..729: mol_type = other DNA
atgctggtggtggaggtggccaatggtaggtctttggtttggggggccgaagctgttcaggcgctccgagagcgcctaggtgtgggagggcggaccgtgggcgccctgccaagggggccaagacagaattcacgcctgggccttccactcctcttaatgcctgaagaagctcgtcttttggctgaaatcggagccgtaacactcgtgtctgctccgcggcctgattcccgtcaccacagcctagccctgacaagtttcaaacgacaacaagaggaaagtttccaggagcagtccgccctggcagcagaagctcgcgaaacacgcaggcaggaacttctggagaagatcacagaaggccaggccgcaaagaagcagaagcttgaacaggctagcggggccagctccagccaggaggcaggaagctcacaagctgctaaagaggacgagacatccgatgggcaggcctcaggggagcaggaagaagcgggacctagcagtagtcaggctggcccctcaaatggcgtggcccccctacctcggtcggctctgctggtgcagctcgcgaccgccaggccccggcccgtcaaagctagaccactggattggcgtgttcaatcaaaggactggccccacgcagggcggcccgcccatgaactcagatactcaatctatcgcgacttgtgggaacgcgggttttttcttagtgccgcaggcaaattcgggggttag

SEQ ID NO: 139083 - DNA, 1581 bp, synthetic construct
  misc_feature 1..1581: note = Description of Artificial Sequence: Synthetic coding sequence
  source 1..1581: mol_type = other DNA
atggaaccagaacccgagcccgctgcagtcgaggtccctgctggcagggtcttgtccgctcgtgagctttttgctgcaagatcaaggtctcagaaactgcctcaaaggtcccacggcccaaaggatttcctccccgacggctcggctgctcaagctgagcgcttgcgccgatgtagggaggaattgtggcagctgcttgccgagcagcgggttgagcgtctgggttctcttgtcgctgcagagtggcgacccgaggaaggattcgtcgaactgaaatcccctgcaggaaagttctggcagacaatgggattcagtgagcagggacggcagcgactccatcccgaggaagccctctacctcctggaatgtggatccatacatctctttcaccaggacctgccgcttagcattcaggaagcctaccaactgctgctcaccgatcatactgtcacgttcctgcagtaccaagtgttctcccatctgaagcgactgggctacgtggtgagaagatttcagcctagttctgtgcttagcccgtacgagaggcagttaaatctggacgcgagtgtgcagcacctagaggacggggacgggaaacgcaagcgatccagcagtagcccgcgctcaatcaataaaaaagctaaggcgttagacaactccttacagcccaagtcactcgcggctagttctccccctccctgcagccagccctctcagtgtccggaagaaaagcctcaggaaagttcacccatgaagggccctggaggtcccttccagttactaggctcgttgggcccatcgccaggccccgccagagaaggcgtcggctgtagctgggagtctgggcgggctgagaacggcgtcactggggctggaaaacgacggtggaattttgagcagatctcttttcctaatatggccagtgatagtaggcacacattgctaagagctcctgctccagaactgttgccagcaaatgtggctggacgggaaactgacgccgaaagttggtgtcagaagctaaaccaaagaaaggaaaaactgagccgacgcgagcgggagcaccacgcagaagcagcccagtttcaggaggatgtgaatgcagatcctgaagtgcagcggtgcagctcttggcgcgaatataaggagttgctgcagcgtagacaagttcagagatcgcagcggcgggccccgcatctgtgggggcagccagtgacgccactcctgagtcccggtcaggctagcagcccggctgttgtcctccagcatatctccgtgttgcagacaacccatctgccagacggcggagctcgtctgctcgagaaaagtggcgggcttgagatcatcttcgatgtgtaccaggccgacgctgtggccacatttaggaaaaacaatcccgggaagccatacgcacggatgtgcatctccggctttgatgagcccgtaccagatctgtgtagccttaagcgcctgagctatcaatcaggcgatgtgccccttatctttgcactggtggaccacggtgacatctctttctactccttccgggacttcactctaccccaggatgtaggccactag

SEQ ID NO: 139084 - DNA, 594 bp, synthetic construct
  misc_feature 1..594: note = Description of Artificial Sequence: Synthetic coding sequence
  source 1..594: mol_type = other DNA
atgggattcagtgagcaaggccgacagcgtctgcacccagaagaggccctgtatctcttggaatgcggatctatccacctgttccatcaggatctgccactcagcatacaggaggcataccagttgctgctgactgaccataccgtgacctttctgcagtaccaggtgtttagccacctgaagaggctgggatacgtggtgcggaggttccagccttccagcgttctgagtccatatgagaggcagctcaatctcgatgcaagtgtgcagcacctggaggacggcgatggaaaacgaaagcgatccagttcaagtcctcggtccataaataaaaaggcgaaggccctcgacaatagcttgcagccaaaatctctggctgcgagctctcccccgagcggaacatcccggtgccctcgcatgtggggtacagacttgaccgccttacagagaatggagttggcccccggcgacagagactgcctcttctctggaacgatctctgccgctagttgtacgcagacactcacctgttccttcagaggccagagcggcccttggccatgggtatcagacacccatcgggtgaaattatag

SEQ ID NO: 139085 - DNA, 534 bp, synthetic construct
  misc_feature 1..534: note = Description of Artificial Sequence: Synthetic coding sequence
  source 1..534: mol_type = other DNA
atggagcccgaaccagaacccgcagccgtggaagtcccggctgggcgggtcctaagcgcacgagaattgttcgccgcgcgctcacggtcacagaagctgccccagcgatcacacggcccgaaggactttctgccggacggctcagctgctcaagcggagagactgagacgctgtcgcgaagagttgtggcagttactcgctgaacagcgagtcgagcgactgggttcccttgtggctgccgagtggcgccccgaagagggtttcgtagagcttaagtcacccgctggcaagttctggcaaaccatggggtttagtgagcagggtcgacagcgcttacacccagaagaagccctttacctgttggaatgcggtagtattcatctttttcatcaggacctgccactctccattcaggaggcttaccaactgctcctcaccgaccacactgttacattccttcagtaccagcctcccgaagaggtgggactgtgcggaagcaccatacccacaaaattgtgccctgtgcctgtatag

SEQ ID NO: 139086 - DNA, 4296 bp, synthetic construct
  misc_feature 1..4296: note = Description of Artificial Sequence: Synthetic coding sequence
  source 1..4296: mol_type = other DNA
atggaccgccggaacgactatggctaccgggtgcccctttttcagggacccctgcctccacctggctctctgggccttccatttccacctgatatccaaacagagactactgaagaagattctgtcttgctcatgcatacgctgttagcagccaccaaggatagtctggccatggatccacccgtagtcaatcgtccgaagaaatcaaagacgaaaaaggcaccaatcaagacaatcaccaaagcagcccccgccgctccacccgtgccagccgctaatgagatcgccacaaataaaccaaaaatcacatggcaggccctgaatttaccagtcatcacccagatctcacaggctctacccactaccgaggtgaccaacacgcaagcctcgagtgtcactgctcagccaaagaaggcaaataaaatgaagagagtaacagcaaaggcagcacaaggatcacaatcaccgaccggtcacgaagggggaacaattcaactaaagagtcctttgcaagtcctgaagcttcctgtgatatctcagaacattcacgcccctattgcaaatgagtctgcatcaagccaggccctgataacctctatcaagccaaagaaggcctccaaagccaagaaagcggccaacaaggccatcgcctcagctaccgaagtctctctggcagcgaccgccacccatacagctacaactcagggacagatcactaatgagaccgcttccatccacacaaccgctgccagcatccgtaccaagaaggcctccaaggcccgtaagacaatagctaaggtaattaatactgacactgagcacattgaggctttgaacgttacagacgcagctactcgtcagattgaagcctccgtggtggctattcgacccaagaagagtaagggtaagaaagccgcatcacgcggccctaattctgttagcgagatctcagaagcaccacttgcaactcagatcgtaacgaaccaagccctcgcagccactctgcgagtcaaacggggcagcagggcccgcaaggcagcaacaaaggcacgagccacagagagtcagacaccgaacgcagatcagggcgcccaggccaagattgcaagcgcacagaccaatgtttctgccctagagacacaagtagccgccgcagtgcaagcgctggccgacgattacctggcacagctttcactggagccgacaactcggacgcgcggtaagcgcaatcgcaaatcaaagcacttgaacggtgacgagcgtagtggtagtaattacagacgaataccctgggggcgccgtccggccccgcctcgagacgtcgcaatcttgcaggagagggctaacaagttggtaaaatatctgttggtgaaagaccagacaaaaataccaatcaagcggagcgatatgctccgggatgtcatccaagaatacgatgaatactttcctgagattatagagcgggctagttacaccttagagaagatgtttcgcgtgaacctcaaggaaatcgacaagcagtcttctctgtacatcttaatctcaacccaggaatctagtgcaggcatcctcggcactactaaggacactcctaagctaggcttgctcatggtgatcctcagtgtaattttcatgaacgggaacaaggccagtgaagcagtgatctgggaggtgctcaggaaactcggactgcgccccggagtccgtcattctttattcggggaggttcgaaaactgatcacagatgagtttgtgaagcaaaagtatctcgagtacaaacgggtccctaatagccggcctcccgagtacgaatttttctggggtttaaggtcataccacgaaacctctaagatgaaggtgctgaagtttgcatgtagggtgcagaaaaaagatccaaaagattgggccgttcagtaccgggaagccgtggagatggaagtgcaagccgctgccgtggctgttgcggaggccgaagcccgcgcagaagcaagagcacagatggggattggggaagaagccgtggctgggccttggaattgggatgacatggacattgactgtctcacccgcgaggagctgggagacgatgctcaggcgtggtcccgattttcgtttgaaattgaggcaagagctcaggagaacgccgacgcctccaccaacgtcaacttctcacgcggagcatcaacacgggccggtttttctgatggggcgagtatcagctttaacggggcaccttcttcaagtggggggttctcaggcggaccaggtatcacctttggggtcgccccgtctaccagtgcatccttttctaacaccgcaagcataagttttggaggaactctcagcacctcaagttccttctcctctgccgcgtctatcagctttgggtgcgcacactccactagtacgtccttctcatctgaggcctcaattagcttcggtggaatgccctgtaccagcgcatctttttctgggggcgtgtccagctcattctccggaccacttagcacatccgcgacctttagtggcggagcatccagcggctttggcgggacactgtccactacagctggatttagtggcgtgctttctacttccacctcattcggatctgctcctaccacttcgaccgtatttagtagtgccctgtccacttccacaggctttggcgggatactgagcacctccgtatgtttcggagggtctcccagtagtagcggctcctttggcgggaccctctccacctctatttgctttgggggcagtccatgcacctcaacaggctttggcggcacgcttagcaccagtgttagcttcgggggatcctccagtacctctgcaaacttcgggggcacgttgagtaccagtatctgtttcgatgggtcacctagcaccggagccggattcgggggcgccctgaatacaagcgcctcttttgggagcgtgttgaatacaagtacagggttcgggggagcgatgtcaaccagtgcagacttcggcggaactctgtctacctccgtctgtttcgggggcagccccggtaccagcgtttcctttggctcagccctgaacaccaacgctggctacggcggagccgttagcaccaacaccgactttggtgggaccctgagcacctcagtgtgcttcggcggatctcctagcacatctgctgggtttgggggcgcgctcaacacaaacgcctccttcggttgcgccgtctctacatctgccagtttttctggcgccgtgtcgacttctgcctgtttctcaggcgcaccaatcaccaacccaggcttcggaggcgcattttcaaccagcgccgggtttggaggtgccttgagcacggcagccgacttcggcgggaccccctccaacagcatcgggttcggcgcagcaccaagcactagtgtgagcttcggaggagcccacgggacgtccttgtgcttcggaggggccccttcaacctccctgtgttttggctcagcttctaatacgaacttatgcttcggcggtcctcctagcacaagcgcatgcttcagcggcgcaactagccccagcttttgcgatggaccctccacctcaaccggattcagcttcggaaatgggctgtctaccaacgctggctttggtggtgggctcaataccagcgccggcttcggcggcggcctgggaacctctgccggattcagtggcggcctgtccacatccagcggctttgacggaggcctgggaacaagcgctggctttggaggtggcccagggacaagtaccggttttggaggcggcctagggaccagcgccgggttttctggcggccttggcacttcagccggcttcggggggggtcttgtcacctcggatggttttggaggtggactcggcacgaatgcctcattcgggagcactttgggaactagtgccggattcagcgggggtttaagcacatctgatgggtttggcagtaggccaaacgcctccttcgaccgcggattgtcaacaatcataggttttggaagcgggagcaacacatctacaggtttcaccggcgagccctccacttcaaccggatttagctcggggcccagcagcattgtagggttctctggcggcccgtctacgggcgtggggttttgctcagggccaagcacctccggattttccggtgggccttcaactggggccggatttgggggtggccccaataccggcgccggctttggggggggaccatctacgtcagccggctttggttcgggggccgcgagcctgggcgcttgcggcttcagctatgggtag

SEQ ID NO: 139087 - DNA, 2121 bp, synthetic construct
  misc_feature 1..2121: note = Description of Artificial Sequence: Synthetic coding sequence
  source 1..2121: mol_type = other DNA
atggacagacgcaacgactacgggtatcgtgtcccgttgttccaaggacccctgcctcctccaggctccctgggcctgcccttcccacccgacatccagaccgaaactaccgaggaggatagcgtgttacttatgcacaccctcctggcggcaaccaaggattctttggcaatggaccctcccgtggtcaatcgcccaaaaaagagcaagacgaagaaggctcctattaagaccattactaaggcagcccctgccgctccaccggtgcccgccgccaacgagatcgctacaaataagccaaagatcacatggcaagccctgaaccttcccgttattacacaaatcagccaggccctaccaaccaccgaagtgaccaacactcaagctagcagcgtcacagcacagcctaaaaaagcaaataaaatgaagagagttacagccaaggccgcgcaagggtctcagtctcccacaggccatgagggtggcacaatccagctaaagtccccactgcaggtattgaaactgcctgtcatctctcaaaacatccacgcccccatagctaacgagagtgcttcctcacaagccctgatcaccagcattaaacctaaaaaagcttcaaaggcaaaaaaggccgccaacaaggctatcgccagcgcgacagaagtcagtctcgccgcaacagctacccatacagccaccactcagggccagattacgaacgagacggcttctattcataccactgcagcttcgattaggactaaaaaagctagcaaagcccggaaaacgatcgccaaagtgattaataccgacaccgagcacattgaggcattaaatgtaacggatgccgccaccagacagattgaggcttcggtggtagcaattcgtccaaaaaagagcaaaggaaagaaggcagcatctcgaggccccaacagcgtttctgaaatcagtgaggcgcctctggcaacccaaattgtgactaaccaagcccttgccgcaacactgcgtgtgaaacgcgggtccagagcacgaaaggcagctaccaaagcccgcgctaccgagtcgcaaacaccgaacgccgatcagggtgcccaggccaagattgccagcgcccaaaccaacgtgtcagccctggagacccaagtggcagccgcagtgcaggccctggccgacgactaccttgcccagctctcgctagagcctaccaccaggacccgcggcaaaagaaataggaagtcaaagcacctgaacggagatgaaaggagcgggtctaattacagaaggattccttgggggagacgccccgcccctccaagggatgtggcgatcctgcaggagagggccaacaaacttgtgaaatatctgctcgtgaaagaccagacaaaaatcccgataaagagatcggatatgctgagagatgtcatccaagaatatgatgaatacttcccggagatcattgagcgcgcttcttatacgttagagaaaatgtttcgcgtgaatctcaaggagatcgataagcagagctcgttatatattctgatttccacccaggaatcttccgcaggcatactgggaactactaaggatacacccaaattagggctgctgatggtcatcttgtcagtgattttcatgaacggaaacaaggcctctgaagccgtgatctgggaggtgctaagaaaacttggactcaggcctggggtaagacacagtctgttcggagaggttagaaaactgatcacagatgagtttgtaaagcagaaatatttggagtataagagggtacctaatagccgacctccggagtacgaatttttctggggcctgcggtcttatcacgagactagcaaaatgaaagttctgaaattcgcctgcagagtgcaaaaaaaagatcccaaggactgggccgtccagtacagagaggctgtggaaatggaagtgcaggcagccgcagtggccgtggcggaagccgaagccagagccgagatatatagtccttgccttcaaatcccattaattaactgcagttctccttcccacggcgctaaagtgcacccttggaacctgtgcccccattcttctcagggctcctatgggcagtccgcagagggcgtgatgtag

SEQ ID NO: 139088 - DNA, 1074 bp, synthetic construct
  misc_feature 1..1074: note = Description of Artificial Sequence: Synthetic coding sequence
  source 1..1074: mol_type = other DNA
atggatagacgcaatgattatggctatcgagtgccactcttccagagcaaacatctcaacggggacgaacggtccggctccaattaccgtcgaattccatggggccggagaccggcacccccccgtgacgttgcaatcctgcaggagagggcgaacaagctggtgaagtacctgctcgtgaaggatcagaccaaaattccgatcaaacgctccgatatgttacgcgacgtaatccaggagtatgatgagtacttcccagaaatcattgaacgcgcttcttacactctggagaagatgttcagggtcaaccttaaagaaatagataaacaatcttctctgtacatccttatatctacccaggagagtagtgccggcattctggggaccactaaggatacccctaaattagggctgttgatggtcatcctgtctgtaatctttatgaatgggaataaggcaagcgaggccgttatctgggaggtgctcagaaagctagggctcaggccaggagtccgccactctctgtttggagaggtgaggaaactgataaccgatgagtttgtcaagcaaaaatacctagagtataagagagtgcccaactctcgtccaccagaatacgagttcttctggggtctcaggtcctatcacgagacctccaagatgaaggtgctgaagtttgcctgccgggtgcaaaaaaaggacccaaaggattgggcagtccagtacagggaggccgttgaaatggaagttcagctgcagctgtggctgtggttgcggttaaaacccggtctgtcaggcagcaataccagcacaggatttactggcgaaccctctactagcactgggttttcctcaggtccctcttccatcgtcggcttcagcgggggtcccagcacaggggtcgggttctgttctggtccaagtacctccggatttagcggcgggccatccaccggagcaggctttggaggcggaccaaacaccggagcaggctttggcggtggtccgtccactagcgccggcttcgggtccggagcagccagcttgggcgcttgtggattctcttatggctag

SEQ ID NO: 139089 - DNA, 2121 bp, synthetic construct
  misc_feature 1..2121: note = Description of Artificial Sequence: Synthetic coding sequence
  source 1..2121: mol_type = other DNA
atggatcgtagaaacgattatggctatcgggtgcccttgttccaaggtcccctacctcctccagggagcttagggctcccttttccgccagacatacagacagaaactacagaagaagattccgtgctgttaatgcacacattgcttgccgcgaccaaagactcccttgcaatggatcccccagtggtgaataggcctaaaaagagcaaaacaaaaaaggcaccaatcaagacaattacaaaggctgcaccagccgcaccgcccgtccccgcagccaatgagattgctacaaataagcctaagattacgtggcaggcgttgaatctgcccgttatcactcagatatcccaggcactgccaacaacggaggttaccaacactcaggccagcagtgttaccgctcagcccaaaaaggccaacaaaatgaaaagggtcacagccaaagctgcacagggatcccaatctcctaccggccacgaggggggcacaatacagctcaaatcgccgctgcaggtccttaagctccctgttatcagccagaatatccacgcacccatcgcaaacgagtctgcttctagccaagcgctgatcacatcgatcaaacctaaaaaggccagtaaggctaagaaggctgcaaataaggctatcgccagcgcaactgaggtaagtctggctgccacagccactcacaccgccaccacacaaggccagatcactaatgaaactgcgagtattcataccaccgccgctagtatcaggaccaaaaaggcatccaaagcaaggaagactatagccaaagttatcaatacggacaccgaacacatagaagctctgaacgtcaccgacgctgctacgcgccagatcgaggccagtgttgttgctattagaccaaagaaatcaaagggcaagaaagctgcctcaagagggcctaacagtgtgtccgagatcagcgaggctccattagctactcagattgttactaaccaggccctggccgcaacactcagggtaaagagaggctctcgggcacgcaaagccgccaccaaagccagggctacagaatcccagacccctaatgctgaccagggggcgcaggcaaaaatcgctagcgcgcaaacaaatgttagcgcactggaaacgcaggtggccgcagccgtacaggctcttgctgacgattatctcgcccagctctctctggagccgacaactcgcacccggggtaaacgaaatagaaaatcaaaacacctgaacggagacgagcggagcggaagtaactaccggcgcattccgtggggacgccgacctgctccacctcgcgacgtcgccatcctgcaggagcgggccaacaagctggtgaaatacctcctcgtgaaggatcagaccaagatcccaattaagcggtctgacatgttgcgggacgtaattcaggaatatgacgaatacttccctgaaatcatcgagagagcctcatacaccctggagaaaatgtttcgagtaaacttgaaggagatagataagcagagcagcctttatatcttaatttcaacccaggagagctcagctggtatcctcggcaccactaaggacacacctaaattaggcctgctgatggtcattctcagtgtcatcttcatgaatggcaacaaagcgtctgaagcagtgatctgggaggtcttgcgcaaactgggcctgaggcccggcgtccgccattcactgtttggggaggttagaaagctcataactgacgaatttgtgaagcagaagtacctcgaatacaagagagtccctaattcccggccacctgagtacgaatttttttgggggttacgatcttatcatgagaccagtaaaatgaaagttctgaaatttgcttgtagggtgcagaagaaggatccaaaggactgggccgtccaatacagagaggcggtggaaatggaagttcaagctgctgcagtggctgtggctgaagccgaggcacgcgcggaaatctatagcccttgtctccaaattcccctgattaactgttcaagcccctcacacggcgcgaaggtacatccttggaatctctgtcctcactctagtcagggcagctatggccagtctgcggagggcgtgatgtag

SEQ ID NO: 139090 - DNA, 3105 bp, synthetic construct
  misc_feature 1..3105: note = Description of Artificial Sequence: Synthetic coding sequence
  source 1..3105: mol_type = other DNA
atggatcgcaggaatgattacggatacagggttccgctctttcagagtaagcatctgaatggtgatgagcgcagtggatcaaattatagacgcatcccctggggccggcgccctgcaccaccaagagacgtggctattctgcaagaacgtgctaataaacttgtgaaatatctgctggtcaaggaccagactaaaatacccattaagcggagtgacatgcttagagacgtgattcaggaatatgacgagtacttcccagagatcatcgagcgggcatcttacactctggagaagatgtttagagtgaacctgaaggaaattgacaaacagtctagtttatatatcttaatttcaactcaggaatcatcagccggcatcctagggaccaccaaagatacaccaaagttgggtctgcttatggtgattttatctgtgatctttatgaatgggaataaggctagtgaggctgtgatctgggaggtcctgcgcaagctgggcttacgtccgggagttaggcattcactgttcggggaagtccggaagcttattaccgatgaattcgtgaaacagaagtatctggagtataagcgcgttccaaatagtcggcctcccgagtacgaatttttctggggcctgagaagctatcacgagactagcaaaatgaaggttctgaagtttgcctgcagggttcagaaaaaggaccctaaggattgggctgtgcagtaccgggaagccgtggagatggaggtgcaggcagccgctgtagctgttgctgaagctgaggcccgtgcagaggcaagagcccaaatggggatcggcgaggaggcggtggccggaccctggaactgggacgacatggacattgactgccttaccagggaggagcttggggatgacgctcaagcatggagtaggttttctttcgaaattgaggctcgggcgcaggaaaacgcagacgccagcacgaatgttaatttcagccgcggggccagtacacgcgcaggcttctctgatggcgcctccatatcttttaacggcgctccatcttcctctggcggattttctggaggtccaggtattaccttcggggtagctcccagtacctcggcgtctttctcaaatacagcatcaatctccttcggtggtactttgagtaccagtagctccttctccagcgcggcctcaatcagcttcgggtgtgctcactctacatcaacctccttcagcagcgaagcttccatttccttcgggggtatgccatgtacttcagcctcctttagcggcggcgtgtcatcaagtttttcagggcccctttcaactagcgccacattctccggtggagcctccagtggattcggcggtactttgagtacaactgcagggttttctggagtactgagcacttccacatccttcgggtccgcacctaccaccagtactgtgtttagcagcgcactatctaccagcactggcttcggcggcatcctaagcacatctgtgtgctttggaggaagtccaagttccagcgggtcctttgggggtaccttgtctacttctatatgctttggggggtccccttgtacttcgacaggattcgggggaacattaagtactagtgttagtttcggagggagtagttctactagcgcaaatttcggcggcaccctcagcacctccatttgctttgacggctcccctagcacgggcgccggcttcgggggcgctctgaacacttctgcgtcatttgggtccgtcctaaatacatcaacagggttcgggggagcaatgtccacctcggccgatttcggtggaacactgtcaaccagcgtttgttttggaggatctccaggaacgtccgttagtttcggaagtgctttgaataccaatgctggctacggcggcgcagtctctaccaacacagacttcgggggcacactctctacttctgtctgctttggaggctcacccagcacctccgcaggctttggtggagcgctgaacaccaacgcttccttcggatgtgctgtgagcacaagcgcgagcttttccggagccgtgagcacgagtgcctgctttagcggcgcgcccattactaaccctggatttggtggcgctttctccacctctgcagggtttggcggcgctctctctaccgccgctgactttggggggaccccaagtaatagcattgggttcggggccgcaccatcgacatctgtatcctttgggggtgcacacggaacctctctgtgtttcggcggggctccaagtaccagcctgtgcttcgggtcggcttccaacactaacctgtgcttcggaggcccaccatccaccagcgcttgtttctctggcgccaccagcccttcattctgtgatggaccctctacctccactggatttagtttcggcaacgggctgagcactaacgctggttttggcggcggcctgaatacatccgccgggttcggtggcgggttaggcactagcgcagggttcagtgggggcctgagcacaagcagtgggttcgacgggggtcttggcacctccgccggcttcggaggagggcctggtacgagcaccggctttggaggcggcctcggcaccagcgcaggattttctggaggactggggacatccgcagggttcggcgggggccttgtgacttccgacgggttcggcggaggattgggaactaatgcctccttcggaagcaccctcggtacctcagccggtttttccggcgggctttccacgtctgacggatttggatctcggccaaatgcctccttcgatagagggctgtctacaattattggttttggatctggctcaaacacctcgacaggattcacaggcgagcccagcacgtcgactggcttttcttcaggacctagttccattgtaggcttcagcggtggccccagcacaggagtcggcttctgctccgggccaagtacctctggcttttcaggagggccgagtacaggcgcgggatttgggggtggccccaacacaggagctgggttcggtggcggcccctctacttccgccggctttggatctggggccgctagccttggcgcttgcggtttttcttacggctag

SEQ ID NO: 139091 - DNA, 693 bp, synthetic construct
  misc_feature 1..693: note = Description of Artificial Sequence: Synthetic coding sequence
  source 1..693: mol_type = other DNA
atgcacactttgctggctgccacaaaagactcactggcaatggatcctcctgttgtgaaccgtcccaaaaaatccaaaacaaaaaaagcccccatcaagacaatcactaaggccgccccagctgccccccctgtgccggccgctaacgagatcgccacaaataagccaaagattacctggcaagccctcaatttgcccgttatcacccaaattagccaagctctccccaccaccgaggtcactaatactcaggcctccagcgtgactgcccaaccaaaaaaagcaaacaaaatgaagcgggtcacggccaaggccgcacagggaagtcaaagccctacagggcacgagggaggtacaatacaactcaagtctcccttgcaggtgctgaagttacctgtcatcagtcagaacatacacgcaccgatcgctaatgagagtgctagttcgcaggccttgattacttcaattaagcccaagaaggcatcaaaggccaaaaaagctgcaaataaggccattgcctccgccacggaggtgtcacttgcagcaaccgccacccacactgccacaacgcagggacagattaccaacgagacagcttcaattcacacaaccgccgcttcaataaggaccaagaaggcgtcgaaagctcgtaagaccatcgctaaagtaatcaacaccgacaccgagcactag

SEQ ID NO: 139092 - DNA, 510 bp, synthetic construct
  misc_feature 1..510: note = Description of Artificial Sequence: Synthetic coding sequence
  source 1..510: mol_type = other DNA
atggatagaaggaacgactatgggtatcgggtcccgttgtttcagggcccacttccaccccccggatccttaggactgcccttcccgcctgacatccaaactgagaccaccgaagaggacagcgtcctgcttatgcataccttactggctgcgacgaaggattccctcgcaatggaccccccagtggtgaaccgacctaaaaaatccaaaaccaaaaaagcccctattaagacgatcaccaaggccgcccctgccgccccccccgtaccggccgctaacgagatcgccacaaataagcctaagattacatggcaggccctaaatctccccgtgatcacccagattagccaggccttgcccactactgaggtcacaaacacccaagccagcagcgtaaccgcccagcctaaaaaagcgaacaagatgaagcgtgttaccgccaaggcagctcagggcagccagtctcctacagggcacgagggcggaactatccaactcaagtccccctag

SEQ ID NO: 139093 - DNA, 2889 bp, synthetic construct
  misc_feature 1..2889: note = Description of Artificial Sequence: Synthetic coding sequence
  source 1..2889: mol_type = other DNA
atgctgcgagatgttattcaggagtatgatgagtacttccccgagattatcgaacgcgcctcctatacactggaaaaaatgtttcgggtgaacctcaaggagatcgacaaacaaagctccctctacattctgataagtacgcaggagtcaagcgcgggcatcttgggtacaaccaaagacactcctaagctcggactcctgatggtcattctgagcgtcattttcatgaatgggaataaagccagtgaggcggtcatttgggaggtcctccgcaagctgggcttacgacctggcgtgagacatagcctgtttggcgaagtgcgcaagctgattaccgacgaattcgtaaaacagaagtatctggagtacaaacgagtgcccaattcaaggccacctgaatatgagttcttttggggactccggtcatatcacgaaactagcaaaatgaaagtgttgaaattcgcctgtagagtccaaaaaaaggaccctaaggattgggccgtgcagtaccgggaggccgtcgagatggaggttcaggctgccgccgtggccgtcgcggaagcggaagctcgggcagaggcgcgagcccagatgggaatcggggaggaagctgtcgccggcccatggaactgggatgatatggatatcgactgcctgaccagggaggaattgggagacgatgctcaggcctggtcacgtttctccttcgagatcgaagcccgggcccaggagaacgccgatgcaagcacgaatgtgaacttcagccgaggtgcgtcaaccagagccggcttttccgatggtgcaagtatttcatttaacggcgccccttcatctagcggggggtttagcggaggacctgggatcactttcggcgtcgcacccagcacatccgcctctttttcaaacaccgcgagcatttcctttggcggcaccttgtccacatcttccagcttttcgtctgccgcctccataagttttggctgtgcacattctacttctacaagttttagtagcgaggccagtatttctttcggcggaatgccgtgcacctccgcctcattcagtggcggagtgagctcttcttttagcggaccgctgtcaacatcagctactttctccggtggcgcgtctagtggctttggaggcactctcagcacaactgcgggattctcaggagttctgtctacctccaccagcttcggcagtgcgccaaccacttctacagtgtttagctccgcactgagtacatctactggcttcggtgggattctgtccacgagcgtctgctttggtgggtcacccagctcttcggggtctttcggaggtaccctgagcacttctatatgttttggaggttcgccttgtacctctactgggtttggcggtaccctcagtacctccgtgtcatttggcggctctagtagcaccagcgctaactttggcggcacactctcaacatccatctgctttgatgggtcgcccagtaccggcgcgggattcggcggggccttaaacactagtgcaagttttgggagtgtccttaatacttcaactggttttggcggagccatgtccactagcgctgactttgggggaacactgagcacctccgtctgttttggtgggtcccctggcaccagtgtaagttttggttcagcgttaaatacgaacgcagggtacgggggagccgtgtctacaaatactgattttgggggaacactttcaacctctgtgtgctttggtggatcacccagcaccagtgctggattcggtggtgcactgaataccaacgcttcctttgggtgtgccgtttctaccagcgctagcttctctggcgccgtgtcgacctcagcgtgctttagcggcgccccgattactaacccaggctttggtggagcattcagtaccagcgctgggtttgggggtgcgctcagtacggccgctgactttggaggcacacctagcaactctatcggctttggcgccgcacccagtacctccgtgtccttcggaggggcccatggcaccagcctttgcttcggcggggcgccaagcacttcactctgtttcggatcagccagcaacacaaatctgtgctttgggggccctccctcaaccagcgcatgcttcagtggcgctacatctccatccttttgcgatggcccgagtacctctacgggcttctctttcggcaacggactctcaaccaatgccggcttcggtggtgggctgaacacaagtgctggattcggtggagggctcggaacgagcgccggtttctctggtggactaagtacaagctctggttttgacgggggcctgggcacctctgccggattcggaggaggcccagggacatcaactgggtttgggggtggcttgggcacatcagcagggttctctggtggtctgggcactagcgcaggattcggcgggggcctggttacttctgatggatttggaggcggtttagggaccaatgccagctttggcagcacattgggcactagtgccggcttttccgggggcctaagtacatcagatggatttggcagccggcccaatgcatcttttgaccgcggattgtctaccataatcggcttcggcagcggctccaataccagtacgggatttactggggagccatccacttctaccggcttttcatcaggaccaagttccatcgtgggattctccggtggaccttcaaccggcgtggggttctgttccgggccgagcacatccgggttctctggcggaccttccacaggtgccggcttcggcggtggtcctaacactggggcagggttcggcggtgggccctccacctctgctgggttcggcagcggtgccgcctctctcggggcctgtggatttagctacggatag

SEQ ID NO: 139094 - DNA, 366 bp, synthetic construct
  misc_feature 1..366: note = Description of Artificial Sequence: Synthetic coding sequence
  source 1..366: mol_type = other DNA
atgcacaccttgctggccgcaaccaaagatagccttgcaatggaccctccggttgtgaaccgaccgaagaagtctaaaactaaaaaggcacccattaagactatcaccaaagccgctccagcagctcccccagtgccggctgccaacgaaatcgccacaaataaacctaaaataacctggcaggccctgaacctccccgttatcactcagatctcacaggccctaccgactaccgaggtgacaaatacacaagcatccagtgtgacggcgcagccaaaaaaagccaataagatgaagagagtgactgcgaaggctgcgcaggggagccagagtccgaccgggcacgaggggggcaccattcagtag

SEQ ID NO: 139095 - DNA, 579 bp, synthetic construct
  misc_feature 1..579: note = Description of Artificial Sequence: Synthetic coding sequence
  source 1..579: mol_type = other DNA
atgcacactttgctagcggctaccaaagatagccttgctatggatccccccgtcgtgaacagacctaagaagagcaaaaccaaaaaagcccccattaagaccatcacaaaggctgcccccgccgctccgcctgtgcctgccgccaatgagatcgctaccaataagccgaaaatcacatggcaggctctaaatttgcccgtcattacgcagatcagtcaggccttgccgaccacggaggtgaccaacactcaagcgtcgagcgtaaccgcccagcctaagaaagcaaataagatgaagcgcgtgaccgcaaaagccgcccaaggcagccagtcacccaccggccacgagggcggtacaattcaattgaaatcccctctccaggtgctgaaactacctgtaatctcccaaaatattcacgccccgatcgccaacgaaagtgcaagttctcaggcacttataactagcattaagcctaaaaaggccagcaaggcaaaaaaggctgccaataaggctatcgcatcagctactgaagtcagcttggcagcaacagcgacccacacagccactacacagggatag

SEQ ID NO: 139096 - DNA, 531 bp, synthetic construct
  misc_feature 1..531: note = Description of Artificial Sequence: Synthetic coding sequence
  source 1..531: mol_type = other DNA
atggatcggcgcaatgattatggctatagggttcctctcttccaggggcccctgcctcctccggggagcctggggctgccgtttcctcctgatatacagactgaaacgaccgaagaagattctgtgttactcatgcacacccttctggctgctaccaaggactcactggcaatggatccacccgtagttaatcgcccaaaaaagtctaagactaaaaaggcccctattaagaccattacaaaggccgcaccggcagcccctccagtgccagctgccaacgaaatcgcaacaaacaagcccaagataacttggcaggccctcaacctccccgtgatcactcagatctctcaggccctccccacaacagaggtgacaaacacccaagcatctagcgttacggcccagcccaaaaaggctaataagatgaagagagtcacggccaaggccgctcagggctcccagtcccctacaggccatgaagggggcactattcagcttaagtcacccctgcaggtgttaaagctgccctag

SEQ ID NO: 139097 - DNA, 507 bp, synthetic construct
  misc_feature 1..507: note = Description of Artificial Sequence: Synthetic coding sequence
  source 1..507: mol_type = other DNA
atggatagacgtaatgactacggttaccgcgtgccgctatttcaagggcccctcccacccccagggtccctgggacttccttttcctccagacatccagactgaaacaacagaggaggactccgtcctgctgatgcatacactcctggccgcaacgaaagatagcctggccatggatcctcctgtggtgaatcgaccaaagaagagcaagactaaaaaggccccaattaagacgattaccaaagccgctcccgctgcccccccggtgccagctgctaatgagatcgcgactaacaaacctaagataacgtggcaagcgctcaacctaccagtcattacccagatctcccaagccctccccaccacagaggttacaaacacccaggcaagttccgtcaccgcccagcctaaaaaagccaataagatgaaaagagttactgccaaggccgcccagggctcacagtcccccacggggcacgaggggggaactatccaactgaagagctag

SEQ ID NO: 139098 - DNA, 2046 bp, synthetic construct
  misc_feature 1..2046: note = Description of Artificial Sequence: Synthetic coding sequence
  source 1..2046: mol_type = other DNA
atggaccgacggaacgattatggataccgcgtgcctctgttccagggacccctgccccctcccggatcactgggcctcccttttcctccagacatccagaccgaaacaacagaagaggacagcgtgctgctgatgcataccctgctggcagcaactaaagacagcttggctatggatccccctgtcgtgaatcgaccgaagaagagcaagacgaaaaaagcacctataaaaactataacaaaggcggcaccggcagcccctcccgtgcccgcagcaaatgagatcgctaccaacaagcctaaaatcacttggcaggctctcaacttgccagtcattacccagatatcacaggccttacctacaactgaggtaaccaatacccaggcctcgagcgtcacagctcaaccaaaaaaggccaacaagatgaagcgagtaaccgcaaaagccgcccagggctcgcagagccccaccggacacgagggcgggaccatacagctcaagagcccactccaggtactgaagctccccgtgatttcacagaatatccacgccccaattgccaacgagtccgcctctagccaggccttgattacatccattaagccaaagaaagccagcaaggcgaaaaaagcagctaacaaagctatcgcatctgccacagaggtcagtctggctgctactgcaactcacacagcaacaacccagggacagatcaccaatgaaactgcctctatccacacaaccgctgcttcaataaggacaaagaaagcttccaaagccagaaaaaccatagcaaaggtgattaacacagatacggagcacatagaggctttgaacgtgacagatgcagccacccgccaaattgaagccagcgtggtggcgataaggccaaaaaagtcaaagggcaaaaaggcggcgtccaggggtcccaatagcgtgtccgaaattagcgaagctcccctggccacccagatcgttacaaatcaggccctagctgccaccctgagggtgaaaagaggctcacgggcccgaaaagcggctactaaagcccgcgctacagaatctcagacccctaacgccgatcagggagctcaagccaaaatagcttcagcccaaacgaacgtatccgctttggagacccaagtggccgccgcagttcaggcactggccgatgactacctagcacagctgtccttggagcctacaacccgaacccgcggaaaaagaaaccgcaaaagcaaacacctgaacggggatgagagaagtggctccaattatcgccgaataccgtggggacgtcgaccagcccctccaagggatgttgctattttgcaagagcgtgccaataagctggtaaaatatctgctcgtcaaagaccagacaaagattcctatcaagagatccgacatgcttagggacgtcatacaagagtacgacgaatacttcccagaaatcatcgaaagggcaagctacaccctcgagaaaatgttccgggtgaacctaaaagagattgataagcagtccagcttatatatcctgattagtacccaagagtcctctgcaggaattctcggcaccactaaggacacccccaagcttggcttgttgatggttattttgagtgtgatctttatgaacggtaataaagcgagcgaggcggttatttgggaagttctccgcaaactaggccttcggcctggggttcggcattcactgttcggggaggttagaaagctgatcactgacgagtttgttaagcagaaatatctggaatacaagagagtgcctaacagcagaccccccgaatatgagtttttttggggattgaggtcctatcacgaaacttcaaagatgaaagtgttgaagttcgcatgccgggtacagaaaaaggaccctaaagactgggccgtgcagtaccgcgaagcagtggagatggaggtccaagcagcagctgtagcagttgctgaggccgaggctagagctgagtggtttcagcaccagcactggctatactggagaacacagcaccaacacggcttgcagtag

SEQ ID NO: 139099 - DNA, 372 bp, synthetic construct
  misc_feature 1..372: note = Description of Artificial Sequence: Synthetic coding sequence
  source 1..372: mol_type = other DNA
atgcacaccctgcttgctgctaccaaagattccctggccatggatccgccagtcgtgaatcgcccgaaaaaaagcaagactaagaaggcccccattaaaactatcaccaaggctgcgcccgccgctccgcctgtgcccgccgctaatgaaatagcaacaaacaagcccaaaatcacatggcaagcactaaatttgcctgtgatcacccagatcagccaggcactgccgacgactgaggtgactaacacccaagctagctcagttaccgcacagccgaagaaagcgaacaagatgaagcgcgttactgccaaggcggcccagggatcccagtcacccaccggtcatgagggcggcacgatccagcttaagtag

SEQ ID NO: 139100 - DNA, 216 bp, synthetic construct
  misc_feature 1..216: note = Description of Artificial Sequence: Synthetic coding sequence
  source 1..216: mol_type = other DNA
atgcatactctccttgccgccaccaaggactcactcgccatggaccctcctgtcgtaaatcggccaaagaaatctaaaacaaagaaagcccccattaagaccatcaccaaagccgcaccagccgcaccacctgttcccgccgcgaatgagatagcgacgaacaagcccaagattacctggcaggcccttaaccttccagtgatcacccagatttag

SEQ ID NO: 139101 - DNA, 195 bp, synthetic construct
  misc_feature 1..195: note = Description of Artificial Sequence: Synthetic coding sequence
  source 1..195: mol_type = other DNA
atgcatacgctactggctgccaccaaggacagccttgctatggatccacccgtggtcaacagaccaaagaagtctaagactaaaaaagctcccatcaaaacaataaccaaggcagcacctgctgcccctccggtccccgccgcaaatgagatcgcaactaataagcctaagattacttggcaagccctgaactag

SEQ ID NO: 139102 - DNA, 930 bp, synthetic construct
  misc_feature 1..930: note = Description of Artificial Sequence: Synthetic coding sequence
  source 1..930: mol_type = other DNA
atggatcgccggaacgattacgggtatagagtgcccctgttccagtctaaacacttgaatggagacgagcgatcaggaagcaactaccgaagaattccttggggtaggaggcctgcccccccacgtgatgtagccatccttcaggaacgcgccaacaagctagtgaagtatcttctggttaaagaccagacgaagatccccattaagcggtccgacatgttgcgcgatgtgatccaggagtacgacgaatacttccccgaaattattgaaagggcttcctacacattggagaagatgtttagggtcaatctgaaggagatcgataaacagagctcactgtatatcctaatctccacgcaggagtctagcgccggaattctgggcacaactaaggacaccccgaaattaggcctgctgatggtaattctaagcgtgatattcatgaacggaaataaagcctcggaggccgttatctgggaggtgctgaggaagctgggtctgcggccaggagtccggcatagtctgttcggggaagtcagaaagctaattacagacgagttcgttaagcagaaatacctggaatacaagagggtccctaattcacggccccctgaatacgaattcttttggggcctgaggtcctaccacgagacatcaaagatgaaggtactcaagtttgcttgtcgtgtccaaaagaaagatccgaaagattgggcagtgcaatacagggaggccgtcgaaatggaagtacaggccgcagctgtggcagttgctgaggcggaagctcgcgctgagatctacagtccctgtctgcagataccgctcatcaactgctccagcccatcccacggcgccaaggttcatccgtggaacctgtgtccacacagctcccaggggagttacggccagtccgctgagggggtaatgtag

SEQ ID NO: 139103 - DNA, 1263 bp, synthetic construct
  misc_feature 1..1263: note = Description of Artificial Sequence: Synthetic coding sequence
  source 1..1263: mol_type = other DNA
atgcctggaggttgtagccggggacccgcggctggggacggccgcctccgcctggccagattagccctggtgctcctcggatgggtgagctcttcatctcctacctccagcgcctcttcgttctctagtagtgcacccttcctggcctcagccgtgtccgctcagcctcccctaccagaccaatgtccggccctctgcgaatgttcggaagccgcgagaactgtaaagtgtgtgaataggaacctcacagaagtgcccacagacctgcctgcatacgtgcgcaacctctttctgacgggcaatcaattggcggtgttgccagccggtgctttcgcccggcgcccgccattagctgagctggccgctttaaacctgtcagggtcaagactggatgaggtgagagccggggccttcgaacacctacccagtcttcggcagctcgaccttagtcacaacccacttgccgacctcagtccctttgccttctccgggagcaacgcaagtgtttctgcacccagcccactcgtagagttgatactgaaccatatcgttccgcctgaagatgagagacagaaccgcagttttgaaggaatggtcgtcgcagctctgcttgctggtagagccctacagggcttgcgcaggttagaactggcatcaaaccattttctgtacctgccccgggacgtgctagctcagctcccctcccttagacatctcgacctgagcaataacagcttagtgtcactgacctacgtctcctttaggaaccttacacacctggaaagcctccacctggaggataatgccctgaaagtactccataatggcacactagcagagctgcagggcttgcctcacatacgtgtgtttcttgacaacaacccttgggtgtgcgattgtcacatggctgatatggtgacatggctgaaagaaactgaggtggtgcagggaaaggatcggctcacttgcgcttaccctgagaaaatgagaaatcgggtcctgcttgagcttaactctgccgacctggactgtgaccccattttacccccttccctgcaaacctcgtatgtgtttctcggcatcgtgctcgctctgattggagccatatttctgcttgttctgtacttaaacaggaaagggataaagaagtggatgcacaatattagggatgcctgccgcgaccacatggagggctaccattacagatatgaaattaacgctgaccccaggctgaccaacctttcctctaattctgacgtatag

SEQ ID NO: 139104 - DNA, 1263 bp, synthetic construct
  misc_feature 1..1263: note = Description of Artificial Sequence: Synthetic coding sequence
  source 1..1263: mol_type = other DNA
atgcctggaggctgttctcgggggcccgcagccggagacggaaggctgcggttggctcggctagccctggtcctgttgggatgggtctcgtctagctctccgacctccagtgccagctctttctcaagcagcgccccctttctggccagcgctgttagtgctcagcccccactgcccgatcagtgtccggcactgtgcgagtgtagcgaagcagcccgaactgttaagtgcgtaaatcggaatctaactgaagttcctacggatctgcctgcttatgtaaggaacctgttcctgaccggaaaccaactggcagtgcttcctgcgggagccttcgcaagacgccctccactggccgagcttgccgcattgaatctgtccggctctcgactagatgaggtgagggcaggtgccttcgaacacctgccctctctgagacagctcgatctctcccataatccgctcgcagatctgtccccgttcgcttttagcggatcaaatgccagcgtttcagccccttcccccctggtggaactgatcttaaaccacatagtgccaccggaagacgaacgccagaaccggtcttttgagggaatggtcgtcgccgccctcctggcaggtagggcgctgcagggtttacgaagactggagctggccagcaaccattttctgtatctacctcgagacgttctggctcagctgccaagccttagacatcttgatctgtctaataatagtctcgtgagtcttacatatgtgtcattcagaaacctgacccatctagaaagcttgcatcttgaggataacgccctcaaggtcctccataatgggaccctcgctgagctgcagggtcttccccacataagagtcttcctcgataacaatccttgggtgtgcgactgtcatatggccgacatggtgacctggctcaaagagactgaagtggtccaaggcaaagatcgcctcacctgtgcgtatccagaaaagatgcgaaaccgcgtgctgcttgaactcaattctgccgatttagactgtgaccccatcttgcctcccagccttcagacaagctacgtgttcttaggcattgtacttgccctaatcggcgcgatctttctgttagtcctttatctgaacaggaagggaattaaaaaatggatgcacaatatcagagacgcgtgcagggatcacatggaaggataccattaccggtatgagatcaatgccgatcctcgacttactaacctctctagtaacagcgacgtgtag

SEQ ID NO: 139105 - DNA, 1263 bp, synthetic construct
  misc_feature 1..1263: note = Description of Artificial Sequence: Synthetic coding sequence
  source 1..1263: mol_type = other DNA
atgccggggggctgttccagaggtccagccgctggcgatggtcgcttaaggctggccaggctggccctcgtgctgctgggatgggtgtcctcctcttctccaacaagctctgcctccagcttttcctcaagcgccccctttctcgcatctgcagtaagtgcccagcctccgcttccggaccagtgtccagcactctgcgagtgtagtgaggcagctcgcaccgtgaaatgcgtcaatcgtaacctgacagaagtgcctacagatctgccagcttacgtgcgcaatctgtttttaaccggcaatcaattagctgtgctgcccgcaggagccttcgctcgccgccctcctctggccgaactggccgcactgaacctttcgggttcaagactggacgaagtccgggccggcgcattcgagcatctccccagtctgcggcaattggatctcagccataaccctcttgctgacctcagtcctttcgccttcagtgggagtaacgccagtgtctcggcgccatcaccactggtcgagctgattttgaaccatattgtgccccccgaggacgagcggcagaaccgatcttttgaaggtatggttgtggctgctttgctcgctggacgcgctcttcagggcttgaggagactggagttagcatccaaccattttctctacctgccacgggacgttctcgcccagctaccttccctccggcatctggatctctccaataattctctagtgtcccttacttatgtaagttttagaaatttgacacacttagagtctctacacttggaggacaacgcgcttaaagtgctgcacaacggcacactggccgaactgcagggattgccacacatccgagttttcctggataacaacccctgggtgtgtgactgccacatggctgatatggtcacgtggctgaaagagaccgaggtcgtgcagggcaaagatcgcttgacttgtgcatatcctgaaaagatgcgcaatcgagtgttacttgagcttaactccgcagaccttgattgcgatccgatcctgcctcctagcctccagaccagttacgttttcttgggtatagtcctggctctcattggagccatttttctgctggtcctctacctcaatcggaaaggcatcaagaagtggatgcataacattagggacgcctgccgggatcacatggaaggataccactacaggtacgaaattaacgccgacccgcgtctcaccaacctgtccagcaactcagatgtgtag

SEQ ID NO: 139106 - DNA, 1056 bp, synthetic construct
  misc_feature 1..1056: note = Description of Artificial Sequence: Synthetic coding sequence
  source 1..1056: mol_type = other DNA
atggcattgccctttcaaaaggaacttgaaaagtataagaatattgacgaggacgagcttttgggcaaactgagcgaagaagagctcaaacagctggagaatgtcctagacgatttggaccccgaatccgctatgctacccgcaggcttccgtcagaaggaccagactcagaaagctgctacagggccttttgaccgtgagcatctgctgatgtatctggagaaggaggcgctagaacagaaagatagagaggacttcgtccccttcaccggggagaaaaaagggagggtctttatccctaaggagaagcctattgaaaccaggaaggaggagaaagtaaccttggacccggagctggaagaggctctggcttctgcaagcgatacagagctgtatgacttggccgcagtgttaggcgttcacaatctgctgaataaccctaagtttgatgaggagacagcaaacaacaagggaggtaagggccctgtgcgcaacgtcgttaagggtgagaaggtgaaaccagtgtttgaggagcctccaaatccaactaacgtcgaaatatccttgcaacagatgaaggcaaatgacccctcacttcaggaagtgaatcttaacaacatcaagaatatcccgatccccaccttacgggagttcgctaaggccctggaaacgaacacacacgtgaagaagttttctcttgctgcaacgcggagcaacgaccccgtcgctattgctttcgctgacatgttgaaggtgaataagactttgacttccctgaatatcgaatccaattttattactggcactgggattttggcgctagtggaggctctcaaggagaatgacactctgactgagataaagatcgacaatcaacgccagcagctcggcaccgccgtggaaatggagattgcccaaatgctcgaggagaactccagaatattgaaattcgggtatcagttcacaaagcaaggtccccggacccgagttgctgcagccatcaccaagaacaatgacctcgtgcgtaaaaaaagggttgaggctgacagacggtag

SEQ ID NO: 139107 - DNA, 948 bp, synthetic construct
  misc_feature 1..948: note = Description of Artificial Sequence: Synthetic coding sequence
  source 1..948: mol_type = other DNA
atggccctgccttttcaaaaagagctagagaaatataaaaacatcgacgaggatgaacttttagggaagctatcagaggaggaattaaaacagctcgagaacgtcctcgacgacctcgaccctgagagcgcaatgttgcccgccgggtttcgacagaaagatcagacccagaaggccgctacggggccctttgatagggaacacttgttgatgtatctggaaaaagaggccctcgagcaaaaagaccgcgaggactttgttccctttactggggaaaagaagggccgagtatttatcccaaaggaaaagcccatcgagacccggaaagaagaaaaggtgacattggacccggagttggaagaagcattggcatccgccagtgataccgagctttacgatctagctgccgtgctaggagttcataatctactcaacaatccgaagttcgacgaggagactgcgaataataagggtggaaagggacccgttcggaacgtggttaagggcgagaaggtaaagccagtctttgaagaaccccctaaccctactaacgtcgagatctcgctgcagcaaatgaaggcaaacgaccctagcctccaggaggttaacttgaataacataaaggcctttgcggacatgctcaaggttaataaaacgcttacctctctgaacattgagtccaactttataacaggtactgggatccttgcactggtggaggccctgaaagaaaacgatacccttacagaaatcaaaattgacaaccagcgccagcagctggggactgccgtagagatggaaattgcacagatgttagaggagaacagtcggatcttgaaattcggatatcagtttacgaagcagggtcctcggaccagggttgccgccgctattacaaagaacaacgatctggtgcggaagaaaagggtagaggccgacaggcgatag

SEQ ID NO: 139108 - DNA, 1059 bp, synthetic construct
  misc_feature 1..1059: note = Description of Artificial Sequence: Synthetic coding sequence
  source 1..1059: mol_type = other DNA
atggcgttaccatttcgtaaggacctcgaaaagtataaggatctagacgaagacgaactgctaggaaaccttagtgaaaccgagttaaaacagctggagacagtgcttgacgacctagaccccgagaacgcactcctccctgcagggttccggcagaagaaccagaccagcaagtctacaactgggccattcgacagagaacaccttctgtcttacctggaaaaggaagctctggagcacaaggacagggaagattatgtcccatatactggggaaaagaagggcaaaatcttcattccgaagcagaagcccgtgcagacgttcaccgaggaaaaagttagtctggacccagagctggaggaagctcttacttctgcgtcagataccgagctatgcgaccttgccgccatcctgggtatgcacaatctgattaccaacacaaagttctgcaacatcatgggatcatctaatggggtagatcaagagcacttcagtaatgtggtgaaaggggagaagatcctgccagtgtttgacgagccaccgaatccaactaatgtcgaggagtccctcaaaagaacaaaggaaaacgacgcccacctggtcgaggtaaatctcaacaacatcaaaaatatacccatcccaacattgaaagactttgctaaagctctggaaactaatactcacgttaagtgcttcagtctggctgctacccgaagtaacgaccctgtagcaacagctttcgcagagatgctaaaggtcaacaagacgctcaagtctctgaatgtggaatcaaacttcattacgggcgtcggtattctggccttgattgacgcactacgagataacgaaacccttgctgagctgaaaatcgataaccagagacagcagctaggcacggcagtggaattggagatggctaagatgcttgaagaaaataccaacatcctgaaattcggttaccagtttactcaacagggaccacgcaccagggcggccaacgcgatcacgaaaaataatgacttagtcagaaagcgccgtgtcgagggtgatcaccagtag

SEQ ID NO: 139109 - DNA, 1059 bp, synthetic construct
  misc_feature 1..1059: note = Description of Artificial Sequence: Synthetic coding sequence
  source 1..1059: mol_type = other DNA
atggccttacccttccggaaggacctggagaagtacaaagacctggacgaagacgagctcctcggaaacctctccgagaccgagttaaagcagttggaaacggtccttgacgatctggatcctgagaatgcactgcttcccgccggttttcggcaaaagaaccagacctctaaaagtaccactggaccattcgacagggagcacttgctgtcctatttggagaaagaagcgttagaacacaaagatagagaagattacgtcccttatacgggcgagaagaagggcaagatatttatccctaagcagaaaccagtgcagacttttactgaagagaaagtgagtctcgatccagagctggaagaagccctaacctccgcttccgacaccgaattgtgcgacttggctgccatcctgggaatgcacaacttaattaccaacacgaaattttgcaacatcatggggtcctctaatggagtcgatcaggagcacttcagcaacgtggtgaagggtgagaagatcctgccagtgtttgatgaacctccgaaccccaccaacgttgaggaatctcttaagagaaccaaggagaatgatgcacatttagtggaagttaatcttaataacattaaaaacattccaatacccacattgaaggacttcgccaaggccctggaaaccaatacacacgtgaaatgcttctcactggccgcgacacgtagcaatgacccagtggcaacggccttcgccgaaatgctgaaggtgaataagacgctgaaatctttgaatgtagaatcaaatttcatcaccggggtaggcattctcgccctgatcgatgccttgcgagataatgaaaccctcgccgaactgaagattgataaccagcggcagcaactaggtacagccgtggagctcgaaatggcaaagatgctggaagaaaatacgaatatactcaagttcgggtatcagttcacacagcaggggccccgaacaagggccgcgaacgccatcacaaagaacaatgacctagtacggaagaggcgggtcgaaggggaccatcagtag

SEQ ID NO: 139110 - DNA, 102 bp, synthetic construct
  misc_feature 1..102: note = Description of Artificial Sequence: Synthetic coding sequence
  source 1..102: mol_type = other DNA
atggccttaccattcaggaaagacctcgagaagtataaagaccttgatgaagacgaactgctggggaatttgtctgagacagaactaaaacagctcgagtag

SEQ ID NO: 139111 - DNA, 1038 bp, synthetic construct
  misc_feature 1..1038: note = Description of Artificial Sequence: Synthetic coding sequence
  source 1..1038: mol_type = other DNA
atgagttcttaccaaaaagagttggagaaatacagggacatcgatgaagatgagattctgaggacactgtcaccggaagagctcgagcagttggactgcgagttacaggagatggaccccgagaatatgctgctgccagccgggttaagacagcgggaccagaccaagaagagtccaaccggcccattggatagagaggcattactccagtacctggaacaacaggctctggaggtcaaggagagggacgacctggtgcctttcacgggcgagaaaaaggggaagccctatattcagccaaagcgggaaattcccgctgaagaacagattacacttgagcccgagctggaggaggcacttgcacacgcgacggatgccgaaatgtgcgatattgcggcaatcctcgatatgtacacgctgatgtctaataaacaatattacgacgctctgtgctcaggagaaatttgtaacactgaaggaatttccagcgtggtgcaaccagacaagtataaacccgtacccgatgaaccacccaaccctacaaacatcgaggagattctgaaacgcgtcagatccaacgataaggagctagaagaggtgaaccttaacaacattcaagacattcctatcccaatgctctccgagctttgtgaggcaatgaaagccaatacttacgtaaggagcttcagtctggtcgccacacggagtggcgaccccatcgccaacgcggtcgcagacatgttacgggaaaacagaagcctgcagagcctaaatatcgaaagtaattttattagcagtacaggattgatggccgtcttaaaagcagtgagagagaacgccactctcacggaacttcgggtcgataaccagcggcagtggccaggcgacgcagtggagatggagatggccaccgtcttggagcagtgccctagcatcgtccggttcgggtatcattttacgcaacaggggccacgagcccgcgctgcccaggctatgaccaggaataacgaacttaggagacagcagaagaaaaggtag

SEQ ID NO: 139112 - DNA, 831 bp, synthetic construct
  misc_feature 1..831: note = Description of Artificial Sequence: Synthetic coding sequence
  source 1..831: mol_type = other DNA
atgtctagctaccagaaggagctcgaaaagtacagagatatagatgaagatgagatcctgcggacattgtctccagaggagcttgaacagctagattgcgagttacaggagatggatccagaaaatatgctgttgcctgcagggttgagacagcgtgatcagaccaagaagtctcccaccggcccccttgaccgagaggcactccttcagtatctggagcagcaggctctggaagttaaggaacgggacgaccttgtgcctttcacgggcgaaaaaaaaggggtcgtgcagccagacaaatacaagcccgttcctgatgagccacctaacccaaccaatattgaggagattctgaagcgggtcaggtctaacgacaaagagctggaagaggtgaatttaaataatatccaggatatccccatacccatgttgagtgagctatgtgaggccatgaaggccaacacctacgtgcgatcgttctccctggtagccaccagatccggcgaccctatcgccaatgcggtggcagatatgctaagagagaaccggtcgctgcagtccctgaatatagagtccaactttataagttccactggtctcatggctgtcctcaaggcggttcgggagaacgccactctcaccgagcttcgagttgataaccaaaggcagtggcccggcgatgctgttgaaatggagatggctacggtgctggagcagtgtccatcaatcgtaagattcggatatcactttacacagcaggggccacgagcccgtgcagctcaggcgatgacacgcaataacgagctccggagacagcagaaaaagaggtag

SEQ ID NO: 139113 - DNA, 429 bp, synthetic construct
  misc_feature 1..429: note = Description of Artificial Sequence: Synthetic coding sequence
  source 1..429: mol_type = other DNA
atgagttcgtaccagaaggagttggaaaaataccgggacatcgatgaggacgagattctgaggacgctctcacccgaagagctggagcagctcgactgtgaattacaagaaatggacccagagaacatgctcctgccagcaggcctgcgccagcgggatcaaactaaaaaaagtccaactggtcccctagatcgggaggccttgctgcagtacctggagcaacaggcgctggaggtcaaagagcgagatgaccttgtcccatttacaggcgaaaagaaggggaaaccatacatccagcccaagagggaaattccagctgaggagcagatcacactcgagcctgagctggaggaggcccttgcgcatgcgaccgacgccgagatgtgcgatattgctgccatactcgatatgtataccctcatgagctag

SEQ ID NO: 139114 - DNA, 855 bp, synthetic construct
  misc_feature 1..855: note = Description of Artificial Sequence: Synthetic coding sequence
  source 1..855: mol_type = other DNA
atggatgctatcaagaagaagatgcagatgttgaagctggacaaagaaaacgcactcgaccgcgccgaacaggccgaggcagataagaaggccgcagaagacagatccaagcagctcgaagaagatatcgccgccaaagagaaactgctgcgcgtgagcgaggatgaacgcgatcgcgtgcttgaagaacttcacaaggctgaggacagcttgttagctgcggaagaggcagccgctaaggcggaagctgacgtggcttctctgaatagacgcatacagttggtggaagaggagctggatagggctcaggaacggctcgccacggctctgcagaagctggaagaggcagagaaggcggccgacgagagcgaacgtggcatgaaggtgatcgaaagtagggcccagaaagacgaggagaagatggagatacaggagattcagctaaaggaggccaagcacatagcagaagacgccgatcgcaagtatgaggaagtggcgaggaaacttgttatcattgagtccgacctggagagagccgaagaacgcgccgagctgagcgagggcaaatgtgcagagctggaggaggaacttaagaccgtgaccaacaatctgaagtccttggaagctcaggctgagaagtattctcaaaaggaggataggtacgaggaagaaatcaaagtgctgtcagacaaacttaaagaggctgaaacccgggccgaattcgccgaacggtctgtcaccaaactggaaaaatccatcgatgacctcgaagaaaaagtcgctcatgcaaaggaggagaacctgtcaatgcatcagatgctggaccagacactactggagctcaacaatatgtag

SEQ ID NO: 139115 - DNA, 855 bp, synthetic construct
  misc_feature 1..855: note = Description of Artificial Sequence: Synthetic coding sequence
  source 1..855: mol_type = other DNA
atggacgccataaaaaaaaaaatgcaaatgctcaagcttgacaaagagaacgcactggaccgcgccgaacaagccgaggccgacaaaaaggccgcggaggaccgcagcaagcaattagaggacgagctcgtttccttgcagaagaagttaaaagggactgaggatgaactcgacaaatattccgaggcactgaaggatgcccaggagaagcttgaattggcggagaaaaaggctaccgacgccgaggccgacgtcgcctcattgaacagaagaattcagctggttgaggaggagctggatagggcccaagagagactcgctaccgccctgcagaagctggaagaggcagagaaggcagctgacgagtccgagcgcggcatgaaggtcatagagtccagagcacagaaagatgaagagaagatggagattcaggagatacagctcaaggaggccaagcatatcgcagaagatgccgataggaagtatgaagaggtggcccgcaagcttgtgattatcgagtccgatctcgaacgtgccgaagaacgagctgaactcagtgaggggcaggtacggcagttagaggagcagctccgaatcatggatcaaaccttaaaagccctaatggccgccgaggataagtacagccagaaggaggaccgttatgaagaagagataaaggtactctcagataaattgaaggaggcagaaaccagagccgaattcgctgagcgcagcgtcacaaagctcgagaagagtatagacgatctggaggatgagctatacgcccagaagctcaagtacaaagccatttccgaggagttagatcacgccttgaacgacatgacttctatgtag

SEQ ID NO: 139116 - DNA, 738 bp, synthetic construct
  misc_feature 1..738: note = Description of Artificial Sequence: Synthetic coding sequence
  source 1..738: mol_type = other DNA
atggctggaagttcttctctcgaggccgtccgcagaaaaattagatccttacaggagcaggctgatgccgctgaggagagagccggaactcttcaaagagaattggatcatgaaaggaagcttcgggagacagctgaggcagacgtggcttcccttaaccgacgcatccagctggtagaggaggagctggacagagctcaggaacgcttggcgactgccctccagaagctcgaggaggcagagaaggcagcagacgaatcggagcgaggaatgaaagtgatcgagtctagggcccagaaggacgaagaaaagatggagattcaggagatccagctgaaggaagccaagcatatcgccgaagatgctgacagaaaatacgaagaagttgcccgtaaactggtcatcatcgaaagtgacctggagcgcgcggaggagcgagccgaactgtccgagggaaagtgcgccgagctggaagaggaactgaagactgtcacgaacaacctaaaatcactggaggcacaggcagaaaagtattcccaaaaggaggatagatatgaggaagaaataaaagtgttgtccgataaactgaaagaggcggagacacgcgccgagttcgccgagaggtcagtgaccaaactggagaagagcatagacgacctggaagaccagctctatcagcagctcgagcagaacagacgcctgaccaacgagctgaagctagcactgaatgaggactag

SEQ ID NO: 139117 - DNA, 981 bp, synthetic construct
  misc_feature 1..981: note = Description of Artificial Sequence: Synthetic coding sequence
  source 1..981: mol_type = other DNA
atggatgccataaagaaaaagatgcagatgctaaagcttgataaggagaatgccttggatcgcgcagagcaggctgaggcagacaaaaaggcagcggaggaccgatcaaaacagttggaggaggatattgccgctaaagagaagcttctgagggtgagcgaggatgaaagggatcgagtattagaggagttacataaagcagaagatagcctgctggctgctgaggaggccgccgccaagctggaagacgaactcgtgtcactgcagaaaaagctgaaggggacagaggatgaacttgacaagtacagcgaggccctcaaagatgcgcaggagaagctcgagttagcggagaaaaaagcgacagacgccgaagccgacgtggcctccttgaatcgcaggatacagctcgtggaggaagagcttgatagggcacaggaaaggctggctaccgccctgcagaagcttgaagaagccgagaaggcagccgacgagagcgagcgggggatgaaagtgatcgagagccgcgctcagaaagacgaagaaaagatggaaatccaggaaatacagttgaaggaagccaaacacatagctgaagacgccgatcgcaaatacgaggaggtcgcacggaagctggtgattatcgaatccgacctcgaacgcgcagaagagagagctgagctctcggagggcaagtgtgcagaactggaagaagagctgaaaacagttaccaacaaccttaagtcgttggaagcccaggctgaaaagtactcccagaaagaagatcgatacgaggaagaaattaaagtgctatctgacaaattaaaggaggccgagacccgcgcagaattcgcagagcggagtgttaccaagctggagaagtctatcgacgacttagaagaaaaagtagcacatgccaaggaggagaatctcagcatgcatcagatgctggatcagactttacttgagctgaacaacatgtag

SEQ ID NO: 139118 - DNA, 855 bp, synthetic construct
  misc_feature 1..855: note = Description of Artificial Sequence: Synthetic coding sequence
  source 1..855: mol_type = other DNA
atggacgctattaagaaaaaaatgcaaatgctgaagctggataaggaaaatgccctggaccgagctgagcaagccgaggcagacaagaaggccgccgaggatcggtcaaagcaactggaagacgaactggtgagtctgcagaagaaactcaaggggactgaggatgaacttgacaaatattccgaggctctcaaagatgctcaggaaaaactcgaacttgccgaaaaaaaagccaccgatgccgaggctgacgttgcgagcctgaaccgtcgaatccagctggtggaggaagagctggaccgggctcaagagaggctcgcaactgctctgcaaaaactcgaggaagccgagaaagctgctgacgagtccgaaagaggaatgaaagtgatcgaatctagggcgcagaaggatgaggagaaaatggagatccaggagatccagctgaaggaggcaaagcatatagccgaagacgccgatcgcaaatatgaggaagtggcccgcaaactagtgataatcgaaagtgatttggaacgcgccgaagaacgggctgaactctctgagggacaggtgaggcagctggaggaacagctgcgaattatggaccagaccttgaaagctttgatggccgctgaagacaaatatagccaaaaggaggaccgctacgaagaggaaatcaaagtgctgtctgacaaactcaaggaggcagaaactcgcgcggaattcgcagagcggtccgttaccaaactggaaaaaagcatcgatgacctcgaagagaaggtcgcacatgccaaggaagaaaatttatccatgcaccaaatgctggatcagaccttgctcgagcttaacaatatgtag

SEQ ID NO: 139119 - DNA, 855 bp, synthetic construct
  misc_feature 1..855: note = Description of Artificial Sequence: Synthetic coding sequence
  source 1..855: mol_type = other DNA
atggatgcaattaagaaaaaaatgcagatgctgaagcttgataaagaaaatgcactagatcgcgcagaacaggccgaagcagataagaaagccgcagaggatcggtccaagcagctggaggacgaacttgtgtccctccaaaagaaactgaagggaacggaagacgagctagacaagtactccgaagctctcaaggacgctcaggaaaagcttgaactcgccgagaaaaaggccaccgatgccgaggcggacgttgcctcattaaaccggagaatacagctggtggaggaagaactagaccgggcccaggaacgactggctaccgctctgcagaagctggaggaagccgaaaaagcagctgacgaaagtgagaggggcatgaaggtaatagagtcaagagcccagaaggacgaggagaaaatggagattcaggagatccagctcaaggaggctaagcatatagctgaagatgccgaccgaaaatatgaggaagtcgcccggaagctggtgattattgaatcggaccttgagagggctgaggagcgggctgagctgtcagaagggaaatgtgctgaactggaagaggaactgaagactgtaacaaataacctgaaaagcttggaagcccaggccgaaaagtactcccagaaggaagatagatacgaagaagagattaaggtgttgtctgacaagcttaaagaggccgagacacgcgctgagtttgctgagaggagtgtcaccaaactagagaaaagcatcgacgatctggaagacgagctgtatgctcagaaactaaaatataaggctattagcgaggagctcgaccatgctttaaacgatatgaccagcatttag

SEQ ID NO: 139120 - DNA, 855 bp, synthetic construct
  misc_feature 1..855: note = Description of Artificial Sequence: Synthetic coding sequence
  source 1..855: mol_type = other DNA
atggatgcgattaagaagaaaatgcagatgctaaagctcgacaaagaaaatgcattggaccgcgcggaacaggctgaggcggataagaaagctgcagaggaccgttctaagcaattggaagaagacattgcagctaaggagaagctcctgcgcgtctctgaagacgagcgcgatcgggttctagaggaacttcacaaggccgaagactccttactggcagccgaggaagccgcagcaaaagccgaagccgacgtcgctagtctaaaccggagaatacagcttgtcgaagaagaactcgatcgggctcaggagagacttgccacagccttgcaaaagctggaggaggcagaaaaggcggccgatgagtctgaacgcggaatgaaagttatcgagtccagggcccaaaaagatgaggagaaaatggaaatacaagagatacagctcaaagaagccaaacacatcgcagaagatgccgaccgaaaatacgaggaggtggctcgaaagctcgttataatcgagtctgacctcgagcgcgccgaggaaagagccgagctgtcggagggacaggtgcgacagctcgaggagcagctacgcatcatggaccagaccttaaaggcgctcatggccgcagaggacaagtactctcagaaggaggatagatacgaggaggagatcaaagttctgtccgacaaactgaaagaagctgagacacgcgcagaattcgccgagcgttcagtaactaaactggagaagagcatcgacgacctggaggagaaagtggcgcacgctaaggaggagaacctgagcatgcaccaaatgctcgatcaaactcttttggagcttaataatatgtag

SEQ ID NO: 139121 - DNA, 855 bp, synthetic construct
  misc_feature 1..855: note = Description of Artificial Sequence: Synthetic coding sequence
  source 1..855: mol_type = other DNA
atggatgcgatcaaaaagaagatgcaaatgctcaagttggacaaggaaaatgctctggacagagctgagcaagcagaggcggacaaaaaggctgccgaagatcgatccaaacaattagaggacgaactcgtgtcactccaaaaaaaacttaaaggaaccgaagatgagttggataagtacagcgaggcacttaaagatgcccaggaaaagctggagctggccgaaaaaaaagctacggacgcagaggctgacgtagcaagccttaatcgcagaatccaacttgtcgaggaggaactggacagggctcaggaacggctagccaccgccttgcagaagctcgaagaggccgagaaggcagccgacgaatcggagaggggtatgaaggtgatcgaatcccgtgctcagaaagacgaagagaagatggagatccaggagatccagctgaaagaagcaaagcacatcgccgaagatgcggatcgaaaatatgaggaggtagctcgcaaactggtgattatcgaaagtgatttggagagagctgaggagagagcagagctatcggagggtaaatgtgctgagttagaagaggaactaaagaccgtcaccaataacttgaaaagtctcgaggcacaggctgagaagtactcccagaaggaagaccgatacgaggaggaaatcaaggtgctgtcagacaagcttaaggaggctgagaccagagcagaattcgccgagcggtccgttacgaagctcgaaaagtccattgatgacctggaagagaaggttgctcacgctaaagaggaaaacctgagtatgcatcagatgctggaccagactctgctcgaacttaataacatgtag

SEQ ID NO: 139122 - DNA, 798 bp, synthetic construct
  misc_feature 1..798: note = Description of Artificial Sequence: Synthetic coding sequence
  source 1..798: mol_type = other DNA
tgacgggctgagcaggcagaagcggacaagaaagcagctgaggatcgaagcaagcaactggaagacgaactggtaagcctgcagaagaagctgaagggtaccgaggacgaactagacaagtatagcgaggccctgaaggacgcccaggagaaactcgagctcgctgagaagaaagctactgatgctgaagctgacgttgcttctctgaacagacgaattcagttagtagaagaagagttggacagagcacaggaaagactcgctactgcactccagaaactggaggaagccgagaaagcagccgatgaaagcgagagaggcatgaaggtcattgagagtcgcgcccagaaagatgaagaaaagatggagatccaggagatccagctgaaagaggccaagcacattgcggaggatgctgacaggaaatacgaggaggtagcacggaagttagtgatcatagaatcagatttggagagagctgaggaacgggcagaactgtctgaaggaaaatgcgctgaactcgaagaggagcttaagactgtgactaacaacctgaagagccttgaagcccaggccgagaagtactcacagaaggaggatcgatatgaagaagagatcaaagttctttcagacaagctgaaagaagcagaaacgagggctgagttcgccgaacgatccgtgactaaactggagaagtctattgacgacctggaagatgagctgtatgcccaaaagctgaagtacaaagcgatatccgaggaactggatcacgccctgaatgacatgacctcaatgtag

SEQ ID NO: 139123 - DNA, 855 bp, synthetic construct
  misc_feature 1..855: note = Description of Artificial Sequence: Synthetic coding sequence
  source 1..855: mol_type = other DNA
atggatgctatcaagaagaagatgcagatgctgaaacttgataaggaaaacgcaatagatcgagcggaacaggctgaagccgataagaagcaggcagaggatcgctgtaagcaactggaggaggaacaacaggccctgcagaaaaagttgaagggtaccgaggacgaagtagaaaagtatagcgaaagtgtgaaggaagctcaggaaaaattggagcaggcagagaagaaggccacggacgctgaggcggatgtggccagtctgaaccggcggattcagctggtggaagaggaattagaccgggcccaggagagactcgcaacagccctgcagaagctcgaggaggctgagaaagcagccgatgagtccgagagaggcatgaaggtgattgaaaaccgcgccatgaaggatgaggaaaagatggagctgcaggaaatgcagcttaaggaggccaagcatatcgccgaagacagcgacagaaagtacgaagaggtcgctagaaaacttgtaatcttggaaggcgagctcgagagatccgaagagcgcgctgaggtcgcagagagcaagtgtggagacctcgaagaggagctgaagatcgtgaccaacaatctcaaatctcttgaggcgcaggccgataagtactctacaaaggaagacaagtatgaggaggagatcaaactcctcgaagaaaaactgaaagaggcagagacacgcgcggagttcgccgaaaggagtgtggcaaaactggaaaagacaatcgacgacttggaagagaccctcgcctccgccaaagaagaaaacgtcgagattcatcagaccttagaccaaacattgctggagctgaacaacctgtag

SEQ ID NO: 139124 - DNA, 855 bp, synthetic construct
  misc_feature 1..855: note = Description of Artificial Sequence: Synthetic coding sequence
  source 1..855: mol_type = other DNA
atggacgctattaagaagaaaatgcagatgctgaaactagacaaagaaaacgctatagaccgggcagaacaagctgaagcagataagaagcaggcagaggataggtgcaagcagctggaagaagaacagcaggccctgcaaaagaaacttaaggggaccgaagatgaggtcgagaagtacagcgagtccgtaaaagaggcacaggagaaactagaacaggctgaaaagaaagctaccgatgccgaagccgatgtggctagcctgaataggagaatccagctggtggaagaagaactggatcgagcgcaggaaagactggccaccgccctccagaaacttgaggaggccgagaaggcggcagacgagtcagagcgtgggatgaaggtcattgaaaacagagctatgaaggatgaagaaaaaatggagctgcaggagatgcaacttaaggaagcgaaacatatcgccgaggatagtgaccgtaaatacgaagaagttgctcggaagttggtcattctagagggggagttggagaggtccgaagagagggcggaggttgccgagtctaagtgcggtgatctggaggaggagttgaaaattgtcaccaataacctgaaaagcctggaagcccaagcagataaatacagcactaaagaagacaaatacgaagaagaaattaaactgttggaggaaaaactcaaagaggctgagactcgggcagagttcgccgagagatcagtagccaagctggaaaagacgattgatgacctggaggacgaggtctacgcgcagaagatgaagtacaaggccatcagcgaggaactggataacgctttaaacgacatcacttcactctag

SEQ ID NO: 139125 - DNA, 855 bp, synthetic construct
  misc_feature 1..855: note = Description of Artificial Sequence: Synthetic coding sequence
  source 1..855: mol_type = other DNA
atggacgcaatcaaaaagaagatgcagatgttgaagctggacaaagagaatgcaatcgaccgcgccgaacaggcggaggccgacaagaagcaagcagaggaccgctgcaaacaactagaggaagagcaacaggccctgcagaagaaattaaaggggacggaagatgaggtggagaagtactcagagagcgtgaaggaagctcaggagaaactggagcaggccgagaaaaaagccactgacgctgaagctgatgttgcctctctaaaccggcgaatccagttggtagaagaggagttggatagggcccaggagcgtctggcaaccgcactccagaaattagaggaagctgagaaggctgctgatgagtcagagcgcggtatgaaggtcattgaaaacagggcaatgaaagacgaggaaaagatggaactgcaagaaatgcagctaaaagaggccaagcacattgccgaggattcagataggaagtatgaagaagtcgctcgcaaactggtgatcttggagggcgaattagagcgatccgaagaacgtgccgaagtggccgagagtcgtgctagacagttggaggaagagctccggactatggaccaagcacttaaatctcttatggctagcgaagaagagtattctaccaaagaggataagtacgaagaagagattaaactgcttgaggagaagctcaaggaagctgagacccgcgccgagttcgctgagaggagtgtggcgaaactggagaaaaccattgacgatcttgaggaaacactggcttcagctaaagaagaaaacgttgagatccaccagacattggatcaaacgctgctcgagttgaataatctgtag

SEQ ID NO: 139126 - DNA, 969 bp, synthetic construct
  misc_feature 1..969: note = Description of Artificial Sequence: Synthetic coding sequence
  source 1..969: mol_type = other DNA
atggacgcaatcaaaaagaaaatgcagatgctgaagctggataaagaaaatgccatagatcgggcagaacaagcagaggcggataagaagcaggccgaagaccggtgcaagcagctcgaagaggagcagcaggcgctgcagaagaaactgaaaggaacagaagacgaagtcgaaaaatattctgaatcggtaaaggaagcccaggagaagttagagcaggcagagaaaaaagccactgacgccgaggctgacgtggcctccttgaaccgtcgaattcagttagtcgaagaagaactggatagagcacaggaaagacttgccaccgccctgcagaaactcgaggaggccgaaaaagccgccgacgagtctgagagaggaatgaaagtcattgaaaatagggctatgaaggacgaggaaaaaatggagctgcaggaaatgcagctgaaagaggcaaagcacattgctgaggatagtgacagaaaatatgaggaagttgcccggaagctagttattcttgagggagaacttgaaaggtctgaggagagagctgaggtggctgagtccaaatgcggcgacctagaagaagaattgaaaattgtaaccaataatcttaagtctctcgaagcgcaggcggataaatattccaccaaggaggacaaatacgaagaagagattaagctgctcgaggagaagttaaaagaggctgaaaccagagccgagttcgcagagcgatcagtggctaaactagaaaagaccatcgacgacctggaggagagcacatcaattgccacgactgagcactggtttactcccgatacgctggcactgactgacacacccagcccatgcaccgagcccacccataagactccctggccaacattgaagcccctgtgtacgggcactccctggctgtccctcagcgactcccccctgcatgttggcacatgtggaccgattaagccctag

SEQ ID NO: 139127 - DNA, 858 bp, synthetic construct
  misc_feature 1..858: note = Description of Artificial Sequence: Synthetic coding sequence
  source 1..858: mol_type = other DNA
atgatggaagccatcaaaaagaagatgcagatgttgaagcttgataaggaaaatgcactggacagagcagagcaggccgaagcagaacaaaagcaagccgaagagcgaagcaagcagctcgaggacgaactcgccgcaatgcagaaaaagctaaagggcactgaggacgaactcgacaaatattccgaggccctgaaagatgcgcaggagaagttagaattggccgaaaagaaagccgccgacgcggaggctgaagtggcctccttgaatcgccgcatccaacttgtagaggaagaacttgatagagcacaagagagactggctaccgctctacagaagttagaggaggcagagaaggcagcggatgaatccgagcgcgggatgaaggtgatcgaaaacagagccctcaaggacgaggaaaagatggaactgcaggagatccagttgaaagaagccaaacacatagctgaagaggcagaccgcaagtatgaggaggtggctcggaaattggtgattatagagggtgatctcgagaggactgaggaacgggcagagcttgccgaaagtaggtgtcgagaaatggacgaacaaatccgactcatggatcagaacctcaagtgcctgagtgcggctgaggagaaatactctcaaaaggaggacaagtatgaagaagagattaagatactgactgacaaacttaaagaggccgagactagggctgagtttgccgagagatcagtggccaaactggaaaagaccatcgatgacttagaggataagctgaagtgtacgaaagaggagcacctgtgtactcagagaatgctggatcaaactctgctggatctgaacgaaatgtag

SEQ ID NO: 139128 - DNA, 744 bp, synthetic construct
  misc_feature 1..744: note = Description of Artificial Sequence: Synthetic coding sequence
  source 1..744: mol_type = other DNA
atggcaggaatcaccacaatcgaagccgtgaagaggaagatccaggtgctgcagcaacaggctgacgacgccgaggagcgcgcggagcgtctgcagcgtgaagtcgagggcgaacggcgggcccgcgagcaagctgaggcagaggttgcatctcttaaccgccgcatccagctagtggaagaggagctggatcgcgcacaggaaagattggccaccgccctacagaagctggaagaagcagagaaagccgccgacgagagtgagcgcggaatgaaggtgattgaaaatcgggcccttaaggacgaagaaaaaatggagctccaagaaatccagctgaaggaggccaaacacatagctgaggaggctgatcgcaaatatgaggaggttgcaagaaaactcgtaattatcgaaggggatctcgagagaaccgaagagcgagccgagctggccgagagcaagtgctcggaactcgaagaggagttaaagaacgtcactaacaacctgaaatcgcttgaggcccaggccgaaaaatactcccagaaagaagacaaatatgaggaagagattaaaatcctgaccgacaagttgaaggaggccgagacgcgtgctgaatttgcagaacgcagtgtcgctaagctagaaaagaccattgatgacctggaagagaggctgtatagccaactggagaggaatcgtctcttgtcaaacgaactgaaactgactcttcacgatctttgtgactag

SEQ ID NO: 139129 - DNA, 747 bp, synthetic construct
  misc_feature 1..747: note = Description of Artificial Sequence: Synthetic coding sequence
  source 1..747: mol_type = other DNA
atggccggaatcaccacaatcgaggcagtgaagcgtaagatacaggtcctgcagcagcaggctgatgacgcagaggaacgcgcagagagactccagagagaggtggagggagagagaagggctagggaacaggccgaagcggaggtagctagtcttaaccgccgcatccagctggtggaggaagaactggatagagcacaggaacgtctggcgaccgccctccaaaaactggaggaagctgaaaaggccgctgatgagagcgagcggggaatgaaagtcatcgagaaccgagcccttaaggacgaagagaagatggagctccaggagatccagctgaaggaggccaaacacatagctgaggaggccgaccgcaaatacgaagaagttgcaagaaagttggtcattatcgaaggggatctcgaaagaaccgaggaaagggcagagttggctgaatcacgttgtagagagatggatgagcagatcaggcttatggaccaaaacttaaaatgcctgagtgccgcagaggaaaaatactcccaaaaagaggataaatacgaagaagagatcaagatcctgaccgataagctgaaagaggccgaaactcgtgcagagtttgctgagcggtccgtcgccaagttagaaaagaccattgacgatctagaggatgaattgtatgctcagaagctgaaatataaggctatttcagaagagctggaccacgccctgaatgacatgaccagtatctag

SEQ ID NO: 139130 - DNA, 747 bp, synthetic construct
  misc_feature 1..747: note = Description of Artificial Sequence: Synthetic coding sequence
  source 1..747: mol_type = other DNA
atggccgggatcactacaattgaagccgtcaagaggaaaatacaggtgctgcagcagcaggctgacgacgcggaagagagggccgagcgactgcaacgtgaggtggaaggggagaggagagctagagaacaggctgaggctgaggtggcctccttgaataggcgcatacagttagtagaggaggagctggatcgcgctcaagaacggttggcaaccgccttacagaagctggaggaggcagaaaaagcagcggatgagagcgagcgtgggatgaaagtaattgagaaccgagctctcaaagacgaagaaaagatggaactgcaggaaatacaacttaaagaagccaaacatattgccgaagaggcggatagaaaatatgaggaagttgcccgaaaactggtgatcatcgagggagacctggagcgcaccgaggaaagagccgagctggcggagagcaagtgttctgagctcgaagaggagctcaagaatgtgaccaacaatttaaaaagtctggaggcacaggcagaaaaatactcacagaaggaggacaagtatgaggaagaaatcaagattctgacagacaagctgaaagaggcagaaaccagagctgaatttgctgaaagatcggtcgcaaaactggaaaaaacaattgacgacctggaggacaaactgaagtgcaccaaggaggaacacctctgcacgcagcgcatgctcgaccagacgttgctagacctcaatgagatgtag

SEQ ID NO: 139131 - DNA, 675 bp, synthetic construct
  misc_feature 1..675: note = Description of Artificial Sequence: Synthetic coding sequence
  source 1..675: mol_type = other DNA
atggcaggcattaccaccatagaggctgtgaaaaggaagatacaggttctgcaacaacaggccgacgacgctgaggagagagctgaaagattgcaacgcgaagtggagggcgaacgaagagcgcgcgagcagcgactggccaccgcccttcaaaagttagaggaggctgaaaaggcagctgatgagtctgagcgcggaatgaaggttatagagaaccgggctctgaaggatgaggagaaaatggagctacaggaaatccagttgaaggaggcaaaacatatcgctgaggaagctgacagaaagtacgaggaggtagcacgaaagctcgtcatcattgagggagatctggagagaacagaagaacgcgctgaactggcagagtctcggtgcagggagatggatgagcagatccgacttatggaccaaaaccttaaatgtctttctgccgctgaggaaaaatactcccaaaaagaggataaatatgaggaagagatcaaaatactcactgataagctgaaagaagccgaaaccagggctgagtttgcagaacggtccgtggctaaactggaaaaaactattgacgacttagaggataaacttaaatgcacaaaggaagaacacctttgtacccagagaatgttagaccagaccctgctggacctcaacgagatgtag

SEQ ID NO: 139132 - DNA, 858 bp, synthetic construct
  misc_feature 1..858: note = Description of Artificial Sequence: Synthetic coding sequence
  source 1..858: mol_type = other DNA
atgatggaggctattaaaaagaaaatgcagatgttaaagcttgacaaagaaaacgctttggatagggcagaacaagcggaggccgagcaaaagcaagccgaagagcgttcaaagcagctagaagatgagttagctgccatgcagaaaaagctaaaaggaacagaggacgagctcgataagtatagcgaggcattaaaggatgcacaggaaaagctcgagctggccgaaaaaaaagcggctgacgctgaggctgaagtagcatccctgaacagacggatccaactcgtggaagaagagctcgacagggctcaggaaagactcgctactgcacttcagaagctcgaggaagccgaaaaggctgctgacgaatcagaacgtggaatgaaggttattgagaatcgggctttaaaagatgaagaaaagatggagttgcaggaaatccaactgaaagaagctaagcacatcgccgaggaggccgataggaagtacgaagaggtcgctaggaaacttgtgatcattgaaggagatcttgagaggacagaggaacgtgctgagttagctgaatccaaatgttccgaactggaggaggaactgaaaaacgtcactaataacctgaaaagcctggaggcccaggccgaaaaatactctcaaaaagaggacaagtacgaagaagagatcaaaatcttgactgacaaactcaaggaggcggaaacccgcgccgagtttgcagaaaggtccgtagccaaactcgagaaaaccatcgacgacttggaggacgagctgtacgctcagaagctaaagtacaaagcgatctcggaggaattagaccacgccctcaatgacatgaccagtatctag

SEQ ID NO: 139133 - DNA, 744 bp, synthetic construct
  misc_feature 1..744: note = Description of Artificial Sequence: Synthetic coding sequence
  source 1..744: mol_type = other DNA
atggctggaataaccactattgaagctgtgaaaagaaagattcaggtcctccagcagcaggcagacgatgccgaagaacgcgcagagcgattgcagcgtgaagtggaaggagagaggcgcgcccgcgagcaagcggaagccgaagtcgcttctttaaaccgtagaatccagctcgttgaagaggagctcgatcgagcacaggaaaggctcgccaccgccttacaaaaattagaagaggccgagaaggcagccgacgaaagcgaacgtgggatgaaggttatagaaaacagggcactgaaagacgaggagaagatggaactgcaagaaatccagctgaaagaggctaaacacattgcggaggaggcagatcgcaagtacgaagaggtggcacgaaaacttgtgatcattgagggagacctggagcgcacggaggagagggcagagctggcagagtccagatgcagagagatggacgagcagatccggcttatggatcagaacctgaagtgcttaagcgctgctgaggaaaagtacagccagaaggaagataagtacgaggaggagatcaagatccttactgataagctcaaagaggcggagacccgagccgagttcgctgagagaagcgtggctaagctggagaaaaccattgatgatctcgaggaaagactttatagtcaattggaaagaaaccgtctgctgtctaatgaactcaagttgacactgcacgacctttgcgattag

SEQ ID NO: 139134 - DNA, 747 bp, synthetic construct
  misc_feature 1..747: note = Description of Artificial Sequence: Synthetic coding sequence
  source 1..747: mol_type = other DNA
atggcgggcataacaaccatcgaagcggtcaaaaggaagatacaggtccttcagcagcaggcggacgacgccgaggaaagagctgagaggcttcaacgagaagtcgagggggaaagacgtgcacgcgagcaggctgaagcagaggtagcatccctcaaccggaggattcagctggtggaagaagagcttgatcgagctcaggaaaggctggccaccgcgctgcaaaagcttgaggaggcggagaaggcagctgacgaatcagagaggggtatgaaagtgatcgagaaccgggcactcaaggacgaagagaagatggaacttcaggaaatccagttaaaggaggctaaacatatagccgaggaggcagacaggaaatatgaggaggtcgccagaaagctcgtcattatcgagggcgaccttgagaggaccgaagagcgggcagaactcgccgagtctagatgcagagagatggatgaacagattaggttaatggaccagaatctgaaatgcctatccgcggcggaagagaagtacagccagaaagaggataaatacgaggaggagatcaagattctgaccgacaagctgaaagaggctgagacacgggccgagttcgctgagagatccgttgcaaaattagaaaagacaattgacgatctagaggataagttaaagtgtaccaaagaggaacacctctgcactcagcggatgctggatcaaaccctcctggatctcaatgagatgtag

SEQ ID NO: 139135 - DNA, 228 bp, synthetic construct
  misc_feature 1..228: note = Description of Artificial Sequence: Synthetic coding sequence
  source 1..228: mol_type = other DNA
atgatggaggcaatcaagaaaaagatgcagatgttaaagctcgacaaagagaatgccctggatcgtgcagaacaagctgaggctgagcagaaacaggcggaagagcggtccaagcagttggaagatgagctggccgctatgcaaaagaagcttaaggggactgaagacgagttagataagtactctgaagctttgaaagatgcccaggagaaactcgagttggcttag

SEQ ID NO: 139136 - DNA, 747 bp, synthetic construct
  misc_feature 1..747: note = Description of Artificial Sequence: Synthetic coding sequence
  source 1..747: mol_type = other DNA
atggccggtttaaattctttagaggccgtaaaacggaaaattcaagccctccagcagcaggcagacgaagccgaagatagagcgcagggcctgcaaagggagctggatggggaaagggagaggcgggagaaggccgaaggcgacgtcgctgccctcaaccggcgcatccaacttgtggaggaagagcttgatagggcccaggaacggctggctacggctctgcagaagctcgaagaggctgagaaggccgccgacgagagcgagcgaggaatgaaagtaattgagaatcgggccatgaaggacgaagagaaaatggagattcaggagatgcagctcaaagaagctaaacatatagccgaagaagccgatcgtaagtatgaggaagtggccagaaagctcgtgatcctggagggcgaattggagcgggccgaagagcgagctgaggtcagcgaacttaagtgcggcgacttggaggaggaactgaaaaatgttaccaacaatttgaagtcactcgaggctgcctcggaaaagtactccgagaaagaggataagtacgaggaggaaatcaagctcctatctgataaactgaaagaagctgaaacacgagctgagttcgccgagagaaccgttgccaagcttgagaagacaatcgatgacctggaagagaaactggcgcaggccaaggaagaaaacgtcggactgcaccagacgttagatcagacactgaatgaacttaattgcatatag

SEQ ID NO: 139137 - DNA, 855 bp, synthetic construct
  misc_feature 1..855: note = Description of Artificial Sequence: Synthetic coding sequence
  source 1..855: mol_type = other DNA
atggaagccataaagaagaagatgcagatgttgaagttggataaagagaacgcgatcgatcgggcagagcaagcggaagcagacaaaaaggcagccgaggacaaatgcaagcaggtcgaggaggagttaacacacctccagaagaagttaaagggaactgaggatgaactggacaaatactccgaagatctgaaggatgcgcaggagaaacttgagcttaccgagaaaaaagcatctgacgcggagggcgatgtcgcagccctgaaccgccgcatccagcttgtcgaggaagagcttgatagagcccaagagcggctggctactgcactacaaaaactggaagaggcagagaaggccgcagatgagagcgagcgagggatgaaggtcattgagaatagggctatgaaggacgaggaaaaaatggagattcaggagatgcagcttaaagaggccaaacatattgccgaagaggccgaccgaaaatatgaggaggtggctaggaagctggtgattttggagggcgagttagagagagcagaagagcgtgccgaagttagcgaactcaaatgtggcgatttggaagaagagttgaagaatgtcaccaacaatctcaagagcctggaggctgcctctgagaaatactccgaaaaagaagataagtacgaggaagaaatcaaattgttgtctgataaactgaaggaagccgagacacgcgccgaattcgcagagcggacagtggcaaagctggaaaaaaccatcgatgacctggaggagaaactggctcaggccaaggaagagaatgtaggcttgcaccagactttagatcagacattgaatgagctgaactgtatctag

SEQ ID NO: 139138 - DNA, 855 bp, synthetic construct
  misc_feature 1..855: note = Description of Artificial Sequence: Synthetic coding sequence
  source 1..855: mol_type = other DNA
atggaggccatcaaaaagaagatgcagatgctcaagctggataaagagaacgcaattgatcgggcagagcaagcggaggctgacaagaaggccgccgaggacaaatgtaaacaggtggaggaggagctgacacacctccagaaaaagctgaaaggcaccgaggacgaactggacaagtacagcgaggatcttaaggacgctcaggagaagctcgagctgactgaaaaaaaagcttcagacgcagagggagatgtcgcggctctgaacaggcgcattcagctcgttgaggaagaactcgatcgcgcccaagaacgcctagcaaccgcactccagaaactagaagaggcagagaaagccgccgacgagagcgagcgcgggatgaaggtgattgaaaatagagccatgaaagatgaggagaagatggagatccaagaaatgcagttgaaggaggcaaagcatattgcagaagaggccgatcgaaaatatgaggaagtggctagaaagttggtgatcctagaaggggagctagaaagagctgaggagagggcagaggtcagtgagctgaagtgcggagacctggaggaggaactcaaaaacgttactaacaacttgaaatccttggaggccgcaagcgagaagtattcggagaaggaagataagtacgaagaagaaataaagctgttgagcgataagttaaaggaggctgagactagggccgaatttgcagagcggactgttgcaaagctggaaaagaccattgatgacctggaggagaaactagcccaggccaaagaagaaaacgtggggctgcaccagacccttgatcaaacactgaacgaactcaactgcatctag

SEQ ID NO: 139139 - DNA, 2244 bp, synthetic construct
  misc_feature 1..2244: note = Description of Artificial Sequence: Synthetic coding sequence
  source 1..2244: mol_type = other DNA
atgggaaggctcaacgaacaacggctgttccagcccgatctgtgcgacgtcgacctggtcctggtaccgcagcgatctgtgtttccagctcacaagggggtgctcgccgcgtattcgcagtttttccactccctgttcacacagaacaagcagctgcaaagggtggagctttccctcgaggcactggcccccggcggcttacagcagatcctgaattttatctacacatccaagctactggtgaatgcagccaacgtgcatgaggtcctttccgcagccagtttacttcagatggccgacattgccgcctcttgtcaggagcttctggacgctaggagcttgggcccacccggcccgggtaccgttgcgctggcccagccagcagcaagttgtaccccggccgcaccaccttattactgcgacataaagcaggaggcggacacgcctggtctgcctaagatttatgccagggagggtccggacccatattccgtacgtgtggaagatggagccgggactgccggaggaacggttcccgctaccattggcccggcccagcctttttttaaggaagagaaggaaggaggtgtagaagaggccggagggccccctgccagtctttgcaagctagagggaggcgaggaattagaagaagaactcggcgggagcggcacctacagcaggagggagcaatcccagatcatcgttgaagtcaatctaaacaaccagaccttgcatgtctccacaggacccgagggaaaacctggcgccggtccctcccctgctactgtggtactgggcagggaggacggcctgcagagacacagcgatgaagaggaggaggacgatgaggaggaagaagaggaagaggaggaagaggaaggcggtggttcaggacgcgaagaggaagaggaggaagagggcggaagccagggcgaagaagaggaggaagaggaagatggccactccgagcaggaagaggaggaggaggaggaagaggaggagggtccatctgagcaggatcaggagtcctctgaagaagaggaaggcgaggagggcgaagcaggcggaaagcagggaccaaggggcagtcgatcttctcgcgccgatccgcctccacatagccatatggcgactcgctccagggaaaacgctaggcggcgagggaccccggaaccagaggaagcaggccgccggggcgggaagcgcccaaaacctcccccgggggtagcttcagcttctgccagaggcccccccgccaccgacggtctgggggccaaagtaaaacttgaagagaaacagcaccatccctgccagaagtgcccaagagtgtttaataacagatggtatctggaaaagcacatgaatgttactcacagccggatgcaaatctgcgaccaatgcgggaaaagattcctcttggaaagtgaattgcttctgcacagacagactgattgcgagcggaacatccagtgcgtcacatgcggtaaggcttttaagaagctgtggagtctgcacgaacataataaaatcgtgcacggatacgccgagaagaagttttcttgtgagatctgcgagaagaaattctacaccatggcccatgtccgcaaacatatggtcgcccataccaaggatatgccatttacttgcgagacctgcggaaagtcttttaaacggtctatgagccttaaggtgcactccctgcaacactctggtgagaagccctttcggtgtgagaattgtaacgagaggttccagtacaaatatcagctacggagccatatgtctatccatattggccacaagcaatttatgtgccaatggtgcgggaaggacttcaacatgaagcaatacttcgatgaacacatgaagacacacaccggtgagaaaccatatatttgtgaaatctgcggcaaaagtttcaccagtaggcctaacatgaagcgccaccgccggacacatacaggcgagaaaccttacccctgtgacgtgtgtggacaaaggtttagattcagcaacatgctcaaagcccacaaagaaaagtgtttccgggtttctcacacccttgctggtgatggggtgcccgcggctcccggacttccaccaactcaacctcaggcccacgctctgccactcctccccggccttccacagaccctcccccctcccccccatctgcctccaccccctcctttgtttcctactaccgccagccccggcggacgcatgaatgcaaacaattag

SEQ ID NO: 139140 - DNA, 483 bp, synthetic construct
  misc_feature 1..483: note = Description of Artificial Sequence: Synthetic coding sequence
  source 1..483: mol_type = other DNA
atgacggaccagcaggctgaagccaggtcttacctatccgaggaaatgatagcagagtttaaggctgcatttgatatgtttgatgccgatggtggaggggacattagtgttaaggagttgggcaccgtaatgcgaatgctgggccagaccccgactaaagaggaactggacgccataatcgaagaggtggacgaagacggcagcggtaccatcgactttgaggaatttctggtgatgatggtacggcagatgaaagaggacgcgaaggggaaaagcgaagaagaactggctgaatgttttagaatattcgatcggaacgccgacggatatatagaccccgaggaattagctgaaattttccgggcttctggtgaacacgtcaccgacgaggagattgagagcctcatgaaggatggcgataaaaataatgatggaaggattgactttgatgaattcttgaagatgatggaaggagtgcagtag

SEQ ID NO: 139141 - DNA, 438 bp, synthetic construct
  misc_feature 1..438: note = Description of Artificial Sequence: Synthetic coding sequence
  source 1..438: mol_type = other DNA
atgatcgccgagtttaaggcagccttcgatatgtttgatgcggatggcggtggcgatatcagtgtcaaagagctgggtactgtcatgaggatgttgggccaaacacctacaaaagaggagctcgatgctatcattgaggaagttgacgaggacggatcaggaaccatcgactttgaggaatttctcgtgatgatggtgagacaaatgaaagaggatgcaaagggtaaaagcgaggaggaactggcggagtgtttcaggattttcgatagaaatgctgatgggtatatcgaccccgaggagctggccgaaattttccgcgcgtctggtgaacacgtgactgatgaagaaattgaatcactcatgaaggatggtgataagaataacgacgggcgcatcgactttgatgaattcctgaagatgatggagggcgtgcagtag

SEQ ID NO: 139142 - DNA, 564 bp, synthetic construct
  misc_feature 1..564: note = Description of Artificial Sequence: Synthetic coding sequence
  source 1..564: mol_type = other DNA
atgcccgaagtggaaagaaagcccaaaatcacagccagcagaaagctcttgctgaaatcattaatgcttgccaaggcaaaagagtgttgggagcaggagcacgaggagcgcgaagccgaaaaggtccggtacctggcagaacggatccccactttgcagacacgcggactaagcctatcggcccttcaggacctgtgtagagagctacatgctaaggtggaggttgtggatgaagagagatacgatatcgaggcgaagtgcttgcataataccagagagataaaagatctaaagctgaaggtgatggacctgcgaggaaagtttaaacggccaccgctgagacgcgtacgcgtatccgctgacgcgatgctaagagctctgctgggctcaaaacacaaggtctccatggatttgcgcgccaatctcaaaagtgttaagaaagaggatacagagaaggaacgccccgtagaagtcggcgactggagaaagaatgttgaagccatgtccggaatggaaggacggaagaagatgttcgacgccgcaaagagtcctaccagccaatag

SEQ ID NO: 139143 - DNA, 564 bp, synthetic construct
  misc_feature 1..564: note = Description of Artificial Sequence: Synthetic coding sequence
  source 1..564: mol_type = other DNA
atgccagaggttcaacggaaacctaagattacggcttcaagaaagctgcttctgaagagcctgatgcttgcaaaggctaaagagtgttgggagcaggagcacgaggaaagggaggcagagaaggtaagatatctcgccgagaggattcccaccttacagacccgtgggttgagtttgtctgccttgcaggatctgtgccgggaactgcacgctaaggtcgaagtggttgacgaagaaaggtacgatatagaggcaaagtgcctccacaacacccgggagattaaggaccttaagctcaaggttatggacctgcgcggtaagtttaaaagaccacccctgagaagagtacgagtatcagccgacgcaatgctgcgcgcccttctgggcagtaagcacaaggttagcatggatcttagagcgaatctgaagtccgttaagaaggaggataccgaaaaggagcgcccagtggaggtgggcgattggaggaaaaacgtggaagccatgtccggaatggaaggcagaaagaaaatgtttgacgcagccaagtctcctacatctcagtag

SEQ ID NO: 139144 - DNA, 564 bp, synthetic construct
  misc_feature 1..564: note = Description of Artificial Sequence: Synthetic coding sequence
  source 1..564: mol_type = other DNA
atgcctgaggtggaacggaagcccaaaattacagccagccggaaactcctcctcaaatctctgatgctggcgaaagctaaggagtgttgggagcaggagcacgaagagcgagaggccgagaaagtgcgctaccttgcagaacggatcccaactctccagacgcggggcctcagcctgagcgccctgcaagatctgtgccgtgagctacacgccaaggtcgaagtggtagatgaggagcggtatgatattgaggccaagtgtctccataatactagagaaatcaaagatcttaaactgaaggtgatggacttgcgcggtaagttcaaaagaccccccctgcgccgggttagggtttctgccgatgcaatgcttagggcactgctggggtccaagcacaaggtgagtatggatctgcgcgcgaacctcaagtcagtgaagaaggaggataccgaaaaagagagaccagtggaagtgggcgactggcgtaagaacgtcgaagcgatgtcgggcatggaaggtagaaaaaagatgtttgacgccgctaaatcaccaactagtcagtag

SEQ ID NO: 139145 - DNA, 564 bp, synthetic construct
  misc_feature 1..564: note = Description of Artificial Sequence: Synthetic coding sequence
  source 1..564: mol_type = other DNA
atgccagaggttgaacggaagcccaaaatcaccgcctctaggaaactcttgctgaaatctctgatgctggccaaggccaaagaatgctgggagcaggagcatgaagaacgtgaagccgagaaagtaaggtatctggccgagcgcattcctaccctccaaaccagggggctcagtctgagcgccctgcaggacctctgccgagagcttcacgccaaggtggaagtggtggatgaggaacggtacgatattgaggccaagtgtttgcacaataccagagaaataaaagacttaaagttaaaggttatggacctgagaggcaagtttaaaagacccccgctgcgtagggtgagggtgtctgccgacgcgatgttgcgcgccctgctcgggtctaaacacaaagtttccatggacctcagggccaacttgaagagcgtcaaaaaagaagacactgaaaaggagaggcctgtggaagtcggcgattggaggaagaatgtcgaggccatgagcggcatggaaggacggaagaagatgtttgacgctgccaagagccccacctcacagtag

SEQ ID NO: 139146 - DNA, 564 bp, synthetic construct
  misc_feature 1..564: note = Description of Artificial Sequence: Synthetic coding sequence
  source 1..564: mol_type = other DNA
atgcccgaggtgcagcggaagccaaagatcacagcctctcgcaaactcctccttaaaagtttgatgctcgccaaagcaaaggagtgttgggaacaggaacatgaagagagagaggctgagaaggttaggtaccttgccgaacgcatacctactctccagactaggggattgtccttgtcagctctccaagatttatgccgcgaactgcacgctaaggtagaagtcgtggacgaagaaagatacgacattgaggccaaatgtttgcataacacacgcgagattaaggacctgaagctcaaagtgatggatctcagaggcaaatttaagcgtccgcccctgcgcagagttcgggtatctgctgatgccatgctgagagctctgctgggctcaaaacataaggtttctatggatctgagagcaaacttgaaatccgttaagaaagaagatacggagaaagaacgacctgtggaagtgggggattggagaaagaatgtggaggctatgagcggaatggaggggcgcaagaaaatgtttgacgcagccaagtcacccacaagccaatag

SEQ ID NO: 139147 - DNA, 414 bp, synthetic construct
  misc_feature 1..414: note = Description of Artificial Sequence: Synthetic coding sequence
  source 1..414: mol_type = other DNA
atgcctgaggtggagagaaagcccaagatcactgcctctagaaagttgctgctcaagtcactgatgctcgccaaagctaaggagtgctgggaacaggaacacgaagaaagagaagcggaaaaagtgaggtatctagctgaacggattcctaccctgcagacacgcggcctgtcgctgagcgctctgcaggacttgtgtcgcgagcttcatgccaaagtggaggtggttgacgaagaaagatatgacattgaggccaagtgcctgcataacaccagggaaatcaaagacctaaagctgaaggtaatggatctccgcgggaaattcaaaaggccaccccttcggcgtgttcgggtgagtgccgatgccatgctccgcgccctcctggggagtaagcacaaagtttcaatggattag

SEQ ID NO: 139148 - DNA, 549 bp, synthetic construct
  misc_feature 1..549: note = Description of Artificial Sequence: Synthetic coding sequence
  source 1..549: mol_type = other DNA
atgtctcagtgcaagaagcgaaaccgggccatcaccgctcgccgccagcatttaaagtcagtgatgctccagatagcagccaccgagctggagaaagaggaatctagaagggaggctgagaaacaaaattatctggctgaacactgtccacctttacatatccctggaagcatgtctgaagtgcaggaactgtgcaagcagctgcacgcaaaaatagacgccgccgaggaggagaagtacgacatggaggttcgggtccagaagacaagcaaagagcttgaagatatgaaccagaagctctttgatctgagagggaagtttaaaaggccacctttgcgtcgcgtacgaatgagtgctgacgccatgctaaaagcacttttggggagtaaacacaaggtatgtatggatctccgcgctaatctgaaacaggtgaagaaagaagacacagaaaaggagcgggacctgcgggacgtgggcgattggcgtaagaatattgaggagaaaagcggaatggagggacgcaagaagatgttcgaaagcgaaagttag

SEQ ID NO: 139149 - DNA, 549 bp, synthetic construct
  misc_feature 1..549: note = Description of Artificial Sequence: Synthetic coding sequence
  source 1..549: mol_type = other DNA
atgggcgatgaagagaaacgcaacagggcgatcacagcacggaggcagcacctgaaatccgtgatgctccagatagcagctacggagctggaaaaggaggagtcccgaagggaagccgagaagcagaattacctcgcagaacattgtccccccctgcacattccagggtctatgtccgaggtgcaggagttgtgtaagcagctgcacgcgaaaatagacgcagccgaggaggagaaatatgacatggaggtgcgtgtgcagaagacctcaaaggaacttgaagacatgaaccaaaagcttttcgatttaagggggaaatttaagcgcccccccctgcgcagagtgagaatgtctgcagacgccatgttgaaagctcttctgggatccaaacataaagtgtgcatggacttgcgcgcaaatttgaagcaggtaaagaaagaggatacagagaaagagcgcgatcttcgcgatgtcggcgactggcggaagaatatagaagagaaaagcggcatggaagggcgcaagaagatgtttgagagtgaaagctag

SEQ ID NO: 139150 - DNA, 549 bp, synthetic construct
  misc_feature 1..549: note = Description of Artificial Sequence: Synthetic coding sequence
  source 1..549: mol_type = other DNA
atgggggatgaggagaaacgcaatagagctatcactgcacgtcggcaacacctcaagtctgtcatgctgcagatagctgccacagagttggagaaggaagagagtaggagagaggctgaaaaacagaattatttggcagaacactgcccccccctgcacatacccggctcaatgagcgaggtgcaggaactatgtaaacagctgcatgcaaaaatcgacgctgccgaggaagagaaatatgatatggaagtgcgagtgcagaagactagcaaggaacttgaagacatgaaccagaaactttttgatcttcgaggtaagtttaaacggcctccattgaggagagtccggatgtctgccgacgctatgttaaaagccctcctcgggtcaaagcacaaggtctgcatggatctaagagcaaacctgaagcaggtcaaaaaggaagataccgagaaagagagggatctgagggacgtgggggattggcgaaagaatattgaggaaaagagcggcatggagggcaggaagaaaatgttcgaaagcgagtcttag

SEQ ID NO: 139151 - DNA, 549 bp, synthetic construct
  misc_feature 1..549: note = Description of Artificial Sequence: Synthetic coding sequence
  source 1..549: mol_type = other DNA
atgggggacgaggaaaagcgcaaccgggccatcaccgcacggcggcagcatctaaagagtgtcatgttgcagatagctgccactgagctcgagaaggaagaatcacgccgggaagctgagaagcagaattacctcgccgagcattgcccgcccttgcatatccctggcagtatgtcggaagtgcaagaactgtgtaagcagttacatgctaagattgacgcagctgaggaggagaagtacgatatggaggttcgagtgcaaaagacctccaaagaattggaagacatgaatcaaaaactattcgatctgagggggaagtttaagcgaccaccacttcgacgagtcaggatgagtgctgacgcaatgttgaaggctcttctcggcagcaaacacaaggtatgcatggatttacgggcaaaccttaagcaagtaaagaaggaggatactgagaaagagagggacctacgggacgtcggggattggaggaaaaatatagaagaaaaaagcggcatggagggaagaaagaaaatgtttgagtcagagtcatag

SEQ ID NO: 139152 - DNA, 633 bp, synthetic construct
  misc_feature 1..633: note = Description of Artificial Sequence: Synthetic coding sequence
  source 1..633: mol_type = other DNA
atggccgatggcagttctgatgcagccagagaacctcgcccagcgccagctcccattaggaggcgctcctccaactatcgtgcctatgctactgagcctcatgcaaagaaaaaatctaaaatcagtgccagccgaaagctgcaactcaagactctattgcttcagatcgctaagcaagagctggagcgcgaagctgaagaaaggagaggcgaaaaggggcgtgctctctcgacacgctgccagccattggagttggcgggcctaggttttgccgaactgcaagatctctgtcgacaactgcatgcacgggttgataaggttgatgaggagcgatacgacatcgaggccaaggtcaccaagaacattacagagatcgccgacctcacccagaaaatatttgaccttcgagggaagttcaaacgcccaaccctgcgcagggtcaggatctctgcagacgcgatgatgcaagcgcttctgggtgctagggccaaggagagcctagacctgcgcgcccatctgaagcaagtgaagaaggaggacacagagaaagagaacagagaagttggggattggagaaagaacatcgacgcccttagcggtatggagggaaggaagaagaagttcgaaagttag

SEQ ID NO: 139153 - DNA, 837 bp, synthetic construct
  misc_feature 1..837: note = Description of Artificial Sequence: Synthetic coding sequence
  source 1..837: mol_type = other DNA
atgtctgacacagaggagcaggagtatgaggaggagcagcccgaggaagaggcagctgaggaggaagaagaggctcctgaggaacccgagccagttgctgagcctgaggaggaacggccgaaaccttcccgacccgtggttcccccattgataccccccaagattcctgagggcgagcgagtcgatttcgacgatatccatcgaaaacggatggaaaaggatttattggagctacagacactgattgatgtgcacttcgagcagcgcaaaaaggaggaagaagaactggtggccctcaaagaaaggatcgagagaaggcgttccgaacgcgctgagcagcagcgtttcaggacagaaaaagagagagagcgtcaagctaagctcgccgaagaaaagatgcgtaaagaagaggaagaggcgaaaaaaagagcagaggacgacgctaaaaagaaaaaggtgctgtctaatatgggagcccacttcggtggatacctggttaaagccgaacagaagcggggcaaacggcaaaccggcagggagatgaaagtgcgtattctcagtgagagaaaaaagccattggacattgattacatgggcgaagaacagctccgcgcaagaagtgcgtggctaccaccatctcaaccatcttgccccgcccgggagaaagctcaggaactctctgactggatccatcagctcgagtccgaaaaatttgacctgatggccaagctcaaacaacagaaatatgaaataaatgtcctgtataaccgcatcagccatgcccagaagtttcgcaagggcgcaggaaagggccgtgtcggggggcgttggaagtag

SEQ ID NO: 139154 - DNA, 837 bp, synthetic construct
  misc_feature 1..837: note = Description of Artificial Sequence: Synthetic coding sequence
  source 1..837: mol_type = other DNA
atgagtgacaccgaggaacaggaatacgaagaagagcaacccgaagaagaagccgccgaagaggaggaggaggcccccgaggaaccggaaccagtggcagagcctgaggaagagagacctaaaccgagtcgccctgtggtgcctccactcatcccgccaaaaatccctgaaggcgaacgcgttgactttgatgatatacatcgcaaacggatggaaaaggacctgctggaactccagactctgatcgacgtgcacttcgagcagcgtaaaaaagaagaagaggagttggtcgccctgaaggaacgtattgagaggcgacgcagtgagcgagccgagcagcaaaggtttcgaaccgaaaaggaacgagaacgccaggctaaacttgcggaagagaagatgaggaaggaggaggaagaagctaagaagcgagccgaggatgatgctaaaaagaaaaaggtgctgtcaaatatgggggctcactttggaggctacctggtcaaggctgaacaaaaaaggggcaagagacaaaccggacgggagatgaaggtgagaattttgagcgagcgtaagaagcccctagacatcgattatatgggagaggaacagttgcgagcgcggtccgcatggctccccccctcccagccttcatgccctgccagagaaaaggctcaggaactaagcgactggatccatcagctggagtcagagaaattcgacttgatggccaagctgaagcagcagaagtatgagataaatgtgctgtacaacaggatctcccacgctcagaagtttcgcaaaggcgcaggaaaggggagagtcggtggtaggtggaagtag

SEQ ID NO: 139155 - DNA, 756 bp, synthetic construct
  misc_feature 1..756: note = Description of Artificial Sequence: Synthetic coding sequence
  source 1..756: mol_type = other DNA
atgtccgacactgaggaacaggagtatgaagaggagcagccagaggaagaagctgcagaggaggaggaagaggaagaggaaaggccgaagccttctcggcccgtggtacctccactgatcccacctaagattcccgaaggcgagcgtgttgatttcgacgacatccatagaaagcgaatggagaaagacctgctcgagttacagaccctcattgacgtgcatttcgaacaacggaagaaggaggaggaagagctggtagccctgaaggaaaggattgaacgccgtcgtagtgagagggccgagcaacagcgcttcagaacagaaaaggaaagggagcggcaggctaaattagccgaagaaaaaatgagaaaggaggaggaagaggcaaagaagagagccgaagacgacgccaagaaaaaaaaagtccttagtaacatgggggcccactttgggggttatctggtgaaagcagaacagaaaaggggaaagcggcaaacaggacgagagatgaaagttaggatactgagcgaaaggaaaaaaccactcgacatcgattacatgggggaggagcaacttagagagaaggcacaggagctgagcgattggatccaccagttagagagtgaaaaatttgatctgatggctaagctgaagcagcagaaatacgagattaatgtgctctacaaccggatcagtcatgcccaaaagtttaggaagggcgcaggcaaaggcagggtggggggcagatggaagtag

SEQ ID NO: 139156 - DNA, 522 bp, synthetic construct
  misc_feature 1..522: note = Description of Artificial Sequence: Synthetic coding sequence
  source 1..522: mol_type = other DNA
agtaaggctcagccgcaggattcccagcacttaaggcactcactggggcgcacgcgcatgagcgacaccgaagagcaggaatatgaagaggaacagcccgaggaagaagccgcagaggaggaagaggagggggaagttcccgactcagccgaagaggagcgccctaaaccaagcaggccggtggtccctccactcatcccgccaaagatcccagaaggggagagagtcgattttgatgacattcacaggaagcgcatggagaaggatctgcttgaactacagaccctgattgatgtgcacttcgagcagcgaaaaaaggaggaggaagaactggtggccctcaaggagcgcatagagcgcagacgatctgagagggctgagcaacagcggtttaggacagaaaaagagcgggagcgtcaggcaaagttggcagaagaaaaaatgaggaaagaggaagaagaagccaaaaaacgggccgaggatgacgccaaaaaaaaaaagaagaagaaaaaaaagaaatag

SEQ ID NO: 139157 - DNA, 756 bp, synthetic construct
  misc_feature 1..756: note = Description of Artificial Sequence: Synthetic coding sequence
  source 1..756: mol_type = other DNA
atgtctgacaccgaagagcaggagtatgaagaggagcaacccgaagaggaagccgccgaagaggaggaagaggcaccagaagaacccgagcccgtgcgtccagttgtgcctcctctgattcccccaaaaatccctgaaggggaaagagtcgatttcgacgatatacacagaaaacggatggaaaaggacctattagagctgcaaactttgatcgacgtacattttgaacagcggaagaaagaagaggaggaattggtggccctgaaggagcggatcgagcgcaggcggagcgagcgcgccgaacagcagaggttcaggactgaaaaggagagagagcgccaggcgaagttggcagaagaaaaaatgaggaaggaagaggaggaggctaagaagcgggcggaagacgacgctaaaaagaagaaggtgctttccaatatgggggcccacttcggtggctacttagtgaaagccgaacagaagagaggcaagcggcagacaggcagggagatgaaggtcaggattctgagcgagcggaagaaacctctcgatatagattatatgggggaagaacagctgagggaaaaagcgcaggaattaagcgactggatccaccagctggagagtgaaaaattcgacctaatggcgaagctgaagcagcaaaagtatgaaatcaatgttctttataatagaatttcacacgcacagaaattcaggaaaggcgcgggcaagggacgagtcggaggccgttggaaatag

SEQ ID NO: 139158 - DNA, 579 bp, synthetic construct
  misc_feature 1..579: note = Description of Artificial Sequence: Synthetic coding sequence
  source 1..579: mol_type = other DNA
atggagaaggacctcttggagctgcagacactgatcgatgttcactttgagcagcgtaagaaggaggaagaagaactggtcgctctgaaagagaggatcgagagaaggagatcggaaagggcagagcaacaacggttccgcacagaaaaggagcgcgagaggcaggcaaagttagccgaagagaaaatgcgaaaggaagaggaagaggcgaaaaagcgtgccgaagatgatgctaagaaaaagaaggtcctgtcaaacatgggggcccatttcggcggatacctggtaaaggccgagcaaaagcgaggtaaacggcagacaggccgggagatgaaggtaaggatactttccgaacgcaagaaacctctggatatcgactacatgggagaggaacagttacgggaaaaggcccaggaactgtccgactggatccatcaactggaaagcgagaaattcgatctgatggctaaattgaagcaacagaaatacgaaatcaatgtcctttacaatcgcatatcacacgcccagaaattccgaaaaggggcaggcaaagggcgagttggcggaaggtggaaatag

SEQ ID NO: 139159 - DNA, 882 bp, synthetic construct
  misc_feature 1..882: note = Description of Artificial Sequence: Synthetic coding sequence
  source 1..882: mol_type = other DNA
atgtcagatatcgaggaagtggtcgaggagtacgaggaagagcaccctgaggaagaggaggactggcgggaagacgaagatgagcaagaagaggccgccgaggaagacgctgaagccgaagcggagactgaggaaacgagggctgaggaagacgaagaggaagaggaagcgaaagaggccgaagacggccctatggaggagtcgaagccgaaaccgcgctcgtttatgcctaatttagtccctcccaaaattcccgacggagaaagagtggactttgatgatatccatcgtaagcggatggagaaagatcttaatgagcttcaggctcttattgaagcccattttgagaaccggaagaaagaagaggaggagcttgtatccttgaaggacagaatagagcggcgcagagcagagcgcgcggagcagcagcgcatccggaatgagcgagaaaaggagcgccagaacaggctggccgaggaacgggctcggcgcgaagaagaggagaaccgcagaaaggccgaagacgaagcaaggaagaaaaaagcgctaagcaacatgatgcattttggcggatatattcagaaacaggcacagacagaaagaaagagcggtaaacgtcagactgagcgtgagaagaagaagaaaatcctcgccgagcgccggaaggtgcttgccatcgatcacctaaatgaggatcagctgcgagagaaggcaaaagagttgtggcaatccatttacaaccttgaagccgaaaagttcgatctgcaggaaaaattcaagcagcagaaatatgagataaacgtcctccgtaatcggattaacgacaaccaaaaggtgagcaaaacacggggaaaagcaaaagtgactggacgctggaaatag

SEQ ID NO: 139160 - DNA, 600 bp, synthetic construct
  misc_feature 1..600: note = Description of Artificial Sequence: Synthetic coding sequence
  source 1..600: mol_type = other DNA
atgagtgatatcgaagaggtggtagaggaatacgaagaggaaatggccgctccgcagcaccaggaggaggcggcagaagaggatgccgaagctgaggctgagaccgaagagacaagggctgaggacgaggaagaggaggaggcgaaggaagcagaagacggtccaatggaagagagtaagccaaaaccgaggtcctttatgccaaatctggttcctcctaagataccagacggggagcgagtagactttgatgatatccataggaagcgcatggaaaaggatctgaatgagctgcaagccctgattgaagcccattttgaaaaccgcaagaaagaggaggaggagttggtgtcactcaaagatagaatagagcgacgtcgcgccgagcgagccgaacagcagcggatacgaaatgagcgcgagaaggaacgacagaatcgcttggccgaggagcgggccaggcgggaagaagaggaaaacaggcggaaggccgaggatgaagcccggaagaagaaggctttgtcaaatatgatgcattttggcggctatatccagaagcatcctcctgatcgcgcagaaaaatgggaggaagctgattag

SEQ ID NO: 139161 - DNA, 852 bp, synthetic construct
  misc_feature 1..852: note = Description of Artificial Sequence: Synthetic coding sequence
  source 1..852: mol_type = other DNA
atgagcgatatagaagaggtcgtagaagaatacgaagaggaggccaaactggagcaagaagaggccgcagaagaggacgcggaggccgaagccgagaccgaggagactcgagccgaagaggacgaagaggaggaagaggccaaggaagctgaggacgggccgatggaggaatctaagcccaaaccccgatctttcatgcccaatctagtgcccccgaaaataccggacggagagagggtggacttcgacgacatacatagaaaacggatggaaaaagacttgaatgagctgcaggctcttatcgaggcccattttgaaaatcggaaaaaggaagaggaagaactcgtctccctgaaggaccgaatcgaaaggaggagagctgagcgcgctgaacagcagcgaattcggaacgaacgcgagaaggagcggcaaaaccggcttgcagaagagagagcccgccgagaggaagaggaaaaccgccggaaggcagaggacgaggcccggaaaaaaaaggcattaagcaatatgatgcactttgggggctacattcagaaacaggcccaaacggaacggaaatctggaaagcggcaaacagagagagaaaagaaaaaaaaaattcttgctgaaaggaggaaggtgcttgctattgaccacttgaatgaagatcagctgcgagagaaagcgaaggaactctggcagagcatatataatctcgaggcagagaagttcgatctccaagaaaaattcaagcagcagaagtacgaaataaatgtgctgagaaaccgtatcaacgataaccagaaagtgtcaaaaaccaggggcaaggccaaagtgacaggccgctggaagtag

SEQ ID NO: 139162 - DNA, 858 bp, synthetic construct
  misc_feature 1..858: note = Description of Artificial Sequence: Synthetic coding sequence
  source 1..858: mol_type = other DNA
atgtcagacattgaggaagtggtcgaggagtatgaagaggaagaacaggaggaggcagccgtggaggagcaggaggaagcagcagaagaagatgccgaggccgaggcggagactgaggagaccagggccgaggaagatgaggaggaggaggaggcaaaggaggcagaggacggccctatggaggaaagcaaacctaagcctcgtagctttatgccaaatctggtgcctcccaaaattcctgacggggaaagggtggactttgacgacattcaccgcaaaagaatggagaaggatctgaatgagctgcaagcgctcattgaagcacactttgaaaaccggaagaaggaggaggaggagctagtgtcactgaaggatcgaatcgaaagacggcgtgctgaacgagccgaacagcagcggattaggaacgagcgagaaaaggagaggcagaatagactggccgaggaaagggcgcgccgagaggaggaagagaatcgcaggaaggccgaggacgaagcccgaaagaagaaagccctttccaacatgatgcatttcggagggtacatacaaaagaccgagcgaaaaagtggaaaacggcagacggagagggagaagaagaaaaaaatcctggcagaaaggagaaaagtgttggctatcgaccacttgaatgaggaccagttgagagagaaggccaaggagctttggcaatctatatacaatcttgaggctgagaaatttgacttacaggagaagtttaaacagcaaaagtacgagatcaacgtgctgcgaaatcggataaacgacaaccagaaggtttcaaagacaagggggaaagcaaaagtgactgggcggtggaagtag

SEQ ID NO: 139163 - DNA, 867 bp, synthetic construct
  misc_feature 1..867: note = Description of Artificial Sequence: Synthetic coding sequence
  source 1..867: mol_type = other DNA
atgagtgatattgaagaggtagtagaggagtacgaagaggaggaacaagaagaggcagcagttgaggagcaggaggaggcagccgaagaggatgcagaggccgaagctgaaactgaagagacaagagccgaagaagatgaagaggaggaagaggccaaagaggccgaggatggtcctatggaagagagcaagcccaagcccaggagctttatgcccaacctcgttcccccaaagattcctgacggagaaagggtggacttcgatgacattcaccggaagcgcatggagaaggacctgaacgaactgcaggcactgatagaggcgcactttgagaaccggaaaaaagaggaggaagaacttgtgtccctgaaagaccggatcgagcgacggcgagccgaaagggccgaacagcagagaatcaggaatgaacgagagaaggagcgccagaaccgtttggcggaggaacgggcaagaagggaggaggaagaaaatcgtcggaaggctgaagatgaggcccgaaaaaaaaaggcgctgagcaatatgatgcactttggcggctacatccagaaacaggcccagactgagaggaagagcgggaaacggcaaaccgagagagagaagaaaaagaagattttagctgagaggagaaaggtgctcgcaatcgatcacttgaacgaggaccagctccgtgaaaaagccaaggagctgtggcagtcaatttataatctcgaagcagaaaagttcgatctgcaggaaaagtttaaacagcaaaagtacgaaattaacgttttgcgtaatagaatcaacgataaccagaaagtgtctaaaacgagaggcaaagccaaagtaactgggcgctggaagtag

SEQ ID NO: 139164 - DNA, 867 bp, synthetic construct
  misc_feature 1..867: note = Description of Artificial Sequence: Synthetic coding sequence
  source 1..867: mol_type = other DNA
atgagtgacatcgaagaggtggtcgaggagtacgaggaagaggaacaggaggaagccgcggtggaggaacaggaggaggcagcagaagaggacgccgaggcggaggcagaaacagaagaaacgcgcgctgaggaagacgaggaagaggaggaagccaaagaggcagaagacggtccaatggaagagtcaaaacccaaacctaggtcgtttatgccaaaccttgtccccccaaaaatccctgatggcgagcgcgtcgacttcgatgatattcataggaaacgcatggagaaggacctgaatgaattacaggccctgattgaggcgcacttcgaaaatcggaaaaaggaagaagaggagctggtatctctcaaggaccggattgagagaaggcgcgccgaacgggctgagcagcagagaatacggaacgaacgcgaaaaagaacgccaaaatcggctggccgaggaacgagccaggcgcgaggaagaagagaacaggcgcaaggcagaagatgaggccagaaaaaagaaggccctctctaatatgatgcatttcggaggatatatccagaaacaggcacagaccgagaggaagtctgggaaacgccagacagagagagagaagaaaaaaaagattcttgctgagcggaggaaggtgcttgcgatcgatcacttaaacgaagaccagttaagggagaaagcaaaagaactgtggcagtccatttataaccttgaagcagagaaattcgatctacaagagaagttcaaacaacaaaaatatgagatcaatgttttaagaaatcgcatcaatgacaatcagaaggtgagtaagactcggggcaaagccaaggtgacgggcaggtggaagtag

SEQ ID NO: 139165 - DNA, 681 bp, synthetic construct
  misc_feature 1..681: note = Description of Artificial Sequence: Synthetic coding sequence
  source 1..681: mol_type = other DNA
atggaggagagtaaaccaaagccgcggagcttcatgcccaacctggtgccccctaaaatacccgacggcgagcgggtggacttcgacgatatccatagaaaaaggatggagaaagatctgaatgagctccaggccctcattgaggcccatttcgaaaacaggaagaaagaggaggaggagctggtctccctgaaagaccggatcgagcgtcgccgcgctgagagagccgagcagcaacgcatccgaaacgaaagggaaaaggaaagacaaaataggttagctgaagaacgcgctcgccgcgaagaggaggaaaataggagaaaggccgaggacgaagcgaggaaaaaaaaagccctgtccaacatgatgcattttgggggatacattcagaaaaccgagcggaagagcggcaagcgccagaccgagcgggaaaaaaagaaaaaaattttggccgaacgtcgcaaggtgctggctatcgatcacctgaatgaagaccagcttcgggaaaaggcgaaagagctctggcagtctatctataaccttgaagcagagaaattcgacctccaggaaaagtttaaacagcagaagtacgagattaatgtgctgcggaaccggattaacgataaccagaaggtctccaagacccggggtaaggcaaaagtgacaggacgctggaagtag

SEQ ID NO: 139166 - DNA, 858 bp, synthetic construct
  misc_feature 1..858: note = Description of Artificial Sequence: Synthetic coding sequence
  source 1..858: mol_type = other DNA
atgagcgacatcgaggaggtggtggaagagtatgaagaggaggagcaggaagaggccgcagttgaagaacaagaagaagctgcagaggaagatgccgaggcagaagccgagaccgaagaaacgcgtgccgaagaggacgaggaagaagaggaggctaaggaggccgaggatggcccaatggaggagtctaagcctaaacctcggagcttcatgccaaatttagttcccccaaagatccccgacggcgaacgtgtcgactttgatgatatccacaggaagcgtatggagaaggacctgaacgagctacaggcgctcatagaagcccattttgagaaccggaagaaggaagaggaggagctcgtttcacttaaggaccggatcgagcggcggcgcgcagagagagctgagcaacaacggatcagaaatgaacgtgaaaaggagcggcaaaatagactcgccgaggagcgcgccagaagagaagaagaagaaaataggcgcaaagctgaggatgaggccagaaagaaaaaggctctgtccaacatgatgcacttcggcggttacattcagaagaccgaaagaaaatcaggcaagagacagactgagagagaaaagaagaaaaagatactggccgagcgtcggaaggtactcgccatagatcatttgaacgaagaccagttaagggagaaggctaaagagctctggcagagtatttataatttagaggctgagaagttcgacctgcaggaaaagttcaagcagcaaaagtacgaaatcaacgtgctccggaatagaatcaatgacaatcagaaggtgtccaaaaccagaggcaaagccaaagtaacaggcaggtggaaatag

SEQ ID NO: 139167 - DNA, 876 bp, synthetic construct
  misc_feature 1..876: note = Description of Artificial Sequence: Synthetic coding sequence
  source 1..876: mol_type = other DNA
atgagtgatatcgaggaggtggtcgaggaatacgaggaggaatacctggaacacgcagaggcagccgttgaggaacaggaggaggcagcggaggaagacgccgaggccgaggcagagaccgaggagactagggcggaggaagacgaggaagaggaagaagcaaaggaagctgaggatgggcccatggaggagtcgaagcctaagccgaggagcttcatgccaaaccttgtgcctcccaagatacccgacggggaacgagttgattttgacgacatacacaggaagaggatggagaaggacctcaatgagctgcaggccctcatcgaggcccatttcgagaatcgaaaaaaggaggaggaggaacttgtgagcctgaaggaccgcatcgagaggcgccgcgccgaacgggctgagcagcaaagaataaggaacgagcgggaaaaggaaaggcagaacaggttagcagaagagcgtgcgagaagagaggaggaggaaaatagacgcaaagcagaagacgaggcacggaaaaaaaaggcccttagtaacatgatgcattttggcggatatattcaaaaacacaccctgcagactgagcgaaagtctggtaagcgccaaacagaacgggagaaaaagaaaaaaatccttgccgaaaggagaaaagtgctggccatcgatcatctgaacgaagatcagctcagggaaaaagcgaaagagctctggcagtctatttacaatttggaagcagaaaaattcgatttgcaggagaagtttaaacaacagaagtacgaaattaacgtccttaggaatcggatcaacgataaccaaaaggtcagcaaaactcggggaaaagctaaggtgacgggccggtggaagtag

SEQ ID NO: 139168 - DNA, 894 bp, synthetic construct
  misc_feature 1..894: note = Description of Artificial Sequence: Synthetic coding sequence
  source 1..894: mol_type = other DNA
atgagtgatatagaagaagtggtagaggaatatgaagaagagtacttggaacatgctgaggctgccgtggaagaggaggaggactggagagaagacgaggacgaacaggaggaagctgcggaagaggacgccgaagccgaagccgagactgaagagacccgagccgaggaggatgaggaggaagaggaagcgaaggaagctgaagacggaccaatggaagagagtaagccaaagccccgttcttttatgcccaatcttgtccctccaaaaatcccggacggagagcgcgttgactttgatgatatccatcgtaaacgaatggaaaaagatctgaacgaactccaggccctgatcgaggctcatttcgagaataggaagaaagaggaggaggaacttgtgagcctgaaggataggattgaacggcggagggccgagcgcgccgagcagcaaagaatccgcaatgaaagagaaaaggagcgacaaaacagactggctgaagaacgagcgaggagggaagaggaagagaaccgacgcaaggcggaggacgaagcacggaaaaagaaagctctgtctaatatgatgcactttgggggttatatccagaagactgagcgaaaatcgggaaagagacagactgagcgcgagaagaagaaaaagattctggctgagagaagaaaggtactcgccattgaccatttgaatgaagaccagctccgtgaaaaagctaaggaactatggcaatctatttataatttagaggccgagaagtttgatcttcaggaaaaattcaaacagcagaagtatgaaatcaatgtgcttcggaatagaattaatgataaccagaaagtcagcaaaaccagaggcaaggcgaaagtgaccgggaggtggaagtag

SEQ ID NO: 139169 - DNA, 867 bp, synthetic construct
  misc_feature 1..867: note = Description of Artificial Sequence: Synthetic coding sequence
  source 1..867: mol_type = other DNA
atgagcgacatagaggaggtggtggaagagtatgaagaggaggagcaggaagaggctgctgtggaagaacaggaagaggcggccgaagaggatgccgaggccgaagccgagacagaagagaccagagctgaggaggacgaggaagaggaggaagcgaaagaagccgaggacggaccaatggaggaaagtaagcccaagcccagatcctttatgcctaatcttgttccccctaagatacccgacggcgagagagtggattttgatgacatccaccggaaaagaatggagaaagatctgaatgaattacaagccctgatcgaggctcactttgagaatagaaagaaggaagaggaggagctagtctcacttaaggatcgtatagaaaggagacgcgcagagcgggcggaacagcaacgaatccgcaatgaacgtgagaaggaaaggcagaacagattggccgaggagagggcacgccgggaggaggaggagaatcgacgcaaggcggaagacgaggcccgaaagaagaaagctctcagcaacatgatgcactttggagggtacattcagaaacaggcacagactgagagaaaatctggcaagcggcaaaccgagagggaaaaaaagaagaaaatcctggcggagcgacggaaggtgctggccattgaccatttgaatgaggatcagctaagggagaaagctaaggaattatggcaaagcatatacaacttggaggccgaaaagtttgaccttcaagaaaagtttaaacagcagaaatatgaaatcaatgtcctcagaaaccgcatcaacgacaatcagaaagtatccaagacaagaggcaaggctaaggttaccggccggtggaaatag

SEQ ID NO: 139170 - DNA, 771 bp, synthetic construct
  misc_feature 1..771: note = Description of Artificial Sequence: Synthetic coding sequence
  source 1..771: mol_type = other DNA
atgagcgacgaggaggtggaacaggttgaggagcagtacgaagaggaagaggaggctcaagaagaggcagcggaggtgcatgaagaggtgcatgagccagaggagaaaccacgacccaagcttactgcacccaagatcccagagggcgagaaggtggacttcgacgatatccagaagaaaagacagaataaagatctcatggagttgcaagctctcatagacagtcactttgaagccagaaagaaagaggaagaggaactggtggctttaaaggagaggatcgagaaaagacgcgcggaacgggcagagcagcagagaatccgggccgagaaggagagggagaggcagaaccgcctggccgaagagaaggcacggagggaggaggaggacgctaagcgaagagccgaggatgacttgaaaaagaagaaagccttaagttccatgggtgccaactactccagctatcttgccaaggccgaccaaaaacgcggcaagaagcaaactgcacgcgagatgaaaaaaaagattcttgctgagcggcgaaagcccttgaacattgaccatcttggggaggataagctgcgggataaggcaaaagagttgtgggagacactgcaccagctcgagattgacaagttcgaatttggcgagaagctcaaaagacagaaatacgacatcaccaccctgcgctcaaggatcgatcaagctcagaaacactcgaagaaagccggcactccggctaaaggtaaggtaggtggcaggtggaaatag

SEQ ID NO: 139171 - DNA, 777 bp, synthetic construct
  misc_feature 1..777: note = Description of Artificial Sequence: Synthetic coding sequence
  source 1..777: mol_type = other DNA
atgagtgacgaagaagtcgagcaagtggaggagcaatacgaggaggaggaggaggcacaggaggaagaggaagtccaagaagacaccgcggaggaggatgcagaggaagagaagccccggcctaagctgacagctccaaagataccagaaggtgagaaggtggactttgatgacatccagaagaagcgtcagaacaaggatctcatggaactccaagccctgattgacagtcacttcgaggcccgtaagaaggaggaggaggaattggtggccctgaaggagaggatcgagaaaaggagggcagagagagccgaacagcagcgaattcgtgccgagaaagaacgagagcgtcaaaaccgcttggcggaagagaaggccaggagagaggaggaggacgccaagcgaagagccgaagacgacttgaaaaaaaaaaaggctctctcatcgatgggggctaattattcctcatatctggccaaggctgaccagaagaggggcaaaaagcagaccgctagggaaatgaagaagaagatcctagcagagcgccggaagccactcaacatcgatcacctaggcgaggacaaactgagggataaggctaaagagctgtgggaaactctgcaccaactggagatcgacaagtttgagttcggagaaaaactaaaacgtcagaaatacgacatcacgacccttcgcagccggatagaccaggctcagaaacactcgaaaaaggccggaacgccggctaagggcaaggtgggcggacggtggaagtag

SEQ ID NO: 139172 - DNA, 738 bp, synthetic construct
  misc_feature 1..738: note = Description of Artificial Sequence: Synthetic coding sequence
  source 1..738: mol_type = other DNA
atgagtgatgaggaagtggaacaggttgaagagcaatatgaagaagaggaggaagcacaagaggaggaggaaaagccgcggcctaagttgacagcacctaaaatccctgagggcgaaaaggtcgacttcgacgatatccaaaagaagagacagaacaaagatctcatggagttgcaagcgcttatcgattcccatttcgaagctcgcaagaaagaagaagaggagttggtggccctgaaggaacggattgagaaaaggcgagctgagcgggcagagcagcaaagaataagagccgaaaaggaacgggaacgacagaatcggctggctgaagaaaaagcgcgtagggaagaggaggatgctaagagaagggctgaggacgacctgaagaaaaaaaaagcgctgagcagcatgggcgccaactatagctcatacttagccaaggctgatcagaaaagaggcaagaagcaaacagccagggagatgaaaaaaaagattctggcagagcggaggaaacctctgaacatcgaccacttaggcgaagacaagctgagagacaaggccaaagagttgtgggaaaccctgcatcagcttgaaatagataagttcgagttcggcgagaagctgaagagacagaagtatgacattaccaccctcagatctcggatcgaccaggcccagaagcacagtaaaaaagccggcactcccgcaaagggaaaggtgggaggccggtggaaatag

SEQ ID NO: 139173 - DNA, 759 bp, synthetic construct
  misc_feature 1..759: note = Description of Artificial Sequence: Synthetic coding sequence
  source 1..759: mol_type = other DNA
atgtccgatgaggaggtcgagcaagttgaggaacagtacgaggaagaggaggaggcccaggaggaggctgcggaggtgcatgaggaggaagagaaacctagacccaagctgacggcgcctaaaattccagaaggcgaaaaggtggactttgacgatattcagaagaaacgccaaaataaggacctcatggagctgcaggccctgatcgattcccactttgaagctcggaaaaaagaagaagaggagctcgtggcgctcaaggagaggatcgaaaagagaagggcagaacgggcggagcagcagcgaattcgcgcagaaaaggaaagagagcggcagaaccgcctcgccgaggaaaaggctcgtcgggaagaggaggacgcaaagaggagagccgaggatgacctcaaaaagaaaaaagccctcagctctatgggggctaactattcctcttacctggccaaggctgaccagaagcgcggaaagaagcagaccgctagggagatgaagaaaaaaatcctagccgagagacggaagccattgaacattgatcacctcggtgaagacaagctgagagataaggcgaaagagctgtgggaaacactccatcagctggagattgataaatttgagttcggtgagaaactgaaacgccagaagtacgatattatgaacgtcagagcacgggtgcaaatgctggctaaattctccaaaaaagcgggcacacccgctaagggaaaagtcggcggacgctggaagtag

SEQ ID NO: 139174 - DNA, 783 bp, synthetic construct
  misc_feature 1..783: note = Description of Artificial Sequence: Synthetic coding sequence
  source 1..783: mol_type = other DNA
atgtccgacgaagaggtcgagcaggtagaggagcagtacgaagaggaagaggaagcgcaagaggaggccgccgaagtgcacgaggaggacacggctgaagaagatgccgaggaggagaagccccgaccaaagctcacagccccaaagatccctgaaggggagaaggtcgatttcgacgatatccagaagaaaaggcaaaataaggatctgatggagctgcaggcattaattgatagccacttcgaagctcgaaaaaaggaagaagaggaactggtggccctgaaggagcgaatcgagaagcggagggccgagagagctgaacagcagcggatcagagctgaaaaggagagggagcgccagaatagactcgccgaagagaaagcacgtcgagaggaggaagacgcaaagagacgcgcagaggacgacctgaaaaagaaaaaggcactctcttccatgggcgctaactactcttcctatcttgccaaggccgatcagaagcggggcaaaaagcaaaccgcacgcgaaatgaagaaaaaaatcttagcagaacggcgaaaacctctgaatattgaccacttaggggaagacaaactgagggacaaggcaaaggaattgtgggaaactctgcaccaactggaaatcgacaagttcgagttcggggagaaacttaagcgtcagaagtacgacattaccactctcagaagccgaatcgatcaggctcaaaaacactcaaaaaaagctgggacacctgctaaagggaaagtaggggggcggtggaaatag

SEQ ID NO: 139175 - DNA, 753 bp, synthetic construct
  misc_feature 1..753: note = Description of Artificial Sequence: Synthetic coding sequence
  source 1..753: mol_type = other DNA
atgtcagacgaggaagtagagcaggttgaagaacagtatgaggaggaggaagaggctcaggaggaggaggaagtgcaagaggaggagaagccccggccaaaactcactgcgccaaagatccccgaaggagagaaagtggacttcgacgatatccaaaagaagcgacagaataaagacctgatggagctacaggccctaatcgactcacatttcgaggcacggaaaaaagaggaagaggagctagtagcacttaaagaacggatagaaaagcgaagagccgagcgagccgaacagcagagaataagggccgagaaggaacgtgagaggcaaaaccgcctggccgaagagaaggctaggagagaggaagaggacgctaagagaagggcagaagacgacctgaagaaaaaaaaggctctgtcttccatgggcgccaactattctagttatctcgccaaggctgaccagaaaagaggtaagaaacagacggctagagaaatgaaaaaaaagattctggccgaaagacgcaaaccactcaacatcgaccacctgggcgaagacaaactaagggacaaagcgaaggagctgtgggaaactcttcaccagctggagattgataagtttgaattcggtgagaagctgaagagacagaagtatgacatcaccacactccgctcacggatagatcaggcacagaagcattccaagaaggcggggactcccgccaagggtaaagtaggcggcagatggaagtag

SEQ ID NO: 139176 - DNA, 786 bp, synthetic construct
  misc_feature 1..786: note = Description of Artificial Sequence: Synthetic coding sequence
  source 1..786: mol_type = other DNA
atgtctgatgaagaagtagaacaggttgaagaacagtacgaagaagaagaggaggcccaggaggaagcggcagaagtccatgaggagggtatgcggacgcaagacttttttcatgaagagaaaccccgccccaaattgactgctccaaagatccctgagggagagaaagttgacttcgacgacattcagaaaaagcgacagaacaaagatttgatggagttgcaggcccttatcgatagtcacttcgaggcaagaaagaaggaggaggaggaattggtcgctctgaaagagcgaattgaaaagagacgcgcggaaagggcagagcagcaaagaatccgggctgagaaggaacgggagcggcagaatcggctagcagaggagaaagcacgccgcgaagaggaggacgcaaagaggcgggccgaagacgatttgaagaagaagaaggctttgtcatccatgggcgcaaactacagctcttaccttgccaaggcggaccaaaaaagagggaaaaaacaaacagccagggagatgaaaaaaaaaatccttgcagagcgccggaaaccactgaacatcgaccatctgggagaggataaactgcgggataaagctaaggagctctgggagaccctgcaccagttagagattgataagtttgaatttggagaaaaactgaaacgccagaagtatgatatcaccacgttgaggtcccgcattgaccaggcccagaaacattccaaaaaagctggaacacccgcaaaaggcaaggttggcgggcgttggaaatag

SEQ ID NO: 139177 - DNA, 786 bp, synthetic construct
  misc_feature 1..786: note = Description of Artificial Sequence: Synthetic coding sequence
  source 1..786: mol_type = other DNA
atgagtgacgaagaggtggaacaagtggaggaacagtatgaggaagaggaggaggcccaggaggaggctgctgaggtccatgaggaagtgcacgaacctgaagaggttcaagaagaagagaagcctcgaccgaaacttacagccccaaaaattcccgagggcgaaaaagtggacttcgatgacatccagaaaaagaggcaaaacaaggacctgatggaactgcaggcgctgatcgacagccacttcgaagcccgtaagaaggaggaggaggagctggtggccctgaaagagagaattgaaaagaggagggccgagcgtgctgaacagcaacgcattagggcagagaaggagcgcgaacggcaaaatcgcttggcagaggagaaggccaggcgagaggaggaggatgcaaagcggcgggccgaggatgaccttaaaaagaaaaaagctctgtcatccatgggcgctaactattctagttacctggcaaaagctgatcagaagaggggtaaaaagcagactgcccgtgaaatgaagaagaaaatccttgctgagaggcgcaaaccattgaatatagatcacctgggagaagacaaacttcgggataaagctaaggagctctgggagactttacatcaacttgagatcgacaagttcgagtttggtgaaaaactgaagagacagaagtacgacattactacattgaggagccggatcgaccaggcacagaagcatagcaagaaagctggaacacctgccaagggcaaggtggggggacgatggaagtag

SEQ ID NO: 139178 - DNA, 753 bp, synthetic construct
  misc_feature 1..753: note = Description of Artificial Sequence: Synthetic coding sequence
  source 1..753: mol_type = other DNA
atgagtgacgaggaagtggaacaggtcgaagagcagtatgaggaggaggaggaagcgcaagaagaagaagaagtgcaagaggaggagaagcctaggcctaagttaacggctccaaagatcccagagggggagaaagtggactttgacgatatccaaaagaagcgccaaaataaagacctgatggagcttcaggccctaatcgatagccacttcgaagcacgtaaaaaggaggaggaggaacttgtagctctcaaagaacgcatagaaaagaggcgtgccgaaagagcggaacaacaacggatccgagccgaaaaggagcgcgaacggcagaatcggttagcagaggagaaagctcgacgcgaagaagaggatgctaagcgacgcgccgaggacgacctgaagaagaagaaagcactctcatctatgggcgccaactacagctcctatttagctaaagccgatcaaaaacggggcaaaaagcagaccgcacgggaaatgaagaagaaaatactggccgaaagacgcaaacctctaaatattgatcacctgggcgaagacaaattgcgagacaaggctaaggaattgtgggaaaccctgcatcagctggaaattgacaaattcgagttcggtgagaaattgaaacgacagaagtacgatataatgaacgtgagagcacgggtacagatgttagccaaattttctaagaaggcaggtactcccgcaaaggggaaggttggcggcagatggaagtag

SEQ ID NO: 139179 - DNA, 810 bp, synthetic construct
  misc_feature 1..810: note = Description of Artificial Sequence: Synthetic coding sequence
  source 1..810: mol_type = other DNA
atgagcgatgaagaggtagaacaggtcgaagaacagtatgaggaagaagaagaggcccaagaggaggcagccgaggttcatgaagaggttcacgaacctgaagaagtgcaggaggataccgcagaggaagatgctgaggaagaaaaacctcgccccaagttgacagcaccaaagattccagagggagaaaaggtggacttcgatgacatccaaaagaaacgacaaaataaggaccttatggagctccaggcgttaatagacagtcattttgaagcacgaaaaaaagaagaagaggagctcgtcgccctgaaagagcgcattgagaaacgaagagcagaaagggccgagcagcagcggatccgcgccgaaaaagagcgcgaacggcaaaaccgcctcgccgaagagaaagcgaggcgagaagaagaggacgccaagagacgggctgaggacgacctgaagaaaaagaaagcactttccagcatgggagcaaattacagtagttacctggccaaagccgaccagaagcggggaaagaagcaaaccgctcgtgagatgaaaaagaagatactcgctgagagacggaaacctttgaacattgaccaccttggcgaagacaaactgcgggacaaggctaaggaactttgggagacgctgcaccagctggagatcgacaagttcgagttcggcgagaagcttaaacggcagaagtacgacatcacaacgcttagatccagaatagaccaggctcagaagcattcgaaaaaggctggaacacccgcgaaaggaaaagtaggagggcggtggaaatag

SEQ ID NO: 139180 - DNA, 813 bp, synthetic construct
  misc_feature 1..813: note = Description of Artificial Sequence: Synthetic coding sequence
  source 1..813: mol_type = other DNA
atgtcagacgaggaggtggaacaagtggaggaacaatacgaggaggaggaggaagcccaagaagaggcggctgaggtgcacgaggaggcgcacccgggagaagaaagcgttcgcgaagacacggccgaagaggacgcagaagaggaaaagccacgacctaagctgacagcccctaagataccggagggcgaaaaagtggactttgacgatattcagaagaaacgccaaaacaaagacctcatggagctccaggctcttattgattctcacttcgaagctcgaaagaaagaagaggaagagcttgttgccctgaaggagaggatcgaaaaacgtcgagctgagcgagccgagcaacaacgcattcgcgccgaaaaggaaagggagagacaaaacagattggcggaggagaaagcacgccgtgaggaggaagatgccaagagaagagccgaagacgatttgaaaaagaagaaggctcttagctcaatgggggccaactattcttcttatctggctaaggctgatcaaaagcgaggcaaaaaacagacagccagagagatgaagaagaagattctggcagaacgcaggaagccacttaacattgaccaccttggtgaagataagctgcgcgacaaagcgaaagagctgtgggagacattacaccagctggagatcgataagttcgagttcggcgaaaaactgaagcgccagaaatatgacataacgactctgagatcccgtatagatcaagcccagaaacattcaaagaaagctgggacacccgcaaagggcaaagtgggcggcaggtggaagtag

SEQ ID NO: 139181 - DNA, 435 bp, synthetic construct
  misc_feature 1..435: note = Description of Artificial Sequence: Synthetic coding sequence
  source 1..435: mol_type = other DNA
atgtcagatgaggaggtcgaacaggtcgaagagcaatacgaagaagaggaagaagctcaagaggaagccgcagaagttcatgaagaggagcgtagggctgaggacgaccttaagaaaaaaaaagcccttagctccatgggggccaactattcctcatacctcgccaaagctgaccaaaagcgcggcaaaaagcagaccgcccgtgagatgaaaaagaaaatccttgctgagagacggaaaccactgaatatcgaccacctgggagaggacaaattgagggacaaagccaaggaactgtgggagcctccccagtcatgtcagggactgcccgattctccgggaggaggagaagcaatcccaggacgcccaccccgcctttgtccctgctgtttacaccctctcggtccagtcaacaaggctgccgaacctccttag

SEQ ID NO: 139182 - DNA, 1617 bp, synthetic construct
  misc_feature 1..1617: note = Description of Artificial Sequence: Synthetic coding sequence
  source 1..1617: mol_type = other DNA
atggaagagagtgtaaaccagatgcagcccctgaatgagaagcaaatcgccaattcccaggacggctacgtttggcaggttacagatatgaatagactccaccgatttttatgttttgggagtgaaggggggacctattacatcaaagaacagaagcttggcctggaaaacgctgaagccctcatccggctgatcgaagacggccgaggttgcgaggtgatccaggaaataaagtcattttcccaggaaggccgtaccactaagcaggaacccatgctattcgccctcgccatctgcagccagtgttctgacatttccacaaagcaggccgcttttaaggccgttagtgaggtatgtcgaatcccaacccacctgttcacttttatccaatttaaaaaggacctcaaagaaagtatgaagtgtgggatgtggggacgtgccctgagaaaagctatagccgattggtacaacgaaaagggcggcatggcacttgcactggctgtaaccaagtacaagcagcgtaacggatggagtcacaaagatctcctgagactaagtcatctgaaaccctcgagcgaaggactggctatagtgacaaaatacattaccaaaggctggaaagaagtgcacgaactctacaaggaaaaagctctgtccgttgagacagagaaattactcaagtatcttgaggcagtcgaaaaggttaaaaggacacgagatgagctggaagtgattcatttaatcgaggaacatcgcttggtaagagaacacttgcttaccaatcatctgaaaagcaaagaggtttggaaagctctgctacaggaaatgccactgactgctctattgcgcaatttgggaaagatgacagccaatagtgtactcgagcctggcaactctgaagtctccctggtctgcgagaagctctgcaatgaaaagctgcttaagaaggcgcggattcatccatttcatattctgatcgctcttgagacttacaaaaccggacatggactgagagggaaactaaaatggcgtcccgacgaggagattctgaaagcccttgatgctgctttctataagacattcaaaactgtggagcccaccggtaaaaggttcttactggctgtggatgtttccgcttcaatgaaccagagggtgctaggcagcatacttaatgcctcgaccgttgcagccgccatgtgtatggtggtgacacgtacagagaaagatagctatgttgtcgcattttccgacgagatggtcccctgtcctgtcactacggatatgacgcttcagcaggtcctgatggctatgagtcaaatcccggccggcgggacggattgctctctgcccatgatttgggctcagaagaccaatactcctgctgacgtcttcatcgtatttaccgacaacgaaaccttcgcaggtggagtgcatccggcaattgctctacgagaataccggaagaagatggacatcccggccaaattaattgtgtgtgggatgacctcgaatggcttcaccatagctgaccccgatgatcgtggcatgctggacatgtgcgggtttgatacgggggcccttgatgtgatcaggaatttcactctggacatgatctag

SEQ ID NO: 139183 - DNA, 1557 bp, synthetic construct
  misc_feature 1..1557: note = Description of Artificial Sequence: Synthetic coding sequence
  source 1..1557: mol_type = other DNA
atggaagaatccgtgaatcaaatgcagccacttaacgaaaaacagattgccaattcccaggatggctacgtgtggcaggttaccgatatgaatcgcctgcatagatttctgtgctttgggtcagagggtggcacatactacatcaaagaacagaagcttggactggaaaacgcagaggccttgatcaggcttattgaggacggaagaggatgcgaggtgatccaggagattaagagtttctctcaggagggtcgcactacaaagcaagaacctatgctcttcgcactggctatctgcagccagtgttctgacatttcgacaaagcaggccgctttcaaggccgtgtccgaggtctgcagaattcctactcatctttttacatttattcagttcaagaaggatctgaaggagtccatgaaatgcgggatgtggggacgcgccctgcgcaaggccatagccgattggtacaatgaaaaaggtggcatggcgctggctctcgcagttacgaagtataagcagcgcaatggctggtcccataaagaccttctgcgactcagtcacttgaaaccatcaagcgaaggattggctatcgtgacaaaatatatcacaaaggggtggaaagaagttcacgagctttacaaggaaaaggcgctgtccgtcgaaaccgagaaactgctgaaatatctggaagcggtggagaaggttaagcgcacgagagacgagctggaggtgattcacctcattgaggaacatagactggtaagagaacatctgttgaccaatcatctgaagtcgaaggaggtttggaaggccctgttgcaggagatgccactgacagctctgttgcgaaacctagggaagatgactgctaattccgtgcttgagccaggcaacagtgaggtgtctctggtctgcgaaaagctgtgcaacgagaagctgctgaagaaggctaggattcatccctttcacatattaatcgccctggaaacctacaagactggacatgggctcaggggtaagctcaagtggagacccgacgaggagattctaaaggctctcgacgccgccttctataaaacatttaaaaccgttgagccaacgggcaagcgctttctgctggccgttgatgtgtctgcctctatgaatcagagggtcttagggtccattctgaacgcgtccaccgtcgcagcagccatgtgtatggtggtaactcgaactgagaaggattcctacgtggtagccttttcagacgagatggtcccctgccccgtgacaacagacatgaccctacaacaagttctgatggcaatgagccagatcccggctggggggacagactgctcgctgcccatgatatgggctcaaaagacaaacaccccagctgacgtgttcatcgtcttcaccgacaacgagacctttgcaggcggggtgcaccctgctattgctttgagggagtataggaagaaaatggacattcccgccaaactcatagtgtgtgggatgaccagcaatggctttaccatcgccgaccccgacgatcgcgataccgttaaatag

SEQ ID NO: 139184 - DNA, 1578 bp, synthetic construct
  misc_feature 1..1578: note = Description of Artificial Sequence: Synthetic coding sequence
  source 1..1578: mol_type = other DNA
atggaggagtctgtgaatcagatgcaacctctcaatgagaaacagatcgccaattctcaggatggctacgtatggcaggttaccgatatgaatagacttcacagatttctttgttttggtagcgaggggggcacttactacatcaaagagcagaaattaggactcgagaatgcagaggccctaatacggcttatcgaagacggccgtggctgtgaagtaatccaggagatcaagtcatttagtcaggagggacgcaccacaaaacaggagcctatgctgtttgccctcgctatttgctcacagtgctccgacataagtaccaaacaggctgcattcaaagccgttagtgaagtgtgtagaatcccaactcatctctttacgttcatccaattcaaaaaagatctgaaggagagtatgaaatgcggtatgtggggcagggcactccggaaggcaattgcggattggtacaatgaaaagggcggtatggctcttgctctagccgtgacaaaatacaagcaacgtaatggatggtcccataaggatctgcttcgcctgtcacatctcaaaccctccagcgaaggccttgcaatcgtaaccaagtatatcaccaagggatggaaagaagtgcacgaactctataaagaaaaggcgctgtcagtggagacagaaaagctcttaaagtacctcgaagctgttgagaaggtcaaacggacacgcgacgagctcgaagtcatccacctgatcgaggaacaccgtctggtaagggaacatctgcttactaatcacttgaaatcaaaagaagtctggaaggctctgctccaagaaatgccgctgacagcgctcctccgcaacctgggaaaaatgactgccaattccgtcctggagccaggtaactccgaggtgagcctggtgtgcgagaaactgtgtaacgagaagctgttgaagaaggcacgaattcatccattccatatactcatcgccctggaaacctataagacgggacacggactccgcggcaaactgaaatggaggcctgacgaggagattctcaaagctttggatgctgccttttacaaaaccttcaaaacggtggagccaacagggaagcgtttcctgctcgccgtcgacgtttcagctagtatgaaccagcgtgtgctcggttcaattctgaatgcaagcaccgttgccgccgccatgtgtatggttgtgacgagaacagaaaaagacagctacgtggttgcattcagtgacgagatggtgccctgccccgtgaccacggacatgactttgcagcaggtactgatggccatgagtcagataccagctggcggcaccgattgtagtttgccgatgatatgggcacagaagacaaatacacctgcagacgtttttatcgtgtttacggacaacgagacatttgcagggggagtacaccccgctattgcactgcgcgagtacagaaagaaaatggatatcccagcgaagctgattgtttgcggtatgacatcaaatggttttacaattgcggaccctgatgatcgcgccctgcaaaacactttattaaataaatccttctag

SEQ ID NO: 139185 - DNA, 1605 bp, synthetic construct
  misc_feature 1..1605: note = Description of Artificial Sequence: Synthetic coding sequence
  source 1..1605: mol_type = other DNA
atggaggagtcagtgaatcagatgcaacctctgaacgaaaagcagatcgctaattcacaggacggatacgtctggcaggtcacagatatgaatagattgcatcggtttctgtgcttcgggtccgaaggtggcacatactacattaaggagcagaagctgggcctcgagaatgcagaggcattgattcggctcatagaggatggccgcggctgcgaggtgatacaggaaatcaaaagcttttcacaggagggccgcactactaaacaggagcccatgctgtttgctctcgccatctgcagtcagtgcagcgacatctctaccaagcaggccgccttcaaagctgtgagtgaagtctgcaggataccgactcatctgtttacattcattcaattcaagaaggacctaaaagaaagcatgaagtgtgggatgtggggtagagccctgcgcaaggcaatcgctgattggtataatgagaagggaggcatggcactcgctttagctgtgaccaagtacaagcagagaaatggatggagccataaggacctacttcgccttagccacctgaagccgtcatctgagggcctggccattgtgacgaagtatattaccaaaggatggaaagaagtgcatgaactctacaaggagaaggctctgtccgtggagacggagaaactgctcaaatacctggaggcagttgagaaggtgaaacggacgcgagacgagctcgaggtgatccaccttatagaggagcaccgtcttgtgcgggaacacttgttaaccaaccatctgaagtccaaagaagtgtggaaggctctgctgcaggagatgccgttgaccgctttgcttagaaacctgggcaagatgaccgcgaatagtgtgttggagccaggtaattctgaagtctccctcgtttgtgagaaactttgcaacgagaaactcttaaaaaaggccaggattcatccatttcacattctgatagcgctggagacctacaaaaccggacatggacttcgcgggaagttaaagtggcggcccgacgaggagatactgaaggccctggacgcagccttctataagaccttcaaaactgtggagccaaccggaaagcggtttttgctcgccgttgatgtttctgcttccatgaaccagcgtgttctgggctccatactcaacgccagtacggtggcggccgcaatgtgcatggtggtaacacgcaccgaaaaagattcctacgtggtggctttcagcgatgaaatggtgccatgtcccgtcacaacggatatgaccctgcaacaggtccttatggcgatgagccaaataccagctggggggaccgactgcagcctccccatgatttgggcacaaaaaacaaatactcctgcggatgtgtttatcgtttttaccgataatgaaacatttgcaggtggcgtacacccggccatagcactccgtgagtacagaaaaaaaatggatataccagcaaagctgatcgtctgcggaatgacatctaatggattcaccattgccgatcctgatgaccgggggatgctagacatgtgcggcttcgataccggggccctggatccctgtaaaatcccctactag

SEQ ID NO: 139186 - DNA, 1617 bp, synthetic construct
  misc_feature 1..1617: note = Description of Artificial Sequence: Synthetic coding sequence
  source 1..1617: mol_type = other DNA
atggaggagtccgtgaatcagatgcagccactgaacgagaaacagattgctaactctcaggacggctacgtatggcaggtcacagacatgaatcggctccaccgatttctgtgctttggttctgaagggggaacctactacatcaaggagcaaaaactggggttggagaatgctgaagcgcttattaggctgatcgaggatgggaggggctgcgaggtgattcaagagatcaagagtttttctcaggagggtagaaccactaaacaggagcccatgcttttcgctcttgcaatctgtagtcagtgcagcgatatctcgacaaagcaagccgcatttaaggcagtgagtgaggtctgtagaatccccacccatttatttaccttcatccagttcaagaaggacctgaaggagtccatgaaatgtggcatgtggggcagggccctgagaaaggccatagccgactggtataatgaaaaggggggtatggcactggctctggctgttaccaagtacaaacagagaaatgggtggtcccacaaggatctcctaaggctcagccatctgaagcctagttccgaaggccttgctatcgttaccaagtatattacaaaggggtggaaggaggtccatgaactatacaaggagaaagcattatctgtcgagaccgagaaactcctaaagtaccttgaggcagtggaaaaggtcaagaggacaagagacgaactggaggtgatacatttgatcgaagagcatagactggttcgggagcatttgctcactaatcatcttaagtccaaggaggtgtggaaagccctgcttcaggagatgcccctaaccgccctgctcaggaacctgggaaaaatgaccgctaactccgtgctcgagcctggaaattctgaggtgtccctggtgtgcgagaaattatgcaacgagaagttactaaagaaggccaggattcatccctttcacattctcattgccttggagacctataagactgggcacggactgaggggaaagctgaaatggagacccgacgaagaaatcctgaaggccctggacgccgccttctacaagacattcaaaacagtcgagcccacaggcaaaagatttctgctagccgtagacgtgagtgcatctatgaaccagagagttctgggaagcatactcaatgcgtctacggtggccgccgctatgtgtatggtggttactaggactgagaaagattcatatgtggtggccttttcggatgaaatggtaccgtgcccagtaacgacggacatgacgctgcagcaggtccttatggcaatgagtcagatacccgcaggcggcaccgactgcagccttcccatgatttgggcacagaaaacaaatactcctgctgatgtgtttattgtctttaccgacaacgaaactttcgccgggggcgtccacccagccattgcacttcgagagtacaggaagaaaatggacattcccgctaagctgatcgtgtgcggaatgacttcgaacggcttcaccatagcggatcccgatgatcgaggtatgctggatatgtgtggcttcgataccggtgcgctggacgtcatccgcaattttactctcgatatgatttag

SEQ ID NO: 139187 - DNA, 1617 bp, synthetic construct
  misc_feature 1..1617: note = Description of Artificial Sequence: Synthetic coding sequence
  source 1..1617: mol_type = other DNA
atggaggagtccgtcaaccagatgcagccactgaatgaaaagcagatagcaaattctcaggacggctatgtgtggcaggtcacagacatgaaccgcctccatcggttcctctgtttcggaagtgaaggcggtacatattatataaaggagcagaaacttggcctggaaaacgcagaggcactgatccggcttatcgaagatgggcggggttgcgaggtgatacaggagatcaagtccttcagtcaggagggccggaccacgaagcaggaaccaatgctttttgcgctggcaatttgttcccagtgcagtgatatctccaccaaacaagccgcattcaaggcggtgagcgaagtttgccggattccaacccacctattcacctttatccaatttaaaaaggacctgaaggagtccatgaaatgcggcatgtggggcagggccctcagaaaggctatcgctgactggtataacgagaaaggaggcatggctctggcgctggccgttaccaagtacaagcagagaaacggttggagccacaaagacttattaaggctcagccatttaaaaccatcttctgaggggctcgcgatagtgactaaatatataaccaaaggctggaaggaggtccatgaactctacaaagagaaggccctaagtgtggagaccgagaaactcctgaaatatcttgaggcagtagagaaggtcaaacgtactcgggatgaattggaagtgatccatctcattgaggagcatcgcctggtacgcgaacacctcctcacgaaccacttgaagtctaaagaagtgtggaaagcccttctccaggaaatgccattaacagccttactccggaatctgggtaaaatgacagcaaacagcgtgctggagcccggcaattctgaggttagcttagtgtgcgagaaactgtgtaacgaaaaattgctgaagaaagccaggattcatcctttccacatactgatcgcactggagacttacaagacagggcatgggcttagggggaaattgaaatggcgaccagatgaagaaattctgaaggctctcgacgctgcattctataaaacatttaaaacagtggaacccacaggcaaacgctttctcctggcagttgacgtctccgcgtccatgaaccagcgtgttctgggttccatcttaaacgcatctacagtcgccgcagcaatgtgcatggtcgtcactagaacggaaaaagactcttacgtcgtcgccttttccgacgagatggtcccatgccccgtgaccaccgacatgaccctccagcaagtgctgatggcgatgtctcaaattccagccggtggtactgattgcagcctccccatgatttgggcccagaagacaaatacccccgctgatgtcttcatcgttttcaccgataacgagaccttcgccgggggggtccatcctgccatcgctctgagagagtataggaaaaagatggatatcccagcgaagctgatagtgtgcgggatgaccagcaacggattcacaattgccgatcctgatgaccggggcatgttggacatgtgtggatttgataccggcgctcttgacgtgatccggaatttcaccctggacatgatctag

SEQ ID NO: 139188 - DNA, 792 bp, synthetic construct
  misc_feature 1..792: note = Description of Artificial Sequence: Synthetic coding sequence
  source 1..792: mol_type = other DNA
atgcctcttaccgctctcctgcgaaacctggggaagatgaccgcaaacagtgttttggaacctggaaatagtgaagtatccctggtgtgcgagaagctctgcaatgagaagcttctaaaaaaagcgagaattcacccctttcacattcttatcgccctggaaacttataagactggtcacggactgagggggaagctcaagtggagacccgacgaagagatactgaaggcactggacgcggcgttctataagactttcaagacagttgaacctactggaaaacggtttttactggctgtggatgttagtgcctccatgaatcagcgagtgctgggctcgatcctgaacgcatctactgttgcagccgccatgtgcatggtggtgaccaggacggaaaaggattcatacgttgtggcctttagcgacgaaatggtcccatgccctgtcacaactgacatgactctgcagcaggtcctgatggcaatgtctcagattcctgctggcggtactgattgcagtttacccatgatctgggctcaaaaaactaacacccctgctgatgttttcattgtgttcactgacaatgagacatttgcgggaggagttcatcctgctatcgctctgagggaatatcgtaaaaagatggatatccccgccaaactaatcgtgtgcggaatgaccagtaacggattcaccatcgcagaccccgatgaccgagggatgctcgatatgtgcggattcgatactggcgccttggatgtcatccgaaattttacacttgacatgatatag

SEQ ID NO: 139189 - DNA, 126 bp, synthetic construct
  misc_feature 1..126: note = Description of Artificial Sequence: Synthetic coding sequence
  source 1..126: mol_type = other DNA
atggaggagagcgttaaccagatgcagccgctgaatgaaaagcagattgccaacagtcaggatggctatgtgtggcaggtaaccgatatgaacagattgcatcgtttcctctgtttcggatcttag

SEQ ID NO: 139190 - DNA, 1050 bp, synthetic construct
  misc_feature 1..1050: note = Description of Artificial Sequence: Synthetic coding sequence
  source 1..1050: mol_type = other DNA
atggccgcctcagaggcagctgtggtgagtagtccctccctgaaaaccgacaccagtccagtcctggaaactgccgggactgtcgcagctatggcagctaccccatcggcccgcgccgccgctgccgtcgtggcggcggctgcccgaactgggtcagaagcacgtgtgagcaaggctgccttggctacaaagcttctctcattaagcggcgtcttcgctgtgcacaaaccaaaaggtccaactagcgcggaactactgaaccggctgaaagaaaagctcctcgccgaggctggtatgccatcccctgaatggacgaaacgcaaaaagcaaactctcaagattggacatggcggaaccttggattcggccgctcgaggggtactggttgtgggaatcggatcgggaactaaaatgctgactagtatgctttctggcagtaagagatatacagctatcggagaactgggaaaggctacagacaccctggacagcacaggccgggttacagaagagaaaccctacgataagattacgcaggaggatatagagggcatcctgcagaagttcacaggcaatattatgcaggttccccccctgtattcagcattgaagaaggatggtcagcgcctcagcacgctcatgaagaggggtgaggtggtagaggctaaacctgcacggccagtaacggtgtatagtattagtttgcagaaatttcaaccgcccttcttcacattggacgtcgagtgtggcggcgggttctacatcagatcattggtaagcgacatcgggaaggagttgtcctcctgcgccaatgtgctagagctgactcgcaccaagcaaggaccttttacccttgaagagcacgcactgcccgaggataagtggacgatcgacgacattgcccagagcctcgaacactgttccagtctgtttcccgctgagctggctcttaagaagagcaagcccgagagcaatgaacaggtactgtcatgtgagtacattactcttaacgagccaaagagggaagatgacgttatcaagacatgttag

SEQ ID NO: 139191 - DNA, 996 bp, synthetic construct
  misc_feature 1..996: note = Description of Artificial Sequence: Synthetic coding sequence
  source 1..996: mol_type = other DNA
atgggcagcgctggactatcccgcctgcatgggctcttcgccgtctataaaccacctgggctcaagtggaagcaccttcgtgacacggtggaactgcaattgctaaagggactcaatgcacggaaacctccagcccctaagcaaagagtgcggtttctcctgggccctatggaagggtctgaagaaaaagaactgaccctcactgcgacctcagtgccctcatttatcaatcaccccctcgtgtgtggtcctgcattcgcacacctgaaggtgggcgtcgggcaccggctggacgcccaggctagcggggtgcttgtactgggcgtgggtcacggctgtagactgctgacggatatgtacaatgcccacctcacaaaggactacaccgtaagggggctccttgggaaggctactgatgattttagggaggacggacggctcgtcgagaagactacatacgaccacgtgacccgagagaagcttgacaggatcctggctgtcatccaaggcagccaccagaaagcactggtgatgtactcgaatttagatcttaaaacacaggaggcgtatgaaatggcagttcgcggcctcattcggcccatgaacaaaagccctatgctaatcaccggcattagatgcctctactttgcaccacccgagttcctgcttgaagtgcaatgtatgcacgaaacccagaaggaactgagaaagctggttcatgagatcgggcttgagctgaagacaaccgctgtgtgcacccaagtgagaagaactcgggacggatttttcaccttggatagcgctttgcttcgcacacagtgggatctaaccaatatacaagatgccattcgcgccgccacaccccaagtggctgccgaattggagaagtctctttcgcctgggttggacacgaagcagctcccatcaccaggttggtcctgggacagtcaaggtccatcaagcacgctcggtcttgagagaggagccggccagtag

SEQ ID NO: 139192 - DNA, 828 bp, synthetic construct
  misc_feature 1..828: note = Description of Artificial Sequence: Synthetic coding sequence
  source 1..828: mol_type = other DNA
atggaaggttccgaagagaaggaactgactctaactgcaacaagtgtgccctcttttatcaatcacccattagtatgcggtccagcattcgcacacctcaaagtcggcgtgggtcatcgactggatgcccaagcctcgggcgtgctggtgctaggggtgggccatgggtgcaggttgcttacagatatgtataatgcccacttaacaaaagattacacggtaagaggtctgctaggcaaagcgactgacgacttccgcgaagacggtcgcctagtggaaaaaacaacttatgatcatgtaactcgagagaagctggatcgcatccttgctgtgattcaggggagccaccaaaaagccttggtaatgtattctaatctggatctcaaaactcaagaggcttacgagatggctgtcaggggcctgattcggcccatgaataagagcccaatgctgattaccgggatcaggtgcctctacttcgctccacccgagtttcttcttgaggtacagtgcatgcatgaaacccagaaggagctgcgcaagcttgtgcacgagatcggactggagctgaagactacagctgtatgcacccaggtgcgccgaacgcgcgatggattctttacacttgactccgctctgctgcgcacccagtgggacctcactaacatccaggacgctattcgtgccgctactccacaggtggccgccgagctggagaagtccttaagccccgggctggacacgaagcagctgcccagtccaggctggagttgggactctcagggaccgagtagcaccctggggttggaaaggggggcaggccagtag

SEQ ID NO: 139193 - DNA, 1701 bp, synthetic construct
  misc_feature 1..1701: note = Description of Artificial Sequence: Synthetic coding sequence
  source 1..1701: mol_type = other DNA
atgaggcgacagtggggtagcgctatgcgcgcagctgaacaggcggggtgtatggtgagcgcgagtcgggctggccagcctgaagccggcccttggagctgctccggcgttatcctcagcaggtctcccgggttagttctctgtcacggggggatatttgtcccatttctgagggcaggctctgaagtgcttaccgctgccggagcggttttcctgcccggtgacagctgcagagacgacctgagactccacgtccaatgggccccaacagccgccggccccggggggggggctgagcgcgggaggcctggactttgcacccctcaatgtgccagcctcgagcctggtcctccagccccatctcgtgggcggcctctgcagccccgtctccccgctgagctgctcctgctgttgtcctgtccagctttctgggcccattttgcccgactgttcggggatgaggccgccgaacagtggcgtttcagctccgcagcccgagatgacgaagtgtcggaagacgaggaggccgatcagctgcgtgccctcgggtggtttgcattactaggagtgcggctgggacaagaagaagtggaggaggagagaggaccggccatggcagtttctcctctgggggccgttcccaagggcgctccactgctggtatgtggtagtccattcggcgcgttttgccctgatatctttttgaatactctgagctgcggagtcctcagtaacgttgctgggcctctgttgctcacagacgcacgctgcctaccaggcaccgaggggggtggggttttcactgcaagacctgctggcgctctggtggcactggtggttgcccccctctgctggaaagcaggcgaatgggtcggctttaccctcctttgcgcagccgctccacttttcagggctgcgagggacgccctgcatcgcctgcctcactcgactgcagctttggcagccctcctcccgccagaagtaggtgtcccgtggggactgcctctgagggactctggacctctgtgggcagccgcagctgtgctggtagagtgtggcaccgtctggggcagcggagtcgccgtcgcccccagactagtagtgacctgccgccacgtgtcgcctcgagaggcggccagggttctcgtgcgaagcactacccctaagagtgtggccatctggggtcgggttgtgtttgctacccaggaaacatgcccgtatgatatagctgtggtgagcctggaggaggatctggatgatgttcccatccccgttccggctgaacatttccacgagggggaagccgtgagtgttgtgggtttcggcgtcttcggacagagttgcgggcccagcgtaacatccggcatcctaagcgcagtcgttcaggtgaatgggaccccagtgatgctacaaactacatgcgcagtccacagcggttccagtgggggaccccttttttctaatcattctggaaacctactgggcatcatcacctccaatacaagggacaacaatactggggccacctacccccatctaaactttagtatccctattaccgtcctacaaccagctctgcagcaatacagtcagactcaggatttaggggggttgcgggagctagatagagccgcagaaccagttagggtagtttggcggctccagcggcccctggccgaggctccgcgctccaagttgtag

SEQ ID NO: 139194 - DNA, 1197 bp, synthetic construct
  misc_feature 1..1197: note = Description of Artificial Sequence: Synthetic coding sequence
  source 1..1197: mol_type = other DNA
atgcgacggcagtggggctccgccatgcgagcggcggagcaagctggatgcatggtttccgcatcccgggccggccagcctgaagcgggaccatggagttgctccggcgttattctcagtaggtcaccggggctggttttatgtcatggaggcatattcgtgccgtttctgcgtgcaggtagcgaggttctgacagccgcaggcgctgtgttcctccctggagattcttgcagagacgacctgcgacttcatgtgcaatgggccccgactgccgccggacctggaggcggagccgaacggggccgtcctggtctgtgtacaccacaatgcgccagcctggagcctggcccccccgccccctctcggggacgcccgctccagccacgtctgcccgccgaattgttgctgttactatcatgtcctgctttctgggctcactttgccaggctgttcggagacgaagctgccgagcaatggcggtttagctcagcggcgagggacgatgaggtgagtgaggacgaggaggccgatcagctccgggcactggggtggttcgctctcttgggtgttaggctcgggcaagaagaggtagaagaagaacgggggcccgccatggcggtatcccccctcggagcagtacctaagggtgcccctctgctcgtgtgcggatccccctttggagccttttgtccagacatttttttgaatacgctctcctgcggcgtgttgtcaaatgtggccgggccactcttgcttaccgacgccaggtgtctgccagggacggagggcgggggagtcttcaccgctcgcccagcaggagccttggtagcccttgtcgtcgccccactgtgttggaaagcaggagagtgggtcggtttcacgttactgtgtgccgctgcacctcttttcagggcagcacgcgatgcccttcatcggctcccacactccaccgccgccctcgccgctcttctcccccccgaggttggggttccatggggtcttcccctccgcgacagtggcccgttgtgggctgcagctgcggtgctcgtcgagtgtggcaccgtctggggctccggggtagcagtggcaccacgactggttgtcacttgtcggcacgtttcacctcgggaagccgctcgggttttagtgcgttccaccacccccaagcacaatcatcaacagcaccctggccagtag

SEQ ID NO: 139195 - DNA, 828 bp, synthetic construct
  misc_feature 1..828: note = Description of Artificial Sequence: Synthetic coding sequence
  source 1..828: mol_type = other DNA
atgctgaatctgctactactggctctgcctgtgctggcatcaagggcatatgcggcccctgcccccggccaggctctgcagagagtgggcatagttggcggccaggaagcaccaaggtccaagtggccttggcaagtcagcttgagagttcacggtccatattggatgcacttctgcgggggatctttgatccatccgcagtgggtgctcacagctgcccattgcgtgggaccggatgtgaaggatctagcagctttacgcgtgcagctccgcgaacagcacctttattaccaggatcagttactgccggtcagccggataatcgttcaccctcagttttacaccgcccaaataggcgcagatatcgccctcctcgagctggaggaacctgtcaatgtttcaagccatgttcatacagtgacattaccgccggcctcggaaacatttccaccaggcatgccttgttgggtcacaggctggggcgatgttgacaacgatgaaaggctaccaccacctttccctctgaagcaggtgaaggttccaatcatggaaaaccacatctgcgatgctaagtaccatctgggtgcatatactggggatgacgtgaggattgtgcgagatgacatgctctgtgcaggtaatacccgcagggattcctgtcagggggatagtggcggtccgttggtttgcaaggtcaatgggacttggctgcaggccggggtcgtgagctggggcgagggctgcgcgcagccaaatcgacccgggatctatacccgggtgacgtactatctggattggattcaccactacgtgccaaaaaaaccatag

SEQ ID NO: 139196 - DNA, 849 bp, synthetic construct
  misc_feature 1..849: note = Description of Artificial Sequence: Synthetic coding sequence
  source 1..849: mol_type = other DNA
atgcttcttctcgcaccccagatgctgaacttactgctgctggcccttccagttcttgcatcccgcgcgtacgctgccccggcacctggccaggccctgcaacgtgtcgggattgtgggtggccaggaggctccacgaagcaaatggccttggcaagtgtccttgcgggtgcacgggccttactggatgcatttctgcggggggtccttgatccacccacagtgggtcctcactgcagcacactgtgtgggcccagacgtcaaagatctcgccgcgctgagggtgcagcttcgcgagcaacacctgtactaccaggatcagcttctgccagtatcccggataatcgtgcacccacagttttacaccgctcagatcggcgctgacattgcgctgctggagctggaggagcctgtgaacgtcagttcccacgtccacacagttacactgcctcccgctagtgagacgtttcccccaggaatgccctgctgggtgacagggtggggagacgtggataacgacgagcggcttccccctcccttccctttaaaacaggttaaagtgccaataatggagaaccatatttgtgacgcaaagtaccacctgggtgcctatactggtgacgatgtccggatagtgcgagacgacatgctgtgtgctggcaatacgcgcagggactcttgtcagggcgactctggcgggcctttagtgtgcaaggtgaacggaacctggcttcaggcaggggtcgtctcttggggggagggctgtgctcaacccaataggcctgggatctatacacgcgtcacatattacctcgactggattcatcattatgtaccaaaaaagccctag

SEQ ID NO: 139197 - DNA, 2532 bp, synthetic construct
  misc_feature 1..2532: note = Description of Artificial Sequence: Synthetic coding sequence
  source 1..2532: mol_type = other DNA
atgtgggggaggctctggccattactcctgagtatccttacagccaccgccgtccctggaccttctttgcgccgcccctctcgggaactggacgctaccccacgaatgaccatcccgtacgaagagctgtcgggcacccgccactttaagggacaagctcagaattacagcacccttctactggaagaagcttcagccaggctgctcgtgggagccagaggagccctattctcgttgtcagccaacgatattggcgacggagctcacaaggaaattcactgggaagccagccctgagatgcaatctaaatgtcaccagaaggggaaaaacaatcagaccgagtgttttaatcacgtgcggttcctacagcgacttaactctacgcatctgtacgcgtgtggcacccacgcatttcaacccctgtgtgcggccatcgatgcggaagctttcacccttcccacgagcttcgaagagggcaaggaaaagtgcccctacgacccggcacgaggctttaccgggctaattattgacggcggtctatataccgccaccagatatgaattcaggagtattccagatatacgtcgatctcgacaccctcattctctcagaaccgaggagaccccaatgcactggctgaatgatgctgaattcgtgtttagcgtgctggtaagagaaagcaaggcttcggcggtcggggatgatgacaaagtctactacttctttactgaacgtgctactgaggaggggagcggcagcttcactcagtcccgctcatcccaccgagtggccagggtggcacgcgtctgtaagggtgaccttggagggaagaaaatactgcagaaaaagtggactagttttctgaaagctcgactgatctgccatatccccttatatgagacacttcgaggcgtttgttccctggatgcggaaaccagcagtagaacgcatttttatgctgccttcacactgtctacccagtggaaaacactggaggctagcgcaatctgtcggtacgatctggcagagatccaggctgtgttcgcaggaccctacatggagtaccaggatggcagtaggcggtggggccgatatgaggggggtgtcccagagccccgcccagggtcctgcatcactgattccttgcgatcacagggttataatagttcccaggatctgcccagccttgtccttgatttcgtgaagctgcatcccctcatggcccgcccagttgtgcctacgcgagggcggcctttgctccttaaaaggaatattagatacactcacctgactggcacccctgtgacgacgccagcaggcccaacttacgacttactgttcctgggaacggcagatggttggattcataaggcagtggtcctggggagtggtatgcatatcattgaggagacccaggttttccgggagtctcaatctgtcgaaaacttggtgatttcattgctgcagcatagtctctacgtcggcgccccatcgggtgtgattcagctgccattgtccagttgtagtaggtatcggtcctgttacgattgtatcctagctagagatccatattgcggctgggatcccgggacccatgcgtgtgctgctgccaccacaatagctaacaggagtcagggatcccgtacagccttgatccaagacatagagcgggggaataggggctgcgagtcatctcgagatactggacctcctccacccctaaagactagaagcgtactgagaggcgacgatgtgttactgccatgtgatcagcctagcaatctggcacgagctttgtggctgcttaacggttctatgggcctgtcagatggtcaggggggatatcgagtgggagttgacggcctcctagttactgatgcccagcctgagcactcaggaaactacgggtgttacgctgaagaaaatgggctccgcaccctgctggcctcatactccctaactgttcggccggctacccctgctcccgcacctaaagcccctgctacacccggtgctcagttggcccccgacgtacgattgctctatgtgttggccatcgcagcactgggcgggctatgcttgattctggccagcagcttgctgtacgtggcttgtctgcgcgagggacggcgtggcaggcgccgcaagtactctctcggtcgcgcgagtagggccggtggttccgctgtgcaactgcagacagttagtgggcagtgccctggtgaggaggatgaaggcgacgacgagggcgccggaggactggaggggtcgtgtctccaaatcatccctggagagggcgccccagccccgcctcctccccccccaccaccccctcctgcggaactgaccaacggactagttgccctcccctccaggctgcgacgaatgaacggcaattcttacgtgctgctcagacagagtaacaacggagtcccggcggggccctgcagctttgcggaggaactcagtcgcattttggaaaagcgtaaacacacacaattggtggagcagcttgacgaaagctcggtatag

SEQ ID NO: 139198 - DNA, 708 bp, synthetic construct
  misc_feature 1..708: note = Description of Artificial Sequence: Synthetic coding sequence
  source 1..708: mol_type = other DNA
atgctgagcctactcctgctggcattgccagtgttagcctcccccgcctacgtggctcccgccccagggcaagcactgcaacagaccggcatcgtgggggggcaggaggctccaaggtccaagtggccatggcaggtaagtctgagagtacgagggccctattggatgcacttttgtgggggcagcttgatccatccacagtgggtactgacggccgcccattgcgtggaacctgacatcaaggacctagctgcacttcgggtgcagctacgagaacagcacctctactatcaggatcagttattgccagtgtctcgcattatagtacacccacagttttacatcattcagaccggagccgacattgctttgcttgagcttgaggagccagttaacatctcctcccacatccacaccgtcactctcccgcccgccagtgagacctttcccccagggatgccctgctgggtgactgggtggggcgatgttgataataatgtgcacctcccacccccttatcctcttaaggaggttgaggtgcctgtcgtggagaatcatctgtgcaatgccgagtatcatactggattgcacacaggtcacagtttccagattgtgagggacgacatgttgtgcgccggctctgaaaaccacgactcttgccagggcgactctggcggaccactcgtctgcaaagtgaacggaacatag

SEQ ID NO: 139199 - DNA, 4281 bp, synthetic construct
  misc_feature 1..4281: note = Description of Artificial Sequence: Synthetic coding sequence
  source 1..4281: mol_type = other DNA
atgcactcatccaaccccaaagtgcggtcctctccctctggcaacacgcagagttcacctaagtcaaaacaggaggtgatggtacggcctccaaccgtgatgtcgccatctgggaacccccaactcgatagcaagttcagcaaccaaggcaaacaggggggttctgccagtcagagccagcccagtccttgtgattctaagtcagggggacatacccctaaggcccttccaggccctggaggaagtatgggactcaaaaacggagctggtaacggagcgaagggcaagggaaagcgggagaggagtatttccgcagactccttcgaccagagggacccggggacacccaatgatgacagtgatatcaaagagtgtaatagtgccgaccacatcaagtcccaagatagtcagcataccccacatagcatgacccctagtaatgccaccgcccctcggagtagtactccttctcatggccagaccaccgccaccgagcccacaccagcccagaagacacccgcaaaggttgtctatgtgttctccaccgaaatggctaacaaggccgccgaagccgtcctcaagggacaagtggaaacaatagtgagctttcatattcagaacattagcaataataagactgaacgaagtacagcccccctgaacacgcagatcagcgcactgcggaatgacccaaagcccctacctcagcaaccgccggccccagcgaatcaggaccaaaattctagccagaatactcgcctccaacccaccccccctatccctgccccagctccaaaacctgctgctcccccccgaccattggaccgcgaatcgcctggagtggaaaataagctgataccaagtgtagggagtcccgcctcgtcaacaccgttacctccggacgggaccgggcccaacagtaccccaaataaccgggctgtcacccctgtgtcccagggcagcaacagcagttccgctgatcctaaggcccctccacctccccctgtgagttctggagaaccacctacgcttggcgaaaatccagacgggctctcccaggagcagctcgaacaccgggagaggtcactacagacgctgcgtgatattcagcgcatgttatttcccgatgagaaagagtttacaggagctcagagcggcgggccacaacagaacccgggggtgcttgatggaccccaaaaaaagcctgagggcccgatacaagctatgatggctcaatcccagagtcttgggaagggaccaggcccgcgcaccgatgtaggcgcgccgtttggtcctcagggacaccgagacgtcccattctcaccggacgagatggtgccaccttccatgaacagtcagagcggaacaatcggtccagaccatcttgaccacatgactcctgagcagatcgcttggctgaaactccagcaggaattctatgaggaaaaacgacgaaagcaagagcaggtagtagtgcagcagtgttctctgcaggacatgatggttcatcagcatgggccaagaggcgtagttcgcggccctcctcctccatatcaaatgacgcctagtgagggctgggccccgggaggtacagaaccatttagcgatggaataaatatgcctcacagcctgcctcccagagggatggccccccaccctaatatgcccgggagccaaatgcggctgcctggctttgcaggaatgatcaattccgaaatggagggccctaatgtgccaaaccctgcctcccgcccaggtttatctggcgtgtcttggccagacgatgttcctaaaattcctgacggtcggaatttcccgcccggccaggggatctttagcggccccggcaggggagagagattccccaatccccaagggctcagtgaagagatgtttcagcagcagttggctgagaaacagctgggcctccctcccgggatggccatggaaggaatacgaccctctatggagatgaaccgaatgatccccggctcccagcgccacatggagccaggtaataatcccatctttcctcgcatcccagtggagggacccttaagccccagcaggggagatttccctaagggtatccctccacaaatgggtccagggagagaactggaattcggcatggtccccagcggaatgaagggagacgtaaacctgaatgtgaacatgggtagcaacagtcagatgataccacagaagatgcgcgaggccggtgcagggcctgaagagatgctgaaacttcgccccgggggcagtgatatgttgcccgctcagcagaaaatggtgcctctcccgtttggggaacatcctcagcaggagtacggcatggggccccgtccgtttcttcctatgtcccaggggcccggaagtaacagcggtctccgcaatttgagagaacctatcggaccggatcaaagaactaactctaggctcagccatatgccaccgctgccattgaacccatcctcaaatcccacatctctcaatacagcacctcctgtgcagagagggcttggacgaaagcccttagacatctccgtagcgggcagccaggttcactccccaggcattaacccccttaagtcacccaccatgcatcaggtccagagcccaatgttgggctcaccctctggcaatctgaagtctccccagacccccagccaactggcggggatgttggccggcccagcagccgccgcatccatcaaatcgcctcccgtgcttggatcagccgcggcgtcccccgtgcacttgaaaagtccatccctacctgcgccatccccagggtggaccagctctcccaagccacctttgcagtctcccggcataccccccaaccacaaggcgcccctgacaatggcctcaccggcaatgctaggaaacgtcgagtcaggcgggccgcctcctcccaccgctagtcagccagccagcgtgaatatccccgggtctctcccctcctctacgccctacacaatgccccctgaaccaacgctgagccagaacccactgtctatcatgatgtcacgcatgtctaaattcgctatgccatctagcactcccctttaccatgacgcaattaagacagttgcttcatccgacgacgactcccctccagctcgcagccctaacctcccaagcatgaataacatgccaggcatggggattaacactcagaatcctaggatcagcggccctaaccccgtcgtgcccatgcccactttgtcacctatgggcatgactcaacccctgagccactcaaaccaaatgccttctcccaacgctgtcgggccaaacatcccaccccatggggtgcctatgggaccagggctgatgagtcacaacccaataatgggccatgggtcccaagaacccccaatggtcccccaaggacggatgggctttccccagggctttcctcccgtgcaatccccaccccagcaagtgccctttcctcacaacggcccctctggggggcagggttcatttcccggaggtatggggttccccggcgaagggcctctggggcggcctagcaatctcccacagagttccgcggatgcagccctgtgcaaacctggaggccccggaggtccagactcattcaccgtgctcggaaacagcatgccatctgtatttacagacccagatctccaagaggtgatcaggcctggtgcaacggggattcccgagttcgatctgagccgcataattccatccgagaagcctagccaaacattgcaatatttcccacggggggaagtccccggcaggaagcagccccagggaccgggacccggcttctcccacatgcagggcatgatgggtgagcaggcaccccgaatgggacttgccctcccagggatgggggggccaggccccgtcggaaccccagatatacccttgggaaccgcccccagtatgccgggccacaaccctatgagacctccagctttcttgcaacagggcatgatgggccctcaccatagaatgatgagtcccgcccagagcactatgccggggcaacctaccctgatgagcaaccctgctgcagcagttggaatgatccctgggaaggaccgcggccctgccgggctgtacacacatccaggtcccgtcgggtctccagggatgatgatgagcatgcagggtatgatgggcccacagcagaacataatgataccaccccagatgaggccacgggggatggctgccgacgtgggcatgggcggattctcacagggacccggcaatccaggaaacatgatgttctag

SEQ ID NO: 139200 - DNA, 1221 bp, synthetic construct
  misc_feature 1..1221: note = Description of Artificial Sequence: Synthetic coding sequence
  source 1..1221: mol_type = other DNA
atgtcgggctgtccttttttagggaataatttcgggtatacctttaaaaaactgccagtggagggctcagaagaagataaatcccaaactggagtgaatcgtgcctccaaaggcggcctaatctatgggaactacctccacctggaaaaagtgctcaatgctcaagagcttcagagcgaaactaaaggaaataaaatacacgatgagcatctgtttatcataacccaccaagcctacgagttatggttcaagcagatcctgtgggagctcgacagcgtgcgcgaaatcttccagaatggacatgtgcgagacgagcgaaatatgctgaaggtcgtcagccgcatgcaccgggtttccgtaatactcaagctgctcgtccagcagttctctatcctcgaaactatgaccgccctggactttaacgacttccgcgaatatttgagcccggcttctgggttccaaagcctgcaattcagattgctggaaaacaaaattggagttttacaaaatatgagagttccttacaatcgcaggcattaccgggataactttaaaggtgaggaaaatgagttactgttaaaatccgagcaggaaaagaccctgttagagcttgtcgaagcttggcttgagagaacacccggccttgagccgcatgggtttaacttttggggcaagttggagaagaatatcactcgaggcctggaagaagagtttataagaattcaggcaaaagaggaatccgaggagaaggaggagcaggtagccgaattccagaagcaaaaagaggtgttactgagtctctttgacgagaagcgccacgaacacctactcagcaaaggtgaaaggcgtctcagctacagagcccttcagggagccctaatgatctacttttacagagaagaacccagattccaggtgccctttcagctgctcactagcctaatggatattgattccctaatgacaaagtggagatataatcacgtctgtatggttcatagaatgctaggatccaaagccggaaccggcgggagcagcggttaccactacttgaggagcaccgtttcagatagatacaaagtttttgttgatctgttcaacctcagcacttatctaatccccaggcattggattcccaaaatgaaccctacaattcataaatttctctacacggccgagtactgtgactcctcttacttctcctccgacgaatctgattag

SEQ ID NO: 139201 - DNA, 1335 bp, synthetic construct
  misc_feature 1..1335: note = Description of Artificial Sequence: Synthetic coding sequence
  source 1..1335: mol_type = other DNA
atgatcgaagataacaaagagaataaagaccacagcctggagcgcgggagggcatctctcatcttcagcttgaaaaatgaggtcgggggtctcattaaagctctgaagatttttcaagaaaaacacgtcaatctcctccacatcgaatcacgcaaaagtaaacgccgcaactccgaattcgaaatctttgtcgactgcgatattaatcgcgaacagttgaacgacatcttccacttgcttaagtctcataccaacgttctgtctgttaacctgcctgataacttcaccctgaaggaagatgggatggagaccgttccctggtttcccaaaaagatcagcgatctggatcactgcgcaaatagagttctcatgtacggctccgaattggatgcagatcaccccggttttaaagacaacgtctatcgcaaacgccggaagtattttgctgatctagctatgaactacaagcacggcgacccgatcccgaaagtagaatttaccgaagaggagatcaagacttgggggactgtcttccaagaattgaataaactctaccctacccacgcctgcagggaatatctcaagaacctgcctctgctctctaaatactgcggatacagagaagataatatccctcagctggaggacgtgtccaattttctgaaggagcgcactggcttttccattaggcctgtagcgggttacctcagccccagagatttcctctcaggccttgccttccgggtgtttcattgtacacagtatgtgagacattcatccgaccccttctacacgcccgagcctgacacctgccatgaattactgggccatgtacctttgctcgctgagcccagctttgctcagttctcacaggaaatcggactggcttccctcggggcgtcagaggaagctgtgcagaaactggccacttgttatttttttacggtggaatttggactctgcaagcaagatggccaattgcgagtgtttggtgccggcttgctttcttctatatctgaacttaagcatgccctgtccgggcacgctaaagtcaaacctttcgatccaaaaattacttgtaaacaggagtgtttgattaccaccttccaggacgtctacttcgtctccgagtccttcgaggatgctaaagagaagatgcgggagtttacaaaaaccattaagagaccatttggggttaagtacaatccctacacccggtccatacagatcctgaaggacacgaaatccatcacgagcgccatgaacgaactccagcacgacctcgacgtggtctcagacgcccttgccaaagtgagtcgtaagccctccatctag

SEQ ID NO: 139202 - DNA, 1401 bp, synthetic construct
  misc_feature 1..1401: note = Description of Artificial Sequence: Synthetic coding sequence
  source 1..1401: mol_type = other DNA
atgattgaggataacaaggagaacaaggatcactccctggaacggggcagggcatccctgatcttcagtctgaaaaacgaagtcgggggtctcatcaaggctctgaagatcttccaagaaaagcatgtgaacctcctgcatatcgagtccaggaagtcgaagcgtagaaattcagagttcgaaatcttcgttgactgcgatattaacagagagcaactcaatgacatcttccacttgctgaagtcccacacaaacgtgctttccgtgaatctacctgataatttcactctcaaggaggatggaatggaaaccgttccgtggttcccaaagaaaatatcagatctggaccactgtgccaatcgtgtgctgatgtatggttcggaactcgatgctgaccaccctggcttcaaggacaatgtctatcgcaaaaggcgcaagtactttgctgacctcgctatgaactataagcatggagatccaatcccaaaggtcgaatttacagaagaggagatcaagacatggggaaccgtcttccaggaactgaacaagctgtatcccacccatgcctgcagagagtacctaaaaaacctacccctcttgtccaaatattgcgggtaccgcgaagacaatatccctcagttggaggatgtctctaactttctgaaggaacgaaccggattctctatccgcccagtggctggctatctgtctccccgagattttttatcaggactggcattcagggtgtttcactgcacacagtatgtcagacatagttcggaccctttctatactcccgagccagacacctgtcatgaactgctggggcacgtcccattgctggccgagccatccttcgcacagttttcccaagagatcgggttagctagcctcggggctagcgaggaggccgtgcagaagctcgccacgtgttattttttcaccgtcgaattcggtttgtgcaagcaggacggccagttgcgagtgtttggcgctggactgctgtcaagtatctctgagctgaaacatgccctgtctggccatgcaaaggtcaaaccttttgaccccaaaataacatgtaaacaggagtgtctgattactactttccaggatgtctactttgttagtgagtcctttgaagacgctaaggagaagatgagggaattcaccaaaactatcaaacgcccattcggagtgaagtataatccttacactagatctatacaaatcctgaaggataccaagtctatcacctcggcaatgaacgaattgcaacacgacctcgacgtcgtgtcggatgctctggcaaaatctctcaacgaggatgtcttgcaagtcagcgtcttcgccctgctactcttcctgccaagtctgcacggcgaatgtcatcctgatacgtag

SEQ ID NO: 139203 - DNA, 753 bp, synthetic construct
  misc_feature 1..753: note = Description of Artificial Sequence: Synthetic coding sequence
  source 1..753: mol_type = other DNA
atgcagcccgcaatgatgatgttttcatcgaagtactgggcccgtagaggtttcagcctagactccgcagtgccggaagaacaccagctgctgggctcctcaacactgaacaagccaaattctggtaagaacgatgataaagggaacaaaggtagctccaaacgcgaggcagccacagagtctggtaagacagctgtggttttcagtttgaagaatgaagtgggcgggctggtaaaggcgctgagactttttcaggagaagcgcgtcaatatggtgcacatcgaatcacgaaaaagtagacgtcggtcctctgaagtggaaattttcgtggactgtgaatgtggaaagaccgagtttaacgagttgatccagctgttgaagtttcagacaaccatcgtgaccctcaacccacctgagaatatctggactgaggaagaggagctggaggatgttccctggttcccacgtaaaatatctgagctcgataaatgttctcaccgagttttgatgtacggtagcgagcttgacgctgaccacccaggttttaaggacaacgtgtaccgccaaaggcgcaagtactttgtagatgtggcaatgggatacaagtatgggccgagactgctcgccgctataggagattgggagtttcagctcttcagcgtctcctcttctctgagcagcagttcgctttgcatgctttccgtccacattcttatggacgtccggagcatcgttgtcgcggtggatatttag

SEQ ID NO: 139204 - DNA, 1473 bp, synthetic construct
  misc_feature 1..1473: note = Description of Artificial Sequence: Synthetic coding sequence
  source 1..1473: mol_type = other DNA
atgcagcccgccatgatgatgttctcttctaagtactgggccagaagaggttttagtctggacagcgcagtgcctgaggaacaccagttactgggatcatcaactctgaacaaacccaattccggcaagaacgatgacaagggcaacaagggatccagcaagcgggaggctgccacagagtctgggaagactgcagtagtgttttctctgaagaatgaagtcggcggtttagtcaaagccctacgactgtttcaggaaaaaagagtaaacatggtgcacattgagagtcgcaagtcccgcaggcggtcctcagaggtggaaatcttcgtagactgcgagtgcgggaaaaccgaatttaatgagctgatccagttactgaaattccagaccacaatcgtcacacttaacccgcccgaaaacatttggacagaggaagaggaactcgaggatgttccctggttccctaggaagatttcagaactggataaatgttctcacagggtgctgatgtacggttctgagttggacgctgaccacccgggattcaaggacaacgtgtaccgccagaggaggaaatactttgttgacgtggcgatggggtataaatacggccagccgatccctcgcgtggagtacaccgaggaagagaccaagacctggggggtggtctttcgggagctgagtaaactgtacccaactcatgcctgcagggagtatcttaagaacttcccattgctcaccaagtattgtggataccgagaggataacgttcctcagctggaggacgtctctatgtttctcaaagagaggtctggctttaccgtccgccctgtggctggatacttatctccccgggatttcctggcgggtctggcttatagagtattccattgcacacagtatattcgccacggcagcgaccccctgtacacacccgaacccgacacatgtcacgaactgctcggccatgtacccctgttggccgaccctaaattcgcacagttcagccaggagattggcctggcctccctgggagctagtgatgaagacgtacagaagctcgcgacttgttacttctttacaatcgaatttggactctgcaagcaggaaggtcagcttagagcgtacggcgcaggtcttttgtccagtatcggggaacttaagcacgcgttgtccgataaagcatgcgtgaaggcgttcgacccaaaaactacttgccttcaggagtgcctaatcaccacatttcaggaggcttactttgtgtccgaaagtttcgaagaagccaaggaaaagatgagagatttcgccaagtccattactcgtcctttctctgtctacttcaacccttacacgcagagcatagagatactcaaggacacacggtctatcgaaaacgtggttcaggatctcagaagtgacctcaatacagtctgtgatgcgctgaacaaaatgaaccagtatctaggtatctag

SEQ ID NO: 139205 - DNA, 525 bp, synthetic construct
  misc_feature 1..525: note = Description of Artificial Sequence: Synthetic coding sequence
  source 1..525: mol_type = other DNA
atgagctcagccgctgccgaccactgggcttggttgctggtgctgtcatttgtgttcgggtgcaatgtgctccgaatcctgctgccctctttctcctcgtttatgtcgagggtccttcagaaagacgccgagcaggaatcacaaatgagggctgaaatccaggacatgaagcaggagctttctaccgtgaacatgatggatgaattcgcccggtacgcacgtctcgaaagaaaaatcaacaaaatgactgacaagttgaaaacccatgttaaagctcgtaccgcgcagctggcaaaaattaagtgggtgatcagcgtggcattttacgtgcttcaggcagctctgatgatctccctgatctggaagtattacagcgtccctgtggctgttgtgccgtccaagtggattacacccctcgaccgactcgtggcctttccaacacgggtcgccggaggcgtgggaattacctgttggattctggtgtgcaataaagtcgtggccatcgtgttgcaccccttttcttag

SEQ ID NO: 139206 - DNA, 423 bp, synthetic construct
  misc_feature 1..423: note = Description of Artificial Sequence: Synthetic coding sequence
  source 1..423: mol_type = other DNA
atgtcacgagtactgcagaaggacgcggagcaagagtctcagatgagggccgagatccaggacatgaagcaggaactgtctacggtgaatatgatggacgaattcgctagatacgcccgccttgagagaaagatcaataagatgactgataaacttaaaacgcatgtgaaagccagaactgcccagctggcgaaaatcaagtgggttatctcagtggcgttttacgtattgcaggctgccctgatgatctctctgatctggaaatactattccgtgcctgttgctgtcgttcctagcaagtggatcacacccctggaccggctggttgcattccctactcgcgtggctggcggagtcggtattacctgctggatcctcgtatgcaacaaggtcgttgctatcgtgctgcatccgtttagctag

SEQ ID NO: 139207 - DNA, 423 bp, synthetic construct
  misc_feature 1..423: note = Description of Artificial Sequence: Synthetic coding sequence
  source 1..423: mol_type = other DNA
atgagcagagtgctgcaaaaagacgctgagcaagagtcgcaaatgagggcagagattcaggacatgaagcaagagcttagtaccgtgaacatgatggatgagttcgccagatacgctaggctggaaaggaaaatcaataagatgaccgacaagctgaaaacacacgtcaaagctagaaccgcccaactcgccaagataaaatgggtgatctccgtggcattctacgtcctgcaggctgcacttatgatcagcctcatctggaaatactactctgtgccagtagctgtggtaccttcaaagtggattacccctctcgacagactggtggcattcccaacacgcgtggcaggaggtgtgggtatcacctgctggattctcgtctgtaacaaggtggtagcgatcgtcttgcaccccttctcctag

SEQ ID NO: 139208 - DNA, 519 bp, synthetic construct
  misc_feature 1..519: note = Description of Artificial Sequence: Synthetic coding sequence
  source 1..519: mol_type = other DNA
atgtcctccgcggccgccgatcattgggcgtggctgctcgtgctgagcttcgtcttcggctgtaacgttctccgcatcctccttccctcatttagttccttcatgtcccgggtcctgcagaaggacgccgagcaagaatcgcagatgcgagcagagatccaggacatgaagcaggagctgagcacagtcaatatgatggatgaattcgccagatacgctcgactagaaagaaagatcaataaaatgaccgacaaactcaagacccatgtgaaagctcggaccgcccagcttgccaaaattaaatgggttatcagcgtggccttctatgtgttgcaggctgcccttatgatctccctcatctggaaatattatagtgttcctgtagcggtggttccttctaagtggataactccgttggatcgcctggttgccttcccaacgcgcgtcgcagtcttcagctcatcgatctggacctccaaatgcttctcaagccctgacaaaagcatcctcgagaagtag

SEQ ID NO: 139209 - DNA, 1083 bp, synthetic construct
  misc_feature 1..1083: note = Description of Artificial Sequence: Synthetic coding sequence
  source 1..1083: mol_type = other DNA
atggccttacattccatgcgtaaagccagagagagatggagcttcatccgagccctgcacaaaggtagcgctgcagcacctgccctacagaaggattcaaaaaaacgtgtttttagcgggattcaacccacaggcattctacacctagggaattatttgggggctattgaaagttgggtgcgcctccaagatgagtacgattccgtgctgtactccatcgtggatctgcactcgattacagtgcctcaagacccggcagtcttaagacaatcgattttggacatgacggctgtgctgttggcctgtgggattaatcctgaaaaaagcattctgttccagcagtcccaggtgagcgaacacacacagttaagctggattctatcctgcatggttcgcctgccacggcttcagcatcttcatcaatggaaggccaaaacgactaagcaaaaacacgacggtactgtgggactactaacttatcccgtgctccaggcagccgatattctcctgtacaaaagcacacatgtgcctgttggagaggatcaggttcaacatatggagctggtgcaggacctcgctcaggggtttaataagaagtacggagaatttttccctgtacccgagtctatcctgacgtccatgaaaaaagttaagtctctgcgggatccttctgccaagatgtcaaagagcgaccctgataagctcgctactgtgagaatcaccgatagcccagaggagatagtgcaaaaattccgcaaggcagttactgatttcacttctgaagttacctatgaccctgccggaagagccggcgtgagcaatatcgttgctgtccatgccgcagtgacgggtctgtctgttgaggaagtggtcagaagatcagccggcatgaacacagccaggtacaaactggcggtcgcggacgcagttatcgagaagtttgccccaattaagagggaaattgagaagctgaagctcgacaaggaccacttagaaaaagttctacagatcggctcagctaaggctaaggaactggcctacacggtctgtcaggaagttaaaaaactggtgggatttctgtag

SEQ ID NO: 139210 - DNA, 663 bp, synthetic construct
  misc_feature 1..663: note = Description of Artificial Sequence: Synthetic coding sequence
  source 1..663: mol_type = other DNA
atggccctccactcaatgcggaaagcccgcgagaggtggagttttattcgagctctgcataagggttccgccgctgcccctgccctgcagaaggattcaaagaaacgggtgttttccggtatccagcctacaggcattttgcatctgggcaattatttgggtgccatagaaagttgggtccgcctgcaggacgaatacgactcggtcctttattcaatcgtggacttgcacagcataacagttccccaggatccagccgttttgcggcaatcgatcctcgacatgacggccgtcctgctggcttgcggtataaatcccgaaaaatccatcctattccagcaatcccaagtaagtgaacatacacagctgagttggatcttaagctgtatggtgcgacttcccaggcttcaacatctacatcaatggaaggctaagaccaccaagcagaagcatgatgggactgtgggactgctcacatatcctgttctccaggccgccgacatccttctgtacaagtctactcacgttcccgtgggcgaggatcaggttcagcacatggagctggtgcaagatctcgctcagggctttaacaagaagtacggagagttctttcccgttcctgaaagtattctgtcaatgtgtgtgctggttttccttacttag

SEQ ID NO: 139211 - DNA, 801 bp, synthetic construct
  misc_feature 1..801: note = Description of Artificial Sequence: Synthetic coding sequence
  source 1..801: mol_type = other DNA
atgaccgccgtgctcctagcttgcggcattaatcctgaaaagtctatcctgtttcagcagagtcaagtgagtgagcacacgcagcttagttggatcctatcctgcatggtcagactgccaaggctccaacaccttcatcagtggaaggccaagacaactaagcaaaagcatgacggaactgtagggttgttgacatacccagtcctgcaggcagctgatattcttctgtacaagtctacgcatgtgcctgttggggaagatcaggtccagcacatggagctggtgcaagacctggcgcagggtttcaacaaaaaatacggcgagttttttcccgttccagagagcattctgacttccatgaaaaaggtcaaaagcttgagagacccatcagctaaaatgagcaagagtgaccctgataagctcgcaactgttcggattaccgactctcccgaagaaatcgtgcagaagtttaggaaagcagtcaccgacttcacaagtgaggttacttatgaccctgccgggcgggcgggagtctctaatatcgtagccgtacatgccgctgtcacggggctgagtgtagaagaggtggtccggcgctcagccggaatgaacactgctcggtacaaattggctgtggccgatgctgtgatcgagaagttcgccccaatcaaaagggaaatcgaaaagttgaaattggataaagatcatctggagaaagttctgcagattggatccgcgaaagccaaggaacttgcttacacagtgtgtcaagaggtcaaaaaactggttggtttcctgtag

SEQ ID NO: 139212 - DNA, 1293 bp, synthetic construct
  misc_feature 1..1293: note = Description of Artificial Sequence: Synthetic coding sequence
  source 1..1293: mol_type = other DNA
atgcttgtctcattaaagatgagttacaaagccgccgcaggtgaggattataaggccgattgcccccctgggaaccccgccccaacgtcaaaccacggccccgatgcaacagaagccgaagaagattttgtcgacccgtggaccgtgcagacaagcagcgcaaaaggcatcgactacgataaactcattgtccgattcggctcttctaaaattgacaaagagttgatcaaccgaatcgaaagggctactggacaacgccctcaccactttctacggagaggaatcttcttctcccatcgggatatgaaccaggtgttggatgcctacgaaaacaaaaaaccattctatttgtacacaggaaggggtccttcaagcgaggctatgcacgtcgggcacctcattccattcattttcaccaaatggctgcaggatgtctttaatgtgccgttagtcatccaaatgactgacgacgaaaaatacttatggaaagatcttaccctggaccaggcctactcttacgcagtggagaacgccaaggacattattgcctgcggtttcgatataaataaaacatttatcttttccgaccttgattatatgggcatgtcgtctggcttctataaaaacgtggttaagatccagaagcacgtaacctttaatcaggtgaaggggatcttcggctttactgattcagattgtatcggcaagatttctttccctgccatccaggctgcgccaagtttctctaacagctttccacagatcttcagggacagaacagatattcaatgtctgataccctgtgccatcgatcaggacccctactttcgcatgacacgagacgtggctcccagaattggatatcccaaaccggcactgctgcacagtacgttctttccagctctgcagggcgcccaaacgaagatgtccgcgagtgaccctaactccagcatttttttaaccgatactgccaaacaaatcaagacaaaggtcaataaacatgcgttttccggaggcagagatacaattgaggagcacaggcagttcggcgggaattgcgacgttgacgtgagctttatgtatcttacattcttccttgaggatgatgataaactagagcagatccggaaagattacacaagcggagctatgctgaccggagagttaaagaaggcgttgatcgaggtgctgcagcctttaatagccgaacaccaggctaggcgcaaagaagtcacggatgagattgtcaaagagtttatgactccaaggaaactctccttcgactttcagtag

SEQ ID NO: 139213 - DNA, 1416 bp, synthetic construct
  misc_feature 1..1416: note = Description of Artificial Sequence: Synthetic coding sequence
  source 1..1416: mol_type = other DNA
atgccgaacagtgaacccgcttcactcttggagctcttcaacagcattgctacgcagggagagctggtccgaagtctaaaggcaggcaacgcctccaaagacgagatagacagtgctgtcaaaatgttagtgtctctcaaaatgtcttacaaggcagccgccggtgaagactataaagcagactgccctccgggaaacccggctccaacatcaaatcatgggcctgacgcaaccgaggctgaggaggatttcgtggacccatggacagtacagacttcctctgcaaaaggtatcgactatgacaagctgattgtcaggtttggtagctctaaaattgacaaggagttaatcaacagaatcgagcgcgcaaccgggcagcgaccgcaccactttctcagaagagggatctttttttcccaccgcgatatgaatcaagttctggacgcgtatgagaataaaaaacccttttacctgtatacaggtcggggcccttctagcgaggccatgcacgtggggcatctcataccctttatttttactaagtggctacaggatgtatttaatgttcctcttgttatccagatgaccgacgacgagaaatatctctggaaggatctaaccctggatcaggcctattcgtacgcagtggagaacgcaaaagacatcatcgcgtgtggcttcgatattaacaaaacattcattttctcagatctagactatatgggaatgtcatctggcttttataaaaacgtggtgaagatccaaaagcacgtaaccttcaatcaggtcaagggcatattcggattcacggacagcgattgcatcggcaaaatcagctttcccgccatacaggccgcgcccagttttagcaactccttccctcaaatatttcgggatcgtactgatatacaatgcctcattccctgcgcgattgatcaggatccttattttagaatgacccgggacgtggcaccgcgaataggctacccgaagcctgccttgctacacagcaccttctttcctgcactgcagggagcacagactaaaatgtccgcatcggacccaaatagtagtattttccttaccgacacggccaagcagattaaaactaaggtgaacaaacatgctttcagcggcggtagagacaccatcgaggaacacagacagttcggagggaattgcgacgtcgatgtcagctttatgtatttgactttctttctagaggacgacgacaagctggaacagattcggaaagactacacatccggcgccatgttaacaggtgagctgaagaaggctctgattgaggtgctgcaaccactaattgccgagcatcaggcacgacgaaaagaggtgactgatgagatcgtgaaggagtttatgactcccagaaagttaagtttcgacttccagtag

SEQ ID NO: 139214 - DNA, 1293 bp, synthetic construct
  misc_feature 1..1293: note = Description of Artificial Sequence: Synthetic coding sequence
  source 1..1293: mol_type = other DNA
atgctggtcagtctgaagatgtcatataaagctgccgccggcgaggattacaaggccgattgtccaccaggcaaccccgcccccactagtaatcacggaccggacgcaacggaggccgaagaggatttcgtggatccttggaccgtgcagacatccagtgcaaaaggaatcgattacgataaactgatcgtcaggtttgggagttccaaaattgataaggaactgataaaccggatcgagagagcgacgggtcagcgtccgcaccatttcctgagaagagggatattctttagtcacagggatatgaaccaggttctcgacgcttatgagaataagaaacctttctacttatatactggcaggggacccagctcggaagccatgcacgtgggacacctgattccttttattttcaccaagtggcttcaggacgtcttcaacgttcctctggtcatacagatgaccgatgatgaaaaatatctctggaaggacttgaccttagatcaggcctatagttacgctgtcgagaacgccaaggacatcattgcatgtggattcgacataaataaaacatttatcttctcagaccttgattacatggggatgtcttctggcttctataagaatgtggtgaagattcagaaacatgtgacattcaatcaggttaaaggcatcttcggcttcacggactcagattgtatcggaaaaatttcattccccgcaatccaagccgctccgagcttttcaaactccttccctcaaatatttcgagaccggactgacatacagtgcttgattccttgtgctattgaccaggatccctactttcgaatgactagggatgtggcccctcgcatcggatatcctaaaccagcgctgctgcacagtaccttttttcctgctctacaaggagcgcagacaaagatgagcgcctcagatccgaattcatccatttttctgaccgatactgcaaaacaaattaaaacgaaagtgaataagcacgctttttccggtgggcgggataccattgaggaacatcggcaatttggtggcaactgtgacgtggacgtatcatttatgtatctaacgttcttcctcgaggacgacgataagctcgaacaaattagaaaagactatacaagcggggcaatgttaactggtgagctgaagaaggccctgattgaagtcttgcagccccttatcgccgagcatcaggccagacgcaaggaagttactgatgagattgtgaaggagttcatgacccctcggaagttatcttttgactttcagtag

SEQ ID NO: 139215 - DNA, 1416 bp, synthetic construct
  misc_feature 1..1416: note = Description of Artificial Sequence: Synthetic coding sequence
  source 1..1416: mol_type = other DNA
atgcctaactccgaaccggcatcattgctggaactgttcaattccattgcgactcaaggcgagttagtgagaagcctgaaggcaggaaacgcatctaaggatgagatcgattcagccgtaaaaatgctagtgagcctgaaaatgtcctataaggccgcagccggagaggactataaagctgactgccctccaggcaacccagcacccacgtccaatcacggacctgatgctactgaagcggaggaagactttgtcgacccttggactgtccagacaagttccgccaagggtattgactatgacaagttgattgtgcgtttcggcagtagcaagatcgacaaagagctaattaatcgcatcgaacgcgcaacagggcaacgcccacaccacttcttaagacgtggcatatttttttcacatcgggatatgaaccaagtgctcgacgcttatgaaaataaaaagcctttctacctgtacacggggaggggccccagcagtgaggccatgcatgtcggtcacctgatcccattcattttcacaaagtggttacaggacgtgtttaatgttccactcgtgatccagatgactgatgatgagaagtacctttggaaggacttgacgttagaccaggcttacagttacgccgtggaaaacgcgaaagacattatagcctgcggtttcgatattaataaaacctttattttctctgacctcgactacatgggcatgagctccggcttttacaaaaacgtggtaaagatacaaaaacacgtgactttcaatcaagtgaaggggatttttgggttcacggatagcgattgtatcggcaagattagcttccctgctattcaggctgcacccagtttctctaattcctttccacagatctttcgagaccgaacagacattcaatgccttattccttgcgccatcgaccaggacccttactttcggatgaccagggatgtggccccccgtattggctatccaaagcctgccctgttacactccacattctttccggccctgcagggagcccagactaaaatgtcagcctctgacccaaactcaagtatatttctgactgatactgctaaacagattaaaactaaggtgaacaagcacgcattcagcggaggccgtgacacaattgaagaacatcgccaatttggcggaaattgcgatgtcgacgttagctttatgtacttgacattttttttggaggatgatgacaagttagaacagatcagaaaagactatacctcgggggctatgctgactggtgagttgaaaaaggcgctgatagaggtcctacagccccttatcgctgaacatcaagcccgacgcaaagaagtgaccgatgaaatcgtcaaggaattcatgactccccgaaagctttctttcgattttcagtag

SEQ ID NO: 139216 - DNA, 684 bp, synthetic construct
  misc_feature 1..684: note = Description of Artificial Sequence: Synthetic coding sequence
  source 1..684: mol_type = other DNA
atgttggtctcactgaagatgagctataaggccgctgctggcgaagattataaggcagattgtccacccggcaaccctgctcctactagcaatcacggacccgatgccacagaggccgaggaagactttgttgatccctggaccgtacagactagtagcgccaagggcatcgattacgacaagctcattgttcgttttggatcttccaagatcgataaagagctgataaaccgcattgaacgggccactgggcaacggccacaccatttcttgcggcgaggtattttcttcagtcacagggacatgaaccaggtgcttgatgcatacgagaataagaaaccattttatctttacaccggacgggggccttcatccgaggccatgcacgtggggcacctcatccccttcatctttaccaaatggttgcaggacgtttttaacgtacctttggtgatccagatgacagacgacgaaaagtacctgtggaaagacctgacccttgaccaggcgtacagctacgccgtcgaaaatgccaaggacatcattgcttgtggtttcgacataaacaaaacgttcatattctctgacctggactacatgggaatgagttctggattttacaaaaacgtggtcaaaatccagaaacacgtgaccttcaaccaggttaaagggatctttggatag

SEQ ID NO: 139217 - DNA, 324 bp, synthetic construct
  misc_feature 1..324: note = Description of Artificial Sequence: Synthetic coding sequence
  source 1..324: mol_type = other DNA
atgccgaactccgaaccagctagtctcctggagctttttaatagtatcgccacccaaggcgagttagtgcgatcccttaaggctggaaatgcttctaaggatgagatcgacagtgcagtaaagatgctggtttcactcaagatgtcatataaggcggccgcaggggaggactataaagcagattgccctccaggcaatccggcaccaactagcaaccacggaccggacgcaacggaggccgaggaagacttcgtggatccttggaccgtccaaacatcgtcggctaaagggatagactacgacaagctgatagtgcggttttag

SEQ ID NO: 139218 - DNA, 453 bp, synthetic construct
  misc_feature 1..453: note = Description of Artificial Sequence: Synthetic coding sequence
  source 1..453: mol_type = other DNA
atgcccaacagcgagccggccagcctgcttgagttgttcaactctattgccactcagggtgagctggtgcgctccttaaaggctggtaacgcctccaaggatgagatcgactccgcagtgaaaatgctggttagcctgaagatgagctataaagcagcagccggagaagactataaggctgattgcccgcccggcaaccccgcgccaacatcaaatcatggccctgatgccacagaagctgaggaagatttcgttgacccttggactgtccaaacatcttctgccaagggcatcgactacgataagctgatcgtgcgatttggttcatcaaaaattgacaaggaactgatcaacagaattgaaagagccactggccagcggccacaccattttctgcggcggggaattttcttttcccaccgggatatgaatcaggtgttggatgcttactag

SEQ ID NO: 139219 - DNA, 294 bp, synthetic construct
  misc_feature 1..294: note = Description of Artificial Sequence: Synthetic coding sequence
  source 1..294: mol_type = other DNA
atgccaaattctgaacctgcgtctctgctcgagctgttcaattccattgccacccagggggagctggtcaggagtttaaaggctggcaatgcctctaaggatgagattgacagtgcggtgaagatgcttgtgagcctcaagatgagctacaaagcagctgctggggaggactacaaggctgactgtcctcccgggaacccagcacctaccagcaaccacggaccagacgctactgaggctgaggaagatttcgttgatccctggacggtccagacaagctccgccaaaggatag

SEQ ID NO: 139220 - DNA, 81 bp, synthetic construct
  misc_feature 1..81: note = Description of Artificial Sequence: Synthetic coding sequence
  source 1..81: mol_type = other DNA
atgccaaatagcgaacctgcaagcctgctggaactgttcaatagtattgccactcagggcgagttggtgagaagtctgtag

SEQ ID NO: 139221 - DNA, 318 bp, synthetic construct
  misc_feature 1..318: note = Description of Artificial Sequence: Synthetic coding sequence
  source 1..318: mol_type = other DNA
atgccaaacagcgagccagcctcgctgctcgagcttttcaacagtatagctactcagggcgaactcgttcgaagtctgaaggcaggaaatgcctccaaggatgagatcgatagcgcagttaagatgctggtatctctaaagatgtcttacaaggcagcagctggggaagattataaagctgactgccctcctgggaaccccgcccccacttctaatcatgggccagatgcaaccgaggctgaggaggattttgtggacccgtggaccgtacagaccagcagcgctaagggcatcgactatgataaactgatagtgtag

SEQ ID NO: 139222 - DNA, 102 bp, synthetic construct
  misc_feature 1..102: note = Description of Artificial Sequence: Synthetic coding sequence
  source 1..102: mol_type = other DNA
atgcccaactccgagcccgccagcctgctggagctgtttaatagtatcgccacccagggagagctcgttaggtctcttaaagccggtaatgctagcaaatag

SEQ ID NO: 139223 - DNA, 207 bp, synthetic construct
  misc_feature 1..207: note = Description of Artificial Sequence: Synthetic coding sequence
  source 1..207: mol_type = other DNA
atgcctaactcagagccagcttcactgctggagctatttaactccattgcgacacagggagagctagtacggtctctgaaagcaggcaatgcttctaaagatgagatcgattccgctgttaaaatgctggtctcactgaagatgagctacaaggccgccgctggagaagactacaaagcagactgtccacccgggaatccagcatag

SEQ ID NO: 139224 - DNA, 375 bp, synthetic construct
  misc_feature 1..375: note = Description of Artificial Sequence: Synthetic coding sequence
  source 1..375: mol_type = other DNA
atgccaaacagtgagcctgcatccttacttgaactcttcaatagcatcgcaactcagggggagctcgtgaggagccttaaggcaggcaatgccagtaaggacgagatcgattctgcagttaaaatgttagtcagtttgaaaatgtcgtacaaggccgccgcaggagaagactataaagcagattgcccacccggtaacccggcgcccacttctaatcacgggcccgatgctactgaagctgaagaggacttcgtagacccgtggaccgtccagacatccagcgccaaaggaatagactatgacaaactgatcgtgagatttggttctagcaagatcgataaggaacttatcaacagaatcgagagagcgacatag

SEQ ID NO: 139225 - DNA, 261 bp, synthetic construct
  misc_feature 1..261: note = Description of Artificial Sequence: Synthetic coding sequence
  source 1..261: mol_type = other DNA
atgccgaatagcgaacctgcttcactgttagagttgttcaatagtatcgccacacaaggggagctggtgcgctcactcaaggcgggaaacgcctctaaggatgagatcgatagtgctgttaagatgctggtgtctctgaaaatgtcttataaagcagccgctggtgaggactacaaggccgactgtccgcctgggaatcccgctcccacgtcaaatcatggccctgatgccacggaggctgaggaggatttcgtggattag

SEQ ID NO: 139226 - DNA, 168 bp, synthetic construct
  misc_feature 1..168: note = Description of Artificial Sequence: Synthetic coding sequence
  source 1..168: mol_type = other DNA
atgcctaactcggagccggcctcattattggagttattcaatagcattgcaactcaaggagaacttgtgcgcagcttgaaagcaggaaacgctagcaaagacgagatcgactctgcggtgaagatgttggtatctctgaagatgagctacaaagcagccgctgggtag

SEQ ID NO: 139227 - DNA, 192 bp, synthetic construct
  misc_feature 1..192: note = Description of Artificial Sequence: Synthetic coding sequence
  source 1..192: mol_type = other DNA
atgcccaattccgagcccgcgagcctgctcgagctgttcaattcgatcgccacgcagggcgagctggttcgtagtctgaaggccggaaacgcgtccaaggatgagatcgattccgccgtgaaaatgttggtgagcctgaagatgagctataaggcagctgccggtgaagactacaaggccgactgcccatag

SEQ ID NO: 139228 - DNA, 213 bp, synthetic construct
  misc_feature 1..213: note = Description of Artificial Sequence: Synthetic coding sequence
  source 1..213: mol_type = other DNA
atgccaaactccgaacctgcttcacttttagagctcttcaacagtattgcaactcaaggcgaactggtgcgctctttaaaggcagggaacgcctccaaggatgagatcgacagcgccgtcaaaatgcttgtgagtctgaagatgagctataaagccgcagcgggcgaagattacaaagcagactgcccacccggtaaccctgccccaacatag

SEQ ID NO: 139229 - DNA, 177 bp, synthetic construct
  misc_feature 1..177: note = Description of Artificial Sequence: Synthetic coding sequence
  source 1..177: mol_type = other DNA
atgcccaattctgagcccgcgtccctgcttgagctgtttaacagtatcgctacacagggggagctcgtccgaagtttgaaagccgggaacgcatctaaggacgaaattgactcagcggtcaagatgctggtttctcttaagatgtcctataaggccgccgcgggggaggattattag

SEQ ID NO: 139230 - DNA, 423 bp, synthetic construct
  misc_feature 1..423: note = Description of Artificial Sequence: Synthetic coding sequence
  source 1..423: mol_type = other DNA
atgctggtttccctcaagatgagctacaaagcagcagccggagaggattacaaggctgattgccctcctggcaaccctgcacccacatctaaccacggccccgatgctaccgaggccgaagaagacttcgtcgatccgtggacagtgcagacctctagcgccaagggaatagactatgataagctcatcgtcagattcggctctagcaaaatagataaggaactcattaatcgcatcgagcgggccactggccagagaccccaccacttcctgcggaggggcatttttttctctcaccgagacatgaatcaagtattagacgcctacgagaataagaagcctttctatctttacacaggcagaggcccctcgagcgaagccatgcatgtgggccatctgatcccattcatatttaccaagtag

SEQ ID NO: 139231 - DNA, 462 bp, synthetic construct
  misc_feature 1..462: note = Description of Artificial Sequence: Synthetic coding sequence
  source 1..462: mol_type = other DNA
atgctggtttcattgaaaatgagctataaagctgccgctggcgaggactacaaagctgattgccctcctggcaaccctgccccgacgtccaaccatggacctgacgccaccgaggctgaggaggactttgtggatccttggactgtgcaaaccagcagtgctaaaggtattgattacgataagctgatcgttcgcttcgggtcttccaaaattgataaggagctcatcaatcggatcgaacgggcaacaggacagagaccccaccattttctgagaagaggtatttttttctctcaccgggatatgaaccaggtgcttgacgcgtacgaaaacaagaagccgttttacctctacacaggacggggacctagctcagaagccatgcacgtcggacatctgatccccttcatcttcaccaagtggcttcaggacgtatttaacgtaccgctggtcattcagtag

SEQ ID NO: 139232 - DNA, 675 bp, synthetic construct
  misc_feature 1..675: note = Description of Artificial Sequence: Synthetic coding sequence
  source 1..675: mol_type = other DNA
atgctcgtctcacttaagatgtcctacaaagctgctgccggggaggattacaaggcagactgtccgcctggcaaccctgccccaacgtccaaccatgggccagacgccaccgaagccgaagaggattttgttgatccctggacggtgcagaccagcagcgccaaggggatcgactatgacaaactcatcgtccgttttggctcgtccaagattgacaaagaactgattaataggatcgagagagcaacagggcagcgtccccaccacttcttgcgtcgcgggatattcttttcccaccgcgatatgaatcaagtgctggatgcttacgaaaacaagaagccattctatctctacaccggccggggaccctcctctgaggctatgcatgtggggcacctgattccattcatctttacaaagtggctccaggacgtgttcaatgtgccccttgtcatccagatgacagacgatgaaaagtacctgtggaaggacctgaccctcgatcaggcatatagctatgcagtcgagaacgctaaggacatcatcgcatgtggatttgacatcaacaagacatttatctttagcgatcttgattacatggggatgtctagtggattttataaaaatgtcgtgaagatccagaagcatgtgacatttaaccaggtgaagggctag

SEQ ID NO: 139233 - DNA, 1293 bp, synthetic construct
  misc_feature 1..1293: note = Description of Artificial Sequence: Synthetic coding sequence
  source 1..1293: mol_type = other DNA
atgctggttagcctcaaaatgtcctataaagccgccgcaggggaggactataaggcggactgtccgccaggaaaccccgcaccgacttccaaccacggaccagacgccacagaggcagaagaggattttgtcgacccttggactgtccagacttcctcggcaaagggcatcgactatgataaactgattgtgcgatttgggtcttccaagatcgacaaggagctgattaaccgcatagagcgagcgaccggccaaagaccccaccactttctgcgacgtgggatctttttttcgcacagggatatgaaccaagtactggacgcgtacgagaataagaagccattttatctttatactggtcgcgggccaagttccgaagcgatgcacgtcggacatttgatcccttttatttttacaaagtggctgcaggatgtgttcaatgtgcccctagtgatccagatgaccgatgacgagaaatatctctggaaggaccttactttggatcaggcctattcctacgccgtagaaaacgctaaggatatcattgcctgcggttttgacattaataaaacattcattttcagcgacttggactacatgggtatgtcctctggcttctacaaaaacgttgtaaagattcagaaacatgtcacctttaaccaggtgaaggggattttcgggtttacagactcggattgcataggaaaaatctcttttcctgccatacaggctgccccctccttcagcaactccttcccacagatattcagggatcggacggatatccaatgcttaataccatgtgcaattgaccaggacccatactttcgtatgacccgagatgtcgcaccacggattggttacccaaagcctgctctgctgcactcaaccttttttcctgctctacaaggggcccagacaaaaatgtccgcctccgatcctaattcatcaatatttttaaccgacacagccaagcagattaaaacgaaggtcaacaagcacgcctttagtggcggaagagataccatcgaagagcaccgtcagttcggcggcaattgtgacgttgatgtgagcttcatgtacctaaccttctttttggaggatgacgacaagcttgagcagatccgcaaagattacacttctggcgccatgctgaccggcgagcttaagaaggccctcattgaggtgttgcagcccctgatcgccgagcaccaggcccggcgaaaggaggtcacagacgaaatcgtgaaggaattcatgaccccacgcaagctgtcgtttgacttccagtag

SEQ ID NO: 139234 - DNA, 345 bp, synthetic construct
  misc_feature 1..345: note = Description of Artificial Sequence: Synthetic coding sequence
  source 1..345: mol_type = other DNA
atgccaaactcagaaccggcctctctgttagaactgtttaattctatagctacccagggggagctggtcagaagcttaaaggcgggcaatgcttccaaggatgaaatagattcagccgttaaaatgctggtgtcactgaaaatgagctataaggcggccgctggagaagactacaaagctgattgtccacccggtaaccctgctccaacttcaaatcacggacctgatgcaacggaggcggaagaggattttgtggatccgtggactgtccagacctctagtgccaaaggaatagactacgacaagcttatcgtccgttttggctcttcgaagatcgacaaatag

SEQ ID NO: 139235 - DNA, 177 bp, synthetic construct
  misc_feature 1..177: note = Description of Artificial Sequence: Synthetic coding sequence
  source 1..177: mol_type = other DNA
atgccaaacagcgaacctgccagcctgctcgaactgtttaactccattgctactcaaggtgaattggtgagatctctgaaggccgggaacgccagcaaagatgagatagattcagctgtaaagatgctggtgtcgctcaaaatgagctacaaggcagcggcaggcgaagattattag

SEQ ID NO: 139236 - DNA, 459 bp, synthetic construct
  misc_feature 1..459: note = Description of Artificial Sequence: Synthetic coding sequence
  source 1..459: mol_type = other DNA
atgccaaactcagagcccgccagcctgctagaattgttcaactccatagccacacagggcgagctcgtgagaagtctgaaagcgggaaatgcgagcaaagatgaaatagactccgcagtaaaaatgcttgttagcctgaagatgtcatataaagcagctgcaggtgaagattataaggcagactgtccaccagggaaccctgcacctacctccaaccacggcccagatgccacagaagccgaggaggattttgtggacccatggactgtacaaaccagttcagcgaaaggcattgactacgataaactgatcgtgaggttcggctcatctaagattgacaaggagctgatcaatcgaatcgagcgcgccacaggccagagacctcatcattttctgcgaaggggcatcttcttctctcatcgcgacatgaaccaagtgttagacgcctacgagaactag

SEQ ID NO: 139237 - DNA, 1416 bp, synthetic construct
  misc_feature 1..1416: note = Description of Artificial Sequence: Synthetic coding sequence
  source 1..1416: mol_type = other DNA
atgcccaatagcgagccagcttctctgttggaactctttaattctattgctacacaaggagaactggtgcgaagcttaaaagctgggaacgcgagcaaagacgagatagactcagcagtcaaaatgcttgtgagcctcaaaatgagttacaaagctgctgcaggcgaagattacaaagccgattgtcctcccgggaacccagcacccactagtaaccatggccccgatgccaccgaagccgaggaggatttcgtagatccttggactgtgcagacgagctccgctaagggtatagattacgataagctaatagtcagatttggatcctcaaaaatcgacaaagagcttattaaccggatcgagagggcaaccggacaacggcctcaccacttcctgcggagagggatctttttttctcaccgcgacatgaatcaggtcctggatgcctacgaaaataagaagcccttttacctatacaccggacggggaccgtcctccgaggccatgcacgtcgggcatctgattccgttcatattcaccaagtggctacaagatgtgttcaacgtgcccttggtcatccagatgacagatgacgaaaagtacctatggaaagatctgacactagatcaggcctacagctatgcggtcgagaacgccaaagacattatcgcatgtgggttcgacattaataaaacctttatctttagcgaccttgattatatgggcatgagctccggtttttacaaaaatgttgtgaagattcagaaacatgtgaccttcaatcaagtgaaagggatcttcggctttaccgattcggactgtatcgggaagattagcttccccgccattcaggcggcccctagtttctctaattctttcccacagattttcagggacagaacagacatccaatgcctgatcccttgtgctattgatcaggacccctacttccgaatgacgagagatgtggcgccccgaattgggtaccccaagcctgccctccttcacagcacgttttttcctgctctccagggggcgcagactaaaatgagtgcatctgatccaaactctagtatttttttgactgacacggctaaacaaataaagaccaaggtcaataagcatgcctttagtggaggaagggacaccatcgaggagcaccgccagtttggaggcaactgcgatgtggatgtgtcatttatgtacctgacatttttcctcgaggacgatgacaagctggaacagatccggaaagattatacaagcggggccatgctgactggcgaactgaaaaaagcactgattgaagtgctgcagccgcttatcgccgagcaccaagctaggcgcaaggaggtgaccgatgaaatcgtaaaggagttcatgacaccacggaaactgtcctttgactttcagtag

SEQ ID NO: 139238 - DNA, 465 bp, synthetic construct
  misc_feature 1..465: note = Description of Artificial Sequence: Synthetic coding sequence
  source 1..465: mol_type = other DNA
atgctggtgtcgcttaaaatgtcctataaagcagcagccggcgaggattacaaagcagattgtcctcctggtaaccccgctccaacctcgaaccacggtcccgatgccaccgaggcggaggaagatttcgttgacccctggaccgtgcagacctccagcgcaaaggggatagattatgataaactgatcgtgcggttcggcagttcaaagattgataaggagcttattaatagaatagagcgcgcaacagggcaacggccgcaccatttcctgcggagaggtatttttttttctcacagagatatgaatcaggtactggacgcttacgaaaataagaaaccattctacctctacacaggaagaggcccttcttcagaggcaatgcatgtcggccatcttattccattcatctttactaagtggctacaagacgtgtttaatgttcccctggtgatccagatgtag

SEQ ID NO: 139239 - DNA, 639 bp, synthetic construct
  misc_feature 1..639: note = Description of Artificial Sequence: Synthetic coding sequence
  source 1..639: mol_type = other DNA
atgcctaattcagagccagcatctttgttggagttgttcaactctatcgccacccagggggaattagtgcgatccctgaaagctgggaacgcatccaaggacgagatcgactctgctgtgaagatgctggtgtccctgaaaatgtcatacaaagccgccgctggcgaggattataaagcggattgcccaccggggaaccccgcgccaacatcaaatcatgggccagacgccaccgaagccgaggaggattttgttgacccttggactgtgcagacgtcatccgccaaagggattgattacgataagctgattgttcgtttcgggtcttccaaaatcgataaggagctgatcaaccggatagagagggcgacaggacagcgtccgcatcactttctccgacggggcattttcttttcccaccgagatatgaatcaggttcttgacgcatacgaaaataagaaacctttttacctgtacacagggaggggccctagctcagaagcaatgcacgtgggacacttgataccattcatatttacaaaatggctccaggacgtcttcaatgttcctctggttatacaaatgactgacgatgagaagtatctgtggaaggacttaaccctggaccaagcttattag

SEQ ID NO: 139240 - DNA, 1041 bp, synthetic construct
  misc_feature 1..1041: note = Description of Artificial Sequence: Synthetic coding sequence
  source 1..1041: mol_type = other DNA
atgagcttactgcggagcctcagagtctttctcgtcgcccggaccggttcctatccagccgggagccttctgcggcagagtccacagcctaggcatactttttacgcaggcccacgcctctctgcctctgctagttccaaagaactgcttatgaagctcaggagaaagacaggctactcgtttgtgaactgtaagaaagccctggaaacctgcgggggcgacctcaaacaggctgaaatctggctacataaagaggcgcagaaggaggggtggtccaaggctgctaaactgcaggggcggaaaacaaaagagggcctcatcggactcctccaggaaggaaatacgaccgtactggtcgaggtgaattgcgaaactgacttcgtctccaggaacctcaaatttcaactgctagtccagcaagtcgctctgggcactatgatgcactgtcagaccctgaaggatcagccaagcgcatattctaaagtgcagtggctgactccagtcaaccttgccctgtgggaagcagaggcaggagggtctctggagggtttcctgaacagcagtgaactttctggtctgccagccgggcctgatcgagaaggatccctgaaggatcaactggccctggccatcggaaaacttggagagaacatgatactcaagcgtgccgcgtgggttaaggttccaagtggcttctatgtcggcagctatgtacacggtgcaatgcagtccccttcgcttcacaagcttgtcctggggaaatacggtgctttggtgatttgtgaaacgagcgaacagaagacaaacttggaggatgtggggcggaggttagggcagcatgtggttgggatggcgcctctgtccgttgggtcattggacgatgagcctggaggtgaagcggagaccaaaatgctttctcagccttatctgcttgacccaagtatcacactgggccagtatgtgcagccccagggggtgtcggtcgtcgactttgtgagatttgagtgtggcgagggagaggaagccgccgaaactgagtag

SEQ ID NO: 139241 - DNA, 858 bp, synthetic construct
  misc_feature 1..858: note = Description of Artificial Sequence: Synthetic coding sequence
  source 1..858: mol_type = other DNA
atggtctactgtactaccacttgggcgatctggaactgccaattactcctgggctacaaacctcttcagaacgtcacaggactcaacacagtgggaagctgtaatactgtggccgagatctggctgcataaagaggctcagaaagagggatggtcaaaagccgcgaaactccagggacggaaaacaaaggaggggttaattggcttgttgcaggagggcaataccacggtgctagtggaagtgaattgtgagactgactttgtgagtagaaacctgaagttccagcttctggtgcagcaggtggcactcggcaccatgatgcattgccagacactaaaggatcagccgtccgcttactccaagggctttctgaattcctctgaactgtcaggcctcccagcaggtcctgaccgcgagggaagtctgaaagaccagttggcactggccattggcaaattgggggagaacatgatccttaaacgggccgcttgggtgaaagtaccatcaggcttctacgtgggctcctacgtacatggagccatgcaatcccccagcctgcataaattggttcttggaaagtacggcgcgctggtgatctgtgaaacgtcagagcaaaaaactaacctcgaagacgtgggcaggcgcctgggccagcacgtagtgggaatggcccctctcagcgtgggctctctggatgacgaacctggcggagaggcagagaccaagatgctgagccagccctacctgctagacccttctatcaccctgggccagtacgtgcagccccagggtgtgtcagtggttgactttgtgcgtttcgagtgcggcgaaggggaggaggctgcagagacagagtag

SEQ ID NO: 139242 - DNA, 978 bp, synthetic construct
  misc_feature 1..978: note = Description of Artificial Sequence: Synthetic coding sequence
  source 1..978: mol_type = other DNA
atgtcattgttgaggtctctacgggtgttcctggtcgctcggactggttcttatccagctggttcactgttgcgacagtcccctcagccgcgccacaccttttacgccggcccccggctctctgctagcgcctcctcaaaggagctgctcatgaaactccgtagaaaaacgggctattcttttgtgaattgcaagaaggccctcgagacatgcggtggggatctgaagcaagctgaaatctggcttcacaaagaggcccagaaggaaggctggtccaaagccgccaagttgcaaggtcgaaagacgaaggaaggcctaattggccttctgcaggagggcaatactactgtgctcgtcgaagtgaattgcgaaaccgacttcgtctcacggaacctgaagttccagcttcttgtccagcaggtcgctttggggacaatgatgcattgtcagaccctcaaggatcagcctagcgcctacagcaaggggtttttgaattctagcgagctaagcgggctccctgcgggccctgaccgggaagggagcctcaaagaccagttggcactagctataggtaagttgggcgaaaacatgatcttaaaaagagcggcttgggttaaggtccctagcggcttctacgtgggatcttatgtgcacggagccatgcagagccctagcctgcataagttggttctgggtaagtatggcgcccttgtgatctgcgagacctccgagcagaagactaaccttgaggacgttggaaggaggttgggacaacacgtggtgggcatggcacctcttagcgtggggtcattggacgatgagcccggaggcgaagcagagactaagatgttaagccagccttacctattggatccgtcaatcacacttggacagtacgtccaaccccaaggggtgtccgttgtagactttgtccgctttgaatgtggagagggtgaggaagcggcagaaaccgaatag

SEQ ID NO: 139243 - DNA, 504 bp, synthetic construct
  misc_feature 1..504: note = Description of Artificial Sequence: Synthetic coding sequence
  source 1..504: mol_type = other DNA
atgtcattactgcggtctttgcgcgtctttctagtggctaggacagggtcctatcccgcgggatccctgctgcggcaatctcctcagccccgccatacattctacgcaggcccacggttatcagccagcgctagtagcaaggaactccttatgaaactcagacggaaaacaggatattctttcgtgaattgtaaaaaggcccttgagacatgcgggggcgacctcaagcaagctgaaatctggctccacaaggaggcacagaaggagggctggagtaaggccgcaaaactgcaggggcggaagaccaaagaaggacttataggactgctgcaggagggcaatactaccgtcctggtggaggtgaactgcgagacagatttcgtttcgcggaacttgaaattccagctccttgttcaacaggtcgccttggggacgatgatgcactgccagacactgaaggaccagcctagcgcttactctaaagaaaactgggaaaagacctag

SEQ ID NO: 139244 - DNA, 648 bp, synthetic construct
  misc_feature 1..648: note = Description of Artificial Sequence: Synthetic coding sequence
  source 1..648: mol_type = other DNA
atgagtctgttgagaagccttagagtgttcctggtcgcaagaacagggagttatcccgcaggttctctgctgagacaaagcccgcaaccccgacatacattctacgctggtcccagactgagcgcctcagctagtagcaaagagctgctgatgaagctgaggaggaaaactgggtatagctttgtgaactgcaaaaaagccctcgaaacctgtggcggcgatctcaaacaggctgaaatctggcttcacaaagaagcacaaaaagagggatggtccaaggctgccaagcttcaaggcagaaagactaaagaggggcttattggccttctacaggaggggaatacgactgtgttggttgaagtgaattgcgaaacagatttcgtaagccggaacctgaagtttcagcttcttgtccagcaagttgccctcgggaccatgatgcattgtcagacgctgaaggatcagcctagcgcttactctaagggattcctcaattcttcggagctaagtggactccctgccggccccgacagggaaggatccctgaaggaccaactcgctttagccattggacttccttttcagattggcgccgtctcagaacttcagctcccagaatcaaacttccttcagaatacttcaagttag

SEQ ID NO: 139245 - DNA, 435 bp, synthetic construct
  misc_feature 1..435: note = Description of Artificial Sequence: Synthetic coding sequence
  source 1..435: mol_type = other DNA
atgaaatcccagtggtgcaggcccgtggcgatggacttgggcgtgtatcagctccgccacttttctataagtttcttgtcctcactactcggcacggagaacgcttccgtgcggctagacaactcaagcagcggagcatccgtggtcgccattgacaataagattgagcaggctatggatctggtcaagtcccatcttatgtatgcggtgcgcgaggaagttgaagtgctcaaagaacagatcaaagagttgatcgagaagaacagccagctggagcaagagaataacctgcttaagactctggctagccccgagcagctcgcccagttccaggcgcagctgcagacaggtagcccgccagctacgactcaaccgcaaggcacaacccaacccccagcccagcctgccagccaaggctctggcccaacagcatag

SEQ ID NO: 139246 - DNA, 3222 bp, synthetic construct
  misc_feature 1..3222: note = Description of Artificial Sequence: Synthetic coding sequence
  source 1..3222: mol_type = other DNA
atgcaccagccgcctgagtctaccgctgctgccgccgctgccgcggacatttccgcccggaaaatggctcaccccgccatgtttcctcgcagaggaagtggaagtggaagcgcctccgctctgaacgccgccggtaccggggtggggagcaacgcaacatcttcagaagatttccccccaccatcactgttacagcccccgccccctgcggctagctctaccagtggtccccagccgccacctccacagagcttaaatctgctgtctcaggcccagctgcaagcgcagccactcgctcccgggggcacccagatgaagaagaagtccgggttccaaataacgtccgtgacaccggcccagatctccgccagtatctccagtaataatagcatcgcagaggatacggaatcctacgacgacctcgatgagagccatacggaagatctgtcatcttcggagatactggatgtgtcgctatcaagggccaccgacttgggcgagcccgaacggagctcctctgaggaaacacttaacaactttcaggaggccgagactccaggcgcagtctcaccaaaccagccacatctcccgcagccacatcttccccacctgccccagcagaacgtggtgatcaatggaaatgcacatcctcaccatctccatcaccaccaccagattcatcacggacaccaccttcagcatggccaccaccacccctctcatgttgccgtggctagtgcatctattactgggggccccccttcaagtcctgttagcagaaagctcagtaccaccggatccagcgattctatcacccccgtggctccaacgtccgcggtttcgagcagtggaagcccagcatccgtgatgactaatatgagggccccttcaacaaccggagggatcggaattaacagtgttacagggacctccactgttaataatgtcaatattacggcagttggttctttcaaccccaatgtgacatcctccatgcttggtaacgtcaacatttctacatccaacatcccatccgcagcaggcgtcagcgtgggtcctggagtgacctctggcgtaaatgtgaatattctcagcgggatgggcaatggcaccatttcgtcaagtgctgccgtgagctccgtaccaaatgctgcagctgggatgacaggcgggagtgtgtcttcccaacagcaacagccaaccgtcaatactagccggttcagagtcgtcaagttggactcgagctcagaacctttcaagaagggtagatggacctgtactgagttctacgagaaagagaacgctgtgccagctaccgaaggggtgctaattaataaggttgtggaaactgtgaaacagaaccctatcgaagttactagcgagcgggagtcgacctccggaagcagcgtcagcagtagtgtaagtaccctttcacattataccgagagcgttggaagcggagagatgggagctcccaccgtggtcgtccagcaacagcagcagcagcagcagcagcaacagcagcaaccggccttacaaggagttaccctccagcaaatggattttggatcaacaggtcctcagagcattcccgcagtctcaatcccccaaagcatttcccagtcacagatttcacaggtccagctgcaatcccaagagcttagctatcaacagaagcaggggcttcaacccgtgcccctgcaggctacaatgagcgcagccaccgggatccaacccagccccgttaacgttgtgggagtgaccagcgcacttggccagcagccttcaatcagctctctcgcgcagccgcagctgccctattcacaggccgcccctccagtgcaaactccgctgccaggggcacctccaccacagcagttacagtatggtcagcagcagcccatggtgagcacccaaatggcccctgggcatgtcaagagcgttacccagaacccagcttctgagtatgttcaacagcagcctatactacagacagccatgtcaagcgggcagccctctagcgcaggagtgggagccgggactacagtgatccctgtcgcccagccccagggtatccagctgccagtgcaacccactgccgtccctgcgcaacctgctggagcgagcgtacaaccagtgggccaggcacctgctgcagtgtccgcagtccccaccgggagtcaaattgctaatataggccaacaggccaacatacctactgccgtgcagcagccttccacacaagttcctccctccgtgatacagcagggggctcccccctcatctcaagttgtaccacctgctcagacaggaatcatccatcagggtgtgcagacaagcgcccctagtcttccccaacagctggtgatcgcaagtcagagcagcctgctgaccgttcctcctcagccccagggagttgaaccagtggcacaaggcattgtcagtcagcaacttccagctgtgtcatctctcccaagtgcctcctccatttccgtgaccagccaggtctcctccaccgggccctcgggcatgccgagcgctcccacaaaccttgtccccccccagaacatcgcgcaaaccccggcaactcagaacgggaatctggtgcagtccgtgagccaacccccccttatcgccactaatactaacttgcctctcgcccagcaaataccactgagttcaacacagttcagtgctcagagcctggctcaggcaattggctcccagatcgaagatgcccggcgcgccgctgagcccagtctcgtggggttgcctcagacaattagtggagacagcggcggtatgagcgcggtgtccgatggctccagctccagtttggcagcatccgcctccctctttccgctaaaggtgctaccactcactacccctctcgtcgatggagaggacgagtcttccagcggggcgtccgtcgtagccatcgacaataaaatcgaacaggccatggatcttgtcaagtctcatctgatgtacgccgtgcgcgaggaggtcgaagtcctcaaggaacagatcaaggaactgatcgagaagaattcacagcttgaacaggaaaacaacctgctcaagactttggcttcacccgaacagctggctcagttccaggcccagcttcaaaccggaagcccacccgccactacgcagcctcagggcacgacacagcctcccgctcagccagcctctcagggaagtggcccaacagcatag

SEQ ID NO: 139247 - DNA, 126 bp, synthetic construct
  misc_feature 1..126: note = Description of Artificial Sequence: Synthetic coding sequence
  source 1..126: mol_type = other DNA
atgaagtcacagtggtgccgcccggtcgccatggacctcggagtgtaccagctgagacatttctcaatctcctttttgtctagcctgcttggtacagagaacgcctccgtgaggttggacaattag

SEQ ID NO: 139248 - DNA, 429 bp, synthetic construct
  misc_feature 1..429: note = Description of Artificial Sequence: Synthetic coding sequence
  source 1..429: mol_type = other DNA
atgcatcagccacctgagagtacggctgctgccgcagctgccgctgatatttctgcccggaagatggcccacccagcaatgtttcccagacgggggagtgggtcaggctcggcttcagcactcaatgccgcagggacaggagttgggagtaatgcaactagcagcgaagactttccacctccatcactccttcagcccccccctcctgctgcctccagcacgagtggtccgcagcctccacctccccaatctctaaacctcttaagccaagcccagctgcaagctcaacctctcgcccccggcgggactcagatgaagaagaagtcagggttccagattacatccgtgacacctgcacagattagcgcgtccattagttccaacaatagcattgccgaggatacagagtcctatgatgacctcgattag

SEQ ID NO: 139249 - DNA, 1713 bp, synthetic construct
  misc_feature 1..1713: note = Description of Artificial Sequence: Synthetic coding sequence
  source 1..1713: mol_type = other DNA
atgcaccagcctcccgagagtaccgccgccgctgctgcagcagcagatatcagcgcacgaaaaatggctcaccctgcaatgttcccacggaggggttctggctcaggaagtgcctctgctctcaacgccgccggtactggggtaggcagtaacgccacgagcagtgaggatttccccccaccttccctccttcagcctcctccaccagccgcatcttctacatcagggccacagccaccacccccacagtccctcaacttgcttagccaggcacagcttcaggctcaacctctcgctccgggcggaacccagatgaaaaaaaaatcagggttccaaattacaagcgtcacaccagctcagatatcagcatctatttctagcaataatagcattgccgaggacactgagagttatgatgatttggatgagagtcacactgaagaccttagctccagcgaaatcctcgacgtcagcctcagccgggccactgatctgggtgagccagagaggtcaagtagcgaggaaacattaaacaattttcaagaggccgaaacacctggagccgtgtcacctaaccagcctcatctcccacagccgcatctcccacatctcccgcagcagaacgtcgtgattaacggcaatgcccacccccaccatctgcaccaccaccatcagattcaccatggtcaccatctccagcacggacaccaccatccatcccatgtggctgtcgcctcagcctctatcacaggaggaccaccctcttctcccgtcagcagaaaactatccactaccggttcttctgactccattactcctgtggccccaaccagtgccgtcagctctagtggttctcctgccagtgtcatgaccaacatgcgggcaccctcaactacagggggcattggcattaattctgtcaccggcacgagcacagtaaataacgttaacattactgcagtggggtcctttaacccaaacgtgaccagctcaatgttagggaatgtgaatatttccaccagcaacatacctagcgctgccggagtttcagtagggcctggagtgacttccggtgtgaacgtcaacattctttcaggaatgggcaatggcacaatcagttcgtccgccgccgtaagttcagttccaaacgcagccgcagggatgacaggagggagtgtctctagccagcagcaacagccaaccgtgaacacatctcggttcagagtagtcaaacttgatagcagcagcgaaccctttaagaaaggtagatggacttgcactgagttttatgagaaggagaatgccgtacccgccaccgagggcgtgctgatcaataaggtcgtcgagactgtgaagcagaaccctatagaggtgaccagcgagcgcgaatcaacctctggcagttctgtaagcagttccgtcagtacgctatcacactacactgaatcagtcggctccggagaaatgggtgcgcctactgtcgtggtgcagcagcagcaacagcagcagcagcaacagcagcagcagcctgcacttcagggggtcacattgcagcagatggactttggcagtacagggcctcaatcaatacccgccgttagcattccgcaatctattagccaatctcaaatctctcaggtgcagctgcaatcccaggaactgagttatctcacgatgaaggttgttctcttaatcgtatatctatgtatgtag

SEQ ID NO: 139250 - DNA, 603 bp, synthetic construct
  misc_feature 1..603: note = Description of Artificial Sequence: Synthetic coding sequence
  source 1..603: mol_type = other DNA
atggcccagtctaaactcgactgtagatcccctgtgggcctggattgctgcaattgctgtctggatcttgcacaccgcagcggacttcagagaggatccagtggcgagaacaacaatcccggctcgccaacggtctccaattttaggcaactccaggagaagctggtattcgagaacttgaatacagataaattaaactcaattatgcgccaagacagtctggagccagtgctgagagacccttgctacctaattaacgaagggatctgtaatagaaatatcgaccagacgatgctgtccatcttgctcttcttccactccgcatcaggcgccagtgtggtggctatcgataataaaattgaacaggccatggatttggtgaagaaccacctgatgtatgcagtgcgggaggaggtggaaatcctgaaagagcagattagagaactggtcgagaagaactctcagttggaacgagaaaacacattgctcaaaactttagcttcacccgaacagcttgagaagttccagagctgtctctctcccgaagagcccgccccagagtcaccccaggtcccagaggctcccgggggatcagccgtatag

SEQ ID NO: 139251 - DNA, 333 bp, synthetic construct
  misc_feature 1..333: note = Description of Artificial Sequence: Synthetic coding sequence
  source 1..333: mol_type = other DNA
atggccttccagcctccatattcgtcaagcctgtttcgtaaaagggataatgccagcggggcaagcgttgtagctattgacaataaaatcgagcaagccatggatctggtgaaaaaccatctaatgtacgctgttcgagaggaggttgagatacttaaagaacagatacgtgaactggtagagaagaactcccagcttgaacgcgagaacacactactcaagacattggccagtcccgagcaactggaaaagtttcaaagctgcttgtctcctgaggagcctgcaccggaaagcccccaggtaccggaagcacccggcggaagtgctgtttag

SEQ ID NO: 139252 - DNA, 603 bp, synthetic construct
  misc_feature 1..603: note = Description of Artificial Sequence: Synthetic coding sequence
  source 1..603: mol_type = other DNA
atggcacaatcaaaactagactgtcggtccccagtgggtctcgactgctgtaattgctgtctagacctagcacaccgctctggcctgcaacgggggtcctctggcgaaaataacaatcccggttcaccaactgtgagtaacttccgtcagttgcaggaaaagttagtgtttgagaacctgaacacagacaaactgaatagtatcatgaggcaagattctctcgagccggtgttgagagacccatgttatctaattaacgaaggcatttgcaacagaaatattgatcagactatgctttccatcctattgttctttcacagtgcctccggtgcctctgttgtggccatcgacaataagattgaacaggctatggatctagtaaaaaaccatcttatgtacgccgttcgagaagaggtcgaaatcctgaaagagcagatcagggagttggtggaaaagaacagccagttggagagggagaataccctactgaagacattggcctcgccagaacagctggagaaattccagtcctgtctcagtcccgaagaaccagcacctgaatcccctcaggtgcccgaggcacctgggggatctgccgtctag

SEQ ID NO: 139253 - DNA, 603 bp, synthetic construct
  misc_feature 1..603: note = Description of Artificial Sequence: Synthetic coding sequence
  source 1..603: mol_type = other DNA
atggcccagtccaagctggactgtagatcgcccgtggggctcgattgctgcaattgctgtctagatctcgcacaccggtccggcttacaaagaggcagcagcggcgaaaacaataatcccgggagccccaccgtgtcaaacttccgccagctgcaggaaaagctggtctttgagaacctcaacactgataagctgaacagcattatgcgacaagattcccttgaaccagtactcagagacccttgctaccttatcaacgaggggatctgcaatcgtaacatcgaccaaacaatgttaagtattcttctcttttttcatagtgccagcggcgcctcggtggtggctatcgacaataagatagagcaggcaatggatttggtcaagaatcaccttatgtacgctgttagggaagaagtcgagattctcaaagagcagatccgcgagctcgtggagaagaactcacagctggagcgggagaacaccctgttaaagactctggcttcccccgagcagctggagaagttccagtcatgtctcagccctgaagaaccagctccagagagccctcaggttcccgaggcacccggcgggtctgctgtgtag

SEQ ID NO: 139254 - DNA, 234 bp, synthetic construct
  misc_feature 1..234: note = Description of Artificial Sequence: Synthetic coding sequence
  source 1..234: mol_type = other DNA
atggacttagtgaagaaccaccttatgtatgccgttagggaagaagtcgaaatccttaaagagcagatacgggagttggtcgaaaaaaacagtcagctggagcgggagaatactctgctaaagactttagcgtctcccgaacagctggagaagtttcaaagctgcctgagtccagaggaacctgcccctgaatctcctcaggtaccggaggcccccgggggtagcgccgtgtag

SEQ ID NO: 139255 - DNA, 405 bp, synthetic construct
  misc_feature 1..405: note = Description of Artificial Sequence: Synthetic coding sequence
  source 1..405: mol_type = other DNA
atgaatacagagatgtaccaaacaccaatggaagtggccgtgtaccaattacacaactttagtatcagcttcttctcttctctgttgggcggggatgtggtgtctgtgaagttagataacagcgccagcggcgcttccgttgtggctattgacaacaagatcgaacaagcaatggacttggttaagaatcacttgatgtacgcggtccgcgaggaagtggagattctcaaagagcaaattcgcgagttagtggaaaagaacagccaactcgagcgggagaacacgttattgaagactctggcttccccagagcagctagaaaaatttcagtcatgcctgtcaccagaggaacctgcgccagagagccctcaagtgcccgaggcccctgggggcagtgccgtctag

SEQ ID NO: 139256 - DNA, 540 bp, synthetic construct
  misc_feature 1..540: note = Description of Artificial Sequence: Synthetic coding sequence
  source 1..540: mol_type = other DNA
atggcccagtctaagctcgactgccgaagcccagtggggctggactgttgtaattgttgtctcgatttggcccatcgttctggcctgcaaagggggagtagtggggagaacaacaaccctgggagccctaccgtttccaatttcagacaggacagtctagagcctgtgctcagagacccttgctaccttatcaatgagggcatttgcaacaggaatattgaccagaccatgttgtctatattgctgttcttccattccgcgagcggagctagcgtagtggcaatcgacaataaaatcgagcaagccatggatttggtaaagaaccacctgatgtacgctgtcagagaggaagtggaaatcttgaaagaacagattagagagttggttgagaaaaattcccagcttgagcgagaaaataccctgctgaaaacactagcttctccagagcagctggagaagtttcagtcgtgtctaagcccggaggagccagctccggaaagccctcaagtgcctgaggctcccggcggcagcgccgtgtag

SEQ ID NO: 139257 - DNA, 372 bp, synthetic construct
  misc_feature 1..372: note = Description of Artificial Sequence: Synthetic coding sequence
  source 1..372: mol_type = other DNA
atggcccaatctaagctcgattgccggagcccggttggcttggactgctgcaattgttgtctggatctggctcacaggtcaggcctgcagaggggctccagcggagagaacaacaaccctggcagtcccaccgtaagtaatttccgccaactccaggagaagctggtgttcgagaacctgaacaccgacaaactgaattccattatgagacaagatagtctggagcccgtgcttagggacccgtgttatttaatcaacgaggggatatgcaaccgaaacattgaccagactatgctgtcaatactgcttttctttcacagcgccagcggcgcttctgtggtcgcgatcgataataaaatagagcaagcctag

SEQ ID NO: 139258 - DNA, 78 bp, synthetic construct
  misc_feature 1..78: note = Description of Artificial Sequence: Synthetic coding sequence
  source 1..78: mol_type = other DNA
atggaccttgtgaaaaatcatctcatgtatgcagtccgagaagaggtcgaaattttaaaagaacagattagggagtag

SEQ ID NO: 139259 - DNA, 351 bp, synthetic construct
  misc_feature 1..351: note = Description of Artificial Sequence: Synthetic coding sequence
  source 1..351: mol_type = other DNA
atggcccagtctaaactggattgccgatcacccgtcggactggattgttgcaattgttgtctcgatctcgcccacagatctggtctgcaacgcggcagcagcggtgaaaacaacaatcctggctctccgacagtgagcaattttcgacagctgcaggagaaacttgtcttcgagaatcttaacactgataaactcaatagcataatgcgccaggactccctcgagcccgtcttgagggatccatgttatctgatcaatgagggtatatgtaacaggaacattgaccaaactatgctgtccattctgctgttcttccattcagccagtggggcttccgtggtcgcaatttag

SEQ ID NO: 139260 - DNA, 177 bp, synthetic construct
  misc_feature 1..177: note = Description of Artificial Sequence: Synthetic coding sequence
  source 1..177: mol_type = other DNA
atggcacagtcaaaattggattgtaggagccctgtgggcctggactgctgtaattgctgcttggacctggcccacagatcggggctgcagaggggttcatctggcgaaaataacaatccaggctcccctacagtctccaacttcaggcaactgcaagaaaaactcgtttttgagtag

SEQ ID NO: 139261 - DNA, 255 bp, synthetic construct
  misc_feature 1..255: note = Description of Artificial Sequence: Synthetic coding sequence
  source 1..255: mol_type = other DNA
atggcacagtccaaactggactgtcgctctccggtgggactggactgttgtaactgctgtctcgatcttgcacacaggtccggccttcagcgcggctcctcaggggaaaacaacaatccagggagtccaacagtctctaactttcggcaactgcaggaaaagcttgtcttcgagaatctaaatactgacaagttgaattctatcatgcgtcaggacagcctcgaacctgtgttacgtgacccttgctacttgtag

SEQ ID NO: 139262 - DNA, 603 bp, synthetic construct
  misc_feature 1..603: note = Description of Artificial Sequence: Synthetic coding sequence
  source 1..603: mol_type = other DNA
atggcccaatcaaagcttgactgccgatccccagtgggtctagactgctgcaactgttgtctagacctcgctcacaggagcgggctccagagaggttcgtctggcgaaaataacaatcccggatcccccaccgtgtctaattttcgacagttgcaggagaagctggtgttcgaaaacctgaataccgacaagctgaactccattatgagacaggacagtttggagcctgtcctcagagacccctgttatctcatcaatgaaggcatttgtaatagaaacatcgatcaaaccatgctgtccatacttctcttcttccactccgcatccggagcctccgtggtggctatcgataataaaatcgaacaggcaatggatcttgtgaagaaccatttaatgtacgccgtccgggaagaagtggagatcctgaaggagcagatccgagagctggtggagaagaactctcaacttgagcgcgaaaacacattgctgaaaacccttgctagccctgagcagctggagaaattccagtcctgtctgtcgcccgaagaaccggctcccgaatccccccaggtacctgaggctcctggtgggtcggccgtgtag

SEQ ID NO: 139263 - DNA, 303 bp, synthetic construct
  misc_feature 1..303: note = Description of Artificial Sequence: Synthetic coding sequence
  source 1..303: mol_type = other DNA
atggcacagagcaagctcgactgtagatctcctgttgggctggactgttgcaactgctgcctggatttggcacatcggagtggcctgcaacggggaagctccggcgagaataacaatccgggaagccctacggtatcgaatttccggcagctgcaggaaaagctggtcttcgaaaacctcaataccgataagcttaacagtattatgcgtcaggatagcttggagccagttctccgagacccttgctacttaatcaacgagggaatctgtaataggaatattgatcagacaatgctcagctag

SEQ ID NO: 139264 - DNA, 360 bp, synthetic construct
  misc_feature 1..360: note = Description of Artificial Sequence: Synthetic coding sequence
  source 1..360: mol_type = other DNA
atggcacagtccaaactggattgccggagtcctgtgggtctggattgttgcaattgctgtcttgacctcgcacatcgcagcggtcttcagagaggatctagcggagaaaataataatcccggctccccaaccgtcagcaactttcggcagctccaggagaaactcgtctttgagaacctgaacacggataagctcaattcaattatgaggcaggatagcctggagccggtgttgcgcgatccttgctatctgataaatgaggggatctgcaatcgcaatatcgatcagactatgctcagtattctgttatttttccacagtgcatccggtgcctcagttgtagctatagacaataaatag

SEQ ID NO: 139265 - DNA, 399 bp, synthetic construct
  misc_feature 1..399: note = Description of Artificial Sequence: Synthetic coding sequence
  source 1..399: mol_type = other DNA
atgcgtcaggatagtttagaacccgtcctccgagacccctgctaccttatcaacgaaggcatctgcaaccggaacatcgaccaaactatgttgtcaatccttctatttttccactccgcaagtggcgcgagcgtggtagcaattgataacaagatcgaacaggccatggatttagtcaagaaccatctaatgtacgccgtccgagaagaagttgagattctcaaggaacagattagagagctggtggaaaaaaattcccagctggagcgagagaataccttattaaagacactggcatctcctgaacagcttgagaaattccagtcatgcctttctccagaagaacccgcaccagaatcaccccaggtgcccgaggctcctgggggatcagctgtctag

SEQ ID NO: 139266 - DNA, 375 bp, synthetic construct
  misc_feature 1..375: note = Description of Artificial Sequence: Synthetic coding sequence
  source 1..375: mol_type = other DNA
atggcacagtctaaactggactgccgaagccctgttggcctggattgctgtaactgctgcttagacctggcccaccggagtgggctgcagcgcggctccagcggcgagaacaacaatccaggctctcctactgtaagtaacttcaggcagctacaggaaaagttggtattcgagaatctgaacactgacaaactgaattcaattatgagacaggacagtctggaaccagtgcttcgagacccttgctatttaatcaatgagggcatctgtaacagaaacatcgatcaaaccatgttgagtatcctgctgttcttccactctgcttccggcgcaagcgtagtggcaatcgacaataaaatagagcaggcaatgtag

SEQ ID NO: 139267 - DNA, 1188 bp, synthetic construct
  misc_feature 1..1188: note = Description of Artificial Sequence: Synthetic coding sequence
  source 1..1188: mol_type = other DNA
atgtctggcggtaagaaaaagtccagcttccagatcacgtccgtgacaactgactacgaagggcccggctcgccaggtgcctctgacccacccactccacagccacccaccggaccgccaccccgactgcccaatggagagccctcccctgatcctggcgggaagggaacccctcggaacgggtccccacctccgggagccccttcttctcggttccgggttgtaaagctgccgcacggactgggcgaaccttatcgcagaggccggtggacatgcgtggatgtgtatgagagagatttggaaccacactcttttggcgggcttctagaaggcatcagaggcgcttctggcggagccgggggccgaagccttgactccagacttgagctggcgagtctgggactcggggccccaacacccccttccggactctcacagggccctacctcatggttgcgtcctccacccacttcccccggtccccaggctcggtccttcaccgggggcctgggacagctggtcgtcccgagcaaggcgaaggcagaaaagccacccctatctgcgagctcaccacagcagcggccaccagagccggagaccggcgagagcgctggcaccagtcgtgcagctacgccccttccatctctcagagttgaagcggaagcaggcggaagtggagctaggacgcctcctctgagccggcggaaagctgtcgatatgcggctgcgtatggagctgggcgccccagaagagatgggacaggtccccccactggattccagaccatccagtccagcactatactttacccacgatgcctccctagttcataagtctcccgatccctttggagcagtggcggctcagaagtttagcctcgctcattccatgctggccatatctggccaccttgactctgatgatgactcgggtagcggatctctggtcgggattgataataagattgaacaagccatggacctagtcaagagtcacctgatgtttgcggtgagggaagaggtggaggtgctgaaggaacagattagggagttagcagaacgtaacgcggctctggagcaggagaatggcttgctgagggctctggctagtcctgagcaactcgctcagttgccatcgtccggtgtcccacgattaggcccgcccgcacccaacggcccaagcgtatag

SEQ ID NO: 139268 - DNA, 1314 bp, synthetic construct
  misc_feature 1..1314: note = Description of Artificial Sequence: Synthetic coding sequence
  source 1..1314: mol_type = other DNA
atgtctggcttggacggtgtgaagcgtactaccccgttgcaaacacactctataatcattagtgatcaggtgcccagtgaccaggacgctcaccagtatctgagattgagagatcagtccgaggccactcaggtaatggccgaacccggtgagggagggtcagagaccgtagccctaccccctccccccccgagcgaggaaggaggagttccccaggacgctgccggccggggaggaaccccccagattagagtggtcgggggacgaggccacgtcgccattaaagccggccaggaggaaggacagccccccgccgagggtttggctgccgcgagtgtggtaatggccgcagatcgctcactgaagaaaggagtgcaggggggggagaaagctctggagatttgcggggcgcagcgctccgcctcagaacttaccgcaggggccgaggctgaggccgaagaggtgaaaactggcaaatgcgctacagtgagtgctgccgtcgcagagcgagaatctgcggaagtggtgaaggagggtcttgccgaaaaggaagtcatggaagagcagatggaggttgaggaacaacctcccgaaggcgaagaaatagaggtggctgaggaagaccgtttggaggaagaagccagggaggaagaaggtccctggccacttcacgaagccttacgcatggacccactggaagcgatccagctggaacttgacacggtcaatgcccaggccgaccgggcctttcagcaactagaacataaattcggccggatgcggcgtcattatcttgagcgccgaaattatattattcagaatattcctggtttctggatgacagcgtttagaaaccacccacagctcagcgctatgatcagggggcaggatgccgaaatgctccgatacatcaccaatctggaggtgaaggaactgcggcatccccgtacagggtgcaaatttaaattctttttcagaaggaacccttattttaggaacaaactgatcgtgaaggaatacgaggtgagaagttctggcagagtggtgagtctgagtacaccaatcatctggcggagaggccacgagccccagtcctttattcgcagaaatcaggatctgatttgttctttcttcacttggttcagtgatcattccttacctgagtctgacaagattgccgaaattattaaggaggacctgtggcctaatccactacagtattatctgcttcgagaaggggttcgaagagcacgccggcgaccgctacgggagcctgtggaaattcctagaccttttggcttccagtctgggtag

SEQ ID NO: 139269 - DNA, 522 bp, synthetic construct
  misc_feature 1..522: note = Description of Artificial Sequence: Synthetic coding sequence
  source 1..522: mol_type = other DNA
atgtccggcctagatggagtcaaaaggaccacccccctgcagacacattctatcattatctctgaccaagtgccaagcgatcaggacgcacaccagtacctgagattgcgagatcaatctgaggccacccaggtaatggccgagccaggggagggagggagtgaaacggtggccttacctcccccacctccatctgaagaaggcggggtgccacaggacgccgcgggtcgtggtggaacgccacagatcagagtggtgggagggagaggccatgtggcaatcaaagcaggccaggaagaagggcaaccccctgctgaaggactggccgcagcctcggtagtgatggcagcagatcgctccctgaagaagggtgtacaaggcggggagaaagccttggagatttgtggcgcccaacggagcgcttcagaattgaccgcaggtgccgaagctgaggctgaggaggtgaagaccggtaagtgtgccacggtgagcgctgctgtggctaaaatgcaaagatgttag

SEQ ID NO: 139270 - DNA, 2082 bp, synthetic construct
  misc_feature 1..2082: note = Description of Artificial Sequence: Synthetic coding sequence
  source 1..2082: mol_type = other DNA
atggacaggccggatgaaggcccacccgctaagactcgcagactgagtagctctgaatccccacagagggacccgcccccaccacctcctcctcctcctctcctgcgactgccactccctccccctcaacagcggccccgcctccaggaggaaactgaggccgcccaagtgctcgcagacatgcggggggtcggcctgggccctgccttgcctcccccacccccatatgtgattctggaggagggcggaatccgcgcatacttcaccttgggcgccgaatgcccagggtgggacagcactattgaatccggatatggggaggcacccccgcccactgaaagcctagaagctttaccaaccccagaggccagtggggggtcattagagattgactttcaggtggtgcagagtagcagtttcggaggagagggagccctggagacttgttcagccgttggatgggcgccacagcgcttggtcgaccctaaatcaaaggaagaggccatcatcattgttgaagatgaggatgaggacgagcgggaatccatgagaagctctcgtagacgacgtcggcgacgccggcgcaaacaacgcaaggtcaaaagggaaagtcgtgagagaaatgccgagaggatggaaagcatcctgcaggcactggaggacattcagctggacctagaagcagtcaacataaaagcagggaaggcctttcttcgcctgaaacggaagtttattcagatgcgacggcccttcctagaaaggcgggatctgataattcagcatatcccaggcttctgggtcaaggctttcttaaaccaccctcgaatcagtattttgatcaaccgaagggacgaggacattttccggtatcttactaatctccaagtccaggacttgagacacatcagcatggggtacaaaatgaagctgtacttccaaaccaacccatactttactaacatggtgatcgtcaaggaattccagagaaaccgttccgggagactcgtctcccattctactccgatccggtggcatagaggccaagaaccacaggccaggagacacgggaaccaagatgcaagccatagtttcttttcatggttttctaaccacagcttgccagaagcagaccgcatagcagagattatcaagaacgacctttgggtgaaccctctgaggtattatctgagggaacgcggtagtagaatcaaacgcaaaaaacaagaaatgaaaaaacgcaagaccaggggacggtgcgaggtggttattatggaggatgctcccgactattatgcggttgaggacatctttagcgaaattagcgatatcgacgaaactatccacgacattaaaatttccgatttcatggaaaccacggattactttgaaactaccgacaacgaaatcaccgacatcaacgagaatatctgcgactcagaaaatcccgatcataatgaagtcccaaacaacgagactactgacaataacgagagcgcggatgatcatgaaaccacagataacaatgagtccgccgatgacaataacgagaatcccgaggataacaataagaatacggacgataacgaggagaatcccaacaataacgagaatacctatggcaataattttttcaagggcggcttctggggatctcatgggaacaaccaggactcctccgattccgataacgaggccgacgaggcaagcgacgatgaggataacgacggaaacgagggagataacgaaggttcagacgacgatggcaatgagggagacaatgaaggcagtgacgatgacgatagggatatagaatactacgagaaagtcatcgaagacttcgataaagaccaggcagactatgaggatgtcatcgagataataagtgatgaatctgtcgaggaggaaggcatcgaggaggggatccagcaagatgaagatatatatgaagagggaaattacgaggaggagggttcagaagacgtgtgggaagaaggggaggattccgatgattccgacctggaggatgtcttacaagtcccgaacggctgggctaaccccggcaaacgcggcaagactggctag

SEQ ID NO: 139271 - DNA, 1062 bp, synthetic construct
  misc_feature 1..1062: note = Description of Artificial Sequence: Synthetic coding sequence
  source 1..1062: mol_type = other DNA
atgccatggccattgctcctcctccttgccgtctcaggcgcccaaacaactcgtccctgttttcccggctgtcaatgcgaagtagaaacattcggactgtttgactctttcagtttaactagggtcgactgtagtggcttagggccacatattatgcccgtgcccatacctctggacactgctcacctcgacctgtctagtaaccgcctggagatggtgaacgaaagcgtgttagccggacccggatacaccacacttgctggcctggacctttcccataacctgctcacatcgatctcaccaaccgcattttctagactgagatatttagagtctttggacctgtcccataatggacttactgccctgcccgccgagtcctttaccagctcaccactcagcgacgtaaacttgtcgcataaccaattacgggaggttagtgtgtctgctttcaccacccactcacagggcagggcactccatgtggacctatcccacaacctcattcacaggctggtgccgcatcctacacgcgcgggcctaccagctccaacaattcagagccttaatctggcttggaacagacttcatgccgtgcctaatctacgcgacctccccctgagatatttgtcactggacggaaatcccctggccgtcatcggccctggggctttcgccggcttgggagggttgacgcacttgagcttggcttcactccagagactgccggagctcgcaccatcaggtttccgggagctgcctggtttgcaagtgctcgatttgtcaggcaatccaaagttgaattgggctggtgcagaggtgttcagcggcctcagtagtctgcaggagctggatctctccggaactaatctcgtgccacttccagaagccctcctgctccacctccctgcactccagagcgtttccgttggacaagatgtgagatgtcgaaggctggttagggaggggacctaccctcggagaccaggaagctccccaaaagtggccttgcactgcgtcgacacacgggattctgctgcgcgggggccgactatattgtag

SEQ ID NO: 139272 - DNA, 966 bp, synthetic construct
  misc_feature 1..966: note = Description of Artificial Sequence: Synthetic coding sequence
  source 1..966: mol_type = other DNA
atgccctggcccctgctgctcctgctcgctgtgtcaggtgctcagacaaccagaccatgctttccaggatgccaatgtgaagtggagacctttggtttgttcgatagcttctctctaactagagttgactgtagcggactgggcccacatattatgcccgttccaatcccattggatacggcccatcttgacctgtcttccaatcggcttgaaatggtcaacgaatcagttctggcagggcccggctacactactctggctggccttgacctaagtcacaatcttctgactagttcacccttgtccgacgttaatctgtcccataaccagctgcgagaggtaagtgtgagcgccttcacaacacattcacaggggcgcgctcttcatgtggacctatcccataatctgatccatcggcttgtgcctcatcctacccgtgcagggctgcctgcccctactatccagagtctcaatttagcctggaatagactacacgcggtgcccaacctccgggacctgcctttaaggtacctgagcctggatggcaatcctttggccgtgatcggaccaggagcttttgctggcttaggaggactcacacacctgtcacttgcttcactgcagaggctgcccgagctggcaccttctggcttccgcgaactgccaggtctgcaggtgctggacctttccggaaatcccaaactcaactgggccggcgctgaggtattttccggtctaagctccctgcaagagctggatttatccggcactaatctggttcccctcccagaggctttgctactccacctgcctgctctgcagtccgtgagcgttggtcaagacgtgaggtgccggcggcttgtgagggaaggaacatatcctcgaaggcctggcagcagccccaaggtggccctgcactgcgttgacacccgagactcggccgcccggggtcccacaattttgtag

SEQ ID NO: 139273 - DNA, 318 bp, synthetic construct
  misc_feature 1..318: note = Description of Artificial Sequence: Synthetic coding sequence
  source 1..318: mol_type = other DNA
atgccttggcctcttctgctgcttctcgccgtgtccggtgcccaaaccacgaggccctgtttccccggatgccaatgcgaggtggaaaccttcggtttgtttgactctttttccctcacacgagtagattgctctgggctcggccctcatatcatgcctgtgccaattcctctggacacggcccacttagatcttagttccaataggctagagatggtgaatgagtccgtgctcgctggtccaggatacacaacgctggctggcctggatctctcgcacaacctgctcactagcattagccccactgctttttcatag

SEQ ID NO: 139274 - DNA, 1062 bp, synthetic construct
  misc_feature 1..1062: note = Description of Artificial Sequence: Synthetic coding sequence
  source 1..1062: mol_type = other DNA
atgccttggcctctgcttctgctcctggctgtttcaggcgcacaaaccactcgtccatgcttccctggctgtcaatgtgaggtggaaactttcggtctgttcgattcttttagtcttaccagagtggattgtagtgggctcggtcctcacattatgccagttcccatacccctggacactgctcacctagatctgagcagtaacagacttgagatggtcaatgagtctgtcctggcagggcccggttatactacactggccggactagacctcagtcacaacctactgacatccatctccccgaccgcatttagtagactgaggtatctcgagtcccttgatctttcgcacaatggtctgactgctctgcctgcagaaagcttcacctccagcccactaagcgacgtgaatttgtctcataatcagctgagggaggtgtctgtgtctgcgtttaccacacactcacagggaagggccctccacgtcgacctgtcacacaatctgattcacaggttagtaccccaccccacccgggccggattgcctgcccctactatccaatcactgaacctggcttggaatagactgcatgccgtacccaatctgagagacctgccacttcgatatctttcgctcgacgggaatcctctggcagtcataggtcccggcgcgttcgctggattgggaggcctgactcatctttctctggcatcattgcagagactccccgaattagcgccctccggattccgggaattaccagggctgcaggttctggacctgagcggaaatccgaagctgaactgggcaggagcagaggtgttctccggcttatcatcgcttcaggaactggatttgagtggcactaatcttgtcccactcccagaggccttgcttttacacctgccagccttgcagtcggtatcagtgggccaggacgttagatgccggcgcttggtgcgggaagggacttacccgaggcgaccaggtagtagtccaaaagtagcgctgcattgcgtcgatacgagagactctgcagcccgtggacctactatcctctag

SEQ ID NO: 139275 - DNA, 453 bp, synthetic construct
  misc_feature 1..453: note = Description of Artificial Sequence: Synthetic coding sequence
  source 1..453: mol_type = other DNA
atgccttggcccttgttgctgttgctcgcagtgtcaggggctcagactacgcgtccctgcttccccggctgccaatgcgaggtagagaccttcggactgtttgactccttttctctgacacgcgtcgactgcagcggcctcggcccacacatcatgcccgtaccaattccattggatactgcacacttggacttgtcttcgaatcgtctggaaatggtcaacgagtctgtcctcgccggccccggctacaccacactagcaggcctggacttgtcccacaacctgctgacatccatttccccaacagcttttagcagactgcgatacctggaatcactggacctctcccataatggcctgactgctcttcctgccgagtcatttacctcctcgcctcttagcgacgtaaacctaagtcacaatcagctacgcgaggtatccgtgagtgcatag

SEQ ID NO: 139276 - DNA, 2574 bp, synthetic construct
  misc_feature 1..2574: note = Description of Artificial Sequence: Synthetic coding sequence
  source 1..2574: mol_type = other DNA
atggaaagcgaggacctaagcggcagagagttaaccatcgattctattatgaacaaggtgcgagacattaaaaataagtttaaaaatgaagacctgacagacgagctgtctcttaacaagatttccgctgatacaaccgacaacagcgggaccgtcaatcaaattatgatgatggccaataaccctgaagactggctgtcgctgctgctaaagctcgagaaaaatagcgtccctctaagcgacgctctactgaacaaactaattggcaggtattctcaagccattgaagcgctgcctcccgataagtacgggcaaaatgaatcttttgcccgcatccaggtgcggttcgccgagttgaaagcaattcaggaaccagatgacgcgcgtgactacttccagatggcgagggccaactgcaagaagttcgcgttcgtccatatctctttcgcccagtttgaactatctcagggcaatgtgaagaagagcaagcagcttctgcagaaggcagtggaacgtggcgctgtgccgcttgagatgcttgagatcgcactgcgcaacctgaatctccaaaagaaacaattgctcagcgaggaagagaagaaaaacctctccgcatcaaccgtgctcactgcacaggaatctttcagcggatccctggggcacctgcaaaaccgcaacaactcctgcgactctagaggacagacgacaaaagctcggtttctgtacggggagaacatgcctccccaggatgccgaaatcgggtatcgaaattccctgcggcagacaaacaaaaccaaacaatcctgccccttcggccgggtaccagtgaacctgctgaactcacccgattgcgacgtgaagaccgacgacagcgtggtgccttgtttcatgaaaaggcagacctcacggagtgagtgccgggatctggtggtacctggctcaaagccatctggcaacgattcctgtgagctcaggaaccttaagagcgttcagaactcccacttcaaggagccgctggtctcggacgagaaatccagtgaactaattattaccgactcgattacccttaagaataagaccgagagctccttactggccaaactggaagaaacaaaggagtatcaggaacctgaggtgcccgagagcaatcaaaagcagtggcagtctaaacgaaaatcagagtgtattaaccaaaatcccgcagcatccagcaatcactggcaaatcccggagctggccagaaaagtcaataccgaacaaaagcatacaactttcgaacaaccagttttcagtgtgtccaaacagagtcccccaatcagcacgtccaagtggttcgatcccaaaagtatctgcaagacaccatcatcaaacactcttgatgactatatgtcttgttttcgcacacctgtcgtaaaaaacgactttcctcccgcctgtcagctcagcacaccttacgggcaacccgcttgtttccagcagcagcagcaccagattctggcaacacccttacagaaccttcaggtcctagcttcttctagtgcaaacgagtgtatctccgtgaagggccgcatttacagtattctgaaacagatcggctcgggcggttcttcgaaggtgtttcaggtcctcaacgaaaagaagcaaatctacgcaataaaatacgtgaatctcgaagaagctgacaaccagacactggattcgtataggaacgaaatcgcttacctgaataagttgcaacagcactcagataaaattatcagactctatgactatgaaattactgatcagtacatctatatggtgatggagtgcggtaatattgatcttaactcatggctcaagaagaagaagagcatagatccgtgggagcgcaagagctattggaagaatatgctcgaggccgtccatacaatacaccagcacggaatcgtgcacagcgacctgaaacctgcgaatttcctgatcgtggacgggatgctcaaacttattgactttggaatagcaaaccagatgcaacctgataccacctcagtggttaaggactcccaggtcgggactgtgaactacatgccgccagaggctatcaaagacatgagctcgagccgcgagaatgggaaatctaagtctaagatttcccccaagagtgacgtgtggagcctagggtgtatcctgtattacatgacctacgggaagaccccctttcagcagatcattaatcagatttctaagctgcatgcaattatcgacccaaatcatgaaatcgaattccccgatattccagagaaagacctccaggatgtgctgaaatgttgcttgaagcgggaccccaagcagcgaatttctatcccagagctgctcgcgcatccctacgtacagatccagacccacccggtcaaccagatggccaaaggcacgacagaggagatgaagtatgttctgggccaacttgtggggctgaactcaccgaattctatactaaaggctgccaagactttgtacgagcactattccgggggagaatcacacaatagttctagcagcaagactttcgagaagaaacgaggcaaaaagtag

SEQ ID NO: 139277 - DNA, 420 bp, synthetic construct
  misc_feature 1..420: note = Description of Artificial Sequence: Synthetic coding sequence
  source 1..420: mol_type = other DNA
atggagtccgaagacctcagcggaagggagctcacaatcgatagcataatgaacaaagtgagggatatcaaaaataagttcaagaacgaagatttgactgacgaattatcgctcaataaaatcagtgctgatacaaccgataatagcggcactgttaatcagattatgatgatggcgaataatcccgaggattggctctccctcctcctcaaactggaaaaaaatagtgtccccctttcagacgcattgctaaacaaactgattggccgctacagtcaagccatcgaagccctgccacccgataagtacggacagaacgagtcatttgctaggattcaggtgcgctttgcggagctgaaagctattcaggaaccagacgacgctagagactatttccaaatggcgagggccaactgttag

SEQ ID NO: 139278 - DNA, 531 bp, synthetic construct
  misc_feature 1..531: note = Description of Artificial Sequence: Synthetic coding sequence
  source 1..531: mol_type = other DNA
atggaatctgaggacctgtctgggcgagaattgaccatagatagcataatgaacaaggtgagagatattaagaataagtttaaaaatgaggacctgaccgacgagctttccctgaataagattagcgcggatactacggataattccggcacggtcaaccagatcatgatgatggccaataatcccgaagactggctgtcgttgctcctcaaactcgaaaaaaattccgtaccgctctccgacgccctgctgaataaacttatagggaggtactcgcaggctatagaagctttgccccctgataagtacggccagaacgaatctttcgcacgtatccaggtccgattcgcagaattaaaggctatacaggagcccgatgacgctcgcgactactttcagatggcacgcgctaattgtaaaaaatttgcgtttgtgcacattagtttcgcgcagttcgaacttagccagggaaatgtcaagaagagcaagcaactgctgcagaaagcagtggaacgcggagcagttccttag

SEQ ID NO: 139279 - DNA, 453 bp, synthetic construct
  misc_feature 1..453: note = Description of Artificial Sequence: Synthetic coding sequence
  source 1..453: mol_type = other DNA
atggagtcagaggacctttcaggacgggagctgaccatcgattccattatgaataaggtgcgagacataaagaataaattcaagaatgaagacctcaccgacgaactgtccctgaataagatttcagccgataccacagacaattcagggacagtcaaccagattatgatgatggccaataaccctgaagactggctgtctctccttctgaaactagagaaaaactcagtccccctcagcgacgccttactgaacaaactgataggtcgctatagtcaagcaatagaagccctgccacctgataagtacgggcagaacgagtctttcgccagaattcaggttcgttttgccgagttgaaagctatacaggagcctgacgatgcccgcgactacttccagatggccagggccaactgtaagaagttcgccttcgtccacatttctttcgcgtag

SEQ ID NO: 139280 - DNA, 492 bp, synthetic construct
  misc_feature 1..492: note = Description of Artificial Sequence: Synthetic coding sequence
  source 1..492: mol_type = other DNA
atggccgaaggaggagggcaaaaccaccacgaggtcgttaagtttatggacgtgtaccagcggtcttactgtcatccaattgaaactctcgtcgacatttttcaagagtaccccgacgaaatcgagtacatatttaaacctagctgtgtccccctgatgcgatgtggcggatgttgtaacgacgagggactggaatgtgtacccacagaggagagtaacataaccatgcagataatgcggatcaagcctcaccagggtcagcacataggagaaatgtcctttcttcaacataacaaatgtgagtgtaggccaaagaaggaccgggccagacaggaaaatccttgtggtccttgctcggagcggcgaaaacatcttttcgtccaagacccacagacctgtaagtgctcttgtaagaacaccgactcccgctgcaaagccagacagctggagctcaacgagcgtacatgccgatgcgacaagcccaggagatag

SEQ ID NO: 139281 - DNA, 1368 bp, synthetic construct
  misc_feature 1..1368: note = Description of Artificial Sequence: Synthetic coding sequence
  source 1..1368: mol_type = other DNA
atgacaacaatggctgctgccacactgcttcgcgctactccgcacttttccggcctggccgctggccggacttttctgctccagggcctgctccgactgttgaaagccccagccctgccactgctgtgtcgggggttggcagtagaagcaaagaagacttatgttcgcgataaaccccatgtgaatgttgggaccattgggcatgtagaccatggcaagacaaccttgaccgctgcgatcaccaagattctcgccgagggaggtggagcaaaatttaagaagtacgaggagatcgacaacgcccccgaggaacgagcccgcggcatcaccataaatgccgcccacgtggagtacagcaccgctgctcggcattatgcccacaccgattgtccaggccatgccgattacgtgaagaacatgatcacaggaacggcccccctggatggttgtatcctggttgttgccgcgaatgacggccctatgccacagactagggaacacctgttgttggcacgccagatcggggtagaacatgtggtggtctacgtaaacaaggcggatgcagttcaggacagcgaaatggttgaactggtggagctcgagatcagagagctgctgaccgagttcggctataagggtgaagagacaccagtaattgtgggctctgcactgtgtgcacttgagggccgggaccctgaactgggtctcaagagtgttcagaaactcttggacgcggttgatacctacattccagttccagcaagggacctggagaagcccttcctgctcccggtagaagctgtttactctgttcccgggagaggaactgtagttaccggcacgctggaaagggggatactgaagaagggggacgaatgcgagctcctggggcactctaaaaacattcgcaccgttgtgacagggatcgaaatgttccataaaagtttggaacgggcggaggccggagataaccttggcgctcttgtgcgcgggctgaaaagggaggacctgcggcgaggactggtaatggtcaaacctggcagcataaagccccatcaaaaggttgaggcgcaggtgtatatcctctccaaagaggagggtgggcgccacaagcctttcgtctcccacttcatgccagtgatgttttctttgacttgggacatggcctgccgcatcatcctgccaccagagaaggagctggctatgcccggagaggacctcaagttcaatctgatattgcgtcagcctatgattctagagaagggtcaacggtttaccctccgtgacggtaacaggactatcggtaccggcttggtgaccaacactctggcaatgacagaggaagaaaaaaatatcaagtggggctag

SEQ ID NO: 139282 - DNA, 1611 bp, synthetic construct
  misc_feature 1..1611: note = Description of Artificial Sequence: Synthetic coding sequence
  source 1..1611: mol_type = other DNA
atggctacccccgatgccgggttaccaggcgcagagggcgtggagcccgcaccatgggctcaactggaggcccccgcgcgactgctcctgcaggcattgcaggccggacctgagggggcgagaagagggctgggcgtgctgagggccttgggtagtcgtggatgggagcccttcgactggggacgcctattggaggccctgtgccgcgaggagccagtcgtgcagggccccgatggaagactggaactgaagccacttctgctgcggttgcctcgcatctgccagagaaatctcatgagtctgctcatggctgtgaggccaagcctgcccgaaagcgggttgctgtcagtattacaaattgcacagcaagatctggcgccggatcccgacgcctggctgcgagctcttggtgaactgctccgacgcgatctgggggtgggtacttctatggagggggctagccctctgtcagagcggtgtcagcgtcagttgcaaagcctgtgcagggggttaggactcggcggtagaagactcaagtcaccccaggctccagaccccgaggaagaggagaaccgtgacagtcagcagcccggcaaacgccgaaaagactcagaggaggaagccgccagccccgagggaaagagggtccctaagagactgcgttgctgggaagaggaggaggatcacgagaaggagcgcccagagcataagagcctcgagagccttgctgacggtgggtctgcaagtcctattaaggaccagcctgttatggccgtgaaaaccggcgaagatggaagcaacctcgatgatgccaaggggctggccgaaagtctggagctgcctaaagctatccaggatcagctgccacggctgcagcagcttctgaagacgctcgaggagggattagaaggtctagaagacgcccccccagttgaactgcagttgctacatgagtgtagcccatctcagatggatctcctctgcgcacagctgcagcttcctcagctgtctgatctgggactgctcaggctctgcacctggctgttggcactcagccccgatctgtctctgagcaacgcgactgtactgacaaggagcctttttcttggccgtattctctcacttacctcttccgcctccagactgctcactactgctcttacgtcattctgcgccaagtatacgtatcctgtgtgttcggccctactcgacccagtgctccaggctccaggcacagggcctgctcagaccgaactcctctgttgtctggtgaaaatggagagtcttgagccagacgctcaggttttgatgctgggacagatcctcgagctgccatggaaggaggaaactttcctggtgttacagagtctcctggaacgtcaggtagagatgacacctgaaaagttctctgttctcatggagaagctgtgtaagaaaggactggcagcaacaacttccatggcctacgctaagttgatgcttaccgtgatgaccaagtaccaggctaatatcaccgaaacccagcggttaggtctggctatggctctggagcccaacacgaccttcctccggaagtccctgaaggctgccctgaaacacctcggcccttag

SEQ ID NO: 139283 - DNA, 1470 bp, synthetic construct
  misc_feature 1..1470: note = Description of Artificial Sequence: Synthetic coding sequence
  source 1..1470: mol_type = other DNA
atgcctcttagggacgagaccctgcgagaagtgtgggcgtcggacagcggccacgaggaagagtcactcagccctgaagcaccacgcagaccaaagcaacgacccgcccccgcgcagcggctccgcaagaagagaacagaggctcctgaatcgccctgcccgacaggctcgaagcctcgaaaaccgggggaggaggaggaggaagaggaggacgaggaagatgaagaggaagaggccgaggaaaagaaagagaagatccttctgccccctaagaaacctcttcgtgagaagtcttccgccgacctcaaagagagacgcgctaaagcccagggcccgagaggggatttgggtagcccggatccgcctcctaagccgcttcgcgtccgtaataaagaagcacctgcaggggagggcacaaaaatgcggaagactaaaaaaaagggctcaggcgaagctgataaggacccttcaggctcccctgccagcgccaggaaaagtcccgcagcgatgtttctcgttggcgagggtagccccgataagaaagccctgaaaaaaaaaggtaccccgaaaggggctcgaaaggaagaggaggaggaggaggaggccgcaaccgttataaagaaaagcaaccaaaaaggtaaagccaagggaaaggggaaaaaaaaggcaaaagaggagcgggccccaagccctcctgtcgaagttgatgaaccaagggaatttgttctcagaccagctccccaaggtcggacggtgaggtgccgattgacccgggataaaaagggtatggacagggggatgtacccgtcttattttcttcacctcgataccgagaagaaggtgtttctgctggcagggcgcaaacgaaaacggagtaaaacagcaaactacctcatttcaattgatcctactaaccttagcagaggtggtgagaactttatcggcaagctgcgctcaaacctgctgggcaatcgttttaccgtgtttgacaatgggcaaaacccgcagaggggatacagcacaaacgtggccagtttgagacaagaacttgctgcagtcatctatgagactaacgtgttggggtttcgcggaccacggcgcatgacagtcattattcccggcatgtcagccgagaatgaaagagttccaatcagaccccgcaatgccagcgatggcctgctcgttcgctggcagaataagaccctggagtctttgattgaacttcacaataagccgcctgtttggaatgacgactcaggcagctataccctgaattttcaggggcgcgtcactcaggcgagcgtaaaaaacttccagatcgtgcatgcagacgatccggattatatagtactacagtttgggagagttgctgaagacgctttcacacttgactatagataccccctatgcgctctccaggcttttgccatcgctctgtcatcatttgacggcaagttagcctgtgagtag

SEQ ID NO: 139284 - DNA, 561 bp, synthetic construct
  misc_feature 1..561: note = Description of Artificial Sequence: Synthetic coding sequence
  source 1..561: mol_type = other DNA
atgccactgcgcgacgagaccctccgcgaagtctgggccagcgactcaggacacgaggaagagtcactatccccagaggctcctagaagaccaaaacagaggcctgcgcctgcacagaggctgagaaagaaaagaaccgaggccccagaatccccctgcccaaccggatctaaacctcgcaaacccggggaggaagaagaggaggaggaggatgaggaggatgaggaagaagaggccgaggagaagaaggagaagattctactgcctccgaagaagcctctgcgtgagaagtcttccgccgacctgaaagagaggagggctaaagcccaggggcctcgcggggacttgggtagtccggatccccctccaaagcccttgcgggtgcgaaacaaagaagctccagccggtgagggtactaaaatgaggaaaaccaagaagaaaggctctggtgaagcagacaaagatccaagtggcagcccggccagtgctcggaagtctcccgcggcaatgttcttggtgggcgaaggttccccggacaaaaaagctctcaaaaagaagtag

SEQ ID NO: 139285 - DNA, 3033 bp, synthetic construct
  misc_feature 1..3033: note = Description of Artificial Sequence: Synthetic coding sequence
  source 1..3033: mol_type = other DNA
atgggcgcctatgccagagcaagcggcgtgtgcgctcgtggctgtctggattctgctgggccttggactatgtcgcgcgccctgaggccaccgctgcctcctttatgtttctttctgcttctgttagctgctgccggcgccagagctgggggctacgagacatgcccgaccgttcagccgaacatgctgaacgtgcatcttctcccccacacccacgatgacgtagggtggttgaaaaccgtggatcaatacttctacggaatcaaaaatgacatccagcatgcgggagtccaatacatcctagattcggtcattagcgccctccttgccgatcccacccgccgcttcatctatgttgagatcgcgttcttctcccgatggtggcaccaacagacgaatgcgactcaagaggttgtcagggatttggtgagacaaggtagacttgagttcgccaacggtggatgggttatgaatgacgaagccgccacccactacggcgccatcgtggaccagatgacgttgggcctgaggttcctggaggatacattcggcaatgatggcagaccccgtgttgcctggcacatcgacccctttggacattcacgagagcaagccagtctattcgctcaaatgggatttgacggatttttttttggtaggcttgactaccaagataaatgggttaggatgcagaagttggaaatggaacaggtctggagggcgagtacatctctgaaaccaccaacagcggatctcttcaccggcgtactgcctaacggatacaaccccccccgaaatctctgttgggacgtgctgtgtgtggaccagcctctagttgaagacccacgctcccccgagtataatgcaaaggagctggttgattacttcctaaacgtggcaaccgcccagggcaggtactaccgcacaaaccacactgttatgaccatgggatcggacttccagtatgaaaacgccaatatgtggtttaagaatctagacaagctaatcagactggtaaatgctcaggccaaaggttccagcgttcatgtgctctactctactcccgcctgttatctctgggaactaaataaagctaatttaacatggtcagtgaagcacgatgatttcttcccctacgccgacggaccacatcagttttggacaggctatttttcaagtcgcccggctctgaagagatatgagagattaagctataacttcctacaggtctgtaatcagctggaggccctggtaggactagctgcaaacgtggggccctatgggtctggggactcggcaccattaaatgaagccatggcagtgctgcaacaccatgatgccgtgtccggcaccagtaggcaacatgtggcaaatgattacgccagacagctggcggctgggtggggcccttgcgaagttttgttgagtaacgccctggcaaggctcagaggctttaaagatcatttcacattttgtcaacagctcaacattagtatttgtccactcagtcagacggctgcccggttccaggtgattgtttacaaccctctgggcaggaaggtcaattggatggtgcggttgccagtgtctgagggtgttttcgtggtcaaagaccccaatggtcggactgtaccaagcgacgttgttatttttccctcgagtgacagtcaagcccatccgccggagctcctcttctctgcaagcttgcctgccctcggcttttcaacctactccgtggcacaggtcccaaggtggaagccccaggcaagggcaccacagccaatcccaagaagaagctggagtccagccctaactatcgaaaatgaacacattagagctacttttgaccccgacacagggctgctcatggaaattatgaacatgaatcagcagctgctgttgcccgtgcggcagaccttcttttggtacaatgcctctatcggcgataacgaatcagaccaagcaagtggtgcctacattttccgacctaaccagcagaagcctctacctgttagccgatgggcccaaattcacctggtgaagacgcctcttgtacaggaggttcaccaaaacttctccgcatggtgttcacaggtagtacggctgtatccgggccagcgccaccttgaattggagtggtcagtgggccctatccctgtgggggacacatggggcaaagaagtcatcagccgttttgacacaccgttagaaacaaagggccgcttctatactgattcaaacgggagagaaatcctcgaacgaaggcgcgactaccgccccacctggaagctgaatcagactgagccagtggctggcaattattatcctgttaatactcgtatatacatcacggacggcaatatgcaattgacagtcctgactgataggtcccaaggagggtcctccctgcgcgatggctcattggagctcatggtgcacagacggttgttgaaagatgacggcagaggagtgtccgagccgctgatggagaacggaagcggcgcctgggtccgtggcagacacctggtactgttggataccgcacaagcagcggctgccggacatcggctactggccgaacaggaggtgttagcacctcaggtggtgttagctcccggcgggggcgcagcgtacaatctgggagctcctccacgtactcagttttcagggctcagacgggatctgcccccatcggtgcatctccttacccttgcatcatggggccctgaaatggttctgctaagactagaacatcagtttgctgtgggcgaggatagcggacggaacctgagtgcccccgtaactctgaacctgagggatcttttttccacctttaccattacaagattgcaagagaccacccttgttgctaatcagttgcgcgaggctgcctctaggctgaagtggacgacaaacaccggccccaccccccatcagacaccataccagctcgaccctgcaaacattacactcgaacccatggaaatccggacattcctggcctctgtccagtggaaagaagtggacgggtag

SEQ ID NO: 139286 - DNA, 1158 bp, synthetic construct
  misc_feature 1..1158: note = Description of Artificial Sequence: Synthetic coding sequence
  source 1..1158: mol_type = other DNA
atgcacgtgtgtgtgtgtgtgtgcgtttgtgtgtacatgcccgtgtgtgttgacgcatgcatgtgttgcgaggctggcagacctgcttttcgcagcttcctgttttccttatgctccgaccttggggccgtcatttccctgctgctgtggggcagacagctgtttgccctctatagtggcaatgatgtgactgacattagcgacgatcgtttcccgaaaccaccagagatcgccaatggatacgtggaacacctattccggtaccagtgcaaaaattactacagacttaggaccgaaggcgatggtgtttataccctgaatgataagaagcagtggatcaataaggccgtgggagataaactcccagagtgtgaggctgtgtgcggtaagccaaagaatcctgctaatcccgtgcaacgcatattgggcgggcacctcgatgcgaaagggagctttccttggcaggccaagatggtttctcaccacaacctgacgaccggcgctacccttatcaacgaacaatggctcctgaccacggcaaagaatctcttcctcaatcatagtgagaatgccaccgccaaagacatagcgcctaccctgaccctatatgtcggcaagaaacagctggtggaaatcgagaaggtagtgttgcatcctaattaccatcaagtggatatcgggctgataaagctgaagcaaaaagtgctggtgaatgaacgggtgatgccaatctgcctaccttcgaaaaattacgctgaggtgggcagggtgggttacgtgtccgggtggggacaatccgataacttcaaactaactgaccatcttaagtacgtgatgctccccgtggccgatcagtatgattgtatcacccattacgagggcagcacttgccccaaatggaaggcccctaagtccccagtgggagtccaaccaatcctgaatgaacatactttttgcgtgggaatgtcaaagtaccaagaggatacctgctacggcgacgccggatccgcctttgcagtgcacgatctggaggaagacacttggtacgcagcgggcattttgagctttgacaagagctgcgccgttgcagaatacggagtatacgtgaaggttacaagcatccaacattgggtgcagaaaaccattgctgaaaactag

SEQ ID NO: 139287 - DNA, 1329 bp, synthetic construct
  misc_feature 1..1329: note = Description of Artificial Sequence: Synthetic coding sequence
  source 1..1329: mol_type = other DNA
atggaagcctctagatgcaggctcagtccgagcggggattccgtatttcacgaggagatgatgaaaatgcgacaggccaaacttgactaccagcgactcttacttgaaaaacgacagcgcaagaagaggctcgaacccttcatggtgcagcccaatccagaagcacggctccgacgtgcgaagccaagggccagcgacgaacagacacctctcgtcaattgccacacacctcattctaatgtcattctccacggcatagacgggcccgccgctgtattgaaacccgatgaggtgcacgcccctagtgtatcatctagcgtcgtggaggaagatgcagagaacacggtggataccgcctcgaagccagggctgcaggaaaggctccagaagcatgacatcagcgaatcagtcaattttgatgaggagactgacgggatcagccagtcagcttgcctggagaggcccaatagcgccagtagccagaacagtaccgacaccggtacctccgggtcggctacggcggcccaacccgctgacaacttattgggagatatcgacgacctagaagatttcgtttactccccagcacctcagggggtgacagtgcgctgtaggattatccgcgataagaggggcatggacagggggctcttccctacgtattatatgtatctcgaaaaagaggaaaatcaaaagatctttctcctcgccgcacgcaagaggaaaaaaagtaaaaccgccaattacctaattagtattgacccagtggacctttctcgagagggagagagttacgtaggaaagttacggagcaacctgatggggactaagtttaccgtatacgataggggcatatgccccatgaaaggaaggggcttagtgggggcagcccatacccgtcaggagctagctgctatctcatacgaaaccaatgtcttggggttcaagggcccaagaaagatgtctgtaattattcccggtatgacccttaaccacaaacagattccgtaccaacctcaaaataatcatgacagtcttctatcccggtggcaaaatagaaccatggagaatctcgtggaacttcataataaggctcctgtgtggaattcagacacccagtcttacgtgctgaatttcagggggcgggttacacaggcctctgttaagaactttcagatagtgcacaagaacgaccccgactatattgtcatgcagttcgggcgcgtggccgatgacgtcttcacactggactacaattatcccctgtgcgccgtacaggcattcggcataggtctatcttccttcgacagcaagctggcttgtgagtag

SEQ ID NO: 139288 - DNA, 513 bp, synthetic construct
  misc_feature 1..513: note = Description of Artificial Sequence: Synthetic coding sequence
  source 1..513: mol_type = other DNA
atgatgaagatgcgacaagcaaaacttgactatcaacggctgttgctcgagaagagacagcggaagaaaagacttgagccattcatggtccagcccaatcccgaagcccgcctgcgaagagccaagccaagggcctcggatgagcagacacctttggtcaattgccacacccctcatagtaatgtcatcctgcatggtatcgacggccccgcagcagtcctgaagcccgacgaggtccatgcgcctagcgtgtcgtcttcagtggtggaagaggacgctgaaaacactgtggataccgcatccaagccaggtctgcaggaaagactccaaaaacacgacatttcagaatcagtgaattttgatgaagagaccgacggcatatctcagtcggcatgtcttgaacggcctaacagcgccagtagccaaaacagcactttttcatctttctgtcagaagactgaggataccggctatcgacattttcgcttctgctattgcagacccacttcctag

SEQ ID NO: 139289 - DNA, 801 bp, synthetic construct
  misc_feature 1..801: note = Description of Artificial Sequence: Synthetic coding sequence
  source 1..801: mol_type = other DNA
atgcttaagactccttggatcctcctgccctctcaagattttcggtctgtctctaaatccatggataccgggacttcaggatcggcgacggctgctcaacccgccgacaatctgctgggcgacatagacgatttagaagacttcgtttactcacctgccccccaaggagtgaccgtcagatgccgtatcatcagagacaaaagaggaatggataggggtctgttcccaacctattatatgtatcttgagaaagaagaaaatcagaaaattttccttttagcagcacgtaagcggaagaaaagcaaaactgcaaattaccttatcagtattgaccctgtggacttgagtagagaaggggaaagttatgtgggcaagctgagatccaatctgatgggtacaaagttcacagtgtatgacagaggcatttgccccatgaagggtcgggggctggttggcgcggcgcatacccgtcaggagcttgccgctatatcttataatcatgactctctactgtctcgctggcagaaccgaactatggaaaacctggtggaattacataataaggcccccgtatggaatagcgacacacaatcttatgtgctgaattttcggggcagggtgactcaggctagcgtgaaaaatttccagatcgtgcacaaaaacgatcccgactatattgtgatgcaattcggaagagtggccgatgacgtttttactctcgactacaactaccctctttgcgccgtgcaggccttcggaatcgggttgtcctctttcgatagcaagctggcctgcgaatag

SEQ ID NO: 139290 - DNA, 1506 bp, synthetic construct
  misc_feature 1..1506: note = Description of Artificial Sequence: Synthetic coding sequence
  source 1..1506: mol_type = other DNA
atggaggcctcccgctgtaggctcagtccgtcaggagattcagtcttccacgaagagatgatgaaaatgcggcaagccaaacttgattatcagcgcctcctgctggagaagcgacaacggaaaaagcggctcgaacctttcatggtacagccaaatcctgaagctcggctgagaagggccaaacctcgggcctctgacgagcagacgcccctagtcaattgccacacaccgcattccaatgtgatcttgcatggtatcgatggcccggcagccgtactaaagcctgacgaggttcacgcgccgtctgtgagttcttcagttgtagaagaagatgccgaaaatactgttgatactgctagtaagccaggtctccaggaaaggctacagaagcacgatatctctgaaagcgtgaacttcgatgaggagaccgacggcatctcgcagtctgcatgtcttgagcggccaaattctgcttcctcacagaattctaccgatacgggcacctctggaagtgcaaccgctgcacagccagcagacaatctgttaggcgatatcgacgatctggaggatttcgtttattcccctgccccacagggggtcaccgtgagatgtaggatcataagggacaagcgaggcatggacagaggcctctttcctacatattacatgtacctcgagaaggaagagaaccagaagattttcctgctagcggctaggaagcggaagaaaagcaaaaccgctaactatttgatctctatcgacccagtggacctgagccgcgagggtgaaagctatgtgggcaagctaaggagcaacctcatgggcacaaagtttacagtgtacgatcggggcatctgtcctatgaaaggtcgtgggttggttggcgctgctcacactcgacaggaacttgcggccatctcttacgaaactaacgtcttgggctttaagggaccaaggaagatgtctgtgataataccaggcatgacactgaaccataagcagattccatatcaacctcagaataaccatgacagccttctctctcgttggcagaatcgcaccatggagaacctggtggagttgcataataaggcccccgtttggaacagcgacacccaaagctacgtgctgaacttccgtgggcgcgtgacccaggcatccgtcaagaactttcaaatcgtgcacaaaaatgaccctgactacatagtaatgcaatttggtcgcgtggctgatgacgttttcacgctggattataactaccctctgtgcgctgttcaggctttcggaatcgggctttctagctttgataagtgtatccagaccctgcgaatgcaagaattatgcgaactgcaccggcagcaccacagcgccgcaagcctcgtgcacagaaccgtatgtcagcgctgggttggtcacccgtggcgtctcttaccacagactagtctgctgtggacagacctcagcccgccacccgttgtgcccgccccacaccaaattagtatgtag

SEQ ID NO: 139291 - DNA, 1269 bp, synthetic construct
  misc_feature 1..1269: note = Description of Artificial Sequence: Synthetic coding sequence
  source 1..1269: mol_type = other DNA
atggccctcagcgacgagcctgccgcaggaggaccagaagaagaggcagaggatgagacgctagcttttggcgccgccctggaggcttttggggaatctgcggagactcgcgctctgttaggccggttacgggaagtccacggcggaggtgctgagcgggaggtggccttggagcggtttcgggagtggatgatgaatctgcttctagatatagtgcaggatcagacctcacctgcctccttagttcatttggcattcaagtttctctatattattacgaaggtgaggggctataagacattcctgcggctcttccctcacgaagttgccgatgttgaacccgtcctggacctggtaactatacagaatcctaaggatcacgaagcctgggaaacccggtacatgcttttgctttggctgagcgtcacatgtctaattccatttgacttctcacggttagacggcaatttgttaacccagccgggccaggcgcgcatgtccatcatggacagaattttgcagatagcagagtcttacctcatcgtgagcgacaaagcaagagatgccgcggctgtgctggtgtcccgctttataacccgtccagacgtaaaacagtctaaaatggccgaatttcttgactggtccctctgtaacttagccaggagtagtttccagactatgcagggagttattacaatggacgggactctccaggcgctcgctcagattttcaagcatggcaagagagaggattgcctgccttacgctgctaccgttctgcggtgcctggatgggtgccgcttgccagaaagtaatcagacgctgcttagaaagctgggagtaaaattagtacaacgacttggccttacgttccttaagcccaaagtggccgcatggcgctatcaaagagggtgcaggagcctggctgccaatttacagttgctgactcagggacaaagcgagcaaaagcctctgatcctaacagaggatgatgacgaagacgacgatgttccagagggtgtcgaacgagtaatcgaacaactcttggtaggccttaaagataaggataccgttgtgcggtggagcgccgcaaaaggcattgggagaatggccggccgcttgcctagggctcttgctgatgatgtcgtgggaagtgtgctggattgcttttcatttcaggagaccgacaaggcttggcatggaggatgccttgccctcgccgagctcggtcgacggggtctcctactgccatccaggctggttgattag

SEQ ID NO: 139292 - DNA, 2997 bp, synthetic construct
  misc_feature 1..2997: note = Description of Artificial Sequence: Synthetic coding sequence
  source 1..2997: mol_type = other DNA
atggacggaacactccaagcactggctcagatctttaagcacgggaagcgcgaggactgtcttccatatgccgcaacagtgttacgctgtctggatggttgcaggctgcccgaatccaaccagaccctcttaaggaagctgggcgtgaagctcgtgcaacggttaggactgacttttctcaaacccaaggtcgccgcgtggcggtatcagaggggatgccgtagcctagccgctaacctccagctactaacccagggccaatctgaacagaagccgctgatcctgaccgaggacgatgatgaggatgacgacgtaccggagggggtagaacgtgttatcgagcagctcctggttggcctgaaggacaaggacacagttgtccgatggtccgcagctaagggcatcgggagaatggccggaaggcttccaagggccctggcagacgatgtggttggtagtgtgttagactgttttagcttccaggagaccgacaaggcctggcatggcggctgcttggccttagccgagctcggcaggaggggcctgttgttgccaagcaggctggtagacgttgtggcagtaattctgaaggcactaacttatgatgagaaaagaggagcctgctccgtaggaacgaatgtccgagacgcggcttgttacgtgtgttgggccttcgcccgggcttacgagccccaggagcttaaaccttttgtgactgccattagctctgccctagtcattgcagctgtgtttgaccgcgatattaactgtcgcagagcagcctctgctgccttccaggaaaacgtgggtcgacagggaactttcccacacggtatcgatatcttgaccaccgcggactatttcgcagtcggtaaccgatccaactgctttctggtgatatccgtttttatcgcagggttccccgagtacacacagccgatgattgatcatttggtcaccatgaaaatttctcattgggacggagtcatccgtgaactggctgctcgtgctctccataacctcgcacaacaggcgcctgagttttcggctacacaggtgttcccgaggctcctctcaatgaccttgtcacctgacctgcatatgagacacgggtctattctggcatgtgcggaagtggcttacgccctgtacaaactggccgctcaggagaaccgccccgtcactgaccaccttgacgagcaggccgttcagggcctgaagcagattcatcagcagctctacgaccgacaattataccgtgggctgggcggccaactgatgagacaagccgtctgtgtgcttatcgaaaagctcagcctgtccaagatgccatttcgcggagacacggtgattgatggttggcagtggttgattaatgataccctgcggcaccttcacctgatctcatcacacagccggcaacagatgaaggacgccgccgtgagcgccctagccgctctctgctccgaatattatatgaaggaaccaggcgaagccgaccccgccattcaagaggaactgatcacacagtatctagccgagctccgcaatccagaggagatgacccgatgcggtttttctctcgctctgggggctttgcctggattcctgttgaagggcaggctgcagcaagtgcttaccggactgcgtgcagttactcacacctcacctgaggacgttagtttcgcggagagcaggcgagacggattaaaggccatcgctcggatttgccagacagtcggagtgaaggccggggcacctgatgaggccgtctgcggcgaaaacgtttcccaaatttactgcgctctactcgggtgtatggacgattatacgacagactcacgcggggacgtggggacttgggtaaggaaggccgcaatgacttctttgatggacttaaccctgctgctcgcacggtcacaacccgaattgattgaagcccatacctgtgaacgcataatgtgctgcgttgcccaacaggcatctgaaaaaatcgatcgctttagggctcacgctgccagtgtgttcctcacgctcctgcactttgactcacccccaataccacacgttcctcaccgaggtgagctggagaaactctttcccaggagtgacgtcgcaagcgtgaactggagtgccccttctcaggccttccctaggattacgcaacttctgggcctgcctacctacagataccatgtgctcctgggactggtggtgtccctaggaggcttaaccgagtctacgatccgacattctacccagagccttttcgagtacatgaagggcatacagtctgatccgcaggcactaggctccttttctggcacgcttcttcagattttcgaggataatttactgaatgagcgggtatctgtgcccctgctgaagacccttgatcatgtgttgacacacggatgtttcgatatcttcacaaccgaggaagaccacccgttcgccgtgaaacttctagctctgtgtaagaaagagatcaaaaactcaaaagatatccaaaagctgctgagcggaattgccgtcgacttccccagcgccactttggtttgcgtcggaaccgtgcagatgtatgctcatacccacctccgtctgggggcgcccggaccccactgcgcccatggctctgcgctgccacgtttttgcgagatggtgcagttccccggcgacgttaggcgtcaggcattgctacaactttgtttgctcctctgccatagattccctctaattagaaagactacagccagccaggtctacgagacactgcttacttactctgacgtggtaggcgccgatgtccttgacgaagtggttaccgtgctgtccgacactgcgtgggatgccgagctagcggtcgtccgcgagcagcggaaccggctgtgcgatctactgggcgttccaccatcttggtgtcctacatggtgccttctcaagccagtgttggagcccattcctcacccctgccttgtacgaatgagctgttcttag

SEQ ID NO: 139293 - DNA, 3579 bp, synthetic construct
  misc_feature 1..3579: note = Description of Artificial Sequence: Synthetic coding sequence
  source 1..3579: mol_type = other DNA
atggccctatccgatgagcctgcagcaggcggccctgaagaagaggccgaggacgaaaccctggcctttggcgcggcgttagaagcttttggtgaatccgcagagacccgggccttgttggggagacttcgcgaggtccacgggggtggagctgagcgcgaggttgcactcgagagatttcgcgttatcatggataaatatcaggaacagccccacctcttggaccctcatctcgaatggatgatgaatttactacttgatattgtgcaggaccagacttctcctgcctccctggtgcatctagccttcaaatttctctacatcatcacgaaagtccggggctacaagactttcctgaggctcttccctcacgaagtcgccgatgtcgaacctgtgctggacctcgtgacaatccagaatcctaaggaccacgaggcctgggagaccagatatatgttgcttctgtggttgtccgtgacctgcctgattcccttcgatttttccagattggacggcaatctcctcactcagccagggcaagcccgcatgagcataatggatagaattctacaaatcgcagaatcctatcttattgtgagcgacaaggcacgcgatgcagcagctgtcctcgtaagcaggttcattaccaggcccgatgtgaaacaatcaaaaatggctgaatttttagattggtcactctgcaatctggccagatcaagcttccagacaatgcaaggggtaataacaatggatgggaccctgcaggcactggctcagatctttaaacatggtaaacgtgaggattgtctaccttacgctgctacagtgctgcggtgtctcgacgggtgccgtctaccagagagtaaccagacgctcctaagaaagttaggtgttaaactagtccagagactcggcctgacgtttctgaaaccaaaggtggctgcttggcgctaccagcgaggttgtcggtccttggcggcaaacttgcagcttctgacccagggccagtccgaacaaaagcccctgatcctcaccgaagatgacgatgaggatgacgacgtccccgagggcgtcgaaagggtcattgaacagcttctggtcggcttaaaggacaaagacaccgttgtgagatggtctgccgctaagggaattggccgcatggccggccggcttccaagagccctggcagacgacgtcgtcggttcggtattggattgcttctcctttcaggaaacagacaaagcctggcacggcggttgtttagcccttgccgaactggggagacgcggactcctcctgccatctagactcgtcgacgtcgttgcagtgattctgaaagctctgacttacgacgaaaaacggggtgcatgttctgtgggcacaaatgtcagagacgccgcctgttacgtgtgttgggcctttgcacgcgcttacgaacctcaggaattgaaaccatttgtcaccgccataagcagcgcgctggtgatagccgctgtttttgatcgtgatattaattgtcgccgggccgcttctgctgcctttcaggagaatgtggggcggcaaggcacgtttccgcacggtattgatatcctgactactgcagactattttgccgtcggaaatcggtccaattgttttttggtgatctctgtgtttatcgctggatttcctgagtacacgcagcctatgattgatcatctggtgaccatgaagatctcccactgggatggcgtgatcagagagttggcagcccgggctttgcacaacctggcacaacaagctcccgaattctccgccacgcaagttttcccaaggttgctctcaatgaccttgtctcccgatctacacatgcgtcacgggagtatccttgcgtgtgccgaggtggcctatgcactgtacaagttggctgctcaggagaaccgccccgtgaccgatcacctggatgagcaggccgtccagggcctgaagcaaatacaccagcagctgtatgaccgccagctttatagaggcctgggcgggcagcttatgcggcaggccgtatgcgtgctcatagaaaagctcagcctgtctaagatgccattccggggagataccgtcattgacggatggcagtggttgataaatgatacactgcgccacctccacctcatctcaagccattccaggcagcagatgaaggatgcggccgtgagcgccctggcagccctgtgtagtgagtactatatgaaggaacccggcgaggccgaccctgcaattcaggaggagctgataactcagtatctggctgaactgcggaatccggaagaaatgacacggtgtggcttttcactggccctgggcgctctgcccggattcctgctgaagggccgattacaacaggtacttactgggcttagggcagtgacccatacatcacccgaggacgtgagctttgctgaaagcagaagggacggactcaaggcaatcgcaagaatttgtcaaacagtcggggtgaaagccggagcacccgacgaggcagtgtgtggtgagaacgtgagccagatttactgcgcactcctggggtgtatggatgactatacaactgattctaggggagacgtggggacctgggtacggaaagccgcgatgacatccctgatggatcttaccctactactagccaggagccaaccagagctaatcgaggcccacacatgcgagaggatcatgtgctgtgtcgctcagcaggcatctgagaaaatagacagattcagagcgcacgcagcgagtgtgtttctaacactactccactttgatagtccccccatcccccacgtgcctcataggggcgagctggagaagctgttcccacggagtgacgtagcatctgtcaattggagtgctcccagccaggcatttccgagaataacacagttgctaggactgcctacatacagataccatgtgttattgggactggtggtgagtctgggcgggctgactgagtccacgatacgccactcgacccagtcccttttcgagtatatgaaagggatacagagtgacccccaggccctgggaagtttcagcggcaccttgctccaaatattcgaggacaacttgttgaatgagagggtttcagtgccactgttaaagaccttggaccacgtcctgacacacggatgcttcgatatcttcactacagaggaggatcatcccttcgccgtaaaactgctggctctgtgcaaaaaggagatcaaaaattccaaggatatccagaaactactaagcggcatcgctgttttctgtgaaatggtccaattcccaggagacgtaaggagacaagcactactgcaactttgcttactcctgtgtcacaggtttcccctgatacgaaaaaccaccgctagtcaagtatatgagaccttgctgacctacagcgatgtcgtcggcgccgacgtcctcgatgaggtagtaacggtgctgtctgacaccgcttgggacgccgaactcgctgtagttcgcgagcaacgcaacaggctttgtgatttgttaggggtgcctaggccccaactggtcccccaacccggagcgtgttag

SEQ ID NO: 139294 - DNA, 936 bp, synthetic construct
  misc_feature 1..936: note = Description of Artificial Sequence: Synthetic coding sequence
  source 1..936: mol_type = other DNA
atggccggccggcttcctagggcattagcagacgatgtggtagggtcagtactagattgcttttcatttcaggaaaccgacaaagcatggcacggggggtgtctggcattggccgaactgggacggagagggctgttgctaccttctagactggtggacgtggtggccgtcatcctgaaggcgctgacctacgatgagaagaggggcgcttgttcagtagggaccaacgtgagagatgcagcctgttacgtgtgttgggctttcgcacgggcctatgagcctcaggagctcaaaccgtttgttactgcaataagtagcgccttggtaatcgcagccgtgtttgatcgagatattaactgtcggagggccgcatccgccgcctttcaggagaacgtgggaaggcagggcacgtttccccacgggattgatatcctgaccacggcggactactttgctgttggcaacaggagcaattgtttccttgtcatctctgtctttatagcaggcttccctgaatacacccaacccatgatcgaccatttggtgacaatgaagattagccactgggacggggtgatcagagagcttgctgcccgcgccctgcacaaccttgctcagcaggctccagaattctccgctacacaggtattccctagattgttgtccatgacattaagccccgacctacacatgcgtcacgggagcatcctggcttgcgcagaggtggcgtatgcactgtacaagcttgctgcccaggagaatcggcccgtgactgaccatctggacgaacaggccgtgcaggggcttaaacagattcatcagcagccttgtatttgctcttggggcctgatgagcccagagtctaaggccgaattctgtgtttgcgtttgccgaattagcctcggaaggcagtgtgtgcacctctctgggttgtag

SEQ ID NO: 139295 - DNA, 2253 bp, synthetic construct
  misc_feature 1..2253: note = Description of Artificial Sequence: Synthetic coding sequence
  source 1..2253: mol_type = other DNA
atggcattgtccgatgaacccgcggctggcggtccagaggaggaagcagaagacgagaccctcgccttcggagccgccctagaggcgtttggcgaatctgctgagacacgggcgttgctgggacgtttgcgtgaggtacatggaggaggcgcggagagggaggtggccctggaacgttttagggttatcatggacaagtaccaggagcagccacacttattagacccacatctggaatggatgatgaatcttttattagacattgtccaggatcaaacctccccagcctctctggtacatctcgcatttaagttcctgtacataatcactaaggtcaggggatacaagacctttttgcggttattcccccacgaggtggccgatgtggaacctgtccttgacctggtgacaatacagaatcccaaagaccatgaagcctgggagactcggtacatgctgctgctttggctcagcgtgacttgcttaatccccttcgacttctcgagactggacggaaatctgctcacccagcctggacaggccagaatgtcgattatggacaggattctgcagattgctgagtcttacctcatcgtgtcagacaaggctagagatgcagccgcagtcctggtcagccggtttatcactcgccctgatgtgaagcagtccaaaatggcggaatttctggactggtcattgtgcaacctcgcacgcagctctttccaaaccatgcagggagttatcacaatggacggcacacttcaagcgctggcccagatctttaaacacggaaaacgcgaggattgcctgccatacgcagcgaccgtcctgaggtgcctggacggctgcagattgcccgagagtaaccaaacactgcttcgcaaactgggagtcaaacttgtacagaggctgggacttactttcctcaagcctaaggtggcagcgtggcggtaccaaaggggatgcaggtcactggcagccaacctgcagctgttgacccagggacagtccgaacagaagccccttatccttactgaggacgatgatgaggacgacgacgtgcctgagggcgtcgagcgggtaattgagcaactattggtcggcctaaaagacaaagatacagtggtgcgttggagtgctgctaaaggcatagggagaatggccgggcgacttccacgggcactcgcagacgacgtcgtaggatcagtcttggactgcttttcctttcaggaaaccgataaggcctggcacgggggatgtctagccctggcagaattggggcgccgggggctactgcttccatctcgactcgttgacgtggtagccgtgatcctgaaagctttgacttatgacgagaaaagaggggcctgcagcgttggtaccaacgtgcgagatgcagcgtgttatgtgtgttgggccttcgcccgggcctatgagcctcaggagcttaaacccttcgtaacagcaataagctccgccctcgtaatagccgcagtgttcgaccgcgatattaattgtcgccgggctgcttcagctgccttccaggagaatgtgggccgccagggcactttcccacacggtattgacattctgaccacagccgattatttcgccgtgggcaaccgtagtaattgttttttggtcatctcggtgtttattgctggcttcccagaatacactcaacccatgattgaccacctcgtcactatgaagatatctcactgggatggtgtgattcgcgagctagctgccagagcactacacaatctggcacaacaagcccctgagttctccgctacacaggtgttccctagactgcttagcatgaccctgtccccggatctccatatgagacatggctctatcctggcgtgtgcggaagtcgcttacgccctctacaagctcgcggcacaagaaaacaggccggtgactgatcacctggatgagcaggcagtccaaggcctgaaacagatccatcagcagctgtatgatcgccagttataccggggcctcggtggccagctgatgcgccaggccgtctgcgttctcatcgagaaattgagcctgtctaagatgccttttcggggcgacaccgtgattgatggctggcagtggttgatcaacgacagtctgtggttgctcgtgggtctaggccgaccttcccgattaccatctgaacggcctgctcccgcggggagccatcgattcaagagttcctatccccattttccccggggccggaaattttgctag

SEQ ID NO: 139296 - DNA, 555 bp, synthetic construct
  misc_feature 1..555: note = Description of Artificial Sequence: Synthetic coding sequence
  source 1..555: mol_type = other DNA
atgaaaggaatccaaagcgatcctcaggccctgggtagcttctcgggcactctactccaaatctttgaagacaatctgctgaacgagagggtctctgtgccactactgaagacactcgaccatgtgttaacacacggctgtttcgacattttcaccacagaggaggatcacccttttgcagtgaaactcctggctctgtgtaaaaaagagatcaagaacagcaaggacatccagaagttgctgagcggcattgctgtcttctgcgagatggtgcaatttccgggcgacgtccgccgccaggccctgcttcagctgtgcctgctgctgtgtcatagatttcccttgatacgcaagaccactgctagccaagtttacgagaccctcctaacatactctgatgtcgtaggagctgacgttctggacgaagtggtgacagtgctgagcgacacagcatgggatgccgagttagcggtggtgagggagcagcgtaatcggttgtgcgatcttctaggggtccctcgcccccagttggtgccacaacccggcgcttgctag

SEQ ID NO: 139297 - DNA, 1584 bp, synthetic construct
  misc_feature 1..1584: note = Description of Artificial Sequence: Synthetic coding sequence
  source 1..1584: mol_type = other DNA
atgtccgacacgctgacggctgacgtgattggtcggcgtgttgaagtgaacggtgagcacgctactgtgcggttcgctggagtggtccctccagttgccggaccatggctcggagtggaatgggataatccagagcgggggaaacatgatggttctcacgagggcacggtttactttaagtgcagacaccctactggaggtagtttcatacgacctaacaaggtgaatttcgggactgatttcctcaccgctattaaaaaccgatatgtgctggaggatggtcctgaggaggacaggaaagaacagatcgttactattgggaacaagcctgtagaaacaatcggattcgactcaatcatgaagcaacagagccagttgagtaagttacaggaagtatcacttcgcaattgtgccgtgtcttgtgccggggaaaagggaggagtggctgaggcctgtccaaacataaggaaggttgacttgagcaagaacctgctctcaagttgggacgaggtcatccacatcgcagaccagctaaggcatctggaggtgctaaacgtgtcagagaacaaactgaaatttcccagtggctcggtgctaacaggaactttgtccgtattaaaggtccttgtgctgaatcagaccggcatcacttgggccgaggtgctgcgatgcgtggcaggctgtcctggtcttgaagagctgtatctggagtcgaataacatctttatctcagagcgcccgacggacgtgctccaaactgtcaaactattggatctcagctccaaccagctgattgacgagaatcagctctacttaattgctcacctgcctagactggagcagctcatcctgtccgatacaggtatcagctctttgcactttcccgatgccgggatcggatgtaagacctcgatgtttccatcgctcaagtacctggtggtaaatgataaccagatctcacaatggtccttctttaacgagcttgagaagctaccatcactgagagcactttcctgtttgcgcaatccactcactaaagaggataaagaggccgagacagcaagattactcattattgcatcgatcgggcaactcaagaccctgaacaaatgtgaaatcctcccagaagagcgccggagggcagaactcgactaccgcaaggccttcggtaatgagtggaaacaagctggcggtcacaaagaccccgagaagaaccgactctcggaagagtttctgacagctcatccgcggtatcagttcctgtgtctgaaatacggcgcccctgaggattgggaactcaagacccagcagcctctcatgctgaaaaaccaactcttgacacttaagatcaagtacccccaccagctggaccagaaagtgctggaaaaacagttgccaggatccatgacgatccagaaggtgaagggcctgctatcccgcctgttaaaggtgcctgtgtccgatttactgctcagctacgagtctcccaaaaaacccggccgggaaattgagctggaaaacgatttaaaatccctgcagttctactcagtggagaatggtgattgcttactggtgcgatggtag

SEQ ID NO: 139298 - DNA, 1584 bp, synthetic construct
  misc_feature 1..1584: note = Description of Artificial Sequence: Synthetic coding sequence
  source 1..1584: mol_type = other DNA
atgtctgacacattgacagccgatgtgatcgggcggagggtggaggtaaatggagaacatgctaccgtaagatttgccggagtggtcccccccgtcgcagggccctggctgggggtggagtgggacaacccagagcgcggcaaacatgatgggagtcatgagggaacagtgtacttcaagtgtcgccatcccacaggcggatcatttattcgacctaacaaggttaacttcggcactgactttctgacagcaatcaagaataggtacgtgctcgaggacggacccgaggaggacaggaaagagcagatcgtgaccattggcaacaaaccggtggagactatcgggtttgacagcattatgaagcagcaatcccagctctcaaaactacaagaagtgagtttgcgaaactgcgcagtgtcttgtgccggggaaaagggcggagtggcggaggcctgccccaacattcgaaaagtggacctctccaagaacctgctgtctagctgggacgaagtcatccacatagctgaccagcttagacaccttgaggtcctgaatgtgtccgaaaataaactgaagtttccgagcggaagcgtgcttacaggcacgcttagcgttctgaaggtgttggtactgaaccagactggcatcacttgggccgaagtgttacgctgtgtggcgggctgccccggactcgaggagctatatttggagagcaataatatctttattagtgagcggcctacagacgtactgcagaccgtaaagcttctcgatctatcgagcaaccagttgatcgatgaaaaccaactgtaccttattgctcacctgccgcgcctcgagcaactgatactgagcgatactgggatctcctccctgcactttcctgatgctgggatcgggtgtaagacctcaatgtttccttcccttaaataccttgttgtgaatgataaccagatatcccagtggtcttttttcaatgaacttgagaaactgcctagcctgcgtgccttgtcatgccttcgaaatcctttgactaaagaggataaggaggccgaaacagcccgcctcttgattattgccagtattggacaactaaagacactgaacaagtgcgagattctcccagaagagcgacggagagccgaacttgattatagaaaggccttcggaaacgagtggaagcaggccggtggacacaaggaccccgagaagaatcgcttgtcagaagaatttctgaccgcacatccacgttaccagtttctgtgtctgaagtatggagcccccgaggattgggagctgaagacccagcagccgcttatgctgaagaaccagctgctgacactcaaaataaagtatccccatcaattggatcaaaaagtacttgagaagcagcttccaggaagcatgaccatccagaaagttaagggcttgctctctaggctgttaaaagtcccggtctccgacctcttgctgtcgtatgaatcccccaagaaaccaggacgggagatcgaactcgagaacgatcttaaaagtctccaattttatagtgttgagaacggagactgccttctggtgcggtggtag

SEQ ID NO: 139299 - DNA, 1737 bp, synthetic construct
  misc_feature 1..1737: note = Description of Artificial Sequence: Synthetic coding sequence
  source 1..1737: mol_type = other DNA
atgagcgacactctgactgccgacgtgattgggcgccgcgtggaagtcaatggtgagcatgccacagttcgcttcgccggagttgtgcctcccgtggcaggaccctggctgggggtcgagtgggataatcccgagagaggcaaacatgatgggtcccacgaaggtaccgtctactttaaatgcaggcaccctaccggggggtcctttatcagacctaataaggttaatttcggcaccgactttctgacggcgattaagaaccgttacgtgctggaagacggtcccgaagaggacagaaaagaacagattgtgactattggcaacaagcctgtagagactatcggattcgacagcatcatgaagcagcagagtcagctgtcgaagttgcaagaggtgtcgctgagaaattgcgccgtgtcctgtgccggcgaaaagggaggcgtggcagaggcctgtcccaacatcaggaaggttgacttatccaaaaatttgttatcttcatgggatgaagttattcacatagcagatcagctgcgccacctggaagtccttaatgtgtcagagaataagttgaagtttccctcgggttccgttctaaccggcaccctgtccgtgctgaaagtgctggtgctcaatcagactggcataacatgggccgaagcacacgcacaatgcgggggtagccggcacggacttgacatgcagaaagatgcatcgaagtttgtggatctatgcgttttgcagaagtgtagcacatccaattgcataatttctgccaaagatcatacatcaatgcgaatgaacgttgccaaagtgttgaggtgtgtggccggctgccccggcctggaagagctgtacctggaatcaaataacatcttcattagtgagagaccaaccgatgttctgcagacagtgaaactgctcgacttaagtagcaatcagctgattgatgaaaaccagttatatcttatcgcccacctccctcgtttagagcaattaatactcagcgacaccgggatttcaagcctgcacttccctgacgccggcatcggctgcaagacctcaatgtttccctccctgaagtacctggtggttaacgataatcagatcagtcagtggtccttttttaatgagctcgaaaagttgccctcactgcgggctctctcttgccttcgcaaccccctgaccaaagaggacaaggaggccgagaccgctagactgctcatcattgcttctattggtcagctcaagactctgaacaaatgcgaaattttgcccgaagaaaggcggagagcggaactcgactacagaaaggcattcggcaacgagtggaagcaggccggcggacataaggaccctgagaagaatcgattgagcgaggagtttcttacagctcatccacgctatcaatttctgtgtcttaaatacggtgccccagaggattgggagctcaaaacacaacagcctctcatgctcaagaatcagctgctgacactgaaaattaagtacccacatcagctggatcagaaggtactggaaaaacagcttccaggatccatgaccatacagaaggtcaagggattgctgtccagactgctgaaggtgcctgtaagcgacctgttgttgagttatgaatctcccaaaaaaccaggccgggagatagagttagaaaatgacctaaaaagcctgcagttctattcggttgaaaacggggactgtctcctggtgagatggtag

SEQ ID NO: 139300 - DNA, 2001 bp, synthetic construct
  misc_feature 1..2001: note = Description of Artificial Sequence: Synthetic coding sequence
  source 1..2001: mol_type = other DNA
atgatccacgaacttttattggctctgtcaggctacccaggatccatctttacttggaacaaacggagtgggttgcaagtgagtcaggacttcccttttctccacccgtccgaaacaagcgtgcttaaccggctgtgccgcttggggaccgattatattcgctttacggagtttattgaacagtatactggacatgtccagcaacaggatcaccatccaagtcagcagggacagggcggactgcacggcatctacctgcgggccttctgcactgggttggactctgtattacaaccgtaccggcaggcactgctcgatcttgagcaagaattcttaggcgaccctcacctttcaatctcccacgttaactattttctggaccagtttcagcttttgtttccatcagtaatggttgtggtcgagcaaattaaatcacagaagatccatggatgccagattttagaaaccgtttacaagcactcttgcggtggactgccaccagtgagaagtgctctggagaagatcttggccgtgtgtcacggcgtgatgtacaagcaactctccgcatggatgctgcatgggttgctgcttgaccagcacgaagagttctttattaagcaggggccctcctctgggaatgtctccgctcaacccgaggaggatgaggaagacctggggattgggggtctgacaggtaagcaacttagagaactgcaagacctccgtctgatcgaggaggagaatatgcttgcaccatccctaaagcagtttagtctcagggtggaaatcctcccatcatatatacccgtaagagttgctgagaaaatcctgtttgtgggcgagagcgttcagatgttcgaaaaccaaaacgtcaatctgacgcgcaaaggcagcattctgaagaatcaggaggacacattcgccgccgagctgcatcggctaaagcagcagcctttgttcagccttgtcgatttcgaacaggtagtcgacaggatcaggtcgacagtcgcggaacacctatggaagctcatggtcgaggagagcgacctgctcggccagctcaagatcataaaggacttctaccttctgggccgaggcgagctgtttcaggcctttatcgacacagcgcagcacatgcttaagactcctcccacagcagtgacggaacacgacgttaatgttgctttccagcagagcgcacacaaggtcttacttgacgacgataatttactacccctccttcacctgaccatagagtaccatggcaaagagcataaggatgccactcaggcacgcgaaggcccttcacgagaaacatctcctagggaagctcccgcttcaggctgggcagctcttggactgtcgtacaaagtccagtggcctctccatattttgtttacacccgctgtgcttgagaagtacaatgttgtcttcaaatacctgcttagtgtgaggcgcgttcaggccgagttacagcactgctgggccttgcagatgcagaggaaacatctgaaaagtaatcaaaccgatgcgattaagtggagactgagaaaccacatggcatttctggtggacaatttgcagtattacctgcaggtcgatgtgctggagtcacagttctcccagctcctgcatcagattaattcaacaagggacttcgagagcatccgattggctcatgatcacttcctgtcaaatctcctagcccagagcttcattcttctgaaaccagtgttccattgcttgaatgagatcctggacctctgtcactctttttgtagtttggtgagtcagaatctgggcccattagatgagaggggggcagcccagctatcaatattagtgaaaggattttccagacaaagctccttgctgttcaagattttgagttcagtcaggaatcaccagatcaatagtgatctggcccaactactgctgcgactcgattacaataaatattacacccaggccggcggcactcttgggtctttcggcatgtag

SEQ ID NO: 139301 - DNA, 660 bp, synthetic construct
  misc_feature 1..660: note = Description of Artificial Sequence: Synthetic coding sequence
  source 1..660: mol_type = other DNA
atggctgataaagcaaaacctgcgaaggctgcgaataggacgcctcctaaatctccaggcgacccttctaaagatagagccgctaagaggttgtcgttggaatctgagggagctggtgagggagcagctgcctcacccgagctgagcgccctggaggaagccttccgccgatttgccgtgcacggcgatgcacgagccactggaagagagatgcacggtaagaactggagtaaactgtgcaaggattgtcaggtaatcgatggaagaaacgtgacagtaacggacgtagacattgtttttagtaagatcaaggggaagtcatgccgcactataactttcgaacaattccaagaagctctcgaggaacttgccaagaagcgtttcaaagacaagagctctgaagaggccgtgcgcgaagtgcaccggctgatcgagggcaaggctcccatcatatcgggagttaccaaggcaattagcagcccaactgtaagtcggctgactgacactaccaagtttacaggtagtcataaggagagatttgaccctagtggaaagggtaaggggaaggccggacgggtggatctggtggacgaatccggctacgtatctggatataaacacgcgggaacatacgaccagaaggtccaaggtggcaagtag

SEQ ID NO: 139302 - DNA, 1071 bp, synthetic construct
  misc_feature 1..1071: note = Description of Artificial Sequence: Synthetic coding sequence
  source 1..1071: mol_type = other DNA
atgagtaagttgtggcggaggggttctacatcgggagcgatggaagcccccgaaccaggtgaagctttagagctgagcttagccggggcgcatggccatggagtgcacaaaaaaaagcataagaaacacaagaaaaagcacaagaaaaagcaccaccaggaagaagatgccggacccacccagcccagccccgcaaaaccacaattgaagctgaagattaaactgggaggccaggtcctcggcacgaagtccgttccaactttcacagtgatcccagaaggaccccggtctccctctccattgatggttgtggacaatgaagaagagcccatggagggagtacccctggagcaatatagggcatggctcgacgaggacagtaacctgtctccgtcaccactgcgcgatctcagtggaggtcttggaggccaagaagaggaagaggagcagaggtggctcgatgctctggaaaagggtgagctggatgataatggagatctgaagaaggagatcaacgagaggctgttaaccgcacggcagcgggccctgctgcagaaggcacgcagccagcctagcccgatgctccccctgccagtggcagaaggatgtcccccacctgcccttactgaagaaatgctgttgaaaagagaagaacgggcccggaagagacggctgcaggccgccagacgcgcagaggagcacaaaaatcagacaattgagcggctgacaaagaccgcggcgacctctggaaggggtggacgtggaggtgcacgcggagaaagacgcggaggtagggccgctgctccagctcccatggtgcggtactgtagtggtgcgcagggctcgactctgagctttccccctggcgtacccgcgcccacggccgtctcccagaggccaagccctagcgggccacccccccgttgctcggtcccaggatgccctcaccctaggcgctatgcatgctcacggaccgggcaagctctgtgtagcctccagtgctacaggattaacctgcagatgcggctggggggcccagagggccccggctccccacttctggccacctag

SEQ ID NO: 139303 - DNA, 1272 bp, synthetic construct
  misc_feature 1..1272: note = Description of Artificial Sequence: Synthetic coding sequence
  source 1..1272: mol_type = other DNA
atggctggcaaagtcaaatgggtaaccgatatcgagaaaagcgtgttgatcaataactttgagaagcgcgggtgggtccaagttacggagaacgaggactggaacttttattggatgtctgtacaaactatccggaacgtgttcagcgtagaggctgggtaccggctctccgatgaccaaattgtaaaccacttcccaaaccattatgaactcacccgaaaagatttgatggtcaagaatattaaacggtaccgaaaagagctggaaaaggaagggtccccactagcagagaaggacgagaacggcaaatacctgtatctggattttgtgccagtcacctatatgctgcccgcggattataacttgttcgtggaggaatttagaaagtccccctctagcacttggatcatgaagccctgcggcaaggcgcaggggaaggggatcttcctcataaacaagctgtctcagataaaaaagtggtctcgcgacagtaaaacatctagctttgtaagccagtctaacaaagaagcttacgttatctccctgtacataaacaaccctctcctaataggcggcaggaaattcgatcttcgtctttatgtgctcgtgtctacctacaggccactgcgctgctacatgtataagcttggcttttgtagattctgcacggtgaagtacacaccatccacctctgagcttgacaatatgtttgtgcaccttaccaacgtggcaatacaaaaacacggggaggattacaatcacattcatggtggtaaatggacagtgtcaaacctgcggctgtacttggagtccacacggggcaaggaggtcacaagcaagctcttcgatgaaatccactggataatcgtccagtctctgaaagccgttgctcctgtgatgaacaatgacaagcactgttttgaatgctatggttacgacatcatcattgacgataagttgaagccatggctgatcgaggtcaacgcatctccttctctgacatcaagcaccgccaatgacaggatcctcaaatataatctcatcaacgataccctgaacatcgcggttcctaacggggagatcccagactgcaagtggaacaagtctccgccaaaagaggtcctggggaactatgaaattctgtatgacgaggagctcgcacaaggtgatggagctgatcgcgaactcagaagtagacaagggcaatccttaggaccccgggccggacggtcacgagactccggccgggctgtgctgacaacgtggaaatag

SEQ ID NO: 139304 - DNA, 1185 bp, synthetic construct
  misc_feature 1..1185: note = Description of Artificial Sequence: Synthetic coding sequence
  source 1..1185: mol_type = other DNA
atggccggcaaggtgaagtgggttaccgatatcgagaagagcgttctgatcaacaattttgaaaagaggggctgggttcaagtcacagaaaacgaagattggaatttctactggatgtcagtacaaactattcggaacgtttttagtgttgaagccggctatcgattatctgacgaccagatcgtgaaccattttccaaaccactatgagttgactcggaaagatctgatggtaaaaaacatcaaacgttacagaaaagagcttgagaaggagggaagccctcttgctgagaaagacgagaatgggaaatatctgtacctggattttgtacctgtgacttacatgctgcctgcggattataatttattcgttgaagaattccggaagtccccgtcatcaacatggataatgaagccttgtgggaaagcccagggaaaaggaattttcctcatcaacaaactgtcccagattaaaaaatggtctcgggatagtaagacttcttcttttgtctcgcagagtaacaaagaggcctacgtcatttcactctatattaataacccattattgatcggggggcgcaaatttgatctgaggctgtatgtactggtcagtacctaccggcctctgagatgctacatgtataagctaggtttctgccgcttttgtaccgtcaaatacactccctcgacgagcgaacttgacaacatgttcgtccatctgacaaacgtggctatccagaaacacggagaagactataatcacattcatggcggaaaatggacagtttccaacttaagactatatctggagagcacacgggggaaagaggttacttccaagctgtttgatgagattcattggatcatagtgcaatcattaaaggccgttgcagttaatgctagccctagcctcacttctagtacagctaatgatcgaatcttaaaatataacttgatcaacgacaccctgaacatcgctgtgcctaacggtgagattcccgactgtaagtggaacaaatcccctcccaaagaagtccttggcaactatgaaatactctacgacgaggaactggcccagggggacggcgctgacagggagctcagatctcgccagggacagtccctcggtccccgggctggccgctctcgcgacagcggcagggcggtgttaacgacgtggaaatag

SEQ ID NO: 139305 - DNA, 180 bp, synthetic construct
  misc_feature 1..180: note = Description of Artificial Sequence: Synthetic coding sequence
  source 1..180: mol_type = other DNA
atggcaggcaaggtgaagtgggtgactgacattgaaaaatcagtgctgatcaataactttgaaaaacgcggctgggtgcaagtgaccgagaatgaggattggaacttctactggctactagacctgccggaatttaggtacaggagctgtctgaacgagttcccagactttcgcgtctag

SEQ ID NO: 139306 - DNA, 1068 bp, synthetic construct
  misc_feature 1..1068: note = Description of Artificial Sequence: Synthetic coding sequence
  source 1..1068: mol_type = other DNA
atgcctcaccagcccaccatcctcctgaacacagtgagtgcatcagcatccccctgtttacatccaggtgctcaaaatattccttccccaaccgggctccctaggtgccgttctggttcccacacaatcggaccgttctcgtctttccagtcagctgcccacatctatagtcaaaaactcagtcggccaagctcggcaaaggctgccggtagctgttatcttaataaacaccattccggcattgccaagactcaaaaagaaggggaagacgctagtctgtatagcaaaaggtacaaccagagcatggtcaccgccgagctgcagcgccttgctgagaagcaggccgcgaggcagtattcaccaagtagccatatcaatctcctcactcagcaggttaccaatcttaacctggctacagggattattaatcgcagctctgcaagcgctccccctaccttgagaccgattatctctcccagcggccccacgtggtcaacacagtctgaccctcaggctccagaaaaccatagctccagccccggctctagatcacttcaaacaggcgggtttgcgtgggaaggcgaggtggaaaataatgtgtattcacaagctacaggtgtggtgcctcagcacaaatatcacccgaccgcgggatcttaccagctgcagtttgccctgcaacagctggaacagcagaagctacaatccagacaactactcgaccagtccagggcacggcaccaggctatttttggctcccagactctgccaaattcaaatctctggaccatgaataatggagctggctgcaggatctcatctgctaccgctagcggtcaaaagccaactacgctgccccagaaggttgttccgcccccaagttcatgcgcttccttagtgcccaagccgcctcctaaccacgagcaagttctgcgcagagctacatcacagaaggcctctaaaggcagttcagccgaaggccagctcaacgggcttcagagctctctgaatccagctgccttcgtgcctataacgtcctccacagtaaacagtcacacagcactgtag

SEQ ID NO: 139307 - DNA, 3846 bp, synthetic construct
  misc_feature 1..3846: note = Description of Artificial Sequence: Synthetic coding sequence
  source 1..3846: mol_type = other DNA
atgcctatagtcatggccagggatttagaggagactgccagcagttccgaggacgaagaggtgataagccaggaggatcatccttgcatcatgtggaccgggggatgtagacgtattccagtgctagtctttcacgccgacgcaatactcacgaaagataataacattagggtaatcggtgaaaggtaccatttgtcgtacaagattgtccgtacagattccaggctggtgaggtccatcctgaccgcccatgggtttcatgaagtgcacccctcaagcactgactacaacttaatgtggaccgggagtcatttgaagccctttctcctgcggaccctgagtgaagcccagaaggtgaatcactttccaaggagctacgaactcacacggaaggacaggctgtacaaaaatatcattcgaatgcagcacacacacggtttcaaagcttttcacattcttccacaaacatttctccttccagctgagtatgctgagttctgtaattcttacagtaaagaccgcgggccctggatagtgaaaccggtcgcctcgtcgaggggtcgcggcgtgtaccttataaacaacccgaaccagatcagcctggaggagaacattctcgtctcccgttacataaataacccactgttgatcgacgacttcaagttcgacgttcgactttatgtcctggtgacatcttacgaccccctcgtgatttacctatacgaggagggcttagccagattcgctacagttagatacgatcagggcgctaaaaacattcgaaaccagtttatgcacctaaccaactactcagtcaataaaaagagcggtgactatgtgtcctgcgatgacccagaagtggaagactatggcaataagtggtccatgagcgccatgctccgctaccttaagcaggagggccgggacaccactgccctcatggcacatgtggaggatttgattattaaaactataatatctgccgagcttgccatcgccactgcttgtaagacatttgtgccacatcgatcaagttgctttgaactctacggtttcgacgtcctaatagacagcactctcaagccatggctgcttgaggtcaatctgagccctagtttggcctgcgatgctcctttggatctgaaaatcaaagccagtatgatctccgatatgttcacagttgtggggtttgtctgtcaggatccagctcagagggcgtccacccgcccaatctacccaacctttgagtcgagccggcgcaatccctttcagaaaccccagcgctgccgtccattgagcgcctcagatgcagaaatgaagaacttagttggcagtgctagagagaaggggcccgggaagctgggagggtcagtcctgggattaagcatggaagagattaaagtactccggcgggtaaaagaggagaatgatcgcaggggaggtttcatccggattttccctacaagtgagacgtgggagatctatggttcctatctggaacataagacttccatgaattacatgttggccacacgtctcttccaggacagaatgacagctgacggcgctcctgagcttaagattgaaagtcttaattctaaggccaagctgcatgctgccctgtacgaacggaagctgctgtcccttgaagtgcggaaaaggaggcgacggtctagcagactgagggccatgaggccgaaatatccagtgataactcagccggccgagatgaatgtgaagactgaaaccgaatctgaggaggaagaggaagtcgcactggataacgaagatgaagagcaggaggcctcacaggaagaatcagccgggttcctcagggagaatcaggcaaagtatacccctagcctcacagctctcgtagaaaacaccccaaaagaaaatagcatgaaggtgagagaatggaacaacaagggggggcactgctgcaaacttgagactcaagagttggaaccaaagtttaatctgatgcaaatattacaagataatggcaacctaagcaaaatgcaagctcgaatagcctttagtgcctacctgcagcacgtgcaaatcagactcatgaaagatagtggggggcagaccttttcagcaagctgggccgctaaagaagatgagcaaatggaactcgtggtgagattccttaagcgcgccagcaataacttgcagcattctctcaggatggtgttgccttctagaaggctcgccctgctggaacggaggcggattttagcccatcagctaggggatttcattatcgtatacaacaaagagactgagcagatggccgaaaaaaaatccaagaagaaagtggaggaagaagaggaagatggagtaaatatggaaaacttccaagagttcatccggcaggcctcagaggccgaactggaagaggtactcaccttttacactcagaagaacaagtccgctagtgtcttcctgggaacccactcaaagatatcaaaaaataacaataactacagtgactccggcgcaaaaggcgaccaccccgagaccatcatggaggaggttaagattaaaccccccaagcagcagcagacaaccgagatacactcggataagctctccagattcaccacgtcagccgagaaggaggccaaactcgtttactcgaattcctctagcggtcctacagcgacattgcagaaaatccctaacactcaccttagcagcgtgacaacaagtgacctgagccccggcccctgtcaccacagctcccttagccagatcccgtccgcaattccgagtatgcctcatcagcctaccatcctcctgaacactgtgtctgcatccgcttcaccatgtctgcatccaggcgctcagaatataccaagtcctacaggcctaccccggtgtcggtctggatcacacaccatcggtccattcagcagctttcagtctgcagcccacatttacagtcaaaaattgtccaggcccagctctgcaaaggccggaagctgttatctgaacaagcatcattccggaatcgctaaaactcaaaaagagggcgaagatgcatcgttgtatagtaaaagatacaatcagagcatggtcacggcagaattacagagattagccgagaaacaggccgcaaggcagtatagtccctcatcgcacataaatctgctgacccaacaggtgactaatttgaatctggcaacaggtataattaaccggtcgagcgcctcagcgccccctaccttacggccgatcatttctcccagtggtccaacatggagcacccagtctgacccacaagctcctgagaatcacagcagctcacctggatcaagatcactgcagaccggtggatttgcgtgggaaggagaggtcgagaacaacgtgtactcccaggcaaccggagtggtgccccagcataagtatcaccccaccgctggaagttaccagctccaattcgccctccaacagcttgagcagcaaaagttgcagtcccggcagctgctcgatcagtctcgcgccaggcaccaggcaatattcggtagtcaaaccctgccgaactcaaatttatggaccatgaacaatggggccgggtgtcgcatctcatcagccacagcgagcggccaaaaacctacaaccttaccacagaaagttgttccacccccttccagctgcgcatccctggtgccgaagcccccacccaatcatgagcaagttttgagacgggctacctcccagaaagcttctaaaggctcctcggcagagggccagctgaacgggctccagagcagtctgaatcccgcagcgtttgtgcccatcacaagcagcactgatccggcccacactaagatctag

SEQ ID NO: 139308 - DNA, 2454 bp, synthetic construct
  misc_feature 1..2454: note = Description of Artificial Sequence: Synthetic coding sequence
  source 1..2454: mol_type = other DNA
atgaaggagatcaaggttctacggcgtgtcaaggaagagaacgaccgaaggggtggctttatcaggatctttccaaccagtgagacatgggaaatttacggctcttatctggaacacaagacttctatgaattacatgttggcgacaagactgtttcaagatcggggaaatcctcggcgctccctcctaacaggccggacaaggatgacagccgacggcgcacctgagcttaaaatcgaatctcttaactccaaagctaagttgcatgctgccctgtatgaacgaaagcttctgtcactggaagtgaggaaaaggaggaggaggtctagcaggctgagagccatgcggccgaagtaccctgttatcactcagcccgctgagatgaatgtcaagaccgaaacggagagcgaggaagaggaagaggtcgcgctcgacaatgaagatgaggagcaggaagcctcccaggaagaaagcgcgggtttccttagggagaatcaggctaaatatacaccttcattgaccgcactggttgaaaatactccaaaagagaatagtatgaaagtgagagaatggaataataaggggggccactgctgtaagctggagacccaggagctggagccaaaatttaatctgatgcagattctccaggacaacgggaacctgtcaaaaatgcaggcgcgaattgcgtttagtgcctatctgcagcacgtgcagatacggttgatgaaggactcaggggggcagactttctcagcatcatgggccgccaaggaggatgaacaaatggagctagttgttagattcttaaagcgggcctcaaataatttgcagcatagcctaagaatggtattaccaagcaggagacttgccctgctggaaaggcgtcggatattagcccaccagttgggagacttcatcatcgtgtacaataaggagactgagcagatggcggagaaaaaatcaaaaaagaaggtagaggaggaggaagaagatggtgtgaacatggaaaacttccaggaattcatccgtcaggcttccgaggccgaactcgaagaggtgctaacgttctacactcaaaaaaataaatcagcatcagtgtttcttgggacacactcaaagattagtaagaacaataataactattcagactcgggcgcaaaaggtgaccaccctgagaccattatggaggaagtcaaaatcaagccccctaagcagcaacagaccactgagatccacagcgacaaactgagcagattcacaacatctgccgagaaagaagcgaaactggtctatagtaacagttcaagcggacctaccgccaccctccagaaaatcccaaacactcacctgagtagtgtgactaccagtgacctgtcaccagggccatgccaccattcatccctgtcacagattccctctgccattccaagtatgccccaccagccaaccattctgctgaatactgttagcgcatccgcgtcgccttgtctgcacccgggggcacagaatattcccagccctaccgggctgcctcgttgccgctctgggagtcacacaatcggccctttctcttcttttcagtcagcagcccatatttattcacagaagctgagtagaccctccagcgcgaaggcggggtcctgttacttgaacaagcaccattccggcattgcaaagacccagaaagagggagaagatgcaagcttatattccaaacgttacaatcagagcatggtcacggcagagctgcagagactggcagaaaagcaagctgcgagacaatacagtcccagttctcatattaatctccttacgcaacaagtgaccaatttgaatctagccaccggcatcattaaccggagctccgccagcgccccccctaccttacgtccaattatcagcccttcgggacctacctggagcactcagtccgaccctcaggcaccagaaaaccactcgtcaagccctgggagccggtccctccagacagggggatttgcttgggagggagaggtggaaaataacgtctattcccaggccaccggggtggtcccccagcataagtatcacccaaccgccggcagctaccagctgcagtttgcactccagcagctggaacagcagaagttgcagagccgccagctcctggaccaaagccgggcgcggcaccaggccatctttgggtctcaaacccttcccaattccaacctatggacaatgaacaatggtgccggatgcaggatttctagcgcaaccgcatctggacagaagccaacaacccttccacagaaagttgtgccaccacccagctcctgtgcctcgctggtacccaaacccccacccaaccacgagcaggtgctacggcgtgccaccagtcagaaggcctccaacaccagattccggagctcattccagaactacctgtggtacttcttccaagctgtgtcgtag

SEQ ID NO: 139309 - DNA, 2337 bp, synthetic construct
  misc_feature 1..2337: note = Description of Artificial Sequence: Synthetic coding sequence
  source 1..2337: mol_type = other DNA
atggctcatgtcgaggatctgatcatcaagaccatcatttcagctgagttagctatagcgacagcctgtaagacatttgtccctcacaggtcgtcttgtttcgaactgtatggatttgacgtgctgatcgactcaacccttaaaccctggctgctggaagtgaacttaagcccttcactagcttgtgacgcaccgctggacttgaagattaaagccagcatgataagtgatatgtttacggtggtcggttttgtttgccaggatcctgcacagagggcatcaaccagacctatctatcctacttttgaatctagccgacgaaaccctttccagaagccacaaaggtgcagaccactgagtgcttcagacgctgagatgaaaaaccttgtcggtagcgcccgggagaagggaccaggcaagctgggaggcagtgttttgggtctttcaatggaagaaatcaaggttttacggcgggtgaaagaggagaatgacagaaggggcggcttcatacgaatttttcctacatcagagacctgggagatctatggaagctatctcgagcacaaaaccagtatgaactatatgctagcgactagactctttcaggacaggatgaccgctgatggcgcaccagagctgaagatcgaatcgctcaattctaaggcaaagctccatgccgccttatatgagcgaaaattgctctctctcgaggtgagaaaaagaaggagacgcagcagcagactcagggccatgagaccaaagtaccctgtcatcactcaacctgcagagatgaacgttaagacagagaccgagtcggaagaggaagaggaggtggccctcgataacgaagacgaagagcaggaggccagccaggaagagtccgccgggttcttgcgcgagaatcaggccaaatacacaccatcattaacggctctcgtggagaacacaccgaaggagaattctatgaaggtgagggaatggaacaataaaggcggacactgttgtaagcttgaaacacaggaactcgaacccaagtttaacctgatgcagatccttcaggacaatgggaatttgtccaaaatgcaggctaggatagcattctcagcttatttacagcacgtgcaaatccggctcatgaaagactctggagggcagacgttcagtgcttcctgggcggctaaggaagacgagcagatggagctggtggtgagatttctgaaaagggcgagcaacaacctccagcactctctgcgaatggtcttgccgagccgtcgactggctctgctagagcgcagacgcatactcgcacaccagctcggagatttcataatcgtctataacaaggagaccgagcaaatggccgaaaaaaaaagtaagaaaaaggtggaggaagaggaagaagacggagtgaacatggagaattttcaggagttcattcggcaagcctccgaggccgagttagaagaggtgctcaccttttatacgcagaagaataaaagcgcaagtgtattcttggggactcattcgaagatatctaagaacaataacaactactccgattctggcgctaaaggcgaccatcccgaaacaattatggaagaggtaaagattaaacctccaaaacagcaacagactactgagatccatagtgacaagctgagtcgctttacgacatcagcagaaaaggaggctaaattggtatattccaacagttctagtggcccaaccgcgactttacagaagattcctaacactcacctgagctcagttactactagcgatctgtcacctggtccatgtcaccatagctctctgtctcaaatcccaagcgccatacctagcatgcctcaccaacccactattctcttgaacacagttagtgctagtgcaagcccatgtctccaccccggcgcccagaatatccccagcccaactggcttgcctagatgcagatctgggagccatacaatcgggccatttagctcttttcagagcgcggctcacatctactcccagaaactgtcgagaccttcgtcggccaaagctgggtcatgttacctgaacaaacaccacagtggcatcgcaaaaacgcaaaaagagggagaggatgcatccctgtactccaaaaggtataaccagtctatggtcactgcagaattgcaacgcttggcggagaaacaggccgcacgtcaatattcaccaagttctcacaccgatccttggaaatacgaccgaagtattagaatgtgttcaccgctcaatatcctcgaaccagaatttaaaaagtacctgatgggcatctatagccctcatagcagcaagaagaaaaagaaatag

SEQ ID NO: 139310 - DNA, 1755 bp, synthetic construct
  misc_feature 1..1755: note = Description of Artificial Sequence: Synthetic coding sequence
  source 1..1755: mol_type = other DNA
atgaggatcggtacccctacagccgggcccgggccgagcgcagtgatggaaggctgcttaggagtggccgagctgcggaagctgtctacattttcagcctacctagaggaccactcatataacgtcgaacagatatggagggatattgaagacgtcattatcaagacacttattagtgcgcatccaattattaggcacaattaccacacctgctttccaaaccacaccttgaattcagcctgctttgaaatccttggatttgatattttgctggatcacaaacttaagccatggttgctggaggtcaaccattctccctcgttctctacggactcccggctggacaaggaggtgaaggacgggctgttgtatgatactttggttcttatcaacctcgaaagttgcgacaagaagaaagtgttggaggaagaacgccagcgcggccagtttctgcagcagtgttgttcccgggagatgaggattgaagaggccaagggatttagggcagttcagctgaagaaaacagaaacatacgaaaaagagaactgcggcggctttcgcctcatttaccccagcttaaatagcgaaaagtacgagaagttcttccaggataataacagtctattccaaaacactgtcgcctcccgagctagggaggagtatgcaaggcaactgatacaagaactgcggttgaaacgtgagaagaagcctttccagatgaagaaaaaggttgagatgcagggcgaatcagccggcgagcaggtccgtaagaaggggatgcgcggttggcaacagaagcagcagcaaaaagacaaggcagcaacacaggccagcaaacagtacatccagccccttacgttggtctcttatacacccgacttactactgagtgtgcgcggtgagagaaagaacgagaccgactcttctctgaatcaggaagcccctaccgaggaagcctctagtgtgtttccaaagctcacgagtgctaagccatttagtagcttgccggatctgcgcaatatcaacctgtcatctagcaaactagaaccttctaaaccaaacttcagcatcaaagaagctaagtcggcctctgccgtgaacgtgttcacaggcaccgtgcatctgaccagtgtcgaaactactcccgagtctacaactcagcttagtatctccccaaaaagtcctcccacactcgcagtgactgccagctccgaatactcaggtcctgaaacggatcgcgtggtctctttcaaatgtaaaaagcagcagacaccgccgcaccttacccaaaagaaaatgcttaagtcattcctccccacaaagtcgaagagcttttgggaaagcccgaatacaaactggaccttgctgaaatccgatatgaataagccccacctcattagcgaactgttgactaagctgcagttatccggcaagttgtctttttttcctgcgcattacaacccgaagctcggaatgaacaacttgtctcagaaccctagcttgccaggggagtgccacagtaggagtgactcctctggagaaaaaagacagcttgatgtgtcgtccctactgctccaaagtccgcagtcatacaatgtgacactacgggatcttctggtaatcgctactccggcacaactcgacccaaggccttgccgcagccatgcctctgcgatgagagatccttgtatgcaggaccaggaggcgtactctcattgtctgattagcgggcagaaggggtgcgagaggagctag

SEQ ID NO: 139311 - DNA, 2532 bp, synthetic construct
  misc_feature 1..2532: note = Description of Artificial Sequence: Synthetic coding sequence
  source 1..2532: mol_type = other DNA
atgcctcaatgtcccacacttgaaagtcaggagggtgaaaatagtgaggaaaaaggcgactcctcgaaggaagatccgaaagaaacagtggccctggccttcgtgagggagaatccaggtgctcagaatggactgcagaatgctcagcagcaggggaagaagaagaggaagaagaagaggctggtcattaacctatcgtcttgcaggtacgagtccgttcgcagagcagcccagcagtatggtttccgcgaaggcggagaggacgatgactggacgctctattggacagattactccgtcagcctggagcgagtgatggagatgaaaagctaccagaagattaatcattttcccggcatgagtgaaatttgtaggaaggacctgctggccagaaatatgagccgcatgctgaaaatgtttcctaaagattttaggttcttcccaagaacctggtgcctgcctgctgactggggagacttgcagacctactcccggagtcggaaaaataaaacttacatctgtaaaccagattcagggtgccaaggaaaggggatcttcatcacaagaactgtaaaggaaatcaagccaggggaagacatgatatgtcagctctacatttccaagccgttcataattgacggtttcaagttcgatcttcgcatttacgtcctggtcacctcatgcgatccactgaggatttttgtgtataatgaaggattggccaggttcgctacgaccagctactcaagaccttgtacagataacctcgacgacatttgtatgcatctgaccaattacagcattaacaagcattcgtccaactttagccgtgacgcccatagtggaagtaaacggaagttgtccacgttcagtgcctacctggaggaccactcttacaatgtcgagcagatctggcgcgatattgaggatgtgatcatcaaaacactgatctcagcacatccaattattcgccataactatcatacgtgctttccaaatcatactctaaacagtgcttgctttgaaatcctcgggtttgacattttactcgatcacaaactgaagccatggcttttggaagtaaaccatagcccttctttttctacagactcccgacttgataaggaagtgaaagatgggctactctacgataccctcgtgctaattaacctggaatcctgcgataagaagaaggtcctagaggaggaaagacagcgaggtcagttcctacaacagtgttgcagccgcgagatgagaattgaggaggctaaaggatttagagcagtgcagctgaagaagactgagacctatgaaaaggagaactgtggaggctttcggctgatctatcccagcctgaactctgagaaatatgagaaattttttcaggacaataactctctgtttcagaacaccgtggcttctagggcaagggaggaatacgctcggcagctcattcaggaattgagactgaagagagaaaagaaaccattccaaatgaaaaaaaaggtcgagatgcaaggagagtcggctggtgaacaagttagaaagaagggcatgcgaggctggcagcagaagcagcagcagaaagataaagccgccactcaggctagtaaacagtacattcagcctcttaccttagtgtcttatactccagatctgctgctcagcgtgagaggcgaacgcaagaacgagaccgactctagcctgaatcaagaagcccctacagaggaagcttctagcgtttttcccaaacttacctccgccaaaccattctctagcctccccgatctccgaaacatcaatttaagctcttcaaagctcgagccatctaagcccaattttagtatcaaagaggccaagtcagcgtctgcagtgaatgttttcaccggtacagtccatctaacatcggtcgaaactactccagaaagcacgacacagctgagcatctctcctaagagccctcctacattggccgtgacagcatcgtccgagtacagtggtcctgaaacagaccgcgtggtgagttttaaatgcaaaaaacagcagacccccccgcatctgactcagaaaaaaatgctgaagagctttctgccgacaaaatctaaaagtttctgggaaagcccgaacacgaactggactctcttgaagtccgacatgaacaagcctcatcttatctccgaactcctgactaagctgcagctatccggcaaactgtcattttttccagcacactacaaccccaaactgggaatgaacaatctgtcgcaaaatccatccttgccaggcgagtgccattcacgctcagatagttccggggaaaagcgtcagctggatgtgtccagcctgctgctgcagtctccgcagagctataatgtcaccttacgggacctgctcgtgatcgccacacccgcccagttggacccaagaccatgccgcagccacgcctcggcaatgagagacccctgtatgcaagatcaggaagcatatagtcactgtctgatcagcggacaaaagggctgcgagaggagctag

SEQ ID NO: 139312 - DNA, 558 bp, synthetic construct
  misc_feature 1..558: note = Description of Artificial Sequence: Synthetic coding sequence
  source 1..558: mol_type = other DNA
cagcccatgggagcgctcctgctgcatcctagtagaagggggcccgccggcgttgtggcgagttggacttcatcacctgctggtagagacgggggcgttggaatcgcaggtgcgtggtatttcccaagggccagcagccaagctcgggaaatgccccagtgtcctacactggaaagccaggagggagagaacagcgaggagaagggagattcttctaaggaggacccaaaggagacagtggctctggcattcgtgagagagaaccccggcgcccagaacggactgcaaaatgctcagcagcagggcaaaaagaagcggaaaaaaaaacggatgcctctcaagaacagtagaaaacggagattcccttgtttcaagaaagcactgatttgcccagggaatctggttcgcctccagtacgactcgaccatattgacgtaccaggatcccacagcggcctgtgctttccagttcctgttcaatatttccccctgtctggcaccctttagactcatcgacgaaggtaagctcgtccattttctgatacatagtttcccatag

SEQ ID NO: 139313 - DNA, 1710 bp, synthetic construct
  misc_feature 1..1710: note = Description of Artificial Sequence: Synthetic coding sequence
  source 1..1710: mol_type = other DNA
atggagggctgcctcggggtagctgagctgagaaagctgagcaccttctccgcgtaccttgaggaccattcgtacaacgtggagcagatctggcgggatattgaggacgttatcattaaaacactgatttctgctcacccaatcatccgacataactaccatacctgctttcccaatcacactttgaatagtgcctgctttgaaattctgggctttgacatcctgctcgaccacaaattgaagccttggctgctggaggtgaatcactctccctctttctccacagatagcagactcgataaagaagtaaaggacgggctcctgtatgacaccctggtactgataaacctcgaaagttgtgacaagaaaaaagttcttgaagaagaaagacagcgcggacagtttttacaacagtgctgttctcgagagatgaggatcgaagaggcgaaaggcttcagggccgtccaattgaagaaaacggagacatacgagaaggaaaattgcggcggatttcggttaatctatccaagccttaattccgagaagtacgaaaaattcttccaggacaataacagccttttccagaataccgtggcatcacgcgcaagggaggaatatgcacgccagctgattcaggagttgcggttaaaaagagaaaagaaacccttccagatgaagaagaaggtggaaatgcaaggcgagagcgctggcgagcaagtgcgtaaaaaaggtatgcgcgggtggcagcagaagcagcagcagaaagacaaggctgctacccaggcctcaaagcaatatatacagcccttaacacttgtgagctacacccctgacttactgctctcagtccggggcgaacgcaaaaacgagaccgattccagcttaaatcaggaagcacctacggaggaggcttcgtcagtcttccccaagctaacctctgcaaaacctttctcatcgctgccagatttgcgcaacatcaatctgagctcatctaaactcgaacctagcaagcccaatttttccattaaagaggcaaagtccgcctctgccgtaaatgtgttcacaggaaccgtgcaccttacatcagtggagactacgcccgaatcaaccactcaactgtctatctcccccaagtctcctcctacactggccgtgacagcttcaagcgaatactcgggacccgagactgatcgtgtggtttctttcaagtgtaagaaacaacagacccctccccatctgacacaaaaaaagatgttgaagagtttcctgcctaccaaatctaagtccttctgggagtcaccaaatacaaactggactctgctaaagtccgatatgaacaagccccaccttattagtgagctgctcaccaagctccagctgtctgggaaattgtcttttttcccagcccattataatcccaagcttggaatgaataacctgagtcagaatccctccctgccaggcgaatgccactcaaggtccgattcatccggcgagaaacgccagctcgacgtgagctcactgctgctgcagtctccgcagagttacaacgttacattaagggatctgctggtgattgccacgcctgctcagctcgatcccaggccctgcaggtctcacgcatcagccatgcgcgacccatgcatgcaggaccaggaagcttattcccactgccttatttccggacagaagggctgtgagcggtcttag

SEQ ID NO: 139314 - DNA, 2676 bp, synthetic construct
  misc_feature 1..2676: note = Description of Artificial Sequence: Synthetic coding sequence
  source 1..2676: mol_type = other DNA
atgggggcactcctgctgcacccctccaggcgtggcccagcaggagtcgtcgctagctggacgtctagcccagccggccgtgatggcggcgtgggcatcgcaggcgcctggtactttccaagagcctcgagtcaggctagggaaatgcctcagtgtccaactctggagtcgcaagagggggagaattcagaggaaaaaggtgactccagcaaggaggaccctaaagaaactgtggcgctggcttttgtgagggaaaatcctggtgcgcagaatggcctgcaaaacgcccagcagcagggaaaaaaaaagcggaaaaagaagcgccttgtgataaacctgtcttcctgtcggtatgaaagcgtcagacgcgctgcacagcagtacggcttccgtgaagggggtgaagatgacgactggacactttactggaccgactacagtgtctctctcgagagagtgatggaaatgaagtcttatcagaagatcaaccacttcccgggcatgtccgagatctgtcgcaaggatctgttggcgaggaacatgagcaggatgttaaaaatgtttccgaaggatttcagattctttcccaggacatggtgtcttcctgccgattggggtgatctacagacctattctaggtcacgcaagaataaaacatacatatgcaaacccgactctggatgtcaggggaaaggcatcttcattactagaacggtcaaagaaattaagcccggtgaggatatgatctgccagctttacatcagtaagcccttcattattgatggcttcaaatttgatctgcgtatctatgtgttagtcacctcttgtgatcctcttcgcattttcgtgtacaacgaggggctggcccggttcgcaaccacctcctactcccgaccctgcacagataacctggacgacatctgcatgcatctcactaattatagtatcaataaacatagcagtaacttttctcgcgatgctcactctggcagtaagaggaagttgtcaaccttctctgcatacctggaagaccactcctacaacgtcgagcaaatttggcgagacattgaggacgtgatcatcaagacgctgatctccgcccatccaatcattagacacaattaccatacgtgcttccctaaccatacacttaattcagcctgttttgagatccttggatttgacatcctattagaccataagctaaaaccatggctgctcgaagtgaaccactctccttcctttagtacggattctcgcctagacaaggaagtgaaagatggtctcctatatgatactctcgtgctgatcaacctggagtcttgtgataaaaagaaggtcctggaagaagaaagacagaggggacagttcctccagcagtgttgttcgcgggagatgaggatcgaggaagctaaaggatttagggccgtgcagctgaagaaaaccgagacatatgaaaaagaaaattgcggcggcttccgcctgatctatcctagtcttaacagtgaaaagtacgagaagttctttcaagacaataatagcctgtttcagaatactgttgcgtcacgggcccgagaagagtacgcacgccagctcatacaggaacttagacttaaaagggaaaagaagccattccaaatgaagaaaaaggtcgagatgcagggcgagagcgccggcgagcaggtgaggaagaaagggatgaggggatggcagcagaagcaacagcaaaaggataaagcagccacccaggcgagtaaacagtacatccagccactcactctagtaagctacactcccgatctgctgctgagcgtacgaggagagcggaaaaacgagaccgattcctcattaaatcaggaagccccaactgaagaggcctcctccgttttcccaaagctcacatccgccaagccgttttctagccttcctgacctgcgcaatatcaacctcagctccagtaaactggaaccatccaagcccaatttttccattaaggaggccaagtccgcctcagctgttaacgtatttaccggtacagtgcacctcacaagtgtcgaaactactccggagagtacgacacagctgtccatcagccccaagtccccccctactttagctgtaacagctagctccgagtattccgggccagaaaccgatcgggtcgtatcctttaaatgcaagaaacagcagaccccaccacacctcacccagaaaaaaatgctcaagagcttcttgcccactaaatccaagtctttttgggagtccccaaacaccaattggactctgttgaagagcgacatgaacaagccccatttgattagcgaactgctaacaaaactgcagctttctggaaagctgagtttttttccagctcattataatcctaagctgggaatgaacaacttgagccagaatccatcccttcctggcgagtgccattcacggtcggactcatctggcgagaaaagacagctggatgtctcctcgctcctcctgcagtcccctcaatcttacaatgtgacgctgcgcgatctgctcgtgattgcaacccccgcccagcttgatccgcggccctgtcgatcgcatgccagcgccatgcgggacccatgtatgcaggatcaggaggcttattctcactgtcttataagcgggcagaagggatgcgagaggtcttag

SEQ ID NO: 139315 - DNA, 306 bp, synthetic construct
  misc_feature 1..306: note = Description of Artificial Sequence: Synthetic coding sequence
  source 1..306: mol_type = other DNA
atgccccaatgtcccacgctcgagagtcaggagggggaaaattccgaggaaaaaggcgattccagcaaggaggatccaaaagaaaccgtggcactcgctttcgttagagaaaaccctggtgcacagaacggtctccagaatgcccagcagcagggcaaaaagaaacggaagaagaaaagattggtgattaatctgtcatcatgtcggtatgaatcagtgagacgagcagcacaacagtacggattcagggaaggtggggaagacgacgactggaccctgtactggactgactacagcgtgagctag

SEQ ID NO: 139316 - DNA, 1356 bp, synthetic construct
  misc_feature 1..1356: note = Description of Artificial Sequence: Synthetic coding sequence
  source 1..1356: mol_type = other DNA
atgagagaatgtattagtattcacgtaggtcaggcaggtgtgcagataggaaatgcttgctgggaactgtactgcctggagcatggtattcagcctgacggtcagatgcccagcgacaaaaccattggaggaggagatgactcatttaacacctttttcagtgagacaggggccggaaagcacgttccccgggctgttttcgtggatctagagcctacagtgatcgacgaggtgcgcacaggtacgtacagacagttgttccaccccgagcagctaataaccggaaaagaagatgccgcgaataactatgctcgtgggcattacacaatagggaaggagatcatcgatcttgttctggacagaatccgaaagttagcagatcagtgcaccggcttgcaggggtttctagtctttcatagtttcggtggcggaacaggctctggatttacttcactcctaatggaacgtttaagtgtagactatgggaagaaatccaagctggaattttctatctatcccgcacctcaggtcagcaccgcggtagttgagccctataactcaattctgaccacacatacaactcttgaacactccgactgtgcattcatggtggacaatgaagctatctatgacatttgccgcagaaacttggacattgaacggcctacttataccaacctgaaccgcttgatcggtcaaattgtgtcttctattacagcaagtttgcgtttcgacggcgccctgaacgtggatctgaccgaattccagaccaacttggtgccgtacccaagaatacactttccactggctacctacgcacctgttatatccgcagagaaagcttaccatgagcagctgtctgtcgcagagattaccaacgcttgcttcgaacctgcaaaccagatggtgaagtgcgaccctaggcacggaaagtacatggcctgctgcttactctatcgaggcgacgttgtaccgaaggatgttaacgctgccattgccaccattaaaactaaacgtactattcagttcgttgattggtgcccaacaggattcaaagttggtatcaattatcagccccctacagtggtacccggcggggacctcgcaaaggtacagcgggctgtgtgtatgctgagtaacacaacagccattgcggaggcatgggcaagactggaccacaaatttgatctcatgtacgccaagagggcatttgttcactggtacgtcggcgaggggatggaggagggcgaattctctgaggcacgggaggatatggctgctctggaaaaggattacgaggaggttggcgttgatagtgtggagggcgagggggaagaggagggcgaagaatattag

SEQ ID NO: 139317 - DNA, 1356 bp, synthetic construct
  misc_feature 1..1356: note = Description of Artificial Sequence: Synthetic coding sequence
  source 1..1356: mol_type = other DNA
atgcgcgagtgtatctcaattcatgttgggcaggctggcgtacagattgggaacgcttgctgggaactatattgcctggaacatggcattcagcccgatggacagatgcctagcgacaagaccataggaggcggcgacgactcctttaacacctttttctcagagacgggcgccggcaagcatgtgccaagggcagtgttcgtggacctggagcccacggtgatcgatgaagtgcggaccggaacgtatcggcagctgttccatccagaacagcttataactggcaaggaagacgcagctaataactacgcccggggccactatactataggcaaagagataattgatctggttttagacagaataaggaagcttgcggatcaatgcacaggcctgcagggctttttggtgtttcactcctttggcggcgggaccggtagtggctttacctccctcctgatggagcggctgtcggtcgactacggcaagaagtctaagctagaattttccatctatcccgccccgcaggtaagcactgccgtggttgagccctataatagtattcttacgacacacactacactcgaacacagcgactgcgctttcatggttgacaatgaagccatctacgacatctgtcggaggaaccttgatatcgaaaggcccacgtacaccaacttgaatcgtctaatcggtcagattgtgtcctcaatcacagcatctctgcgattcgacggggcattgaacgtggacctgacagagttccagacaaatctcgtaccgtaccctaggattcatttcccacttgccacctatgccccggtgatctcagcagaaaaagcatatcacgaacaactgtcagtggctgagattaccaacgcctgttttgagcctgcgaaccagatggtgaagtgtgaccctcgacatggtaagtacatggcctgctgcctgctgtaccggggggacgtcgtcccaaaggacgtgaacgcagctatcgccaccatcaagaccaaaaggactatccagttcgtggattggtgtccgaccgggtttaaggtagggatcaattaccagcctccaactgttgtcccgggaggagacctggcaaaggtacagagggccgtttgcatgctgtcaaacactaccgctatagctgaagcctgggctcgtctggaccataaatttgacctgatgtacgccaaacgagcttttgtccattggtatgtgggggaaggcatggaagaaggggaattctcagaggcccgcgaagacatggccgcgcttgaaaaagattacgaagaggttggcgtggactccgtcgaaggtgaaggcgaggaggaaggtgaggaatactag

SEQ ID NO: 139318 - DNA, 1152 bp, synthetic construct
  misc_feature 1..1152: note = Description of Artificial Sequence: Synthetic coding sequence
  source 1..1152: mol_type = other DNA
atgattgatttagaacctacagtcgtggatgaggttcgtgcaggaacctacagacagcttttccatccggagcagctgatcaccgggaaagaggacgctgcaaataactatgcaagaggccattacacagtgggaaaggagagcatcgatcttgtactggataggattcgaaagctcaccgacgcttgctcaggactacaggggtttctgattttccattctttcggcggtggaacagggagtggcttcacgagtttgctgatggagagactctccctggactatggaaagaaaagcaaactggaattcgctatttatcctgcaccccaggtgtcaacagccgttgtcgaaccctataactccattctaaccacacacaccactctcgagcacagtgactgcgccttcatggttgataatgaagccatctacgatatctgccgtaggaacctggacatcgagagacctacgtatacaaatctcaaccggctcataagccaaattgtgagcagtatcacagcaagtttaagattcgatggagcactaaacgtggatttaacagaattccaaacaaacctggttccgtaccctcgcattcattttcctttggttacatacgccccaatcatatccgctgagaaggcttatcatgagcagcttagcgtcgcggaaataacatctagttgtttcgagcccaattcacagatggtcaagtgtgacccccgccacggtaagtatatggcctgctgcatgctgtacaggggcgacgttgttccaaaagacgtgaacgtggctattgccgccattaagaccaagcgtaccatccagttcgtggactggtgtccaactggctttaaggtgggtataaactaccagcctcctactgttgtccccggcggagacctggcaaaagtccagcgggctgtttgcatgctgagtaacactacggcgatcgcagaggcttgggcccgcctagatcataagttcgatttaatgtatgcaaagcgcgcttttgtgcattggtacgtgggagaggggatggaagaaggcgagttcagcgaggcacgcgaagatcttgctgcactcgaaaaggattacgaggaggtcggcactgactccttcgaagaggagaacgagggcgaagaattttag

SEQ ID NO: 139319 - DNA, 1350 bp, synthetic construct
  misc_feature 1..1350: note = Description of Artificial Sequence: Synthetic coding sequence
  source 1..1350: mol_type = other DNA
atgagggaatgcatttccgtgcacgttggccaggctggggtgcagattggcaacgcttgttgggaactgttctgcctggaacacggaattcaggccgatgggacctttgacgcacaggcttctaagataaatgacgatgactccttcacaacatttttctcagaaacgggcaacggcaagcacgtgcctagggcggttatgatcgacctggagcctacggtcgtggacgaagtgagggccggaacataccgacagctgtttcaccccgaacagctgattacaggcaaagaggacgcagcaaataactacgcaaggggccactacactgtcggcaaagaatcgatcgatcttgtcctggaccgaatcagaaaacttaccgatgcttgctctggcctgcagggattcctaatctttcacagcttcggtggaggcaccggatccggcttcactagcctgctaatggagaggctgagcctggactatgggaagaagtccaagctggagtttgcgatataccccgcacctcaagtctcgaccgcagtggtggaaccatataattcaattctgacaacacacaccacgctagagcatagcgattgcgcctttatggtcgacaacgaagctatttacgacatttgtcgccgtaacctcgatattgagaggccaacttacactaacctcaaccggcttatcagccagattgtctctagtattactgcctcgttaagattcgacggcgcattgaacgtggacctgaccgagtttcaaacaaatctcgtcccctatcctcgaattcatttccccttggtgacgtacgccccaattatcagtgccgagaaggcctatcacgagcagctcagcgtggcagagatcacctcctcatgtttcgaacccaacagtcaaatggtaaagtgcgatcctcgccatgggaagtacatggcctgctgtatgctctaccggggagacgtggtgcctaaggatgttaacgtggccatcgctgcgatcaaaacaaaacgaactatacagttcgtggattggtgccctaccggattcaaggtaggtatcaactaccagcctcccactgtggtgcccgggggagatttggctaaggtgcagcgggctgtgtgcatgctctccaacacaaccgcgattgcggaggcctgggcccggttagaccacaaatttgatcttatgtatgccaaaagagcttttgtccactggtacgtgggggaagggatggaggaaggcgaattctctgaagccagggaggatttagcagctctggagaaagactatgaagaggtcggaacagatagtttcgaggaagaaaacgagggggaagagttctag

SEQ ID NO: 139320 - DNA, 912 bp, synthetic construct
  misc_feature 1..912: note = Description of Artificial Sequence: Synthetic coding sequence
  source 1..912: mol_type = other DNA
atggcaaggcgaggtcccgggtggaggcccttgttgttacttgttcttctcgccggggctgctcagggcgggctgtatttccgacgaggtcagacttgctatcgtcctctccggggagacgggctagcaccactgggaagatccacgtaccccagaccccatgaatacctcagtcctgccgatctaccgaagtcctgggactggcgcaatgtggatggtgtcaattatgcctccattacgcgcaaccagcatatcccacagtattgtggctcttgttgggcgcacgccagcacatctgccatggccgacaggattaacatcaagaggaagggcgcctggcccagcacactgctgagtgtccagaatgtcattgactgcggaaatgctggatcttgcgaaggcggaaatgacctgagtgtttgggattacgctcaccaacatggaatccccgatgagacatgcaataattaccaggccaaagaccaagagtgtgataaatttaaccagtgtgggacctgtaatgaatttaaagagtgccacgccattcggaactacacgctttggcgggtgggcgactacgggtctctctccggcagagagaaaatgatggcggagatctacgccaacgggccgattagttgcggcattatggccacagaaaggcttgccaattacactggaggaatctatgctgagtaccaggacaccacctatatcaatcatgtcgtctcagtggcgggctggggaatcagcgatggaaccgagtattggattgtccggaattcatggggtgagccctggggggaaaggggatggctgaggattgtgacctcaacatacaaggacggaaagggggcccgctacaatttggccatagaggagcattgcacattcggcgacccaattgtgtag

SEQ ID NO: 139321 - DNA, 1338 bp, synthetic construct
  misc_feature 1..1338: note = Description of Artificial Sequence: Synthetic coding sequence
  source 1..1338: mol_type = other DNA
atgcgagaaatagttcacatccaggctggccagtgtgggaaccaaattggtgctaaattttgggaagtgatttctgacgagcacggtatcgaccccacagggagctatcacggtgactcggatctgcagctggagcgtattaatgtatactacaacgaagccacaggtaacaaatatgtgcctcgtgctattttggtcgatcttgagccgggcaccatggactccgtccggtcagggccgttcggacaaatattcagacctgacaacttcgttttcggccagagtggggctggcaacaactgggcaaaaggccactacaccgagggagcagaattggtggactcggtgctcgacgtggtgcgtaaggaatccgagagctgtgactgcttacagggttttcaattaacccacagcctggggggaggaacaggttccgggatgggaaccctgctgatctcaaaaatccgggaggaatacccagatcgtataatgaacacctttagtgtgatgccgagtcccaaggtatcagacacagtggttgagccctataacgcaactctcagcgttcaccaattggtggaaaatactgacgagacctattgcatcgataacgaagccctgtatgatatttgcttcagaaccttaaaactgaccacacccacttacggcgacctgaaccacctggtttctgcaactatgagcggggttacaacttgcctccgcttccccggccaactcaacgccgatctgagaaagttggccgtcaacatggtcccattcccacgactgcactttttcatgccaggcttcgcccccctaaccagtagagggagccaacagtacagggcactgacagtacccgagcttacacaacagatgttcgacagcaaaaacatgatggctgcttgcgaccctagacacggacggtacctaaccgtggcagctatttttagagggagaatgagtatgaaagaagttgatgagcagatgcttaacgtccagaataaaaactcatcatatttcgtagagtggattcccaataatgtgaagactgctgtgtgcgatataccccccagaggcctgaagatgtcagcaaccttcatcggcaacagcacggcaatacaggaattatttaagcggatcagcgagcagttcaccgccatgttccgtagaaaggcattcctgcactggtacacaggcgagggtatggacgaaatggagttcaccgaagccgaatcaaacatgaatgaccttgtctccgaataccaacagtaccaggacgctacggcggacgagcagggggagttcgaagaagaggagggtgaggacgaggcttag

SEQ ID NO: 139322 - DNA, 1353 bp, synthetic construct
  misc_feature 1..1353: note = Description of Artificial Sequence: Synthetic coding sequence
  source 1..1353: mol_type = other DNA
atgagggaaattgtgcacatccaggcaggtcagtgtggaaaccaaataggtgccaaattctgggaggtgatttccgacgaacacggcatcgacccttctggaaattatgtgggggactccgatttacagctggaaagaatttctgtgtattacaacgaagcatcttctcataagtatgtgccccgcgcaatcctggtggatctggaaccaggaactatggactccgttagatcaggagccttcggtcacctgttcagacccgacaactttatcttcgggcaaagtggcgccgggaataactgggctaagggccattacacagaaggtgccgaactagtggattcggtgttggacgtggtccggaaggagtgcgaaaattgcgactgtctgcaaggctttcagctgactcacagcctaggaggaggtacggggtctgggatgggcacactgctcatcagcaaagtgagagaggaatatccagatcggatcatgaatacatttagcgttgttccgagtcccaaggtgtcagacactgtggtggagccttacaacgcaaccctgtcaattcaccagctagtcgaaaacacagatgagacctattgtatagacaacgaagcactgtatgatatttgcttcaggaccctaaagcttgccactccgacatacggcgacctgaaccacctggttagtgctactatgtcgggcgtcactacatcgcttaggtttcctggccagttaaatgccgatctacgtaaactggcagtgaatatggttccctttccgcggttgcacttctttatgccagggtttgccccactaaccgctaggggcagtcagcagtacagagccctgactgttccagaactcacccagcaaatgttcgatgcaaagaacatgatggcagcatgtgatccccggcatggccgttacttgacagttgcaaccgtcttcaggggtaggatgagcatgaaggaggtggatgaacagatgctggctattcagtcaaagaactccagctatttcgtggagtggatccccaataatgtcaaagtggccgtgtgtgatattccacctcgtggccttaaaatgtcctctaccttcattggaaattctacggctatccaggaattattcaagcgaatcagcgaacagttcacagctatgtttcggaggaaagcgtttctgcattggtataccggagaggggatggacgagatggaattcaccgaggctgaatcaaatatgaacgatctagtcagcgaataccaacagtatcaggatgcaaccgccgaagaggaaggagaaatgtatgaggacgacgaagaggaatcggaggcccagggtccaaaatag

SEQ ID NO: 139323 - DNA, 1137 bp, synthetic construct
  misc_feature 1..1137: note = Description of Artificial Sequence: Synthetic coding sequence
  source 1..1137: mol_type = other DNA
atggacagtgtccgcagtggcgcattcggccacctgttccgccccgacaatttcatattcggtcagtctggggcgggcaataactgggctaaaggccactacacagagggagcggaactcgttgattcggtcctcgacgttgttagaaaagagtgcgaaaattgtgattgcctccagggatttcagctcactcacagcctaggagggggaacagggagcggtatgggtacattgttaatctcgaaagtgagagaggagtaccccgaccggatcatgaacacatttagcgtggttccctcaccaaaagtgagtgacaccgtggtggaaccctacaatgctaccctttcgatccaccaactggtggagaatacagacgagacctattgtatagacaacgaggcattgtatgacatttgttttcgtacgttgaagttggccactcctacttacggagatctgaatcatctcgtttctgcaacaatgtcaggagtgacaacgagccttcgatttcccggacagctaaatgcagatctgcgtaagttggccgtgaacatggtgcctttcccacggcttcatttctttatgcctggattcgcaccgttaactgccaggggttcccagcaatacagagcccttacggtcccagagttgacacagcaaatgttcgatgccaagaacatgatggctgcctgcgacccccgccatggcagatatctgaccgttgctactgttttccgaggccgtatgtctatgaaagaggtcgacgaacagatgcttgctatccagagcaagaatagctcgtacttcgtcgagtggatcccaaacaacgtcaaggtggccgtttgcgacataccaccccggggactcaaaatgagctctacctttattggcaacagtacagccatacaagaactttttaagagaatatcagaacagtttaccgctatgtttaggcgcaaggcttttttgcattggtatacaggggagggaatggacgaaatggagtttacagaagccgagtccaacatgaatgacctggtgtctgaatatcagcaataccaggatgctacggccgaggaggagggcgagatgtacgaagacgacgaggaagagtcagaggctcaggggcccaaatag

SEQ ID NO: 139324 - DNA, 1335 bp, synthetic construct
  misc_feature 1..1335: note = Description of Artificial Sequence: Synthetic coding sequence
  source 1..1335: mol_type = other DNA
atgcgcgagatagtgcacatacaggcaggtcagtgcggtaaccagattggcgccaaattttgggaagtgatcagcgatgagcatggaattgatccaaccggcacctaccatggggattcagatctccagcttgaccgcatttccgtgtattacaatgaggccacggggggcaaatacgtgcccagagcaatcttggtggatctggagcctggaaccatggattctgtcagatcggggcccttcggtcagatcttccgccccgacaatttcgttttcgggcagtctggtgctggcaacaactgggcaaagggtcattacacagaaggtgcagagttagtcgattctgtgcttgatgtggtgcgcaaggaagccgaatcctgtgactgtctccaaggcttccagctgacacactcccttggaggaggtacaggatccggaatgggaacactcctgatctccaagattcgggaggaatatcccgatcgaatcatgaacaccttctcagtcgtaccctctcccaaggtttcagacaccgttgttgaaccttataatgctaccctttccgtacatcagctagttgagaacacagacgagacttactgcattgataatgaggccctgtacgacatctgctttcggacccttaagctcacgactccgacctacggagacctgaatcacctggtatcggcaactatgagcggtgtgactacctgccttcgtttccctggccaactgaatgctgacctaagaaaattggcagtgaatatggtcccttttcctcgactgcatttttttatgcccggcttcgctcccctgactagtagaggtagtcagcagtacagggctctgaccgtgcccgaactgacgcaacaggtgtttgacgctaaaaatatgatggctgcatgcgaccctcgccacggacgttaccttactgtagcggctgtcttccgaggccgcatgagtatgaaggaagtggacgagcagatgctgaatgtgcagaataaaaactccagctactttgttgaatggataccaaataacgtgaaaactgccgtatgcgacatccctccgagaggcttgaaaatggctgtgacatttattggaaatagtacagccatacaagaactcttcaaaaggatttccgagcaatttaccgccatgtttaggagaaaggctttcctccattggtatacaggagaaggcatggacgagatggagtttaccgaagctgagtccaatatgaacgatttggtgtcagagtaccagcagtaccaggacgcaacggccgaagaagaggaggatttcggggaagaggcagaggaggaggcatag

SEQ ID NO: 139325 - DNA, 1119 bp, synthetic construct
  misc_feature 1..1119: note = Description of Artificial Sequence: Synthetic coding sequence
  source 1..1119: mol_type = other DNA
atggactcagtaaggtctggcccattcggccagatttttaggcccgacaactttgtgtttgggcaaagcggcgcgggaaataactgggctaagggacactacacagagggcgcagagctggtcgatagcgttctggatgttgtcaggaaggaggcggaaagctgtgactgccttcaaggattccagctgacgcacagcttgggcggtggaaccgggtctggcatgggtaccctcctcatcagtaagatcagagaagaatatcctgatcgtattatgaatactttctcggtggtgccctctccaaaagtgtccgacactgtcgttgagccatacaacgctaccctgtctgtccatcaattggtggagaacacagatgaaacttactgcatcgacaatgaagccctgtacgatatctgcttccgtaccctgaaactcactacacccacctacggcgaccttaatcacttggtgtcagctactatgtcgggggtgactacctgcctccgttttccaggccagttaaacgccgacctgcgcaagcttgcagtaaatatggtcccttttccgagattacacttttttatgcccggcttcgcacctctaacatcacggggctctcagcagtaccgcgctttgacagtgcctgagttgacccagcaggtgtttgatgccaagaacatgatggccgcttgtgaccctaggcacggtagataccttactgttgcagctgtttttcgcgggcggatgtcgatgaaagaggttgatgagcagatgctcaatgtccagaacaagaatagttcttacttcgtggaatggattcccaacaatgtgaagacagctgtctgtgatatccctccgcgagggctcaagatggctgtaacttttatcgggaactccaccgctatacaggaactttttaaaaggatctccgagcagttcactgccatgttccgacgaaaggcctttctgcattggtataccggcgagggaatggacgagatggaattcacagaggccgagagcaacatgaatgacttggtgagcgagtatcaacagtaccaggacgctacagctgaagaggaagaagattttggagaggaggcagaagaagaggcatag

SEQ ID NO: 139326 - DNA, 1335 bp, synthetic construct
  misc_feature 1..1335: note = Description of Artificial Sequence: Synthetic coding sequence
  source 1..1335: mol_type = other DNA
atgagggaaattgtccacatccaggctggccagtgtgggaatcaaatcggcgctaagttctgggaagtcatatccgatgaacatggcatcgaccccactggcacttatcatggagattccgatctgcagctagataggatatctgtgtattataatgaggctaccggtggaaagtacgtgccacgggccatcctcgtagacctggaacctgggactatggattctgtacggagcgggcctttcggtcagatctttcgccccgataacttcgtcttcggacagtctggtgcaggaaacaactgggctaagggtcactacactgagggcgccgaactggtcgactccgttctcgatgtcgtaagaaaggaggccgagagctgtgactgcctgcagggatttcaactcacccactccttagggggcggcactggcagcggtatgggaacgcttttgatctctaaaattagggaagaataccctgaccggatcatgaacactttctcggtagtgccatcaccaaaagttagcgacaccgtggttgagccctacaatgcaactctgtctgtccaccagctcgtggaaaacactgacgagacctactgtatagataatgaggcattgtacgatatatgtttcaggaccttgaagctcaccaccccaacgtacggggaccttaaccatctggtgagtgctaccatgagcggagtcacaacatgtcttcgtttcccggggcaactgaacgctgacctccgaaagcttgccgttaacatggtccccttccctcggctccacttctttatgccgggcttcgcccccctcacatccagggggtcacagcaatatcgcgctctcactgtgcctgagcttactcagcaggttttcgatgccaaaaacatgatggccgcgtgtgatccaagacacgggagatatctgacagtagctgcggtgtttcgtggccgcatgtctatgaaggaggtggatgagcagatgcttaacgtgcaaaacaaaaactcaagttacttcgtcgagtggatacccaataacgtaaagactgctgtgtgcgatatcccaccaagaggcctaaaaatggcggttacatttatcgggaatagcaccgctatccaggaactgttcaagcgaatcagcgagcagttcactgccatgtttcggagaaaggccttcctacattggtacactggcgagggaatggacgaaatggagtttaccgaggctgagagcaatatgaacgatctggtatcagagtatcagcagtatcaggatgcaaccgctgaggaggaggaggactttggtgaagaggcggaagaggaggcttag

SEQ ID NO: 139327 - DNA, 1119 bp, synthetic construct
  misc_feature 1..1119: note = Description of Artificial Sequence: Synthetic coding sequence
  source 1..1119: mol_type = other DNA
atggactctgtgagaagcggtccctttgggcaaattttcaggccggacaactttgtgtttggtcagtccggtgccggcaataactgggctaagggacattatactgagggcgctgagttggtagacagcgtgttggacgtcgtgcgcaaggaagcagagagctgcgattgtctacagggatttcaactgactcacagcctgggaggtggcactgggagcggcatgggcacactcctgatctccaaaatccgcgaggaatacccggacaggatcatgaatacattctccgtggttccgagccccaaagtgtccgacacagtcgttgaaccctacaacgcaacgctcagcgtgcatcagctggtggagaacactgacgaaacgtattgcattgataacgaagccctttacgacatctgcttcagaactctgaagctgacaacacccacatacggggacctcaaccatctggtctccgccactatgtccggagtgaccacatgtctaaggttccccggtcaacttaacgccgacctgaggaaactcgccgtgaacatggtaccgttcccccgcctccacttcttcatgcctggctttgcccccctcacctcacgcggaagccagcagtatagggcccttacagtccccgagctgacccagcaggtgttcgatgccaagaacatgatggctgcctgtgatccgcgccacggccgctatctgacagtggctgcagtgtttagaggcagaatgagcatgaaggaggttgacgaacagatgctgaatgtgcagaacaaaaacagctcctactttgttgagtggatccccaacaacgtcaaaactgcagtctgtgacattcctccccgtggcctgaaaatggccgtaacctttattggcaacagcactgccatacaggaattgtttaaacggatttccgagcagtttacagcaatgttccgccggaaagcttttctacattggtacactggcgagggtatggacgagatggagttcactgaggccgagtccaatatgaacgatctggtgtctgaataccaacagtaccaggacgccacagcagaggaagaggaggatttcggcgaggaagctgaagaagaggcttag

SEQ ID NO: 139328 - DNA, 1281 bp, synthetic construct
  misc_feature 1..1281: note = Description of Artificial Sequence: Synthetic coding sequence
  source 1..1281: mol_type = other DNA
atgttctgggaggtcattagtgatgagcacggaatcgatccgacaggtacataccacggcgacagtgacttgcaactcgaccgcatcagcgtctattataatgaagccaccggtggaaaatacgtgcctcgggcaatcctggtggaccttgagccaggtacgatggactccgttcgctctggcccattcggccagattttcagacccgacaacttcgtgttcggccagtccggggctggcaacaactgggcaaaagggcactacacagagggcgccgaactggtggattccgtattggatgttgtgcgcaaagaggccgaatcatgcgattgtctgcagggcttccagctgacgcactccctaggagggggaactggctcaggcatgggaacattactgatttccaagattagagaggagtaccccgacaggatcatgaacacattttctgtagtccctagcccaaaggtaagtgatacagtagtggagccgtataatgcaaccctgtccgttcaccagctcgtggaaaatacagacgaaacctactgcatagataacgaggcgctgtatgatatttgtttccgcaccttaaagttgacaacccctacctatggggacctcaaccacctggtgtcagccactatgagcggggtcacaacctgtctgaggttccccggccaactgaatgccgacctgcgaaagttggcagtcaatatggttcctttccccaggctccacttcttcatgcccggcttcgcccccttaacatccaggggctcacagcagtaccgagccctgaccgtcccagaactgacccagcaggtgtttgatgccaagaatatgatggccgcctgcgatcccaggcatggacggtacctcaccgtggctgcagtctttcgtggccggatgagcatgaaggaagtcgacgaacagatgcttaacgtgcagaataagaatagttcctactttgtggagtggatccctaacaacgtaaagaccgccgtatgcgacatacctccaagagggctcaagatggccgttacgttcatcggcaactccactgctattcaggaactttttaagcggatttcagaacaattcactgctatgttcaggagaaaggccttcctgcattggtatacgggcgaaggcatggatgaaatggagttcactgaggctgagtctaatatgaatgacctcgttagtgagtatcaacagtatcaggatgcaactgctgaggaagaggaagacttcggtgaagaagccgaggaagaagcatag

SEQ ID NO: 139329 - DNA, 1119 bp, synthetic construct
  misc_feature 1..1119: note = Description of Artificial Sequence: Synthetic coding sequence
  source 1..1119: mol_type = other DNA
atggactctgtgcgcagcggaccttttggtcagatattccggccagacaattttgtattcggtcagtcgggggcaggaaataactgggccaaaggacattataccgaaggagctgaacttgtggactccgttttggacgtcgttcggaaggaggcagaatcatgtgactgcttgcaaggattccagctcactcactcactcggaggaggaaccgggagtgggatgggtaccctgctaatttctaaaattcgagaagagtatcctgatcgcataatgaatacctttagcgtggtgcctagtcccaaagtgtccgacaccgtcgtagagccctataatgctactctttccgtgcatcagctcgtggaaaacactgatgaaacttattgcattgataacgaggctctctacgatatatgctttcgtacattaaaacttacaacccccacctatggcgatctgaatcatttagtctcagcaacaatgagcggggtgactacctgccttcgcttcccgggacaattgaacgccgacctacgcaaactggctgtgaatatggtgccattcccccgcctacatttttttatgccggggttcgccccactgacctcccgcggtagccagcagtatcgggcactgaccgtacctgaacttacccagcaggtgttcgacgctaagaatatgatggccgcatgtgatccccgccacggcagatatttgacagttgcagctgtttttagaggcagaatgtcaatgaaagaggtggacgaacagatgttgaatgtacagaacaaaaattccagctactttgtagagtggattccaaataacgttaagacagccgtatgtgatataccgccacgagggctcaaaatggctgtgacgttcattgggaatagcacagctatccaggagctgtttaaaagaatttccgagcagttcacggctatgttccgccggaaagctttcctgcactggtacacaggtgagggaatggatgagatggagttcaccgaggctgaatctaacatgaatgatttggtctctgagtatcaacagtaccaggatgcgaccgctgaagaggaggaggacttcggtgaagaggctgaggaggaggcttag

SEQ ID NO: 139330 - DNA, 1119 bp, synthetic construct
  misc_feature 1..1119: note = Description of Artificial Sequence: Synthetic coding sequence
  source 1..1119: mol_type = other DNA
atggattctgttaggtcgggaccttttggtcaaatcttcagacccgataatttcgtgtttggccagtccggcgccggcaataactgggctaaaggccattataccgaaggtgctgaactggtagatagcgttctagatgtggtgaggaaagaagcagaatcctgtgattgtcttcagggttttcagctgacccacagcttgggtggaggcactggcagcgggatgggtactttgctcatatcaaagatcagggaggagtatcctgaccgaattatgaatacattctctgttgtgccatctccaaaggtctcggacaccgtcgtggaaccttataatgcaacactgagtgtccatcagctggtcgaaaacacagatgagacgtactgcattgacaacgaagccctgtatgatatctgctttaggaccctgaaactgaccacaccgacgtacggtgatcttaatcacttagtcagtgccactatgagtggcgtcactacctgtttgcgattcccgggtcagctcaatgccgatctgcgcaagctggcagtcaatatggtcccattcccaagacttcacttctttatgcctgggttcgcgcctcttacatcccgcggatctcagcagtatcgagctcttactgtacctgaactcacccagcaggttttcgacgctaaaaatatgatggcggcatgcgacccgagacacggccggtatctaaccgtggctgcagtcttccggggaagaatgtccatgaaggaggtagatgaacagatgttaaatgttcagaataaaaattcctcctacttcgtggagtggattcctaacaacgtcaagaccgcagtttgcgatataccgccaagagggctgaaaatggccgttactttcatcggaaacagtacagccatacaagaattgtttaagagaatatcagagcagttcactgccatgtttcgccgcaaggctttcctgcactggtacaccggtgaaggcatggatgaaatggagtttaccgaggccgagagtaatatgaacgacttggttagtgagtatcagcagtaccaggatgctactgccgaagaggaggaggattttggagaggaagcggaggaagaggcttag

SEQ ID NO: 139331 - DNA, 1281 bp, synthetic construct
  misc_feature 1..1281: note = Description of Artificial Sequence: Synthetic coding sequence
  source 1..1281: mol_type = other DNA
atgttttgggaggtgatttcagacgagcatggtattgatccaactggtacataccacggcgatagtgatttacagctggataggatttcagtgtattataacgaagctaccgggggtaagtatgtacctcgcgccattctagtagacttggagcctgggacaatggattccgtgcgttctggtcccttcggccagatctttaggcccgacaacttcgtcttcggacagtccggtgcaggcaacaactgggcgaagggccactacactgagggagctgaactggtggacagcgtgctggatgtagttcgaaaggaggctgagtcgtgtgattgccttcaggggttccagctcacgcatagcttgggaggaggcacaggttccggtatgggcaccctgctgatctctaaaattagagaagaataccctgatcgtatcatgaacacctttagtgtcgtcccctctccgaaagttagtgatacagtggtggaaccatacaacgccactctcagtgtgcatcagctcgttgaaaacacggatgagacgtattgcattgacaacgaggcactgtacgacatctgcttcagaacactcaaactgaccacgcctacatacggtgatctgaaccacctggtgtctgccactatgagtggcgtgacaacctgcttaagatttcccggtcagcttaacgctgaccttcggaaactggccgtgaatatggttccattcccacgtctccacttttttatgccaggatttgcccccctcacttccaggggttcccagcagtatcgcgcactgaccgtgccagagctcactcagcaggttttcgatgctaaaaacatgatggccgcctgcgacccaaggcacggacgttatctgaccgtggccgccgtttttcgggggaggatgtctatgaaagaagttgacgagcagatgctgaacgttcagaacaaaaattcttcctattttgtagagtggatccctaacaacgtgaagaccgctgtttgtgacattcctcccaggggtctcaaaatggctgttactttcattgggaacagcacggcaatacaggaattattcaaacggatcagtgaacagttcaccgcaatgttcagacgaaaagccttcctccactggtatacaggcgagggaatggatgagatggagtttactgaggccgaatctaacatgaacgaccttgtcagcgaataccaacagtatcaggacgccactgcagaagaggaggaggactttggcgaggaggcggaggaagaagcgtag

SEQ ID NO: 139332 - DNA, 1281 bp, synthetic construct
  misc_feature 1..1281: note = Description of Artificial Sequence: Synthetic coding sequence
  source 1..1281: mol_type = other DNA
atgttttgggaggtcatctcggacgagcatggaattgatccaaccgggacttaccatggagactctgatctccagttggaccgtatttccgtttattacaacgaagccacaggtggtaagtacgtccctcgggcaatactggtggatttggagcccgggacgatggattcagtgcggagtgggcccttcggacagatcttccggcccgataattttgtgttcggccagagtggcgccggtaacaactgggctaaagggcattacactgagggcgccgaactggtggattctgttctagacgtggtgaggaaagaggctgaatcttgcgactgcttgcagggcttccagttgacacacagcctcggcggtgggactgggagtggaatgggcaccctcttaatctccaagatacgcgaggagtacccagatcgcattatgaatactttctcggtggtgccgagtcccaaggtgagtgataccgtagttgaaccctacaacgccacactgtctgtccaccagttggtcgagaacaccgacgagacctactgtattgacaatgaagccctttatgatatttgttttcggacccttaagctgaccacaccgacttacggagatctcaatcacttagtgtctgccactatgagtggggtgacgacatgcttgagatttcctgggcagcttaacgccgaccttaggaaattggcagtgaatatggtgccctttcctcggctgcatttctttatgcctggcttcgctcctctgaccagcagagggtcacagcagtacagagcgcttaccgtgcccgagctgacacagcaggtgttcgacgcaaaaaacatgatggccgcttgtgatccgaggcacggcagataccttacggtggccgccgtgtttaggggtaggatgtctatgaaggaagtggatgaacagatgttgaacgtgcagaataaaaacagttcgtactttgtcgaatggatcccaaacaatgtgaaaaccgccgtctgcgatatcccacctagagggctgaagatggctgtgacctttatcggaaattctactgccattcaagaactgtttaagcgcattagtgagcagttcacggcaatgtttcgcaggaaggcattcctacattggtatacgggagaaggcatggatgagatggagtttaccgaggccgaaagtaacatgaacgacctggtgagcgagtaccagcagtatcaggatgccacagcagaggaagaggaggacttcggagaagaagctgaagaggaggcctag

SEQ ID NO: 139333 - DNA, 1119 bp, synthetic construct
  misc_feature 1..1119: note = Description of Artificial Sequence: Synthetic coding sequence
  source 1..1119: mol_type = other DNA
atggactctgtgagatccggacctttcgggcagatctttcgtcccgataatttcgtcttcggacaatccggggccggcaataattgggcaaagggccactatacagaaggcgccgaattagtggacagtgttctggatgtggttcgtaaggaggcggagtcgtgtgattgtcttcaaggattccaactgacccactcactcggcggaggtaccggctcagggatgggaacattactcatttctaaaattcgtgaagagtacccagacaggatcatgaacacattctccgtcgtcccatcccctaaggtgagtgacactgtggttgaaccttataacgctactttgagcgttcaccagctcgttgaaaacaccgatgagacctattgcatagataacgaggccctctacgatatctgcttcaggactcttaagcttaccacccccacatacggggacttgaatcaccttgtgtcagctacaatgtctggtgtgaccacatgcctgcgcttccctggacaactgaatgccgatctcaggaaactggctgtgaacatggtaccatttccccggcttcacttctttatgcctgggtttgcccccttaacctcacgggggtcacagcagtatcgagctctgacagtccccgagctgacccagcaggtgttcgacgccaaaaacatgatggcagcctgtgacccacgtcacgggaggtatttgaccgtggctgccgtcttcagaggccgaatgagcatgaaggaggtggacgaacagatgctcaacgtccagaacaagaactctagctatttcgtggagtggatccccaataacgtaaaaacagcagtctgtgatatcccacctcgcgggctgaagatggcggtcactttcattggcaacagtactgccatccaagagctctttaaacggatctccgagcagttcacggccatgttcagacggaaggcgtttctgcactggtacacaggagaagggatggatgagatggagttcacagaagccgagagcaatatgaatgatctggtgtctgaataccagcagtatcaggacgccactgccgaagaggaggaggactttggagaggaggccgaggaagaggcttag

SEQ ID NO: 139334 - DNA, 1281 bp, synthetic construct
  misc_feature 1..1281: note = Description of Artificial Sequence: Synthetic coding sequence
  source 1..1281: mol_type = other DNA
atgttttgggaggtgattagcgacgagcatggcatagacccaaccgggacctatcacggcgattctgatttgcagttagaccgcataagtgtttattataatgaggccactggaggtaaatatgtcccccgcgctatactggtcgatctcgagcctggaaccatggacagcgtcaggtccgggccattcggacaaatctttcggccggataacttcgttttcggtcagagcggggctgggaataactgggctaaggggcactacactgaaggagctgaacttgttgattctgtcctcgatgttgttcgcaaagaggctgaatcctgcgattgcctgcaggggtttcagttgacgcacagcctaggagggggtacgggaagcggaatggggactctcttgattagtaagataagagaggaatatcctgacaggataatgaacaccttttctgtggtgcccagtcccaaggtcagtgatactgttgtggagccctataatgccactttgtccgtccaccagctcgtggaaaatacagatgaaacctactgtatcgacaacgaggcgctatatgacatatgctttcggacactgaagctaacaacccctacgtatggagatttgaatcacctggtgagcgcgacaatgtcaggcgtgactacatgtctcagatttcccgggcagctaaacgctgacctgagaaagctggccgtcaatatggtaccctttcccagactacactttttcatgcccgggtttgcgccattgacgagccgcggcagtcagcagtatcgcgctctgactgttcctgaattaacccagcaggtattcgacgcaaagaacatgatggctgcatgtgaccccagacacgggcggtatctcaccgttgccgcagtgtttaggggccgcatgagtatgaaggaagtggacgagcagatgctgaacgtccaaaacaaaaattccagctacttcgttgagtggatcccaaataacgttaaaaccgccgtatgcgacatcccgccacggggattgaagatggcagtaacatttatcgggaattccactgccatccaggaactcttcaaaagaatttctgaacaattcaccgcgatgttccgacgtaaggcttttttacactggtataccggcgaaggaatggacgagatggagttcacggaggctgagtccaatatgaatgatctggttagcgagtaccaacagtaccaggatgccacggctgaggaggaggaggattttggggaggaggcagaagaggaggcatag

SEQ ID NO: 139335 - DNA, 1335 bp, synthetic construct
  misc_feature 1..1335: note = Description of Artificial Sequence: Synthetic coding sequence
  source 1..1335: mol_type = other DNA
atgagggaaatcgttcacattcaagctggacagtgcggaaatcaaatcggcgctaaattttgggaggtaattagcgacgagcacggcattgaccccacaggaacctatcatggtgacagcgacctgcaactcgatagaatcagcgtatattataacgaagctacagggggtaaatacgtgccacgagcaatccttgttgacctggagcctggtaccatggacagtgttaggtctgggccattcgggcaaattttccgacccgacaatttcgtgttcggacagagcggcgccggcaacaactgggccaagggtcactatacagaaggggctgaactcgttgacagcgtcttggacgtggtgcgcaaagaggcagaaagttgcgactgtttgcagggcttccaactgacccattcattgggcggaggcacgggatccggaatgggaacgctcttgattagtaaaattcgcgaggagtatcctgatcgcatcatgaatacctttagtgtggtgccgagccccaaggttagcgatactgtggtggaaccctataacgctacactgagcgtccaccaactagtggagaataccgatgagacctattgtatcgataatgaagctctctacgacatctgtttcagaactctgaagctaacaacccctacatatggcgacttaaatcatctcgtgtctgcaaccatgagcggcgtgaccacttgtctacgctttcctggtcagctgaatgccgaccttcgcaaattagccgttaacatggtgccctttccaagattgcattttttcatgccagggttcgcccccctgacttctcgcgggtcccagcaatatcgcgctctgactgtccctgagctaacgcagcaggtcttcgatgctaagaatatgatggccgcctgtgatcctagacacggccggtacctcacagtcgctgcagtcttccggggacggatgagcatgaaagaagttgacgaacagatgctcaacgtacagaacaaaaattcctcctattttgtcgaatggatcccaaacaatgtgaagaccgcagtttgtgacattcccccccgcgggcttaagatggctgtaacctttatcggcaattctaccgcgatccaggagctattcaagcggatctcagaacagtttacggccatgttccgccgcaaagcctttctgcactggtacaccggtgagggcatggatgagatggagttcaccgaggctgagtctaatatgaatgacctggtttcagaataccagcagtatcaggacgccacagctgaggaagaggaagatttcggagaagaagcagaggaagaagcttag

SEQ ID NO: 139336 - DNA, 1281 bp, synthetic construct
  misc_feature 1..1281: note = Description of Artificial Sequence: Synthetic coding sequence
  source 1..1281: mol_type = other DNA
atgttctgggaggtcatttcagacgaacacggcatagaccccactggaacatatcatggtgattctgaccttcagttagatcggattagcgtttattataacgaggctacagggggaaagtacgttccacgcgctatcttggtggaccttgaacctgggactatggattcggtccggtccgggccctttggacagatttttcgccctgataacttcgttttcggtcagagcggagccggaaataactgggccaaagggcattacactgagggcgctgagttggtcgacagcgttcttgatgtagtcaggaaagaggcagagtcgtgtgactgccttcaagggtttcagctgactcacagcctgggcggcggaacgggctctgggatgggaaccctgctcatctcaaaaattcgcgaggaatacccggaccgcattatgaacactttctccgtagtgccaagtccaaaggtgtccgatactgtggtcgagccttacaatgcgactttgtctgttcaccagctggtggagaatactgatgagacgtactgtatcgataatgaggccctgtacgatatctgctttagaacactgaagctaacaacaccaacatatggtgatctaaatcacttggtgtctgcgactatgtcgggtgtgacaacttgtctgagattcccgggccagctcaatgccgatctccggaaattagctgtaaacatggtgccatttccacgccttcacttcttcatgccgggcttcgcaccgctgacttctagaggaagccaacaataccgagcactgacagtcccagagttgacccaacaggtattcgatgccaagaacatgatggcagcctgcgatcctcggcacggaagatatctaactgtggctgctgtgtttcggggtcggatgtctatgaaagaggtggacgagcaaatgcttaacgttcagaataaaaactcttcttattttgttgaatggatccccaacaatgttaagaccgcagtttgcgacatccctccaaggggactcaagatggcagtaaccttcatcggaaattctacggctattcaggaactctttaagcggatctcagagcagttcacagcgatgtttcgcagaaaggcttttcttcactggtacaccggtgaggggatggacgagatggagttcactgaggccgagagcaatatgaatgacctcgtcagtgaatatcagcagtatcaggatgctacagccgaagaggaggaagacttcggagaagaggcagaagaggaggcctag

SEQ ID NO: 139337 - DNA, 1119 bp, synthetic construct
  misc_feature 1..1119: note = Description of Artificial Sequence: Synthetic coding sequence
  source 1..1119: mol_type = other DNA
atggattcagtgaggtctgggccgtttggccagatcttccggccagataacttcgtgttcggtcagtctggggcaggaaataactgggccaaaggccattatacggaaggcgctgaactggtggattctgtcctggacgttgtgcggaaagaagctgagtcttgtgattgcctacaggggtttcaattaacccacagcttagggggtggcactggcagtgggatgggaacgttgttgatctccaaaatccgagaggaataccctgaccggattatgaatacgttttccgtcgtcccctctccgaaagtgtctgacaccgtggtggagccttacaacgctacattgtctgtgcatcaattagtggagaatactgacgaaacttattgtattgataacgaggcactctacgatatatgtttccggactttgaagctcacaactcctacatacggcgacctaaaccatttggtctctgctaccatgagtggcgttaccacttgtttgcgtttccctggccaactcaacgccgacttaagaaaactggccgtcaatatggttccctttcctcggttacacttcttcatgcctggctttgctccgctgacctctcgcggatctcagcagtaccgagctttgacagtcccagagttgacacaacaggtttttgacgcaaaaaatatgatggctgcgtgcgatccccgacatggtagatacttgaccgtcgccgccgtgttccgggggcgcatgtcgatgaaagaggtggatgagcagatgctaaatgtgcagaacaaaaactcgtcatatttcgtcgaatggatccccaacaacgtgaagacagccgtctgtgatattccaccgcggggattgaagatggcagtgaccttcattggcaacagcacggctatacaggagctattcaaacgaatttcagagcagttcaccgcgatgtttcgacgcaaagcctttttgcactggtacactggcgaaggtatggatgagatggaattcactgaagccgagagtaatatgaatgatctcgtatcagagtatcagcaatatcaggacgcaacggctgaagaggaagaagactttggcgaggaagcagaagaggaggcatag

SEQ ID NO: 139338 - DNA, 1335 bp, synthetic construct
  misc_feature 1..1335: note = Description of Artificial Sequence: Synthetic coding sequence
  source 1..1335: mol_type = other DNA
atgcgggagattgttcatatccaagcaggacagtgcggaaaccagattggcgccaagttttgggaagtgatttctgacgagcacggcatcgatcccactggcacgtaccatggcgacagtgatctccagcttgacagaatctcagtgtattataatgaggcaacgggtggaaagtacgtgcctagggccatactcgtcgatctcgaacccggaactatggactcagtacggtcaggaccctttggacagattttccgccctgataactttgtctttggccaaagtggcgcaggaaacaactgggccaagggtcattataccgagggcgccgagctcgtagattccgtccttgacgttgttcgaaaggaggcagaatcctgcgattgtctccaggggtttcagctgacacactccttaggaggaggcactggcagtggcatgggaacacttctcatctctaaaatacgagaagagtaccccgaccggataatgaatactttctccgtagtgccttctcctaaggtctctgatacggtagttgagccctataacgctactctgagcgtccatcaactcgtcgaaaatacggacgagacatattgtatagacaatgaggccttgtacgacatctgcttccgcacattgaagctgacgaccccaacttacggcgaccttaatcacctggttagcgcaacgatgagtggcgttactacctgtctgagattcccgggccagctgaacgcagatctccgcaaactggcagtaaatatggtgccctttccgaggctgcattttttcatgccaggctttgcccccctcacctctcggggatcacagcagtaccgcgccctgacagtgcccgaactgactcaacaggtttttgatgctaagaacatgatggccgcctgtgatccaagacacgggcgatacctcacagtggcggccgtgttccgggggcgcatgagtatgaaggaagtagacgaacagatgctcaacgtgcagaataaaaatagctcatattttgtggaatggatccctaacaacgtcaagaccgcagtttgcgatattccaccaagggggctcaaaatggccgtcaccttcattggcaactccaccgctattcaggagctgttcaaaagaatttccgagcaattcaccgctatgttccgccgcaaggcctttttgcactggtataccggtgagggaatggatgagatggaatttaccgaggctgaatccaacatgaacgacctggttagcgaatatcagcagtaccaggacgccactgcagaggaggaagaggatttcggggaagaggcagaggaggaagcctag

SEQ ID NO: 139339 - DNA, 1335 bp, synthetic construct
  misc_feature 1..1335: note = Description of Artificial Sequence: Synthetic coding sequence
  source 1..1335: mol_type = other DNA
atgcgcgagatagtgcatatccaggctggacagtgtggtaaccaaatcggggctaaattctgggaggtaataagcgacgagcacggaatcgaccccactgggacatatcacggtgactcggatctccagctcgaccgcattagtgtatattataatgaggccactggtggtaaatatgttcccagagccatcttagtggaccttgagccagggactatggattctgtaagatctggccctttcgggcaaattttccggcctgataactttgtgttcgggcagagcggtgctggtaataactgggcaaagggtcattatactgagggagccgagctggtggatagtgtcctggatgtcgtaagaaaggaggcagaatcgtgcgattgtctacagggcttccagcttactcattccctggggggcggtacagggagcggtatgggcacgcttctcatttccaaaatcagggaagagtatcctgacagaataatgaatacatttagcgtggtcccatcccccaaggtgtccgacacagtggtagagccatataacgccacactgtcggtccatcaactggtggaaaacaccgatgagacctattgcattgataatgaagccctgtatgatatctgcttcaggaccctgaagctgacaactccaacctatggagatctaaatcatctcgtgtccgcaacaatgtctggagtgactacctgtctcaggtttccgggacaactgaatgctgacctcaggaaactggccgtgaatatggtgcccttccctagattacatttcttcatgcccgggttcgctcctctgaccagtcgtggcagtcaacaatacagggctctcacagtccctgaactcacgcagcaggtgtttgacgctaagaacatgatggctgcttgtgaccccaggcacggccggtacctcacagtagctgctgtgtttcggggcagaatgagtatgaaagaagttgacgaacagatgttaaatgtacagaacaagaactcttcttatttcgttgaatggatcccaaataacgttaagaccgcagtttgcgatatccccccccgcggcctaaaaatggcagtcacttttatcggaaactcaaccgccatccaagagctcttcaagaggatttctgagcaattcaccgctatgttcagaaggaaggcatttctccactggtatacaggcgagggaatggacgagatggagtttacagaggctgagtctaatatgaacgatcttgtgtctgagtatcagcaatatcaggatgctaccgccgaagaggaggaggactttggcgaagaggctgaagaagaggcttag

SEQ ID NO: 139340 - DNA, 1335 bp, synthetic construct
  misc_feature 1..1335: note = Description of Artificial Sequence: Synthetic coding sequence
  source 1..1335: mol_type = other DNA
atgcgggagatcgtgcacattcaggctggacaatgcgggaatcagatcggcgcaaagttctgggaggtgatttcagacgaacatggcatcgatcctacagggacgtatcatggagattccgacctccagctcgatcgcatatcagtgtattacaacgaggctaccgggggaaagtacgttcccagagctatcctggtcgatcttgagcccggcacaatggacagtgtgcggagtggaccttttgggcaaatctttcggcccgacaactttgtcttcggccagtccggagccgggaataactgggccaaggggcactacaccgagggcgctgagctcgttgactctgtccttgatgtggttcgtaaggaagccgagagctgtgattgtctccagggcttccagctaactcacagtctcggcggaggcaccggatctgggatggggacactcctcatttctaagattagggaggaataccccgacagaatcatgaacaccttttctgtagtgcctagcccaaaggtctcggatacagtcgtcgaaccttacaatgccacattgtctgttcaccagcttgttgaaaataccgatgagacatactgcatagataacgaggccctatacgacatttgtttcagaacattgaagttaacaaccccgacgtacggcgacctgaatcacctggttagtgcaacaatgagcggcgtgacaacctgcctgcggttcccaggacagctcaacgcagatctgcgaaaactcgccgtcaacatggtgccttttccgcggctgcactttttcatgcccggcttcgcaccgctgacatcacgcggttcccaacagtatcgcgctctgacagtcccggagctgacacagcaggtgtttgatgctaagaacatgatggccgcctgtgacccccggcacggacggtatctcaccgttgccgctgtgtttcggggcagaatgtcaatgaaggaggtggatgaacagatgctgaatgtccagaacaagaattcttcctacttcgttgaatggatcccaaacaatgtgaaaaccgcagtctgcgatattccgcctagaggtctgaagatggctgtgacattcattggaaacagtactgctattcaggaactgttcaagcgtatctctgaacagttcaccgcgatgttccggcgtaaagccttccttcactggtatacgggagaagggatggatgagatggagtttactgaggccgaatctaatatgaacgacctggtgtctgagtatcagcagtatcaagacgcgaccgccgaggaggaagaggacttcggcgaggaggcggaggaggaagcatag

SEQ ID NO: 139341 - DNA, 1062 bp, synthetic construct
  misc_feature 1..1062: note = Description of Artificial Sequence: Synthetic coding sequence
  source 1..1062: mol_type = other DNA
atgcgggaaatagtgcacatccaggccgggcagtgtggtaaccagatcggcgccaagttttgggaggtgatcagcgacgagcacggcatcgatcccacaggcacataccatggcgattccgaccttcagctaacgcattctctcggtggtggtaccggctcagggatgggcacactgctgatttcgaagatcagggaagaatatccagatcgtatcatgaacacgtttagtgtcgttcccagccctaaagtttcagataccgtcgttgaaccctataacgcaactctgagtgtgcaccagttggtggagaatactgatgagacctactgtatcgacaacgaagcattatatgacatctgttttcgtacgctgaaactgaccactcctacttatggggaccttaaccatttggtgagcgccacgatgtccggagtcacgacttgcctccggttccccggccaactcaacgctgatctccggaagttggcggtcaatatggttcccttcccacggcttcactttttcatgcccgggtttgccccgctgacttcacgcggatcacagcaatacagagcactgacggttccagaacttacccaacaggtttttgacgccaagaatatgatggctgcttgtgatcctcgacacgggcgttacctcactgtggcagccgtattcagaggcagaatgagtatgaaagaagttgatgagcagatgcttaacgtgcagaataaaaactcttcgtatttcgtcgaatggatccctaacaatgtcaagacagcagtctgtgatattccgcctcggggcttgaagatggccgtgaccttcataggcaactccaccgccatccaagagctcttcaagcgcatatcggaacagttcactgccatgttcagaagaaaggccttcctgcattggtatactggcgagggcatggatgagatggagttcacagaggccgagtcaaacatgaatgacctggtgtctgaataccagcagtaccaagacgccactgcggaagaagaggaagactttggagaggaagcggaagaggaagcatag

SEQ ID NO: 139342 - DNA, 1281 bp, synthetic construct
  misc_feature 1..1281: note = Description of Artificial Sequence: Synthetic coding sequence
  source 1..1281: mol_type = other DNA
atgttctgggaggtcatttctgacgaacatggtattgacccaacgggtacataccacggggattctgacttacagttggataggatttccgtgtactacaatgaggctactggcggaaaatatgttccgagagcaatactggtggacctggaacctggtactatggactcggtacggtctggacctttcggccagatatttcgccctgacaatttcgtcttcggacagagcggcgctggtaacaattgggcgaaggggcattacaccgagggagccgagctcgtggattcagtcctggacgtcgttcggaaggaggctgaatcttgtgattgcctacaagggttccaactaacacactcactgggggggggtacggggtccggtatgggcaccctgctcatcagcaaaataagagaagaatatcctgacagaatcatgaatacgttcagtgtggtcccttctcctaaggtgtccgacacagtggtggagccttacaatgccaccttgtcagtccaccagttagtcgaaaacacggatgagacctactgcatcgataacgaggcgttatacgacatctgctttcgtactctgaagctgaccacacctacttacggtgacctgaatcaccttgtgagtgctacaatgagcggcgttaccacttgcctacgctttccgggccagctaaatgcagacttacgcaagctcgctgtaaacatggtgccatttcctcgactgcacttttttatgcccggcttcgctcctctgacatctaggggctcccagcaatatagagcccttacggttcccgaactgacacagcaggtgttcgatgcaaaaaacatgatggctgcatgtgacccacgccacggaaggtaccttaccgtcgccgccgtgttcaggggccgcatgtccatgaaggaagtggacgagcagatgctcaatgtgcagaataagaatagcagctactttgtggagtggattccaaacaatgttaaaacagcggtgtgtgatatacctcccagaggtttaaagatggctgtcacatttattggcaattcaaccgccatccaggagttatttaagcgtatttccgagcagttcactgcaatgttcaggagaaaagcatttctgcattggtatacgggggaagggatggacgaaatggaatttactgaagctgagagcaacatgaacgatttggttagcgagtatcaacagtaccaagacgctacggccgaagaagaagaggacttcggagaggaagcggaagaggaggcatag

SEQ ID NO: 139343 - DNA, 1119 bp, synthetic construct
  misc_feature 1..1119: note = Description of Artificial Sequence: Synthetic coding sequence
  source 1..1119: mol_type = other DNA
atggacagtgtccgctctggcccgtttggccagatttttaggcccgacaattttgtgttcggccaaagtggtgccggcaacaattgggctaagggacattacacggaaggagctgaactagtggatagcgtactcgatgtagttcggaaggaggcagaaagctgcgactgcttgcagggctttcagctgacacactcactcggtggcgggactggctcaggcatggggactttactgatctctaaaatcagagaagagtacccggataggatcatgaacaccttctcagtcgtgccaagccccaaggtctccgacactgtggtcgaaccctataatgccacactctccgttcaccagctcgtggagaacactgatgaaacatactgcatcgacaatgaagcgctgtatgacatctgcttccgaaccctcaagctgactacccccacctacggcgatctaaaccacctcgtgagcgccactatgtccggcgtcacaacctgcctgagattccctgggcaactgaatgctgatttgaggaagctggcggtgaacatggtgccattcccgaggctgcacttctttatgccagggtttgcccctttaacctctcgtggatcacagcagtatcgcgctctgactgtgcctgagctcacacagcaggtttttgatgccaagaacatgatggccgcctgtgaccctaggcacggcagatacctgacggtggccgctgtgtttcgaggccgcatgtccatgaaggaagtggatgaacagatgctgaatgttcagaataaaaatagctcttacttcgtcgagtggatccctaacaacgtcaagacagccgtctgtgacattcccccaagggggctgaagatggcagtaaccttcatcggaaactctaccgccattcaggagctcttcaagcgaatatctgagcagtttacagcgatgttccggcgaaaagccttcctccactggtacactggagagggcatggacgagatggagttcactgaggcggagtcaaatatgaatgacctggtgagtgagtaccagcagtatcaagacgctaccgccgaagaggaggaagattttggggaagaggctgaggaggaggcctag

SEQ ID NO: 139344 - DNA, 1281 bp, synthetic construct
  misc_feature 1..1281: note = Description of Artificial Sequence: Synthetic coding sequence
  source 1..1281: mol_type = other DNA
atgttttgggaggtgatttctgacgagcacggcattgatccgaccggaacctaccatggggactctgacctgcagctcgatcgtatctctgtctactataacgaggcgacaggcgggaaatatgtgccccgagccatcctggtagaccttgagcctggaacaatggactctgtgaggtctggtccattcggtcagatcttccgccctgataactttgtcttcggacagagcggcgctggcaacaattgggcaaagggccactacactgaaggagctgaactcgtggatagcgtattggacgtcgttagaaaggaggccgagtcttgcgactgtcttcaaggcttccagctcacgcattccctgggcggcggcacaggatcaggcatgggcacgctgctgattagcaaaattagagaggagtacccggacagaattatgaatacgttttcagtggtgccctctccgaaggtgagtgatacagttgtggaaccatataacgctaccttaagtgtgcaccagctggttgagaacacggacgagacttattgtatagataatgaagccctctatgatatctgctttcggacactgaaattgaccaccccaacatacggcgaccttaatcatctcgtctctgccacaatgtcaggagtgacgacttgcctgagattccctggccaactgaacgccgacttgcgtaagttggccgtgaacatggtgcccttcccccgcttgcactttttcatgccaggctttgccccacttacctcgcgcggcagccaacagtatcgagcccttacagtgcctgaattgactcaacaggtgtttgacgctaaaaatatgatggccgcctgcgatccccgtcacggacggtacctcaccgtggctgctgtcttccggggtcggatgagcatgaaggaggtggacgagcaaatgctcaacgttcagaacaaaaattcttcatattttgttgagtggattcccaataacgtcaaaactgcagtgtgcgatatcccccctcgtggtctcaaaatggcagtcacattcatcggaaacagtaccgcgatccaggagctgtttaagaggatcagcgagcagttcaccgccatgtttcgaaggaaagcgttcttgcattggtacactggtgagggcatggacgagatggaattcacagaggccgagtccaatatgaacgatctggtgagcgaataccaacagtatcaagatgccaccgcagaagaagaggaagattttggcgaggaggcagaggaggaggcttag

SEQ ID NO: 139345 - DNA, 1281 bp, synthetic construct
  misc_feature 1..1281: note = Description of Artificial Sequence: Synthetic coding sequence
  source 1..1281: mol_type = other DNA
atgttctgggaagtgatctccgatgagcatgggatagaccccactggcacttaccacggagattctgacctgcagctggatcggatctctgtgtactataatgaggcaacgggaggtaaatacgtcccccgagctattctggtggaccttgaaccaggcaccatggactccgtgagatctggaccctttggccaaatcttccgacccgacaacttcgtcttcggacagagtggggccggcaacaattgggcaaaaggtcattatacagagggggccgaacttgtggattccgtgttggatgtcgtgcgcaaagaagctgagagttgcgactgcttgcaaggcttccagctcacccactcattggggggcggaactggttcagggatgggcacacttctcatatctaagatacgggaggagtaccctgacagaattatgaataccttctccgtagtgccttcgcccaaggtaagcgacacagtggtggaaccatacaatgccaccctcagtgttcaccaacttgtggaaaacacggatgaaacgtactgcattgacaatgaggccttatacgacatctgcttccgcaccctgaagctcacgacgccaacatacggtgacttgaaccatctagtaagtgcaactatgtctggggttacaacctgccttcgcttcccaggccaacttaatgccgacctgcggaaattggccgtcaacatggtccccttccccaggctccacttcttcatgccgggttttgcgccattgacgagccgcggcagtcaacagtacagagccttgacagtgcccgaactcactcaacaggtttttgatgctaagaacatgatggctgcctgtgacccgaggcacggccgctacctcacggttgcagccgtctttagggggcgcatgagcatgaaggaagtggatgagcaaatgctgaatgtgcaaaacaaaaatagctcctatttcgtggaatggatccccaacaacgtcaagaccgctgtatgcgacatcccaccccgtgggctgaaaatggcagtaaccttcatcggcaactctacggccatccaggagctgtttaaacgcatctcagagcagttcacagcgatgttccggcgtaaggcattcttacactggtacacaggagagggcatggatgagatggaattcaccgaggcagagtcaaacatgaacgacctggtctccgagtaccagcagtaccaggacgccacagctgaggaggaggaggatttcggggaggaggcagaagaggaggcctag

SEQ ID NO: 139346 - DNA, 1119 bp, synthetic construct
  misc_feature 1..1119: note = Description of Artificial Sequence: Synthetic coding sequence
  source 1..1119: mol_type = other DNA
atggatagcgtcagatccggacccttcggccaaatcttccgtccagataatttcgtgttcggacagtcaggcgctgggaacaattgggcgaaaggccactatacagaaggcgccgaactcgtggattccgtgctcgacgttgtgcgaaaggaagccgaatcctgcgattgtctgcaggggttccagttaacccacagtctggggggggggacaggctccggtatgggcacgctactcattagtaagattcgagaggagtacccggaccgaatcatgaacacattttccgtcgttccgagtccgaaggtctccgataccgtggtggaaccatacaatgccaccctgtcagtgcatcaactggtggagaacactgacgagacatattgtattgataatgaggccctttacgatatctgttttcggaccctgaagttgaccactcctacctatggagacctgaatcaccttgtgtccgctaccatgtctggagtgacgacctgtttacgctttccaggtcagctgaatgctgatttgcgcaagctggccgtgaatatggtcccattcccaagactgcatttcttcatgcccggtttcgcacccttgaccagtagggggtcccagcagtaccgggcgttgaccgtgcctgagctgacccaacaagtattcgacgcaaagaacatgatggcggcatgcgacccgaggcacggtcgatacctcaccgtggccgcggttttccgcggccgcatgagcatgaaagaggtcgacgagcagatgttaaacgtgcagaacaagaattcttcttactttgtggagtggatcccaaataacgtgaaaacagccgtgtgtgacattccccctagaggattaaaaatggcagtaaccttcatcgggaacagtactgctatacaagaactctttaagagaatctcagagcagttcacagccatgtttaggaggaaggcgttcctgcattggtataccggcgaaggcatggatgagatggaattcaccgaagcagaaagcaatatgaatgatctggttagcgaataccaacagtatcaggacgctacagcagaggaggaggaagattttggagaggaagcagaagaagaagcctag

SEQ ID NO: 139347 - DNA, 1335 bp, synthetic construct
  misc_feature 1..1335: note = Description of Artificial Sequence: Synthetic coding sequence
  source 1..1335: mol_type = other DNA
atgagggagatagttcatatccaggcagggcagtgcggaaaccagataggtgcgaagttctgggaagtcataagtgatgaacatgggattgatccaacagggacctatcatggagattctgacctacagctggataggatctctgtatattacaatgaggccacgggaggtaagtacgtccctcgagctatcctcgttgatctggaacctgggacaatggactctgtacggagtggtccctttggccagatatttcggcctgataattttgtgttcggccagtccggggcaggcaacaactgggctaaaggacattacaccgaaggcgccgaactggttgactcggttctcgatgtggtgagaaaagaggccgagagctgcgactgccttcagggctttcagctcacccatagcctgggtggtgggacgggcagcggcatgggcacactgctcatctcaaaaattagagaagagtacccagaccggattatgaataccttctcagtagtgcctagtcctaaggtcagcgataccgttgtcgagccatataatgccactttgagcgtgcatcaactggttgagaacacggacgagacttattgcattgataatgaggcactctacgacatctgcttccgaactctcaaattgaccaccccaacctacggggatctgaatcacctggtaagcgccacaatgtctggagtgaccacatgtctgcgcttccccggacaactgaacgctgaccttagaaagcttgcggtaaatatggtcccatttccaagactccacttttttatgcctgggtttgctcctctgaccagtcgagggtcccagcagtatagggcgctgacagtccctgagctgacccaacaggtattcgacgcaaagaacatgatggcggcctgcgatcccaggcacggccggtacttgactgtggctgccgtgtttagaggtcgcatgtcaatgaaggaggtcgacgagcagatgctaaacgtgcagaacaagaacagcagctactttgttgagtggattcctaataacgtaaagactgcagtgtgtgacatcccacctcgggggcttaagatggctgttactttcattggcaacagcaccgccatccaggaacttttcaagaggatcagtgagcagttcaccgccatgttcaggagaaaagctttcctccattggtatactggcgaggggatggatgagatggagttcactgaagcagagtctaatatgaatgacctagtttctgagtaccagcagtatcaggatgccacagcagaggaggaagaggatttcggggaggaggcagaggaggaggcttag

SEQ ID NO: 139348 - DNA, 732 bp, synthetic construct
  misc_feature 1..732: note = Description of Artificial Sequence: Synthetic coding sequence
  source 1..732: mol_type = other DNA
atgcgggaaatcgtccatatccaggcaggtcaatgcggcaaccagatcggggctaagttctgggaggtgatcagtgatgagcacggaatagaccccactgggacataccacggagacagtgacctacagctcgaccggattagcgtctactataatgaggcaactgggggcaagtacgtaccacgggccatcctagttgacctcgagccaggcaccatggactcggttcgctctggtccatttggtcagatctttaggcctgacaacttcgtatttgggcagagcggcgcaggaaataattgggccaaagggcattacacggaaggtgctgagctggtggacagtgtgctggacgtggtgaggaaggaagaggtagacgaacaaatgttaaacgtccaaaacaagaacagctcttatttcgtggagtggattcctaacaatgtcaagacggctgtatgtgacattcctcccagggggctcaagatggctgttacatttattggcaattccaccgcgatccaggagttgttcaagcgtatctcagagcagtttacagccatgttcagacggaaggcctttctgcattggtacactggtgaaggcatggatgagatggaatttaccgaagccgagagtaatatgaacgatctagtcagcgagtaccaacagtatcaggatgccactgcagaagaagaagaagattttggcgaagaagccgaagaagaggcgtag

SEQ ID NO: 139349 - DNA, 1119 bp, synthetic construct
  misc_feature 1..1119: note = Description of Artificial Sequence: Synthetic coding sequence
  source 1..1119: mol_type = other DNA
atggattccgtgcggagtggacccttcggtcagattttcagaccagacaacttcgtctttggtcagagcggggctgggaataattgggccaaggggcactataccgaaggtgcagaactggtggactcagtgctcgacgtggtcaggaaagaagccgagagctgcgattgcctgcagggtttccaattgacacactcactgggaggagggacagggagtggcatgggaacactcctcatctccaagataagagaagagtacccagaccgcattatgaataccttcagcgttgtgccatctcctaaagtgtccgatactgtcgtagaaccctacaatgcaaccttgagcgtccaccagctagtagaaaataccgacgaaacctactgcatagataacgaggctctgtacgatatctgctttcgcacactgaaacttaccacgccaacctacggagacctgaaccacctcgtgtccgccactatgtccggggtcacaacttgcttgcgtttccctgggcaactcaacgccgatctgcggaaactcgccgttaacatggtacccttccctagacttcacttttttatgcctgggttcgcgcccctgaccagtcgcgggtctcaacagtaccgagccctgactgtgccggagctgacccaacaggttttcgacgctaaaaatatgatggctgcttgtgacccgcgccacggaaggtacctgacagtggccgctgtgttccgcggccggatgtccatgaaggaggtagacgagcagatgctcaatgttcagaataagaactctagctattttgtggagtggatcccgaataatgtcaaaactgcggtttgcgatatacctccaaggggtctgaagatggcagtgactttcatagggaactcaactgctatccaggagctgtttaaacgcatctccgaacagttcacagctatgttccgtaggaaggcatttctgcactggtatacaggagaaggtatggacgaaatggagtttacagaagctgaatccaacatgaatgatctagtcagcgaatatcagcagtaccaggacgcaacagccgaggaagaggaggattttggcgaagaggcagaggaagaagcgtag

SEQ ID NO: 139350 - DNA, 1119 bp, synthetic construct
  misc_feature 1..1119: note = Description of Artificial Sequence: Synthetic coding sequence
  source 1..1119: mol_type = other DNA
atggatagtgtgcgtagcggaccctttggccagattttccgacccgacaactttgttttcggccagtctggggccggaaacaattgggcgaagggtcactacactgagggagcggagctggtagactcggtactcgatgtggtacggaaggaagccgagtcatgcgattgcctgcagggatttcagctgacacactccctaggtggcggaactggctcaggcatgggcaccctgttgattagcaaaatcagggaggagtacccagacagaattatgaacacattctcagtcgtgccttctccaaaggtgtcagatacagttgtggaaccatacaacgcgacactttcagtgcatcagctcgtggagaataccgatgagacttactgcatagacaatgaagctttgtacgatatttgtttcaggactctcaagcttaccacccccacctatggggatctaaaccatctggtgagcgccaccatgtcgggagtgaccacctgcctcagattccccggtcagttgaatgccgacttaagaaagctggctgtcaatatggtcccattccctcgtctgcacttttttatgcccgggtttgctccacttacatctagagggagtcagcaatatagagccttgacagtacccgagctgacacagcaggttttcgacgcaaaaaacatgatggcggcgtgcgaccccaggcatggcagatacttaacggtggcggccgtgtttcggggacgcatgagcatgaaagaagtcgacgagcaaatgctgaatgtccagaataaaaattcctcctatttcgttgagtggatcccaaacaatgtcaaaaccgccgtctgtgacataccaccaagaggcttgaaaatggccgtgactttcatcgggaatagcactgccatacaagagctttttaaacgcattagcgaacagtttaccgcgatgttcaggcgcaaggcatttcttcactggtacacaggggaaggcatggacgagatggagttcaccgaggcagagtccaacatgaacgacctggtaagtgagtaccagcagtatcaggacgccacggcagaagaagaagaggactttggcgaagaggctgaggaagaagcgtag

SEQ ID NO: 139351 - DNA, 1335 bp, synthetic construct
  misc_feature 1..1335: note = Description of Artificial Sequence: Synthetic coding sequence
  source 1..1335: mol_type = other DNA
atgcgggaaatcgtgcatatccaggctgggcaatgcggaaaccagatcggagcaaaattttgggaggtcatttctgacgagcacggcattgatccgacaggaacctaccatggcgacagcgacctgcagctggacaggatctcagtgtattataacgaagctacggggggaaagtacgtgccccgcgcaatcctggtggatctggagcccgggacgatggacagcgttagatctggcccatttggccaaatttttcgtccggacaacttcgtattcgggcagtccggcgcaggaaataactgggcaaaagggcactacactgagggtgccgagctggtcgactccgtattagacgtcgtgagaaaggaggcagaatcctgcgattgcctgcagggcttccaattgacccattcgctgggcgggggtacaggcagtggaatgggcactctgctgattagcaagattcgcgaagaatatccggatagaatcatgaataccttctctgtggtgccctctcccaaagtctcagataccgtggtggaaccctacaacgcgacgctgagcgtccatcagctcgtagagaataccgatgaaacctactgcattgataacgaggccctatatgacatttgctttcgaaccttgaagctcacaacacccacttatggcgacttgaatcacctggtgagtgccaccatgtcaggcgtaacaacctgcctgagatttcctgggcagctgaatgccgacctgagaaaacttgccgtgaacatggtgccttttcccagactgcacttctttatgccgggcttcgcccctctgacgagcaggggaagccagcagtaccgcgctttaacagtccccgagctgacccaacaagtcttcgacgctaaaaacatgatggccgcctgtgacccaaggcatggaagatatctgacagtggccgctgtgtttcgcgggagaatgagtatgaaggaagtcgacgaacaaatgctgaacgtgcagaacaaaaacagctcttactttgtggagtggattccaaataatgttaaaacagctgtctgtgatattcccccccggggactgaaaatggctgtaacattcattggcaatagtaccgcaatacaggaacttttcaaacgcatttctgagcagtttacagctatgttcaggcgtaaggcgtttctgcattggtatacaggcgagggcatggacgagatggaattcaccgaggcagaatcgaacatgaacgacctagtctccgagtatcagcagtatcaggacgctaccgcagaggaagaggaagattttggggaagaagctgaggaagaagcatag

SEQ ID NO: 139352 - DNA, 1119 bp, synthetic construct
  misc_feature 1..1119: note = Description of Artificial Sequence: Synthetic coding sequence
  source 1..1119: mol_type = other DNA
atggattctgtcagaagcggaccttttggacagatcttccgaccagataacttcgtgtttggacagagcggagcaggcaataattgggctaaaggacactacaccgaaggcgcagaactcgtcgacagcgtcctagacgtagtgcgcaaagaggctgaatcgtgcgactgtctgcaagggtttcagctgacacatagtctagggggtggaaccggctctggcatggggaccttgctcatcagtaagatacgggaagagtatccggacaggatcatgaataccttcagtgttgttccgagtccaaaagtttcagatacggtcgttgagccatacaatgccacgctgtccgtgcatcagttggtcgagaataccgatgaaacatactgtattgataacgaggcactctacgacatctgtttccgtactctcaagctgaccacaccaacatatggagaccttaatcacctggtgtcagctaccatgagtggggtaacgacctgtctgcgatttcctgggcagcttaatgcggacctgcgaaaacttgcagtcaatatggtgccgtttcctagattacacttctttatgccagggttcgcacctttgacatcacggggttcccagcagtaccgggccctgactgtcccagaactgacccagcaagtttttgacgctaagaacatgatggccgcttgtgaccccaggcatgggagatatcttaccgtcgccgccgtcttccggggtcgcatgtctatgaaggaggtggacgagcagatgttgaacgttcagaacaaaaacagcagttatttcgtggaatggattcccaataatgttaagaccgcagtttgtgatattccccccagaggtctgaaaatggctgttacatttattggtaattcaacagcaatccaagagctgttcaagcgtatcagcgaacagtttacagccatgttcagaaggaaagccttcctccactggtacacaggcgagggcatggatgagatggagtttaccgaagccgagtcaaacatgaacgaccttgtttccgagtaccaacagtaccaggacgccaccgcagaggaggaagaggatttcggcgaagaggcggaagaggaggcttag

SEQ ID NO: 139353 - DNA, 1119 bp, synthetic construct
  misc_feature 1..1119: note = Description of Artificial Sequence: Synthetic coding sequence
  source 1..1119: mol_type = other DNA
atggatagcgtgaggagtggcccatttggacagatctttcgaccagataatttcgtcttcggccaatccggcgccgggaacaactgggccaaggggcattacacagaaggagctgaattggtcgactctgttctcgatgtagtgaggaaagaggcagaatcttgcgactgcctgcagggcttccaactgacacatagcttaggtggggggaccggcagcggtatgggaactttgctaattagcaagatccgtgaggagtatccagatagaattatgaatactttttccgtcgtgccctctccgaaagtgagcgacaccgtcgtagagccctacaatgcaaccctaagcgttcaccagctcgtggaaaatactgacgagacatactgcatcgataacgaggccctctatgatatttgcttccgcacacttaaactgaccacaccaacctacggtgatttaaatcacctggtgtctgctacaatgagtggggtgactacgtgtctccggttccccggtcagctgaatgctgacctgcggaaactcgcagtaaatatggtaccattcccacgcttacatttctttatgccgggctttgccccattgacaagcagaggttcacagcagtatcgagccctgacagtgcccgaacttacgcaacaggtctttgacgccaagaatatgatggcggcctgcgatccacgccacggtcgatacctgaccgtagccgccgtgttccggggtcggatgtctatgaaggaggtagacgagcagatgctgaatgtccagaacaagaactcctcttattttgttgagtggatccccaacaacgtgaagacagcggtttgcgatattccgcccaggggcctgaagatggctgtgaccttcattggaaatagcacagccattcaggaactgtttaaacggataagcgagcaattcacggccatgttcagacgcaaggcctttctccattggtacacaggcgagggcatggatgaaatggaatttactgaggccgaaagtaacatgaacgacttggtgagcgagtaccagcaataccaggacgccaccgccgaggaggaggaggactttggggaggaggcagaggaggaggcatag

SEQ ID NO: 139354 - DNA, 1119 bp, synthetic construct
  misc_feature 1..1119: note = Description of Artificial Sequence: Synthetic coding sequence
  source 1..1119: mol_type = other DNA
atggatagcgtgaggtccggaccatttggccaaatctttcgccccgataattttgtgtttggccaatcgggggccggcaataactgggccaaggggcactacaccgagggagctgaactcgtggatagtgtgctcgacgtcgtgcgaaaagaggcggagtcatgcgattgtctacagggtttccagttgacccacagcctggggggcggcaccggctccggaatgggcaccctactgatctccaaaatccgggaagaatatccagacagaatcatgaataccttcagtgtggtgccttccccaaaggtgtctgacactgttgtcgagccctataatgcaacactcagtgtccaccagctcgttgagaatacagacgagacctattgcattgacaatgaagctctgtatgatatctgtttcaggactttaaaactgaccacacctacttacggggatctgaaccatctggtgtcagcgacaatgtcaggggtaacaacgtgtctgagattcccggggcagctaaacgccgacctgcggaagctggcggttaacatggtgccatttcctcggctccattttttcatgcccggtttcgctccactcactagtcgtggttctcaacagtaccgagccctgactgtccccgagctgactcagcaggtcttcgacgctaagaacatgatggccgcctgtgatcctcgacacggtcggtacctgaccgtcgcagcggttttccgcggccggatgagcatgaaggaagttgacgagcagatgctgaacgtacaaaacaagaatagtagctacttcgtcgagtggatcccaaataacgtgaagaccgccgtgtgtgatattccaccacggggtttgaagatggcagtaacatttatcgggaactccaccgctattcaggagctgttcaagagaataagcgaacagttcaccgctatgttcagacggaaagcattcttgcattggtacactggggagggaatggacgagatggagttcacggaggctgaatccaatatgaacgacctggtcagtgagtatcagcagtaccaggacgctaccgctgaagaagaggaagatttcggggaggaagcagaagaggaagcgtag

SEQ ID NO: 139355 - DNA, 1119 bp, synthetic construct
  misc_feature 1..1119: note = Description of Artificial Sequence: Synthetic coding sequence
  source 1..1119: mol_type = other DNA
atggactcagtaaggagcggcccctttgggcagatcttcaggcctgataactttgtatttggccaatctggtgccggcaataactgggccaagggacattatacagagggcgcagagctggtggacagcgtgctcgatgtcgtcagaaaggaagccgagtcttgcgattgtttgcagggctttcagctgacacatagcttgggcggcgggacaggttctggaatgggcacccttttaataagcaaaatccgggaggaataccccgatcgaattatgaacacctttagcgtggtgccctctccaaaggtgtccgacactgtcgtcgagccatacaatgctacgctctcggttcaccagctcgtagagaatactgacgaaacttattgcatagacaatgaggcactctatgacatttgcttccgcaccctcaaactgactactcctacttacggagatctgaatcatctggtctctgccacgatgtccggcgtcacgacgtgccttaggttcccgggacaactgaacgcagatctaagaaagcttgccgtaaatatggtgccctttccaagactgcactttttcatgccaggattcgcaccactgacctctaggggttctcagcaatacagggcgctcaccgtgccagagttgacacaacaagtttttgatgcaaagaatatgatggccgcatgcgatcctcgccatgggcggtacctgaccgtggccgccgtcttcaggggtcggatgtccatgaaagaggtagacgagcagatgctgaacgtacagaacaagaactctagttatttcgtggaatggatcccaaacaacgtgaagaccgcagtatgtgatattcctcctcgcggcctgaagatggcagttacttttataggcaatagcactgcgatccaagaacttttcaagcgaatttcggagcagtttaccgccatgttcagaagaaaggcttttcttcattggtataccggcgaaggtatggacgaaatggagttcaccgaagcagaatccaacatgaacgacctagtctccgaataccagcagtaccaggatgcaactgcagaagaggaggaggatttcggagaggaagccgaggaagaggcttag

SEQ ID NO: 139356 - DNA, 1119 bp, synthetic construct
  misc_feature 1..1119: note = Description of Artificial Sequence: Synthetic coding sequence
  source 1..1119: mol_type = other DNA
atggacagcgtgcgttcaggaccttttggccagatcttcaggcctgataatttcgtgtttgggcagtcaggcgctgggaataactgggcaaaggggcactacacggagggagctgagctagtcgattcagtcctcgatgtggtgcggaaagaagctgagtcttgcgactgtctgcaaggattccagctaacccactcactgggaggcggaactggtagcggaatgggaacgctgctcatcagcaagattagggaagaatatcccgacagaattatgaatactttctccgttgtaccttcacctaaggtttccgatacggtggtggagccttacaatgccaccctatccgttcaccaactcgtagagaacaccgatgagacgtattgcatcgataacgaagccctttacgatatttgcttccgaaccctaaagctaactacccccacctacggcgacttgaatcatctcgtgagcgccacgatgagcggagtgaccacctgtctgcggtttccaggccaactgaatgccgacttaagaaaactggccgtgaacatggtgccttttccccggctccacttctttatgcccggtttcgcccctctaacctccagaggatcacagcagtatagggcgctcacggtgccggagcttacacagcaggtcttcgacgctaaaaacatgatggccgcgtgtgacccccgacacggacgatacctgacagtggcggcagtcttcaggggccggatgagcatgaaagaggtcgatgagcagatgctgaacgtccagaataagaactcaagctattttgttgaatggattcctaacaacgtgaaaaccgcagtatgtgacattcctcctaggggactcaaaatggctgttactttcatcggaaacagtactgccattcaggagctgtttaagcggattagcgagcagtttactgcgatgtttcggcgcaaggcatttttgcattggtacacgggggagggtatggacgagatggagtttaccgaagcagaaagcaacatgaatgacctagtgtcagaatatcagcagtaccaagacgccaccgctgaggaagaagaggatttcggggaggaagccgaagaggaggcatag

SEQ ID NO: 139357 - DNA, 1119 bp, synthetic construct
  misc_feature 1..1119: note = Description of Artificial Sequence: Synthetic coding sequence
  source 1..1119: mol_type = other DNA
atggactcagttcgtagtggaccattcggccaaatatttcgacccgacaacttcgtgttcggacagtccggcgcgggcaacaattgggctaagggacactatacagaaggagcagagttagtggactcagtcctggatgtggtgcggaaagaggctgaatcttgcgactgtctccagggcttccaactgacacattctcttggaggcgggaccggaagtggtatggggacactactcatctcaaaaatcagagaggaataccccgatcggattatgaataccttttcagtcgtgccctcacctaaagtgagcgacacagtggtcgaaccatataacgctacattgtctgtgcaccaacttgtggaaaataccgatgagacctactgcatcgacaacgaggccctctacgacatttgttttaggaccttgaagcttaccacacccacttacggtgacctcaatcatttggtgagcgctacaatgagtggtgtgacaacctgtctgaggttcccaggccaactgaatgctgatctccggaagctcgcggtgaacatggtgccatttcctcgcctgcacttttttatgcccggtttcgcccccctgacgtcccgcggcagccagcagtaccgggctcttacagtgccagagctgacccagcaagtgttcgatgccaagaatatgatggctgcatgcgaccctaggcacggcagatatctaactgttgcggctgtgtttagaggcagaatgtccatgaaagaagttgatgagcagatgctgaatgtccaaaacaagaacagcagctatttcgtggaatggattcctaacaatgtgaagactgccgtctgtgatatccctcccagaggtcttaaaatggccgtaactttcataggcaacagtacggctatccaagagttgttcaagagaatctctgagcagttcactgccatgtttcgcaggaaagccttcctgcactggtataccggagaaggaatggacgagatggagtttacagaagccgaatctaacatgaacgacctcgtgtctgagtatcagcaataccaagacgccaccgccgaagaagaggaagattttggtgaggaagccgaagaggaggcctag
